United States Patent Application Publication US 2011/0183924 A1 - sequence listing, part 53

SEQ ID NO: 156977 - DNA, 234 bp, Homo sapiens
ttgtctgcgacaaagtcaaggctttaagagcagccattccttcctgcccagtgctgtccacccctggcagactttcccttccccgggctgaaaattagggcaagatacagacagaaaaggcatttcttaaaattttaacaacctggaattcattcgtgattttaacaagaatcattttggtggagtgagagggacagatttgagtcagctgagaaaagtgtgacaaatgaggaa

SEQ ID NO: 156978 - DNA, 193 bp, Homo sapiens
cttttgctgggtcccataagttttggtacattgtttttatttccaagtattttctaatttttcttgttatttcttctttgatccattggttgtttgaaagtgtgttaattttcactaatttctgtattttctcagttttccttctgctatagatttttaactttatcccagtttggtttaaggagagactttg

SEQ ID NO: 156979 - DNA, 371 bp, Homo sapiens
ggaggtggaggttgcagtgagccgagatcacgccactgcactccagcctgggtgacagagtgagactctgtctcaaaaaaaaaagaagccatataaggattgaaaaggaaaagatggagttgtcataatttagagatgctttgagtgcccatatagaggatccaaaagaatccacagataaattatccaaattaataagggatgaattcagtagggttgaaaaaaatgaatatcattcataatagcaacaaaaactataagactatagaaataaatatagcaaaagatatctaagaccattatgaaaagaattttaaagtgttaacataaaagatctaaataggaatgccatcagcaagatggcgaggata

SEQ ID NO: 156980 - DNA, 400 bp, Homo sapiens
acggacaagagtgtgggtctgtgaatgaaggggacagggagccattgcacccatcagcagtgtcacttctggggctgccgggtgacaattgccatctctgcttcctccccggtggagcgtgtggctccagggcagcgagggtgtctgagctggccaggagcgcgtctggtctgttaggggaatatgtactcgcatcctgtccggtgtgaggggcaacgtgtgctcccgagctgtggcggaggtcagtcggggtcagtgaaagcacagaggtgtccctgggttagggtcagagaaggaggacccagtagagcagcgtgcccagtgccccccacccctagcctctctccaaggcttagcctccacccgcccgtctcccctcctctcctggtagcccctcaca

SEQ ID NO: 156981 - DNA, 317 bp, Homo sapiens
tcaaatattgtttatgcaaatgttccaaatgcatctgaagtgagttcactcaggtttcctcagcagtaaccccaaaattatataaatgacttcctcttttcccacattcctgcctcacaatccgtcttcattcagaaaataattgctacatcaggggtctcctcagttctccttctacagtgtctatgggttattatgaacagttttctgtctgtttttagcactacgatgtgacgtctgtaaaatctgtacttcctctccttctccgtacacccttaatgaaaagatgctaccgaattaaagcagaattatgctgg

SEQ ID NO: 156982 - DNA, 371 bp, Homo sapiens
tttcaggatcaatctttttcttttcctgctaatactactaccagacttaagaagttattagaaaaatttaaatcagaatttttttttttttgagatggagtctcgctctgtcgcctgggctggagtgcagtggtgcgatctttgctcactgcaacctccgcctcccaggttcaggcaattctcctgcctcagctccctgagtagctgggattacaggcacctgccaccaagcccggctaattttttgtatttttagtagagacggggtttcaccatgttagccaggatggtctcaatctcctgacctcgtgatccgcccgcctcggcctcccaaagtgttgggattacaggcgtgagccaccgggcccggc

SEQ ID NO: 156983 - DNA, 297 bp, Homo sapiens
aagtgattctcctgccttagcctcccgagtagctgggattacaggtgcccaccaccaggtccagctaatttttaaatttttagtagagactgggttttattatgttggccaggctggtcttgaactgctgacctcaagtgatccacccgcctcagcctcccagagtgctgggattacaggcctgagctaccacgcccagcctatcatcactgattttaaaactttgcatttaagtagtttagatttttatacacacaaatacacaatcttaaacatgtaaatgttgctgtcttgagg

SEQ ID NO: 156984 - DNA, 398 bp, Homo sapiens
ggaccagctctcccttctccctgcctggtgaaccctcagggtccaactgtcactactgtctccactatgtcttcctgatgttccacccccggtcacatcctcaatacatctgtgactttctttttaaaacggcgtctcgctttgttgcccaggctggagagcagtggtgtgatcttggctcactgcaacctccacctcatgggttcaagcgattctcctgcctcagcctcccaagcggctgcgactacaggcatgtgcccccatgcccggctaatttttgtatttttagtagagagggggtttcactatgttggccaggctggtctgaaactcccaaccttgtgatctgcccacctgggcctcctaaagtgctgggattacaggcgtgagccactgcg

SEQ ID NO: 156985 - DNA, 353 bp, Homo sapiens
ctcaaaaacaaataacccctccccaactctgacaaaaataatggacagagaaaactgtgtaagttttctgaagcactataaaggttgcttttagcagaatctttttacttcttttgtttttgtttgtttgtttgcttgtttgtgtttgggacggagtctctctgtgtcgcccaggctggagtgcagtggcgcgatctcggctcactgcaagctccgcctcccaggttcacgccattctcctgactcagtctcccgagtagctgggactacaggcgcccgccaccacgcccagctaattttttttgtatttttagcagagacggggtttcaccgtgttctccagtatggtctcg

SEQ ID NO: 156986 - DNA, 314 bp, Homo sapiens
agtctcatgaacacaattaggagtcaaattctctacttttctgaagaaaaatatttcaaaatatttcagccagttaaggcttttagttacacagaatgctgctcaggcagaaatggactctcattcacatctgaggaagtagtccttgcctcgaaaaatgttgaggacggtaagtgtgaaaatagaaaaaaacatacatagtgtgacaacctttaagttaaaagggatatatattaagaagctcagtatgactacttcaagcaccagctaaaaattaagcggaaattcccactatgagaaagctatacaataga

SEQ ID NO: 156987 - DNA, 412 bp, Homo sapiens
aatagcggaccgagatgggtctgctctacactctacccataggctctcttccctgttgatgtgtctatggcatggaccttctctggccaagttttgaccggcctgactgaccttgaaattttgatgaaacagccaatcaaagatctctgatctacacaggcctaccatggccctgttctgcagccccacttgggggatggaggacccttgcctcctccctctcctgcagccccagagacgggtgaagggtcgtgagcgcttccctggtcccccaacacacggtacacctacaccccttatccccatactagttattatcgaaaccatcagcctactcattcaaccaatagccctggccgtacgcctaaccgctaacattactgcagggacccactcggcagggacccactcg

SEQ ID NO: 156988 - DNA, 522 bp, Homo sapiens
tatgaaggatgtatacttaaccccattttataataaggaaactgaggttcagaaagggtttcggtctcatgaccaacaagtggtagagcaaggattcaaaccagctttgtctaactccgaagctagtaccctttccaccactctacccataggctctcttccctgttgatgtgtctatggcatggaccttctctggccaagttttgaccggcctgactgaccttgaaattttgatgaaacagccaatcaaagatctctgatctacacaggcctaccatggccctgttctgcagccccacttgggggatggaggacccttgcctcctccctctcctgcagccccagagacgggtgaagggtcgtgagcgcttccctggtcccccaacacacggtacacctacaccccttatccccatactagttattatcgaaaccatcagcctactcattcaaccaatagccctggccgtacgcctaaccgctaacattactgcagggacccactcggcagggacccactcg

SEQ ID NO: 156989 - DNA, 219 bp, Homo sapiens
ggccccgaggtttggatgagtgttgtgtccctggctagactgacccctggggtggcaccctcatcctggaatctattgagaggccacccagaggccaccaggaacaccatggggagagggagggtggctcgggaggcagcccccagaggaggcccaactggctggtccttctgtgagccgaggccaccctgtggccacatcacagtgcagagggctcag

SEQ ID NO: 156990 - DNA, 261 bp, Homo sapiens
caaaaatgggagaagaaacacgaaatcctgctaggaagctgagagaaaatctgagaacactcagcaaagaatgcatgagcaaaggatgggatagataacagacagcttttcagtctctagacatcacaaaacggctcagaaaatgaccagaggggccaagctggagaagaggaaaacactgagaaagagcagaaggagctcagttatgcgcggctggctaacgtctggggttgtctgccagggagtcacggtggctgggct

SEQ ID NO: 156991 - DNA, 274 bp, Homo sapiens
gtgctgagattacgggcgtgagccaccatgcctggcctcctatgactcttaattctgcagatggtcagattattttgacctcaggttgcctcttcagggtataacttaagtgatgacagctttctaaactttcaaagtcaatgaccacttaatatatgatgaaaatggggccaaaaaaaatcaatccacaaaaatctgttaatgctttattttatttcacttttacatgtttcgtcttccaggtacttggaatgtcatatctgactgtcttatt

SEQ ID NO: 156992 - DNA, 326 bp, Homo sapiens
cacggcaagggagcatttcaggcacaggtgcaaaatcgaccagggttactgctgggttttgagagtgtcttctcagaaaaacacccagaagagatcatctgaaggcaagttaaacaccgatttttgttttaactaaaggcaagaaattcagaaaaatggggtcactcattccactctagctcaaaagaatggtttaaacataaatgatctcatcctgagttagatataccaatctctagaaatttcaaaataactaaggaaattggggtcaatcctcaaaattcaggggtgaactccatgaagcataccgcttactcccagaaaca

SEQ ID NO: 156993 - DNA, 186 bp, Homo sapiens
agaatgtcacaaatatgaattatcatttctaatggaaagcctatgccttcttctgagctacagagcagattagttaggtctcagtagtcctgctgaagtgcaacctaggaaacttattgagggaccagggccttcccgttcagtatttcattttattcttgaaaaagaaaatgctcctcatcattg

SEQ ID NO: 156994 - DNA, 233 bp, Homo sapiens
actgtgccactgcgctccagcctaggcgacagaccgagaccccgtctcgaaagaaaaaaaagaaaatccaatcctggcttcccttggcctggctcagtcaagcttcagcacctggcctcctcccttgccagccccgacactcctcactgctcccttcagattcctgccacgaggctctgctctgcctcccccagcctggcctggcttggattcctcgttcccaggctctgccc

SEQ ID NO: 156995 - DNA, 220 bp, Homo sapiens
ccgattatttgcaggaaatgaaacagtcatccagataattaggaacactgtgcgaggcactttattttcaaaactatgttccatgaaacaaaaataaactataatatactgcgtttctcaaacagaacttctcccttcttccttcctactcccctgctcctctattgaacacctgcagtatattatagtttatttttgtttcatggaacatagttttgaa

SEQ ID NO: 156996 - DNA, 516 bp, Homo sapiens
cactttatgtctcgatcgttatcagatactcagcaagcacttatgggtgtacgtgaaacagagcctctaaaactcagttagactattgtatcagggaagctatcattgcacagaaaagaatgcaataaatttcaggtcataaatcattcagcatatcttgatagaggagcaaggaaaaagctgaaggggatatcatgtgcttgaaaggacagacagaaggagggaaaggacatttacaagggaaatatgaaatccaccaaatccaagccagccacataacttgccattttctgcacttggaaagctcttcttggttcctcatgtggcaggtgaagggattgaggacttcagatacattcatagaaactgttttcctgagtgctcagtgagaagaaggttaaaaaatcttaatttttcggctcttaaagccaagcttttatttctatgggttgagctctgtcactctacctactttccctggggaagcctgtctgctctctaacgatcgagacatag

SEQ ID NO: 156997 - DNA, 458 bp, Homo sapiens
ggtgtactaaatcaggcttcaaatcgcagccctgcaacttcagagctaccacaggtaacccagaaagggagcatggacagcaccacccactgcctgaggctatgagatggaccagaaacctgtgcttactaccagcctgccttattccagaaggaattcaggaaacacaaagacactcacagtacagcaaaataaagtaaatgtgaatcatgttggctgaggagaaacggaagagtctaagactatgtcataaagtttacctctactctaaactctcattactggcgagccaccaatctgactttaagttctctagcagctaaactgaagaggaaaatgtaatcaggtaaaggtttataagatgcaaacaaaacaggacagccaccacagttgctgagaacacgcgcagctccagctccaggagaaacagggtggccatctcctggggctgccccgca

SEQ ID NO: 156998 - DNA, 238 bp, Homo sapiens
caggaagctgatgcaatatttttgtaataatagtgaaatggaagcattccaaatctattggattaatgcagtaaataagtaaatcttgataccttaataaatgaaatatgtgggttaaaaatgttatgaaaagtatcttttgagagaaatacttatgttattaaatgaaaaaggcagggtaacagtattctgtaacaatatcataattcactattttaaaaaatcacaggaataccca

SEQ ID NO: 156999 - DNA, 539 bp, Homo sapiens
atcaatctcataatgttttaagtaagtttacaaatttgggttgcacaagcttgcattagtgacttcccaaatttctatttccagttggacctttctcttcaactcccgtctctataaccccacttgaacaggcatctcaaacctgactaaaactggctccacctaccttcacactcagtcttctccatctcagtacactgtttaactaaagccttccaatagctcaggccaaaggccacagggtcgtgcttcaccctttctctcataagcacatccaaaccataagcaaatcctatcagcaatactcagaatacgacggcttcttactgcctctcttactacccacctggtctaagccaccattctctctggcttcaattactgcatcaacctaacaggtctccctgcttccatccttgcccttacagtcaacctgaacacagcagccagagtgatcctttaaaaaccttaagccagatcccctcattcctctgctcaaaaccctccaaacacctcccttctcacaaaggggaaaagca

SEQ ID NO: 157000 - DNA, 440 bp, Homo sapiens
tcgctgtgctctccatgtagaagttctcttccccagatattcacattactcatcccctcacttccttcagggctttctcaaatgttaccttatctgcgaggccttcttgagtacatgctgcccaatactccctattctcctcaccttgactcttctccagagctctttccaccacaggaaggagaaactgtctggcttcccttatgagacggaaaggtccacaagggcaggactttgttctgtcacctgatacggtcctaccgtctagaagaatggctggcacataataggaatttaatgtttgttgaataaagtgctttagtgtgggaaatgacgccttactgatgtacacacactttttagttttccctcccaacttgaataatcaaggaacgcccaacagaagaagcaaaggcagaaaatgaccattttccttcaag

SEQ ID NO: 157001 - DNA, 494 bp, Homo sapiens
catctgttctttgttcctcttgtttattagttctttctcttttggcattccatttctccagccctgacaacatcactgtattatccatatctatcatagtggatttttctttttcttgatggatagatgctcacctatatcattttaattcctccttaagaactttctctaacttctcttattacctaaatttgctggtgacaaattcagcttttgtttttctggaaagtctttatttctccttaattttaaataatatttactctggaaatagaattataggttgacagtctttcttttagcactttaaagttgtgggtccactgtttttttcttttttggctaattgctgatgagaaatccatgcctattcattcttatatttctgcctctgtgcttaaggttctcctcctacactttggggcctcaatatggttttctttatctttcttgagttttattaagcatcttcaaattgtgggtttattgctctt

SEQ ID NO: 157002 - DNA, 491 bp, Homo sapiens
  misc_feature (477)..(477): n is a, c, g, or t
gttgctgcggtgactctagtaggatccccttgtctgctttggactacagtcctgtgcaggcggggtggggtaggggggtgcctcctccttcctgctttgcttctggacctgcatgctgctctctctggctggtcaacacctgcttgtccagaagcctcagctgaagtgtcagttcctctgggaagccttccctccgcggagacttagaacttgtccctctctcccctgggactcttcacacagctttctagtccaaaggcaggacaagcttgtcctgcctttggactaccttttacttccttagtacctcattacatcttccatagtcactgaattttattctttgtcattgcggcttatttaaatactgactgtattggaaaaattaaaattatggtatccttaataaaataacattgaagagggtatagatgtctgcactgggaatattctttgtgtgtgaacaaaattcaactntgttatagtccaag

SEQ ID NO: 157003 - DNA, 394 bp, Homo sapiens
agcagccttgaaagatgccagtgcacaggagggtatttttaacaagttagcagaggttttctctcctccccctcaaacaacctgtggacctggatacatcacccggggaagagagggtggagtggatggcgccctgcccgtatcccctccacattcacctcccctagcaaaagacacctgtaactttttactgcaggcacctgcaattccctatctgagggcttttttggccacaggacatgaaaggacccacaacctatgggagttgatggagagatgccccagcttccttgacctacagatggggatagcacgactctgaggtgtgttccatgcagcctcccagagctggagttccaggcacccatgggggtgacctggtccttagccaccc

SEQ ID NO: 157004 - DNA, 665 bp, Homo sapiens
ggcggggctggaatttgtctcatgactcatgattgccagacaccagagccgtttctgtgtttaaacttggtcccccaagccctgtctggttctcatagctgacaaataatatttaatgccttattctttgccagctggaattacaaaacactgctcaatttccatcatagacagcgagaggctgtgtggtatagtggctgtgagtgtgggttctggagccagtcaggtcagattttactatttgagtgactctggacaagtttttaacctctataatgcttcaacttttctcatctgtaaatgggcataataattgtccctgctgagtgtggtggctcatacttataaccccagcaatttgggaggctgaggtggaaggattgcttgagcccaggagttcgagaccagcctgggcaacatagggagaccccgtctgtaccaaaaatagaaaaaaaattagctgggcttggtggcacacgcctgtggtcccagctacttgggaggctgaggctggaggattgtgtgagctcaggaagtcaagaattcagtgagctgtgttcgcactactgcactccagtctgagcgacagatcaagaccctgtctcaaaaaaaaagaaaaaatgcggccggtttagctcacttgcccatttcggcctatcggggtg

SEQ ID NO: 157005 - DNA, 537 bp, Homo sapiens
ggcggggctggaatttgtctcatgactcatgattgccagacaccagagccgtttctgtgtttaaacttggtcccccaagccctgtctggttctcatagctgacaaataatatttaatgccttattctttgccagctggaattacaaaacactgctcaatttccatcatagacagcgagaggctgtgtggtatagtggctgtgagtgtgggttctggagccagtcaggtcagattttactatttgagtgactctggacaagtttttaacctctataatgcttcaacttttctcatctgtaaatgggcataataattgtccctgctgagtgtggtggctcatacttataacctcagcctcccaaggtgctggcgttacaggcatgagccgtagcacccagccaacattttactctttatacgtgtgttcagctacaaaactttcttccctaccaaccctcccaagtctaagtaaaattgatctcggagtcacttgacctatttatctggtattatcctggtacgctgctagaggtatat

SEQ ID NO: 157006 - DNA, 2958 bp, Homo sapiens
attcaccaccctgaacaggttggatcggcatgaacagatctgcatgaggtcaagccacatgcccattcctggaggaaaccaacgctttttagaaaactatcctaccattggacaaaatggaggttcattcacaggtccagaacctttattatctgaaaataggattggtgaattttccagtaccggaagtactttgccagacacggaccacatggttaaatttgttaatgggcaaatgctctacagttgcgttgtgtgcaaacgtagttatgtgaccttatctagcctccgaagacatgcaaatgttcactcctggagaagaacatatccttgccattactgcaacaaagtatttgcattggctgagtacaggacaaggcatgaaatttggcatacgggagaaagacgatatcagtgcattttctgtcttgaaactttcatgacctactatatactcaaaaatcatcagaagtctttccatgccatcgatcatagactttccatcagtaaaaaaacagcaaatggaggcttgaagcctagtgtctatccgtataaactttataggctactgcctatgaaatgcaagagagccccttataagagctaccgaaattcttcctatgaaaatgcacgagaaaacagtcaaatgaatgagtctgcacctggtacctatgttgttcagaatccacacagctctgaattaccaacgctgaatttccaagatactgtaaacaccctgaccaacagtccagccatcccattggaaacatctgcatgtcaggacatacccacttctgccaatgtacaaaatgcagagggtaccaaatggggagaggaggcattgaaaatggatcttgacaataacttttattcaactgaggtgtcagtttcttccactgaaaatgctgtcagttctgacctccgggcaggggatgtacctgttttatctttgagtaatagcagtgagaatgccgcctctgtgatcagctacagtggctctgcaccctcggtcattgtacacagcagccagttttcatcggtgatcatgcacagcaatgccattgctgccatgaccagcagcaaccacagagccttttcagacccagctgtcagtcagtccctgaaagatgacagtaagcccgagccagataaagtgggtaggtttgcaagcagacccaaaagcattaaggagaaaaagaaaactacatcacataccaggggagaaataccggaggagtcaaactatgttgctgatcctggaggatcactgagcaaaaccacaaatattgctgaagaaaccagcaaaattgaaacctacattgcaaaacctgctctgccgggaacctccacaaatagtaatgttgcacccctttgccaaataacagtgaaaattggaaacgaagccattgtgaaaaggcacattctaggatctaaattgttttataaaagagggagaagacccaagtatcagatgcaggaggagcctttgccacaggggaatgacccagaacccagtggagacagcccactcgggctttgccaatccgagtgcatggagatgagtgaagtgttcgatgacgcaagtgaccaggattccactgacaaaccgtggcgcccttactacaactacaaacccaaaaagaaatccagacagttgaaaaaaatgaggaaagtcaactggaggaaggagcacggaaacaggagcccgagccataaatgtaaatacccagcagaactggattgcgccgtggggaaggctcctcaggataaaccctttgaggaagaagaaactaaagagatgcccaagctgcagtgtgaactctgtgatggagacaaagcagtgggggctggaaaccaaggaaggccccaccgacatcttacttctcggccatatgcctgcgagctctgcgccaagcagttccagagcccttccacactcaaaatgcacatgagatgtcacaccggggagaagccataccagtgcaagacctgcggacggtgcttttcggtgcaaggaaacttacagaaacatgaacgcatccacctgggcttgaaggagttcgtctgtcagtattgcaacaaggcattcaccttgaatgagaccctcaaaatccatgaaagaatccatactggagaaaagcgttaccactgtcagttctgctttcagagatttttgtatctctccaccaaaaggaatcacgagcagaggcatattcgggagcataatgggaagggctatgcctgcttccagtgccccaaaatttgcaaaacagctgctgcccttggaatgcaccaaaagaaacacttattcaaaagcccaagtcagcaggagaaaataggtgacgtgtgccacgaaaactcaaatcccttggagaatcaacatttcattggttcagaagacaatgaccaaaaggataacatacaaaccggtgtggaaaatgttgtcctttgagtggcaagaattagaaaaatcttcaaaaatatagttggtggtttttttagttatgatttaagtttagtttcattttgtccatgtgacagtcatgaaggagtgaaattaaaaaaaaaaaaactcatttgtgaaaattccagaaaaaggatcctaatatctactttgggttttagcattaactttatgcaaagtgcacaaaaacaaaatagctgactcctccaatatcccaagtttcttgtgaaagttaataaaattcttagctgtggtatttctaccagtgaaaaaaggagtttaattttagcctagtttaaaactttctaataattgctaataagaactggctgctgaactgtctttagtcactggagaaaataagggtcagatatcctgaagatggcatcttcgtaaatatgttacgtggtaataagctgtgtgacggtctttattcccatctggcttctgcactattaaaatttgtttaaattaatggatacacatgaaatact

SEQ ID NO: 157007 - DNA, 437 bp, Homo sapiens
  misc_feature (368)..(368): n is a, c, g, or t
actgcgggatgggcagtgagccaggatcttagagaccacaagagcaggctcaccttagctgaagctcaaaggatgagctccttcatcccaaaggtgggctctggggcagagcaatccctgagggttaactctttatgtgccacccacatgctgcactctcatttccagtcactttccctatgagaacacactgggtgggaatcacctaccagaggggtgggtggcattgtccacaagcatctctctctagactatacacacaacctgttcaaaaccatcaacaatcttgcctgcccttctcctctgcagctggcatttccaagcaaagtctcagatgtgctctttgatactagtaacagaacagaatntaaaagagcagtaagaaacagaaggggctctctaagaagaggctagtgaatactaactgagcaggtcac

SEQ ID NO: 157008 - DNA, 631 bp, Homo sapiens
agggaggggaggaggcaacacctcctgcttcacagagaagaagagagaggaagtggggagggacaggtggggaaggaggaggggaaacaggaagaagggattcggccctttccccaggtgggctctgggagaggggcaaaatcgaccctttttcaagtccactggctactcccgagaaagaactcagcacttgggtgaggagaccttctgaggtctctttgtgcctttagacctcagcttcctcatctgagatacgggcccaaattccttttcctgccacttcacataggactggaaagctgggacaaaggacagccatgaaccgctgatggactcacccagggacgttcagttcaataaacttctgaagcagaataggttcccacagagcaggccagagtgaaaggggcctgcatgaaaagttttgattcaagggccttctatttgcaagaaaggaaattacatatgaagttcccaggtttctcggagactttcatttccctctcattttccttctcgttaatagtggaagaatttatttagaggtgtagaagagtccctttggggccatacaatcatagcatttgaaagcaacctcagaattggtgtttttttccctggtaatcttcct

SEQ ID NO: 157009 - DNA, 331 bp, Homo sapiens
gttcattttcacagattcctagggcaccctgcaaaagacattcctggggagatggggccgacagggctccaaccctaatctgacaaagggtccattgtgactactgatgcacaggtgcctgtgtcagggcaagtgaaaggaaaaggcacatcagaacagagaaccctctaacctgggaaatctgatctgaaagggtagcaaaaaagaatgtgattgtgactcccatgttaaatacaaaagactcttagcagttgccctgtgttccaagccactatttttgaccaagatcaaatcaatagcctgtaacccacatacttcatgttgaattcaa

SEQ ID NO: 157010 - DNA, 712 bp, Homo sapiens
ttaatattgtggcattgacatcacaattttaaataaggaccaaagggaaattttaaaatctattttaaaatatcattatacagtttatgtaatggtggctttttaaatggcttattaaaattggttgatatgattgtttttctcaaactaaattatacacttttttgttttacaatatttcttactgatctaggaatgtgtgtctggggttggaagatctgcagtatgttttcatgatttcttcacatgagcttttcattacattgttgaaagatgaagaacgaaagctacttgttgatcagatgaggaagagatcccctagagtaaatctgtgcattaaacctgtaacttcattttatgatatcccaggttagctctctagtcggccagccaaaatgttggcatgttttgcccctctattcaaattaaccttgaaatatatttgaggattctctcttgttttaattaacacttgtgttggtaattaatagaaattcacctgtcttccgtatcagatttctgtataagcagttatgctctggagctctgccaagccaatgattagtacagattcagtcctagatacataaaagattttagctggggaaggctgggcgtggtggctcacgcctgtaatcccagcactttgggaggccaagacgggcggatcacgaggtcagcagatagagaccatcctggctaacacggtgaa

SEQ ID NO: 157011 - DNA, 523 bp, Homo sapiens
aaaatatgcccccaaagggggttgattaagtatagtacattcatgtaataaaaggcaatcatccctcagtgcctgtggggaattggttccaggacccctgtggatcctgggctcctctgatgcttatataaatgatgtaacatttgcatatataaaatgatgcggtatttgcatataacctatgcacatcctcctgtatactttaaatcatctgtagattacttataacacctgatacaatgcctacacatcactgcatttgcatagacttaatgaagtagttggtgtacagcaaggtcaagttttgctttttggaattttgtagaatttttttttttcctgaatatttctgatccttgtttggttaaatccatgaatgtagaattcatggatgcaaaacccatggatatggagggctcactgtattataacaactttacagaattatgttgtagaagaatctttaaataacatattgaattacttgtattaaattgttaggttaataaaagtagctttcata

SEQ ID NO: 157012 - DNA, 574 bp, Homo sapiens
cgtaccacgcacttcacatgcactatataatttaatcttctcagtaagttcagttaccgagcctgcacttgttggaaaatgggattcaaaccctgaatgttggctccacaacctgcacttttaactgtcaatcatattaagattaaatttaactgtcaggaaaatagaaaaatgcatcaaactagcaacctacagatacctgtaacacactactgggtcccaagtagtagtctaagatttaggtgaggagcagtttatgtccaagacaatctaacaccaagacaatggtgtaaaatatagaatgtcagtgagtcaatggttacattaattacaaagtttatgtgtcacttaatttggtttttcttccccattcaaatgaatcatcagattttggcatcctaggaacaggataaacgtggtcatattaattctcaggtaaggaggcctgcctagacatgacataaaagcaaatacagtgataacatgatctcagtgaagctatgactaaaaaagtctcaaatagaaacttcatggaatgagaaatggctctaccacgtccaatactagccagctt

SEQ ID NO: 157013 - DNA, 311 bp, Homo sapiens
aaggacaattccatatggtggttttctttttagactataaatgaaatgtattatttcactgaaccacaggtatgacactaggtcagacaatagtactggaacaaaaaaacacattgtcacctattgcaatggaaggtggctggttgtctactgggtataccgtgatgttgagatcatacactggaaaggacgcatgaagtggaacagatggattgggtccattgtagcaacagccattcacaaaagggccagcctctccatccgaaaccaccaatgtaatggtgtcaaaacaaggcatcaggccaatctcg

SEQ ID NO: 157014 - DNA, 351 bp, Homo sapiens
agatggatagacagacagatgagaggggatttattaagggaataataaatctcactccatcatagaagctaagtcccatgatagccatgtcttagtctttttttctgaatacctgagactgggtaatttataaagaaaataaatttattatagttctggaggctgtgaagtcccaggtcaaggggctgcatctggttggcctctggggagggctttgtgctgtgccataatgtggtagaaggcatccaggacagtagggctcacaagagagagccaacctggtttttataagagactcactcttgtgataagtcgttaacccatgaatgcatcaatgaattaatgagttat

SEQ ID NO: 157015 - DNA, 369 bp, Homo sapiens
gtcctgccgtttctcaagtgactcagcctcccggagtaagcagcaccgtgagcagggagaagccagagagcgatgttgccacaggacattcgacaagctgtcaaaatgcgggtctgggactcgaggggaggaggggtggagagcattgagaggacgtgagcacgtgcgagagtgcgtgtgtgtgtgtgggggtgtgtgcatgtgtgagtgtgtgcaagagtgcgtgtgtgggagaggtgtacatgtgtgagtgtgtgcaagtgtgcatgatgtgtggtggggggttgcgagactgcatgtgcatgtgtggggtttgcatgggggctgtgtgagtgcatgtgcgtgatgtgtggggtgtgtatgtgtttg

SEQ ID NO: 157016 - DNA, 463 bp, Homo sapiens
tgtatttcacttctataagtcaagaacagtttagttcctagtgaactataaggaaatttaaaaattgaggttggtggacttgagcttttcgaaggctgctttgtcccttatctaattcattccttccccttgggagccaatccttgagatgcctcagagctcagctacagtggtgatgtttaggccgcagtagattcccctttactcctattgccatagactgtcctgcatcccaccagatcctccaggccctggtgcccttatagtctcagggaacttggggacattgacccctcccagagcttttgcgaagaaatttagtgctcctctttttcacgggttacagggttccctcagtcattaaaacacgtttctcttccctttaaccgataggtgccctgggctttttgtttctgtgtctgcagaccagtgtcaatcagatttttccaggtgtccttctaca

SEQ ID NO: 157017 - DNA, 331 bp, Homo sapiens
tttggggccttgcctccactagaccagcctccatttttctacctgtaaagtggggaatcagccttgcacccgggggcggctgtgaggacgaagtgaggcctggctaagaaccctacagtcctgccccttccagaacccgccccacagctttggattggcagccccatcaggggccatgacctcctgaggggggctgcctggaggaggtgctattgagaagtcactgtggggccgggcgcggtggctcacaagccgtaatcttaagccctttgggaggccgaggcgggcggatcacctgaggtcaggagttcgagaccagcctggccagcat

SEQ ID NO: 157018 - DNA, 190 bp, Homo sapiens
tcgagtggggagacagatgattgcaatagaatgtgctaagttcatggctggtggggtggggaatgctttcccattagagggaacagtgtgtgcaaaggccaggaacgcacagctcaagacattttagtgggaagttaagggttccaaactcccctcgattgactgctatgtgacgtgtgcttgacctatc

SEQ ID NO: 157019 - DNA, 268 bp, Homo sapiens
gagtcctcaccaccccctctctgagtccacttagggagactcaggttgccagggtctcagggtcagagtcttggaggcatcttggaggtcaggaaagaaagctggtgagagggacccttcgaaagggaacgcagcctgtcctccccaagtccggccacagatgtcggcagctggggggctccttcgggtggtctggggtgacctctctccgcttcacccagagcactctcaggggctgtcgtgatgattgcctggtgggactctgtcc

SEQ ID NO: 157020 - DNA, 331 bp, Homo sapiens
gggcaacctgtatcttagctactcagaaggctaaggtgggaggacagcttgagccaaaaaggtatagctgcagcaatatgagtcttaaagccccattaagaacttcagtgattttcatcatttttcagagcagcaagctgtcacattatttgagcacaagtaaacaatttgggtaaagtatttatttaaactagacagaatgaactactaaaggagggtccccccgtgtgcctatactctatttcattcactctttcttgcctgtcatttaactcaagttgatcagctctccttcccttttagggggcaatcggggtggatggtacaactc

SEQ ID NO: 157021 - DNA, 218 bp, Homo sapiens
cctgaagaccatatggttaggcattcctactgaacattaaactcataaaactatattctctttataagacaaattgtacatttacatcccttttatctcatctcctacccacactccaccatcccttttatagtctctagaatttcaattccaggctctgaaattttattttcctagtccttttaagacaactttactaggctatcggacattacttg

SEQ ID NO: 157022 - DNA, 1232 bp, Homo sapiens
  misc_feature (289)..(289): n is a, c, g, or t
  misc_feature (353)..(353): n is a, c, g, or t
  misc_feature (384)..(384): n is a, c, g, or t
gcgaccatcgtttgtcgacgccgctgccaccgcctgcctgagagaagtcgtcgcggccgaccccgtcgcctccgccggctaccatgtccgcccaggcgcagatgcgggccctgctggaccagctcatgggcacggctcgggacggcaatggatcacttggagtcctttattgctgaatgtgatcggagaactgagctcgccaagaagcggctggcagaaacacaggaggaaatcagtgcggaagtttctgcaaaggcagaaaagacatgagttaatgaagaaatagganactccttgctaaagccgaacagctaggggctgaaggtaatgtggatgaatcccagaagattctnatggaagtggaaaaagttcgtgcgaagaaanaaagaagctgaggaagaatacagaaattccatgcctgcatccagttttcagcagcaaaagctgcgtgtctgcgaggtctgttcagcctaccttggtctccatgacaatgaccgtcgcctggcagaccacttcggtggcaagttacacttggggttcattcagatccgagagaagcttgatcagttgaggaaaactgtcgctgaaaagcaggagaagagaaatcaggatcgcttgaggaggagagaggagagggaacgggaggagcgtctgagcaggaggtcgggatcaagaaccagagatcgcaggaggtcacgctcccgggatcggcgtcggaggcggtcaagatctacctcccgagagcgacggaaattgtcccggtcccggtcccgagatagacatcggcgccaccgcagccgttcccggagccacagccggggacatcgtcgggcttcccgggaccgaagtgcgaaatacaagtaactactctgactccttcggtagctgcaaccaggagtgagcccttctctgtgttcccagggtctgctgagggccgtgtctggtggggatggggctgggctcaccctcaggagtagggctggggagtcgtgaacgggactcaggtgtgggaagaggcgagagggctgtggaggagctcgcacggcgccaggtgatgggctgcacaggcactgtcccctgcctgcgtcctggggcctgtgcactgttgcgtccatgctcagagtggctgagacttgtgtcctgaccaggccctgcttacctctgttttggtttttgtttttgatatttttttttccattgtgtttttacgtagtgtcatgttctgtgcatat

SEQ ID NO: 157023 - DNA, 721 bp, Homo sapiens
ggagacctcattggaaggacctagccattggagatgaactgatggaaatattttaaacctaaatttgtgggagtaaaggagaaaatgtcagtaaagcagcaagcagaatctgctgaggggtggggccctcatagtgttggcacctatagagtctcagccttggagccttctgattgttcaggtcacgctcccgggatcggcgtcggaggcggtcaagatctacctcccgagagcgacggaaattgtcccggtcccggtcccgagatagacatcggcgccaccgcagccgttcccggagccacagccggggacatcgtcgggcttcccgggaccgaagtgcgaaatacaagtaactactctgactccttcggtagctgcaaccaggagtgagcccttctctgtgttcccagggtctgctgagggccgtgtctggtggggatggggctgggctcaccctcaggagtagggctggggagtcgtgaacgggactcaggtgtgggaagaggcgagagggctgtggaggagctcgcacggcgccaggtgatgggctgcacaggcactgtcccctgcctgcgtcctggggcctgtgcactgttgcgtccatgctcagagtggctgagacttgtgtcctgaccaggccctgcttacctctgttttggtttttgtttttgatatttttttttccattgtgtttttacgtagtgtcatgttctgtgcatat

SEQ ID NO: 157024 - DNA, 858 bp, Homo sapiens
  misc_feature (289)..(289): n is a, c, g, or t
  misc_feature (353)..(353): n is a, c, g, or t
  misc_feature (384)..(384): n is a, c, g, or t
gcgaccatcgtttgtcgacgccgctgccaccgcctgcctgagagaagtcgtcgcggccgaccccgtcgcctccgccggctaccatgtccgcccaggcgcagatgcgggccctgctggaccagctcatgggcacggctcgggacggcaatggatcacttggagtcctttattgctgaatgtgatcggagaactgagctcgccaagaagcggctggcagaaacacaggaggaaatcagtgcggaagtttctgcaaaggcagaaaagacatgagttaatgaagaaatagganactccttgctaaagccgaacagctaggggctgaaggtaatgtggatgaatcccagaagattctnatggaagtggaaaaagttcgtgcgaagaaanaaagaagctgaggaagaatacagaaattccatgcctgcatccagttttcagcagcaaaagctgcgtgtctgcgaggtctgttcagcctaccttggtctccatgacaatgaccgtcgcctggcagaccacttcggtggcaagttacacttggggttcattcagatccgagagaagcttgatcagttgaggaaaactgtcgctgaaaagcaggagaagagaaatcaggatcgcttgaggaggagagaggagagggaacgggaggagcgtctgagcaggaggtcgggatcacagaaccaggagatcgcaggagggaatcatcatctatggaaacatccatcgaaaccaaaaagcactgaaaacttctccgcaccgagggaattactgccattgagaaaccgggaagtctattttacgatatggtgctgcctggatccccttctctcaaagaaaaaaacggtgggagcacccggaaac

SEQ ID NO: 157025 - DNA, 500 bp, Homo sapiens
tatattcaattctcgttatttgtggtagttatgttttataacgttgctgtgagtgctgcattagcagatattgaaccactgctcctaggggaaatgtaagattagggtcctgagagcctctggtcacaccaaatcactcaccttttttttttttcctttgagatggacccaagctggagtgcaatggtgcgatcttggctcactgcaacctctgcctctggacctcgggtgatctgcccgcctcagcctcctggccagggtgcggggataacaggcatgagccaccgcaccgggccagaaagggattaaacgcaactattatacttatcctcaatgcagtagaggagaaatatctcggcaaagaggggaaatctcagaaaagaagtagaaaggattttaaaggggccaatgggaagtcctagaattaaaaattacggggatttaaaaaaaaattcgttaaggggaattacccaggaagggactaggggattggacagagg

SEQ ID NO: 157026 - DNA, 343 bp, Homo sapiens
ggcacgtagtaacacagatagagaccatccttgttgtgttgtaaatttcatctggcagaagatcaaaaatgaaaagtacacatcgtagtgaactatatgatatgtgaaaatggttatgaatagggttacatgaaagagactagtacaagatgagggatgtgagaagaggaaggcgtgcttgcgtaaaggggagggctgagggaatcctggaagtagagagcgagaggctgccctagagagccagtcccccacaaagctcatgaaaagcagggaaaagaaaaataaaaataaataaattttaaaaagagccggtctgccacccttgaatcccttggtgcccaag

SEQ ID NO: 157027 - DNA, 330 bp, Homo sapiens
gttcaagcaattctcctgccccagcttcctgagtagctgggattacagtacagcctcaaatttaaggagggactcactcacaggattgtgcaaatgcaaagttggcttttgcatgaccctgggagtaggtgcctccttaaattttgcaccctcagcaactccatcacctgtcactttgctagtcccaaccctgatgggaacaaatgcagggaaggcattccagatggcgggaacagcaagtacaaaaatccagaggccagaaaggcctggtgtgtttcaggaacagaaactcggctcccatgactgaaatggagtagggaaatcctaatg

SEQ ID NO: 157028 - DNA, 263 bp, Homo sapiens
aaaactcctgtgcacattaataaatttgtacgtcttttcttttattaatctgcttttgagagttgatttttcagtgaatcttcagagggcaaaggggatgctttcccttggcccctacaaaccctactggaccaaatcaaaatgcctctgggaaaacactgcttctctgcactatactcacacagcacactcctgataccagatgtgtgaggaatgcccccccaaacccaaaccaagcaaatcttcagcaggcaccagctggg

SEQ ID NO: 157029 - DNA, 532 bp, Homo sapiens
tgggttcaactgatcctcccactttagcctcccaaaaagctgagaccacaggcatgtgccactatgttgcccaggctggtctctaactcctggactcaagccatcttcctgctttggcctcctaaagtgcagggattataggtgagcccctgtgccaggcccatttacttattttttatttatttatttttttgagacagtcttgctctgttgccaggctggagtgcagtgcagtggcatgatctcagctcactgcaacctctgcctcctgggttcaagcgatttccctgcctcagcctctcgagaagatgggactacaggcacccaccactataccgggttaattttttgtattttagtagacatggggtttcaccaagttggccaggatggtctcgatcttccgacctcgtgatccgcccacctcagcctcccaaagtgctagcattacaggcgtgagccacggcacacagccccatttacctatcaagaaggttgagtgtgcaaatactagtaagctctgtgtcaaacg

SEQ ID NO: 157030 - DNA, 293 bp, Homo sapiens
aagctgagaaaaatgacttcattgtgtggctttgtacaagattgtaaatgtactttatctaatttgtaagtggctccgaacctctccctcaagccataaggaaatgctatgtgggcttccagtagagaaggaagagagaagagtcttgggaggataatctaacctgagaccctcataccataatactcttgtgatggaaatagagaggaaatggtcacatgctcatcgtcctgaaggcacccattttaaaataacacagggacacccccacacccgtcaccacactcacatgg

SEQ ID NO: 157031 - DNA, 378 bp, Homo sapiens
ggggcccttgccaaggacttggcctcttctgcccagaatttccctgccttctgtccatatcactgggatgaagaatccaaggtaggaaactaatctctattttctggttttaatcagtagaattcatttctcgatagaaaatgtgtgtaattccagttctacctcttttctcttaaatattttttcttttaatattgttcacattttatgtactaattaaagaaccagacattgcaaacatgacacattgattttttccacaataatgtttgtgagtaacatatggaattgctaactaacaaagttatggtttggtttgtctgtctgcttctccattcgggcctctggcacagcctcctaactggcctccccgcctcc

SEQ ID NO: 157032 - DNA, 442 bp, Homo sapiens
tcgaggatctcggtgttcctttgtctgataatcatgaatgtgctgcatgaacctgtctccccaggacaagtcagtagtttcagacacagacttactctcctctcacaaatctaactctaatattctgacaatctatatgacattctggtaaaaagctacaattacaattacttaatttaagctggttgtctaaggttcaaattaattggcctctgcctatctaacgtacatttggtttttggtgttggtttagtttaattgagatggagtcttgttctgtcgcccaggctggagtgcagtggtgcgattgtcgctcactgcagactctacctcctggtttcaagcaattctcctgcctcaggctcccaagtagctgggattacaggtgcgtgccaccacgcctggctaatttttttgtatttctattagagacagagtttca

SEQ ID NO: 157033 - DNA, 408 bp, Homo sapiens
gcagggagctaagttgcattttcctctcagccgaggatctggtgataagttgggtggaggaggattgtgagttaggtgagttattcgtgcagacgcgctgtgtcctgaaccatgaggaaaggcagacatagccaatctgcgaattctttttgcttccccggctccccccagcctgacttctcttccctaattaggactccacacctgtattttttgttttcatcgtgtgacaaacacccatggacctgccacctgacacaagagccagctcggtcctctcacgtctcacaggtgaccacgatgcttatcccctgcctccttccgcctgggtaaccgtcagcccaaattccgcgctcatcatcccttgctgtccttttaaaataactatctggtatctatacaaatctg

SEQ ID NO: 157034 - DNA, 210 bp, Homo sapiens
attacattgaatctatagaccaatttgagtaatatatatatattttttccttgcaatattaagtattccaatccatgaacatgggatatctttccatttatttgtgtcttctgtaatttcttgcatccatgtatcatagttgtcagtgttcagatctttcacttccttggttaaatttaatttaatctttttgatggtattgtaaatgcg

SEQ ID NO: 157035 - DNA, 750 bp, Homo sapiens
ttggggaggctggcacctccctgtgctgaggccttgttgttcttggggagggcaggtagtgagtgggtcatggggcaccccgagctcatgatcactaaaccaggccatcttctggctttcctcaggggtctccatagccacccagggccaaaattttgaagctgcaaaggtgactctgtgatgcgggttgaggggagaaaggagagaaggcaagtccgttcctgcctcccaccgcagaagctgggcctttagtacttgttacacagccggttgaacctgacagcagagctgggggctgggtagctggtggggagcagaggcccattctctggatcgctactctggtctactgtgtgctggcccctggctatggagataaaccaagagttgctctctgtcctcgggcagctcagtatgggcgggtaggcaggcacggatctgtaattacacaatagttcctgtagctgacccttctggggttttggaggggttagaaaaatgaattagatgggatccagggatttcttctagcttgctgagagagagatgtttgtttagccagcaaaagtttgcggaggacctactacgttctaggcaggcattaaggctatagcagggaccaacaaaaccaagtcccaaactcaatggaactcacatctagtaacaggagatacaacaggtgaagacataagaaaataatttcagacagcgagaaaggttatgaagaaaataaagtgatgtgaaggagag

SEQ ID NO: 157036 - DNA, 357 bp, Homo sapiens
cctgccaggtttattgaccctgcaattcaccagctacctcctcctgtcgccatggcaacacccacacccaagcagctccagaattcacctttggatatccagaattcacctttggatatccacaatccaccgaatttgcacctacgcagttcaaataaaccaacaaaagatatccccacccgctaaactgagacaaccacgaccttttccatttccccgatctctaattcatccacggaacatgtctttaatttttcacccatatccactgaagggagggtgagtcctaaacaacgaccacttttgatacagtaagaggttttttcctttcctccccctcccccactctttttttgc

SEQ ID NO: 157037 - DNA, 511 bp, Homo sapiens
attgcaacttaaatgatagtattataaggtactttttagtgttcattatttcagtagtggtgataaaacctttttttattctgcaaaattatgctggtgaaattgtatgtatctgcatgtgtctgtctgtgatttctaccatagtaaaatgaaacttcagttttgagccagaactgagaactcttggttcttaggtctagcccaagagaagacaaaagggaagagaagggagaggctacctttcctgacagcttcatggagttttcattttttgtgtgtcccctccccacgccgtacacacacatattcccattacacttctgttgatcagttagatcagttagtggctgctctgtttttccctgcaaaaggaatttttcaatttgattttccatcccgatttcccagtgggccttcatgaagcagtcaagacattttcagtatgttctttccctccaacagatgtgaatccagccatattgagcatatgctgtgtttctagggctgtaca

SEQ ID NO: 157038 - DNA, 257 bp, Homo sapiens
actcacagctcattttattctgtttaatcggctctctgcttccccagttaagaaatagaggcaaaactgctcttaggtcacacggtcatgaagtgaggtcttaacctccaggctccttccaggccacaggcctgccccaatctctcctccccttctctgcagaaagaagtccagtctctcagaacagacgaatgctgtgacaaaacataggtggaaagcagctctgcgatgacagggatcaccctgggaaccagtaa

SEQ ID NO: 157039 - DNA, 486 bp, Homo sapiens
tcttagttactggactaaacacagggaagcgattcattcttccctgaggaaataagcatttcttacatacatctatcttggcacaaaaagggctggctaagcaaattaatagtgtaaacaggactgcacgggggaatgtttgtcctacttaggagaataaactttttatgcactttgtgcatatccacttacatacaaataattgatatgctaattacaaatgattcttaaagccccttccctgaggtgctgtactatgctgttagtctagtttgaattactagcatgtccagtgcttgaaagtaataaaaatgcatttaaaaatatcccatgattcagactggctttcctctaattaggctgagttagtgaggcttgcctgtatttaaataggatagatatttttccacttcacccctaacacgtttaagatggtctccctcccctctctattcctccatccccctcaacacggagctggcgcac

SEQ ID NO: 157040 - DNA, 377 bp, Homo sapiens
ccacgtcttatggactgcttctgttcccttcctcctcttactcaccttgtttctgcaccctcaagcctttctccaatgcctcccaggaggatttggggactttctccctggggcgcccagatccagctcggaggcctcactgggacctggcaaggcctccgagctggatctgggcgccccaggaaaagatgggtcagatggacagttaattagctttttgtcttctgggtttactgatgtcctcccactgagtggtaagtttctgggtatttcagaattttggaatgaaaactttggtgatgtgcccaggacgggtaaggcagctagctctcacagacacaccccacagtgaacatcacacacacacacacacaccc

SEQ ID NO: 157041 - DNA, 321 bp, Homo sapiens
agtccctactgtgtgccagcccatagggtgtgctgtgtgccacaggtgaatgcattcacttcccagtggacatttaacaaccacctactgtgtgcagactcatggagatgcagaaatgcaaatggcacagtccgtagtggtttggacacttgtggtgttttgatggggtctttagtcctggctctctctctgcttgctgtgatatacccagtcagccactgttcacaggccacgtggtgacgtccccagaatgaaccagaaacaatccagatgccccaggaaccgacgtgagaacaaggcatccccttcacacgttgtgtc

SEQ ID NO: 157042 - DNA, 351 bp, Homo sapiens
gcttgagagagtaaatcaagagtatcctttcaaccagattgggctagtgccttggtgatgtaatgtaatgttcaaaagggaaattcaagtttctatcttttgtaattggatgagtggtggcatgatttactgagatgggaaataagaaagaaacagattcgttcttactctaaattggtggaattatcagatctctatttccaaggcatattcaagaggcatttaagatgagaggctgaatatgaatttgggactgcaagtttggcatgcaaaggagagatctgggatctggatatattcattttagagttaaaatactgttatttaaagcaaggtcgacgcggccgcgaa

SEQ ID NO: 157043 - DNA, 149 bp, Homo sapiens
tggcacaggtgatgtctggagccccctagggatccccaagatactttcaaggggaatgtgaggtcagaacttttcatagtaatattgattcattatgtgccctttttgcccagccaacagttttctgatgtagatagacagttctgaca

SEQ ID NO: 157044 - DNA, 332 bp, Homo sapiens
caagtcagcagccacaatttctcctactttccatagtccagtctcatagggaaggttgccccatttctgtgtccctcaaatttgaagagtggttcttgccacataactgctatacactttctcaccataccacacctctctccacccacccccaacacctacaacagtaacagtgcttagtagacctatgatgaatatttgcggaatgaatgagatagggccctgccctcacagattttacattctgtttggagaaccagacaataacaaattcagtacacacataggaactcacagtttgtggtaagggctattaagggaagaaacctgcc

SEQ ID NO: 157045 - DNA, 769 bp, Homo sapiens
ctagcaattagtagggactgaataaatgacagcaattattactatgtcccccagccctggtcttataagtgaaatatgtggtttagtaagagacaaagtgatgcaaatccaggtaagttttggcatgggtcagaaataacatttagagtacataaaactgatgttttttttcagtttggagagctatgagtcagggagcagtttaaatctaaactgcaaatttatcccctcttcttcctgggttaagaatcacttccacggtgaatcagagaagggattgtaccactcgtcacgtgtgttgggaaagaagaaagggtgagaaaccctggcctaaacaatccatcccacagatcctcaggcattcctttgtgtacttggtttttcaccactgagctttaaataagaatggaaatacaagggaaaacctgcgttgtaaacatgaggatttgggaacagatctaggacatgccactgaattgaagaccacccatcttccaggcagggccagaattacagaaaacaattctggtaaaatatatttttgtatcactttattaataattctttttaaaattctgtattttctttatagcaagacaagtagaacactaaaccatgaaaattctctatgtgattatgaccatagtgggttttaggccttaaaatattcagatcaggagttaccaattgtttaatataggacatatataaacaatcaaacttattgtaacttaaccttccccaagacacacttgacataaaatgtgcc

SEQ ID NO: 157046 - DNA, 299 bp, Homo sapiens
gatctctgcctaaatgtgatacactgaaatatatcttccacactgctatcctaatttacttaaaatataaatatgaacgtgtcacttccctgactcaaactcttcccatcatgctgctcaggatatcacataatggcccctatgaaattcctgacacctattcccccttcatactctacagtcaggcaacacttcaatagtgtatccgaatacaccaagctctatacacaaacctcatgtatttaagaagtcccctttacttgatacttttatattttatttgcctggctaagtcttcc

SEQ ID NO: 157047 - DNA, 357 bp, Homo sapiens
ttcttgtggaggcaggggctggacttgagggcttcatcaggtggtatccatggctgggacttgagactctgggtctggtgagtgtccataaggacatagactgactgtggaagaatttcttagaattagtgtcatagaatctatattcttttatgtctgacttcttttgctcagcagaatgtttttaagattcatattttatcatattctcatatgtatcagttgttcattcttttttacttctgagcaatgttctattgtatgaaaataccgtttgttagccatttacctgttaatttgggttgtttccagctttaggctattataaataaagctgctatgaaaatgcttatatga

SEQ ID NO: 157048 - DNA, 439 bp, Homo sapiens
gccaagggaggaaatacaggagtcttggaggtgagagatacagcttgtttccgcagagagcaacgtgttcaaaggcctagagtagagggtgagtattttgagaattgggacctaaaagaagcctaatattgatgggacagaaagctaagagacacagacagcatctttctttgccagagtgctaggcagatcttaaaaagctttaaggttatctcaagctcttaagttgtgaggccattaacctaaaggcaaatggaagtcactgaggtttttaagcatgagagaaagatgatcatatgtgacatcaaagatcattctggctttggagacagaatgaacgggagaggaataagaaataaaggcagggaggtgattttaggaggtgatttttagcaggccagtaaaaagataatgatggtctaaattaggatggtggcag

SEQ ID NO: 157049 - DNA, 179 bp, Homo sapiens
ggacactcttgtaccaagccacagtactgcatcaaaatcaggaaattaacattgatgaccatacggccattaaatgtacagattgttcagattttgcagattgtcccaatagtgttctttattaggtgtagtatcagttgtttcatatctctttaatattctttaacctaagaatacta

SEQ ID NO: 157050 - DNA, 498 bp, Homo sapiens
caggcaccccacgaggagccttgagctctgggcttctcctctggctgaccagagccctcaggggccatagagaaagataaaaatgggtcctatgttctggaagtcagggcctgggttggccagagtggatgagtagatgagctaggctaggaaggatgaatcaggtacaagaatccatgttcagtcctgtcacagctctctatcacaagagcctagctttgaaaactactccctgctcattagcaggaaggatgagctccaaagagggtgggctccagagtacagggttgccagtgctgcccagctccatgtcccgtctctgtgtattattctctgagaaagtgatacggctgtacacaggtaaatgtgtcagagaagcaacacataatcattgggaaattgcagaaaggaggaaagggtctcttcttggtatattttactctggtttgtatctgcacgtgattgttcttgcataattataaccacactgtgaacaga

SEQ ID NO: 157051 - DNA, 363 bp, Homo sapiens
agcagagaggaactcatgaaagtggcagaattgaggtgggtcttgaatagggattcaatatttcgatgagtggaagggtattctaggtggaggagggaacagcatgattagaggcaggtgtaaagcctggagcagtctccttttccgaaaggatgatattaaaaatacttaacaattgcaatggtcaggccttaggcaatcagcatgggcacctgtgaacagtggcatggtggatgcgctgtgagggccggtgtggcccactgggtggatatgctgtgaacgctgtcatggcacactgggtggatgtcaaccctgcctgtggggcacatgaagtagcccattttgatacaggagttaagaaga

SEQ ID NO: 157052 - DNA, 404 bp, Homo sapiens
agagcttaggttaaaaaaccaaaaaacaacaacaaaaaagtttgtgatatatacatacaatggaaaattatttagccagaaaaaggaatgaaattttgatacatgcttacaacataaatgaatcttgaatacattctgctaagtgaaataagccagacatttaaaatgacaaatactgtataattccacttatgagatacccaggaaaggtaaatgtatagagacagaaagtagactagaggttcccaggggctgggaggagggaaaatgaggagtcactgttcagtgctatttaatgggtacaagcaggaaaatggcttgaaccccctgagacagaggttgcagtgagccgagatggcgccattgcattccagcctgggtgacagaacgagactccatctaaa

SEQ ID NO: 157053 - DNA, 764 bp, Homo sapiens
ggggtttagaccaagggaggggccctaactccggcgaggagggcgcccacccctcggttcccggagctggtggaggcgtgcgggggagcgtggcggcgcggtgcacaggtggcgggggccgcgccagctgcgcgccgcgctctgctccgcgggtgggccgccaggcgtcgcgctggagccgcggttgccctggagaccaagcggggcgagtgggcggcgcggcgaggagccgagctgcggctggagtagcggggcgtgagttggggggagtggctccccggactgcgcgaggggtcggctagtcctggggcagggctgggtggcacggctggcgagcccggaacgcctctggtcacagctcagcgtccgcggagccgggcggcgctgcagctgcacttggctcgtctgtgggtctgacagtcccagctctgcgcggggaacagcggcccggcgctgggtgtgggaggaccaggctgccccaagagcgcggagactcacgcccgctcctctcctgttgcgaccgggagccgggtaggaggcaggcgcgctccctgcggccccgggatgacttctcagcgttcccctctggcgcctttgctgctcctctctctgcacggtgagtagctccagccctttcttcccggtggggccaggccgggtcggcgggcccggggcgaagctgtttggggacggcaaagagcctccttgctttgccgagggtcgggagtccaactttctcaggggcggcgttcgttgctgcggcc

SEQ ID NO: 157054 - DNA, 567 bp, Homo sapiens
agtggccgtcccgctgttgtaagtggagggacggcagtcagctgaccctgcagtgtgcaggcgagcgcagggagtacgccatgtcctgagaaggggcgattctcaggctctggcagttacagcttctcctcaccctgccgagcaaccaggccacggggctccgtgcatcgccacctagagtgttaccctcttccttgttcacagaggttctccgcagtgtgtgagaaagaggccctctctcagatgaatggataaagaaaatgcaggacatatggggggaggagccaagatggccgaataggaacagctccggtctacagctcccagtgtgagcgacacagaagacaggtgatttctgcatttccatctgaggcaagaagaataaatgtctctggtggaacttttgctctggtggaactgcttttctagaactgttccaagaggaaattgcagaaaccagtctgagtccatcaccaaaggaagtcttgcaagatgaggggcagaagaagtgagcctagaaggatggacttgctgaacttctgtttatcctccaagatgtgattagtc

SEQ ID NO: 157055 - DNA, 1595 bp, Homo sapiens
ggggtttagaccaagggaggggccctaactccggcgaggagggcgcccacccctcggttcccggagctggtggaggcgtgcgggggagcgtggcggcgcggtgcacaggtggcgggggccgcgccagctgcgcgccgcgctctgctccgcgggtgggccgccaggcgtcgcgctggagccgcggttgccctggagaccaagcggggcgagtgggcggcgcggcgaggagccgagctgcggctggagtagcggggcgtgagttggggggagtggctccccggactgcgcgaggggtcggctagtcctggggcagggctgggtggcacggctggcgagcccggaacgcctctggtcacagctcagcgtccgcggagccgggcggcgctgcagctgcacttggctcgtctgtgggtctgacagtcccagctctgcgcggggaacagcggcccggcgctgggtgtgggaggaccaggctgccccaagagcgcggagactcacgcccgctcctctcctgttgcgaccgggagccgggtaggaggcaggcgcgctccctgcggccccgggatgacttctcagcgttcccctctggcgcctttgctgctcctctctctgcacggtgttgcagcatccctggaagtgtcagagagccctgggagtatccaggtggcccggggtcagacagcagtcctgccctgcactttcactaccagcgctgccctcattaacctcaatgtcatttggatggtcactcctctctccaatgccaaccaacctgaacaggtcatcctgtatcagggtggacagatgtttgatggtgccccccggttccacggtagggtaggatttacaggcaccatgccagctaccaatgtctctatcttcattaataacactcagttatcagacactggcacctaccagtgcctggtcaacaaccttccagacatagggggcaggaacattggggtcaccggtctcacagtgttagttcccccttctgccccacactgccaaatccaaggatcccaggatattggcagcgatgtcatcctgctctgtagctcagaggaaggcattcctcgaccaacttacctttgggagaagttagacaaaataccctcaaactacctccaacagctactcaggaccaggtccagggaacagtcaccatccggaacatcagtgccctgtcttcaggtttgtaccagtgcgtggcttctaatgctattggaaccagcacctgtcttctggatctccaggttatttcacgggcattcttttactggagaagcaaaaataaagaggaggaagaagaagaaattcctaatgaaataagctttattcactggatcatgaaggagggaaaggtccagcatgtgcccaactaggaggatacaaatgaagagttctccttatcttccgtgtctccaggagaggatgatcttccacccaagtgttcttctgccaaagcatttcacactgagatttcctcctcggacaacaacacactaacctcttccaatgcctacaacagtcgatactggagcaacaatccaaaagttcatagaaacacagagtcagtcagccacttcagt

SEQ ID NO: 157056 - DNA, 1401 bp, Homo sapiens
agtggccgtcccgctgttgtaagtggagggacggcagtcagctgaccctgcagtgtgcaggcgagcgcagggagtacgccatgtcctgagaaggggcgattctcaggctctggcagttacagcttctcctcaccctgccgagcaaccaggccacggggctccgtgcatcgccacctagagtgttaccctcttccttgttcacagaggttctccgcagtgtgtgagaaagaggccctctctcagatgaatggataaagaaaatgcaggacatatggggggaggagccaagatggccgaataggaacagctccggtctacagctcccagtgtgagcgacacagaagacaggtgatttctgcatttccatctgaggcaagaagaataaatgtctctggtggaacttttgctctggtggaactgcttttctagaactggtgttgcagcatccctggaagtgtcagagagccctgggagtatccaggtggcccggggtcagacagcagtcctgccctgcactttcactaccagcgctgccctcattaacctcaatgtcatttggatggtcactcctctctccaatgccaaccaacctgaacaggtcatcctgtatcagggtggacagatgtttgatggtgccccccggttccacggtagggtaggatttacaggcaccatgccagctaccaatgtctctatcttcattaataacactcagttatcagacactggcacctaccagtgcctggtcaacaaccttccagacatagggggcaggaacattggggtcaccggtctcacagtgttagttcccccttctgccccacactgccaaatccaaggatcccaggatattggcagcgatgtcatcctgctctgtagctcagaggaaggcattcctcgaccaacttacctttgggagaagttagacaaaataccctcaaactacctccaacagctactcaggaccaggtccagggaacagtcaccatccggaacatcagtgccctgtcttcaggtttgtaccagtgcgtggcttctaatgctattggaaccagcacctgtcttctggatctccaggttatttcaccccagcccaggaacattggactaatagctggagccattggcactggtgcagttattatcattttttgcattgcactaattttaggggcattcttttactggagaagcaaaaataaagaggaggaagaagaagaaattcctaatgaaataagagaggatgatcttccacccaagtgttcttctgccaaagcatttcacactgagatttcctcctcggacaacaacacactaacctcttccaatgcctacaacagtcgatactggagcaacaatccaaaagttcatagaaacacagagtcagtcagccacttcagt

SEQ ID NO: 157057 - DNA, 1583 bp, Homo sapiens
ggggtttagaccaagggaggggccctaactccggcgaggagggcgcccacccctcggttcccggagctggtggaggcgtgcgggggagcgtggcggcgcggtgcacaggtggcgggggccgcgccagctgcgcgccgcgctctgctccgcgggtgggccgccaggcgtcgcgctggagccgcggttgccctggagaccaagcggggcgagtgggcggcgcggcgaggagccgagctgcggctggagtagcggggcgtgagttggggggagtggctccccggactgcgcgaggggtcggctagtcctggggcagggctgggtggcacggctggcgagcccggaacgcctctggtcacagctcagcgtccgcggagccgggcggcgctgcagctgcacttggctcgtctgtgggtctgacagtcccagctctgcgcggggaacagcggcccggcgctgggtgtgggaggaccaggctgccccaagagcgcggagactcacgcccgctcctctcctgttgcgaccgggagccgggtaggaggcaggcgcgctccctgcggccccgggatgacttctcagcgttcccctctggcgcctttgctgctcctctctctgcacggtgttgcagcatccctggaagtgtcagagagccctgggagtatccaggtggcccggggtcagacagcagtcctgccctgcactttcactaccagcgctgccctcattaacctcaatgtcatttggatggtcactcctctctccaatgccaaccaacctgaacaggtcatcctgtatcagggtggacagatgtttgatggtgccccccggttccacggtagggtaggatttacaggcaccatgccagctaccaatgtctctatcttcattaataacactcagttatcagacactggcacctaccagtgcctggtcaacaaccttccagacatagggggcaggaacattggggtcaccggtctcacagtgttagttcccccttctgccccacactgccaaatccaaggatcccaggatattggcagcgatgtcatcctgctctgtagctcagaggaaggcattcctcgaccaacttacctttgggagaagttagacaaaataccctcaaactacctccaacagctactcaggaccaggtccagggaacagtcaccatccggaacatcagtgccctgtcttcaggtttgtaccagtgcgtggcttctaatgctattggaaccagcacctgtcttctggatctccaggttatttcaccccagcccaggaacattggactaatagctggagccattggcactggtgcagttattatcattttttgcattgcactaattttaggggcattcttttactggagaagcaaaaataaagaggaggaagaagaagaaattcctaatgaaataagagaggatgatcttccacccaagtgttcttctgccaaagcatttcacactgagatttcctcctcggacaacaacacactaacctcttccaatgcctacaacagtcgatactggagcaacaatccaaaagttcatagaaacacagagtcagtcagccacttcagt

SEQ ID NO: 157058 - DNA, 1377 bp, Homo sapiens
agtggccgtcccgctgttgtaagtggagggacggcagtcagctgaccctgcagtgtgcaggcgagcgcagggagtacgccatgtcctgagaaggggcgattctcaggctctggcagttacagcttctcctcaccctgccgagcaaccaggccacggggctccgtgcatcgccacctagagtgttaccctcttccttgttcacagaggttctccgcagtgtgtgagaaagaggccctctctcagatgaatggataaagaaaatgcaggacatatggggggaggagccaagatggccgaataggaacagctccggtctacagctcccagtgtgagcgacacagaagacaggcaagaagaataaatgtctctggtggaacttttgctctggtggaactgcttttctagaactggtgttgcagcatccctggaagtgtcagagagccctgggagtatccaggtggcccggggtcagacagcagtcctgccctgcactttcactaccagcgctgccctcattaacctcaatgtcatttggatggtcactcctctctccaatgccaaccaacctgaacaggtcatcctgtatcagggtggacagatgtttgatggtgccccccggttccacggtagggtaggatttacaggcaccatgccagctaccaatgtctctatcttcattaataacactcagttatcagacactggcacctaccagtgcctggtcaacaaccttccagacatagggggcaggaacattggggtcaccggtctcacagtgttagttcccccttctgccccacactgccaaatccaaggatcccaggatattggcagcgatgtcatcctgctctgtagctcagaggaaggcattcctcgaccaacttacctttgggagaagttagacaaaataccctcaaactacctccaacagctactcaggaccaggtccagggaacagtcaccatccggaacatcagtgccctgtcttcaggtttgtaccagtgcgtggcttctaatgctattggaaccagcacctgtcttctggatctccaggttatttcaccccagcccaggaacattggactaatagctggagccattggcactggtgcagttattatcattttttgcattgcactaattttaggggcattcttttactggagaagcaaaaataaagaggaggaagaagaagaaattcctaatgaaataagagaggatgatcttccacccaagtgttcttctgccaaagcatttcacactgagatttcctcctcggacaacaacacactaacctcttccaatgcctacaacagtcgatactggagcaacaatccaaaagttcatagaaacacagagtcagtcagccacttcagt

SEQ ID NO: 157059 - DNA, 340 bp, Homo sapiens
ggttggtagaatgatttctggtgttctgtagcaccatagggtgaatatggttaaatacaacttgtgtattttcacaaagctagaagtgaggattttgaatgttcacaacccaacaaaatgataagtttgaggtgatggatatgctagttaccataatttgatcattacatactgtatacacatattagaatattactgcatctcataaatgtctacagttattttatgtcaactaaaaataaaaaggaaaaaagaattctttgcctaaatcaatatcacacagacttcgttttcctctaaaagtgttatgttttatgttagagttttatatttagatcta

SEQ ID NO: 157060 - DNA, 104 bp, Homo sapiens
cttcttgtctttatcgtaagaggtcagatttgtgttttgaaaagattacaggatagagaatgatttacaaaggaacaagggtaagtgctaggagattaatgagt

SEQ ID NO: 157061 - DNA, 320 bp, Homo sapiens
gcttcctagtcatgcttcctgtacagtttgtggaactgtgagtcaattaaatttctttgtatcataaattatgcagtctcagatagttctttatagcaattcaagatcagactaatacacctccccattctccatccttttaaaccttattccaatgtcaacattcactctaacattttttaagattcctacaatgaagaaagtaatgtccttaactttacattaaaaagaaaaacaaactcggaatatagagtttctctgctgttttctatccaggcatggaatagaaattaatgtgcatgagtgttttctctggatgt

SEQ ID NO: 157062 - DNA, 254 bp, Homo sapiens
agcagctccaacaacatggatccatccgacctgtgattccctccgaccccaacctgcttctcccctgccttctccatctttgttaatggcaactctccctggctccagccaaaacctttggagtcatcttggagtgctctcattctcttatactctatgtccaatctatggcgaagcctgtcttccccgtcttccaaatgatttctgaatctggccactccttaccacctccacagctaccataccctccctag

SEQ ID NO: 157063 - DNA, 150 bp, Homo sapiens
tcatagacaaataggtcttaagtatctttaactgcaggctccataaactgaatttacattcccatgatctgtgcctccaaacacccttttatcccctgcttattttagaataagaaatgggaatggaatcaatgtatccatattcataat

SEQ ID NO: 157064 - DNA, 414 bp, Homo sapiens
gaggtttctccctcctccaaagtcagaggtgaccaatccctaaacacattcgtgcaggaagaagaaagagagaaagaaatccctgaacagactcctctggaagagacagaaggatgaaagagagggagagggggaaaaaggagaggagagacggagacaaggaaaaggaagggagagaaacagagggagggagaggaaagaagaggaaggcaagaggaagaaagagaggggaaggggagaggagaaagagggagaaggcagtgaccaaggagggttaagggctcccggagggttaagggctcccggggggttaagggctccctgagggttaagggctcccggagggttaagggctcccggagggttaagggctcccggagggttaagggctcccggagggttaagggctcccgg

SEQ ID NO: 157065 - DNA, 176 bp, Homo sapiens
cgatccccctcctcaggccttgcttagccaccggccccgagaggtcaccgtttccctgcgggccactgggctgatcctgaaggccattccagccagcgacacagaagtttcagggtctagccattgccccctgcctgctgctcctgtcacagaccacacatgtctaaatgcaatca

SEQ ID NO: 157066 - DNA, 384 bp, Homo sapiens
aatatttacaatactgctccaaattcatgaaaaaaaactagatgtaatattatataacataagaaacagtagcaattgctcttctagaagttgctacaatccatcagcaaactgtgtcacacacactaaaagcaaaattctagaacaaaaatactccagtttctgacgagttagaagatgatgattaccctaagccaatatgagttcatagctatgaaaaataccaaaataatttcataggcttcttttcttttggttgctggatactgactcaaggaaaaactgtagatcatccactagcctccaagcattacacacttcaaaatcaccccatctttgagtaccaagatcctgaaccttattccagatcccttgaaacagaat

SEQ ID NO: 157067 - DNA, 377 bp, Homo sapiens
ggagggagatggggagggcgtgtgagctgacgacaccgagggagggagagggggagggcgtgtgagccgacagcactgccggccatgcaagcaggggacctgggaccatgggaagcgaggacattccctcttcctaactgcatgcacgacaactgtgtaagcagcacaagtcaccttacaagattaaatgtgcaaccaccactccactctgccagatagagtaagggcaccggtaagtatcacacaggcagatgagcaaaggtaggcgtggaggccgccgcacagatgtgaagttggcccaggccagcgccccgctggctcatttagggcacaggaaacataggacctggggtgaccaacggctgcaggcaggtctg

SEQ ID NO: 157068 - DNA, 288 bp, Homo sapiens
agagagaggctctctccacccacttcctttgcaatctgcatttctctctgacagtctttcaaatgaagggagcctggctgcttcatttttatggagggttggaagtgcttagtggcaggcacaaaggttcattttacatattgtttatatccttctcaaaagcgtctaggccatacagacaacaaatcctttcaaacaaggggaaaagtacaaaggttgggtgatttctggggagcgtcagggaaggtagtggggggcatcctggctcctcatcagcagaaacttact

SEQ ID NO: 157069 - DNA, 421 bp, Homo sapiens
aatgttttattaatctcatctccttaatgagttctgtggtgagtttaactcattcgtggtccagtccacacatatggaagtatgtgtgaacattcatttgtgcaattatgtattattcctatctgtgtataagtctttaattttggaaaaacactttgccttttacattaacttcatccacaatatgaagggattttgacttttggaaaagtagcaaatcctatatttgagaactttcgggaataagtttgagaaggatgttttcagacagagtgtgaccagagaagagccccagagggacgtgtctgagaggtggttgaaaaacttggtcatgtttatcagagaggaaagagaatgcaggcagatgtggtatggttttcaagaacataaggcactttttatggaagaaggaaggacatca

SEQ ID NO: 157070 - DNA, 267 bp, Homo sapiens
ggtaaatgaagggagactttttgagaagtcaaatacatgtagtcaatacaaaaactacggaagagaccttttatccttttaactataataaaagccctactggcttcccaaaatacctattccatcaaggaaaaagataagctttgtgtgtaaatgaaagagaatatctcttctttgtcctgaaacagttgaaaaataaaaagttttactacaggagtatgagattgcctgaaaaatacatgacataaaagctaaaaattaatcttt

SEQ ID NO: 157071 - DNA, 234 bp, Homo sapiens
cagcctgggtgatagagcaaaactgtgtctcaaaaacataataaaaagaagaattgtgtgtccgttttccttcttaagcaaggaagcaagcaaacaagtaagcaatgagtcagagaaagtccaccaagggcagatttatgaatgaagagacttacacagacagatgttaggatgacagcaacctgattacttgattcagtgaagtctaaactaagctgactctagcaaagaagc

SEQ ID NO: 157072 - DNA, 456 bp, Homo sapiens
ttgcatgtaatcgtagtttgctcatttttattacatttcacacatgaatttaacacaacttatccattttactgttggacaagtattattgttttctttttgtgtctattctgacacttttctctcagtgaacatatatattcatttctgtagggtatataactgtgagtggtcaaagttatatattggcccacatttaattgatattgccaaatactttctcacttttatgtacagggttactttcctgtcagtaatgtgtgaaagttccctttcctctacaacatttgattttttttttttaagttcatgtttctggtggtgtggtgttatcatactaaatgttttactttaatttccatgctgactaatcaagctgaagcattttgcattttattctatgcaccagctttccttcgtttttgtttttgtgttttgttttgttttcttgagaca

SEQ ID NO: 157073 - DNA, 530 bp, Homo sapiens
atagaacaacataatagtgagaaattgtaatatctcactttcaataatggataaaaaatccagacagaagatcaataaggaaacagataactcaaacaacactatggcccaagtggacctatcaaacaaatacagaatattctacccaacaacagcaaattatacattctcctcaaacacacatagaacagtctccagaatagttcacatgctagcccacaaaacaaatcttaacaaatttaaggagactaaaatcataccaagtatcttttctgaccacaacggaatgagacattgctaatagaaataatttcagaaagttctcaaatatgtggaaattaaaaaacactcttgaacaaccaatgggtcaaagaagaaatcaaaagaaaaatcagaaaatattttgagaaaaacaaaaactaaagcacaacatagcaaagcttatgggaaacagcaaaagcaataaaaggaaagtttacagcagtaaatgtctacagtaagaaagatctcaaacaacctaattttacaac

SEQ ID NO: 157074 - DNA, 209 bp, Homo sapiens
tgtattttggggttctgttgttaattacatatgtttgtagttatgccttgctaataaattgatattttatcattaaaatatatccctttttataactggtaacaatttttgccttaaaatctattttgtgggatactagaatagccactgcagttctctctgagttactgtatgcatggtatagcttttgccatctttttttttttttt

SEQ ID NO: 157075 - DNA, 401 bp, Homo sapiens
ctttgcctgattataagctgagcgaagggtgctgggatttttgtggagaggacagcctccgaggccttagggaagccatttttagagcctctagggccactgggggaaattgaatcttttaccagggcctcccacctccagcctcttctccaaaggggagaccctccccaaaagcaccaactgtaatcacccagaaaccccaagcgttttttccttccacactctgaatctaacactatcccccacaaccccaacatcagggaccctggcccaaatccttccccaggagaccatcctcctctcatcaggcctcggtcccaccccctcaaagcagcctcctttccaggagtggtcgaggtcccaccacattctacagcctcttccttgccccagacctcctg

SEQ ID NO: 157076 - DNA, 448 bp, Homo sapiens
ctcaagccgtcctcctgccttggcctcccacagtgctgggatcacgggcgtgagccaccagcccagcatcccttgcctttcattcgcacctccacctccagaatgaccctcattccctcctgcacagacggtgacagcagtaactcctacaaacaccaccagactgatcttcaagagcagaggaactcccaatcacgattccacccccgccgggctctcaaatcctccagggctgcctgctatggggagggaggcacactttgcttggctctcaaggcctcagccagccgggtccaaaccagctcccagcctggcctcaccatcccaccgccaaacctttgctcacactggcccctcttcctggaacatgggcctcatgaccccaggtctacctgtgtgaccaccaccccaccttctagaccatttccagtagcccctcccccatgct

SEQ ID NO: 157077 - DNA, 199 bp, Homo sapiens
caaagagggagaggtacttcaccaagaagagggtggtgaaaagggaagatctgtgtggtaggaaagatctgcaagtgataggtggtgaaggatagtgcttgagccctttttgtttagataggtgtataacatccaccatttaaagtggtcacatttcaaggcttgatgactttttacaaatgtataaacctgtataacc

SEQ ID NO: 157078 - DNA, 208 bp, Homo sapiens
aattactttttgaaacatttacttcagttaagagtgtatgcatatgtactagatggcaatgtaacatataaaagttgaaaaacacaggtttggaggatcataatgtaaaacacatatcttaacatatcatggccagctgtatggccacgtagctctttgagggttgggacattcttgatctatatatccctcatgcccaatgtcctac

SEQ ID NO: 157079 - DNA, 650 bp, Homo sapiens
gctgcatcgttttacattcccaccagtaatacacaagggttcaattttcccacatcctccccaacacttattttctgtttttccttttttgataaatttgtgtgtgtatatgtggttttttatttgtgtgttttgatgatagccaccctaatgggtgtgaagtggtatctcgttgtgttttcttggtttttgcttgtttgtacctttttacccatttttaagtgtgctacttagtagtagtaagtacattcttctttttgtgcaaccataataaaaatccagcttcagaacttttttcatcttcccaaactgagtttctgtacccattgaatagtaactccctattctctcctcccctgacaatcaccattctgctttctgtctctatgaatttgactactctaggtatctcatgtaagtggaatcatataatatttgatctttggtgtatggcttattttacttagcataatatcttcaggattcatccatcttgtagtatgtatcagaattttattcctttttaaggctgagtaatattccattatacatatataccacattttgtttatccatttatctattgatggacatttgggttgtttccacctttttgctcttgtgaatataatggtgctatgaatatcagt

SEQ ID NO: 157080 - DNA, 591 bp, Homo sapiens
gtgttttaggggagaacccgggctaggggagctcaagtgaaaaattacaaaggctggtcagtgtgagattaagctcgctgtgtctgctagctgataattacagtagttaggattctaccttcccagagagaccagaacagaggccatcctgtcctttctgatatcttttcaaagacactcctgaattgcagatttagagacatctcaaaaggacagagaaggattcataatttaagcccttttaaactctcttcagaaaggatgtcagggacctatccccaggtgttggctaaaacaaacagtaaattattctgacagccctgagctctttcagacaacactgagctgggttgtcccagaggtggccttacaccgcgaggagcagtgttaaactttcgtcaagaatcagcacagggctttgaatggagagttcatgccagagtttctgcagttctctggaggaaccccacaagcggattggtgaggaccaaccttggagaccccactgtagctactctaaaacattcagcctttctaaaaacagaatgaaacggcattgcactgtacctaaacagttcacatcactagtac

SEQ ID NO: 157081 - DNA, 528 bp, Homo sapiens
aattcttttcctaaatggatatgcccatgtatactttatcagcattatgtgggcatttctagcatcctcacccatacttgggattgtcagattttaaaatagttactaatttgaggcatgtgaaatgctatctcattttaatttacagttgcttgattattctgaatggtaggtaaaaggataggaaatttattattttctgtatgttttaaatatctcaaaaataaatgtttttaaaggaaaggcacactatcgtacaacatttatgttgaaaaggaccatgaagatcatttcatccaaccttcttactttacagtgcagccaaagaaagttaccagaataagagtaaaatataaaatcctgcccattgtagtattctctggtagtatgagccttaatttttgatgtaaaaatcatgtctttttctttatgattgtgctttttgtttaagaaatcctctttttatattgtctgctaatagttgaggattttttgttactctttgttatttgcatttaggttcatctg

SEQ ID NO: 157082 - DNA, 377 bp, Homo sapiens
tagctgggattacaggcatgcacctccacgcccggctaatttttgtatttttaatagagatggggtgtcaccatgttggccaggctggtctcaaactcctgactttaccacccgcttcggcctctcaaagtgctgggattacaggcgtgggccaccgtgcccggcccttgaatttttaaaaaggcagctgcttagtatagatcagattcttgtgaacttagtatagcaatcgcctatgaacacacatgattcctactgatctatttgaacagcagcaataacatttactgagcacttattccagagcagacattaggctaacaccatacatggcttgtcctgctgaattccatagcagtctgatgaagttgcttgta

SEQ ID NO: 157083 - DNA, 791 bp, Homo sapiens
gcctctaactccttttcggacatccccaccgcgcgctccggcgcccgctactccagcctacggccggccggtttagctccaggcccgctcccccgcggagccggaggacacccagggactggagacttcgcgggactccccacccttccacgcctctcagatttccaggcgctgggggccctgtgcgaacttgactggcttcagaaaagccgaaggccgagtttgtactggcgcgcccaagttgcgttctggactttggagatgccaactttagcccggacacctgggctgtgccatccggaccactcgggccgcacagagtatgcgtgaccctccccattccctggcagcctcgagttctgtctctctccgtctgtttcactctctccccttgtcagtatccacttcctccagctgaggggccttgtctcactattgggaaacgctctgcagatgtcaaggcttaagacaggagctcccgcccccacccctgtggtcaaggagggccaggatcggggtgagcagccaaagcgaggggggagtgtggaggcagtgctgctgtgtttgaggacagtgttcatctcttgacaggcttataaaacacatcttgagttacattcagtccataaaaatcttcctatgctatgggtgtctgactttgtctttcacaacttagaattatttttaactctttaatttctttgggactttcccaggtagaaaatcttcaaccatactggaccgaaaacagattctgatttataatacgagtgttggagtgaacgtcaaaa

SEQ ID NO: 157084 - DNA, 770 bp, Homo sapiens
ttttcattcctctttccaaatccacctccactcaagctttcaatctgtgcctgggctctggtttgaatgagccactgatatatttgcagccaccggggatctggagtgcagatgcaaatggcagtgttccctggtaagtgttggtgacaattggatctttctctgatttgcattcccaaggcctgcaggttttcagaaaatcacatcttataggcagttctggggaggggggaggtttattttcaatgtcagctacaaatgccggcccatgataattcttagaatgaaagacctctcatttgcaaaggagaggatagttagagccagaacaattcacttagcaaaaatttgggcccaaaaatatatatataggagaagggattgttggtgggtagagaggcctggagatcaagagcaagagatgagataaacacaagtttggaagccattggcttgtgaggggacctgagcacttagaatagaggagacccctcagggagagcttgtatggagagagagaaaggtgcatcctgaccccatcctgggcatttctctttgaaactcagccttgttataattcatttctaattctgatatcagcagtgagggttcatctaatctattctcatcacttcttgagcctctcagctctcactggtcctggctcttgcctggagatgattttactcaaaattctagtccaggatttagaattggtctaagtacagatgtgcatcaggaggctatttcaaaatcccagatgagctcat

SEQ ID NO: 157085 - DNA, 239 bp, Homo sapiens
tcatttgttttttccaacagattttcattgaacacctattatgtgttagatactatgctgtatgctgggctatatggttataaacaagacccacccttcatgaagtccattgtaggggagaccaataaagattgtgattgcaattatgaaggaaataaagtgatgatagaggcagtggggaaggccacattaatagagtggccagagagccctctctaccgaggtgtcatttgtgctga

SEQ ID NO: 157086 - DNA, 562 bp, Homo sapiens
cgataagaatgtgtaacaacgactcccaaagaaaatgtacagatttacttcctagccaaaagtatttagatttgaatttgaaaatgatgttattatttgaatttttatggaatattagaatgtttgaatcatatactcttctttcacccaatatcttttatttttaaaagaagaaactctatctaatgttatcaaaagagaaaccacttctttctttctgtttttgcccctgacggaggtgatggtggaagcccacctgccctggagggcagctgttgttgttgacacaggatttcgccatgttgcccaggctggtctcaaactcctggcctcaagcagtcctcctgcttcagcctcccagagtgcttagattataggcatgagctaccacacctggccatccttcctttttatttctatgaatatttcagttacctttgtacctgtaatatatatatcaatcccaaagtttattgttgtatgtgttttattttcatttgtgttttttaattataaagttaatgtgttcttttgttaaattaaaattcagaagtattaagtt

SEQ ID NO: 157087 - DNA, 567 bp, Homo sapiens
  misc_feature (22)..(22): n is a, c, g, or t
aggatccccagtatgtgtaacnacgacctcccaaagaaaatgtacagatttacttcctagccaaaagtatttagatttgaatttgaaaatgatgttattatttgaatttttatggaatattagaatgtttgaatcatatactcttctttcacccaatatcttttatttttaaaagaagaaactctatctaatgttatcaaaagagaaaccacttctttctttctgtttttgcccctgacggaggtgatggtggaagcccacctgccctggagggcagctgttgttgttgacacaggatttcgccatgttgcccaggctggtctcaaactcctggcctcaagcagtcctcctgcttcagcctcccagagtgcttagattataggcatgagctaccacacctggccatccttcctttttatttctatgaatatttcagttacctttgtacctgtaatatatatatcaatcccaaagtttattgttgtatgtgttttattttcatttgtgttttttaattataaagttaatgtgttcttttgttaaattaaaattcagaagtattaagtt

SEQ ID NO: 157088 - DNA, 297 bp, Homo sapiens
caggcgcatgaatagaagcctcagccacccacagcctcagtgcccggcagcgtgtctccaggaaggaaaggcccgggcacaatgcatttctctcaggtttggctcagcttccccggggatttgcaccatcacagagaaacctatctctcctccagggacccacagttggggaggccactccatgctgtcaccccttcctgtccctctgaaacgtttcttccttccactcatttctcctagatgaaattttaactagtattttcttgatattttaaatagacaattaaataaagtctt

SEQ ID NO: 157089 - DNA, 211 bp, Homo sapiens
tttggtctctcactgagaaaacaaggcacacacactaagcaaatatattcttccttgcattgtcatgtaactacatatctaaaatgggagccaccgtaatcctagcacttgggagacctgaggtcaggagttcaagaccagcctggccaatatggtgaaaacccatctctactaaaaatacaaaccctagccaggcatggtggcatgcacc

SEQ ID NO: 157090 - DNA, 375 bp, Homo sapiens
atgccagtgcaaacagtgggcacatgaggttttgggaaatccttcccctgaggttttgctgggtagagcctccatggttgcttttattggctggcattaagtgccagcagattttccaggtgcatggcgcaagctgtcagttctgccattctggggtctgaaagacagtagccctcttctcacagatccactatgtaatgtcccagcagagactctctgtgggggcttaaaccccacatctgtctgcactgccctagtaaagggtctccatgagggctccgctcctgcagcaggcttttgtttgaacatccaagcttttccatacattctctgaaatataggcaaaggctcacaagcctcaactcttgcactctg

SEQ ID NO: 157091 - DNA, 351 bp, Homo sapiens
ctagaggatcccccctgatccacctaaaaatcttccccactctgaggttatttaaaaaaaatatatatatacagttttggattctgcattatttctgttttcttcaatttccttttttactgttttgtttgtttgcttgttttactttgtctttaatattggaagcttccttcaagtatctggtcatccttttgtttatattttatgacgagacactaaaaagctgatagaaggtgctacgtggatgggcaggttggaaaaccggctttttgcatggtacaaccacctcagttcagtttctgtaagtcttttctctggagttttatttttttttccaaagaaggagcctct

SEQ ID NO: 157092 - DNA, 555 bp, Homo sapiens
gacagagaaataacacctatgcacggtggtgcatcctaaaaagcaggaatttccctaatggcaaggaaatcaattgctggggctgttcagctgcagggagtggaagctggagccttgtcagctcagcagggtgcctgccctctgtgcgggagcacctctgccctgaaagcttctactggtggagttgggaaccggcaacaaattgagcagaaaggaaaggagaaattgatgtgtgacatgaagtaaaggctaactacaggtttcctcagatcagagacaactaatgctgagcttgtctagcctagctctgtctagcgctgctgccagtaggtgagatgactgtggttcaagggaagaagagcccattgggagctagacccaggccagactggggagttcacccccaggggtccttttcccagacccaagcttctttcatgatgtccgctgccaaaaatgtcagcacatgtgtgcccaaatcgaaaaatcccaagaaaagcacaatcaccagattcccttcagtgaaaacatatcacagagaagaaagagcaaaaa

SEQ ID NO: 157093 - DNA, 586 bp, Homo sapiens
agaaatagacccatgcaaacatggcaaaccaatttttgatggaggtgtaaaagcaatagaactggagtaattggatatcaaaaggtaaaaagacaaaaacaaaccccaacctaagccttgcgttttacacaaaaattagctcacattggatcgtgaacttaaaactatgaaactttttggagaaaatatttgggaactggggcaaggcaaaagttagacttgacaccaaaaacacagtccataaaaggaaaaacataaatggacctcattaaaattaagaatttttgctctgcgaaagaccctgttaagaggatgaaaagaaaagctacacagtaggagaaaatacttgcaaatcacatagccaacaaattactagcacactgcctatagggttagccctgctctccaaggaatagcaaaaataaaataaaataaaaatgtctggaatacataaacactaccaatattaaacagaaaatggagaaaataatccaattagaacataggcaaatgacacagagctgtttcaccaagaaagatatacagatggcaaattagtgcatgaaaagatgttcaaagtcattag

SEQ ID NO: 157094 - DNA, 661 bp, Homo sapiens
tttccagtaaagggctctggaatccaggtctaatgagtccataccctttccagtaaagggctctggaatccaggtctaagtgccatgtgattggtttaggaatggaccaatgagacactgtgaggaagtttcctgagggcttctgggaattttctcataatagaaagctaccagaattcacaggcccttttcatcttgacttcttgtccatagacctgaggccaggggctgtggcaggcattttgtaggcagcctaagggtgaaacatgcacaagagagaacaagacaacaccacagagaagcagagctcagtaatggctgagccctgcctcacctccaccattcctagaccttctcagtctcttagccaatgaacagccttgattttaaagcaatttttatttgagtttttgcttctggaagccaaaacaaacattttagcctatggaatcccaatttatacttaacgtttttatttgttaatctttaagtttcagaattcttttctgattataaaaataatacatacttattgtagagaaccaagaaaacattgaaagatataaagaagaacattaagaccatccataatctcactatccctagataactgctattgagttttgagttagtttcctctttatgtatccaaacttacacg

SEQ ID NO: 157095 - DNA, 354 bp, Homo sapiens
ttacttacaggaaaatcctctcatatcatccactctctatctaccttcgccctgtgaactgcagcacacacaccatcctacagctagtgggagattgacggctgtatcacctggaattggaattaagtctcccacagccattggagtagcttttatggacagaagaaaccctttcccagcctgcacaggaaaaagaacataaaatgtgaaaccaggtcttaagtaacagctggggctaaagtatgtatcatcaaactgattatactagtgcaataagtgaaaacagctaacatcgatccactgcttaacaggttcccacactaagtctgacttcgtcagcctatcctagcttcc

SEQ ID NO: 157096 - DNA, 392 bp, Homo sapiens
ggagtttagaccatcaattaacaggtctttgggttactgcaccgtactgtcagtgtgataccgcaatcactattcactaaacataatgtatcattcttaggttgtagacatgggaatcagagttaacaagaggtctgtagttgaagttctagaaatacgtaggtctttaaaataatcctacatttcaattgcccttttaacctcttataaagtcttttgagactttataagtctcaaaagtcatagttagccttttgagaaaaaaaaatttttttccctaaagaaatcccctccaccaagccccttatcacattacaacactgcctcaacagactgcacactctgacataaatgctgcaccaacattttctgtttgcctcctcttccccaaa

SEQ ID NO: 157097 - DNA, 334 bp, Homo sapiens
ctcattagagctgggtttgtgtcataagtgagagagccctgaggtgcttggtttgaagcaaagcttggttagccatcagcatctgattggagactggtcccaacccacccatgccgctgaggaggggacatgggtgctggccagcaccgagattagaacactgacccggtgacatgggagactgtggtttccctcatggtacagaaacataaaccatacttgtttttgagatgtctgaccctgacaagactgggaaatagagctagcgactgataagtgttcaggggcagggactgcttcagtttctgtcgacgcggccgcgaatttagtagta

SEQ ID NO: 157098 - DNA, 155 bp, Homo sapiens
ctagactgtccattctgaacttgggccagatcttaacctgctggtaaagcactggctgagggtttagactttcaaggaatttgaggttgttttccctgccttattgcaacccagtgtctggctgctgagaccagaggcttgggccacccaaggga

SEQ ID NO: 157099 - DNA, 529 bp, Homo sapiens
cttccaggagggttctctactttcagtccaggttcactattgcaaccactgggatttcagaaaacagctatgacttagcatttattttttatctgtgtttggcaaagagataacccagccttcattcataactggcctatgttgtaattatatgcctgtttggtcatctcaaaccaggtgaccacagtgtgtgactacctaggactctaactgatgaccagctggaagctgcagctgcgggagaaagctcaaccacttagatgtgtgagtcacaggcagaatatgatgccaccgctctggaatcttctggctccctgtgtgcttgcaacttgaaattgaaggtgtttactttagtctataaaacaaaccccttatggctaatgcacaagttaccttcacattaatctctcttcttataaaccctagttgagaccagttggtatatcacttaggcactctaaatttatgcttcagaaatctgaatgcaaaaaaacattttaagtcctacagaagacccatgcttttagaa

SEQ ID NO: 157100 - DNA, 541 bp, Homo sapiens
tggaataccaaaaggagaagagaaaaagaaggagaagaaatatttgaagtagtaatggatgagaattttccaaaattaatagcagataacaaactacagatctgggaagctccaagaacaccaagcaggataaataccagaactacacctaagcgtatcatgttcaaactacagaaagacaaagaaaagattttaaaaacagccagagaaaataaacactttacctatatagaaacaaaggtaagaattacatttctcatcagcaactgtgcaagagagtagtgtgaaatatttgtgtcaaaagtaaaaagaaaacacccacttagaataatttatccagcaaaaaaaaaaaaaaaaaaacaaaaaaaagtttggttgcggccgcgccctggggccccgagaagaaagttttcaaaaccccttggctgtgggggcgcccggggcccccagggtgttggtggaaccggtggcccaaagcgggttccccaaggggagaccccgggcccggacctcggggcggggtttctccccataaaaaagt

SEQ ID NO: 157101 - DNA, 375 bp, Homo sapiens
aacggggtgtgggggctgggaagaattggagaggggatccctgaagagcccagagccttgactcagctggaggcggtaccatgggtgctggtgccccctcctgccccaaggctgggcaggaccgctgcgcgccagtggaggcctcggtctgggctctgtggcttatgcctgtgagacgcgggtggattgcttgagcccaggagttggaaaccagcttgggcaacatagagaaaccccatcttaagacaaaatcagctgggggttgtggtgcacttgtggtcccagctactcaggaggctgaggtgggaggatcacttgggggtcgaggctacagtgagtcatgatcgcaccactgcactctagcctgggtgacag

SEQ ID NO: 157102 - DNA, 179 bp, Homo sapiens
attccagaaagaagaaatagcaaatgcaaaggatctgagatgttcaacgactaacaaggatgccagagtgttggagacgaggagcaagtgagggagtgaggagatgaagtcagatgtgggtgatgtgatcggggaagtgagaaaatcagcagacagtgttataatttgcaggcaattgt

SEQ ID NO: 157103 - DNA, 305 bp, Homo sapiens
attcactcctttttttcattcatttcttcatgtgctgttacatgtacctaggaacatatagcttagtagcttagcagcttagcactaggcgctgggcacaaaagggtggagagggtgtgtgcttagccttttgtggctggtaactctgggcccagagttgaggggaatgatttgactggcgaggcagactctgcttggtcccattgtaaaccagtcatagaagagatgcctgtcctgggtaggggccctctcttccttccggtagtgttctgagcattgtctggatgacaggcctattgagcagt

SEQ ID NO: 157104 - DNA, 278 bp, Homo sapiens
gagggatttctagggaaaggggtcagcacaggcaaagaccctatgatgggaagaagctgggcacagcttgggattgaatgaatgccaatgtggctgaagggtggtgattgaagaggagggggagacgagaaggtctggaaggcctggggcatgatcagatcaggtgctgaggccgtggaagtagatgggatttttcatctaagggaaatgggaagtcattagagagttttcaggaggggatgatatgtatttttttaaaattgagcattatcctcggt

SEQ ID NO: 157105 - DNA, 254 bp, Homo sapiens
tcacgcctgtaatcccagtagctttgggaggccaaggtgggagtgtcacttgagcccaggagtttgagaccagccagagcatcaaagtgagatgatgtcacaaaaaaattagccaggtgtggtggtgtgtgcctctagtttcaggggaggctgggaagggaggattgcttatgcttggaaggtcaaggctgcggtgagccttgctggcaccgatgcgaatgcattgggtgacagagaacgggtatgggtgacag

SEQ ID NO: 157106 - DNA, 409 bp, Homo sapiens
atgttgcaatacagtttccacctaaatccaaatgtttttcaggtctaattgtaaactgctacttttgtttaatgtggacttacatagtcttctgtatcaatacctacttcgctggcagttttgtcaaagtgtgttgagttgaggcattttgcattatatccgacgtggtgttagcattccttcttgtagcaatcaatttcatttctatttgctgttgtaactcaaagttaacgaacattcaaagtttactttcatttattcatgcatttttttgtggactgctctacaaaagcacctttcttccttaacaacattctatccaaactgagtgcagatgaatccgagtagtttcattttagagagcagcagtcatatttgtattaggaaggcaatagtcttggaagaatac

SEQ ID NO: 157107 - DNA, 555 bp, Homo sapiens
tggtagagacagggtttcgccatgttggccgggctggtctcaaactcctgacctcaagtgatccgcatgcctcggcctcccaaagtgctgggattacgggcatgagccactgcgcccggtgatcaaaagctgtttatagtgaagaagtgacaagggaagccagggacagaccacaggccttcacaatagcccttcacatgttacccatcgccccaccaactctctctctctctctcaggtccagctttgagcaaaggacataggcaacttctccccgcatctatacagaccaggcccctgggcagggtggggcgtggctgcctcagtttctacgtctccttgttttccatctgtgactttggtcgtttttgccaccttcatctctgtctctaacttccagtgtctgtcgcctctgggtagtactaatagctccctttccatcgtggtctctttcttcctccctgtctctcccctttcttgttgtatttattcctcactcatcaaagcccatctttttcgctatggtccggtgcacttctctctagatccctttct

SEQ ID NO: 157108 - DNA, 158 bp, Homo sapiens
taagttcttttgttcttggtacactttcttcctttttcagactggatcctaatgactccaaccactaaacaactcaatctgttcagagagagaggaactgtttatgtgagttggttgtgtagtcagaggttgtgagttgtttcttcatccatgctgag

SEQ ID NO: 157109 - DNA, 147 bp, Homo sapiens
aagcaatcctcctgcctcagcttccccagtatctgggactacaggtgtgtgccaccacacccagttaattttgtttattttttgttgaggcggggtttcaccacattgcccaggctggtctcgaactcctgagctcaagcgatctgc

SEQ ID NO: 157110 - DNA, 123 bp, Homo sapiens
gctagagaattctgatctctttcaaggtctataaaaccctcttaactgctactttatagacattcaattacaacaggccataatacattaaagcattaaaatacacatatatcccaacatatg

SEQ ID NO: 157111 - DNA, 810 bp, Homo sapiens
aggttggttggaaggagttgaagtgagccagtccacactctccacacatctaggatcaagtggcctattcgccaccatggctacgactagctgtatcagctgtgatcatgaaccctcacatttgcgagggcaggcagagggagtccctccctaccacgtggtcattgccttccctctttattattaacccctttcatagaagaatcagctgaagcctagaggtgtgggatattttgcacaaacctatgctggagcaacaaggggagccaggcttggaactccatttgtctgattccagagactgcactccccgccagtacttgatcctccccacagccgccgtctctccaagtcaaaggcccctgaagttctccctcactctgtttcaagtggcaaaagccccaggctccaggcctgttcacggactcccgacagatctcctgcagcttttctcttgctcctgcttttactgggaattataactatttcagcagttttagtgtttgaaggaagctttctctacgtatctttcctccctctggggacaggattgctttactcatcacagggaaggccttaaatgaccttctgctacatccacagattttatttcatctctctccattagaaataaagatgaaggcaagaccatggtttctgagttctcttagtctccacagaatgtaattactacatttttttctttttctaatcacaggagacttctctcagcaacctagttactgattctattactccctcactctccacttccaactgctctttgaagcggcttttttagggaaatta

SEQ ID NO: 157112 - DNA, 143 bp, Homo sapiens
tcctttgccaagggattaataaaaaattgaaggctcagaaatgcttcttcagtggttgactgatagtttgtttacagtaaggtgggtggaaaggcaaccccagctatcctcctctgtctaggggagaaattgcctcagctctg

SEQ ID NO: 157113 - DNA, 383 bp, Homo sapiens
ccccatctctactaagaatacgaaaattagctgggcatggtggcatgcctgtaatcccagctacccgggaggctgaggcaggagaatcacttgaactcaggaggcagaagagttatataatttttggacattttaattgagaatgtattacacacatcagtgttttaagaaggctaaggagaactttcaagatcgtctcttttcatggttctctacttgagtccccaccgaatactggttagaatctaggtgttcttatcccaaactaaactaatggtcactttctcctagtttattgaaagttattgttatgctctatgataatctattaactgactattaattgttaaaccaatggcttaaggatagacaacaatgtagtg

SEQ ID NO: 157114 - DNA, 436 bp, Homo sapiens
tacgataaagcaagaccaaaacgtggggccctctagcacaggctgatctaaactccttcaaatgattattctttaaatagttctacatttccctagtgggaatgaggataaattgattttctaaattatatatatgtgggccaggtatggtggcttacgcctgtaatcccagcactttgggaggctgaggtgggtggatcacttgaggtcaggagttcgagaccagcctgaccaatagacaggtgaaaccctgtctctactaaaaataccaaaaaagtagccaggcgtggtggggtgcgcctgtagtcctagctactcaggaggctgaaacaggagaattggttgaacccgggaggcagaggttgcggtgagccaagatcgagatcaatcatgcccctgcactccagcctgggtgacagaggaagactccatctcc

SEQ ID NO: 157115 - DNA, 196 bp, Homo sapiens
tgcattgtggtttataatctctgaattttctttctaaatctactagaattatactaaccttagaaagttcatctatatttcacctctttcctgattgtagaggtaattatctctcagctatcacatgttgttgaaaattaaatgatttaacttttccaggtacttctataaaatcagaactattaacacttcaaag

SEQ ID NO: 157116 - DNA, 558 bp, Homo sapiens
ctaagattaaaagttaatagttgaaattaaatttaataataaaactgaatgtgtcattcagcattaatttttggtagccttatgtttcaatttgaacatcaaatattatgtaaaactgcatgctctgaagcatctatttaaatttggtacatttttgcagaagagcaacctggaaaaaaattaaataaataaatttggaaggtttgaagccttcaatgttctggggctcaggagcctaaaatcaaatgtgccctcagaaagacttaatattattttaggttgtgcacatttagaggtcgcttctcagaacttaaacacctctaagagttttattgacactctaacttttaaaacaacttccttggagactagtaccaagagaggaagcaagtcaaatcttgcatctcatacttgccctaaacatgagactcctgttattttagatcaaatttatactagaaggcaataaagatggcaactcattcaccacttgtttactcagtaatataaggtatttattctctagctgctcttcatttattcaataaagacattggg

SEQ ID NO: 157117 - DNA, 171 bp, Homo sapiens
tgtgattgaaagtctgtatgatttcaaagtaatttgagttttgactccacattggcatttccatcaatttactgtgttgttccttgcttgcttattggtctgtttacggtatgcttttaggagtaaacaatttactcctgacctgtaattatcaaagttgttggatattga

SEQ ID NO: 157118 - DNA, 142 bp, Homo sapiens
gttgcagtgagccgagatggtgccactgcattccagcgcaggcgacagagtgaaactgtgtctcaaaaaaaagaaagagctgagaaatttaaatgtgttttaaaatcttgagttgatactgatatgttgcactcagaaccag

SEQ ID NO: 157119 - DNA, 196 bp, Homo sapiens
cctggtatttccacccggaagagggaaaggattttaactacaaatacaggaatccagcagatggcatcagagaacactataaaaaagaaacgatttgcaacagccacctctcttccaaaacaattccttacttctgtggtctgcaaggcggttttttgaatggaacagaacatagtaatataggaaaacacaatga

SEQ ID NO: 157120 - DNA, 403 bp, Homo sapiens
gaagtttgaggctgtagtgagctatgatcatgttactgcactccagcctgggacttcctgtctcaggaagaaaaaaaaagaaaaagaaaaaagacttgagcaagtggagaagagaggtggctagtgtagacatggccagtttccatggggaagcgtggggaagggtgaaggtgtgaatggaggattaaggcatattgttaagtagtcttgatcacaagactaaagagttttgatttcattctttaggcgataggcagcctttgaagattttaaagcaggagagtaacatgagtaaaatagtgctttttgtttgttttattaaaagagtgcttgagcaatctaggtgttagataaacggagaggggagaggctggcagagatgctgaggcttggagctagggtg

SEQ ID NO: 157121 - DNA, 515 bp, Homo sapiens
tgaggatccccctgcctcccggggagcaatagcagaattaatatctgggagcgttgataattatatatcagaatctaatttttagcacagaaaatgtgttaatgacagagaggaaaacaaaaaccactagcttctcccagcaggccccaaagtgtcatttattatttctcagctggatatctatcaagtttatgggttaatttttctgtagactgttatttatgggtttttgtttgttttcagccatcattactaacaatacggttaatagcaatcatttgttatccagtactaggcgtgatgcttcagatgagagcactgaactgagaatactcatttggtagctgaataaggccctgacagggcccatttataacaagctcattctataatgtccatcctattaataaaattttgttgctgtctaattagagatgtctgatgtgtataggagcacggcagaggagactttttgctgctgcctttttccccccgcttcccctggtctcttctgt

SEQ ID NO: 157122 - DNA, 163 bp, Homo sapiens
tttagtaagtgacttgatgctctgagacactgctacacaaagtagctagcctatgaactctttctgactggttcagaatgagaaaaagctcttgttccagaatgtaaatcaacatatgatttcatttactaaggaagtcttgctcagaaaacattctgactga

SEQ ID NO: 157123 - DNA, 118 bp, Homo sapiens
catggatgccctcagctatctctcaggctattgtataaatggagacttggttcgttctgtagagcaaccagttatgtaggcaaaggctaaataacgagggaggagacggacctcccag

SEQ ID NO: 157124 - DNA, 724 bp, Homo sapiens
  misc_feature (405)..(405): n is a, c, g, or t
  misc_feature (428)..(428): n is a, c, g, or t
  misc_feature (436)..(436): n is a, c, g, or t
  misc_feature (440)..(440): n is a, c, g, or t
  misc_feature (452)..(452): n is a, c, g, or t
  misc_feature (459)..(459): n is a, c, g, or t
  misc_feature (466)..(466): n is a, c, g, or t
  misc_feature (476)..(476): n is a, c, g, or t
  misc_feature (485)..(485): n is a, c, g, or t
  misc_feature (509)..(509): n is a, c, g, or t
  misc_feature (517)..(517): n is a, c, g, or t
  misc_feature (524)..(524): n is a, c, g, or t
  misc_feature (529)..(529): n is a, c, g, or t
  misc_feature (535)..(536): n is a, c, g, or t
  misc_feature (548)..(548): n is a, c, g, or t
  misc_feature (574)..(574): n is a, c, g, or t
  misc_feature (580)..(580): n is a, c, g, or t
  misc_feature (593)..(593): n is a, c, g, or t
  misc_feature (600)..(600): n is a, c, g, or t
  misc_feature (622)..(623): n is a, c, g, or t
  misc_feature (633)..(633): n is a, c, g, or t
ctaaaaagtttgcacaaagaattgaatatagctagacattgcctaagtattataatttataataattaatacatgctaaatatttactatgtgtcaggcactagtctatatgctctctcatggattacttatttaatccttgtaacaacaatatgacacaagtacccttaatcctgactttcatttgagtaaactgaagcacagaagttaaattacttgcgtaaggatgtgtagccagtaagtcaaggagctgagattcaaatcctggcagtttttactccagagtctatactcttaaccactatacagcttcactgagaccttcaagctttgctttccttgtttctatagttttattaattgtgtgtgtgtgtgtgtgtgtgtgtgtgtgtgtgtatgattttntaattcctagtcatttttctatngattgttntgcnaaagccatttanatcttanggatatngataatcttntgttatatntgatgcaaatatttttttccagtntataggtngcctttnaattntgtgtnncaggtagataanagttaaacgattttcttaggttagtntatcantgtggtttctgancttgttntgtgtagatcttttccaccccnngagtacatanatattaatccatactttcttatggaacttgtatggtttcgttttttacatttaaaccttcttccccgtggtgtgtgattgtgtaactgttg

SEQ ID NO: 157125 - DNA, 255 bp, Homo sapiens
aattttttgtatttttagtagagacagggtttcactatgttggccaggctggtctcaaactcctgacctcgtgatccgcccacctcagcctcccaaagtgctgggattacaggcatgagccacgcacccggcctgactcctttttaatagtgggctttagaattatatagacttaattcattaaccaggcttatgttgtatggaatactacttgaaataaatgagctattggccagagtataggatgctttttac

SEQ ID NO: 157126 - DNA, 221 bp, Homo sapiens
gcaagagagtgagactccacctcaaaaaaaaaaaagaaaaaagaagaaaaaaaaggacagcagacaatggcactctgcaggtggaactgcttcatgtttcccactcctgtccctgttcttcaagagccggcctccccttctctctgctccatccacatgggtttcaaagaagcttagctctttctcaccccagggtttttttctttctttttttttttaaa

SEQ ID NO: 157127 - DNA, 482 bp, Homo sapiens
tctgctcccataatccaatcacctcccacaggtccctcccccatcactggggattacaattcaacgtgagatttgggtggggacacagagccaaaccatatcaagggtctacaacatacgcaatggacagtacaggtggtccacagtgcaaactgtggcactcactattcactgctagtagcagtagtatctaccaaatctgtgataagggtcacagacccaagcctgtttttctagtatcccaagcctagccccaagtctggttttccagtattccaagtaattctgtagctacccagaatcctttcagtaaattatttctttcgattggccaaaattgggttctgttgcatgtaagtaataaccctgtgagatcctgaaccagcacaatcagcatcatttaggaactttgtagaaatgtaaattatcaggcctcaccccagatctagtcaatcagaatatctgggttgtagggaccagca

SEQ ID NO: 157128 - DNA, 377 bp, Homo sapiens
actagctgtgtgattccgatggagccacttaacctctctgagctgtgggatcttcctgtataaaagagacaaccacgtagtgcccacctcaaacagtggttatcaggattgagatgatctgtgtaaagcatttagtgcctatgaagcacttcttagtgtataaagcacttagggtgtaaaaggtgcatggtaaattctgtttgtcgcccgggctggagcgcagtggcatgatcttggttcactgcaacttctgcctcccaagttcaagtgattctcctgcctcagcctcccgagtagctgggattacagctgtgcaccaccatgcctggctaatttttgtatttttagtagagacgggatttcaccaggttggccag

SEQ ID NO: 157129 - DNA, 583 bp, Homo sapiens
gtccacaagtatttatcacattacatttacctattttaattgtttacctagattatttatgataactgtggtagtcataatttaaagttgtgaaaccgccattgcaaaattataactgagacagtaaaaaaaaaaaaaaaaaaatatggcctaacagattccattttccttttaacctccaaactgtccttgttcattcctaggcataggctgaactaactttgggaggaacttagtttatagtttaactttaaaacaaagatggtaacagtcctttctcaaaacaaacctctctactccctgtgtactacactgcctaaagccacaggattagaacgtatggtaatctaggccagatgcagtggctcatgcctataatcccagagctttggaaggccaaggcaggtgggtcacctacggtcaggagttcaagaccagcctggccaacatggcgaaaccctttctttactaaaaatacaaaaattagtggggcatggtggtgcacacctatagtcccagctactcaggaggctgaggcaggagaatttcttaaactcaggaggtggaggttgcagtgagccaa

SEQ ID NO: 157130 - DNA, 768 bp, Homo sapiens
ggcttggcagtcttctctctcaacagaccactcctttctcctttcttctcctactctctcccagccccttgaactcaaaggaccgcatgctttcagccctttctctcccccaacacacagcagccccattccccttgctcccactatccccgaatcaaccaggagtgagcagttgcagggacaacgcctgcaggtctcctctcccactccctgggaactctggctccaaggaaaaggctcagacattcctctctccccttctgccacccaccagatggaagggataattttgcagaggcaatgggagcatatcccaaagaagccaaaatgacatgttcaggagagaacagagttgaaggaccaaaaggggcccccagctgctgacaggaaactcagagtcagtgagacctccctcccccagaaggcgtacgccacccactggggctgccatcccctctaccaggctgaccgagggtaccagactgactccttgctaggggtgggcagcagaaggaaggctgtagtggacaccccagcccaccaccctcaacagcagagcttggctatgctagacaggcaaggtccagggtaaaaatagagccagaggaagcatggcccagtcctgtgaccacccctgcctgccccaccctcctcaatccctgcctgggcagccactgcagacatctaccacaggcctctggagccagcccagctccaactgctctctctccatgccccaaccctgattccctctggctggggtacaga

SEQ ID NO: 157131 - DNA, 388 bp, Homo sapiens
taacacttatgaattccacttctagatatatactcagaaaataaagatggcactaagatcttagaagcctgatacagtaatatattttagacaattatcccataaaatgaaatattttgtacttaatgaggtaagtttccatcatccaagaaaattttattcatgtgatacatcttccttttatcatgatgctggattgataaagtaatgatataaattgagaggtttactaaattgaactacgtaaaacatggaaattctaagattaggatgatgagtaaattgagccaaatggtatttctctgaaaagctgttacaggaaaaaaacaagtaatggaagcttcacctccagagccatttaagagcagggtgtctattgctagatatt

SEQ ID NO: 157132 - DNA, 342 bp, Homo sapiens
atctatactgagtcactggaaagaaaataagcacttaaatttgttgattatcagaatggtatgcaatgtctgtatgttctgaagtggctgtgagaaatgtagtatgtgtttaaagtctgtaatcttattgtaactgaagtaactgtccattattcggcctcctcatctgcaaaatagactttctataaaagtaataatggagaaaaatgggctaaaacccagaaaaccttgatccaagtcagacctggacttgtcactaagcatcctcttaagctttggtttctttagttaggttataaagtatgttccaactaatatgtttctatgaaaaaaaatgctgta

SEQ ID NO: 157133 - DNA, 262 bp, Homo sapiens
gggggcagggacagcggaggggctacaagaaggccagccctgaaaaagcaagggacccacagatccccaccaagcctgctgcagctgcttatgataaaggaagggctatatatttcagtgattggcaagctcgtccaacctggaagtgggtggagttccgttgtcaaggccaggcctagggccctcccactttccgtcttcttgtttcttctgcacccacgtgcaacactccaggcagcacctgccagtggtacccacttcc

SEQ ID NO: 157134 - DNA, 424 bp, Homo sapiens
gcacttcctcatttttctcagaagcagtacctgaaataaaggcagagtccttgtctgcctctatgtacttgataccagcttgtcaagacccacccttcccttttacctcgtctaaaattcacaccagtggacagcagggcctgcagcatgtctgtagaaatttatttaaacttatgtatgattcatagaagactgagtactttgatttgatggggatgggctatatttcttccaataacaaattaatggattagttcataagattagctacattatggaacaaatggaggagatggaggatgagttagttttagttacaggaggaataaggtaataaataacttcaagtagaacaataaaaatttggacttctaaataatttggataacccattttccaaatataggctaagccctgctgtggt

SEQ ID NO: 157135 - DNA, 402 bp, Homo sapiens
cattgcaaccctctctgcctcccagattcaagtgattctcatgccacagcctctcgagtaggtggaattacaggcatgcaccactatgcccagttaattttttttgttatttttagcagagacggagtttcgccatgttggctaggctggtcttgaactcctgacctcaagtgatctgcctgccttggcctcccaaaatgctgggattacaggtgtgagccaccgcgcctggccacatagagatattttaagctttgggaatgtaaggagaggatataaaatgaacgagaataagacccatgtctgagcacggtggagcaccacttttgaagacatctggtaggtaggatgggaagagccagaggaactgggaagctgggaaggctaagtgttacagaagcc

SEQ ID NO: 157136 - DNA, 536 bp, Homo sapiens
aatcaagaattcaaccacttttacaatagcagcaaaaaaaaaaataaaatacttaggaatatacctaacaaaggagttgaacaacctctacaaggaaaactataaaatgctgctgaaagaaatcatagacaacagaaacaaatggaaacacatcccatgctcatggatgggtagaatcaatattgtgaaaatgaccatactgccaaaagcactctacaaattcaaggaactctccatcaaaatatcaccatcattcttcacagaagaaaagaaaacaattctaaaattcatatggaaccaaaaaagagcccacacagtcaaagcgaggctaagcaaaaagaacaaatctggaggcatcacattatctgatttcaacctatactataagtccatagtcatcaaaacagcatggtactggtataaaaataggcacatagaacaatggaacagaatagagaacacagaaataaacccaactacttacagccaactgatattcaacaaagcaaacaaaaacataaagtggggaaaggggc

SEQ ID NO: 157137 - DNA, 840 bp, Homo sapiens
ggcatgtattagctctagaattaccacagttatccaagtaggagggtgggagcatctggtgttcaccagatgctcccaccaagaggaggcagttggaagagtagttccatcttggccaggttcagttgctggtgggcagcctaccagagaatactcacaggcagtcgtggctgcagatggggacctgagcataaacctttggaaagatgcagtttaggacaggggaggagaagggtgatcagaagtatggggaaaaccaagagtctggatgctcaggaagaatccgctggaaggaggagtttggtcagcagcatcagatactgctgtcattttttagaaagatgaaaagagcaacagtccttggatttagtggttagaaggtagtctttgttgctttctggaggaccatgtcagtgaagacgcagaaactgcatttcgggagaggatgtggatggtggggaagcagaattggggctgttagagaccttggtgcagggttgtggtggaaggaggggatggagcagggctaagaggcgtggtttaggagtggggagatgtgagcaggtttgtggactgaggggagaggagctttggtggaggaaaacattgatgctataggaaagcaggaagatggaacaaggtcttagaagagctggagcttgggctcactggtgcagtgctcccttggagttgcacctctctggccaactgtatatgtactctttatagtctttctctggtatatacttaaggaacattttagaatgtttacaaagaaggtcaggcatagttaataaaaaatggcatggtttgagtggtatgtaagatatttgaatggtg

SEQ ID NO: 157138 - DNA, 310 bp, Homo sapiens
ctctctgtactgaccttacttgactgctgtgtggcatttattatgctttaccataccaccttcctgaaacacgttcatctaggggtttccatgccattgcgttcacctgcttttccttccttgtcactggctactccttctcagtgtcctttccttgttcctcctcttccacttgacctctaaacacggaaagacccaaaggtctgctcttgctacacgctccaaaggtgatctcattcagtccaccaccaggtcaggccaccccttgcccaccacaatccagccacactagacttctttggctccatga

SEQ ID NO: 157139 - DNA, 377 bp, Homo sapiens
ggagagagaggagagagaggagagaggagagcgagcatgggaatgactaggagtgcatcaccagccctgaggctgttttatgtgtcaaccccctgccagctgccaaagtatttaatagatggctgactactgtaaaacaccaatttttggaagaggaaatgaatgttccaagaggtctaaatgacctgtccaaagcctgttaagtgtcagagtcaggattcaaaatatgcctaagtccggagcacatgccctccctcgactcagcctcctagagccagcagtttcagactactctccctgcacaggcaccaggggaggccagagcagtaacctcagtccaccccaacagcagttcttgtttgcatggaacaagcaag

SEQ ID NO: 157140 - DNA, 489 bp, Homo sapiens
ccttgtgcctgttgctttccttctccgggctcttttcccatctgtgaaagctgtttaaggtcttttcagcccaggatctggattatagacatctctgacatgaggtacctgctatggccccactagaagaatccattccacttcccagcctgggctatataggtcattcagtacccgccatagagccagatcttgtgtggagagagaggatgcaggattccactgggtaggcaccgactgtccagttgacccacttgtggtgctgatgcctaggcagcagggctgtggtcgggcttgaacaccatggcctgcgcccctctggagatccagctttccataagcaggtacagggcagccatgtttgttctccagtgaagcagcaactgccctgctccctggtgcccaggctggatgctacccagaatgcactttcagtgaggtgttagctacaaggccagactataaccttgagttcagcctttggagact

SEQ ID NO: 157141 - DNA, 291 bp, Homo sapiens
ggcatctagggagtggcctgctcacggttcctctcctgccagtgtaggacaaacaggacagggcagagctgtgcccgcacctcccagagggactgtgcctgtctctggaggagaccatgaaaaggaggatggggcctctccaacgaggcacacgaacctgttaatgtgaaattattcacaaggaaagaggacactaaattaaattagagtgaccttattttgtgtttggaagatgggcttggtcacccccgagagcctgctgcattcatcaccctccccaagggaaaaatt

SEQ ID NO: 157142 - DNA, 358 bp, Homo sapiens
ataaagcgttgagaagtataaagcgttgagaagtataaagcgttgagaagtataaagcgttgagaagtataaagcgttgagaagtataaagcgttgagaagtataaagcgttgagaagtataaagcgttgagctcaacgctttatactgtcctcttggtggtaatccttccaagagtggaagtaggtgcacaatggtgttactgctggattgcaggctggaggactatcagaactttctttcttttttttttttttgggctgtcagaggacctaagcagaaggcttcagatcactccagactccaagggggaacagtccagcctcttgattcaaagagaaccctcctcaaggttgagg

SEQ ID NO: 157143 - DNA, 301 bp, Homo sapiens
tcccggaaataccagcgtggtatagattggtatttcccaaaattcttctgttgggggtccttttacaaactctcagtactcatatattaaaagctctgaaactcctacttaacattgcccaagccagtttctccatgctattaaccagcatattatagcaatccccagaactacttgctctgggatatatttatttatggaaaagaccaaccagatgaaatatcagaagactggagtccctgttccaacaccattagcatactggacaagtcaaccaaatatttctgtcctaccacctatc

SEQ ID NO: 157144 - DNA, 353 bp, Homo sapiens
tcggtggcgttcagaggatcccggaagcacactgcaacaacgtatttaatacaaagcagccttggggcggggcggggcggttaacaaaatgcatctcagcaccagcctagagaaacttttctgtgtgtaaacagaagaggggttaccatggagaaattcattacggatttcgggagggctttttcctcagacatagagtgaaaagaataagtcgttgtgcaataaatctgatactgacgctgtgtgacttagaagttggtccaaaagttcatcttaggcaattatgcctagatgatcaactacacatcttctgcaacaggtgacacgaacctgttgcagtgtgcttccgggca

SEQ ID NO: 157145 - DNA, 189 bp, Homo sapiens
aatggactgtttacgctgtttctctgtgtctttattctaaagactcttgtgtacacatgaaataaaattttgtatggcttatcttcaattaatctgccttttttgagttgattttttagtgaacattaaaagggctaagaagaaattttcccttggtcctgataactgctagtaagaaaagggaagaaa

SEQ ID NO: 157146 - DNA, 282 bp, Homo sapiens
ccaaaatatttttaatgggtgacctgtgactaaagctttcatatatttttaaaaggcctaccttcttacttactgacctcctatgggatacccccttttttttttaagtctttctcttttttttaagctatctctttgatcatctatcactcagcaattgagttcatcatactaattctgtttatatgagcatagaaaagaataaagaaacattagaaaaggtgagactatgcataaaagattttcattcattaagtaatcgattgacatagattaaaaatt

SEQ ID NO: 157147 - DNA, 218 bp, Homo sapiens
ctctagtactctaatagtcgaatcaccattgtcactcacttggattactgcaaaagccttttaagtgttgtttctgccctaatcccctgtggttacgcctcaatgcagcagccagctcacatcatttctctggcttgaaacctttcaatggcctctcatcttaagcaaaagcctaagtccttacaggggcttgccgagttctacgagatgtgattccc

SEQ ID NO: 157148 - DNA, 315 bp, Homo sapiens
ccggtgccttaatcttggatttcccagcctccagaattgtgagaaatcaagttctcctgttgaaaagctgtccagttcatggcattttgctatggcagcccaaatggcctacaacacaacaattacccacatggcttactccctaacttctctcagaggcctgctctgaccatataacatttatatttacttacttggctgtttactgtctgtttctccctactgaattataagcttaggggttttgttttatataaaggtcaactcccaatgcttaaaatccaataggcaccaaacaaatctctgttgcgtgaa

SEQ ID NO: 157149 - DNA, 901 bp, Homo sapiens
atagtctcataatacatttgtgtttccttcttttcaacctttattactttgcttctttttaacaaccttatttcttcagcaggacctacatatgatattaaatagaagtggtgaaagtagacatctttgatctgggaaagggttcactatttcaccattaagaaatatgttagctgtaggtttctttgcagatgcctgttgtaagattgatttagttactctgtagttatagtttgctaagagattttttaaaatcctgaattaatgttaaattttgtcaaaaatgttttctgcatacactgaaatgttcataagatttttctcttttatactgttaatcagttatgttgactgatttacaaatgtaaaatattgaatacttgatcataaggtattagcctcttatatattgctgatctgacttaaatacttgataagaatatttacatttattttcatgagagatattcatctgtaatttcttttcttataatgccctaattatattttggcatcagagtcctgctgatctcataacatcatttgggaagtagtcccttatttcctatattctgagtttatataaaactgattgtaaatgtttgatagaatccatcagtgaagccatcttgatttgaagctttcttgtgccattgtggaaaagttttagattatgacctcaatttttttaatgctattcacattgtctctttttgtgtcacttttggggaattgtgttatttcaagaaaatttttgtttcaattatcaaatttattggtataaatttgctgaaaatattttcttattagcctttggatgtatgtaagatatatagtgatattgtcacatttatttctgatattggtaattggttattaatgtgtccttcctttttaaaag

SEQ ID NO: 157150 - DNA, 728 bp, Homo sapiens
gcctaggaactccaaaaggaacctgtttgtataataacactcagtaccaagtatgtaatccaggaagtgaccagcccgatgtgtgctatgacccctctgaacctcccatgatcacagtctttgaagtaagactaaggactggtccttttcctggtgacacaagtaaagtaatagctagaacagaagaaagaggggtccccaaacatgtaaccttaaaatttgatgcttgtgcttctattaatagtaatcagcaaggaatagggtgcagttctctagactggaaaaaaaagttacacagtaaaaaaaaaaattaagtatatctgtcaagaatcatatttatgtgagatgtgtcaatactggtcttgtgtcatttggacttacttggaaacaggattaaaaaggtcctgtttggctccagaaaggaaaagcagccccactgtgggagctgcagccctttagaactggtaatcacaaacccctcacacccaaaatgaaataaaggaaaatatgtatcattgagcattgatggaaaaggactagatcctagtgtaaacatcttaataaaaggagaggttcaaagacgctctccagaacccgtatttcagactttctatgatgaactaaatgtgccagtacctgagattccaggaaagactaaaaatttgtttttgcaattagccgagcatgtagcccagtctctaaaagtcacttcgtgttatgtttgtgga

SEQ ID NO: 157151 - DNA, 193 bp, Homo sapiens
gggatacaatcagttttctgtattagaaggattctagactagagaggaatgaggccaaaggcagagcagtcttgataaccccttggttgaaagagatacttaggggccaaattagggcatttggaggataaagacaaggtggaaaatatccaaagatatttaggaaacagattgtatgggtttgagggggcct

SEQ ID NO: 157152 - DNA, 141 bp, Homo sapiens
attcctcagcttcctgagtagctgggattacaggtgtgcaccaccatgcctggctaatgagtttaattaaaattaagtaagactaaaaattccatttctcagtcacaatagccacgtttcaagagcccagttgccactata

SEQ ID NO: 157153 - DNA, 507 bp, Homo sapiens
ctaatttggaatctatatgctttttttttttgagggttactctagctattacaatatgcatacttgttatagtctgaagtcagtctcttgtcctctttctgacaatcaaagatctttacacttttataatttatatacaattgtctattttgataatatatatgtgtttctatgtgaatatatgtacatacatatctttgaagagatagtagatttgcatgtagttgtaagagttaatactgagacatcctgtgcacctttcactcagttttccccactggtatccaataaaataatataacgaggatattggcattgataaggtcaagataggacatttccatcagcaccagaattcctcatgatacccttttatagcaacattcactttcctcccacttctggcaactactaatcttttctctgttcctgtaattttgtcattataagaatggtatcttagcctgtttaggcttctagaacaaaaacactgtaaactgtgtggct

SEQ ID NO: 157154 - DNA, 614 bp, Homo sapiens
taatcatgtgtgtctggagtatgtgtgctgtataagacatgtgtgcatgtcgctgggtgcatacatgtgcgtgtgtgtgcctgtttacatgtgtgcctgtgagtgcatgtgtgcctgagcgcatgtgtgtgagtgcatgtgtgtatgcttgagtacatgtgagtgcatgtgagtgaatgtgtccatgtgtgtatgtgtgagtgtatgtgtgtgtatacattaaagaaaaagcatcaggcccatgtctgggttaatccacagcaaaaggaaagtcacagccagagaacgtgactcccggtgagcctggagccagcgtgactgcagagggccagtccccaggtgatgccggtacgctggagaaggcctgggaagatgtgcggagacagacacctgggacacctaaggaccaagcccagagccacgctgctggtgagtgtgggccggcgcttcagtctgtctctatctgaagacacatccaggccttttcctcttccttgcttgggttgctgctcttctcatgcccctgctctcctggaccccacatccagcaccccacaccccacatctccctggcaaaatcccctctgacagagcctctcctgacgccccagggt

SEQ ID NO: 157155 - DNA, 314 bp, Homo sapiens
tgcctgtgtgtacgtgtgtgcctgtatgagaccatgtgtgcatgtgcctgggtgtacgtgtgtgcctgtatgagtacatgtgcgtgtgtgtgcctgtttacatgtgtgcctgtgagtgcatgtgtgcctgagcgcatgtgtgtgagtgcatgtgtgtatgcttgagtacatgtgagtgcatgtgagtgaatgtgtccatgtgtgtatgtgtgagtgtatgtgtgtgtatacattaaagaaaaagcatcaggcccatgtctgggttaatccacagcaaaaggaaagtcacagccagagaacgtgactcccggtga

SEQ ID NO: 157156 - DNA, 235 bp, Homo sapiens
cctgctgctctgtgaaagccgaaggtgctctgtggttttgggatagagcaggaaggagaaggacgaggagtgggcactggcaggtgactcaccgggacaggtggcacatgctgactccagggcaggtcccggctggggatgagattcccctttgtggaaaacatgggtggagggggagccatgcagtgctcatgctgcctgggtaccacccccttccaccctatgttttcccagg

SEQ ID NO: 157157 - DNA, 211 bp, Homo sapiens
aagcacaaggaaaatgggtgagttataacaacatacttggatgtctctccagatcaatgggagtggttaacagaaccacttgcaagagatgggacagtagcaatgctttcatatggggcaggaagttgcactggtcacaggcagcatagcactagtggacagtgccttcccgggctgcagagtcagacagtctcaaattaaaaacacaagt

SEQ ID NO: 157158 - DNA, 284 bp, Homo sapiens
ttactatgcatattgtatgaacaatccggtatggtggttttattatcccccttctcactaatgaagaaactgagacttggaggttttttttttagaaacaaagacaatatctagtacaccaacaatgagacccaagcaccttcactgtcgtctttgcagcccctgcattgttacttaggattgggacaccaacctgctcagctgagacccagaaatcccaacagacccttgcaactctggttgactgctcgagtgcagctgacaattgattacggggagtcaat

SEQ ID NO: 157159 - DNA, 168 bp, Homo sapiens
taatcatgttgaagaagaaaagaatgaattcattaggggaatgttctgggactgccagtcttccttcttggtgagaatttgacttttccagctatgtcttatttcatttcttgctgttccaaatttattttgaaataattgcattcttttggcctctgttgccttagg

SEQ ID NO: 157160 - DNA, 334 bp, Homo sapiens
ttttttttttttttttcctagtagagacagggtttcaccatgttggccaagctggtctccaactcctggcctcaagcgacccgcccgcctcagcctccaaaagtgctggggattacagacgtgagccactgcacccagccataaattcttcaactttaataatctcaatttgcttgtatttgaaatgggggtaacaatagctactgcctagggctgtgatgaggcctgaaaatgtggccatgcatatagagcacccaaagagtgctcgatgggtagtaatcactggtgcctcccatccagaccgtccttgtctttctaccaggaaatgatgctg

SEQ ID NO: 157161 - DNA, 310 bp, Homo sapiens
caccgagatgatacagatgtcagaattatctgacaaggattttaaagcagccaagataaaaatgcttcaatgagcaattaaaaacatagttaaaacaacaacaacaaaacaataaaaagaatgaaaatataaaaaaataaaaaaggtaaaaacatgcttaaatcaaattaaaaaatacaaagcctcatcaaaaaaaaaaaaaaaagagtctcagcaaagaaacaagatataaagagaaccaaatggaaattttagaacttaaaaatacagtaactgaagcaaaatagatgggttcaacagcagaatagag

SEQ ID NO: 157162 - DNA, 641 bp, Homo sapiens
aaaaaaagggcctcattttatgagaacatcattaaggcaatgaggcctcagcctgaatactttgctgttggatactatggacagggctttccttctttcctacggaataaaatcttcatctatcggggaaaggagtatgagaggcgagaggacttcagcctgaggttgttaacccagttccccaatgcggagaagatgaccagtaccacgcctcctggggaagacatcaagtcgtcccccaagcagtacatgcagtgcttcactgtaaagccagtgatgagcttgccgcccagctacaaggataaacctgttccagagcagatcttaaactactacagagccaatgaagtgcagcagttcagatactcccggccgttccggaaaggagaaaaggatccagacaatgaatttgctacgatgtggattgaacggaccacgtatacgactgcatatacctttcctgggattctcaagtggtttgaagtcaaacagatttcaacagaagagatcagtcctctggagaatgccatcgaaaccatggagctgaccaacgagaggatcagcaactgtgttcagcagcatgcctgggaccggtccctctctgtgcaccctctctccatgctgctcagtggcatcgtgga

SEQ ID NO: 157163 - DNA, 740 bp, Homo sapiens
aaaaaaagggcctcattttatgagaacatcattaaggcaatgaggcctcagcctgaatactttgctgttggatactatggacagggctttccttctttcctacggaataaaatcttcatctatcggggaaaggagtatgagaggcgagaggacttcagcctgaggttgttaacccagttccccaatgcggagaagatgaccagtaccacgcctcctggggaagacatcaagtcgtcccccaagcagtacatgcagtgcttcactgtaaagccagtgatgagcttgccgcccagctacaaggataaacctgttccagagcagatcttaaactactacagagccaatgaagtgcagcagttcagatactcccggccgttccggaaaggagaaaaggatccagacaatgaatttgctgtgagttcaccccttttgtcctttaagaggtaaaattaacgggctgagcacggtggctcacgcctgtaatcccagcattctgggaggccgatgcgggcggatcacgaagtcaagagatcgagaccatcctggctaatacggtgaaaccccatcggtactaaaaatacaaaaaaattagccgggcgtggtggcacgcacctgtagtcccagctactcgggaggctgaggcacgagaattgcttaaacccaggaggcggaggttgcagtgagctgaggtcgcaccactgcactccagcatgggcgacagagcgagacttcgtctcaaa

SEQ ID NO: 157164 - DNA, 312 bp, Homo sapiens
tgctaccacagcgttcggcgggcttttttttaaaaaaaagcacaaatgtctgatacaatgtataattcctattaggaacatacaattaagagtctgtagtaaatactttcattatgaaaggtacagagtacagaataatgaaaaataattcttacctattggtatttttgtgaaatggttttgaaataccaactaaggaattttacatttcagtgacacgaaccgattattatgtatgtctgctctcattagattacagtagtacacatatggtgacaacacatcattgaagttaacctttcattacaatga

SEQ ID NO: 157165 - DNA, 261 bp, Homo sapiens
tttattatgttaaagaagtttccatttgtagttttttgagagctttttgtcatgaaagggtaaagcttttagtctttcataattaagtatgatgtcacctgtgagcttttcatatacagctttattttttgaaactgtttcttcttttcctagtttattgaacatttttatcgtaaataccatcaaatgcttttttctgcatcaattgagatggccatatggttgttgtccatcactctgttaacacagtgtattgcactg

SEQ ID NO: 157166 - DNA, 718 bp, Homo sapiens
cctctttgcattcttttttttcaaaccaagggtatgtcaggtaaggtagaatccaggttccttatcagaagattttctaacgtctcttctaaaaggtgacaaatggaactgaatatttaatccaactttaatctagacagggcaaagcagagtttggatgctgcttctcagacatctgggcttgaaacactcatacccacgtctcaggagctttcctccactgtccaaatctgttcactcctgctaatcccttgcactctgtactgccaactgacatttcttaccaaagtcctccaagcacctcaaattatctaatagaaaatcaaaataatttccccaaaacccgttcctcctcattctgtgttcaatgccttgtatgaagactccacaatttgctcaattcctagcctatcaaaaggacctttccttggttctcatcattgtctccattttcaattgcaggtctctgtcttagcaggtctgtcacctcagctccacgatgattcccttctggctctatcactactgccccaatcacgtctaatgtgtatacctgacagtgataactccttccttgaaataaatttcaccatctacagaataaaatccaaactctttggcaagtctctctgggcccttcctaatgtgcaggagccaatctcccttcccaggctgcttgcccacctatgaaccatccccagttataccacagctggtt

SEQ ID NO: 157167 - DNA, 229 bp, Homo sapiens
cgcttttatattttatcagttgatgaatctcaaagtcttgccgtcttaagaaagggctttttcatcgagtgcttgaaatgtaggtttgtgagttgatcagaggcctcaaagcttcaggtgggttgaagttgcaatagataattctttgtattctgactttgaaagcgtttattttcacttcagtgtccaaaattttcacacacagaaaagttgaaaaagtgatagatac

SEQ ID NO: 157168 - DNA, 469 bp, Homo sapiens
ctcatgacttggaagcggtgggctgaggcctcccaagaccatctggcttgttccattgccagccagagtggaggcgacattcacacgaacccaggagctgcaggggcgcgtgagctacagctgccttgtggcatccaaggagtgcgcaactagtctcactctgttgcccaggctggagtgcagtggcgcgatctcagcttacttcagcctccgcctcccggtttcaagtgaattctccagcctcaacttcacaagtagctgggattacagccactttttatcttctctcctgcaatccaacccacataatttccatgaagaaagcggagtggtgtcattttacaacaagaaaactgagttaagaataagtccaatcaattgctaggtgttgagactgaaatggaagtctcttagtactccacccaaggattttcatattaaacaattatcttgtcatcattttatttct

SEQ ID NO: 157169 - DNA, 335 bp, Homo sapiens
  misc_feature (322)..(322): n is a, c, g, or t
aactttttctcagactcggcccagtccacataactctcagatggcccacgaatcagacttctccagatatttcaccaggggctggcatgtaggcatgtgacctgaactaagggcactgtctccaggtgccccaggagacacgctctgactgactggataaactttgaagttacctaaaagtctgacatctaaatggtggttttatttttaaaaggaaaatacacctcaacgctttatacttctgcttggttgttccttgacttggaatgccccctaacccagatcacctgtcttcaccaacttcaccctcaaaagctagatnaagtaacctgctt

SEQ ID NO: 157170 - DNA, 383 bp, Homo sapiens
agaccccagcacacagctccgtcccccagctccccttctgttttttatcctccagaatgaggggcttccctctttgaccctcattctgcctctctggccccctccaccgacttgattttccctgggccttcatgcttcattctttgtcactccgtacctccatatgtctccttgccccacctatgtgcccatcagggaatccatcaaacaagaccttccagtacaggaccctctcctcttactcagggggcatcctgggggttttctgttgtttcttgagcttgccccttgggattgtatgccccactctggaaagcttctgcccaattcttacattaacttgcatcagctgatggacatgtactaactgttcctcctttata

SEQ ID NO: 157171 - DNA, 370 bp, Homo sapiens
ggaactcttccctgttcctctgcctgcctccttaagacctaaatcctctggcttagaaggtaccataagctgctagctagtagctgcatggttccctgacccctgattcccactgtttctgacacagagggcactcaacctgcccatgggcctatcctgagcctgagctggttggtgtgggaggtgccagcttgcgtcatctcttaggctccttccccatgtcctctctctgctgctggttctgtgtcaattaccctcagcatatccctcctgccctccatcccttgggtcaagcagatgagaaagaagtcccattggccaccatttgcagagcatttacaggggctcactggctcctgaggataccccc

SEQ ID NO: 157172 - DNA, 616 bp, Homo sapiens
gttagagaaagaattcaaatggtttttccaagtatgtaaggtgcctacaaaattacactataaaatttattctttaatagcctagttctttaccaaagcaattagttttcataagtcactccagcaaatcacaaagccagatgggtccccaattcaatcaattatctttaatctttcaactaagaaaaattgctctttatatactttgtctctgtagttctctttccagaattaaccattttggcagtgatgtatgcttgttagcaaaagtagatcctacacacaggtgagaaaacacagaattaactgtgaacactttccttcctagcaaggtgagcagaacactgaaccatgacttaacgaaagactgcccaagtcattcactggggtggaaccctatggtgtttatcacaaacatacttcccaccaacacggtggctttgcgctccactggccagtgctttttatattgaaatgagtcaaagaccagatccagcgcagtcaccatagttccactaagatttaagcgaggcaaaccattgtccctgccattctatcctaaatgtggtcataagtgggacagcagagaaagccacagtacttatccaaggttgca

SEQ ID NO: 157173 - DNA, 990 bp, Homo sapiens
cttctgtcatttaatttgcacaataatcctacaaggtagatattactgacatagaggttaatgtgaaatgagattcagagaggttattaggaacttggtagagcctgaactcaagtcctggcagtatgattcctgagcataaactaattagttagtttcttaggaaaggtgaaaggaatgttggaagttatattttaatatttatttcagtaatatctttttttatgcaaaactctgtttcgtaaacagcttttaacttaatgtagcctgaaagattggtaacacacatgtttatccttggtatctttttgtttgccacccttctacttaaatgtaataatgatggcagatcctctgcaagttatcattagaataacatttttaaatactttggtgtaattggaaattggcagaatgatttggtagattggattaggagtcagatttacaaaggctttgtctaagtagttttgaatttaaatgctatagggaacaactgaaggattttaagcaccaggattttaatccctgtgttcactctttgaatagatatttgacatccaggtattttaatgcttttccaatgaatatatttgtctgtttcctctgtagttagatagttcaggaaagccaaggtgtagacatgggatttcgagtccatagaagcttctgcttcttcatttttgttaaatgtgggacattagacaagtcatttgaaatctgtgatccacacttttttcatctctgaaagtgaaagcagtttgtaaactggatttcagtggaatgttttagttatttatcagtattggtcatgtgaaatctttaatttcctttagtgatcagaagatatttttctgtttttatttctttctaatgataacactcattttctctttattgggacttttttccatacataaattctgcttaaaaactgagattgctttaggaattacatgatcagccttgatggcttcgggaaataagaaa

SEQ ID NO: 157174 - DNA, 309 bp, Homo sapiens
tttactggaggcctactgtgtgccctgcataagcagttggggttccagaaggcatgcttagagggaggatggagagggaagggtgatggcttctggagggttgactaattttttaatctgttctccagacccaactgtaaggcttcccctgaggcatcaagtctctatctagccctggagtcttggttctggggttgatgagttgcagacatagctttcctctcctcctaccctgttccctccactctcatgcctttctcagttcatgccatggtgacctttgcccactgacctcacacacagcctgtt

SEQ ID NO: 157175 - DNA, 169 bp, Homo sapiens
agtgtgaatgccatcaaagaattataaaggaaaaggtagtgtgtccggccatgtactgatactcccaggagacccgggacagtccaattccccctaagtgactagctaactcagggaagaaatgcaaaaaggaagcatggtgtgtggcgggcacacatgtgactagtga

SEQ ID NO: 157176 - DNA, 315 bp, Homo sapiens
ctaaattatggataagattttagacaggtataacaaaataataacctagcagcccagaataatttttaacaaggatatttggcttaaagttattacagtattctcttaaacagccaaaacaggagattatatctaaatttgagaatagtaaaaggtttgatttttatcaccaatgagtataaccataagacccccaactcctaagaaaatttcaaaacctacctttagtaaacaacacttccaaaattccatacaggactgttagcaaaagaacaaataaacaaaaagaccccaccaaccatgttatccccgtag

SEQ ID NO: 157177 - DNA, 130 bp, Homo sapiens
actagcaaagagtagacatgcatgtttgtcagatgaatgacattttcactcagctcttcagaaaggcatctgttatataaagtattgctgtacttaaaaagttcaactgtacccaacaaaattgaccttt

SEQ ID NO: 157178 - DNA, 344 bp, Homo sapiens
ggaagtcagttaggggcaagcccagaaaccgaacgacactgacaagcacagaggcaagggagagcagattcacaaaaataactcatcgctgaggtgaactcccgatgctgaagtcctgaggtaaccttggattcccgatgacgtcctggctccagtcttcatgagacttctcgctcttgaagctcctgttcttccagaggcttggtgatttggcctctcctgggttcccacgaggccttttggggctgagatccctgttttcttcattccttataactccttcccctaatattatatgtaacttgagctgttcctcggaaccaaaagagcctgacgaaaacact

SEQ ID NO: 157179 - DNA, 377 bp, Homo sapiens
ttagccaggtgtggtggcgggcacctgtaatcccagctatttgggaggctgaggcaggagaatcacttgaacccgggaggttgaggttgcagtgagccaagattgtgccactgcactccagcccaggtgacagagcaagactctgtcaaaaaaaaaaaaaaaaaaaagagagagaaaagaaaagaaaaaaacccctttcagatgagtttctctctttattttttctttctgatctttaaaaaaaactccactctttaatgactcaatgtccagagcagacccaaacacacactcaggctctgcttgcatggtatgggcccaaagtgccacagctctggcagttgactcttctcaccctgggaatggtttctccaaaa

SEQ ID NO: 157180 - DNA, 485 bp, Homo sapiens
atgctccatgggtgactggtggaaggaccagaacgaagggagcaggcagagacctgccctgggcatcctcatcatcctcctcacactcagaaggcaggcacagaggcaagaccactgaaaagggtgcctggcctggtagacaatccaaataacctggtcccaccctttcttttcatcaaagtgattttactactcttactttttaaaaatttactttattgtgattaaacacaacataaaatttaccatttgaatcatttttcagtatatagttatttgacactgagttcattcacaatattgtggaaccatcactaccatccatctccagaactttttcaccttccccagctgaaactctgtatcgcccagcgtggtggctcacccctgtaatcccagcactttgcgggtgggcagatcacttgaggtcaggagttcgagaccatcctggcccacgtggcgaaaccccaactctactaaaaata

SEQ ID NO: 157181 - DNA, 383 bp, Homo sapiens
ttatacacttttgtcatttagttacccacctattccccccagtggactcccattctgggctcctgcagagggcttgtaagttcacctttatatccccagggtcagagctgatgctctgccgagtgaatggggaagcgccagaaagaacagaagctaatgatggactggctcgaccatggctcccactttcaatactcatccctctgtttcctcagacattttacttgaattaattttgtagttctccttctgaactgctgagcaagtatttggacactttgtgaggagccttttttttttttttttttttggggaaggggggccccccttgtgccccccaggggggaagcgagggggcaaaaccccggtcacaagggggccct

SEQ ID NO: 157182 - DNA, 1234 bp, Homo sapiens
  misc_feature (1063)..(1063): n is a, c, g, or t
aggaggcctgcccccgctaaccggctttttgcccaaatgggccattatcgaagaattcacaaaaaacaatagcctcatcatccccaccatcatagccaccatcaccctccttaacctctacttctacctacgcctaatctactccacctcaatcacactactccccatatctaacaacgtaaaaataaaatgacagtttgaacatacaaaacccaccccattcctccccacactcatcacccttaccacgctactcctacctatctccccttttatactaataatcttataaaaaaaaaaaaaaaaaaaaaaaaaaaaaagaaaaaaaaagaggtttggggcgcgcccggcctatgacggcgtccttgcggaagtacgggtgccgagagaagcagtagtcaataaagagagtgccgtatttcgcagattggagctgagctgtggctgccagaagatagcgaacgaatggaaactgaaagtggaaatcaggaaaaggtaatggaagaagaaagcactgaaaagaaaaaagaagttgaaaaaaagaaacggtcacgagttaaacaggtgcttgcagatattgctaagcaagtggacttctggtttggggatgcaaatcttcacaaggatagatttcttcgagaacagatagaaaaatctagagatggatatgttgatatatcactacttgtgtcttttaacaaaatgaaaaaattgactactgatgggaagttaattgccagagcattgagaagttcagctgttgtagagcttgatttggaaggcaccagaatccggaggaaaaaacctctgggggaaagaccaaaggatgaggatgaacgcacagtgtatgtggagttacttcccaaaaatgttaatcacagctggattgaaagagtattgggaaatgtggcaatgttgtttatataagtataccacattataagtctactggagatccaaagggatttgcgtttgtggaatttgaaacaaaagaacaagcagcaaaagcaattgagtttcttaacaacccaccagaagaagcaccaagaaaacctggcatatntcctaaaacagtgacaaaataaggcccattccagccttaagagttgtggaagagaaggaaaagaaaagaagaagaaaggccgaatgaaaaaggagaccatatccaaggcaaagaagaaaaccatggacacaagcaaaccagcatcagtaaaatgaaagatccagacccaag

SEQ ID NO: 157183 - DNA, 1152 bp, Homo sapiens
  misc_feature (1067)..(1067): n is a, c, g, or t
aggaggcctgcccccgctaaccggctttttgcccaaatgggccattatcgaagaattcacaaaaaacaatagcctcatcatccccaccatcatagccaccatcaccctccttaacctctacttctacctacgcctaatctactccacctcaatcacactactccccatatctaacaacgtaaaaataaaatgacagtttgaacatacaaaacccaccccattcctccccacactcatcacccttaccacgctactcctacctatctccccttttatactaataatcttataaaaaaaaaaaaaaaaaaaaaaaaaaaaaagaaaaaaaaagaggtttggggcgcgcccggcctatgacggcgtccttgcggaagtacgggtgccgagagaagcagtagtcaataaagagagtgccgtatttcgcagattggagctgagctgtggctgccagaagatagcgaacgaatggaaactgaaagtggaaatcaggaaaaggtaatggaagaagaaagcactgaaaagaaaaaagaagttgaaaaaaagaaacggtcacgagttaaacaggtgcttgcagatattgctaagcaagtggacttctggtttggggatgcaaatcttcacaaggatagatttcttcgagaacagatagaaaaatctagagatggatatgttgatatatcactacttgtgtcttttaacaaaatgaaaaaattgactactgatgggaagttaattgccagagcattgagaagttcagctgttgtagagcttgatttggaaggcaccagaatccggaggaaaaaacctctgggggaaagaccaaaggatgaggatgaacgcacagtgtatgtggagttacttcccaaaaatgttaatcacagctggattgaaagagtattgggaaatgtggcaatgttgtttatataagtataccacattataagtctactggagatccaaagggatttgcgtttgtggaatttgaaacaaaagaacaagcagcaaaagcaattgagtttttaaaaccacagagagccagaaactggattttctaaaaaggaaatagncattcagcttagagttgtggaggagaaacggaaagagagaaggggatgaaaggaggattcaggccagagaattgtagcaccgttt

SEQ ID NO: 157184 - DNA, 595 bp, Homo sapiens
cggtcctttcagacggtgtctgtgcgttgataaaggatgggcctgtccccaggaccctgtgagagggaagcccaatgtcccaccaggttggcagggctggggaagggaaagtgttatggcagccccaagaaaaaaaagaggcagcagagggagcaggacagcgctcacatggaactcatgccactgcctgaatgaggggagggaggagtgcacgccagtgacgtcagggggcagagaggcgcagttccagggcggctttccccctcacttcctgccatgttactctgatcgcctccaggtgagcctgcccactttgtgcccaggggcctgtagaaaaccacagctccccatggttatggccccaggagtggggcagaacaccgtcgaaggacggggttttgccatgttggccagactggtctcgaactcctgaccttgtgatctgcttgcctcgggctcccaaagggctgggattacaggtgtaggcctccacgcccggcctcacaaagtttcttaggaaaattaaggtatagataagagagagaatggagacactgatgactcttccaaattttcatagccagacaccaggaag

SEQ ID NO: 157185 - DNA, 625 bp, Homo sapiens
tttcagtggctcagtagccacacacatgtggctagtggtggctgtgttgaacactgcaaatagagaacctttttttccgttatcacagaaagttctattgcatagcactgtagtataaattaatgacaattactacaagatttcaccaagtttatatattctgaaagttggagaatagagtgcaagatatttgttctctggaattcttaggtgggaccttttacaatggttaacctgtctggtaggggacaggaaacttttaaattatagagttcttgctgtgtccttatttgttgttcacaacagccaggccaggcagttagtattatctccgttttatcgatgagatcaaacctgtaagaggaactgtaatttgaaccaaggtttgtctgactttacatcctctattttttgttcttattttggactttaggggtgttgctgaatggattataatccctagttcatggtgtattgtcattagatatcaaagacccttttcttcctcacactcctaggcaaccattttaatgtgtgtttgatttatctttttttaaaattttttttaaagtgaaagcaagtttattaagaaagtaagggaataaagaatggctactccataggc

SEQ ID NO: 157186 - DNA, 241 bp, Homo sapiens
ctggggaaagggcactcaatgctccctgaataccaagatccattatgctgctgcagccaaaacaggaaataaataatgctggacatcatcaggcagaggatttgaaacagctttcctctgtggcatcgcagtgttccaggacttcgttatatgagctgagcctaccttgccttctcatctctggaggctcttcacttcactctgctcatgtcatcactcctgtgtgtctcagacttccact

SEQ ID NO: 157187 - DNA, 523 bp, Homo sapiens
agtgctttaacagaatgcctggcatgagtaagtcctccataaacatctgtggaataaatcagtagtagagattaagaaatggcctcaaagaaggacacagacaaacatggtcctggttctagaggaagctaaatgtgttcacttttcctgtgagctttacacaggagtttctgcaacataaaagagatcacaaggccagtaccgatgaagcccttgatcctgtgcttgttacctgggaaagactgacagtaataccttaaaaatcattgtctctgtgacttaggagaaacaggacaaattatcctagcatgaaatatagcccaagaatattgtgggaataacgcagattgattttttttctcttttctgaattcacatctgtatccctctttcagatatttattgactgctcagttcagtcccttttcatatagagaatgagggtatatttcatttgttcaaaactacaaaaataatcatacctcttatctttcaaataaaaatcaactttgctctcaacatg

SEQ ID NO: 157188 - DNA, 333 bp, Homo sapiens
ctccccacctagtctggatgctggagtgggccagaggtggacaggacaatcatcctgcagcttcctcttacctcctacaagatctggatttttataccagccacctttcacagaagtccctcccactcctcacatgtgtcccatgttttcatttgagggagctgtttggtttataaagggccctgggaacaaggggtgttgtcactgagcacactcaaggagcagtctgatgggcacctgtcactcagagtagttaccaaatgtgcacaggaaggataagcatctggttggggaaagtggttatctctggcaatggagacaaggtagagccga

SEQ ID NO: 157189 - DNA, 418 bp, Homo sapiens
tgagcggtatttgccgagtgatcatgtggatgtggagatgagaaaactgtgggcccaagaagggacagggctcgccagggccctcacagcaggtcaagcatggacctggtgctagagcctccatgcttgtcccttgctcttttgtcccatgctgtctttacctgttacctgctaggatccccaagttctctgtgcacaggagtcccagtggcctttctccaagttcttttggagcctgtgaatccccaagagaccgccggcccctgaagccattgaattatgcatgtggtcatttgcttgcatgtggcgggactcacagagcaaggaatccacttccctgagccaccctcaacatgaatcattccacgttgcctccagcgccaggttcctctcacttcctggagctctcaagtgcctt

SEQ ID NO: 157190 - DNA, 464 bp, Homo sapiens
caggacatggagggtgggaaaggggggatggactacaggaatagcttcaggaagagaagagtgccaagggaagagcaggtacagaggaactggtgttcaccccccgaagacatctggggcaggcaaagggaaaatcagacaggtaggcaaagacaagggctgcaaccataaggagtccagacttgatcctcgggagcttcgggcaaaggagtagcaaacttggatatgcgttttggaaaaattacttattttattaaactggagttggcaaacattttctgtaagaaccaggtagcatatattttaggctttgtgggccacacagaactgctgagtactatttttgtttaagcattcctttaaaagtgtaaaaatcattcttagtttgtaggccatacaaaaacagtccacaagcccagcagtgtgcccacctctgttagataatatcaaggaatcagagctaa

SEQ ID NO: 157191 - DNA, 664 bp, Homo sapiens
tctgccatgccccaggtcatgctacggactccgccacaccccaggccacgttactgcagacgccaccacaccaggccacgctgccttttccagccacagtcccagttaagcccaccctgagtgccgctcccacctttccttccttcagctgctgcagaaagggctgcaggtatgaggatgcccacctcagccccgtgtgtgggaccaccacccagtggcaggggtgggctcggagcagccccacagtcaagtcacacacagagcagaggccagggggcaagacgcccaagcgtcaccgaagcaacaaccgcgtcagcatcccagcagctgagctggcatgccgttaacgtgagaaccacatcggcatcccagcagttgagctggcgtgccgttaacatgagaactacattggcgtcccagcagccgaggtggcaagccattaacgtgagaaccacactggcatctcagcagccgagccggcgagccgttaacgtgagaatcacatctgtgtcctggcaaccgagccaggcatgtcattaacatggatacaaagagaaatgactacaaatacacaagtgctcaaacctctaagtgaacactcagtgtcctcagatgacaaatgatcatctcacattcacgacagtatcagtgcctgtgcgtgacc

SEQ ID NO: 157192 - DNA, 447 bp, Homo sapiens
agctgactgctggttcctggcagcactgggatccttgactcagaacccacagtacaggcagaagatcctgatggtccaaagcttttcacaccagtatgctggcattttccgtttccggttctggcaatgtggccagtgggtggaagtggtgattgatgaccgcctacctgtccagggagataaatgcctctttgtgcgtcctcgccaccaaaaccaagagttctggccctgcctgctggagaaggcctatgccaaaacaaaagctgcagccaggacttcctccactgccttctaccctgtgaagggctctgcctctgcctgctcaccggggacaggaacgtgtaggtccctggcgagaagcccaagcaacagaggcagcagctgctcggatcctattccgatctgcactatggcttcctcgaggatgccctggtggacctcacagga

SEQ ID NO: 157193 - DNA, 689 bp, Homo sapiens
atgcggcctgtacctcttttaaggaagaagccatcaaaggatcactttctctcttacattatctacacctggcatgaggtctgggtgggtcctcagtgtctgctgactcaggggacaatcttcacatatacagggcaaaaaagacaatagccaggaccctggttgtaaccattagaaacatccctacccagcactggggctggtgacatgatcttgagctagggggagtagggaggcagtgattttgtaagacttcttcctagcctgagaaaaatccagcaagaaaaagttattttaggtcccagaatacgaggctgaactgagtcctccaaagagaggttaagatagaaagttaatgaaatgttcatttcaaaaaaactttgcccaacccacggtttgcaactcccacacttatcctggtaccagtgagagccatctccaggcccgggtagcagtaggcagcgtaaacccgttggccagaatagcatatccacgtctgattgtcaagtggaggcagccccgcttactggctctactagagacttgctggttatttttaacacaggccctcacacctgtgcccactcctcctctccattcctctggccccgctcctaacaaacctactcaacattcattccccagggttgtatgttcagcctgtgtgcagcacctctctctcaactgga

SEQ ID NO: 157194 - DNA, 244 bp, Homo sapiens
gcttggtttcccatgtataaattcagaaaaacatcacctacccaatatagaggtgattattaaatgcactatcctctagaagctgtggttattaaccttgactacacattggaatcacctggaaccttataaagtccgggctgggtgtggtggcttgcacctgtaatcccagcactttaggaggtcaaggtgggagcatcacttggggtcaaacgtttaataccagcctgggcaacatagtgag

SEQ ID NO: 157195 - DNA, 242 bp, Homo sapiens
caggaaacaaataaattggggaagcagaatggacacagacaatctggacctcattcaggagctctggactgaagaagaataatgctttcctgataaaacccaaactttcactttgatgggtctatgaaaaagaaattagggccaattcaaacctgaaagaccaggcttttgagacacttcactgaaagcgtcaggacggtcagtaaagaaaggcaggattactaatgtctaagagatttcta

SEQ ID NO: 157196 - DNA, 365 bp, Homo sapiens
tctgacattaaagagtcataagactgttttaagaatttatttggggatctcctggggctgtatcacagggggaaaagtgaaataaaaaaaaaaaaccacaatcaatttgggctgggtgcggtggctcacacctgtaatttcagcactttgggaggccaatggcgggcagatcacgaggtcgcgagttcgagaccatccttgccagcatggtggagccctgtctctactaaaaatacagaaaaattagccgggcatggtggcgggcgcctgtggtcccagctgctcgggaggctgaggcaggagaatggcattgaacctgggaggctgagcttgcagtgagctgagatcgggccactgcactccgg

SEQ ID NO: 157197 - DNA, 202 bp, Homo sapiens
tggtttcacctctgatgttgcctcctctgaaatgcctctgatcaccctttgcagggatcaccccaattgtcttgattatgggtccctgtttattttctccacagtttgccaaatgctgttaatgtgtttccttcgggtggtttctatccatctccctttatatcacagcagcatttgggccagcttcattcaccacgaatgc

SEQ ID NO: 157198 - DNA, 404 bp, Homo sapiens
ggcagttttgcctttcccttccatcatcccctccccttctctgcagatttctggaatttccaggggaagaggaaggagtacccagcaactcgctctcacagtggcccatgctcctggctccttccctaaccttaccatgaagatcagcaccatggactccaaggtgacaggtcacccctaaaaactcctgcagcaaatcacttagtgagctcccacctggccaccctgtggccacattgacaaagtaaagaactgaggcgctgagagattaaattacatagcgaatgtgtaagtaaaaatagaacagcaagtcccaaacttcagagatttgagcactgccttcatgaattttgctatatctgagtgctactgtattattattaatattttaagaatcaatatgt

SEQ ID NO: 157199 - DNA, 648 bp, Homo sapiens
acccactcccagcgccacgccttcgcagaggcggcctgtgccatcctgcacagctctgtcttccaggaatgccacaggctggtggacaaagagccattctatctgcgctgcctggcagccgtgtgtggctgtgatcccggcagtgactgcctgtgcccggtgctgtctgcctatgcgcgtcgctgtgcccaggaaggtgcctcacctccctggaggaaccagaccctctgccctgttatgtgtcctggtggccaggagtaccgagagtgtgccccagcatgcggtcaacactgcgggaaaccagaggactgtggagagctgggcagctgtgtggctggttgtaactgtcctctggggctgctgtgggaccctgagggccagtgtgtgccccccagcttgtgcccctgccagctcggagcccgtcgctatgcccctggcagtgccaccatgaaggagtgcaaccgctggtgagggcagcgacctttggggcaagaggaagaatgtgggggtgaagaggtagcttgggagataacgggtggggtgcagccttgttggttgcagcgtgcatgctgggggtgacagagtgctgatcacttcccctcggtcgtggggcactttagggtccataaagcactttcgtgtgcatca

SEQ ID NO: 157200 - DNA, 423 bp, Homo sapiens
ctttccagagtgggcagccaggcagaggggctcctcacgtcccagacgatgggcagccaggcagagacactcctcacttcccagacggggtggcggccgggcagaggctgcactcttggcactttgggaggccaaggcaggcggctgggaggcggaggttgtagcaagccgagatcacgccactgcactccagcctggacaccattgagcactgagtgaaccagactccgtctgcaatcccggcacctcgggaggccgaggctggcggatcactcgcggttaggagctggagaccagcccggccaacaccccgttagcctattcctgagtagaaaatggcagccttccgttttcctaccagccaccacctcgccccagctatgggttatttgaactgtttgttggactttggggagacctgtt

SEQ ID NO: 157201 - DNA, 234 bp, Homo sapiens
taacccttgtttctccccagtgagctttggatttgcacatccacctgcctagtacacttttactataagtgatagtcaacatgtggataagaacttgagcattggagtgagacataaggctgccaggtctgccgtttaatagcttaatggccttaaagaagaaagtctttatgtggctcagcttccactctgtaaaatcatgaaacctgtcacgtaagatttatgtgcgggtaa

SEQ ID NO: 157202 - DNA, 1103 bp, Homo sapiens
aatggatggtccaaagaaaggtgaatgaaagagtcataaaagatgttgaggtagttctctattgatgccagaatagccctatggtgcacttttgagtaacagaagccaatttgttaaaaacaacaacaacaacaacaacaaaaaaaaaacagagagagagagatgaatgtgcatccagatgcttagagaagagtctgaatgtctgtatactaaatatcaacactagttactctgcgctgtgggattttggatgattttaatttgatccagtgttttctggaaaataaaatttcactacattgacacatcatttgataatcagataaaagaacaatggtgggaaagcaaggactcaagtgacccttgcttttgggtctagagcatcatgtaggaagccagcacagcccatccctttcctaggcgccaccttctggctcctggtgggacttgtaagtcccgtggtcagttacctgattgctcttacggacctgacgctggaaatcctctctctccaaggtccctgcaggagatgggacctgccacagagaatgccgcaagggatgtttctgttgggagctgtgagtggggtggatgtcctctgcctctcttaaatagatgagctagattgaacctggggctggccaaagggagtctcctctcagaaaccaggatgcagtgggccgtctgtgtcccagccccaaagcagccagggtccagtggattagcacagagccgaccaggcctggagggtggtggtctgggattgggtgagcagccaccagcaggaatagcaattggagggaaggagaagcattgccaagagcaacttagggggccgtgagtgcaggtctctggacagacagcatggtaactggctgaggcaggaagaagcttggtgggctcccatggtgctaataataggccgtgtaggagcaggggaggcagctccagacttggagtgaaaagacgtggggtgcagtcagaatgaactccccagccatccatgtggtctcaggcaagtcactctgcctccagagccccatgtccactcctataagatggtacatccccacagtgccctgccacaggtgattataggtgaa

SEQ ID NO: 157203 - DNA, 631 bp, Homo sapiens
cactcaattcagccagagcagctctcttttaacctatttgatatattgcacattgttataatgttttggttagaagagtttgtttcatgattaaaataagtttgaagaatcattgctccgagttgttcgattttttttttttaaccttttcttttttttctaggtcaaaccagacattgagatcactggctttttggataccttgtgttggctgcatttcttgtatatttggataccgagtgttggctacattggataccttgtgttggctacaattcttgtagaatgttttctactgaatcatactttaagtactttgaattgtactttggcttgcattgagggataaaaaggggtggttaaaactcacttctgtgtttatccttgttggagttatccattacattactcactgacccattaggtttcagcgaggatgcagatgtcacataaagcttcacttctcctcaatagctcttagacaatgtttatcttatggttgatatttcttattcatcttatgccctttgatttattggttttgtaccttgcttacagggcttttatagtttatttttgaaataaaccaagaagttgagtgtgcctctgtggccatttccagccatataac

SEQ ID NO: 157204 - DNA, 295 bp, Homo sapiens
ctttctccgacataaatctgatcatacacacacacaaacatcccatatatttgatgtcaccctatccatgtccatgggttaatggccacagtttccatggctgagcctgagttgagccaggtgagtctcagacataccgtggtttagcccttccacctgagcacctgtggcttgcagggttctcgatgcttggtctgagctggcatcctccctgcctagactaccccctcagtgccagctctggcctgcctgtgtgcgtccccacagtgccttctacctggatcacccccttcct

SEQ ID NO: 157205 - DNA, 318 bp, Homo sapiens
gtctattccagatctaagacccacacatgcaaacccaagtgcatggctccctgggtacagtttgtaacattgccagtgaaagtcatgtctcttcattgtgagtaaatcacaccgttaaaactctgagtacggtctagctgattaacgtcaggttaatccagatcctttattctgtattccagttactcccagctcccaggcagtgatggctttaccggcccaggaggtccccgggccctgctcattggatctttttggtgggatacaccccacagaacacagaaaacattcccttttccgtatccatacataggagtg

SEQ ID NO: 157206 - DNA, 488 bp, Homo sapiens
ttgaatgcaagtctcattttagttgtattataaatgcatttcagcttagcttaaccatttgagttttgatacatagtccttgtatttgtcatttgtttctaattaaaatttcaccagtgactccctcattgaccaatgagttttaggagtatatttttagctttttaaacatgcttttcctatttatattgacagaaacaaaatcatgttttggttgaagttgttggatgtcttagatttcttcatgcctattggtattttgctctgcaggtttggagtgtgatgccttgcttccttttaactatgcttttcctagctagcagtactatagctcaccagaattatgacctccttggcagttttcactttctgccatataaattgacttgtaatgagctttgggattatgttagtagacttggctctattgctggtctggaggctctgtctttcctttagtctctgtttctcactctactagagtgttg

SEQ ID NO: 157207 - DNA, 555 bp, Homo sapiens
aagtatgctccagtcctcctttggaaaaggcagcctgtgtccagagccagcttgaggtgactacacagggtgagccagctttccaagcctcgccatcatcttgctcagatggaggtaatgatctccatcctgcttccccaaaatgccatgaagctgaaagacttggaaaacttcagtcagcaaatatgggtcagtgatttcacactgaaaagttggggtttcgagcacgactgtctaagggttcctcacttgctctgggtctgcatcccacaccctggaaaagcttcctaccattctacaaagtggggtcactgtcttgacaccctaaattctcaaaggtcagcatagcggtggttttggagaccatcttttcttctgttttgcttgtcagcagaagtgagaccaaatgccttgctcacaggaagtgctggtggggcccggggcccagctctgtaattcaggcagacatggattccagctctccttttgccagatgtttcctatacatctgtgctgtcccaggccctgggagtatactgctgtaccagagagaac

SEQ ID NO: 157208 - DNA, 621 bp, Homo sapiens
ctgatgttttggaaacgctgaaaagtcataggcctctcaggggttgcacgactccaggctggggtcattgattcattatagcattttcattttgcagacaaggaaatttagttccatagaggtttaggtgggttacacagggtcacacagcttctcggtaaaagagccaggactctgacctggtgccttgactcagggatgaatgaggaacaatagcaaatctagaacccctggttgatggttttttaagtttgagggggtataagggggaaattagatcaaaactttaatatttgtattgtacaggtcattaaaggcctcgattctgatgccagctgagtgaatcactctgtagcccacagtttaacaatgtaatctactctgctcaagttgattgtcttcattttgcatggaggagtagagattgcatgtagcagatgatgtgaacagtgcacagcttcaagtattatttattgttcccctcaaggctctgtgtggtgaatgaggcacagatagaattagaggccttggcttgattccttgaggtcacaccccctttccttctgctagacagccagcagtcagccacccaccctacaccatgatgtgatgagttccgtg

SEQ ID NO: 157209 - DNA, 194 bp, Homo sapiens
agggggagagaggaagcagtgtaactgtactataacaactataactataactaatatgtgggttgcatcacttcaagtaaactttggactgtgtgcggtcattcatgcctataatcccagcactttgggagtccaaagccggagtatcacttgaagccaggagttcaagaccagcctgggcaacatagtgagac

SEQ ID NO: 157210 - DNA, 154 bp, Homo sapiens
gagggctgcggccgccgcagcgggcacggccaacgagctgcgggcccgggatcgcggcggctggacggggctggagctgtcgggagggcggagctacagggcctgcaaggatgttggctgtcccggagatgggcctgcaggggctgtacatcgg

SEQ ID NO: 157211 - DNA, 474 bp, Homo sapiens
gagggctgcggccgccgcagcgggcacggccaacgagctgcgggcccgggatcgcggcggctggacggggctggagctgtcgggagggcggaggtgagttctggggcgggggctgccgggcgccccgagtggagaaaggcgaggaggtttgccgtcccgggctgtcggctgagaccccaccaaaaacctccagactttgtctggtggggacagatctgcaagcccctctctgcagcgtggctgcgggctcgggaaggcacttggggcagcgaccttggtctcccacctgggcttcgggggaccacctcccctgtccctcgcacagctgctcagaggcttaggctggagaaactcctgtgtcttaggggctggcaggactggtgtgggctggggcctgctccagggagccaaactgagggacccggtgcctaggtctgaggtggaaacctgggagttgagtgtatgtgtgtgtgt

SEQ ID NO: 157212 - DNA, 142 bp, Homo sapiens
gcgcttcacagaaagtctaagggaaaagacagacaaacacacctgcttgggccctccttagcacaagttcgtatgtccctgtctcttcactcattcaacaaatattttctggttatctacagtgtgccagccactgtcacag

SEQ ID NO: 157213 - DNA, 442 bp, Homo sapiens
cgccattgttcctgcatggctaagtcccgggttcgtcctaattgagctgaacactagtcactgggtgccacagttctcttccatgacccacggcttctaatagagctacaacactcactgtatggcccaagtccttggaatctgtgaggccaaggaccccaggtcagagaacaaaaggcttgctgccatcttgggagcagccccaccccatcttgggagctctaagaacaaagacccgcccataacagagtgaagtggtgtgatcacagctcactgcagcctcaatctcctgggctcgagccaccctcccacctcagcctcctgagtagctgggatcacaggtgcacgccaccatgcctggataatgttttaaaataaagcataaggaggctgtcagtatgtttgccaggctggtctcaaactcctggctcaagcaatcctc

SEQ ID NO: 157214 - DNA, 498 bp, Homo sapiens
gtacagcagccactatcctgtctcttccccttgtcacctctccctggctgagccaacttgctttgcgttaactacctttctcacacatccccaagagcctacagaaaaggtctatgatcttggcttgttactaccaaatcatctcaaacctctcagcatctttacctactcagttaagtaaggaaactcacaattccttgagtagttcctgtagccctctcccagcctgaatggctcttcctggtgttgccgatgctaatcaatgactgaacacaggactgctgtctctctcatttctctgacctagctggcatatctttactttcttccctcttggcttctaatgaagacaaaactgcattgcctaattatcctttagaaagaaaaccttaacattctttaatacttgatctcttttcaatgccttctatttgtttctgtaattcagctaaaaatagttcagccattgaaaaaaatagattccaataaaacatattg

SEQ ID NO: 157215 - DNA, 470 bp, Homo sapiens
cccccaccccacccgcccctcccccgcctccccagccatctgtggcgttggcagcagcagtgccagggcggaggagggttcacgctgcacctttaccagggtaggactggccagcctgggctctaccgggcaggtcggtgggatgcttcagactggagggataggcagggggcaacactggtcctcctgaagccaccttcccttcctgagagctccttggggagaaggcaagccctggaagccaccgactgggggctcgggcagagcaagggcagggtaaggggcagcttggccaggaggcacccttgggagccagggtttcctcatctgtaaaatgtgactctgcgagggcaggagcttggtttcactcgctactgtaccccctggggcctacagcagggctggttggtacacactaggtgtctaataaatgttgagggattgaatggatggaccgatgaaaaggttgg

SEQ ID NO: 157216 - DNA, 221 bp, Homo sapiens
atgtataaactgtttttcacagtgagtcagctgacaacacaaatgaagtaggatggctagggaggcagagtcagtgatcatgaacagcagtgcttggttttgtgtgtttcaggtcagggacctaccaaacctttcctaattccttccgctgcattaaattctttctttatttgagcctctaaagcattttgttcataccttaaaacctgctttctactaga

SEQ ID NO: 157217 - DNA, 530 bp, Homo sapiens
gttcttattctttattctctcttttgtctttctgcattgattcaaataattagtctttgagctctgagattctttgctcagcttgccctgttgtgttgttaatgcctccaaccgtattatgacattccttgtgaatttttcacttccagaacttttccagttttttggtttagttctttcttaaaatggctattgcatctttcaattcttggatcattttactggattccctggattctttggattgtgttgtgactttcttctagatctcattgagtttccttgccatccaaatttctaaattgtacatctgtcatttcagccatgtcaatctggctaagaagcatttctgggaaactagtgagatcatttggaggtaaggagacacttagactttttgaattgccagagttcttgtgctgattctttctcatctgagagggctggtgttcctttatctgttttagaaattgctgtcatttgggtgggatttttatttttatattctttatttatcttaagggtttgac

SEQ ID NO: 157218 - DNA, 451 bp, Homo sapiens
gtgaatgttgtgccataggaaagctttatcacaggtgcacgttggtagccaaccaaataacgtgagtgtcaagtacagtatctagtgagtggagaataactgtaataattacaattacagttgtagttaaagtgaagtttgtatcaaaatttctgtttcaaaggtgaacttttagggggtgtatctgcagtgtttcctcctcagatgtgatttctctgaagcagtggttctctataactgacttgacacacagtgcatctgatatttcgaatgacttaagtgatagtatcaaaattactatcatatacatatttaaatcacatgactaacttgtgtgtggtattatgcaaactgctcagctcagtaagggaacagaaataagaaaaaaaaaggacaatattgggagtcttttatacaattaaatttgttcgattaaaggactatcctttct

SEQ ID NO: 157219 - DNA, 464 bp, Homo sapiens
gcgtatgactttagaggatcccagatgatgcatagaaccgggaggcggagcttgcggtgagccgagattgtgccactgcactcccgcctgggcgacagagtgagactaaagaaaaaaagaacagtctcttctcctggaaaactttcttgggacagtcccctccccactcaaccctcaggttttgtttttttacatgtatttgtcctctgtgtgtgtgtatgtgtgttactttgttggtcccttcggccgtgttttggctattaggaaggaggagtgtcgtgcatgttcccatagcagcctttgtgtgggtagtttcatgtctcttgggtcgatcctgagggttcgactgcccggtcacaaccatgttgtggttgtgtctgactataaaatgcggccgtttattttccagagtggctgtgtccccttgcgtctcatccatgatatgagggtttccagcattgtcg

SEQ ID NO: 157220 - DNA, 401 bp, Homo sapiens
ggtgggtagcaataaagattgcatggctcaaaaagcctaaaatatttactatctggcccttcacaaaacaagtttactgacctctggccgattgtgtggtctgttctggagaatgttgcatgtctacttgaaaagaatgtgcattcttttgtttctagtgaagtgttctataaatgtctattagtttaagttgcgtgatagcgcacctatggtcccagctacttgaggcgctgaggtgggaggatcgctggtgcccgggcggttgagtctgcagtgagccataactatgccactgcactccagcctgggagacggagcgagaccccgtctcaaaaaatataaaataaaaaaataaaaaaattatcgagaatggaatattgaaatgaagtattgttgttgaa

SEQ ID NO: 157221 - DNA, 311 bp, Homo sapiens
  misc_feature (10)..(10): n is a, c, g, or t
gtatgtctcnttcgttactggccaggctatattttctcctccattgattcaaatgctgactttattatatattaatgtctacaaaagtatggatctacttctggactctgttctcttccactgatttatcagttttaccagtatatccatataccacaaccaaactgtcttaattacaattggcttactttttttttttttgtgacagagtctcaccctgtcagcgggctggagtgcggtggcacgatcttggctcattgcaacctcccactcctgggttcaagcaattctcatgcctcagcctcccgagt

SEQ ID NO: 157222 - DNA, 436 bp, Homo sapiens
ggaggtaacagtggttcttaaccagagctacacatgacagtcctggaggctctgaaaataatacaggtgatgccacttatatgaaatggccagaaaacgggaatctatagaggcagaaagtagatgagtggttggctttgggggtggggggaatggggattaactgtaaagaagtatgaaggctctcatttggggtgacaaaaatgttctacaattgggttgtggtgatggttacacaactctgtaaatttactacaaatcattgagttctacacttaaaatgagacattttttgaaatatgtcagacacagaaagatatataccacatgttctcattcatatgtgggagccaaaaaaaataacgtcataaaagtagagagtagaattgtggttattagaggctgggaagcatagggtggaggagagatagggaga

SEQ ID NO: 157223 - DNA, 313 bp, Homo sapiens
tagaggatccccggcaatcaccagcgatggaagctagaggaatgatgagattcttcatagatccttgtacttacatcgagtaaactatgactaaatggtgtttataatattaaataagcataaaaagtgatactataaaccctagaaaccatatttgggtctagtgggcagaagtcaaatgaaagaactgagattgctggactactgagtttggctttccataaattcatgttggaagggaaaaatccccaaggcttaattcagtttccatattaggttctcatgccgctgtgtattccgcgctggtattccg

SEQ ID NO: 157224 - DNA, 330 bp, Homo sapiens
agccacaggaagggacaagcgcgtggagggagaggagagagggcagaagcctgaagaatgttgacactcaggcagcggaaagaggaagaggaaccagggcagcaaaggcgcagtcagagaggaagggaaacagaggccatgggagaacagacatttaccctcctagggggcagggtccagtctctttcttctgcatcattcccgagtctaacaaggtactaggcatagagtaggcacttggcaaccgctgaagtaataataaaaagcaattatgtgagagagaccaacatgtgagtgatttctaagatgcaaagaaaagaaggtaaaggc

SEQ ID NO: 157225 - DNA, 555 bp, Homo sapiens
agaatcgcttgaactcaggaggcagaggctgcatgcagtgagccgagattgtgccactgtactccagcctgggcgacggagcgagactatctcaaacaaacaaacaaacaaacaaacaaaaagaaattggggaattcaagatatataaatgaacctttaaactgcacttttgcagagaggaatttaagggttcaaagtgatgaaacagatgtattacagatatctttctgtgtttttacacttgcacatcactgacattttggaagtaaagccatattaatgcagaagtatatctcttctggactgttgggctagatttgagcaagaataatgttgtgacataacagtgttctccatcccttccctgtgatctgctcctcccttgtacagtctcatccttcctcttgacctttcctgtatctataacttttctcttgacctcttcatgcacttccccttctcagctttcctccagtctgcaactgtcttatcccttccctcagcctaaatttccgtctggcttgtaacctttttacctctgtcaactttccatcc

SEQ ID NO: 157226 - DNA, 308 bp, Homo sapiens
ggctgagggaacatgtcagagggggctggggcagtctgctgccttactttctttaccagcgtcaaagaaccatttctattagcacagtgctttacacttaccgcacaagaagtataagaattaatgaacacacattgagaataggagtaggtttgacaagaaaaagaatccaatgatgaagagggagaagaataagagtaaattgtcagagaataagatcatttgaattcctttttatttcaataaaatagtagtagtagtaatagtagcagtagcagcagctaatgtttattgagtgcttactctgg

SEQ ID NO: 157227 - DNA, 438 bp, Homo sapiens
aaggtaaatgtcctttcttccctgtctactagtatagtgaccattttctcctgaatcaaatactgcagccttgaaactagttaaaaccagggttgtgccatacttctactcagctcagaaggaggctctccatttgagaacacatgggttccttttgctaccaggacatgcagcttggaacctctgattctcagtgatgtaggcattttcttagcatacagcagcctggaatttatcataatgtacatgtcacaggaggatatgaaatagagtaaacaccttttttatagactttagattttgaggtctcactacagcagcgttttgcaactttttaaaaaagaaccaataatgatctctttggatgttcataaaagcctcacactctgctgtcccatactagattctgatatacctaactttgaaggatgtccacca

SEQ ID NO: 157228 - DNA, 293 bp, Homo sapiens
tagtttggcacctaagcgcacttagtaaattttttaaatgattccctagtattttctattttctatttactatagttcatttttgaaaaatctgtttgcaatccactaggtttattttacaagcttcagtgggtctcagctttcagtttaaaaaagcaatagaaccaagcacagtggttcacgcctgtagttctagcactttgggaggccaaagcaggaagattgcttgaggacaggcgttcaagaccagcctgggcaacatagggagatgctgtctctacaaaaaataaatt

SEQ ID NO: 157229 - DNA, 324 bp, Homo sapiens
gcgattatagcatgctccttattagggctggcaaagctgggctggtaagcgcttccatttatcaataggataatgaataaatatgtttgaatggttgaagagacggaagaaaacagaatgaagtttaggaaattatggtctaaaattgatgcaataatattatccattctctttattcagctcgaagcataaatattaccaaagaacaaatattttatttaattaacctaagggtgaattctgcagtgcaaaaacaaacaaatcattttttatttttagagatgaggtcgcacccggttgtccaggttggagtgcagaggcaca

SEQ ID NO: 157230 - DNA, 283 bp, Homo sapiens
gcaggaagattgcttgaggccatgagtttgaggttgcagtgagctatgatcacaccactgcactatagcctgggcagaagagtgaaattctgtctcaaaaatatgatcctggtggttagatttgttattggatttttaataatttatttgttcatgtttaccaaacatttatttcaatacttcccatatgccaggtattgtgccccctactaaggaatccaaagtcaataagatccatgacctctctaatttagtctctctatgagtacctgtctacagcatc

SEQ ID NO: 157231 - DNA, 450 bp, Homo sapiens
gactccaggggcctcagtgagggaggctgcctgcagcccagcagcctggtatttcttcatgggatggagaggccgaccctgcctcctgattccctgttctccccagaccgcccatccactctgctttgccagctggaaattacagtcctagaggtttctgccatccccacctgttacccctttcgtccctaaatcctgtcctttctgccttctgtatcctaaatccaactccgtgacagccaggaccatgtctggctcacgtaaatcagtcacctcctttcatctcaccggctcacctggagggtggcagaggcatttcttcctcttctccaaagtctgcctgctctgtagatgcctgggggttcctgtgatgatcacgtctctgccttaccatgctccccattgcctgcagggccaggtgcaaattcttaggctggtccctaggccccc

SEQ ID NO: 157232 - DNA, 489 bp, Homo sapiens
gaaggtgttatgtgagctaagatatcactgttacaaaaaagctgaagacgtaaaaatctgaggaaggacactcacccagaatgaggggcaactgcaaaatctgtggaagaaataaattctttgtgcctgaggagtgtaaagaaagtcagtatgaataacgtataggaaacaaatgacacagtggcaagaagaaggttgtagcgcacattcaggtcagatcatattggtcttgtaggccctgcgtgattttgtttaaggagccatctatgattctaggtgtgctgggattccattggttggtgtaagccagggagtgacaggatcagatcattcattcaggcttctctgtgcaggatgaatatgaataagggagctcgactcaatgagttcctaagtgcaagcaaagaaaccagctttggctggtttaagcagaaagttatattttttggtcagcatattgattaacccggagaattgccaggaaggctg

SEQ ID NO: 157233 - DNA, 319 bp, Homo sapiens
tacagatcaactgaacagagaacccggaaataaagccacgtatctacagccaagtgatctttgacaaagttgacaagaatatatgctgcagaaaggacacatacttttcaataaatggtgctgggaaaactggattaacatatgtataagaatgaaactgaatccctatctgttaccatacttaaaaataaactctcattaaatttacacagaaaagaaaaatcataaatttctcccaagccagctgcaattttcataaggattgtgttgaatttgtagatcagtttagtattactattttttcatttaagattatagt

SEQ ID NO: 157234 - DNA, 513 bp, Homo sapiens
acccttattttcaaaaatttctacaaacaaaaagaaaaagcccaaaaaaacatttcagctgctggaacagtatggacactgatcactgagtactgtatgtgccttgaggcattgtgtttttgtgtaacgagattgccatactgatagtttgcttctctttacatgggcattagattaggtttcagataggagactccacataaatcacatacaaaatgtggaagataggctggttgtggtggctcatgcctgtaatcccagcactttgggaggctgaggcgggcagattgcctgaggtcaggagttcaagaccagtctggccaacatggtgaaaccccatctctcctaaaaatacaaaaaaattagccgagtgtggtggcatgtgcctggaatcccagctactcgggaggctgaggcaggggaattgcttgaatcagagaggtggaggttgcagtgagctgaaatcttactactgcactccagcctgggcgacaaagcgagactctgtctcaa

SEQ ID NO: 157235 - DNA, 221 bp, Homo sapiens
  misc_feature (47)..(47): n is a, c, g, or t
  misc_feature (85)..(85): n is a, c, g, or t
gcgtatcgtacaggacttgagtcttaaatgtgcagcaaggataaaantcaagggaatttgtcagatatggttactttcacatttncagtgttacttgatgtctccaaagccgtatatgtatcagacatataaatgtattaaaaacaagtttcaaaaataaaaaataatgaaagcccaagtggcaaaccacatgcactacgttgaagtactaaaataactgg

SEQ ID NO: 157236 - DNA, 289 bp, Homo sapiens
tgggcagtgattacctgtcatccttcctaccaggaagtcctcaggcttctagtataccacttttcttgtctggatttggattttcatgaaaatctttttattatttctgacgctccggggcaggaatgggaggttgcaacgtgtgctcagtgtgcatcttgccgagcttggcagaacgctagggaaatcgccaccctttccctcatccttcctacccctcacacctagagccagctgatcaccttatcagactggactgtgaggcagccaagaaagcaggagatcagga

SEQ ID NO: 157237 - DNA, 218 bp, Homo sapiens
agagcagatgtggaaggcaagtattcccattaaacatttactcttcagaggactctgccaagccaagcctaaattctgccttcagaacaaaggtaagcactctttcagactggtgggcatatccacagggagccagctgatgccaggaggagaaattgggagaacagcaggctttctaagcaatttggaactaaaggaaggaaaacccgccgaacaag

SEQ ID NO: 157238 - DNA, 195 bp, Homo sapiens
atgttttgctacttttttgtggaatgttttatttttttggagtcaggtagacctaatcaactctgactctacagcctactaactctgggcaagtttcacaatccttctgaccctgtttgcccatctgtaaaatgggactggatacacagccttgctgcaagtattaaatgacttatgtgtgaagcacacagtaca

SEQ ID NO: 157239 - DNA, 459 bp, Homo sapiens
ctcttatgaggacactagtcacattggatttagaacctacctaatccagtatgacctcatcttaactacagtcatgcatcataatgacatttcggtcaatggcacactaaatatatgattatagtctcattagattattgtaccccaattgcctacagtagtcagtacagtaacaggctgtagaggtttgcagcctaggaacaataggatatagtatatggtctaggtgtgtaggagactgtaccgtctaggtttgtgtgagtacactctatgatgtttggacaatgatgaaatcacctaacaacacattactcagaatgtaaccacaatgttaagcaatgcatgacatcgcaaagaccctatttccaaataaggtcatagtctaaggttctagagaaaacatgaatttaggagagacatgcttcaacccagtacacagctccagttctacctctgaac

SEQ ID NO: 157240 - DNA, 461 bp, Homo sapiens
agatgtctcctgggcccccctcaacatcagagggactctcctgacaccgttgctcccaccttggcgtgtggggccgagatgctgcctcctggttttttcccaggatgaggaaccctgcgatgccaatccctctccctccctgtccccccgcaggcctcttgtctcctttcaggctcctggagatttgtttacagtttatttttctttatttttataacagcttcattgagatacaagtcacatactgttcaaataacccatttaagctgtacaattccgtggtacgattgaatgggattcacagaattgtgcaaccacccctccatcaattttcaaatattttcatctccccaaaagaaaacctgataccctttagccatcatccccaaaccttccattctactgtagccctcgatttgcctattctgagcatgtcatataaatgtagtcatacaatatat

SEQ ID NO: 157241 - DNA, 193 bp, Homo sapiens
tttcctctgtgttcttaagtaagaatttctaaagcctcgttgttatgttcatgaatgaatgaagtgaaagtgatacaggtttgctataatttcagagtcctaaggctggaggttgtggtagggccagttttggttggctgaagcctgttcatgattatcctcccacgctaaaggctctgggtcagagttttgt

SEQ ID NO: 157242 - DNA, 375 bp, Homo sapiens
atctctggtgctcatgaaggcagctctgagcctggctccttagtacccagggctcatgggcactttattctgcttccctgtgcacctcagttccctcctcagtaaaggagacggtaaaggtattgacttcatggagctaacagcatgagtgagtgcccgaggcaatgagaacccggctcaccacatgcttgtccagcccatgtcacctagaaagatgtttaagaatggagactgcatcgttattggtgccctgctgggcagggatctgaaataggggcaggaggtttgcttcaacctgctccacccacagggtgtggcctcatggtcagttttcttccagggctttgtgcttgggatttcttttcttttcttttt

SEQ ID NO: 157243 - DNA, 399 bp, Homo sapiens
tttaagaataactgaatttagagcagaactggacaaacttgagacccaaagtccataaaaaaaatcaaagaaaccaaaaatttgttctttgaaaggataaacaagattgatacactgctagctagattgacaagaaagagagaaaatccaaaccataaatgacaaaagtgacattaaaagcaatcccacagaaatacaaaaaatcctcagagaccattataaacatcttctatgcacacaaatttaaaaatctagaggaaatggataaattcctggcaacacacaatttcccaagattgaatcaggaagaaattgaaaccctgaacagaacaatatcaagttccaatattgaaccaataataaaaaacctaccaatcaaaaaacgctccagaccaaatg

SEQ ID NO: 157244 - DNA, 716 bp, Homo sapiens
tcagcctgggcaacaagagtgaaacttcatctcaaaaaaaacaaaacaaaacaaaacaaaaaaaactgacccacgagtgtcctctcttactgcaggtttatttactctgaggacactgaggcccggcatggatgcctcaccacaactcggctacagccagccaagtggaggggctgcccctacaaacagcgctctgtcctcattgatcaaagtccacacatcgttggtttggtcttgacctcacaatggtgctgtgtgatggacttggacctctagtgtagtccatgggtggtgcccctgccaagcagagggcaagctgttcatggagagtctgtttctcaaccagtgcattaaaagtgttggggcttccttgcaataagactttctttatgactgaggttgacacatttccctgaaacacacagcatcaggaatccctgtcctgatgtattgaaacattccttcgtttatgaaaacagtactgttactctctggccatcaggcctgtgtttcgagcccctttttcgggattgtggtggatttgtgctcatctttgtttgcttcattttctcttgcctggcccccaggagggacagcgacacatctgttgcccccactggggagcttgggtcttgttatgaactccgaaagagaagagcatcaccagcacttgtgagccacaagcccccactcagatcccttacggccgtgtctca

SEQ ID NO: 157245 - DNA, 554 bp, Homo sapiens
agtcttgcctaaaaggggtgctctctggggttctcaatcctagattatgtgacgttttatgtgtggtaacaaattaatgggagataatggtgcctctgaagggccagagagattttgattatgtgaagatgacacctagtgctaacttctttaggaaataaacactatgcagatgcactaacgcttcctttaatggcttaacacactcttcaattgacttttgggtaaagctaaaggttgtgttgaccagtttcgtctgcggggagcctatagaagccacgtctaaagttgaagtagctggaaactgcaacttagaataagattgcttcttcagccacaactgtagtgtccctgccacttgccaccacaacgctgttctcctttttcaactgtggagaatctctttcacctgtcaaacacgattatgcagccctctctatagcatgctctacggtacatatcactacagctgttttatatgtaaaagagacttacaaagacattactatgcatagtgatgtctttgtaagtctctttgtcgacgcggccgcgaa

SEQ ID NO: 157246 - DNA, 889 bp, Homo sapiens
  misc_feature (368)..(368): n is a, c, g, or t
  misc_feature (498)..(498): n is a, c, g, or t
ttttttattaaacattaaataaaataataaatgtaaagtgcctggcagacagtatctacttggggtaagtattaatgattggctacattcaagagcaattcaaagagagaaatcactgcctctaaaaactagttgctgtacagatataatacataatatccctgaagtaatttataatactttcaactggagaaataaagaaaaaatacaagattcaacaaaatgtcaagattgggattaatggggcgattataagtttgttgaattattaaccaacaaggccagaaaatcaatgtgctgtcctaaatatggtttgttgcattactctcaaaaggttaagaagacactggcctggtgttaacaggggnccttgaattgaacatattgcatttttctttatcggtatgctccgataaagaaaatgtttttatgggtatgaggagcatacccataaaaaaaatgcaatagtacctacaactctttcgggaactgactgtntttgaaaaaataacagtcagctgccttttacgggggttggtggggaggtaattatctaaatataaggtggcaagtgaaaactagttacctaagaaattgcattacttaagagaagtcgccaaggttcactacatcacatctttcaaatcttaaatgagcacctttcctcacattatccctttgtcggaagcaatttctctttacaactattctggctacctcagacctccatccaaaattctcctgaatccttcattatcgacaaagcctggagcagaacgcaagcattcctttctgaaagcacacatacttactgatcactgctttccaaaaatgcatctaatgcccaagcatgaaattacaagcttgttctcttatgtctcagccatga

SEQ ID NO: 157247 - DNA, 175 bp, Homo sapiens
gatgtgcttagactatgtctaagcctgggtttcccccaccggggttctgagcccttgaaggaagtgtacctggcattgggacgctttggagaagcaactactctagaggccccaggacagaacagccaggcagccccaagaccagtcagcccagagggcggagctggcccggcag

SEQ ID NO: 157248 - DNA, 389 bp, Homo sapiens
acaactagaggatccccccccctgtgaatacctggtcccccttatcactatgccttctctgaattcctagcagccatttctgcctaaaatctataacctaaaatttcactttaaaaggctggaaagaaagcaaagcagaagaaaattttaaaaagcagaaaccaatgagatactaaagacaaatactgacaattacctcagttggttatttgaaaaaataaccgataaatcactagactggtcaagataaaaagaacatactggccagatgcagtggctcacgcctgtaatcctaacactttgggaggccgagaagggtgaacagcttgaggcctttcccccatctatgtttatgatcacctccccttcacttcaaggggaaatgatca

SEQ ID NO: 157249 - DNA, 190 bp, Homo sapiens
tagtatgcctctttcccctccacccagcatctggcccactgtcttgaacataggagatggccagaatttgcttgttttttttcctttggtgtggcgtcatttgtaaagctctgacccagagaggataggaaggtttcttaaggtcacatagcaagaagtggtggagaagctatggtgtcagaattgagag

SEQ ID NO: 157250 - DNA, 345 bp, Homo sapiens
gcactccacgcgggtgggtgacaagagcaaaactccatttaaaaaaaaaagaagtagtgaggaggtagaaatgagtgaattcatagtgcctgaggagttaaatggtgttacaggtaagcctcccacatctgaaaatctgaaatctgaatgcttcctaatctgaaacttttggatgctcaaaggaaattctcaatggagcatttgagatttcagaattttaaatttgggatgttcaaccagtaagtataatgcagatattctgaaatctgaaaaaatctgaaatgtgaatcacctctggtctgaagcatttcatagaaggatactcaacctgtattaaagtagaaa

SEQ ID NO: 157251 - DNA, 231 bp, Homo sapiens
tcacaaccggaggtcaagatgtgtgggaacagtcacgagtttagaaatcagataacacacagttcaactccagggtcactgccacaatagagtgattttagtcaagctacctaggttccaccaagtagacttggagatgagaatacgcacaggctcagaggggctgtgaggtgcaatcatgtattctgttagagatcacaaagcagaagtatgccaggcacacagtaggtg

SEQ ID NO: 157252 - DNA, 427 bp, Homo sapiens
gcctcaggggcagctatttgtgggcatcagaagtggcattagtgctatccacagacagcaacaccacccctatggccacctgtgggcatctataggggtggatgatgccttgatgatttccttggatgtcatggctaagccattgttttttggcagctgcagcttctgaagatgttactgagagccacagagaaagtgaagacggctaagacaaccaggtcatgcgagacatgcccaagacgcccagattgcttaaaagacatttgggaaagggagcatttaaagttctttccagaggatggatggggacaaaactacctggagagcctattttttattcccaggcaaatatgactgaaaaaaaaaaaatcacaggtgttaaagaagaaaaataaaattggatgaaaaaatgtctctgctttttctg

SEQ ID NO: 157253 - DNA, 476 bp, Homo sapiens
tgggcttggccagagaggtgcagagatacctggaggtgcaggaacagtgttggactaggctgatgtttcctgacccttgaggacctgagtgtggcacatagctgaccaactgcctttaattcttcttagttgcctttaatgtccaagggataagcaggaggaggagtgaattgtctggtgtctcagataggatgtctgcaaagaagggtccagaaggatagccaagcaggagaggaaaacacaggtagacagagctagactgtggtataaccatcccttcctgggaaccaaagaaagcaaagaaacacaaagttatttagtgcttattataggccaatatgctaaatgctttgcagatattattttgtcttcatgataaacctgtgtgcaggtgttacaattgctgctttatgaataaggagactaaggctaagaatgggtaaactcaactggcctctactgatcacacaataggt

SEQ ID NO: 157254 - DNA, 572 bp, Homo sapiens
agttgaggtctgaaaactgtcacagcaggctggtgaggcactccatgcttgggagtggaggtggctttcctgggagaaacgtgtgtgtggaggggaagttcagagccaagttctgttggttggttgtggtcagcgctggtttcagaggaaccaccgtgagtccctggtctccaagccacttgccttcccctttggctgggtgtgttgttgcagggatgtgggcaggcgggagagccagtagagacatcttaaaggaagatgtgtgtctggttggctggtttggggagggtctgattgggggtatgtcttgggcatctccgtgccgtcaactggagctcattacaaacagcgcttccctaatatgcaacagggagacactttgctgagatgggccttctgtcctttttcctttctgtgacttgctattggtgaatggctcttcttttccatggaccatgagcttgaagggccagggaggacaaagccccatcgtcctcatcctaaatcggaagtcagtggccttctccatgctatggctgctgtctatgtctgctcagcctgtttgtttgatg

SEQ ID NO: 157255 - DNA, 545 bp, Homo sapiens
ctcggtaccatgtagaccaggctgaggaagacggtggctttcctgggagaaacgtgtgtgtggaggggaagttcagagccaagttctgttggttggttgtggtcagcgctggtttcagaggaaccaccgtgagtccctggtctccaagccacttgccttcccctttggctgggtgtgttgttgcagggatgtgggcaggcgggagagccagtagagacatcttaaaggaagatgtgtgtctggttggctggtttggggagggtctgattgggggtatgtcttgggcatctccgtgccgtcaactggagctcattacaaacagcgcttccctaatatgcaacagggagacactttgctgagatgggccttctgtcctttttcctttctgtgacttgctattggtgaatggctcttcttttccatggaccatgagcttgaagggccagggaggacaaagccccatcgtcctcatcctaaatcggaagtcagtggccttctccatgctatggctgctgtctatgtctgctcagcctgtttgtttgatg

SEQ ID NO: 157256 - DNA, 426 bp, Homo sapiens
caaggccatgcctcagtcccccaagagaacagaggctggggtcacgaggcccagcttcctctccctcctctctgtgtgaccccccaacaggtggctgcccctctctgaactttgtggcagctcctgtgagcggagcaagctgaacccactcttggctttcccatcccaacgaatgatttatttggttaaactatgacccaaccaggtggacatctggaaaatgcaaattaagaagagaaggggaatttaaaacatttgctcaccccaacttgggtgcagtgagtgtagacatgttgggtgtttggccttctggaagaggtttctttctttctttctttctttctttgtttttgagacagcatcttgctctgttgcccaggctagagtaaagtggtgtgatctcagctcactgcaacctctgcctcc

SEQ ID NO: 157257 - DNA, 383 bp, Homo sapiens
gcctgttgtcctaaatgatcacagggctggcatcacccttgctgtgatgggctggcaggccaatgtgcttggccctcctgccaaaagtatctacgcacattctgccatggatggtacatttgcatgctcccctctccttaaaatctgagctgggagatggggaagaatgaaaggagaaaatcaaattaaatgtttgaccagcagaatgaattctgtctccagtgaggctggcttgcatttgtcttgctttttattttctgaactttctctcaccataaatcctttttcctttccttttacccattaaaatgtttttactctttgtgccagcactttgtcctttggctctttctgtgtctgtcccagctccataatcctcccca

SEQ ID NO: 157258 - DNA, 391 bp, Homo sapiens
gagttgagttaggctatcttcccggagcttctctttatcgctagatgcagtcagctggaaacatatgcctgctaattgctgaatgtgtgcctcatggagcaacggtgcagttgtcgaacgacctcggggaaacaagtctaggcctatttgtgcatttctttctttcaccatgggactcaagtgcttcgccaggccactattaggacagtggaaaatcaaggtggaaggctctgatgaaatcaattatcactaagttattttcactggtgaaggggtttcctcacaggggtttaatagtaaattattctttccatgggatgtgctagattaatggaggaaacaaagcaaacaaatgttgcctggtaagactaagaggagggtcccaaaatac

SEQ ID NO: 157259 - DNA, 157 bp, Homo sapiens
ctcccttcttattgaaacttcattcctaaggctttcatgaacccatacttctctgattatccttgtacttaattattccttctttttacctttgtgggtccttctcctccattcatttaaatattgatttatgtgtcccagggttctatcttcatca

SEQ ID NO: 157260 - DNA, 391 bp, Homo sapiens
gatgcagactgaggctgtctctacaggacgaggcacccagtgtaggaagacttctcacaccacatacagcctctccctgtgtccttgctcagagagggtgagcgtctgcccagtgacacagcctgggagcaggatccacaggaaggcctgggatgcagccatggccagggccacatggtgcacacactacagtccatgcagccaggccagggccacacaccacagtccccgcgaccttaggcctaggggtcacccctccggtttgtagcagaggtggaggtgagttgctaagggaggggtgggcactcctggcaggtggccatctctccaccagtggtggcccatggcagagtagacaggagcagtgctcttggggcagagcgcctgtgtg

SEQ ID NO: 157261 - DNA, 590 bp, Homo sapiens
ggggggtttcctaggttgtggagagagcttggttagtgaaaggtagcttgggttctgtcactaacctgtgattgctgtgccatgcacacacctctctgggccttagtttcccctcagtaaattgtcacatccaggacattggagaaagtgagtgggagattaggcacttaatgctgtgagcttgcttttttgtggttacaagtgggaagcccccatccccactgttaattgaaatctggtgtcatacctgtagctagtccagaggcagcgcttgtgtcctgaggctgcccttttgtgaacaacagtgcttcctgtcactcctggggaagcagggttggggtctgtctggagaatgagcccagcaagggcctagtgctttcatagccggaggtcatagcggctggctggctcagtggggatgcaaggtccgagtatgccctggtccagctggccacccttctctaggttcagaccaagggtaggagacaggccaacaggcaccaaagtgtttaagcgacagggtcttgctatgttccccaggctggaatgcagtggcagttcacaggcatgatcacacatcctctaactcc

SEQ ID NO: 157262 - DNA, 514 bp, Homo sapiens
gctaagaaacaggtaattatgataaagcatgatcaatattatgatcaaggaaaatatggtgcaccatgagaattaatagcaaggaagagggtcttatccttgttcaatgtgggaagaagataaggaatttggacatcatcctaaggacaacagaaaagaggagtgctatggctggatttatgttctaaaaagatcactctggctgctgtgtgaaaagcttgagaagagcaagcctagcatcagggatactaactgggagatttttttcttttttgagacaaggtctcactctgttgcccaggctgaagtgcagtggtgctatgacagctcactgcagcctcccaagtagctatgattaggtgtgcatgaccacacctggataatttttgcctttttttttttttttttttggtagagatggagttttgtcatgttgcccaggctgatctatctcaaactcctgggctcaagtgatccacctgccatggcctcccaaagtgctggggttacaggc

SEQ ID NO: 157263 - DNA, 283 bp, Homo sapiens
ctcccgctgagtcagacgctctggttgtggggcttgggcatctgagttgaaccagccctcggcgctgcttttgcatgcaaacattagagaaccacgtgtgtcaggactatccgatgcggtgctgtcaaattccatcacgactgggtgaaaacttgattctgaggcatgagaaggtgagaggctgcagggagtgggaaggtttggtttgtgacaggaaagggcaacagtcactgggcaccaaggaacccagagtcaaaaactaggtgagagtggtaagttacgg

SEQ ID NO: 157264 - DNA, 786 bp, Homo sapiens
ttctgaaaactcctgaaaagagaggcaataaactgtgtggaaagaatatgctgacacccactgccaatttcccattgtcaacccaacccaacccaacgtcaccaaacggagaagaatatgcttagaaacaaccagatagctgctgacaggaatgcgactctcacccaggaaggcagagtcttaaaagacagaatcaaagcacgctggcattgggaaggacctggcgaccacttagtcccactctctcatttatatcatagatggggagactgaagcccagagagcagtaagtgtttctgccccattctggaagcctctgaagtgcacacagggctagcagtttttggtcccattgtccagcactgaaatcatcttcctcaccagaccaattttctcctccacactgtctcagcatcagcatcagcaccagcaccagcagccacctgagtcagtgcttattcctcttccctcacccacatctaactggttaacacgccctataagtccagcaaagcctctcccctactagacagctccctcctggcctcccaaacctctgacgggctgcgggacacctaccacctggaacatgggagactgggaccaaaagcttccttgaatagaaaacaaatcacagggggcagctgacctcttcccagtatagccagtcaagggaaagctctgagccatcccatgatggctacagaggtcataaagacccctgaggactaaacaaacacaatttacctagagaaaataaaccgggctgggtggggtggctcacac

SEQ ID NO: 157265 - DNA, 490 bp, Homo sapiens
tgctggggtttattgggttttagatctcctaggagatcttgaaccttatgtgtagatcctcaaagtaaatgtggagcgtttgttaggatttttagaaacagtactaagtagcaacccctctttcagcctttcttgtcacttctaaagtccttaccctctgccatccttagcaatctccaggaaacaatgaaagagtatcttccttcttgaaatgtagggactcagctctggaggctctgagtgacaaagaaatgatgggagagagatggggagaagaaagtgggaagagaggggaggattctcaagggagattttcagtttcttaggagagattttcagttgtggaaccactttcatttttggcccttagctctgtatgtcccagcttggactcttagagataaggcggagaaaatttcatataattagttcataaccacagaactcactgaatgaaaaccagtcactgggcctatgatgaggtacttgt

SEQ ID NO: 157266 - DNA, 636 bp, Homo sapiens
cttcttggctgtgaaattagacaaaaactcattgaaaattgaatctacatatccattcatcctaaagagggagcacaacatcttctgaagatctagggaaatgctcataagatgtaaagttttaattcctgaattttgctgacaggcgatcatatttccttcctcttttgcatcaggccaaggcactggatagctgaggttgccaaccaaataacttacaaataagtgagatgttcctgtagttcagttgcattatattctaagaaatgaacttacccacacagaaagcagaaggaacacagtggcttctggaatattcctctctccctctccagaagcagaggaggaaaagtacattttaatccattcatcctaacgagacagcacagcatcttctgaccaccagagggcactgtgtaaacagtaggcttttctcagctaaaaacgcttcaccaggaaatcccttattgcacatggcattcatattcttagggttcgttttgtaggacttctatttcaaagtactaattctgtggactcagattttgtctggaacccacttaaaaatgcccctccctgtattttgtctcagctgccaccactatgtaccaatcacctagactacttgggagctac

SEQ ID NO: 157267 - DNA, 245 bp, Homo sapiens
ttgttaaagagaaatgtgacagttgtatgactttcccacctttccagatgggaaatgtctgggctgaaccccaggtggtctgataacccctatgtccaagccaatggcaaagctcaggaagttaggggccatgcagcatgggctgtcgggatagtattgccatgaggacataggattgggccaccataagctaagggggattcttttttttttctaatttgacatataggacactctcaattact

SEQ ID NO: 157268 - DNA, 808 bp, Homo sapiens
aaagcccaggcccagtgggaatacgtatcacctgctcatgtcccatgggtgagaacttagtcatgtggcaaagctggatgaaaggaaggctggcaagtagagccttagcaacagctccacactatggaggagaaacggtgacattttggggggatagtcatgtctgtcgcccatggctgtcaaggttcattattctctgatcccatcctccttcgtctgtcttcccttctgctatttaagcccctccttccctttcatatgcaggctgggggcttcctgagggctaggaccctgaatgatttacttttgtatcctcagtgcttcagtgcataaggtagggcacaggaaggagctcaccaaatacttgtgaaatgactgtcagggcccagggaaacctgtaagacaggaataaccatcgatagcagcacgtgtgccagaaccaaagccacagcgtcttgaactttcaaggaggccagatgatcttctgggccgccttccaaggtggcatccttcctctgtggctctgggcacactcacgagtgcctgtggattcatttgcccagtcttccaccttccctaagcagttggaggctagagctgcactgttcagtacagtagccagtgtctaaatttggctatttaaattaattaaaattaaattaaaaattcacttcctcatctgcaccatagcaatactccaggtactcaatagtcacaggtggctagtggccatgcatagaaagttccattgtccaaaactgggtttgatctttgggcttttggcaacatgacttctgttagaagatcc

SEQ ID NO: 157269 - DNA, 338 bp, Homo sapiens
ccaggataagaaccttgtgggtctgttgggagatttaatatgagtttttatcccttttattgatgctgtcaatgcagctaacaaggcttaggttctcctagcgagaggattcgtgattttgagcaccattttgtactaagatgttgtttatggaaatactctttcatgtttggagaatcatattactccactccaccaacaaggacgcatttcaatcagaatttggaacgggctggttattgattgacagtcttttttgggtcctaatggtctgcgtacttacctttctagaaatgatctcagctgtaagcttgcattacagcacatgacttatttga

SEQ ID NO: 157270 - DNA, 478 bp, Homo sapiens
agccacaagaactcattcagtatcattaggagacttgtcatcatcttgacgtcatttatgatcttcctcacatttcaaggctgttactgcattgctttctagaagatcttcagaggccttcttcaatggcagctactatttagtaatcactctccagaaataagtattaaatctgtgtttaaaaccgaatcctcccctttttataaaactagtttgttgttgtaaccatgacaaagtatccaatattagagttggcttgacatccttccatacctcagtgtccctgactagtgatgagaacttcactgtctcagccatttcacagactaactggagagatgcctctgggactgggactctacattcctcttttgaaatcccaaacaccattcctttccctgggcatgactgcatacttggatttctctttctcacttccaggtttttttgaagctttttttttttttttttttggccc

SEQ ID NO: 157271 - DNA, 105 bp, Homo sapiens
ctggctttgacgtggtgctactagttgagtgtcttaattccactgagagatggtataagggagatgggcttccccacctataaaccagatacacacatgtttgta

SEQ ID NO: 157272 - DNA, 588 bp, Homo sapiens
atttagcacatgacagatgggttggagggcagcaagagtggagtcaggcaggccagtgagaaagctgttgcagtaatccaggagaggagggctttggaaaattggacaaagtaatggtagaagggctggaggtaactgaattgtttcaagagaaaattagaagatagaatagatagcatttggtacttataaataggatatgttaagatgatgaggaacaagtctaggatgatactcaattttctaatttgagcacagagtagaggacaatggaagtaacatggtttgggaaaagttgtcttctgagatagaagcataccctctttctttcctgcattctgagataaagcttaagccctgggattactgctccttgagtcaccttcccttcttccttacctgaatatcatagctcataatcctctgcacctgctctggtccccaccctgactccttgttccctgtagtccaggaggtctcagacctcttccagtgcttgggggcttggatacaggcagatacatagggaagaccatgtgaaagcactggttgaagatggccacctacaagccaagaagtgctgatcac

SEQ ID NO: 157273 - DNA, 282 bp, Homo sapiens
caaaaaaactctttcattcctaacgctacctatgtggacacagtcagtttccagctctccctccgaagtcctcccgactgtacctgcttgtccctggacagcgacctctggcctggccaccaaggctgcagcttggagctctgtcaggccctgtgcacagccatttctgactctcccctttcctagatgactgtgtgtacatgtgtgcgtgcgcgagtgtgggcatgtgcgtgcatgcacacgcttgtgtgtatgtgtgtgtctccatatctctggtgccac

SEQ ID NO: 157274 - DNA, 372 bp, Homo sapiens
ttggagaccagctggggaaacacagtgagatcccagctctaaaaaaattttaaaattagctgggaggatggcttgagcccaggagttcaaggttacagtgaactatgatggcgccacggcactctagcctggcagcctgggtgaaagaaaaagactctcttaaaaaataaataaataaaaaagagtcttgtctaagaattctgaacctggggtcccctgatgtatgtaaaactccaaaaatttttcgaaacaacatataacagatgaattaggacctaaaacttaaaagaaccactgattaaggcaaatgccctaactttacacacaaaggaactgcagaaaagaaggaaatgtctccaaagtgcttctcaa

SEQ ID NO: 157275 - DNA, 555 bp, Homo sapiens
accagcagttattgaatgagtggctcagggtttcacatgcgaagctgacagggaaggtgtctggggtcctcccgtagtcatctcgcctcttcacagatggaaactccccacttcttctccctggggcggcctttccctcactctcctggttccttcccccgaagctggaaatgctggttgtaagagcccaggccccacgtacccagccagtgtccaccccaagaaaggggctgaaatgtggagcaaacttcccattccatcacgaacgggggaaatgagcttgtgtttctttgaaataagccaatattaaactttaaaggaaaagatatattactgaagtctttaagtgtatacagtcggcccttcatctcttccagttccgcatccaaggattcaaccaactagggatacttgggaataaaatcaataaaaaagaacaatacaacagttaaaaaattaaaaaccaatacagcagaacaactatttacataacattaccttgtattaggtattataagtcatcacgaaatgatttaaagtacacagcggggatgt

SEQ ID NO: 157276 - DNA, 268 bp, Homo sapiens
tatattaaattcagactcaggtgaacattgctcattcatccaagaatcttaaagaacttgagctttggccctttaatcgagtccagagcatgacccattaagttattcttgcagtttgtgaaatccagtggtatgttccattaggcatgtgagcattccaaaacactgcacataacatgcacactgcagcatcattagtaccccatcctttccatttgcatttgccctaacaaatgtgtgtgtttataaatgggcacacactttttgt

SEQ ID NO: 157277 - DNA, 298 bp, Homo sapiens
agtctgtccctgggctgagaagggaggggagaagagggaagagatggaaaaggaacattgctcttcccagtctccctggcctcgtcatataaccttttattttacaaattcagtcttgtggcattttgctttaatgcttagagctggccccaggtgccaggcagcaggcacatttccttctgcccaaaaaacaaaacacacatgaatctgaggttgggcgtggtaagggcaggccaaggctgaccgtcctatgtggatatctgtgaggtagtgtgcctacatgtaagggtctgttgtg

SEQ ID NO: 157278 - DNA, 302 bp, Homo sapiens
ccctcgcctcttcacactcctgtaggttccctggaggccacaggtgtacttcagggctgcgaagctgtcagcccaaagctctacaatgtgaccctgcaaggccagccactctgagctgcaaacccttacacgcaaaggtctcttctggctcaaaggttttcaaaagttactcctctaagatcgtgaatctctgtacctctggactctgtggaggtttactctgataccacctgacacaggtgagtaaggggccactttcccccttcttccttccagagatggcctctgcgattagggatagt

SEQ ID NO: 157279 - DNA, 603 bp, Homo sapiens
taattgctagagtctttgggtaaggtgttactgcctctgtttcacagatggacaaactgaggctcagaatgttaagggtttgcccaaatttaaacacttagtaggtaatactgaaagaattgaatctgcacagccctatagtctgaatgaaatcccaatggcagaattcttaattagtattttaatagcttgaactttaaggtatttctgcttaacgtattaggttttccttagtgagcctcagtttttgttagctgaggaaaatggataattgaaagcatgtaaaattttcccttatgttagagagtgaatgttaagcatggataatgcagctaaatagctgtaatcatccactatgcatagccaatagtcaacagatgttcaacatagatccaacagatctaaggggaaaaaacacctaccacatctaacctaacacaggactttatttgcaataatgcatcctaaaacgaaggtcaattttggcacacaaacaacaattttggcaattcttactttttgacatcatattttcctattttagggctgtatgctggcttcatccaaagaaaaacttggcagtctaaacagtgtatatagatg

SEQ ID NO: 157280 - DNA, 412 bp, Homo sapiens
ccgggagcccttaaccctccgggagaccttcccctccaggaggccctccaggctgccccagcccacgcagagccccagcttcagagctcctaccagctctgccaggaagtgagaaccacaggcctcccctcactgactcctcgtctcctctacccgccagcagaggcgctctcagggtttgctcttcatccttccctcctgtctccctgcagcacggacagcacaagctgcagatagatagatgcgcgagtctgcatgaggaccaggtgtcaggctgggctgagaagcagcagccagggtccaaggggggcagatgatgcccaggttttcgcctgcccacgaggcttacaaccatgccatgatcaggacagccaggggggcaccaagcagcctctcttctacttgttccttc

SEQ ID NO: 157281 - DNA, 298 bp, Homo sapiens
  misc_feature (5)..(5): n is a, c, g, or t
actanaggacccctctatccttatctcttgatttctctggggaattggttaagagatgcatgagggtcttattaacacagtgtggaacatagggataacaataatttgcaatttaaagaattatttaggaaacaaaatatgcagaactagctcgactgtttattaaatataatgacatagttaaatattgatgggggaagggagtagtctgtattacatccagaggagggatggttctactggaacttactggacagctagatgacaatatgaagatctaaggaatggggaagagaag

SEQ ID NO: 157282 - DNA, 398 bp, Homo sapiens
cttcctccccctccccacactcctgcaggcgcggggcgcaacttgcaatccgaacttcgcgcggccggagcaagtttgtcggggcgagaagcgcctggtcctcggtccgcaccaccgcactaggtccccgccaccgccccaccactgtgtcaggggccaggcgtggcccccggctggctagggaaccgagcgcggcgccgcggctgcgcattccgtgcgggacgccgctgtctcccaagggtcgggataaactagggggcggttgatctgaaagtcttagccacgactaatagtcaaccgcccaggtgcgacccgcagcagccttggcgatgcagctcgttctccagacgcgggtccacaccggcgcgtcctcgcctccagggaccgatcgctgttct

SEQ ID NO: 157283 - DNA, 152 bp, Homo sapiens
caatgagccgagatggcgccactgcactccatcttgggcgacagagcgagactcagtcttgagcccacaagagtacagggaggtaagaatgtagtgggtgtctggccaagctgggcttaagtttcagttacagctgaatctgcacaaacccc

SEQ ID NO: 157284 - DNA, 966 bp, Homo sapiens
cctcagcaaaaccttctgggagaggctttccccagggaaggaggaggaatgctcttcccgcgagggtggcaaacggcagccgagcctcctggttagagcttccaacaaactctcagtgcccaactgtgggggatttcttcaaggcaaaacagaaacagttaattcagaaatctctgtgcttttatgctgattttgttacttaagttgctttaatacctgtatgaaagcagaatataaaattagcaaatggacttttctaaatcatttcattttctttcaaaaataacttaaaaattttttttttttacctgaagtgatcaacattgtacgttctgaaagtgtaaagggactgaaaagacaggctgaaaaataaagtaagaagaagattgtacaacatttctagctgcctttttttcctttgataagggaacccatgcagtcagctaagagctgccaccaagatcaaggccctgcagggcaccgatgagcaggatcaccgggagcgctgtgtttacagggatttcatttttcattttgaagggttgccacgtcactttcccaagttttgcggggcagagtgaggcttcatcaagacatgcatccatggactgggcgaaattccagtgtccattatttcctggggaaagcgtgtaagaggctctctctatcgctcttcttacttctgcatcccccagaacacacatacacagtcacagtcacacatgtttgcaccaaacacggcctcactctcacaagacactcacgaaggtacgttgacagtctcacagggtcacaaacatgcactagaaatctgacacacacacacacacatccaatctctctctgacacacacacactatctcacacacacatgctcctctgctctgctgagtcatcagtcttggatctcagcctcagcacgtgtggggcctgccctgtgggaggctgttgaacacagagggaag

SEQ ID NO: 157285 - DNA, 391 bp, Homo sapiens
cctcagcaaaaccttctgggagaggctttccccagggaaggaggaggaatgctcttcccgcgagggtggcaaacggcagccgagcctcctggttagagcttccaacaaactctcagtgcccaactgtgggggatttcttcaaggcaaaacagaaacagttaattcagaaatctctgtgcttttatgctgattttgttacttaagttgctttaatacctgtatgaaagcagaatataaaattagcaaatggacttttctaaatcatttcattttctttcaaaaataacttaaaaattttttttttttacctgaagtgatcaacattgtacgttctgaaagtgtaaagggactgaaaagacaggctgaaaaataaagtaagaagaagattgta

SEQ ID NO: 157286 - DNA, 499 bp, Homo sapiens
aatgaaagttgaaattcattaaaattttaatttcatcttattacaaaacaaagatacatttacttctttccaattttgatatatattatactgacatacacactgtattctatggtgaattatactgattgaatttcacattttgaactaacactgaattactttgaaaaactctactgggtcataatgtattatgtttttaatatattttaatacaatttgcaaaaattctgttttaaaattacctctctgttccataaataaataaatatgtaaaaaaaataaatgtttgtattattcaagtgaagattatagcaataattttgaatatctacttaacctcaactagttttaattcagaagtagcaactccataaaaattcaacttattactaccttattactcatacttgtctccttgaagaagttcattgttatcatccagtttagactgggatgtcataaatctctagactgagtagtataatattcactgttc

SEQ ID NO: 157287 - DNA, 560 bp, Homo sapiens
  misc_feature (374)..(374): n is a, c, g, or t
  misc_feature (471)..(471): n is a, c, g, or t
agtcatcgagagcgttcctgtaatcctgtctaattttccgaatgaattttccgaatgacgcactcgtgaaacttagttgtggttaactttgcaaaatgggaaggggggttcaaaatcggaaaagactttacttttcatttttaatcagcctggtgcctttagagctaggatttagtttctattctttctgtctcattttcaagtgatttttttcttcaaatggcatctactgggctcaagaactggagatccccacaaagctgagattcacatgggaattttgtacacacccacacaggtatacacttccatttacatgcagacatccacccacagatacacacatccggagaccaagacagaacgcaaactgncccataaaagcacggttccccaaacaggagaaacgcaccattcactccagggaggtatctatttgtttaattcagcctctgatagtcaggctgttgncaagcccagctctgaaactcttcccctctaggaaagaaagatggattttttctttactcaagaatatagatctctaaaaaaaaaaaaca

SEQ ID NO: 157288 - DNA, 251 bp, Homo sapiens
gagctgtgggaaggggccattgtcttccagacccaagaatggtagatccatcagcagcttgcactgtatgcctggaaaagctgcaggcattcaactccaatttgctgaaccctgcaaagccacagaagtggaagtgcccaagaccttgggagcctgcccctcatcagtttgcccaggctgtggcaaatggagtcaagggctattttggagctttaagatttaatgattgccctgctgggtttaggacttgc

SEQ ID NO: 157289 - DNA, 268 bp, Homo sapiens
tgtctagggaagccttaagtgtggctgggaggcaactggaccctagggtctggacaggccgtggcaggtcacaacataaggtggcaccatgaaaaagtctgtgttttcattttctactatgaaaactacagtgtgaattctaggtcatggagcaaataaaaactcttcacaagcagtatactttctttttttttattttatttatatatattttttgaaacagagtctcgctctgtcacccaggctagagtacaatggcacaatctcg

SEQ ID NO: 157290 - DNA, 736 bp, Homo sapiens
ggcacgatatggcacactgcatcctccatctcatgggcttacatgatcctcctgcctcagccctctcaagtagctgggactacaggctacttgactgtctaacttttttttacggatggggtcttactatgttgcccaggctggtttcgaactcctaggctcaagcaatcctcctgatttggactcccaaagtgttgggattacaggcgtgagccactgcacccagccaaaagagaaatctttttttttttttttttttttttttttgacagagttccactctcgttgcccaggctggggtgcaatggtacaatctcggctcaccgcaacctctgcctcctgggttcaagagattctcctgcctcagcctcccgagtagctgggattacaggcatgcgccacctatgtctggctaatttttgtatttttagtagagatggaggtttctccatgttggtcaaggctggtcttgaactccggacctcaggtgatccgcccgcctcggcctcccaaagtgctgggattacaggcgtgagccaccacgctcggcccaaaagagaagtcttaaacataaaaatattttcaggttgttttcttttattttaaattaggtactcaataaagcttttagttttcatgattttttttttttaagaaagcataaaagacttgaatatttaacaaaaaaggagagaaaaaaggaagtgcaacagatgacaggaactcttttggaggc

SEQ ID NO: 157291 - DNA, 302 bp, Homo sapiens
aggcaaaatgtgaaaaaaatgacatcattgaaagacctgatggagttgaaaaagaaccattctgaatgcttaaaatactttttaagtattttaaaagtaacgatgctcatagcaaatttacagaatacacataaaaagcacctatgatcctaccacccagagatactcactattaactgtgtataccagaattttatctataccttcctatatttaaaacctgtttgaggccattatttatgtagtgttgcaagttacttttcatgtattagatttctctgtcttctgaaacagcacagact

SEQ ID NO: 157292 - DNA, 443 bp, Homo sapiens
acgggttttaaaatgtcccttaataacaggaaagatacctcatactctgacactgatggggggaaggaagaatgggtattatggacttttgtacatttttgaagtaatccatatatgatggtctcaattttcatgatgaattaggaggacaggttcttagaacaagagtttcagagataagacccttgaaacagccactgagaggaactggagtaatagctcaacaaggagaaatagaagcatcagcggctgtattgaggaaccactggagattggggccaccaccctctttgccttcttagtacactgatagctaaataattgagctccccaaggattatacaatgctggccatatagtgggtaatcaataattcccttaaaaataataggctttaaaaattaaattagtacatatttggtcattgtagaaaagttgaaaaa

SEQ ID NO: 157293 - DNA, 166 bp, Homo sapiens
ttttgagacaggatttcactctgttgcccagatgagagttcatggtgtgatctcagctcactgcagtcgtggccacttgcctggctaattttattttttttgtagagatgaggtctcactgttggccaggctggtctcaaattcctgggcttaagtgatcctctgg

SEQ ID NO: 157294 - DNA, 192 bp, Homo sapiens
caaattgttcccacctagtgagagatctcatggctttgtggttaagcacacagactctggggcaagaatgcttaagtttaaatcttcagcttttaccacctattatctgtgtgactttgagcaggttacttagcctcttggtgcctcagttatttcatctatagaatgggaatgatgataacattaatagta

SEQ ID NO: 157295 - DNA, 493 bp, Homo sapiens
tgaagaagtgagtcacacccctgtcacaagccctatggggggataaaggaattcctcccgtttcagggagagagataagcaatgctggtagtgtgcccctttctggtggcactgtagtagttttggctgagggctggtgagagagtgaactccatcttcttggccataccaacccagagtggagcttgcatcatgctgaggttgtattggcaggaaggagtaggtcatggcttcactgctgcagactcttgatgttcttgttcacatttagtcaattttcttgaataaatgattttgtatttgctattttcccttagaacaatttctagtctttaaatgattgctataattgctcttttgttgttgttatttttattttgaatgatttttcaacagttacgattgttttgctgaggagtgggtctatggagctcctcacacagctatttcagaatgtaaggatattggtactttaggcttcagggcaacctgg

SEQ ID NO: 157296 - DNA, 552 bp, Homo sapiens
taccccacaccacctgagtcataccacctgagtcacaccacctgagtcacaccacctgagtcacaccacctgagtcacaccacctgagtcacaccacctgagtcacaatgtctatttttaaagtagtcaacctacttcttagagccacgcacaaaacagaatacaaacacacttcaaatctgttacatggtgaaatgtttgtggaatgcaattttcatgattattttttcagtgcattaacaattgcttttcaggaaatatcacttctctccaagtgccttttgactataccacagagtgctttttaacacctaacgacaatttattcagatttatatttagatagttaattactgtaagatcatacttcagtgaaaatgaccaaatgtaatattattgatagttcattctcctgctgctggtatttcacctcttgaaaaatcacattatttggtgcatgtgaaataatgttacattaattcctttactctttcacaaagcaaaatatttatggtaaaactgcaatgcactaatcatgctgtgggaatgaaa

SEQ ID NO: 157297 - DNA, 464 bp, Homo sapiens
  misc_feature (8)..(8): n is a, c, g, or t
  misc_feature (49)..(49): n is a, c, g, or t
gtcaacancactgattgaacactctggcaaagatgctgtggtagacganggttggagttagaaagaagaagcaagcactggcctggccttgaaagaacggaagtctttcccattcacttctctagaatgctgccaagacagaggcagaaagaaatggatgataattctgtcaagcacacttctattctttattaagagaaacaattatgtttggaattcagcatctttggttggaacgcattggcttttttttcttgttgtgatagaaatggaattaagtaaaattatagtttgtcttttctgttgtcttcaaattttataatgtcttttatttttaatttaatcccattcaattatttaattgttatacattgacattaactgctgtattttatgactttgttcaataattttgttctttcagggctagaaataaacttttttaagaaatgtgcatttttccc

SEQ ID NO: 157298 - DNA, 301 bp, Homo sapiens
aacgattcgagctcggacccctccataatgtgtgcccaacagtaccgtgttttatccatggttatttgggttgcttccatgttttcctgtaatgataccctgaacatttttgtgcatgacttttgattcatgcatgagtacgtttctgttaaatactgagggatttgctatgtcatagggtgtgcttgttttaaactttcatggagcatggttttctgcgtggttttacccatttacactctcaccaggagtaatcattgtttcatcctcaccaacacttgttctgggcagtctttgtgag

SEQ ID NO: 157299 - DNA, 286 bp, Homo sapiens
ccccagttgttctttgttgctgggccccaaagcctcctgcttatataaatagtttctggggcctttttgaaggctcagatttagtccttaaggcctggtaggagataagtttatctcattccaccttccatagttcttcctgacttgctgttccacccaggcaccagagcaaataattcctcacttcatttcaaaaaactaaaagccttatgcatatgaattcgtaaaatctcatacaaatatccaaagaggccgggcacggtggctcacgcctataatcccagca

SEQ ID NO: 157300 - DNA, 124 bp, Homo sapiens
gcttgcctttggtgcatcttcccccatcccctcacacttctcacgaagaatttgggggcacacagcctctccttccagggcagtatacctggtacgtatggcaaaatatttggggtgaggggct

SEQ ID NO: 157301 - DNA, 334 bp, Homo sapiens
agaatgtgtgtgtggatggaggaggaaacttggaaatatctctccaagacaaggtgaaggtgataacattttgaccagaaatcaagaatcagagaccagaggtcagagaatctaaaaggataatggaagtatttcttggaggaacgaacttcacagtggaaccacaaagtcaccagaactctgtggttccactgtgaagttcgttcctccaagaaatacttccattatccttttagactcaggaaagtgaaaatagaagatcaaaatgtacaagttagtatttttgaatatgtaggtaccaaaacatgcattctgcagactacaacactgcaga

SEQ ID NO: 157302 - DNA, 284 bp, Homo sapiens
gtgtcacttttgtttctgaggtgggggaaattaaattgtgtgtgcacacaattaatcttgctaatggcagcctccctggacctagaaattaaatgttaagtatcttgcagccagccgctgggatgacgccctttggaacagatcagtcggctcaggctcatgatactaattggggtggagtctggtgtttgtctagctctgaccctgtttgggggacgttggtcttatcgtgtccacgatgaggctgagacttggagatgtggaagctggaaaagcccttccca

SEQ ID NO: 157303 - DNA, 430 bp, Homo sapiens
taaagtaggcaagggcatacattcctgccctgacacctgtaagagttgttgcattttgagtagtgaggtttgtaaatgtggccaggcagagaggagagtggctggggagagtcggcaggctgaagagcccactcacctggagacattaaacaccatctaaggtttgatctcctaccgcctgctcaggatgctgcctcttccagaccccacatgtgttagcattgagttgttaagcaggcagactgaattcatttaccctctcaacaaatgaatgagatgctgaactctgtaatggatgttgatgttttcctggctatgaagatttttagggggcgtatttcccatattctcacgaacttggtagccatggaaagcactgagagtctgtttcctaaagttgacttaacctggggactctggcttaaactaa

SEQ ID NO: 157304 - DNA, 321 bp, Homo sapiens
cattcctggggagcccacgcatctctctgcacagtggcagcccgtggataacttcacctaataagaattgatagagctgacccagaaagtactagcctacaccggaccatagccctgccacccctagcaattatatagggattagagcagaatattttatcccagctttccccgtggcttttatcttatttttccttcctttatttatttttatttttttagatacagggtcttgttctgtcacccaggccggagtgcagtggcgtgatcgcagctcactgtagcttcaaactcccagctcagtctctgaagtagccggga

SEQ ID NO: 157305 - DNA, 578 bp, Homo sapiens
tgccctaggcattctttgcattactcaaagcccctgttattccatctctttaactcatgccttttgagaggccttctctgaccactctttctaaaatctctttccctctcctcatcctcatttatgtttcttcatggtaagcatcacttactgtttccgtcaccccgtctagatggacagctccacaagcagaaagacttggttttgctgtcacagccgcagcactaaaaccttgcttagcaggtgctcacttcacttgtccaaggaatggctagcatactgaggagggagagcctgcttcctgcctgggacactggacaggcaaatcacttcttcttgcctcagtgccaccctttgtaaggacactggttggttatgcctacccttcccatctccctgggtacaggcacaaatgaaaagaataacgtgtacacgcccgcgaagcagagcagcaagtggataccgagcattattacgccgtgcgttcggccgccctttttctgcacggagaaccccctccgctcccattttccagcgcccccgtcccggcgatccagagacccgctgtgggcggccgc

SEQ ID NO: 157306 - DNA, 614 bp, Homo sapiens
acctgtgtaccctttgcctagtttcttccagtgataccatcttgtaagattctagtatggtatcacaaccaagatgctgacatggacacagtggagatacagaaaatttccatcactacaaggacccctcttgctgtccttttatagccacgtctacttccctgccacttctgttttctccttcacctctgtcaaccactgatatgttctccattcctataattatgtcatttcaaggattttatataagtggaattctgtattatgtagccttttggggagccactcataatccggaaatacataatcccaaatgccatgatcatgaaggttgaaaccctgataatcataatcccaaatatgtaattctggaaagaataattttaaaaacctttaaaagatatttatttacattttgtttgtttgtttgttttgagatggagtcttactctgttgcccaggctgtagtgcagtggcacagtctcagctcactgcaacatctacctcccaggttcgagtgattctcctgcctcagcctcccaagtagctgggactacaggtgtgcgccaccatgcccggctaatttttgtatttttagtagagatggggtttca

SEQ ID NO: 157307 - DNA, 577 bp, Homo sapiens
  misc_feature (12)..(12): n is a, c, g, or t
tactctacaggncttcacgtaccacctgactgacttctgcattttcagtagagacggggttttgccatgttgatcaggctggtctcgaactcctgacctcaagttatctacctgccttggcttcccaaagccccggctgagggcactggttttcatacttggttttctgactgtaaagtgcatactactatccgaagtaagaagagttgcctgcctagttgcctgatttttaccttgacagaactactgtagcttaatttaagtattctagttgatagtagtggcagggatatagtaagaattcagcagtgaaactcctaactcattaaattgagtattttgagtagaaacatttaagtcatcatttttgaatagttaacttaaggcttcactcatgttctttaagtttgggtttcagtaaaatgaaatttctgtagaatgttttattgctggaagaacatatttttccttgtactgatggtgagctgaatattttcatctctgttcttcagtgtttttctagcttagtaattcgcataagttgcttattctttttagtccatatgtgacttgccag

SEQ ID NO: 157308 - DNA, 330 bp, Homo sapiens
gtttatttaaattcctactcctgctagggaaatagaaaaccaagggcacgagacagtgctgataagagatctcatcattataaaggttaaggttggagaagggtcccggagagtgttgaacaagtgattgctacctggggaaattgtctagggcttcaggaatatgaggaaggacagagaggagtagggtagaagggagttgggggtgggggactgggctaaggacaaggacaggttttgattctgaagtgaaagaaccaggtcctaaagacccttgacccttcctcctcctacctgaaaggtactcttttgcttgaatttcaggaacgt

SEQ ID NO: 157309 - DNA, 358 bp, Homo sapiens
gggcagtgctgtgatcctggctcactgtagcctctaactcctgggctcaagccatcctcctgcctcagcctcccaagtaactgggactacaggcactgccactgcaccctgctaaaggaatgactcgacttttaactatcaggtagaatcctgggcgaagtcacatgagcctggtgttttttttggtggaagagctctttgactatttctgtgaaaactggtctgctaagatttttcatcttgactgaattcattttgggtctctaggattagaggctgtaggactcaacaaggaccagcttcatgggcatatgataattgcacagggccccgcacccaggagggggcctcacacata

SEQ ID NO: 157310 - DNA, 342 bp, Homo sapiens
ttaatgcaacagttcaaactacagagtaagtctaagcctagaataaaagtggctgtagctcagtgaacagcaaagtatctatgagatactcaatctggcccgttttttttttttttttgagacgaagtctcactcgtgtccaccaggctggagtcaatggcacaatctcggctcactgaaacctccgcctcccggttcaagcgattctcctgcctcagcctcctgagtcgccaggcgcctgccaccacgcacagctaatttttgtatttttaataaagacaggtttcaccatgttggtcaggctagtcttgaactcctgatctcaggtgatccatcccacct

SEQ ID NO: 157311 - DNA, 485 bp, Homo sapiens
tcaattaacgaagaactgatactggtataatttgatcacctaggcttgtggttcctacacggggatgtagtagccttctcgaaacagacatttgagctcctctggctttcatccgagcttctggtgtttagtaggaaatagtctccgaagtgcaggtcatgtagtcctagtgttttatagttataaagctgaattgttcttacaggagttacagaggtctataaagaaaatgtccataatctctctgtcttcaagttctagttccttagccctaaagtcagcaaagttaacatttggtgtccattattcccacacttttctctttgttcatatcatcgtgtataaacatatacacaggctgggcatggtggctttcacctgtaatcccagcactttgggaggctgacgctgaggtgagaggattgcttgaggctaggagttcaggaccatcctgggcattaagggaagaccccatttctacaaaa

SEQ ID NO: 157312 - DNA, 268 bp, Homo sapiens
aaagaaggacattgagtaatatggaagggcggaaggttttgtggttgaactaaggaagccaaggacaaaggaagggatcaatttaagacatccctaacaagagcttatttttatcaagcttattttgtatgccttgtgctctgcagagcacctgctttttgttatccatcgaatttttatgtactccctgcactccacacctttgaggtggcatttccgtttgcttgatgaggaaactgaagctcagataaatttagtgacctggaag

SEQ ID NO: 157313 - DNA, 710 bp, Homo sapiens
gacaggagttgagggaaagaggtgaggggaaaaggtgaggggaaaagacccatagctggagctccagccaccatcagcaagtgagaaggcactggatctggagttaagtgggaaggtggcaagctcccccaactcccaacagcaaatagaggagagagctaagcagaaggttgcgatgagaaactgcaaggcccagctatcagcccaaggagcttggaggacagtggaggaagggagaacggatttcctagggaaggagctggaggttaagctggaggtggctgtatatcaatgatgcagttttgactccgattcagggctgtgaactggaggcccaaccagaaataacctctcctagcagagccaagaaacactgagaccatgctgatggagggaagtttaacctgaagtctgggttaatccagctgctaaatacggtgggcccttccttctccaagctctaggttagggtgggtctggaataacatggaatttacagaaaggtgactccacctagcaccagagacaggaggagcccaggaacctcattgttgtcagggtccactgctggaagccctggccagctgagctgatggtgcagggcagggccctgtggagcaattctgggatcccatgttaccaagggtgaggagaggaccagataccttttcatcacaaggtcctgcaactggcccttcacttctcatccc

SEQ ID NO: 157314 - DNA, 164 bp, Homo sapiens
atttattctatcattaactaatacagactccagactaccctctccctcacaatttagatttcaaaatacatcccttcacaaattaatggttatctgggaatgagctaatatgggccctggagttctgtacttcaagtacccctaaaaaagggaagcctcctttt

SEQ ID NO: 157315 - DNA, 251 bp, Homo sapiens
ctaaaccttccagtgagatcgggtctgcaccacctccagcttctggaacccttgcaccgggatagggccacccctcacttactccccagagaaggctgctaacaccaagtagcatggcatggcggttatgtgctgaagccagactgccgggattcaaatcctgactccatttcctgtgtgaccttggaaaagttactcaacttttctgtgcctcggtttcctcacctgtgaaatgggcataataatggtac

SEQ ID NO: 157316 - DNA, 489 bp, Homo sapiens
aacaagctcggtatcccacaccacctgagtcctagttaactaagagatgagccttagaaactgcttggtcaagcttagaaaacttcctggcaatagtgatttaaatgcttcattagccctggataaagacacctgtggctccttaacagcaatactatcaagggtaactatggtttattgagaatttagtgtgtcaggctcagcaaccacccgtcatttgctttaatggttttatgttcacataaaaactttgaggtaggtacagttggtgtatttccattattttatggatgaatgaaaagaagcccacagagctggaggaacttacctctgttctatagttagtaagtgtggggcaggactaaacacagacatgtccaaattcaaacctcaggtttcccaccgtcatgctgaattgccttcctaaactcagagaaaaatgtgattcaggacaagaaactttgtatgggggagagagttaaggagaaa

SEQ ID NO: 157317 - DNA, 373 bp, Homo sapiens
agaaactgaggcagagagagataaagtagcccatcgaaggtcactgagctgggaagtggccacgctgggcttccaactcagtccttctagcctgaacacttattccctaccacacactgcttctccagcaacaggtctagcactgttaacggttgttacctttgcagagtagcatttcactttttactttatgctcatcaatatttgtatgtgtcatttctaatagagaatgcattgcttttgtgattaaaaataactagccaggcgcggtgactcatgcctataatcccagcactttgggaggccgagacgggtggatcacaaggtcaggagttcgagaccagcctggccaatatggtgaaaccccgtctct

SEQ ID NO: 157318 - DNA, 486 bp, Homo sapiens
atcgagctcggacccctccataatgagtgcccaagacttaccataagctaaggtgaaaggttggccaaggagcttggcacgggagcaatcaggggctgaagtaattattcatagaggtcagacttacagtccaaataaaggagaatgtctaccggaatgtaccagattccacagtgtccatgccaacaaaaagagaaggaacattttcctgggagcccactgactgtacaaagacaaaggtgtttcttgttttgtatccaaggtaaatggagaatgtctatacctgtattttttttcaaagcttaccattcttacctatggtaaaagactattacaaagggtcctactctatcatggtcttgctagtattgtagaataaataaagcagtctctacaaaaggatgcattctgcgtacctatctccaagttgatggaatgcaatgtattatgggaaacattatccctttgcacagataatcaggatta

SEQ ID NO: 157319 - DNA, 472 bp, Homo sapiens
cagaaatgtgcattcataactggcaaaacaggacccttgctggtttccatcttatgcagaacatgaactgtgaagttttgagaaagaagctaatgttccaagcatctgccacagggaacagtttattttcccttttctttttggtcacatgtcggtttaatttggagtcagtgtttaagtcaatgctggcatggggtgaagactaagaaattgttcttgcagtcagcagacatgggttctcagcccaactccactgccacccagctgcaaaactctccttggcttgtttttaatcaatggcaaagtagcagggttgaatttgatgatcttcgagatttctactatttctgttttctttggttctaattttgcccgagattttccagttcctgtggaattccccagtgaaagcattttctaattcttccaaatactttttgtggcttgaacttaaaaagacaaaaacaaaaat

SEQ ID NO: 157320 - DNA, 155 bp, Homo sapiens
tatgtcctcctcttcagctaaagtgttctacctccttcaatatccagtcctaaagccacttctcagaaccctgtgtataccggcaggtgtcattctgccttatcattatttgtttacattacactccctcctgctacactctaacggaaatcatg

SEQ ID NO: 157321 - DNA, 363 bp, Homo sapiens
accaaaaggaacacattaagctatgtgcattcccacattcattcaccaatccatcaacatacatttatttacaccttttatgccaggcacagatgattcatcagtgatcaaaataaaagtctttgtcatcatggggtttacattctactagggaaaaagcagaggaagaggggaaagcaaatatttgttagatgtgcttatgatatgtgatacatgctaaagagaaaaataaagcagaataaggaagttaggattttgatattttaaagagggtagtcaggaaacgcctctctgataggagatattcgaacacagacctgaagcaagtgagcaagctcttcacatggataactgggggaaatg

SEQ ID NO: 157322 - DNA, 170 bp, Homo sapiens
acacagagagggcaggctgcaggaacgcacagagggcaggctgcaggaatgcacggagggcaggctgcaggaatgcacggagggcaggttgcaggaacacagagagggcaggctgcaggaacacagagagggcaggctgcagaaacgcacggagggcaggctgcaggaac

SEQ ID NO: 157323 - DNA, 616 bp, Homo sapiens
ctaaatgggtaacatgattagccctatatctattaaagaaattgaatttgtagttaaaaaccttaccacaaagaaaattctagatggctagaatgtgcactagaggaaatgatgcctagatggctagatggccgcacagtgaatttcaccaagccttaaaggaacaaagaatatcaattctataagactcttccagaaaactgaagttgggaattctttgcaacttattctatatggccagcatcactctgatatcaaaaccagacaaagccattatgagaagagaaaatttcagaccaatattcctcttgaacatagatgcaaaaattcttaacaattttagcaaacctaataagacaatatataaaaaggataatacatcatgaccaagtgaattttatccaagaaatgtaaggttggtataacatttgaaaattaattgatgtaattcatcatattaataaactaaaaaagaaccacatgatcatttcaatagatatgaaaagaagtatttgacaaaattcaacacacattcatgataaaaattttcagcaaactcaggatagaaagtaacttccttaatctattaaaggtatctactataaacccacagcaa

SEQ ID NO: 157324 - DNA, 559 bp, Homo sapiens
agacagtgctgttcacctagatgagaccactcacagtccgactaagagttctctagaaccagaatgtcttagtcacctcaaagctgagagtcattttagctataattatagaaatccaagccggacgcagtggctcatgcctgtaatctcagcactttgggaggccaaggcgggcagatcacgaggtcaggagttcaagaccagcctggccaacatggtgaaaccccgtctctactaaaaatacaaaaattagccggctgtggtagcatgtgcctataatcccagctactcgggaggctgaggcaggagaattgcttcagcccgggaggcggaggttgcagtgagccaagatcatgccactgcactccggcctgtgcgaaagagcgagactcctcaaaaaaaaaaaaaaaaaaattggcggttaccttcagctcgggtttgggtagaagcagatgcccttggccttattttaactgagtcaaagatagacttagaagagtactttttactaccataagacgaacgagaccttaacaggtatcgggagtggcgtataaag

SEQ ID NO: 157325 - DNA, 664 bp, Homo sapiens
tcgagcgcggaccccaaggtccttagccgtaaaccattagttgcattacttatcatctttgctctccttagtcttcttatctctgccttgcttttacacatttcacttttctgataattcttcatttctgccaatctctcttcctcctcttttgtaatgcatttctgtatcaattcaaatttttaattcaatcttctctctttatgacactaccactttttttttcttttaacctggtacctttaaaaatgagttttctcctgtaacaatagtctgtttaaatatatcgtttcatccacttacaagcaccatgttggatctcaaaaatcttaacaatctcacataattggaagacacatctaaatatacttaaatggtattggttattcataaaaaattctcctgagttatttaagaacttgctaaatgtttttaaattcgatcttgaaacacgcaaaaatttcgaggaaatctaacctcacatctaatctctaatcattccaaaaaactagagacaaccactattctaataaagaggtaatttaggatcttactacattgatgtgagtaaatattgagtaaccaacttctctaaatcaacagaactttagcgctatttattcacatatgggcttaagggacccttggggggacctctagagtc

SEQ ID NO: 157326 - DNA, 331 bp, Homo sapiens
ccagggcacagagccgggcaaagaaaggctgcaaataaccagcaggctatgtttgtgcggcgggcccccgaggggaaattgcccaataggtgttggattctatcttatttggggtggcgagagtggcctaggtactgggagggaagcgtccagcaggccacactgggtttgccccgatcccacgtggtcggttctcccaggccctagagctgcagctcctttgctgtgtttgcactgtgcaccttgtcacctcctacccttctctattcttcagctcttctctttataagaaattccctctgcacccctcttccagctggtttaatcctac

SEQ ID NO: 157327 - DNA, 280 bp, Homo sapiens
ccaggggctggagccagatagtgcctgctccatcgcctcctcacaaacgacagataaggatgagaacagcagcaaacgctgaccccccacccgtgagagcataagtcactcaaccgtcaaggctgcatggccccccccaccccaatttaattcacctgtgagagggcaagtgcctggctcagcaatttctagtgcatgtaacagtacttgctttgtgccaatatgtattttactatatatatataaactctagatccattaaacaatgtattattacata

SEQ ID NO: 157328 - DNA, 265 bp, Homo sapiens
accaggatgagcgggccgaaaacggagtgtgcgcggcagtacggatgcgcggccagtacggctgtgctataatcccagcactttgggagtccaagacaggcgaatcatttgagcctaggagtctaggatcagcctggccaaccttgcttctactaaaaatacaaaaattagctggccatggtggtgcacgcctgtagtcccagctattcgagaggctgaggcatgggaattgcgtgaacctgggaggcagagaggttgcagtgag

SEQ ID NO: 157329 - DNA, 750 bp, Homo sapiens
ctctttggaattctttaccatttccaggaccattgcagttagggcaggaatggagtggtggtgattcctctttcctcttttggtttgaaccctcctttcaggatgcttagttacacaggcctgtcctctctggaaaaaggggatcagtagtaggtttctccactttttggagaaacctaaactaaagcttcaatggggcaataccttttaggagagtttgaactgacagtctggcttcctattcttgcggagagttatgctgctattaggcagagggcttgtttccaggttacaaatctttttagcaaagaagtgagtgtggaatagaatcggaaggacttgtgtagtccttggatataatttaatgctccacatcccagagagagtaaacattgtaaagtgtgcaagatgggttggattaatatcctgacagcatgtggcttggcatgtagggcattccttggagacccttcttaccatacacagctgcctttgccgggtggcctcttcccacaggtctttcccagcagctgtgtgcacctgggtgaatcatccgttccctgtgctttgaaaaaacccattttaactgattgaaaggcctcatacaggaggtgcataaaagacaacctgaaaatgtttttaagtacaacctaagtgctctgaattgtccaggtatcactcatagagcatggtgatctcatctggtttttgatgaatggaaaactggctttatgtgctgaacaggggagc

SEQ ID NO: 157330 - DNA, 324 bp, Homo sapiens
atagtgcccaatagagtaaacttcttacaaaagacgttgggctgcctactagtcctcaccacaggaaatggctttcccagatggatttggtgacacagtaagaggcccagagatcttttagtccagtagtatcaaatttcagtgtgtatcagaataatcaggagggcttgtcaaaacacaaatttctggcccaccctcccagagtttctcattcagtaggtgtgggctgggagtcagaatctgcgtttccaacaagttcccatgtgatgccaatgctcctgatctgggaactatgctttgagaaccatgttccagtccacattc

SEQ ID NO: 157331 - DNA, 137 bp, Homo sapiens
gacgaacctctgcctatcagacccctccatccatcccttctccaatggtctccctcctctttctcctcctttcctctgctccagccactctgaccacctctggccgggcgcggtggctctcgcctgtaatcccaaca

SEQ ID NO: 157332 - DNA, 138 bp, Homo sapiens
gatggagtgagaggaggaaagaggtgattttatacaggtaggcagtatgagcaaaggcctagagtggtccaggaggagaaatagaaactagaaataaaggggaggctgaagagatccaagtcaacattataccctgtg

SEQ ID NO: 157333 - DNA, 408 bp, Homo sapiens
aggaataatcccttcttcatggggtgagggggaggatttgtgttgaacaagcgtggggcaccaagcctggcccatcatgagcacagaatccacggcaacccctgtacttgttgtggttacttacagtcagaagcaggggctgggagaagaacgaagacctggaacatcccagctccaggcacctcagagaagccccaagagaaagggtctgggacgcgccttctctgagtaggcagagcagcactgagaaaatgccagagccacatgcaggggaggcctgggcatgatcaggacagatcttgtcccagtggagggagcccctgcagcagggttccaatactcatgttttttgtgtgtgtttttgttttttgttttttagaaatggagtctcattctattgcccagtgt

SEQ ID NO: 157334 - DNA, 480 bp, Homo sapiens
cctatttctatagagttccatctgaatgaaatcatgtagaatgtgatctttcatctgttttgaaggttcatccacgctgtagcatatgtgctttgctactttttgtgatcaaataatattccaccatgtgggtagacaacattcagtgtatctctacatctggtgatgggcatttggattaattccctctttgggttattaggaggatgctactgtaattattcatgtacaagtttttgtgtggacctgtgctttcatttttgaatatgaaaatctggcacatttccaaggaagacatacaagtggccaataagcacatgaaaagatgctcaatgaaatacatcatcagggaaacagaaatcaaaaccacaatgagatatcacatcatacccataaggttggctagaatcgaagatacagaaaattggcctggtgcggtggctcatgcctgtaatcccagaactttgggagaccaaggag

SEQ ID NO: 157335 - DNA, 241 bp, Homo sapiens
ctgaacaaaggagcaaaaggactcgggattctgaagcgctgtaaaataccatcataactttgaatagtccttgataatgcaatgtatgatacaattgtattgatgcatacaatattttatcttttcagtaaacctttatgattcttattgagttaatgaaggatgtagcacctgagctctgtctcttcatcatacttgtctttgataatgacatgaccagtaactcactccggcccatatg

SEQ ID NO: 157336 - DNA, 512 bp, Homo sapiens
acaaactactacaaggatgtcagcgctgtggagtgaagaaagcagaggcttcagagccagagagagctgcatttagatcttggatcctccacttgagagcagttccttggctatatgacttgccaagcctcatctgaaaaatgggaatatggaaaatcatcttacaggattgattaaatgaaatatcggtgttgtcctgagcatggggccttgtactttataaattatctctattgttcctgtcattagtcattaataataatcctcaattcatctattactaatgctgctaatactgtgataggtattaggaaaataggctgggtgcggtggctcacacctataatcccagcactctgggaggccaaggcgggtggatcacttgaggccaggagttcgagaccagcctggccaacaagatgaaaccccacttctactaaaaatacaaaaattagctgggtatgctagtacatgcctgtaatcccagccactcgggaagctgaggcaagaga

SEQ ID NO: 157337 - DNA, 243 bp, Homo sapiens
gagctcaagtgatccgcctgccttggcctcccaaagtgctaggattacaggcttgagccaccacgtccggcctgagcttgttttcttataagaccgctttacttacgtcctttgtgccctataattacccgattccaaagttgaaaaagtagtttcccagcttttttggtctttgtatacatgctgtcacaatgcagttcttcctttgtctctttatagccgtgtctcaaatgctgtctctag

SEQ ID NO: 157338 - DNA, 418 bp, Homo sapiens
acccatgtcagatgctgcccagaggccaaggagcatgaggactgagaaacaaaaatgggcaatgtggatgtcactggtgacctagagaggagtaaatttggtgaagttcaccgtaaaagacacagtggaggccggacgcagtggctaatgcttgtaatcccagccctttgggaggttgaggtgggtggatcatgagatcagaagttcaagaccagcctggccaagatggtgaaaccccgtctctactgaagatacaaaaattatccaggcttggtggcattcacctgtaatcccagctacttgggaggctgaggcagtgaattgcttgaacttggggtgcagaggttgcagtgagctgagatcgcaccactgcactgcagcctgggtgacagagtgagacttcatctcaaaaaaaaaa

SEQ ID NO: 157339 - DNA, 273 bp, Homo sapiens
gacaagtctaagcacttgaagatcattaccagggaataaaaagcaaggtttaaaaattgcagctgacttccaagctgctttccctccggctctgcgcagggacgggcactgaacagcctgctcctgctgtcctgacacgtgaataaaaaaggaaaggggtgtttacaaatggtacattctcctgacctatccaattcacttccttctaaagcccaagtcctgcccctccactgaaaacagcactcatactgtaaaactattccattgagcccg

SEQ ID NO: 157340 - DNA, 127 bp, Homo sapiens
tagcttacaagacagaagaatatggtttagaaactcccatgaaaagttatttttcagtgactctgttggcttcctcttaacctcagggcccccagcatccagcttctgaccatttggaacagaggga

SEQ ID NO: 157341 - DNA, 294 bp, Homo sapiens
agcaaggtttgggaggtgggatctctaggatttggtaactggctgcgtgcagggaccagatactgatgctgcccacctttctgtttggggtgacagtgggtgaagtggacctgtcaactgagataggccatcaaagggaaaaagaacatgggagggagttgctgaatctagccctgttgcgtttgcgatgtccaaggaagattcagggggatgcgcagaaggcagcctgaagtctgtatacttcacatagacatgtgatcacatttcctgagccaaaggctgttcctaaaggct

SEQ ID NO: 157342 - DNA, 530 bp, Homo sapiens
atgtttcgggaaaaacaaaaacaaacaaacaaaaaacctgtaaagccctttgaccctttgcactacatgcacttataaaatacaaagaacaaggccaggagtggtcgctcatgcctgtaatcccagcaatttaggaggctgaggcaggtggatcacctgaggtccagagttcaagacaagtctgaccaacgtggagaaaccccgtctccactaaaaatacaaaattagccaggcatgttggcatatgcctgtaatcccagctattcaggaggctgaggcaggagaatcacttgaatccgggaggcagaggttgtggtgagccgagattgtgccattgcactccagcccgggcaacaaaagtgaaactccgtctcaaaaaaataataataaaataaaatacaaagaacattgcattgagataaaaattacaatgtatcattgatttgaattttttctgcatgtaattcatcagttaattttattctgtagaaatttttccctgctatttctccatggcaaatgaaagtagt

SEQ ID NO: 157343 - DNA, 363 bp, Homo sapiens
gcgctgatggaacatgggaaatactgttgcaaaggccctcgataggagagcgtggagatgcctagaaatagacatatcacccaacaacgggttatctatgagaactgcattgttctcagtgtgactgggcagcacaggctatggcatcgggatatgaaaaatatagtaacatactctattacacatcctctttactcagagcaagaggagataaacacaggtcatgactaagccactttctccaacgttcacttccaattttgtgtgtagctctgatccagtcatcaaggtgctgacttaaggaaaaagtgtggatggaatatgtggtgtagggccaggcacagtggctcatgcctgtaatcc

SEQ ID NO: 157344 - DNA, 108 bp, Homo sapiens
ctcatgggtgatacagacaagggaagctcaaagaggaacaccaagaggaagagaagggaggggtggtgaatttaacctgtgggagcctccagcaggtgtaaaactcaa

SEQ ID NO: 157345 - DNA, 291 bp, Homo sapiens
gttgatggggatttggatcatttctagtttttgacttatgcataatgaacattcaagtacaagtctttgtgaggacatcctctttcaactttttattttgaaaaatttaaaccccacagaaagattgaagtaagtagtatagcaaacacctatttactcttcacctagattgactattaacatttgcctgctgttctttgcctttttctataaatataccttttccagaaccatttgtagatattatactttatctcttatgtatttcagcatgaatttcctaagaatgag

SEQ ID NO: 157346 - DNA, 508 bp, Homo sapiens
cagatccttcgcatgcacagttcataatagggatcatgagactctaatgccaccactgatctgaaaggaggcagagctcaggcaataatgcttgctcacccaccgctcacctcctgctgtgcagcccagttcctaacaggtcaccagctggtaccagtctgccacctggaggtcgggaatccctgtctgaagtgatttaaaacccttcagtaatctctattgctcttcatataaaggctgctctttcctcatcagggcctatactaccctgcatggtattgtctctgtcacccctttgggctcatctttctcagtcattctttcctggtgttcaagcatgcttttttttagagagagagggggcctcattctgtcactcaggctacagtgcagtggtgcagtggtgcaattatagctcactgcagtcttgacctcctgagttcaagcaatcttcccacttcagcctcccaaagtattaggattataggcatgagccaccatgcccagc

SEQ ID NO: 157347 - DNA, 233 bp, Homo sapiens
ctctagaccaactgggtggcttaaacgtggatccagatagtgtcagtacacagaaattacctgtgtgtggttctcagccctgctgctcattggagtccctgggagctcttcaaattagagacgctagggatgctcagtccctgccccctccccctgagtttttaaaaatagctttattgcgatacaattcaaataaaatacaatctacccatttaaagtatacatttcagtgg

SEQ ID NO: 157348 - DNA, 354 bp, Homo sapiens
ggtgaattagtaaaagagggagcctcttgcagctgagatagaggaaggccactgtctcctgcctgcccctgggaactgaatgtctcggtataaaaccggattgtacatttgttcaattctgagataggagaaaaaccgcccgatggtgggaggcgagacatgtttgcagcaatgctgccttgttattctttacaccactgtgatgtttcggtggagagaaacaaatctggcttacgtgcacgtccagtcatagtaccttcccttgaacttaattatgacatagattctattgctcacatgtttttctccttattatcaccatgccctcctacattcctttttgctgcaataatg

SEQ ID NO: 157349 - DNA, 411 bp, Homo sapiens
catcgcgaattcaccatcgcggattcaccattcgcgaacccaccacttcgtagcccagcagacaaggttctccttccccccagccaggattctttcagctctggtcccatccttattctgatgctacagtcaatagtgtaaatcctttccccagtataggactctgaaatccccacattgttttgtgccgattattacatgtacccaatgtaacatagataaccttcttccctcttctccattccccgggactgagggtctgcactcctgactctcagagttcctcttgagtgttggggctctgtctcctgttaagagaagctttcttccctaggtccctcctcctctccccctttcaccgggagatgccaatcaaagtgcaccctgccctggaggtgggctgcctcgagt

SEQ ID NO: 157350 - DNA, 136 bp, Homo sapiens
gatgcagtccgttcgactgagcctaaaatttgtatgcgctcgccaagttgcactaagcatcttgactcagtccgcaggcttctgcagacttcacgctctgaaaagctgatctgagctgctgtctttcatgccagca

SEQ ID NO: 157351 - DNA, 296 bp, Homo sapiens
gggatgcagcagctactgcccacagaaaagccatctccccgtggccttgatactcccttttaagaagtggtaaactggccgggtgcaatggctcatgcctgtaatcccaaaactttgggagtcccaggcgggcggatcacctgaggtcgggagttcaagaccagcctgaccaacatggagaaaccccatctctactaaaaatacaaaactagccaggcgcggtggtgcatgcctgtaatcccagctactcgggaggttgaggcaggagaatcacttgaacctgggaggcagatgtt

SEQ ID NO: 157352 - DNA, 1306 bp, Homo sapiens
gcataatgaggaaaaaataattcctcagaaagttaaaaagtgaaataaaatgtaaagctgtcagtgaaagaaggaaagaataacccaccacaccacaattcagaaaaccagagtttatgagacacacattgtgttttcctggatatgcaaatgttgttttattaaagagagagggatatggtatatattttcatctaactaccacatcttaagtaatcagttcaggctcttatgatgaaatctttaattactagaagtgtgtcattagttagatgtagaatgaatgatagtaccgtgttttattgcctcacatgatatagccatttgtgccataaattcattgacctcatcttaaatgatgagtcctgtaagacagacttgattcattatttcttaagtgacagtttttcctctaataattttttgcttcaccagaaagattgcttttctgtatttttagatcagtattctgaattgaaatttaataaggcaaggacacacacacacacacacactctgtctctctctctctctctctctctctctctctctcacgttaccgaaaacaagatagtcatgaactgtcacactactacttgaacactttgggatgctgctgaaaatcaagcagctaaccataggcctttgctttaatgggaaagtttgatgaaataggattttgcttctaactttgatgtctgtaattctttttatgtcaaaatcgatgagatatggtggagaattctcatttgacaattgggatagatctatgagcattccttattcatcattggattactgaaagtgaaggaagggaagggagaacatataaattatatttagattattattattttttactccatttgaaaatatttatttggcttgaggaaacaggaatcctttggaggcaaataattcaatctggcaatttaaaaaccaattaaggatttcagaaaacccttctcccttatggctaaaaaataagatccaaaaaaatatgccagaaaatgggtatattattttaattagcttaattcattgataattttttttagtcaatgattaaagaagctatttttgatccttcacttcaagcttgtaaatttgcactgcaggcttccagtgatgctagttggcaccgcaccggtattacttctcatggaattatgcccgtatatacttagttataaagcaccggtttataaaaccacagcgtaggtctcacgtgcagtacctgtgtatagggcttgtgcggcgcacccaggcagcgataacgggcacgatctagagaggctgccttttg

SEQ ID NO: 157353 - DNA, 349 bp, Homo sapiens
tctaggtgtccaaaactaatttgacttcctgtttcaagggcacctactttttctctccttgcaaacttgagcacagtgaagatgagcatttctggacctgaaggagcatttggggaacagttccatggagggagatgcttgctggagcagtattttgtggattcatttcggcttgtctgtggcagccgaacagcggtttccaacaaaggctttcactgactcagctccaagcatgactcgtaaatctccttttcccctcttgctgatttttctaggcatctattgtccacaccctgaccacacactgtcacccatcagagtccccagttgactcaggtttacactgtgc

SEQ ID NO: 157354 - DNA, 123 bp, Homo sapiens
atgacaaactcagctttctgggtgacatagatggttgtatgtaggtaacagggtggtttcacggatggcagattcattttagaaattgtaaaatggctagcagttttcagaacaagagattag

SEQ ID NO: 157355 - DNA, 493 bp, Homo sapiens
agaattcctccatagagcaggggtccctaaccctcgggctgctgaccgataccagtctatggcctgttaggagctgggccacacagcaggaggtgggcagtgggcaagcgggtgagcattaccacctgagctccgcctcctgtcagatcagcggtgacatcagattctcataggagcatgaaccctgttgtgaacggcgcacgcgagggatctaggttgcgcactccttatgagaatcgaatgccgatgatctgagatggaacagtttcattctgaaaccttgggtccgtgggaaaaactgtcttccatgaaacttgtccctggtgataaaaagcttggggaacactgccccagagcattcagaaggagcatgccagccggctgcagtggccacgcctataatcccaacgttgtggaaggccatggcaggaggacggcttgaggccagacttttaagactagcctgagcaacacagtgagaccctatctctac

SEQ ID NO: 157356 - DNA, 415 bp, Homo sapiens
gtgtggggctcaataaattcctgttaataactgattgataattatcagctacatttcagaaaaagtataactctcttttctcctgaattccgagtacaggggcactacagattttaaccttgttgtaaaaataacgacacaaaaacacagagatgaattaactgacttcttagggtgatgcacttgctcatgagtggggcaaggattaaaatggttacagcttctttcctggactgaggtgctaggggaattcattcagattgattcgggttcatatttcatttaaatgctctcatttcacttctgctacatgcaccttctctgacttatatttcaggacctgcagtctgaattggtttacttccacttcagatgctgtcaagataaattagacaccaagggtccatgataccat

SEQ ID NO: 157357 - DNA, 136 bp, Homo sapiens
ttagtaacatgcaggaaagtcggagagggagagttctaattcaagccccgtgggtgacaccctactgaacgtttaacacaggcatggaattccagagttgtagcgtccatagaacggcagtgccgtccaacctcta

SEQ ID NO: 157358 - DNA, 254 bp, Homo sapiens
agcccactgcactccatgggaaacgcagcaggtgttagtctgggcgcaggaccctggcatttgtcccacgtccccgcttttgcatgtgtctgcagcatttcagccgaggccatggttctgtgcagatgctgagcaattctcccggacaaggagcgtcttcatctcccatcagcaattctaggtcccttccacccacacagagcgcagctcagagcccagcctggagacaggctgtgtaagatctcaggacaggc

SEQ ID NO: 157359 - DNA, 503 bp, Homo sapiens
ggacagtggttgccaagttatcctcccctacagctttgtccattgacatgtctgcagagcacaatgacagtgactgttccccagaccttaccatcggggctattaccaaacttttcagtccttgcttataagacttttttatttttttgcttgaatttgcaagtttttaattatcagtgaggttgagtatgtctcatatgcttgtgaccaagtgtattctttttttctgaagtaacattcatatccttcatcatttttccacttttttttatctcattgattgaaaagtttctttgataaggtcctttgcatattgagaacaaaggtcaccattgtttctatgggtgaagaggcctcaagcttagtggggtgggcacttaagaagtgtgaacatttatgcgctttgacccacttgcaataatttattctccaaaaacaactgaaagttcaacagaaggcaagagctgtgtgtccagtggtattcatttaaaaaaaaaaaaaaa

SEQ ID NO: 157360 - DNA, 648 bp, Homo sapiens
gcacgatctcggctcactgcaacctctgcttcccgggttcaagcgattctcctgcctcaggctcctgagtagttgggattacaggaaagctcagtggcccccaagccaggatgtcccaagcttgggtccccggcctcgcgcccaccttgctgttcagcctgctggctggcccccaaaagattgcagccaaatgtggtctcatccttgcctgccccaaaggattcaaatgctgtggtgacagctgctgccaggagaacgagctcttccctggccccgtgaggatcttcgtcatcatcttcctggtcatcctgtccgtcttttgcatctgtggcctggctaagtgcttctgtcgcaactgcagagagccggagccagacagcccagtggattgccgggggcccctggaactgccctccatcatccccccagagagggtcagagtatccctttctgcgcccccacccccctacagtgaggtgattctgaagcccagcctgggcccaactcccacagagccaccccctccctacagcttcaggcctgaagaatataccggggatcagaggggcattgacaacccggccttctgagtcacctcctgcctggaatcttgccatcagcaacctcctccccagtgcctcctggatc

SEQ ID NO: 157361 - DNA, 483 bp, Homo sapiens
acaaaaaaccagctcctttgccttcctagccatgtttcagatgctcagtaactgtgtgtggctgtggaactggacagctcagccgtagagtgtttccctttcttgttaatctttttttagaaatgctaacggtggagactaaggcatacaagtatgactagaattgccagctacacattagaaggtttaggttcaaaactgggagtaaagacttaactcttggagcttgggatagtgctacaactagtcctggcctgagccttttcttcattcatgttttatcctttttttctttatttttggacactgataagaacctgtatgagattgtttccttttttccccccgcgttgtaggtatcttgtcttgctattttgcacaggctgatctctaagtcctggcctcaagtgatcttcctgtttcagtccccaaggtgttgggattatgggcatgaactgctgcacccagccctttatactcaaa

SEQ ID NO: 157362 - DNA, 450 bp, Homo sapiens
aggtttaggttcaaaactgggagtaaagacttaactcttggagcttgggatagtgctacaactagtcctggcctgagccttttcttcattcatgttttatcctttttttctttatttttggacactgataagaacctgtatgagatcgtttccttttttccccccgcgttgtaggtatctcgtttcgccagcaacctaataaaaatcccacccttaggcttgagttctcctgtgctcaagcaattttcttaccttggcttcctgaatagctgggactataggcatgcaccaccacgcctggctaatttttatatttttagtagagacggggtcttgctattttgcacaggctgatctctaagtcctggcctcaagtgatcttcctgtttcagtccccaaggtgttgggattatgggcatgaactgctgcacccagccctttatactcaaa

SEQ ID NO: 157363 - DNA, 1090 bp, Homo sapiens
tctcggcctcccaaagtgctgggattacaggtgtgagccaccttgcccggccaaggctcccacttcaatggactcatttactagaaacaaactaggtctttgataatgtgtgtgctggcccgtgtgaaccaccagcttcttggaaggggaaaataagagtgccttgttttcaaaccaaaaagaactagaaaagaagggaaggcctgtcttcctctggctgtggtagtccatcatggaaaagagcgttacactgcccttcccttggggtgctgtgtgacatacctgctggagagggcacatgtcacaggagggcaggcaggggaagcaggcaggagatgcaagaggaaaggagaaagaaggggactttccaattcatcaggacatggctgatagcaggaactccattttttaaccatcacttccccacctcccccagaaaagctggtggtgggataagcaatcccctctcagcacacctccccaccagagccttgtcttggccctccagcagccctctggatgaggccaactccccacccaaggtagacccctcagagttgctgaagcagaggccgctaccctgcttcattcccagagtgtgggttcaggcttagagcttgtgaccagggaagacacaggaacggaaaggacttgttcaggtgacagcttgtaggtggcagagtcaaaagtaaacccaggacggaggccaagattatttccctacacctcatactgctattttgtgtgggagtttactggaggggcagggaggcgggaggggtcagtggcgggcgcctatcatctttcccagcattgttcccttaagaaaaccgtcaatcaaccactcacgacagagcttggggcaatcgtcccatcctacattaggagtgacccatactccaccagtaatagggaagagaatcataagtgtcccttctttttatttgcataaaatctccagaaagaactggtagtattttttaccttcaatggggagcactagataactcatggagtgacttttgtaccatttgaatatcgagtcatgtgaacatatagtctactaagaatatcctttaaaaaaaaaaac

SEQ ID NO: 157364 - DNA, 431 bp, Homo sapiens
agctgggcatttggggatggaaagattatgagaatgacacagcactgcccttcaggtgatcctaagagagaaacatctcaatgtagaattccagtagaatatagtagagagtgccacagtatatgctgagcactttattcacagaatttaaaaatatctcatatttttatattttttggacactgtgctctagcctggcgacagggcaagactctgtctccaaaaaaaaaaaaaaaagaggagatgagaggatatggatggtcatgtcatgttgtcagaggcataaaaaccagagcaatcccatcttgagtaggggctgggtaaaataaggctgagacctactaggctgcattcccaaagagttaggcattctaagtcaccggatgagataggaggtcagcacaagatacgagtcctaaagaccttgctaa

SEQ ID NO: 157365 - DNA, 373 bp, Homo sapiens
tgttaacatgccttttttacaataaatactaaaggaaatctttaaagttaaaaagatgactccagataactggaatccataggaagaaatagcactgaaaatggcaaatatgtgggttcatataagtgactatataattatatttatcttatttttataccttctttaaaagacatgaaatgatataaagtaataattttaacactctactattaagtctatagcaaatgtagatgtatatgacatataatatatatcacagtaacagcacaaagagggtgggagggaatggagctctattggagcaaattttctatattttactgaaattaagttcgtgttaatctgcaatagattgtgataagttaaggtg

SEQ ID NO: 157366 - DNA, 376 bp, Homo sapiens
tacaggtatgtgtcaccacatccaacttagttcttttgagtacatacctaggagtgagatttctgggtcacagagtaattctatgttcagctttttaaggaatggccaaactattttccacagtggctgcaccattttaaacttctatcaacattgcatgcaggttccagtttctccatgtcctcaccaacactgttatcttgttattttccttttcccattattttaatttttgtaatagccatcccagtgaatatgaagtggtaactcagtgtgatttaggtttgtatttccctagtgactgatgatgttgggcatcttttcatgtgcttgttgtctatttgtatatcttctttggagaaacgtctatgcaaat

SEQ ID NO: 157367 - DNA, 490 bp, Homo sapiens
ccacccaggaagcagctcctatggccgatccccaagtgcaggggtctctgggcttctgtcttccctgataagcccacacatgggagacagagagctcagggtgggacttgggcttctttcagaatgagtctgtccatgaggctgcacctcagccttaaggacatgctcaaaatgcccatctctatatgttgaatcaaggacctctggggcagactgactgactgaagtgagggtcatgcttgtaagtcttgaagacttttcatcaaactttctgttaaaatctaagatcaaaagcaactactatccaaaatatcagggtttgctgccaatgaacggaatgacttggaggaagaacaactcattactgctgggcctgaggaacaggctggaagggagcggacttcaccagggactttccacaggtgaccctggttctgcagtgatagaagctcctataccctaagctgtaaaattattcagaaagatcaag

SEQ ID NO: 157368 - DNA, 644 bp, Homo sapiens
ccacccaggaagcagctcctatggccgatccccaagtgcaggggtctctgggcttctgtcttccctgataagcccacacatgggagacagagagctcagggtgggacttgggcttctttcagaatgagtctgtccatgaggctgcacctcagccttaaggacatgctcaaaatgcccatctctatatgttgaatcaaggacctctggggcagactgactgactgaagtgagggtcatgcttgtaagtcttgaagacttttcatcaaactttctgttaaaatctaagatcaaaagcaactactatccaaaatatcagggtttgctgccaatgaacggaatgacttggaggaagaacaactcattactgctgggcctgaggaacaggctggaagggagcggacttcaccagggactttccacagttcttgtccttcttcttgtaagttttttgaacatgccagtgaaaaagcagttcagccatttggtgaaagaaatttccatttaccaacataggaagagttcatattcacagactccaaacatagatagagtcagccctcctcattcacggtttctgcaatcctggattcaaaagatgtaaatcaaaaatatttcttataaagcatctctactaaacatgtaca

SEQ ID NO: 157369 - DNA, 303 bp, Homo sapiens
gctggcgtctccaaggagctgggtcccaaccctgtgcttccctcccccatcgtggagcagcgacttggacatggtgctgacatggtccctccccccgaccaggaggagtggaatgttgtgatgtcacagtccacctagtaactgccgttactgcaagactggcctttgaccttacgacccagtcccctaagcgttctcaccccgtttctggttcctctggtcacagcacaaatttccagctggaaggggaatggagactatgggacctaggagcaagaggttccaggctgcctcactccctta

SEQ ID NO: 157370 - DNA, 250 bp, Homo sapiens
attcccccttgcaaactgtaccattccgtagttttaatgtgctcacagaattttataatcatcaccacaatcaattttgaacatttttattacccccaaaagaaaccctatgcctattagcagtcatccccaatccctccatcctcccagccctaggcaagcactgactttgtctttatagatttgtctgttctggacagttcatggaatggaatcaaatgtagaatcataaattgaatcacacaatata

SEQ ID NO: 157371 - DNA, 295 bp, Homo sapiens
atcacaatattttttccccacagttaaaatcatcatacttcattatttcccaaatcttaccagtacctccttgatgccttcttttttccatatctctttatgaaagcatagagtttggcataccctaaatcatcggctagcctaagcaaagatctactgttaactatttccaaaaagcccctctggagaatcggtagagtactagctgctcttcttgagaaagtaaggtaaggctggacgtggtggctcacgcctgtaatcccagcactttgggaggccaaggcaggtggatcac

SEQ ID NO: 157372 - DNA, 355 bp, Homo sapiens
gtttgcatttcttactcctaccgaactacagcacctcaaagacaggcactgggtgttattcttttgcacctgttgctgtccctaggacaccggacacactcagcctgtgcttgccaagggtatgtgtatgtactcaaatacacacatcctgtaaacagctgtggtggaaacccaagaccagacttgcagagaacgggatctattttgcaggccacagtgaagggctgtgtgagcttgagtcctctctgagcctcacattttacatcgaagacatgaagggctggtccgactggtttccaaaagtccttccaactgggacagcctgtgaatctgccggtgttccaactgcaccagc

SEQ ID NO: 157373 - DNA, 408 bp, Homo sapiens
tttttttttttttttttttttgagatgggagtttcactcttgttgcccaggctggagtgcaatggggtgatctcggctcactgcaatctccgcctcccgggttcaagcaattctcctctcacatcctctcgagtagctaggattacaggtgcatgccaccacgtctggctaattattgtatttttagtaaagatggggtttcattatattggtcaggctggtctcgaactcctgacctcaggtgatctacctgccttggcctcccaaagtgctgggattacaggcatgagccactgcactggctcctggccagccagttggcatctctttaaggtctccactatccacctatattaagtagcacagaaacacaccaagttaatgatactagcattcatctccccccac

SEQ ID NO: 157374 - DNA, 106 bp, Homo sapiens
tatggggaactacagaatttttcaggcctgtttaagtgctgttctctgctttgtgacaagttcaactttctggagttttcaagttggaagggatgttttctagccc

SEQ ID NO: 157375 - DNA, 543 bp, Homo sapiens
ttgggaagtttgctaatttaataaacaggtatctcagaggaatcaaaggtctacgtataaagctgtaactgaaagacgccttattagggatttcttcctgtggtgtggtggcacaaatgtagtcccagctacttgggacaccgaggcaggaggattgcttgagcccaggagttcaagatcagcctgggcaacatactgggatcacatgtctttaaaaaaaaaaaaaaaaaaaatggtgttgagagtatctacggctacatttacatttacattcctgatattctgctgatgagtcaagaaaacacaacactctagtgttcgagaccatacagctaaggctgaatgtataaatataaatggacttgttaaagcttttgattctgtctcatgcagttttcttaacaagcatgacattgcctaccagaaaacgacataactgactggcagaaatgataaaaagaaagggtttattgtcaaccaaggaagcgtctcaagtgccctgtctccagctcacagctctgttgccgcagtgtgctccctctg

SEQ ID NO: 157376 - DNA, 219 bp, Homo sapiens
ggcagacagcagtcactctggcagctaagaacataacagctgcttttggaaatcttttgcaaaggtaaaatatctttctaagaatctggatattcaccaggaaagagcgagggaaactgtccgtgtgttctcttccaggggcataatactatttcaactatacaggtagtaacacagctctccccatatagtttcttcaagtcagtactacacaagcat

SEQ ID NO: 157377 - DNA, 1039 bp, Homo sapiens
gtatttccatctcactcaatatttcagttgttccactatttcattattcttgcagccagctctttgtgtacatggaccaggtttgttaatcaaggttacaattgttggctcagtctcttttgagtgtggggtgctggaaatagcgctgagtaggaataacagccttaggttccaataaatggtgctcacctgtcttgtgtccctggataattcactatgtgtctgtagacctccctggcacctgtggcagcatggtattatggggggtcaaagtcatgctgggactgacaccagcaaggaagccagggccatcacagagcagccctcctctggagccgtgacattacgcaccccatggcagctggtgtaactcagagacctgtggacaaattcattgtcagagtcaggtgaagactgggcacacggcagatctggccagacctgctctttctaatcagtgagatgtatagtttagggaaaaagagatgggacttctgggacagggtaatgattgaccttgactatgaacatcttactggtttgggtttccatttttcttctagcacatagacagtagttgcacttctgtctccactaacttgtttcccatttgtgattgtgatttccaggtgatggctttggaggaggcgggcgtggggtgtgtgtgtgtgtgtgtgtgtgtgtgtgtgtgtgtgtgtcagagagagaggggagactaagtgactgaaataggctgttagtttcctgaatgatggctcctcatggctgaggctgacttgatgccaagtgttagcaagattgagaatgggaaggttggattctacagctgtctccattaccacaaacaggcactgagacactccctggggaagaaagcaccatttgtccacttgacattggcttctgtcttagccctgtgcatgtcctctaggccttgagtagtgttggctgtgtggtgctgcacctgtgcccaaggccttcttgtgaatcagaagaacccttgaggtcacagacaaagtacttcttaaaacagtagaca

SEQ ID NO: 157378 - DNA, 501 bp, Homo sapiens
gttgcagtgagccgagatcacaccactgcactccagcctgggtgacagagcaagactctgtctcaagaaaaaaaaaagaaaaaattctgcataccacagaactattgtaggatagggaagaaagcacacaaacttgagtgagttattctccaattaattttatttgcttattccttctcaaataacctatttaactgtataaagaatgcaggtagcctctattccactccttgatgacggctttagggttctagtctcatttgtttttgagtcttaagtctgtttgtaaagaacaggagaatctatttatcgcccttagcttcctgtagaaaaaaaactagaatatataatcaagttttaaaacttcttagtttagcaactgtttgactactaccatactaaatgatatgccaggtgttctctctgctgagcagttgctaaactcaccattagagtttttgctaagtgaaagtgatgctgtcaggcttagataataattcc

SEQ ID NO: 157379 - DNA, 183 bp, Homo sapiens
aaggtagatgagaaaacccaagtgacaaagaatgtttagtttattattagaaccaactatgagttgtgacccttatcttctgcactgggaattacagattttttcagggtttttctaacgtgaaaagagtttattggtgtaggaaaacatctggttccaaaatatagatcatccttcttgagc

SEQ ID NO: 157380 - DNA, 354 bp, Homo sapiens
agcagcctctcacacagcagccatgtttcttgaacaaactggaccccactccaggggaacagaatgagtacttagacatgtaagtgggcatttacccgcagcagctggcagggcctcaccattcagtacatcctaacaatccagcctttcagccaccaacctaatgggcttttcttggcacggacagttctggcttggcaaaacactcattttcacatcttaaattggtacatgtcacaactgaatggagcttcaggatctgctgtctgtctgacatgctgcacaaggcttctcttggtcagggactcaggtgtccacactcatctcagactcctttctccataaagatccatg

SEQ ID NO: 157381 - DNA, 526 bp, Homo sapiens
actggttccatgtatcagtgtattatagtgatctttttatattaggacatacagatctgcctcattcccttgaaaatcttaaaggttacagaatattccattgtgtgtatcctttatggataccacataatttatgtaacctgtccccaacaggtaaacatttagtttttttccagtctttgctattctcgagtaaacatccttgttgtgtatattttatctacatgtatgagtgtatctgtctctaggataaattttcaggagtaggattgccacatcaatggattttaattttgatagagatttaccaaattctactcctgtcactagtgagaaacttgaatttacatttcttcaacagtttgcatgcaagataatacaaaacacaaatcctttgttaaatttatatgatctgaataattaccaatattgaaacaggaatctgttttccattgccaggtacatgtacatgataaaaagatgaggtataattctagctataatcatgaattcaacctatattttg

SEQ ID NO: 157382 - DNA, 453 bp, Homo sapiens
gccctcgcctgctaaaaatagcctgtcccattatcacgccagtgctatagagcaccacgcgcgtgaacataacacctgcaagggtgtccacctgggacacagctgcacagagggacaggagctgggcacgctgtgctatgtggcgcgagggaatgcaggcatgagcacttactaggcggcacatggctggactgcggagacgtgtgcaacgtgcagagccatgtgtctggggcctgggggacactgtgatgtcatggggaggacccagaggaaccactaacacagccacagggaagccaagctcccgcctcacccccccaccgtttgatttcagccccctcctgccctcagtggcctcagaggaaggaagaaggcagggccaagaccttaagggcacctcatgatggctttttgagccatgtttgtgagtctcgcaggtagggttaagggctc

SEQ ID NO: 157383 - DNA, 200 bp, Homo sapiens
ttatttcattgacatcttgtgaggaaggggaagtagattggggtattcaatccattaacttggactggaagtgtaagtcatgcatacttttttttctctctctctctctctatctttgtcttccggtttttttttttttttttaggaggtgggcgttgggccctggtcccccgggcgagagtgcaaggggcccgttgtca

SEQ ID NO: 157384 - DNA, 435 bp, Homo sapiens
tgctctgtattctttggctgaagatatcctccactcttggggctcaagtgcatttctctaagtcaatgcagcctttacactttgaagttattagtaattcttctctgacccctcatttttgtcagtttagtaatttttctttaatttctgcttgttgatttgtgaccccaatctctagaaaactcttgtcaggtatcttgaaatgtacattttgtacattgtatttccactttcctgtgtccccaaacagttacccatttcccatgttaaagttctaactgcgtatcctggcattcaaagtatctttacattacttattacctacctctccctgttagttttcactaccttcttacatagaatgtctacgttggccaaacctgactaaccagcattccccaaatccaagcccattctttttgttactttactgtg

SEQ ID NO: 157385 - DNA, 343 bp, Homo sapiens
ggaagcagaggcagagggcagggagggtgggaacggttcgggcaaaatatgtcacagtcaggactcaaaggagtgagtcagtgtttcatctgcagtatgcatcattcgatagatgcacactctaagggctgaaccatgcatggattgaagacatctgggaaaagtcacccagttaattctcttggcccttagcctatggaaacagcatatattcttggctcttcctctgtatctccagtgttcagaactggacactgcttttgttgaggtgctcaacaaaagttgggcaaattggatagtaaaataaaagagattttcagctcttcattgtttttccaaattg

SEQ ID NO: 157386 - DNA, 1000 bp, Homo sapiens
gttactcgtgtgggaggaacgcgctttgcagcagcagttagattattaatggactcctatattgaagtgttcacatttttgaaaggctaattacaatataattttaggtttaaaatattgctttgccaagggtagaagttgtgtcatgtattattaagtggtactttactttttcagtcttgagggaaatatgggtttggttatggtaatctttaatatccagttatttccctcacttccccacttgacgcttctaactcctggaaaaggaaaatacgctccgtggctgtcaagtaccaaaaagttacactggagttatcttggattcttctgatttttttaaataaagaaagccaacctgcttataggttgagtaaaaaaaaaaaaaaaaaaaaaaaaaacaaaaaacaacaaaagggggggcgcccgccccccgaatcataaacattactgtcaccatttgtggcgcccgggccgtggagttaaaccccacacattcgcgacaagaattctagagaggggtggccactagttgggcctccaccccttggtggcgggcaagaccgtttattcccacgctcgggcaccgggggacacctcccttctggggccccagcgggtcccctctcggagacccacccaggcccagagccggcgccccctcaatccatccaacaacgcgggaggggaacccccctgggttcttgtcgcaacacgagaacacactcatctcgtcgcaccaaccaacttgccaccacacaaccacggttccctcccgggtatcacacttcaaacgaaccttaaagtggaatccccatcttaaagccctctgcagacatcaacggtcactctcttcgggccccaccgctgctccaacccctggacgccgcgctaaacgcgggggttgtcgctacaaaggactcaggacgctactctttgtgtcccaaggattccggggacatttagggccataacacacctcccggccgaaacttgcccg

SEQ ID NO: 157387 - DNA, 202 bp, Homo sapiens
tctaggaatttcatgaaaaagccagtggatgagagagtggagggggactattcacagcatggttaggggctgtttgcacaaatcctacttctggtagctattctaataaggcaaggatgagtccctgttggtactgtgtgtcctgtgctgacatcagaaatgataaatgtgcctgatgcaggagccacggagttcatcaccc

SEQ ID NO: 157388 - DNA, 518 bp, Homo sapiens
gtgagtccaaaataacagtccactatttaggtggtataaataaaaatggtagatcccttcctctctcctctattccaacaattctaaggaaaataatatcaagccaagtggcaattaagttcaaactagaaatgcatttcattaagctgtgtatttattagaaataaattacactaggctatttatacaaagtattttatgactggctatgcacatttcagaaataactctaagaaggcaaagaaaagtccagacagctaaaataatgtatcttgccaaaatgagatgctatgtttaaactgagagatactatctttccaaatcatttaaatatagtcagacgcagttcaaaagatttctgactatccattaatggaaaacataaacgtaacaaaattcacagcatacctgaaatcttactaatttacctaaagataacatatctctagaatttcacagaagatagaatcagttcaaaatgatgtattactgaacctataacgatttatggactagat

SEQ ID NO: 157389 - DNA, 421 bp, Homo sapiens
taagaacattgggccagaaattctctactttctcttctctttcatccataatcaatttttcttcttctatggataatatcctttaagtgtttcttggaatatcttttattttaaaaatcactttatcccacatactctttcagctgttgctctatttatctgctcctttttagagcaaaatccataagtacctgtactccaatttctgtgcccatttcaatgaaatgggcacagaaattgataggaaatgcaaacagttttaaaaagaaagttgatgcctctcttgtatatcgggagctctggattaaagcttcccagccaccctttgcttccttatctttttcctgtcttatgctatttagcaggctttttggatttactgtcttggaaaggcttcttgtcattgtattctattcaacat

SEQ ID NO: 157390 - DNA, 461 bp, Homo sapiens
gcatcaatactgtcatgggtgtgaatgtgtgcccagactccagcagcttcacgcctcccaaaatgctggtgccaacacctgagaggaggctggcagcccagggactgctagcaccctgtcccagctgaggggcatgcacccaaccatgtggctatttctactgtcacataaactgaatacaaatctctctgccactgcctgaaaaattgtctcactggctggcatcgctctttggaaggttgtggtcagtggtctgggaatacttcaagccctctagtgaagcaggttaccaacattgagaggggagagaacaaagccagaggcccagtaccagccccccagaattagtgtacacaacccaggaatgctgagctgggccttgccctaacaaaaaaaaaattcaccagaaacaaatccaattgactaaactcaccttataccataatcaaacccccaaggac

SEQ ID NO: 157391 - DNA, 360 bp, Homo sapiens
ttgtttatccgttcatctgttggtgtgtattcaggctgtttctgccttcgggctgttgtgaagaatgccgctatcaacatgggtgtgagaatatctgttcaagtccctggctatatttaaattcttttggatatttagccagaagtggaattactggatcatctggtaattctatttttgattttttgaggaaccaccaatactatttttcacagcagccgcagcattttacactcccaccagcaatgcacaagggttccatgaaatcactaattttataacatttttcctgattacatgttcactgtagaacatttagaaaatgcaagaaataaaatttagaaaattaaaattcccctt

SEQ ID NO: 157392 - DNA, 388 bp, Homo sapiens
ctataggaggcggagatttctggaaatctgagatccgaaggttctacactttcttttttctttctttcttttttaattttaaatggatgttctattttttcccaggtttattattttgaaatttttcaaagctactgaaatgttgaaaaaatagtacagtgagcacccacgtatgcatcaccagattctctgtcaacatcttgccacgttagctggctctatctgtctatctatctatctatctgtatatctatccatctatctatctatctatctatccatctatctatctatcatcttcctgaattgcctgaataacctgctgacatcatgacactgtaccccacatccttcagtgtgtggcccctgagaacaaggacatcatctc

SEQ ID NO: 157393 - DNA, 759 bp, Homo sapiens
tttgtctctttacttatggaatttgttatttctccttcattttctaaaggttttttcaaggctttaacagaagtttgggtataattattaagaatcactatagtataagcacagtctagaaaccaattaaattttctctgtgttacatatcaatttggtaaggactatgtaattcctgccatgaggtggaaatactggattcttctcttggccctaagtttcgtttattgacctgttgttggtccatctctctagaactctcggctgagcttcaggccttacattcatatctgacttcagcgatttgtcttcttgtctcaataagtgtaagaagtgggtagaggatggaaagggagaagaaaggattaaagttaagcctgaatgtttcattctccaccttaacatgaccgcatctactaatagccaataaaatgaattggcctctctactgggctgcttgaccttcctcatgacatggcagttggtttttcccagagcagacaggaacaaccatgattcaatatgtgagtaggctatacaggagacaggaaccattgggagccattttgaacactctctactacaggatcaaaagcaaataattacaaaacagtacatcaatgcaacaatggcattatatgtaagcattaatatagaattttggagggaaatcacgagaaaactgaagacatctgtccaccaagaaaagcacaaaagctataaactgaagatagatatattttcaactaactgcagtct

SEQ ID NO: 157394 - DNA, 737 bp, Homo sapiens
caggctgctgtcagaggtctgaagcagccacgtgccctggagaggaggcggtgtctgcggaggttggtcaagagtctgtatcctgggctttgatggaaatgagccctgaggcatgttcttggtgcgcctgttttcatctctaaagtgagcctgttaaacacatgggtttttccttccaacttttaacttttgctttcaccagttaggaatcagatgacgctttccagaatttgtcaagttagaccatccccaccccacacagaattgatggcaggtccatgtacctgatgcttgccgcttcccaactggaactttaaatgtttaccatattttaatctgatttttaaattacagtttaccacttacctgttgtaagaaatcttttcagccgggcatggtggctcacacctgtaatcccagcactttgggaggctgaggcaagcagatcacatcacctgaggtcaggagttcgagaccagcctgaccaacatggagaaacccagtctctactaaaaatacaaaattagctgggtgtggtggtgcatgcctgtaatcccaactactcggaaggctgaggcaggagaatcgcttgaacccgggaggcggagattgcagtgagccaagatcacgccattgcactccagcctagacaacaagagtgaaactccgtctcaaaaaaaacaaatcttttcaagatacaaaaaacagaccaggcccagtggctcacacctataatg

SEQ ID NO: 157395 - DNA, 378 bp, Homo sapiens
tcacaaagacagaaaggagttatcaaatgaccacaataactctaaaaacagaaagtgaggtgatctttcttattcacagtcccacttattcatttagaaatgctgagcaccaaaacaaaaccttatcacaagttcagtatttcgttaataactgccaagtataatggaatactccccaaagtactgcagcattagaacatgaccactccactaaattaaaaattcagcgaaagcttttctaacaaggctggatggagcactaactcaacggccaaacggctgcacttcctgtatatgcacgttcaaaacacctcgaattaacatgctagggaccttgaagaattgtactaggccttgctcaagaggaaggctttgtaa

SEQ ID NO: 157396 - DNA, 190 bp, Homo sapiens
acagttccctgattaggagatggggaccgggaggtggatcaggcatcagaggtcaggctgcacatcggatcagagcaagtctgtgcccccctgatgctccttggggagaatccagtgtgtaaggtgtcacgtggcagtgccagcactcccttcatcctcctgatctagatgctgattggccataggtcca

SEQ ID NO: 157397 - DNA, 539 bp, Homo sapiens
tttttggtatggtatattcacagcatcctgtagccatcagcacagtccccttagaacattttcctcggctcagagggaaaccctgcaccacttagccctcatccgagacccctccccagcccctttttgcagccacaaacctactttctgtcttgatttgcctgttctggatatttaatggaaatgaaatggcatgtggccttctgtgtctggctttgttcactcagcagttttcaaggctcctctgcgtggttctgtgtctggcttcgtccgctgagcatgttttcacggctcctctgtgtggtggcctgtgtctgttcttcatgccttttcatggccacataatattccattgtggggatggacctgttatgtttatccattcgtccatcgatggacttgttggctgttccaccttttggctgttatggataacgtgctacgcgcgtcctggacgaggttttctgtgagcttttgtgtcttcatttctcgtgggtatctgcatgcgtacatgtggaactgctgggccccgtggtgat

SEQ ID NO: 157398 - DNA, 417 bp, Homo sapiens
gatcactagagtaatggccaggactagaagtcaaaagacctgcacttaggttactggtctttttctttgtgtgggattatagctatgttgccatctccataggcaagagtattctcatttttaaaatggagaatgcttttgatttaccaaggtattttaggaattgagaaaagtgctctgtaaatgtccaagtgctataaagtattagatgaaattattcacactctggccctcttatgtgtctgtccccaagctgtttccaacttaatgctattgattgcccaatttgcacgaaccttttacttcaggttggctagtcttttccctgatgcttccaaaccacatgcactcttatgatggcttacatttgttttacccgctttctcccttttgactgctaagtctgcccgtcaaatc

SEQ ID NO: 157399 - DNA, 278 bp, Homo sapiens
tttctctgtttgggacctgactatctggatgaatgaggaagacccggaagaagtaaacttggaggagggaaaggcaagcattcccttggaggatgtaactgttgagatgaccttgcatttcaacatggagctttccttctcactcccaactccattagtgtctccatctatggcgatctctccaatgatattgggagagcttccatttagggctccctggccacgaggtcatcagtggcatcacaggaggtcctaccaggaggtataaatttaagtaa

SEQ ID NO: 157400 - DNA, 858 bp, Homo sapiens
aaatgtttaatctagcacactgggtaaagagaaaatagctgggtaaggcaccacattagtggcaggggaccagcacactcatatgtggctagtgtgtgaaggcaattaggcgataccctctcaaaatttaaagaacatttaacctttcacccaacaatcccacttagcaattcccttagcattccactgtgtagatgttcaatcttccatgagtataaataatgctgcaatgaacactctcagtacccggtatttccaactgcaaatatccatcaacagggacaggttaaatacattatggaacatctaaacagtggagcccagaaaactgcaaaaatgagggtgctctatttggatggagatggaaagatatggtcagtattttaatactagtttacatttgtgtgacatgagggcacacacacacacacacacacacacctgaatatgtgtctgacgagggaactgggtggcccaggacaggagtgggagaaagactttcactgagagtccttttgcaccttttgaacttcctgtcaggtgcatacattttttaaccaaaagataaatttaaaaaaatgctacctgcctactttgctactttgttaaaacaggtattggtatttgctttctaacgcctagctgacgttttaggtaatggccacgtccacctcaaagcatcaagaaaaactccctgccgtctcccactgtaggactcatctgctgaattgttgagggtttaatctaaacagaaaaatatataattcagtaacagttggtaaattaaagaatgatcacaatgtaattttttggatagaggtccatcatattaaaatcctaagtaatttctttctaaaa

SEQ ID NO: 157401 - DNA, 211 bp, Homo sapiens
cagagatttctgtctctaaggaagtgtaaacatcttggggtacttgttaaaataaacagctttctgaatcccttggggagagtggattctgtaggtctgaggtggaaactagttttaatgcactcccaggggttgtggagtgggcccctctgctctggatctacttggatcaacaggctcaagtggtctctttggacaactgattcacgca

SEQ ID NO: 157402 - DNA, 561 bp, Homo sapiens
tcaacctggagccagccatctgaacaagccttcctccatctcttttaggatggtaagctggggcatgatgtttaagacttcttggctctttggcagggctctggaggggaagtgagtaagccattgggatgtcactgtggtaatgtggacagggttttctggttttgtctccttccctgtggcctttttccatgtccccccaacccctggacttccacggctgggccagacatttcccttcttagacaaatagactcgcttcatcccctccatagctgcagaggagaaatccttggtttgggtcccagtttttccatataggctattcttgtgctttatgcagacagaaacattagtacagtatgtacagaattagcagtatagtaataagtcattttaaccaacagatgtaaaaaatgcttcagcatacctttgtaatactaggcctgattacagaatgggagtggtctgtataagtgagctgtggtagaaaatacaacccttcagaataagttaaatgtaattaacttcactttaccagagtcatttttgttcccacag

SEQ ID NO: 157403 - DNA, 348 bp, Homo sapiens
ttgggtctaccttgttttgaaggcctcagaagccttagagtgctaaggcaaatgaaggaagttagggatgtgctcccctacagcaggagtgcaaagctgaatctctgtgattcctacagaaaacaactctcctgctgatagaatctgtgaaaggaaaatcttgtggcctcaaaattactaagctaaagggaaaagtcaatctgggaactgctcagggcaaacttgcctcccattctattcagtcattgctctcctcactgagataggtgcatagtctgattgcctcctttggaaacacttatcagaaactaaaaagaatccaactatttgtctctcacctacatgtga

SEQ ID NO: 157404 - DNA, 279 bp, Homo sapiens
cgcttttgaggcctttgctttccccaaaggacctgacgttgaaggagcagatccttatggccagggcgctgtggatggagaggaggaggaagaggagaaagaaacagagaaggaaggagaaaaataggtgctctacagtatttcagtaaactagttatttttattttattttattatttttttttgagacaggatcttgctttgttgcccaggctgtagtgcggtggtgcaatcaccactcactgtagcctccacctccctggatcaagacctccctgg

SEQ ID NO: 157405 - DNA, 181 bp, Homo sapiens
gtgagctttttatctatttatctgtgagaggtttaagctgatgctttgtaagtagaacagaaatgcagaaacaaattggatttcaaggttgatgtaatgctccatcccaatttccagttactgttttgttcatcaaacagcctcgtcgtttcctttgattgtctttttaataagaaatggg

SEQ ID NO: 157406 - DNA, 1071 bp, Homo sapiens
  misc_feature (907)..(907): n is a, c, g, or t
  misc_feature (918)..(918): n is a, c, g, or t
  misc_feature (920)..(921): n is a, c, g, or t
  misc_feature (924)..(924): n is a, c, g, or t
  misc_feature (938)..(938): n is a, c, g, or t
  misc_feature (947)..(947): n is a, c, g, or t
  misc_feature (953)..(953): n is a, c, g, or t
  misc_feature (960)..(960): n is a, c, g, or t
  misc_feature (973)..(973): n is a, c, g, or t
  misc_feature (1006)..(1006): n is a, c, g, or t
  misc_feature (1008)..(1008): n is a, c, g, or t
  misc_feature (1037)..(1037): n is a, c, g, or t
gaggctgcggaagggggtcgagtagaaggaccgccgctccggcctcccgcgacttctcgaaggtgggcaggtcccaccttgtggaggatggaggtgaccggggacgccggggtaccagaatctggcgagatccggactctaaagccgtgtctgctgcgccgcaactacagccgcgaacagcacggcgtggccgcctcctgcctcgaagacctgaggagcaaggcctgtgacattctggccattgataagtccctgacaccagtcaccctggtcctggcagaggatggcaccatagtggatgatgacgattactttctgtgtctaccttccaatactaagtttgtggcattggctagtaatgagaaatgggcatacaacaattcagatggaggtacagcttggatttcccaagagtcctttgatgtagatgaaacagacagcggggcagggttgaagtggaagaatgtggccaggcagctgaaagaagatctgtccagcatcatcctcctatcagaggaggacctccagatgcttgttgacgctccctgctcagacctggctcaggaacttacgtcagagttgtgccaccggtccagcggctgcagcacacacctccaacaggtgcttgaccaaagagaggaagtgcgtcagtccaagcagctcctgcagctgtacctccaggctttggagaaagagggcagctcttgtcaaagcaggaagagtccaaagctgcctttggtgaggaggtggatgccgtagacacgggtatcagcagaagagacctccctcggacgttgcgctgagcgagccacatcctttacttgcacttgatgggagaagcaggctccagagcttgagcttatctatgtcagggattttggagggtgggcggaaaccaggtgtcacntgagctacatnanngangacactgcccttgngaatgtagnagtaanaatgcanaaggtgtgttggncccttttgttcacctcctcagactgttaaaccnancctgcaagtttgccaataaaatgcaatgnaaatgcaaaaacacaaaaaaccaaaacaaaaagc

SEQ ID NO: 157407 - DNA, 351 bp, Homo sapiens
cccgactgtgtggagatcttccgccatgaagactgtgccagtgccagcctggccaacctcacttgtgaccagcttgctgaccgccagtcccctgtcatcgagttctgggagaacaaagtcttgaggctgtctgggggactggaggtgccaggggccctcaactgggaggtgaccctttgtctgctggcctgctgggtgctggtctacttctgtgtctgaaagggggtcaaatccatgggaaaggtaccactagaggcatgcaggggggagggtggctcagccctgggagctggatgtctgtgccaggcacacccgtagcaacgggaggtgaccagacagagtctagcccta

SEQ ID NO: 157408 - DNA, 567 bp, Homo sapiens
gtattatccttatcttttctattatcccatctcttcccgtaatagacaggaaatgttgactgtctagtaagagctcctttaatttatttccccttgcccctcaagtatcatatctacttctctctttatttgctgccctgtgtcttacaaaagagtccctcccctgctcaaggctaatgctctcacctaggctctgatgccatctctttctcctccggttcttcctcctcctcttcctctttctctccatcatctccatcagcagcaacctcactatcatcatctcattgccatcatcctacctatcttcctccctttactctttcttcgggatgtcacccccatcaataccctccttcctctttcctgtctctttggctgactctcttatggctccttctgttccccataaacatgctcaatggtatcccacgcctaggaaacagagcaccttcctccaaccttctctcctcccttttccagaaactactgctgtatttctcttcaggtcttcactatcaaaattctttttatttttgttttttactttggtagagacatggtctc

SEQ ID NO: 157409 - DNA, 210 bp, Homo sapiens
cccagcaggacagcaccgttctccccctgcctttgcaaccactctttcactagaccagaggatctcgtccccacaggctcactgctggtcctggccatgctcccacaccggtcctgagctgtaccaacatccaccagccactgttcttgccataacctaggcgccaacccattgctcgtccacagctccccctgctggcgcatgctgccc

SEQ ID NO: 157410 - DNA, 289 bp, Homo sapiens
tccactgataggaacagttctcagctctactagagagatgtccaccaacagcaggcagttagcatattgggggcttccgttgttgtggcacttgggggtaattgggtagctgactgcttaagtcagggagtatgtattagaatcgtgtattagagtatgtatctgttaatctggatagttggtttaatggattgcttaagagagtttctattctattaaataccttccactaaccactttttggtctctcaggcccctagaattgcataaatactgaagcgctccctca

SEQ ID NO: 157411 - DNA, 594 bp, Homo sapiens
agtcctgcagctgcaaacacacctggcttacatcatgtagcattcttccctacaccaccacttaatctcaccctcatattgcctcatctacccagattccctctcatttgtgaggcaacattaaaaaagcatcataaggttctgtcaggtcactgtcacattattagcttctctaattacttaagtaagagataacagtctctgtggcagattaaattttccaaaaatgaccacagcagtatttctggccccacatcttcttcagaagcctcctatgccccatcaaaaggtggcgcctatttcccttccccttgtaactgccttgacaaacagtatggtagaagagatgctgcatggcttccaagactgtgtcatcaaaggtggggtggcttatgcctgtctctccctctcgacaactgtccttggaatgtggccaccacattttgaggaagcgcagaccaaatattggagaggctacatagaagtgctctggccacaggtctagtgaaagtctccgccaacagccaccagacctgtaagggagggagccatcagctagttccacctctccagtggcactgagctgagtagagc

SEQ ID NO: 157412 - DNA, 350 bp, Homo sapiens
gctctgggggcaaaaatgagtatttctgatttgaaatcaggttttctgaaagaatccataagtaaattttaaaattgcttttgtttatatttgtgcttattaaaacactccctgttctggaccaatcttaatcttctaggcagaatttatttagtgttaagaaaatggcaactctttggacatctgttacatgggataatacaaaaataattttgaaaattttttaaaggcaaatgtgactggagtgtgggcatgagtgtgatatgaggatgatggcttgaagaagagccttttaagaagcaatttggccacctaagtgcatcccatcttaggaagaaaggatgggaata

SEQ ID NO: 157413 - DNA, 201 bp, Homo sapiens
ttttccatttccatccagtgcaaacacaattacatgcagaaaacaacacaaaatacaaaacatcaaagcagtaactcacagcatctggcgtggcttcaaatggcatgtctgggaaattccagatgccaggagtggcccagatgaccctaaacccacagtaacacacctgtttctcattcactgtcctaagctaccccatcc

SEQ ID NO: 157414 - DNA, 474 bp, Homo sapiens
atccactttgtcagatactctttttcccaatcttaaccctaactttattcaagtaaattatttttccctcccatcactgtctttcagtgcccctttttcatgaattttcaacatgtaacaacattctatgattctgcagtcttctaattaaccctaaccctaactctaaccttaatgcttattttatatttatttgtcaatacattgctaaagacctttgcctttcattattctggtaaaaatacattcctcagtacttctgctaatttcctaagagctaagattcatggacttggtttctcagcagcattttgtttgtgcttaatataacacgtcatttatacattaaactcttgacttctagagatgcagtcatttttgtggcatattaaagaccttggattttctgtaatatgttttcctgttgccttttccttttttttctgaaactcactttgcttctttaacactaat

SEQ ID NO: 157415 - DNA, 248 bp, Homo sapiens
attggtaccgccgggagccaatcgagttctaggagcgtgaggttagagcccgggtctgggcgctgggtgtgcctgttgtacagggctgcctcagcctctgggccctccagctcttccttgttgaaacatctgctttcgagcatcaccgaggccagctccccgtctcctgtccacctcttccttgttgaaatacctgctatcaagcgtcacctaggccagctccccttcttctgcctccttccacgcgg

SEQ ID NO: 157416 - DNA, 402 bp, Homo sapiens
ttgttgggattttattttgtctgtgcctgctggaattcctgggttgctgatttatttggcttcaggtctagtacacatgaggcaaaggaaaacccagggaattctccaccagcttgctcctcaagtcctgaggcccttagctatcctgacttcttctctcctcctgtcagagtcatcttccaggaagtgtccagggtttccaactgtacttagtgggaagaatagggaaatacatgcctagtccatcttcctggaagagaagaaggatgcataacacatgcacctccaggatgtaatcaaaagagatagtatttgatggcatagacacacacacagacacacaatgcaaacacacatacacaccacacataacacacacacaccacacacacacacacacac

SEQ ID NO: 157417 - DNA, 442 bp, Homo sapiens
atctctactaaaagtacaaaaattagccaggcatggtggcaggcgtctgtaatctcagctacttgggaggcttaggcaggagaattacttgaatccaggaggccgaagttgcagtgagccaagattgcaccactgcactccagcctagatgcaggggaacctgcaataaaggctagaagaaaaatcaaaccattctaaggcatatcgggtaggttaggggagatgaagagtcctaaaacagggggtcaaagaaggtagatgactcaccctttctctcattccctgatttttctataagatggtcatttagaagaaaacatatttcaaaaaaatgagggtgctgagtttctatgaacctctctcccaaccaaaatccagacaaatgtccaaggtccttgtgtgccctaatgcagcagtcccctacctttttggcaccagcgac

SEQ ID NO: 157418 - DNA, 612 bp, Homo sapiens
aagaagaagtcgaacttctcttttcactgatgatatgattgtatacctagaaaaccctaaagcctcctggaactgataaatgacttccataaagtttcagagtacaaaatcaatgtccaaaaatcagtaacatttctgtgcaccagtaatattcaagctgagggcccaagcaagaacacaatcccatttacaatagccacacaccaaaacaaaaacaaacaaaaactaaaaaaaaaaaaaaacacctaaaaatacacccaaccaaggcgatagaagatctctacaaggagaactataaaacactgctaaaagaaatgagagatgacacaaacaaatggaaaaacatcctatgctcattgattggaagaattaatatcctgaaaataccgtactgcccaaagcaatttacagattcagtattattcctatcaaactaccaatatcatttttcacagaatcagaaaaatctattttaaaattcgtatggaaacagaaaaagagcccgaatagccaaaacaatcccaagctgtaagaacaaagtcagacgcatcacattacctgacttcaaactagtaatgtaagtccacagtaaccaaaagagcatggtactag

SEQ ID NO: 157419 - DNA, 159 bp, Homo sapiens
caccttttcccagggatccctgtgtaggttgggtaacatcaagtttggtgatattctgccccagctttttatttcctgtgtctcccctgtgtatgtgcgagcactcacatgcaatcagggatgtgtggatagcccgggcccttccttgttttccctgtg

SEQ ID NO: 157420 - DNA, 147 bp, Homo sapiens
gtattttacaaaaattcatataacttcatgtacaacatagtgctttctgttttggtgcatcttgattcctcttatcctacctaccctcacactcttatgatatttccatcatacctacattcctgacacttttattgaaggtgataa

SEQ ID NO: 157421 - DNA, 355 bp, Homo sapiens
gcgggggccgggcggccagggggactatcggagttggagccccgggccgcagcggcggcggcggcgcggccccagggcccggtgagggcctgcacacaggtcccgtggccgcgggcggcggccagttgcagcgcggtgagccccgcacggttggtgcggtcgaggcgcaggcctaggcggcggaaggaccgcaccaggaactcgagcaccgccccgtggccgcaggccgccgcccacatcaccgggctgttgcccgcagagtcggccgcctcggggtcaccgctgaactgcaccagcagctgcacggcgtccaggtggcctcgctcgcacgccaggctgagtgcggtgcggccgc

SEQ ID NO: 157422 - DNA, 655 bp, Homo sapiens
caactcctgacctcatgatctgtccggttcaaatgtgattgattagctatccaaaaaaaatatgcatgcaaaccaaaagtaagggggcagtcccagatatacccagtctgtacaaaacccagagtaaaggaacaatcccactgtcactgtcacagaaaggccacgcttcagggccagccctagcaaggaggcagcactaggtccagatccctctcctgccatgtatgtgacttggagaaatgtgtcagcttgagtgcctcagcttcagcctctgcacaatgagaataatgccacctaatttgcagggatcccgtgaagattaaatgaggtaaggtgtgtgaaagagaccaccctcctatgtagcgggcattcaaaaaaagctagctataatgaaatcgaagaacttcagagtgtcttaaagcaaacaggaaattcaagaagaaatcatcaaggaaggatggggaaagaagaaggtgaggagggaatgatatgaagaagaagtgcataggtaaagattaacaataaccttttggccgggcgtggtggctcatgcctgtaatcccagcactttaggaggccgaggtgggtggatcacgaggtcaggagatcgagactatcctggctaacacggtgacacccagtctctactaaaaat

SEQ ID NO: 157423 - DNA, 303 bp, Homo sapiens
gaaaaaaatatcttagaaaatactctggtcaatgaaacaataaatgaaaatttcaaatgaaaaaatggggaaaccacagttgaaaagaatcttgtaacttcccagagtcactttagcctcccaagtcagactcagctcccaagtcgcacccagtgcgagcctgtgctggcctcttggggctagatatcccggtgagccaggcatgactgcctcggtgcagcttttcggcttagcttttcttggcactgagacataagcttgtgcagccacaatcgactccccacaactagtatgaactctcct

SEQ ID NO: 157424 - DNA, 374 bp, Homo sapiens
cagtggcaatttcaagcttctcctttttccccaagccccataatctccccctgatgcccttagaaagcttccctggtcagtcctcctcaccacctccagctccccctagaaactgaccatttatcccatcccggctgactcaagctgttatttcaaagtataccatcatttctttcagcacattttgtcattggagacagaaacaagtctctgtaaaagtgcccagaagccagaagtaaaaatacacgagccagtttttattctttttctatattgaggaagatgccaggcattgcagtttacttctaaaagtgccatgctgcattatggaggagtacaggtgttgggcaaatgtaacaaacttttctatccat

SEQ ID NO: 157425 - DNA, 393 bp, Homo sapiens
cagtggcaatttcaagcttctcctttttccccaagccccataatctccccctgatgcccttagaaagcttccctggtcagtcctcctcaccacctccagctccccctagaaactgaccatttatcccatcccggctgacttcttcccttttacaagaagatgtctctctttgaattcaactcagaggtcagcttcactgcctgccctgtggagtcgactctgtgtcccacccttcaggaatacggcttaataataagatgataaggattcgtaccagggattggcaaatgacagtcattttctgtttccttaagtaaaattttattaaaatacagctccactcattcatttatatattgttcatatctaattattttcacactgcaatggtgc

SEQ ID NO: 157426 - DNA, 260 bp, Homo sapiens
ttagtagagatggggtttcaccatgttggccaggctggtctagaactcctgacgtcatgatctgcccgcctacgcctcccaaagttctgggattacaggcatgagccaccgcgcccggccaaggccagtgttttgacacttttcctttagtaggttccatgcaagtcctcccatctcaccagccagactgctgtagttgaaagaattttggaattggagtctgaagacttctttactcctggagatttggctttccatgt

SEQ ID NO: 157427 - DNA, 423 bp, Homo sapiens
gagagcaggtgaagtgttttctaactggctgaaagttcttatcagtattattgtgagttaatggtactctatatcccaagtacgtgttaaaattagaagcataccttctatttgaaatataacaacatggaacatcctttaccaccaaaagcatggcaaagctccaggcaataaatgaaaaatggagagagcataggtacagaaaacacacacacaaagtctttggatcagaaaaaaactgagtttgttactacctttaaaaagcttctatatgaacaatttttttctctatgattacaaaggaagtgtttgtcccgtgacttttttgaactgcatcagtgttgccttttgctctgacttgctatgacaagggtaaagttgcttatgcaacaacttaattttaagattctgttttctcacctg

SEQ ID NO: 157428 - DNA, 199 bp, Homo sapiens
cccttggccccacttgtctccagggctgctaccatccagaggctgggtattggtcactcagcacccaaggatctgagtagttccataactggtgacatgagtcaccccagttaaccggctggtgttacttccatctccagtcagggtccagcacgtgattacgcttttccttttcccacttcatgtggaaaagagacct

SEQ ID NO: 157429 - DNA, 434 bp, Homo sapiens
attttatgttttccaaaattaaaatcaaaatacatgttttgaattgatggtcggaacagatgcagtgaactcatatgtgaaaaatgatgaaagatatgagatcaggctatctttatgcctccaaagcagaccattctattctatacattgtgcttatcaaagtttgaaatagaagttatgtacaaaaagaaatgacccctgttccccaaagtttgaagtctgagatgtaagagaaaaaaaattccctgaattccaaggcttagaaatatatttctatcaccttatttatattaggccacaagtagaaaccttgattttgattaatgagttatcgtccccaagtttgattacttgtactttgagagaatttccaatattcaattccctggattttaaaatctgttttctactaataacttgatttataaagatta

SEQ ID NO: 157430 - DNA, 488 bp, Homo sapiens
tgcctatccctcaactaaggacgcatcactgtatgtcctggggcctctatgtgcactgctttcgtatttctgatgcccagatctataggctgtagctgcttcagttgccttgaactctgttttcaactctgtcccatagccaatgactgactgatgtatgactacaaacatccagctcctttacctagagacagaacaaactctgggttgtaatttatgtcccagagctccctgagggtccaggctgtgctgggatttcacttggaatcactcctcagcttggctctccctcttttctcttttgctgccactcctcagcttggctctccctcttttctcttttgctgccattgctcctggtaactcctgacagcacagcttcaataaatcacttgaccttgaatcctcaattgaaagcactggaacttgcttcagagcctttgcatgtcttattatctcttcctagaatgttctaccctccccttgcc

SEQ ID NO: 157431 - DNA, 605 bp, Homo sapiens
cccgaggtcacctctgcttgctctttgtctaaggtccacagcatgtctggatctcaccatccacatgtgccttgacttgcacagacctgcctgggattaagctgtaaccggatagtttagaccctgttggtatttagatctggagtcctggagatctgggggcatccgtggcttgctgatttccaatgactaggaaataaggagcaatgacacaaaaaggacgggacaatggttacagatgaaagccaaaagcagagaagggatctgaaaccgggagtggctaaagactgaaaacagaagttgatgaaaatggtgaatacagtctatgtccgaatgaagagtaattttgctaaaataaaccggctaggatctggttaacagggcagagaggatgagaagcaaagaccagatgtggccaggcgtggtggcacatgcctgtaaacccagctactcaggaggctgaggcaggagaatctcttgaacctgggaggcagaggttgcaatgagccgagatcactccactgcactctagcctgggcaacaagagcgaaactccatctcaaaacaaaacaaaacaaaacagacaaagggaaacaccgggtacc

SEQ ID NO: 157432 - DNA, 432 bp, Homo sapiens
caaaaatgggaagaaattgatagagaaaaactaaattgttatactcaggctcccccaaaggtcatgtagagaataaaaagtatataaaaattagtatctacaaaaagggcagttgagaatgtaaataggcactgattacaccaagttgcttggggccacataaactcaaagctaaaaaattactgtgctttggcttcattcatgtcatgcatggaggaaagccacacatgaggccccttgttccatcccgtctttccctttcactctcctccggctgacctaagaaaacatgaatgccagctgatgacactcatgaactgccctgcctctcaaaagcgcaatccaggggccagcatcatcctcacctggaggtgcactgtcagatatgcagattctggctgggcgcggtggctcacgcctgtaatcctagca

SEQ ID NO: 157433 - DNA, 632 bp, Homo sapiens
agctgtatccattgctttaagtgtcccactgctactacttgctccagatttcaattgttttctgttatatcagtagcctaaaacctggtctttgcaaatctaccatggctccattctaacccattctcaatattgctatctcaatgacctgtttcaaaaacagaaatatgtctacattgttgtctggttaaaaaccctcaatgcttccctattgtctttttaagaaagtcaaaactccttatataaggcccttcctttattccctgttctgtctacatgtccagagccatctctctatggttctcagcttagatataatttcccctgtgagcctgttgagtgtatctgttattagcttctagcatccattttatccttccttgatgagaccagaatgtttcgctcactcggtacttgtgctattaggaaggagcatgtgattcggccctaggtcacccagaataacccacttctctgagccatgtgattatttatgtatgatggacacatgacccaagccaatccattcagaggatatctcagtgctttgcttgagctgtctgcaaagactcagagagttgggtttggcctgatgtgatgatgcaaacctgaagacactgtgcaaccatgtg

SEQ ID NO: 157434 - DNA, 586 bp, Homo sapiens
caggcgtgcaaggttggatcaggtacgtcgttatacagacgtctgggactttgtaacatgctgtccattctaacccattctcaatattgctatctcaatgacctgtttcaaaaacagaaatatgtctacattgttgtctggttaaaaaccctcaatgcttccctattgtctttttaagaaagtcaaaactccttatataaggcccttcctttattccctgttctgtctacatgtccagagccatctctctatggttctcagcttagatataatttcccctgtgagcctgttgagtgtatctgttattagcttctagcatccattttatccttccttgatgagaccagaatgtttcgctcactcggtacttgtgctattaggaaggagcatgtgattcggccctaggtcacccagaataacccacttctctgagccatgtgattatttatgtatgatggacacatgacccaagccaatccattcagaggatatctcagtgctttgcttgagctgtctgcaaagactcagagagttgggtttggcctgatgtgatgatgcaaacctgaagacactgtgcaaccatgtg

SEQ ID NO: 157435 - DNA, 332 bp, Homo sapiens
gagctcgttgggagtggtagcgtgtggaggagtctggtcggagctagccaggtgtagcctgcctgggtatgagagccagcagtgttggcgtgcatcgcgtggatctggggggtcgatgggaggaagggagctatgggtatggcggcctcgattgccccagaataacccacttctctgagccatgtgattatttatgtatgatggacacatgacccaagccaatccattcagaggatatctcagtgctttgcttgagctgtctgcaaagactcagagagttgggtttggcctgatgtgatgatgcaaacctgaagacactgtgcaaccatgtg

SEQ ID NO: 157436 - DNA, 390 bp, Homo sapiens
tgtaactctttgacttgctttataatgaatactcattgacaaaatgaatcctgatttccagatgttttcaatgcatttatccattttgaaatttattctacctatctttgtttttcaaccaataatttattaataattttctcctgactagcagaataattgtcagctaacagctcaattgttattataccttgtttcatggaaaaaaacctattactttgttttcatgttaagatgccaaacacagacagttaaaaccatttgctttccttttgttctcaaagggataaatgaattgtgtcaaaatattctcaagaaaattacaaatatgacagtcatcttttattacatatctatggaggcagagttttttctttgtgacaaggtctt

SEQ ID NO: 157437 - DNA, 542 bp, Homo sapiens
ggcggctccaagatggcgcaggcgatctttgaggccctggagggaatggacaatcagaccgttctggctgtccagtcattattggatggccaaggagcagtccctgatccgacaggccagagtgtcaatgcgccccctgctatccagccattggatgacgaggatgtatttctctgcgggaagtgtaagaagcaattcaactcgctgccagcgtttatgacccacaagcgggaacagtgccaggggaatgcccccgccctggccacagtctcactggccaccaacagcatctacccaccttcggcagcacccacagcggtccagcaggccccaactcctgccaatcgccagatctccacatacatcacagtgcccccgtccccactgatccagaccctggtgcaggggaacatcttggtgagcgatgatgtgctcatgtctgccatgtcagccttcacatccctggaccagcccatgccccagggccccccacctgtgcagagcagcctgaacatgcattccgtgcccagctacctcaccca

SEQ ID NO: 157438 - DNA, 477 bp, Homo sapiens
tgcgtacctgggcgtatgagaaaaggcatcgggtatgccagggtgtgtgggaaaaggcatcgggtaatcccacgggcatgtgggaaaaggtggtaagaggctggtctcaaactcctgaactcgtgatccgcccacctcggcctcccaaagtattgggattacaggcatgagccaccatgcctggtccctggagactttttctttcctttttggggggattatggttggttggggagaaagatttttttttttctgtgtgtatttaaaagtgtcctgtggtttgctctgatgaatgggtaagtgtcctttagcagtcactgatgggaggttggctgctgaggcctctgggactctgaaggagaagatatgcagcttcactggaccctggttgtgtatctccttgattttgctcctcaaaggttacggatgctgatctatctagctccgttagatacgcccacggttagcagttacgac

SEQ ID NO: 157439 - DNA, 834 bp, Homo sapiens
aggcaccccagcttgctcaccttctcctgcatggctggttcggggttgggcgtagatgctggaccagtttcctgtaaacccagcatggaagtgttcagcacctgtcttccaaacacatggatattcctcactcacgattctcagctttgaagtgctagacaaaagctctatttagcttcctactgtgtgcccattcatggcatcctcttggggaatactagcaagtctttctgggcacaatgtgtctctcaggctgaaactgccaaggggtgcggaaaaccagatagaagtggggaaagggccatttcccagctaaaggcagtttcctcctctaagatatggacacttgctccctttaagacggaatgattgtcattcccaggaagagacctgaatggccaagactggctaatttttgtatttttggtagagatggggttttgccaagttggccaggctggtctcaaactcctgaactcgtgatccgcccacctcggcctcccaaagtattgggattacaggcatgagccaccatgcctggtccctggagactttttctttcctttttggggggattatggttggttggggagaaagatttttttttttctgtgtgtatttaaaagtgtcctgtggtttgctctgatgaatgggtaagtgtcctttagcagtcactgatgggaggttggctgctgaggcctctgggactctgaaggagaagatatgcagcttcactggaccctggttgtgtatctccttgattttgctcctcaaaggttacggatgctgatctatctagctccgttagatacgcccacggttagcagttacgac

SEQ ID NO: 157440 - DNA, 216 bp, Homo sapiens
acacagtaaatttcacctaagttatttcatatcacagaaaatttaataggggttgatgattaaggaagtagatttaaaatatataggaattttgagactgaactgtcaattgtttcaatagacaaatccaatttagaactcatgctgattttttaaaattccaaatacgagtcaaagaactttcaaaataacgaagtgattttattcattcaagca

SEQ ID NO: 157441 - DNA, 627 bp, Homo sapiens
attttaaattaattattagcaaagcaattgtatttatagaaagacaaagttcacaggaatttaacctcaattttattaatgttccctactttcacttagtatttaatcgtgctcttgttgaaataatttcctaagtactaatgtatcctataatcagcacttaagtttattttttgttgaaataatttcctgggacaattatatattttatataataataaaagcacacacttttaaaagttgtcacttttaaaaacatcatcagtcttacagcccattcttggctctttcattttattttgctttatttgagatatatcatcaaatgccttgaaaaactttataatgtttagccatctctgtgtttttatttttctcttcaatccagcatgtatcttgaatacctactctgtttaaaaaactactaggtctacatggaatctactataaatgtaggtaaattacagagtaattctagtcttaatgctaaaatgaaggtaccactgtaatcattattcccaatgttatgattacattgacagataactccagttttgctaacctgaactgatgttatggccataatatgttgttgattcatggcaaatggtgatgtgtgagttatga

SEQ ID NO: 157442 - DNA, 303 bp, Homo sapiens
atcataatcttttatttccaaaactcagacaggtttttatcatcatgctctttggactcttaaccatcttcttctacttttaaattctacttctttctcaatacatttttaaacagcatcttgtgatcatttcccagtcttgagtgcctggcactgggaggtgacctgcccacattgctgtcagaattcgctgctggacccctgcacaggtcccaggctgttggttacgtgtttcaatctgcacatcagccatcctcaccagccttcctttgtgcatctggaaataaaaatgctcttgataaa

SEQ ID NO: 157443 - DNA, 831 bp, Homo sapiens
cgtccaggagccaacagcctctctgtgcaaaccagacaaccctgcaggaactgtgcttgaagaaaccgtggaaactgcccccaaccctcccgtctctatttctttctctgttttattatctcattcttggctgtgaggtaaacaggagaaaatgagaaggtggttctggaggacccgaccgaatttgctttcgtgacagggtcaagcgccctttcctcgccggccgcagccctcaccaaaggggatttgggggcctccggacaggggtcctgaaggttttgaattgttcaatctctgggggtacaggaacccctgcaggaggtttcaaaggcaagagtttcgcagagagaaaaaaaccatgaactttgcaggttggtggcggaatctggtgatttaagaaaacgtgtttaagcctcggccgggccgcgcctgggctgtctgcggtgctcttccggaattctctacaatatctggaagtgaccaagaaaattccagaacccggaggctgcgccgtggagataaacatgggcacctggggcctgtgttccccctgcacgtccccaggaaggaactgctggaccagcagaatgaggggccaacgccaggggcagcactgcccggccacagaggactgtggccccacagatgacaccctcagctaccagctcctgcatctggaagatgaccaggaggaggaaggacggtctgcaagtgttcaaagtgatgtttccaggccgggcgcgcttgtaataccagcatttgggaggctgaggcaggcggatcacctgaggtcgggagttcgagaccagcctgaccaacgtggagaaaccc

SEQ ID NO: 157444 - DNA, 476 bp, Homo sapiens
gtttcttcaaccaacaaattgcaaagaaacaaagtgggggagattttaaaaatctaaagagacacatcaatcaaatgcaacatgtcaactttgtttggatcctaaacacttatgagagaagaaaacttgaacactgaccaaatacttgatgatactgaggaattaccgtttattttctaaggtgtgatgatagtattgtggggttaagaattcttaattttctggccagacgtgatggctcacacctgtaatcccagcactttgggaggccaaggcaacggatcccgtctctactaaaaatacaaaaattagctggatgtagtagcacacacctgtggtttcagctacctgggaggctgaggtgggaggcttgcttgaacccaggaggcagaggttgcagtaagctgagatcacaccactgcactccagcctaggtgacagagtgagactctgtctcaaaaaaaaaaacaaaaaag

SEQ ID NO: 157445 - DNA, 510 bp, Homo sapiens
aatacaaaaaatttagccgggcatggtggtgcgtgcctgtaatcccagctcctcgggaggctgaggcaggagaattgcttgaacccgagaggcggacgttgcagtgagccaagatcatgccattgtactccagcctgggcaacaagagcaaaactctgtcaaaaaaaaaaagggcggggggcgcttagagattcatgtttgagtgaagatttgcagaatgggacccaaatggatatacagcacaatcaagatgcagggaattaagaacttaacatgtgcttgtaggtttgggtttgggggctatgtgggagtataaaaaataggctatgtctagactcccgaggggaactcgttttaaatgcctattctcagcattcagtttcaagaattctgaatatttaggttggagcccaggaatatgcattttcttagccaaaactcccatggttattaatgatgcagttgtccatgcagctgatgtctgtagggggaggagaaacacagatggga

SEQ ID NO: 157446 - DNA, 489 bp, Homo sapiens
atgcacttgtaaattcctgaaactccacacacaatttctctgtgcctggtatactattacccttcttgtatgccacataaactcatattcatccttcaaatcccttcaatcatctgtgaagtctgataattttctacgaaccccaaatagaaaaaaaaatcactattttctattaacttacgtaatacttcgcacatacatgttatatatacatatgtgtgtatatacacagacacatacttcacgctgtattgcagcatgcagatacttgcacatctgtctcttctagaatgtaagttcttagaaacagaaactatctgacttagctcagggtagagagaacttgcctcataatgggctcttatgacattaatattttatattcttatgtgcctcataatttccaaaaaatattcatagcagagagtctccaaagatggccatcaccaagaccttctcccactgtatgtatatggtgctccatctagc

SEQ ID NO: 157447 - DNA, 289 bp, Homo sapiens
gcttatcctaatttcccccccaaatctccatgattgggagtttttcaaacttaaaaaactgtgacatttaaaatttctggtaatttgttctcttttttcttttctttttttttttacagccaaatatttaacaaaaattttaagtataatgtaacattttattatgaaagaaacaactactggaaactaacttgcaacaaaaaccattctagtatctttgcagtacccttaggagatacctaattctttaaagagatgtttatattaatgaactgattttagaagacag

SEQ ID NO: 157448 - DNA, 576 bp, Homo sapiens
tgaaactctcaactgggcatggtggctcacacctgtaatcccagcactttgggaggccaaggtgggtggatcatctgcggtcaggagttccagaccagcctgggcaacatggtgaaaccccgtctctactaaaaatacaaaaaattagctgggtgtggtggtgtgtgcctgtaatcccaactactcgggagactgaggcaggagaattgcttgaacccgggaggtggaggatgcagcgtcgccctctaacctgggaacctgggcgacagagtgagactccatctcaaaacataaaaaagaaactctatacccattatacaattactcctcttttcccctccccccagcgtctagcaactaccattctactatctgtctctatgatttagactactctaaatacctcatttaaatgaaatcatacagtatttgtctttttattattggcttatttcattcagcaaaatgttctcaagattcatccatttttttgtggcagcatattgcagatttccttcaattttttaaggcggaataagattccattgtacgtatgtactacattttacttatcca

SEQ ID NO: 157449 - DNA, 484 bp, Homo sapiens
ccctcactagtcagctaaaacatccccatcttacccccaagactaggtctgcacctctgctgtgtggcccccactctatgcttccctgtcacagaacacatcacactttacttaattctggtggaattctgattgaattcctgacttaattctgatggaataatctgtctcgtctatgagacatattccctgccctcacagaacccacagtctatctcgtgaatcattatgtcccatgcatctagcacaatatttagttcaatattttcttgaattgagaatccatgaattagcctacacatacaatgataaaataatgactacaacttataaacctacagggaagaaatagcctaaccctcaatccttggggcaatcaaaagacaaatctcatctcatctctgctgaggacttctgatttccatctgcagccctgacatctcccactgtgggctctagtctcacagactgctgccagctgatt

SEQ ID NO: 157450 - DNA, 143 bp, Homo sapiens
gaattagggtccatttatttagtcatcaggaatgggtgtttcctcagtggcaaggttcttgccttttgggagttcatagcctatttgggagacataatgatgatgcctgatgataatctaatatgaagaggaggcatgttaga

SEQ ID NO: 157451 - DNA, 327 bp, Homo sapiens
ggcactgatccaggcgagttctcagtaagtgggaactcacaggttcagaagatgctgtgggcctcaggggcttccacctccagggaggtgctctcagaagaagggcccgatgggctcactgcatcgtggagaagataccctggctcagtctcagtcacttctccaagcgcataggtgttcgggaagtggcctgcagacagctcctccatgccttgaaagcagaagtagccccctcctgtttccctgtcccagttgggtgaagcatggggggctgctgagacagtcccaggcgtgccgtcacgcaggggcaggccgtccgtcggtctc

SEQ ID NO: 157452 - DNA, 108 bp, Homo sapiens
gtctactggtgcagtagcaaagaatggatgacaaggattctcgcccagtctagaggacaaggaccacacactataaatatttgttaagttaacctatgctgaggaccc

SEQ ID NO: 157453 - DNA, 267 bp, Homo sapiens
agagactggctaggggaatggtgatgtcttacagcaagcctcatttgctttttacacgtggtttctacagactactcaattttgtccaaaatctaatgctcacctttctttacagtgccatctgctgctgcctctgactactgcattttcccccgtttgcttagtccacgcccagtgtggtaaaagatgggaaagagaaagccatcctctcattaaagtaattggtccggcatatactaagcgtcaggcacttttttttcagacact

SEQ ID NO: 157454 - DNA, 411 bp, Homo sapiens
agccttgtggtgctttcctgtcatgactcatcgagcctctggtgtgttggttgggggttggggggcatcagggtggcatcagtgtgattacagcagcagagtgcaccgggagactggacctgggtcagactgaccccagcccagctcccaacctgtcccctgctaggacttggctgggacacttgcttcctccataaacagaggcttcccctaccttgttggttgggaaggtcacgtgaaagccccttctggtttctttttttctttttttaagccactagaccaccaggaagaaaggagacctttccaaactgccttattctggaaatgcaatggcagtgttgatggtagggggagctgtggcaggcaagggggtctctgctgtcaatggccctggaggcccccggtacc

SEQ ID NO: 157455 - DNA, 229 bp, Homo sapiens
attataatttgactctattccctactttaaaataagtaaaatgtaaaaacgtatgcattctgtatttatagaaaaaaattatgatgtctgtgacttgcttgaaataatacaggccacagaagtgagtgggagcatacattaaaacaacattccccatgggttggtgcctatttaaatgatgtaacggatacactggggttaagcatatcattttgtcagcttttatgaa

SEQ ID NO: 157456 - DNA, 386 bp, Homo sapiens
agaatacactttctactgcagtgttccttcagcacctttactggcaaagcttaatattctgcattttggcaaaggagaaatgtttataagggccagttccagtatcacaaagcaagacagagaaggatagatttggaagaaagaagtactgcattgataacagaggggttaggtaaggtagatcacacggattctcggatattttctaaatctttaccctttggaaaattatttctagtgcatattagatttgttaattcaggaagtagatgtaaattacatattcctgggcacaaattgcaaattagccatcctcatactgtccagccagtataaattcctgggtcttgccagcattgcttcagagaatggactcagctgcttgt

SEQ ID NO: 157457 - DNA, 181 bp, Homo sapiens
ctgggctgagaagaagacttactctgctttggatacctttttgtgctattttgaatttccaactgaaagcatgtgttattttcataataagtcgatgagccaatagagacagagtgatgagcgcaccattgcttaggaatttttataagctaatctcttttgttcatgttgcaattagtgt

SEQ ID NO: 157458 - DNA, 118 bp, Homo sapiens
gaagcatagtgaaagttaatgttgctgtgtggggagggacactgcagagaatttgctatgcagctcactttgcagccggctgtgtgctactttctggcatttattttcatatcctctt

SEQ ID NO: 157459 - DNA, 526 bp, Homo sapiens
catttatatgaatggtaataggtacagcttttcaggtgctcttattttgtaaggtacatttctcaactctttttttttttgcgttttatttgcagtatctatgtatggacaaatgtgcctaagttttaaaatgttgtaaacacagtgtacagtagaatctctctgaactgactctgacagatttttcttttttccccctatagaagtgccaagaatgagaaggctattttctaatatgcccacatgtgcatttgttgcatgtgtatgaagagggaatacagcttctttgcttagcaaaccactggttgtatgggatgtaaacccatgcttattaatgtaattacataatattacataaactgacaaaatatgaatgtgaaagctatttcaatgaaactaagtcaatgccaactaactaaaggttaagtttctaaaagaaaaaaaactcactcatattaggtatgtgtgacagttttaaaagattaaataataaaaataaaaatctagaagtattctgaattaagac

SEQ ID NO: 157460 - DNA, 419 bp, Homo sapiens
attatagagtacaggattttagcaaaatgccagatgttggcatttctgttttggaggtctttagtggtccatgtaaactatttccttgcaagtaaccatccatggtaggaaaacagaaaaaaatgattctaaaagagcatttgtctagttagaaactgtgtcacttgtatcgtttaccgtgaggcatccttgagaggtacatgatttccaaacagccacctaaatcataggtactgcttttggaacagatgtaaataggaaaagcgccagtccagtacccccactaaagaccatcgttagaaagctctcgcagtgctttccagcttagaggagtgtagttcccttcaggtacttaagccagtgttcggtaaagcagcacccaaaatgccttttgttaaatgtgttctaactcgttcctc

SEQ ID NO: 157461 - DNA, 186 bp, Homo sapiens
gtgtggtcactggattcttcactgccaaacactcacataaaaaaaaaaaagtcagttttacaacaggatgtctttgatgaatcatgaaaaattattactttattaaatctcagcccttgagtacacatgcttaatgcttgtatgactagatactcaaagcatttatgtgctacaccaaacaacaat

SEQ ID NO: 157462 - DNA, 230 bp, Homo sapiens
cagccaccgcgcccggccaaaataaggatttttaattgcaaaaatcagttcaggttcgaatggtcttacaccttaaggttaggtggtgtcctggatggggaaggggtttgcatcacagatccattaacgctgtatgctgaaaacacacacatgcagccaaactcattaaatagcgtggaagatttgttctggaaatgactagggaccttccttcccgcgtcccctcctct

SEQ ID NO: 157463 - DNA, 626 bp, Homo sapiens
aaaaagatgtatacattgcactgaccatattatgattaggaacttctatttgtttaaaaaatgtgattatgagagtaagagcaagctacagattggcagaaaacatgtgcatcttaatgaacaacaaagggctcatgccgagaatatataaagaaaaacaaaccattcagaaacagacatccctatgaaaaagtgggcaagagaactgaagaggcacttcacaaaagaagatatctaaatggccaataaccatatgaaaaggtactgaacccttgtagtaatcagaaaacaatgcatattaaagccataacacggtattactgcataacatcagaatggctaaaatgaaaaagactgacaataccaagagctggaaaaaatgtggaacaactagtactctccagtacttaatgtggaagcataagtttttacaactgctcatgaaaataatttgatgttatctactaatgttgaatatcctcataccctatggcctagtagttccactcctagatataatcccaatagaacagtttatatgcatcagagtgtatatacaagaatgtgtacagcaacattagttggaatagccccaaactgaaatgaatgcaaatgcccgtatataa

SEQ ID NO: 157464 - DNA, 468 bp, Homo sapiens
atatatggctataaaatcagtttacacaacagttaaatctagctgcttttcacattcacttcatgttgtaccataaaataaagacataatttccatagtacagacaagaatgaagacaagcaaatttaaatgtcttgcctgcaatgacacgtcacagaagtggcattgtatgaacactccattccttatttttactttctacacttaatcttatgacctctacctctccataggcgaaggataacagaagaatgatagatttatttcttcccggcctctgttccattttggatatgtgagggtgaatagaagggagtaatccaaaatccatgacctatgctgtaatgccagctgagctatgttcacaaacagaaaagagaatgagagatggctcctggccaggaaagtctgactcactaatgatacaagtactcttttgtgtaacctgattgggatcctctagacagc

SEQ ID NO: 157465 - DNA, 342 bp, Homo sapiens
agtttgtaatttctataataggtttacacagcctgagtaagagtacaaaagaggccaatagttggagtttcgcccagcaggggagtgggggattagcaggagactggtatttggccatgatgtctaaaatgtatagcgaaggaagcagaattaaaggtgactaacagagatcaaagtagaggatttagggactgagtacccctgtggtaaaaaaaaaaaaaatgcaacacagggcaaaaatacggagtgagagaaaagaagctgggattacagtaaaatgcttaaatataaaataatagataaatcacttctacgccatgagcccttccttgtgtagctgtg

SEQ ID NO: 157466 - DNA, 424 bp, Homo sapiens
ctgttctagaggataccctccagtaaggtgtgccacggactccatcgacacatcccaaagattccaatcaaagtttgaggttggctctcccaaactttcctctgcagagccattcctgcaggctccctcatgctggcaagcaccctccaccctgcccggtccgtgcaaccccttctcctgtcctccactcctccaagagggagaggaagagaggagagtggagaaggccctgacactttggccaagggcctggaactccacatcactgcgcccaccacataaggctccaatggcgttctggagaagagggcaacctccctgtcaaaagaagtaatgcaagcaaggctgagcttgcactcagcaggacttatggaggaaggagttcgagggcttgcactagagaccttgaaaggtccctttccag

SEQ ID NO: 157467 - DNA, 280 bp, Homo sapiens
tccaagcttcaggaggtcggtctcctttttgtattgttttgtattcacaagtggacccttcatggtgcctggcatgtagtaggcaccacaggaatgaatgaatgaatgcatgagcgtatgaatgaaggaatgaatgaaggtgggtagtgttagaagcaccctccaaaatggtgtgtcagaaacatcaaaagctattgtttcaagatcaccaacacacacccagctccccactccatttcgttttcagtttttgtcttgttttaatatctcatcagcttta

SEQ ID NO: 157468 - DNA, 595 bp, Homo sapiens
aactttattacacaacaaaattatctaaaaagaagcatagcacatatatatatccttgttacaaatgctcccaatttacacatttagaataactcacaacataacctggtccacttaaacattagtgagtggccacctgttgatgcaaaagaatatagcagagaccctcagaaggtctgcttagatatggctaatgcttccattattctacttacggggtttgctcttcatggtggaacatttttaagggtaatggttaataataatattaagccttcagtcggaaggatttcttctccagagccctcacagagaaacttccctcctggttaactggacccaggcatgagtcttcgttgaaaccgtgggaggaagaagagttttaccaatcaccagtgctgaagaaatctctcctttctgggcaggatgagggaatcactaaatgacgagtaagtgctgagactccacaaaatgacatgtcataaattggtatatatttttgggtctttcaattttcttcttcttcttttttttttttttttttttttggaaggggggggaaggggggggaccctaaaagagacaccggggggga

SEQ ID NO: 157469 - DNA, 275 bp, Homo sapiens
cggaatacacagcgcggaatacaccagcgtgctttacctaaggtactaaatctttcttggccatctgttaacatgaggtgccgtggcataaaggtctgtctgtctattattcaacaaatatttatgggtctgtgatgttttttcctcctaacataattctgccatattatcctatgatgttttatatgttatgtaagagccttctggggcataatagagcagcagcacagaacgtaacgtgattgtttgcttttcccgctgcgctgtgtattccg

SEQ ID NO: 157470 - DNA, 296 bp, Homo sapiens
gccaggcccccttattcagtgcacaaacccacttttctatcttctgggagaaccagcctccagtgcagcatcttctgacccatgctactctcctgagaagatagcataatgctcctcccagatttagacaggctccacatggatctgctgcttactccctgtgtggcctttgaaaggtcacttaacctctctgggtcccgatgtctcacttgacaaacaggcataatcccggcctgttcccatcgttgggtagttgtgagaattaaaaggagttatggtgtaaaagacattatggg

SEQ ID NO: 157471 - DNA, 695 bp, Homo sapiens
ctgtcggggtccccttcatgaagccactcccaggactgcagggggccgtttgggtttaccccccatgaaactgcctttgcaaaaattataactgaggaaatgatgacagtgaaagaaatcagacctaaccgactccacattccttctaacctttaagctgtccttattcatccctgggcgtaggccgaactaactttgggaagtaattcagttcatggtttgactctgaaacaaaattggtaacagccctttcccgaatagacccccttcttgcctgaggaccagtcggcctttgtaggactaacaaattagctgcaaggttagaaattatggtttaggggtcttgtggcctccggctgtgagagtctgaacctccccaaattgcttctggggatcacctcactattgtaaaacctgagatcagtgctggggatattctgcagaccccgcactcatggatcagctgacaccacctagaccagtcatctggctcaaccagttccgccatcccacccaggaacagaagacagcaagaaaaactcactttgaccccctatgagtccatctccaaacggaccaaccagtattccccactttctgagcccctacctgccaaattatctttaaaaactctgatccccaaatgctcggggagacccttttgagtaataataataaaactctggtctcccgca

SEQ ID NO: 157472 - DNA, 222 bp, Homo sapiens
ctttagcctcccaaagtgctgggattacaggcgtgagccactgtgcctagcctaatttttttgatttaaaatatttttaatttattttttcgagacagagtctacttctgtcacccaggcagaatgcagtgatctgagtgaagtggtacaatcctagctcactataaccttgaattcctgatcagcttgctgagtagcaaggactacaaggatgcatctacc

SEQ ID NO: 157473 - DNA, 357 bp, Homo sapiens
ggagagggccctgtctctgcttcaaggatggtatcttgaatgctgcgtccccactgggcagaaggggtgagccagcttcctctggcctctttttaaggtccctgatcccattcccaagggcaaagcctcacgccctgctcacctcccaaaggccccatctcttgaagctaccacgctggaaatgaagcttcaacctccgaattgcaggggacacaaaccttcccgccacagcaggacacatgcagcaatatcgggtggggctgccctgggtagaggcagacaaacactgtctgccccagggaatgtgcacatggccaggacccctcaccacagcctgaggcctgcccacctcgtcag

SEQ ID NO: 157474 - DNA, 442 bp, Homo sapiens
ccttttctccagcttggaatgcagatatgcagatgtgatagctggatttgagagagtccccttgtccccagaactaccctgcccagactagaagggctgagttctctgggtccaacagctgtcttaaggccatggcggcaagagggtcagagcagtgctggtgttgacctgtcagccactgaacctgccagcctctctctccagacattgttatatgacacaaaggaccgcctatgtgttgaggtgacaatgtctcttgtgaattctgctagctgcggctgaatcattcctaactgaaacacctgctgcagccgggggccacgtgctgtgccaccaccctggagagtctgcagagagccaccaacatggacctgaaggggtctcagaaagactcagctaaaagccgggcacggtggctcacgcctgtaatcccagcactttg

SEQ ID NO: 157475 - DNA, 295 bp, Homo sapiens
tcccctccctcttcctttcactctagactcttggtgagcctgtccctggaaggctgagtttgacgtgtttcaggactggtgcagtcctcacttcggagtctttgtggggtggggagaagcggtagagctaatgcaggctgttagggaaaagtggtcagaatgaaagtcttgatggtgaattagaatctggtggagcaccacgaagtcctggcgaaggaggcagtagtcagacccttttgggtgacgggttaaggaagacagagactgatgtggaaggggttatatataggaagat

SEQ ID NO: 157476 - DNA, 488 bp, Homo sapiens
gagagaacaattggaaggtggtgagagaaaaacgagtcttcctgcacaaggaaaccccaataaaaattaaccgctgacttctcatcagaaacattgaggccagaaggcagtaggacaacatattcaaagtgctggggttgggggacagacatgacaaccaagaattttacattcagcagcacagtctttaaaatctgaaggcaagctgaagatattcccagataaacaaagactgagagaatttgttgctctaagacttggcttacaagacaccctaaaggaagtaattaggcccaaaacaagtgacatcagacagagtgttccgaatttgcaggaaaaaaatacttgaatactataaaccagcagtccccaacctttttggcactagggactggttttgtggaagacagtttttccacggactggggggtggggggctcacctcctgctgtgcagccccgtttctaacaggccacagacctgacaga

SEQ ID NO: 157477 - DNA, 614 bp, Homo sapiens
atcccagcaactttgggaggtcgaggcaagcggatcacctgcggtcgggagttcaaaaccagcctagccaacatggagaaaccctgtctctactaaaaaatacaaaattagccaggcgtggtggcgtatgcctgtaatcccagccactcgggaggctgaggcaggagaattgcttgaaggctctggcgggcgtcgccatgctgggctaatttataacatttttgtagagacggcatcaaaatatgttgctcaggctcactttgttttcccaactctcaaatgaaggctctggccgggcgctgtggctcacgcctgcaatcccagcaactttgggaggtcgaggcaagcggatcacctgcggtcgggagttcaaaaccagcctagccaacatggagaaaccctgtctctactaaaaaatacaaaattagccaggcgtggtggcgtatgcctgtaatcccagctactcgggaggctgaggccacaggcgggcgtcgccatgctgggcaatttataacatttttgtagagacggatcaaaatatgttgttcaggctcacttgttttcccaaatctcaaatgaaggtctggcgggcgctgtggtcagcctgcaatcca

SEQ ID NO: 157478 - DNA, 248 bp, Homo sapiens
ggcagcccgatgacagaagacagggctcataactgtttctcaaacaaagtgtctacggagcatggaagatgcgagcagaaaccgtgtggcgcagaaaaccggaggaaagagtgcattcgaatcaccttctaaaagctgttcggaatttttatccaacaaataaacttttgtttcaaataaacgaaacagtaaagatcaataagacagagaaaacaggcagacagcgacagagcggggctttaggcatt

SEQ ID NO: 157479 - DNA, 411 bp, Homo sapiens
attctacagaatatattaactaaatatagtttgaacttttttggaaagttgatcatagtttgaaacacccataatgctatgcattatgtacatgagtataaggtttccatgaaattaattattcagttcctcagtccaactagctattaatatatttcaagtgctcaatagcctatgtggcaccgctctggacattgcagatttacaacattttcatcatcccagaaagttccgatggacactgctggtctaggattgtatatgtttcccatgtaatttatggaacaacagactcatatttatagtctgttgttctaaaatgtagaggcaaatatagcacttgctgtgttaatcctcactcaacaaatttaataatttacaggagtgacagcttctatagtcaccatttgt

SEQ ID NO: 157480 - DNA, 270 bp, Homo sapiens
caattagaaagggaaatggcagccagtaataaaactcttcctactatgatcaactatatatatacaatcaatgagattcttctaagctttataaattttcttttgttttcattagagcacatcaaaaatcgaagagacatcacagatttgtggagatcttattattgataactttttataatttcacatggacatatctgcatttgttgccttatttcatctgcaaatctcaccacagcaaataaataccattggtcactttgttgcctc

SEQ ID NO: 157481 - DNA, 497 bp, Homo sapiens
gtacaagattacatttcagagtcagaaccagaaactaaacctgccagaagctctgggttgaagcataagaacatgggattggaagtaaagatttaaaacagtaggatggtggcattcatggagtgacactagaggagcattctgagcatgtctatattccgagtagggaagtgagtcagcccttttgcagtggttcaactcaccttcccggaggagttcactcagagcgaaggcaaattgactgtcaacaagctgtagttcttgtgtggcagagtctgcttgttgctacccatatcaattttcccttgctttgttaaattttatttagggttgctgttcactctgatcgaagactatattttctacccttttttggtgtggtcttggactaagttctggctaaagaggctttatggaaatgtgtgagacctctgagaaggttttttttttaatttttttttaatcaaagaggagtatgtctcttttgcccttccctc

SEQ ID NO: 157482 - DNA, 646 bp, Homo sapiens
gtgaaaccccgtctctactaaaaatacaaaaatttagcctggcgtggtggtgggcacctgtagtcccagctactcgggaggctgaggcaggagaatggcgtgaacccgggaggcggagcttgcagtgagtcgagatctcgccactgcactccagcttgggcgacagagcaagactccgtctcaaacaacaacaacaacaaactttaattaaacagagggattttgcttgcttctagggctgtttcaaggaaatctattaaagagaaacgaaatacaaaattaatttctgaaattaaaagtttaagatctcttttatcttagaatatctgcatttcactaattatgctttgggtgaatgaaaatctatctaggtattcctaaaattattactgtgaaagtgaaatatagctaccctataatttatgctgaattatttttatctcatcaggaattttgtgttggatgaaatgagtcaccctgtaatcacattgtttatcttaaccagtgtttgctttagatagagtcatatttctatgtaattacagtattacgtttaaaggtatgaagaatgcacacttgtttctactcacatctgctttatttttattgtccagtacatactttttatgattttatcataatagga

SEQ ID NO: 157483 - DNA, 447 bp, Homo sapiens
cactggtgttcagctagcgatgttacatgaatcgacttggctattctgaaaattattattgttttaaaatatgtaggaatgagcctcaacatgtatcgcattctgtagaacatattagaattttctcttcagaaattgcttttgaaggcacatgaagtcatacgaaatacacacagcacaaatatatatttgtcacttttaagattcataaatcacagtccttggactttagaaagagtagcacacatgatgtgggccgggcgcggtggttcatgcctggaatcccagcactgtgggaggccaaggtgggcggatcacctgaggtcacgagttcaagactagcctgagcaacatggcaaaatcccatctctactaaaaattaaaaaattagctgggtgtggtggcgcacacccatggtcccagctactcaggaggctgaggtgggag

SEQ ID NO: 157484 - DNA, 653 bp, Homo sapiens
taatgtttgttcatgagagttgtttatttttatcaattcttatttatctttgaatcttataagagacactttaaaatgtttagctaaatcaaaatagtccttacccaatgaaatcacaacatgatagagtcatgagaagtatggataataaactgtggcaatgggtgaggggtagggagataaggagactgattgtaaaacatctgagctttatcaatatatattaatcatataataatttacaaataatgtacagtacaatgaaaggtaaaagtaatgctctcagaggaaatgtttccattctagttctatttggaagtccttgggacaatttgtgttttgattatatttagaaatcttcagtattttgtcttggccaggtgtagttgctcaggcttgtaatcgcagcactttgggaggctaaggcgggtggattacctgaggtcaggagtttgaatcaccctggccaaaatggtgaaaccctgtctctactaaaaatacagaaattagctggatgtggtggtgggtgcctgtagtccaagctacttaggaagctgaagcaagagaatcgcttggacctaggaggcgaaggttgcagtgagtcttgattgcgccactgcactccagcctggtgacaaagagaaactccgtct

SEQ ID NO: 157485 - DNA, 140 bp, Homo sapiens
gatttccgttcgggatcagaaagcattattggaacaggccacacttgcgagggaagtccctgcctcagaaagattcagaaaagctagacagtcactggaagaacaattacaaccgcaagacggtcaaacactaaacaccg

SEQ ID NO: 157486 - DNA, 433 bp, Homo sapiens
ggtttgcagccagagaggtaggagggaaaccaggagagtgggtgacctggaagtcaggggagaagagaggttctccaggccacaatggctgtcagtgccaagtgctgctgagaaaccagccagaaagactgaaaagtgtcccgtggatttactaccagggaagccatgggtgactttagcaagagctattgtagaaagcagtgggtctgaacctgaggcaattttgcagcccagcctcctgtccccggacattgggcaatgtctggagaccttttggttgtcacagctcagcataggggtaagctgctggcatctagcagttggagaccaggattactgtaaacattttacaatggacagaatagtccctcataacaaagagttatctgcagaaaccctgctggagagtgatgggggtggaacctgattagca

SEQ ID NO: 157487 - DNA, 308 bp, Homo sapiens
tatggccttccacactcacatatacaaccttctccctgttccaccactcgtaaatcctagtagtgccacccaaattgaagtgactctgtcctgcccaggtttaaggtgtcttggaaacataatttaaaagagtaacttgtgttcctattcttctccacttccctgatactccaaggttttgatacaagttattaaatgtgagacatcataaaaaatatagttgtaatatggaatgttatcacttcggatacagagttaaaaataataaattaaagataacaaaaataaactgtataaatgaagcattt

SEQ ID NO: 157488 - DNA, 188 bp, Homo sapiens
aatcaccaccccaaggctatttggaaattaggcattcaaaactgactttaaaaatctccttaccagcacttgtattagttctgaaagaatgtttagaggataatttttgtttaagttttaaacagaattgggttaggttgttctctttccaaagtacaggttgatcagaaaatgtttatctgaaagga

SEQ ID NO: 157489 - DNA, 340 bp, Homo sapiens
ctgtggtgactctcagatttgggggtgacttggctggcctcagacctggagtggtgcccaggcctcgcttgtgcccagcaaggggtgtgttctgcaggtggagcagagtagtgggcttccagcctggctttggggctctcttcacctgggctctctgaagcttaagtctggcagtgtcctctgtgggacaacgtttatgtcaccatgcacaggctctggggagactcccgtggccagcagtcaccacacggggcgggggccaagcaagtcatggtctgcatgagctggcccaagtcacttagcttttccaagtgtaaagtaatgcccaccacaacagagt

SEQ ID NO: 157490 - DNA, 199 bp, Homo sapiens
gtctcaaaaaaaaaaaaaaggacatgaaatttttaaatatttcacttgtgttatcagttttatgtaatttaagtgggtttaacagtctttatattattttgcctcaactgttaaatcatatgtgtttatttctacatcttctcttttatagctttatttagttttatagatttaaccactttttttttatactttatgt

SEQ ID NO: 157491 - DNA, 544 bp, Homo sapiens
ttataaaggaatatgtagctgttttatttagttattttattattgatgcacatttgagtttttttcagtttggaaaagtaccaaataatgctgcttagagcatttttctgcattggaaaatatgctggcatttctattgggtgtatatacctagtagcagagtttctgggtcctagagtgtgcttatgtacatcgtgtatgtaaggagttactactcaagaggttttgaatgccgttataacagtttgcacacagaatggtataagaaagttccagttgcttgacatcatcactagtacttaattttgtcagttttcaaaaatgttaatgattgcatagtggtattcaattgtagttttcatatgcattgctctgatgcataaggatgtggatgtgttcatctacttgttggcccttcggttctgtatgtggaactcctagtcacatgtttgccaattttgttcaatgtatgcatctttgtttattaattgatgggatttagttaaataaactagataaaagtcttttgccacataaatatatg

SEQ ID NO: 157492 - DNA, 460 bp, Homo sapiens
gtatgggcagcgtggagggggacccaggtacagaaggaggctggcatggtgggtaatcgccatgcctaggatcccacagtccctcagagggaaaactttggcctgatcattttgcttgagtctcagttggaaagggcctcatactccagtctgcacctgtgagtgaatcttgctgatagcatccttaccaagtgactttatcgcctctgtttgaatatgtccagtgatggagaggttagtacctctcatagcaggcctcctgtgtttggacatctccttattgaggagaaatcttttctcctgttaatgccactccttgttcttgggtctgcccctgcattcacactgagcgagttattcccttctccccaggggcactgtgccacctcaatacccacccacttgtctactcttactccacccacatggtttctccttgtttatctctcatggtttcccc

SEQ ID NO: 157493 - DNA, 310 bp, Homo sapiens
ctggcaattggcttggttgtggtggaggaagagtcagagaggagagggagtgatgtaattctgggcaaagatatcctcagtccaggcaaggcagtggctacagaaggcagatggtgcaggaagaggttagcagattgattggaaaacaggaaacctgggctcttcatttgcttctgcctaagagaacacagtagcagatgatataagcaaaaagcagcatccaagaatattcaactcattaattcagcaaacaggtatgaagtggcaccatgctaggaaatacttaaaaaaaaaaaggataaactctgct

SEQ ID NO: 157494 - DNA, 498 bp, Homo sapiens
agctataatgttctgtaggttaggtgtattaaatacattttccacttaaacaacgggtttattgagacataatcccatcgtaagtcgaggagcatacaagtctgcacacagataggcagatatacagatagacagacggatagataaatctacagatatactgaaggaaaggcatagaatattatgaattagggacctagtttagattagaggggacagtgcagaactctcagagagggtgatatttatttttatttttatttttatttttcagacagagtctcactctgtcgcccaggctagagtgcagtggcctgatcttggctcactgcaacctctgcctcccaggttcaagcaattctcctgcctcagcattcaagtacctgggactacaggtgcatgccaccaagcctggctaatttttgtacttttagtagagatggggtttcacccttgttggtcagcctggtcttgaactcctgacctgaagcaatccac

SEQ ID NO: 157495 - DNA, 414 bp, Homo sapiens
ctctgtctatactgcgttgtctgaacttcacaggtgatggtggcaaatgaaggtggcatgacatctttttgttgcttggtctttacaagcatctcagatcaaattaatattaaagagggaaatagacaaatgaaataagactactaagatgatattcttcacaaaggaataaaaacacatattcctcaaaaaggaggggaaaaccacttttggaaactctctggacatttttttccaagaagggacccagggagccatttttacattgtacttcctcaatcctcattcttgaagctctaaatcttcttgttttccatctcccttgagattaggaaggagggagagatattttttctctctatcctctgagttggccaaatctggatgactcctacatgcctctacggtaatttc

SEQ ID NO: 157496 - DNA, 597 bp, Homo sapiens
  misc_feature (541)..(541): n is a, c, g, or t
  misc_feature (544)..(544): n is a, c, g, or t
  misc_feature (546)..(546): n is a, c, g, or t
  misc_feature (549)..(549): n is a, c, g, or t
  misc_feature (555)..(555): n is a, c, g, or t
  misc_feature (563)..(563): n is a, c, g, or t
  misc_feature (565)..(566): n is a, c, g, or t
  misc_feature (568)..(568): n is a, c, g, or t
ctacacgacagtggatcctcgagaaatcgaggctgaggagtgtgcatgcatgaaacaggccgtcagttatcaaaagagaaatgagaacaggccttgagagggttgctatctgatggacaaatagaaaatctacccagaagtcagactgttagaaagctctcagtaaacatttattgaataaataaatgaaattactaggtgatcttaaatcaactattagagccatagttgatcaataaatatcatgctaggccaggtgcagtggctcacgcctctaatcccagcaatttggaaggcgaaggcaggtggatcacttaagcccaggagtctgagactagcctgggcaacatagcaggaccctgtctctaaaaaaaaaaattagccaggtgtgggagcgggtgcccgtaatcccagctacttgggaggctgaggcaggagaatggcttgaacccgggagaccgaggttgcagtgagctgagatcgcaccactgcactccagcctgggccacagagtgagactccatctcaaaaaaaagaaganagnangtngcaggnggccgacnanntngcacagagatggcaaatgtgtgcggataa

SEQ ID NO: 157497 - DNA, 470 bp, Homo sapiens
ggtgcttcccagctgaaaactgcctagggagggtgctgttgagaccgtgagcacctgagagccctggtctttcactcaggcctctcctctcacctccacctgggaggctaagctcagggtaggtgtcctggcccacaggcaggtgcatgggctggtcccgccagcacctgcaaccttcttgtgcgcagctagcccaacctggggtcaggtggaggtgggtaagtggggcccccagcattaaagagcttcataggctgtcaattaaggggaggcctagtgggctctacaggccacagctacccagggagccttcttaggggaggagttcctaggtgggtctcagagactccaaagtcagcatttcccaaaggaggtctcattagggattcagtgcaaatagagtctcattaacaaaaggatggggaaatgttcagctgtgtttaattcagcaggcttctttcctgcaggac

SEQ ID NO: 157498 - DNA, 457 bp, Homo sapiens
ggtgcttcccagctgaaaactgcctagggagggtgctgttgagaccgtgagcacctgagagccctggtctttcactcaggcctctcctctcacctccacctgggaggctaagctcagggtaggtgtcctggcccacaggcaggtgcatgggctggtcccgccagcacctgcaaccttcttgtgcgcagctagcccaacctggggtcaggtggaggtgggtaagtggggcccccagcattaaagagcttcataggctgtcaattaaggggaggcctagtgggctctacaggccacagctacccagggagccttcttaggggaggagttcctaggtgggtctcagagactccaaagtcagcatttcccaaaggaggtctcattagggattcagcgcgtgttgagtctcaaaaaccccaggagggtttccccttcagcagtgataaaacttgttctcctt

SEQ ID NO: 157499 - DNA, 193 bp, Homo sapiens
ggagcttagctgagctatgttttatatggaagccaaaaattttgctctccaagaaaaataagtgagaaagagaaaagactggtctcagcactctgcagtgggaggattgtgaggtgagatatggtgactagggatcaaggagagagactggaaaggagatgtgtttaatggggatttttctgagtgaaactct

SEQ ID NO: 157500 - DNA, 457 bp, Homo sapiens
ttttaggtttttaaggctgattttagagtatttcttctgataggagtagatgagccctactttggaagctgactttcctgagttcttatttaaacgctgggagttgcttagtgagtcttttcacttcggctagttgaaactctaatggctctcaacattgttgaaccagtgaaatcctcattcagctcattgcctctcagaaactgttctctgtgtggccttctgaaatcttactctgtacatgcgtaatatgttgttcactcaaaaaattcaagaagacttcatttgtagatttttagatctctttctcaggttgactctctcttctctggaatcttcttcataaattccagccacctcagctgcatcctacaatctgtttctccattcagaaaaaatgctgctatctatttaggctcctctttccttctctgcagttttggaagtagccttatat

SEQ ID NO: 157501 - DNA, 469 bp, Homo sapiens
agagtgatgaaacctcaaagccttttcttagaaaataaattaataggtcacagatttgaggtgtgcagacaggagccagagaacatcaaagcatttcataggcatatggctaacaaaatcatcagtttaaacagttgtttcatgcttgacacatataatgatggctgtgggttatgtgtaaattttggtgtacaatatactacttgcaactctttctctcctgctcaagaaagcttatcaggagatgagtgactgagagtgaattttaaagagaattcactctacaggtatgttttatctcaaaattactttgtactgctgctactgaattatctgtgtcatgcctcccaagtggagccacatcctagctaagagaaatgctcctctcctgtagccacgtggcagattacctctgtgcagtgttgtatacagtttccgagagggaggtgatggggagatttgcagcaaa

SEQ ID NO: 157502 - DNA, 403 bp, Homo sapiens
gcatctgctttgtgggacaggcgccccaggtggggaagggattgttctgggtcctgtccacccccagttccattctcaaagtcttggaactcagggacagggagaatgctgccagcagctgaaggaggggaacagatgtttgagtgcccactctcggaagcccaccagctgtctaattgggggccgcctctggcactgatcagcaactctctggccagggttaggggacaggaagtatcccacagcagctgctggggcagaagaagacggcccagaggacagcaactctgccctacgtttctgcccaaactgggtcttgccatcttctggtggatcaaggagggttcacagcttgctgggcaaagctgggcgggtccctgtgcctctctgggcctcatcaggg

SEQ ID NO: 157503 - DNA, 457 bp, Homo sapiens
gacctctccagtttcttctgcaagattctggactcatggtccaagtcatctacagtttctcatttttctttatttttttaacttctgaaactgttaggaccatagagcataaaacatatgcaataagcaaagatagtacaaaagtagcctttatttatcttcatacttctgctcttcccatgctgtttcagaaattctagtaccatcactgagtctagctttcatgaactagtttaattttcactccttcaaacagtgtcttagataatttgaaagtttgacacacagctcacaggtgcagcatttaagcttcccctgttctgaaaactttagtactgtgtaagtgaagagaaccaagacatcagtccatataacattttaagttcatcttataaacaactgatttactctacccctgctcaaagcacttagcaatgaatgatgcattattttagaa

SEQ ID NO: 157504 - DNA, 292 bp, Homo sapiens
atagcgtaagaacaagagtgaagagagcagggtgggaaagagaagcaggtagaatgagaagctaacgggcagccatagctcagcaaaccctgagtccctgttgggggttacaggaaatgcccaaggcccgccagagaccactacactccaaagtggtatgactgcccttcccattgctgtgaggcccaactgagaggctggtgagactgcgttcttacctcttaaacttagagtcttcaggatgcaaggaatagagaaagctaacataactacttacgacttatgtattata

SEQ ID NO: 157505 - DNA, 131 bp, Homo sapiens
caaataaaagacttgcttttctgaaatctgaattgtcatctttaaaaaaatgtttctatctctcatgctaaagtatatctgtatataatcagggtacacttccatctgaccaatttaagaatttttatcct

SEQ ID NO: 157506 - DNA, 300 bp, Homo sapiens
agtcaggcatttggtgggtaggggatgataaattagtttgcttctagataagatgagtagaacatctaagtagaaaatccagattgcagaaaactcacagttgaatggtggagtggtagatgttcttgcttgggtataaagggagagagagcaccagcagttagttgggtgaaggggctgacagtcaagagcagagatttttctgggtaggtgctacaccgaacatatttgtaggaagaggggaagtgactggggcactgggaggtgacatgcaattatttccattttacaaatgagaaa

SEQ ID NO: 157507 - DNA, 106 bp, Homo sapiens
taggattacaacccagacagtctcacacaaagccacttaaccactaagccatattgttttccacacttctcgaagtcagagttcaagtgaattggagagccaatgg

SEQ ID NO: 157508 - DNA, 331 bp, Homo sapiens
gaggaacaaggggagagatgaggggccatgggagtggtgagggataaggtggggaagaggtgagggacaagaggagtggtgggagataacgctcttgaatgggcaggaaccagataatggagcaccttgagcaccctctgcatgagtccacactcactgaattgttcttctgctcctttgtccccttgaggggcatatctctgttcctgattcagtggcttattctagaggactttgctgcataaccttgaggaaagcatgaaggtcatcttttcctttatctcttaatagcagatctcatagtcagctcccgtttttcccccttggtctt

SEQ ID NO: 157509 - DNA, 225 bp, Homo sapiens
atttgtgttatttttaagcctagaaagagaaattaacaagctgtagcaagaaatctacaggttagagacagaagatgaacaaagataaataactagatattttcacctagataaataactaaggaagatacaaaattacttttaccaaataagtggcaccaccctgactccctccaaccccaccctaccctgatctactctaatcagcctggagtcttgagaata

SEQ ID NO: 157510 - DNA, 240 bp, Homo sapiens
cttccacactcagctgctgggaaaacttcccagaatggaggaggaagccaaaaaaatggcccagtcccacacaggtgcttcacgtgagctatgggctcccagacagcagccgctgagctcttaggaggtttgcgccgggtcccaccccatctccaggcatggcagaggtgtgatcctgagcctgcctaggcacctgctcctttcagaatggtgaagagacaacagattttagacatccct

SEQ ID NO: 157511 - DNA, 411 bp, Homo sapiens
cttccccaagaatattccttcccaaagaatattaaaattgtagattattagagcatagaattgcacaatgttaaaaaaaaaaaaattctggaatcccaagaaaaaagacccttagaaatcagctatcccaggccgggccaatggctcatgcctgtagtcacaatactttgggaggctgaggcaggaggatcacgaggccaggagtttgagaccagcctggccaacatggtgaaaccctgtctctactaaaaatacaaaaaaattatttgggcgtggtggctggcacctgtaatcccagctacccgggcgcctgaggcaggagaatcatttgaacccgggaggcggaggttgcaatgagccaagatcaggccattgcactccagcctgggcgacagagcgagattcagtctc

SEQ ID NO: 157512 - DNA, 436 bp, Homo sapiens
tgcataaggtgattgatgagattgaaaaccagttttcataatttagcaagtgcagccaatgatatacttctacttcgctatatgtatctttgagtgggacctttttcagcaaagactgccagtaaaactgactctctaaataattgaatttagagtactcctaagatctggttttaacacaaagtattcaaccaagatttttaaaataatgaggtacaatcatattgatctccataagtttttttgtcatgatttttggtgacacaacaagttttgtgttgttattaaaaagtatgtgagaagatgattttattttcatctcattgtatgtttttatattttgtgtatttttttaatgaacataaattacattcattaactgctgcagagtgccttctgcgttaccagtaggagttacagggtgatctcaaaagcc

SEQ ID NO: 157513 - DNA, 574 bp, Homo sapiens
ttttacagttgaggaaaccaagacacaaagaggttgagcaaactgccccaatgtcatacagtaagaatgcagtggagcaagaaaactcaggcagtttggctccagctttgatacgttgatctactaatacacaaaaaaatgtacttagcttgttcagagtgcctcactgatagtaggtgctcaacaaatgtaactgccttcctgctttcactcaaatgcagccagggcattacagctgagttttttaaagaaagtgttttggttggttgtttgtttttggactagatagtcttttaatctataatccaggagtatacaaccatgcagcactgaccacttagccagatgtaaaataaactagcttcttaccacaactaccctataaacattgcaactaggccaggcacggtggctcatacctgtaatcctagcactttgggaggccaaggcgggcggatcacttgaggtcaggagcttgagaccagtctggccaacatagtgaaaccccatctgtactaaaaatacaaaaattagccaggtgtggtggtggcgggtgcctgtagtcccagctact

SEQ ID NO: 157514 - DNA, 985 bp, Homo sapiens
tgaaagaataattaatgttcctacttcctcccttaactattcattccttaacccactcttggtattggtctgtcctcgctacttcactgaattacttcactgaaactactcttgccatgttgcaacgtttagcatttaatgtaggtattggcttctgtgtaaaaggaaagttttttcttgaatacaacactctcctgcttgttctgtctcacctcatgcaacctccatctcccgggtttaagcaattctcctgcctcagcctcctgagtagctgggattacaggcacgctcccccatgcccggctaatttttgtatttttagtagagacgaggtttcgccatgttggccaggctggtcacgaactcctgacctcaggtgattcacccacctcggcctcccaaagtgctgggattacaggcgtgagccgccatgcccggccggttgtgtttttaaatgaagaaatttaagtttccggggtcccttgatttctcttatctcctgcatctgtttcatcagcaagctctgtcttctccaaaatatagcctatggagttttgctcttgttgcccaggctggagtgcaatggcacgatctcggcttactgcaacttccgcctcccgggttcaagcggttcttctgcctcagcctcctgagtagctgggattgcaggcatgcaccaccaagcctggctaattgttttgtatttttagtagagacggggtttctccatgttggtcaggctggtctcgaactcccgacctcaggttatccacccgcctcgacctcccaaagtgctgggattacgggtgtgagccaccatgcctggcgtctgtccttgtgtttataacatgtcaagattgttcttactgtctagaatgctctgcccccagatttttacatgatgtgatatccttatcagtaacacaggctctggaaagttgataattctccatctggaggtggcttaccagattctgtaagtggt

SEQ ID NO: 157515 - DNA, 233 bp, Homo sapiens
tgtccatacaactattgttgttgttcttacttttagctcttttcttagaagcccacttgtacccaggtttgatcacaccccctactctcctgccctggaagtaactactattctggttatagtctcttaatatctatatctatatatatgcatccacagataatgtgtagtattgtcttgaaaaaaatatacataaatggtatactttgtctccctctgcgattattttcact

SEQ ID NO: 157516 - DNA, 457 bp, Homo sapiens
catgaatctttttttctgcaatgtctagccgtccactaattacatccagtgcatttttaatcccagacattatagcatttgatttggatctcataacatttgatttttatcttttaaaaaatatcttccgtgttttgtttaatattttgtacatatacagttatattaactcttttaatgttcttctctgctaaatttaacatctgtgtctgttctttggcagtttttgtttttgagacagagtctccctctcttgcccaggctggagtgcagtagctcactgcaaccttcgcctcccaggttcaagcaattctcgtgcctcagcctcccgagtagctgggactacaggcacgcaccaccacgcctggctaatttttgtatttttagtagacatgggatttcatcatgttggccaggctggtcttgaacacctgacctcgtcacccacctgcctcag

SEQ ID NO: 157517 - DNA, 156 bp, Homo sapiens
acaacaagagtttcaccattaatttcatagtaagattttttgtctcttctatgtttgacagtttttattttaaaaaatcaacaggaaaacatatttgctgatcacttctgtattatggcgtattatggtggtaaataggtgaagtgaactacagtg

SEQ ID NO: 157518 - DNA, 1233 bp, Homo sapiens
gatgttgcatcagaacgtggcagttgtaacaatgcagtgggtatcataaccttgaggaggcctttgtggtgctatatgcccttttcctaaagattcaactccaagtatagatccctctgttctgccaaggagaatggtattatttaaattacgttgtacctcactataaatttgtccacttggtctagggcacaggaatatagttgaaggtctgcttgggccagacatcattgttctgagtccctgcatccctgctgattcttgttgtcatatacaagcagggaagtgctgaggtttcttcacttcttcctggaagtctttcaggaaagctgggaggtattatggtgaggctgtaatgtctttattctcaggaccgttagtttggaaagtgtatgtaatatttcctgaatatttcacatggcctttatctaaagaatggaaagatggtgactaggagttggtccctgagaaacaaggatgagggtaggagacgtggagcatattttagcaagattcttaatagtcagagtagatattgggtagctaattctggttttgggtttgggttttttactcttccactttatggtaggagaaaattcatggtgcatgagagaaatgaaataagtgacagaatgtcaaaatcaaactttaaaacataaactcttgagggcagagctgatgacttaatggtatgtgagtagaactggtactgtcatggttgtggatttgggagtttgaggaaacttgagcaaagaagtggcagatgatgaaaataaatcagttttaattctgataaaactggttttggaaaatgtggtttagatttaaatgtggcacaattttttcaatactaaactctagaattagtcagacttgcccacccagtaacaggtagcttttgacctccttaagcctccttatgtgagggtcttgtactataaaactccagggattgaggactagagcctcattctaaaagatgggaagaaagggaaaagagatgagtgaggcataccattcctctctcctcctccccactaagagaagcctcaccttctccccagggggagttggggagagaaggcagaaatgttataccggactggcactccccccatgcagaaggaaacctcatgagtgggaagcagcattcctctcccaccgtaagtgacggtgatatgctgcccttgctattataacgatcgagactatgggatcctctagaatgat

SEQ ID NO: 157519 - DNA, 270 bp, Homo sapiens
tgatttatatcatgtattcaccttcaacatgaattagttgtttcttttcttccttgatttgggacttgttccaaacttcccaacaccatcaaactgaacttggctgagccggcaaatgcttaccaagtgatcaccactgtgagcactttacagaagaaaactgggcctctgccatgcagatgtttataaacttactacagtagaacataagtattccttattatccaaatctgttcagaaagccagtgcccagagagtcagggacatatg

SEQ ID NO: 157520 - DNA, 289 bp, Homo sapiens
gttttagcaatggggggagggtctctccaatagctccttgccttttgtgacacctgcagaaagcagggccaaaggaatttggctttgctagttaaaccagcctcacttttttgtgctagaagtttgtggggaaagagagtgacgaggtgattcagcgcagtctccccattttcccaacagtgagactgaagctcagaagggccaatttagctccagccacctgtagtagagccacagccagaactgctgctgtggatggccaggcccctttaaccctccccaggaactc

SEQ ID NO: 157521 - DNA, 488 bp, Homo sapiens
tggaacaagttgtggcccatgatattaacagagtcaactgccccaatttatagctactacttaacagaaaacactttattatttgcatgatagagttaaaactgaaagccaaacttgctaaatattcttctttgaaaccaatcagataaactacagttaacttatttaaagtaacaattcatcacagtagaatttgctgtttaaaggtcttaaccttaatgtgctcattcaaaggacatgaacagaaaagatacaagggatctctctaaagtatctcaatgtgcattaaatattaattattagccaaaataatacaatctcctttttcacaaggtatacggcatgatagtagcttacaggcaagattatcgccaaaataatctatttgctaagaaattaaaacgatggttaactggcccaccgtaaggtgttctgtgtaagtggtactaaaaatatttagatcccactatattcttaaaaacgtactg

SEQ ID NO: 157522 - DNA, 398 bp, Homo sapiens
tggacgataaggaggagaagaacccaggagcagtgacggcccggcgacctcagcatccgcgcacttcagcacggtatgagcatgcccccaccggaatgtctaaatacagcatgaaatgcaataatgcttatttctatgaaatatatgaaatattagctgaaaggcaaagacgactagacagaggagatgagatgaaaggactctctggaggaaaggactctctggcctgctcattccctctgagtcacaaaatgcaatgaaaatcagaaccatttcagtctatgccgcactgaggatcttacagagaatcactgtcagaagcatcacaaacaaaactgaacttctggtgtcaccgaggttgcctctaacccgtgtacctttctcctgctgacaaggcc

SEQ ID NO: 157523 - DNA, 328 bp, Homo sapiens
cctctatcttcagcagaaatttattcctcagaaaattgtcccaatgtaaaggatgttgaataaggaaattgaggactgggtcatgatcttaatggcagactttgccagtaaaaatgctgaaaactctctcccctttaaaaaaaaatctagtatttctacttagccacacaaaagaatgaaatcatgtcctttgcagcagtgtgaatggaactggaggttgattatcctaagtgaaataacttagtcaaataccacgttttcacttacaagttggagctagacaatgggtacctatggacatagagtggaatgatagacattggagact

SEQ ID NO: 157524 - DNA, 432 bp, Homo sapiens
gctgtcatgagaaggaagagaacggcactgggtgggtccccacttttcagtggccattagtgagaaggcaggcgccagtgttactggcttgaataaccagagaaatgagtttggagcaattatagctagcaaaaaggtaatcggaaaaaagtgaagggagaaatcccagaatgaagacaggcagagaaggagtgcttcaaattctgagtatatattctgcacacatctctgctgatcctagaatcatgcacacacagtgcagactccaagcagcccagctaaggctaaaataatggaacagagatttgcactgctgctcacagcggaaagaggctctgctacctacccatcagccacaatgtctaggatataatctaacattccttgatatacaaaaaaaaaaaaaacccataaaaatgtgacccattctca

SEQ ID NO: 157525 - DNA, 402 bp, Homo sapiens
ggtaaaatgaactccaattgcctgaattcaccttcagctctgctttcttaggcaagttaactctttttgctggttttcttatcttcaaaataaatggctttgaaggttatatgagataatccatgtaaagttaaacaatttaacatactgtttagttcatagtaaatgcccagtaaatgttagctacatttactgttgcaaggacccagcatttttaccgaagcaggtgggaggtaaaaaactttctctgtgttatttgtgtggactggaaaagagtcttgtatattaaattgtactatgaaatttaaacttcatttagacatgaaaaggaatcttgaattctttttgactttgtcacattttcagtctagtccatctctggaaaaacgtgaatctttattt

SEQ ID NO: 157526 - DNA, 535 bp, Homo sapiens
tttttgctaggcttgagttgcttactattaaaaaaaattatacttacatttttataataaaacctaatcttaggctcagatgcacatacaactaaagagcagtgcttgtcttttgcttaatgttcatattacaaggttaacttttatttataattaatatatgaacgtgttttttttttaaaaaatacacaatgtgatggataaatctaatgtcctttttgataatcaccctggttttaagaatataactgtctagagaaactaactaatagagctcattgtgtattatctagaagtcattgtatgccaggcaattttctgacaatctgatggggttggcactatttttaatccctattttacagatgaggaaactgatgcagagagaggttttcatatagctcaccaagtcactagccagtaagtagtagagccaggattcaaattaaggacaaaaagcacctgagaagcttcatgctgctttctgatcacctccttactccctaagggtaaccaccatcctgctttctaactg

SEQ ID NO: 157527 - DNA, 211 bp, Homo sapiens
acaggaccctccgtaacgagcgcatagttgaaagtatgacatgaatgtagagtgacatttattgtaacacccaggtgttgatgattgtagttaaaggatgatagatgcaacctgaaagattgcaactttcagactggagcaactttgggttccatacctttttagataaaggggggtgctgattggatagacagtgtgggtcagtcttgga

SEQ ID NO: 157528 - DNA, 387 bp, Homo sapiens
gaaagagagagaaactacacctgaagcctgcttccaaagatccaacatgataacacaggactatcgttcccctttattgctctgaagctgtttccacactgcttcaggaaccaaggaaaaaagaacaaatattgtaacaaaagatctgcttattgctatagtcactgaggaaataacaagggtgatgggaattatgagccaggcatggtggaggaaaaccaatgcataaatatcatcatctcacagggtctttgcagatgatgaggtgaagatgaatcaccaggatgggctctaatccaacatgactgtgtccctgtaaagtctagactcacacacacacacacacacacacacacacacacacacacacacacacacacacacaca

SEQ ID NO: 157529 - DNA, 456 bp, Homo sapiens
cctggctatttgggtagaaatacaggcaacagaatattaaatcacacagtcatatcatgctggagggctcccggtatttgtggccctcaggttttaattgtagaatgcatctttgttctttccctgacctgcagagtgacatcactgcctctcttcctgtgcgctggctttgacataagccagatggccaccgtggttggtaggcgcccaggctgcctggtacaggagttgatgaaacagaataggaagacgttttatggtcagctgtggaagcacagtgagactgcagctttgctaagtaattacatttactgtgtgtgctttattcctcacagagaagggtcacagggaaaaaatacatttttatttatagtgttgtgaggtatagacctttgatcttttattagtcagtagtctgctccaaaggaatgctctcttttccctgctctgcagtca

SEQ ID NO: 157530 - DNA, 424 bp, Homo sapiens
ccccttcttaaagggataattctgtgggagtacgtattaattgtgatctgaggccctgtgcagctagaaatgaggaggagagagttggtttctcattactggcattcaggaattagtggctggtgatgctcacaatctctacagtttttcaaagagaaacaagatgtcacgctctgtttaaatgggcaacccctcacttatgacacaacttgaaagcactggcaaccctatttctctgaggaaaatcttccaacacgaagaacctcactacgtttaactcccaaaacctaggcaagtctgatactcccccagtacaatgagaatcttcctttttatttttggagaaacctgtgtaaaacatccccttacaatgggatgagggaagtcaacaaagacgcagggaaacaaagaaagaacatctgag

SEQ ID NO: 157531 - DNA, 202 bp, Homo sapiens
ttatgtgactcaggaatctggtactaagaagttgcaacatgttttttgtatgttcacttttacttcatttttctcttcttttttaatacagaccactcgaacaaacgcttcacatttacagcaaaacaaaaaataaattagttaaaactagatagaaacatagcctcccaagatgatacaaaagcaatttctgaggatagat

SEQ ID NO: 157532 - DNA, 237 bp, Homo sapiens
ctgagatggctccactgcactccagcctgggggacagagcgagactccatctcaaaacaaaaacaaaaacaaaaacttttctagagtgtctggattttatttacagtaatcatactgtttttctaagagaaaatacaagaacgctattttaatttagggaaaaaagatgtacaattcaagagatgtactgtgggcacgtttcaaagaaaataataatcagagtaatcttgctttatt

SEQ ID NO: 157533 - DNA, 226 bp, Homo sapiens
ccggccctcttagggtggtcttatttatttaacttcacctagagttcctctgggtttctaagcagttatggtgatgacttagcgtcaagacatttgctgaactcagcacattcgggaccaatatatagtgggtacatcaagtccatctgacccatcccacttgttcttcatagctttgtccatccatcatccatgcatccatccatccatccatcctctcatctat

SEQ ID NO: 157534 - DNA, 453 bp, Homo sapiens
gccacactatgctgactcatggggctgtatgggtggacaggcttcactagcaatgcacaggaatagcttgttagcctggtaaatcccacagtcatggactcgctacattctagacatcaacaaagtatcctgctgtcttacatttataaccagtcagaaatatgcaagcaatagactgaccatgcagctgatttttggaatgtaagaaaaagaacatcaaatcatattatttgggggactcatgctcaaaaccacaagccatacccaggaaactcaatatgaactagatcaggggtcagcacacattttctgtaaagagctagacagtaaatattttaggctttgaaggccacgggttctctgctgcaacgaactctggcactgctgcacaaaagcagctgcagacaatacatgaacaagtgggcaaggttggtttctaacaaaacattattt

SEQ ID NO: 157535 - DNA, 146 bp, Homo sapiens
gtgtgtcagggtggagcctgcatgggttgggctggagggtgaggctggggccacaggagtctgatggcatctgaagccaagacttgagcaggtcaccctgggggtgtgtgtggccagagaggaagacacagaggactgcgttcaga

SEQ ID NO: 157536 - DNA, 209 bp, Homo sapiens
tcttttttattatacaagtgacacatttagttatagaaaatatgtaaaagtcagaaaacgcagatgataaaaaataggaagataaattcagccataaacacacaacccagaaataatcactattatcatcttggtgtatatactttttcttcatccattcacacatatgtaagtatatatatatatatatatatatatatatatatata

SEQ ID NO: 157537 - DNA, 459 bp, Homo sapiens
tcgtgccctgcagtctttccccagctagctgatttgtttgttcattcattcattcatcctcacactattctgtgatcatctctgaggacagattttgggaaattccttctgagagagccttaaaagttggcatttttagatcattttaaatgctattttaaagatttcagattatatatagttaatctcttgctaaaaagcggatggaagtgtttactacataaaatgatagaacctcaggtttgaaggagactttcaagccactgagtctttaaggataaagtggaaagcagattttttttggattcgtgaaaacagaggaaattctggcctctgaatatacaagggctgtgcctccttttcctgttttgtactctggcagaaagggagactgaagcctgtgaggaatccttcagcagtgaacagggcagtagggggacaaacagctctgcccaccat

SEQ ID NO: 157538 - DNA, 279 bp, Homo sapiens
cctctgccatttttgagaatatgcttgaacattcgagactttcttctcccttttgcttctgtcattctacatgttggcttatctgacattctagtttaaatttttctcctacctaattttcttaaatgttctttatccatctgtctttcctctgatactatttaaagccgtttgccctgaagtaggcctaccctctcttgtttctttagtaggagctgtcttcccactctgtgtttctgagtgacagtttactcctgttttcctttcccttttctctcc

SEQ ID NO: 157539 - DNA, 534 bp, Homo sapiens
gagttcaaaagcctcaaaagtggggaagctgacagtgcaccctgcagtctgtagctgaaggcccaagagctcccggcaaaaccactggcataagtcccagagtccaaaggctgaagaacctggagtttgatgtccaaggtcaagaggaacagatggaaccatccagcaagggagaaagataaaagccagaatactcaccaagccagcttatttcaccatcttccgcctgctttgttctagccacactggcagccaactggatggtgcccatccacattgagggtgggtctttctctcctagtgtgctaactcaaatgctaatctcctctggcaacaccctcacagagacccaaaaacaatactttaatcagctacctaggcatctttcaatccaatcaagttgacacctaataataaccatcacactactctactcaagtatctttttttttccaagacattattttcctccacctctctgttgttgttgttgttgttttgagacagggcctccctctgtctctcaggctggag

SEQ ID NO: 157540 - DNA, 228 bp, Homo sapiens
tagaaattaacaggataagaaaagttgcaagaaagctctttaatctggaagagaacttacagctcattttacaagaaaaaattgaagaggctaattggaaagtgatataacttgccaatcataaaaataacttttcatttcaagagtctcataccataactaacaatatctcaaaatccttatttactcatggccttgacactgagttatccagttaacatgttatta

SEQ ID NO: 157541 - DNA, 115 bp, Homo sapiens
aggtgagaggccaaaggaggaggctgaggctggcatcagctccaaggtgctgtggcaaaggcaataggcgtggtgatgtggggtcaggaatagggaggaggagcaaagaggtctg

SEQ ID NO: 157542 - DNA, 308 bp, Homo sapiens
ggggagggtcgggcgtgtccgcctgttggaatatgcttctcaggtcttctgggaaacagatgttttgtggaagtggaagattttggaagtagtgccttatcatgtgaaaccacagggcagctgatctcttcaggctttcttgatgtgaatgacagctttgtttcatccactttggtgggtaaaagaaggcaaattcccctgtggtacttttggtgccaggtttagccatatgacgaagctttacataaaacagtacaagtatctccattgtcctttatgatcctccatgagtgttttcacttagtctg

SEQ ID NO: 157543 - DNA, 284 bp, Homo sapiens
ggcgttctagaggatcccagggagtccatcatgccggtgacagaatcttggctgtcttgctcaatgctgcaccccagcccagggtagagtgccaggcccacagtgagtgttcacacacttgtcgaagaaaagcgtgaactgaaggggagaggttctgatggatgagggctgaaatgatgaggtcgtcttcatgtggtggtggaagggagaggaaaagggatgggttcaagaaaggtaaaggacaggtagaagtgatgggccctactggtttactggaggttgtg

SEQ ID NO: 157544 - DNA, 357 bp, Homo sapiens
caatttaacttcctgagtggctaggactacaggctctttggaaattttagtttagtttttatttttttgagacaaagtctcactctgtcgcccagattggagtacagtggcacaatctcggctcactgcaacttccacctcccaggttcaagagattctcatgcctcagcctcctgagtagctgggattacaggcatgcgccaccacgcctggctgattctgtgtatttttagtagagacaggatttcactgtgttggccaggctggtctccaactcctggcctcaagtgatctgcctgccttggcctctcaaagcgctgggattacaggtgtgagccactgcgctagcccttcaat

SEQ ID NO: 157545 - DNA, 429 bp, Homo sapiens
atgtctctggcaatcaccaatctatattctgataatatttggcacctattctagatatttcatataaatggaatcatataatacatagtctgttgtgactagctttctttcacttagcacgttttcttggtttacccaaatagtagcatgtattacttcatctcgtttaatttttttaaattgtggcgaaatacacacaacataatcttaaccattttaaaatgtacagttcagtggcattagcatattcatactgttgtgcaaccatgactaccacccctctccacaactcttttaatcttgcaaaactgaaactcattaaacagtaactccccattcctctctctcttaagcccctagtaaccatcattctactttctgtccctatgaatttgactactgtaggtacctcacataagtagaatcaca

SEQ ID NO: 157546 - DNA, 793 bp, Homo sapiens
ctcttctgctagggatttattattagttgttattgttattatttccattttacagataagaaaactaaggtatagataaattacataacctgcccaaaataatgcggtttttaagtcatggagccagaattcaaattgacagagaccaactccagagtttgctctaatcattattcacttaataatcaaatgataaatgaataaatgatgataaacatcttttaccccaaagctaatgcagaactctaattttaaaaacacatggtccttttgccttaaggaccaaatgagtttctgctcccaaacatcaatcttataattagtaaccctgttgaaataaaaagccatacccatccctactatcccagaccttgtctccctagggcgatagccccagttctgtatgccccagctgaaagaaaaaggaatgttagggatcttgaatttaccttactagtttcctgtcataggaggatgccagaagaaagcaacaaccacagtagataaagaaaagctcttacctctttctaaagtttcatccctagaatatgttgctcagttactatcccagaatccagtttcagatctgcactcctcctcctttgagagaaatgaaaaggggttaggggaagagaagaaaagaacttcacagctttcttctagagcccagcagtggtggtccttttcatgtagaagtccaggaacagttccaatcagtaaacctggtggagaaattaaccaattttatatttgtcttaattcaggaagtcacaatattttttttatttatgta

SEQ ID NO: 157547 - DNA, 175 bp, Homo sapiens
cttgaagagtagaatcagagtattaagaaaatcctgaaacatgaaacatatgatctggatgcttctctttctaccctcattttttattacctgaattgtctttttgagtgtttacttatatgtgcttatcatgccacagtctccctgtgagtctgcttgtccctccaccttatat

SEQ ID NO: 157548 - DNA, 406 bp, Homo sapiens
acaagtacaattattaccccattttataactgagacagagaaaagctcagtagcattgctgttgagtggtaggtagagcttgaatttgttgcaagctggctgactccaaggccaaaagatcatggggaatatgtatattgtttccaagaagacaaagtttccaagagcatcctacaaggtgccgttcattcttgccccaaattctccagatgtcatgagatatagaagagaaacatctttcgatgttgttctagtcagaggagacttctaataggcagagaacaagttatggaagctgttcctgaaagatgcagttgtcattgtggaaccagtcttggatattgtgtggcagctggaccacacagccattgttataaaggagagcaatatgccttgtgacccttgt

SEQ ID NO: 157549 - DNA, 1043 bp, Homo sapiens
ccatctttctttatgatttattcttagtctgatacgcatcagcctggtaagccttcctgtctctctgcttacttaccaatcactccaaatgtcatgtctttgggcaggcattaaattcttgggttttgggttttgttggatggactgcagtctgtgtgagcctatatgggtgtgtcaaatccagtctttggggtgtcatggaaacttagcatgatagacttgattttatccccaagttgacttggtaatttcattagatttcatcagtcacaacctgcattttatcttgtatgtgctgtctattggtcacaaaatcagaaaaccttcttgtccattcataacattagctgttttttcaggtggctagagggacatgtcattgcttcatctgcatgaatttgaaagattaaatgcataaaggaattttcttagagtagagtaggccttcaccatctctttaactgggaaagaagttttgggagtaacatactcatcactcacacccccctcccctcaaacacacacactcacccattagaatgtaagggccttgaggcaggccttgtgtttgcttttcgtgttcactgtcagcatttagaatagtgatagtcatatagatggatagtgctcaatcaattattgtcaaataaagtaatctacttgttccttgatttagactagcaaaaggggctggtacattgtaggtacacagtaaatatttgtagaacagatgaatgaaccaacccaacagatttcttagaagtagcctgcttttggttactaattattttatagaacatataaaagaaaattttagaatacctaatttgttcacaaaaatgttatattgtctcccctgatacttggtattcctgtgtcaggctgagcactaaggttatacattttttgttaagcatgtaattactgttatttctcatgtactttattttgtgtattgatttcagtagttgtagctgagggtaatccttaagagcatgcagattttaaaaattacatagattgccttgccaagccgtctgaaa

SEQ ID NO: 157550 - DNA, 138 bp, Homo sapiens
acatatggctcaatgatagcctatagatgtgcctcacagaatctttcaggcatagaactctttcttcaagcaaaatactaagcaaaagcccaacgtatacaaacaaaagtggagctacacttgttaaaatggaggagg

SEQ ID NO: 157551 - DNA, 340 bp, Homo sapiens
cataccaactgagtcaggtgagagcagagaaataaaagtgtatggtaatgttatggtaatagcattttgattattcaaagagcattatttttccccaaggctatgaacaaaggttgttaatttatatgatgggtagtactctgtcagaatatagttatttattttaattttataatggcaacttctagggttaagtcatcttagggcacaattacagaggaataacaattagttaattgaaatatgtgactagtataaaattaccagttttaaaatcagtaaaacatatgacgatctttcttaacttatacaaatgaagactgaaaggttgtgttgtctt

SEQ ID NO: 157552 - DNA, 409 bp, Homo sapiens
tgaagttatgatcttcaagtgagagatggagggactgcttctgcccaagattacatgtttgtaatctggacttcgatgtcactgatatgtttcaactatcttaaacatcctgaattaactgctgtgacatggctgaggtacatacattaggaagaccgtctaccgaatacctacctatcagccattttgcagtctgtagttcttctcttgaccatgggagaaggcaaatcactaatagccaccgttcttattttttcaagtcaggtttttttataaaatataacaaacagggacccttaactgtctcagctgggtttttttttaatgatttcttctggaaaggtgatagttttagtgtttccatgccttcttttgtccatgttcattataacttgtgactgtcgcatta

SEQ ID NO: 157553 - DNA, 469 bp, Homo sapiens
tcttgaaatcacccaacacaaccccaaatcctttaaaaagcccttcccagcactctcatactgaggcaccccatggttccccatggtgtgtgatctctcttgtgtaaaagtgtgttgataaacccaactcgattcaaccgcagatctgttcctcatgatctctgacgggtggacgttgacaataattttttgagcttagattataactccattttatatttttgttgtagatctgcagtacttgatttgctaaaaaatgcaattaccagttaagtgagggaaggttgtagtctttgttcagtacgtaaccaagagttttctatcattttaaaaactatcactagtggcaacattgctcatggcatttgagttccaggtcaaaactactgcagtagtctgcatttgtagtgggtacattaatggtaattatatgtacatatgcaagcatctaatgattgtgtcatcagga

SEQ ID NO: 157554 - DNA, 714 bp, Homo sapiens
ccctgctgtgtcagtggttcacactcaatcatgatggttgatgaggttcggggctcttaacgtgcaaaaagttctctaataaacaggtaggaggaaaaggagatgagtgtggtgttaagaagcctcatgaagaaagtgtttcatagaggatggattggctagctgtgtcatgctgctaataggacaggaaagatgaggtctgatgagtgatcattgagtggctattgatttggcaactggtccagtcattggtgatcttgataagacggatggtgggagtgaaaacagtgaaataggtttaggagtaattgagaggaaatcaattataatgaatatagataatagttttaaagaaatttactataaagagaagaaaaaagatggaatggtagctggaaagggaagtggggtcaagagaacatttattgttctcattgggttgttttattttttaaacttttttgaagtaattttagatttacagaagagttgcaaagacagcgttcctctatatccttcatccagcttccccaaatgtttaacgtagttgtggtatatttatcaaaactagggaatgaacagtacagctaaattggtacagtactattaaagcacagtttgttctgtttttttaagaggagtgaaataacagcctgattgtatgaaaaaccatggaagagtaattcagtgggactcagttagggaagtgacacc

SEQ ID NO: 157555 - DNA, 314 bp, Homo sapiens
actgacttaacaaggaggagatggatgtttcagtctcttaacactgaaggggagggatggaggaggctctgaaaatttcttgggacactaggaaattaagggaattcctttctacagcccttactcccttctgccccatccacatcaaagcaagactttggatgtggtacaagtcgggaagaatagattgagtaaattatgcagctgttggtgggaggaggaggcctgatcagatagggtaaagtgactttgagatctcaactgagattgcataaaatgaatgcatgtttgtacattttttttttcccagcagg

SEQ ID NO: 157556 - DNA, 331 bp, Homo sapiens
ggagttgaaggctacaataagctctgatcataccactgcactccagcctaggtaacagagccagaccctacctctaaaaataaataataataataaacgtatggctttctatctagagtgccctttcatctggccaagctgaggatatgctacttctcaacccccaagtacctgacaacattactgggataaatagaataagccatttctaagaaaggaggacgcacagcaggggtttcctaatggtaagagcagagaaaggaggtcgaaactctgtgggaagaacaatgctagccccataatgggaatgattttctcatccaacctgcct

SEQ ID NO: 157557 - DNA, 383 bp, Homo sapiens
agagggagatggaactttctggtgacattatcctcaccggaaattaagaaaggaaagcaacaggaaaccatgtatgtttcattactggtgtaaccaaactcttcaggatgtgacttcagacccagggataaaaagttggaggtcgcttatctgttttctgttgaactcaggcctggtacacgagagatgctcttttggtcagtttcctctggttgggtctttcaggaagaaagcaggttacggattggaccacataaactgacctggaaaccagcagtttcagcttttctgtatggcaagtacggcagagagctggttaagctgttagactgaatgtcacatgcactgggcccctttgtgggcaattacacaggtatttaaga

SEQ ID NO: 157558 - DNA, 211 bp, Homo sapiens
atcatcatcatcatcatcatcatcatcatcatcatcaaaaacaaaagacagacctgtaaccgtcttgtgtgcctggctctcatcttagttcaaaatatagaagtaaattctatggccagcgaacaatgaccaaaatagctctcatcactcttgtctgccaccatgtaagacattccttttgccttccaccatgatttcgagacttcttcag

SEQ ID NO: 157559 - DNA, 212 bp, Homo sapiens
atgacttttatggtgatgacattttctcgacttgggtacgacgtgttaatttatttttttgctgtgcgaatggcagtcttggtggtcagcagcttaaggtaggtttcttcctaggctggcttgcatttttcttttttttacatctttcgataaggacgtggttttcaagctggtgctggtgtactggaaatgttaggggtggtacctgtgct

SEQ ID NO: 157560 - DNA, 503 bp, Homo sapiens
gatgcaatatgctttgacattgttctgcctgctatctcatggatcttgtaatttgtcacaacaaatgcttttaacaacatgggcagaggagtgtaagcctattaattttactattttatttttattaagcactcacacacaggatcttaatgctgccctgagttaccaataaaatgaggattattcctctctggaagctgcaaaatttgaaatcagaaacaaaactcatgtagatccttttcttgaaagcagaagcctggcctaggattgatttatcattgtcaattacatgtgaggatctgaattgacccaacttttcagaagtcaggaatatgtgaactcctgcagggtagcttttattttttttttttttttagagacacagcacaagatgaagctgttacctccctccatcaacccagattgcaaaattctacattgaatgcgataagtcacatttaattttccccacttgagtcacaaagtagattctatccagactg

SEQ ID NO: 157561 - DNA, 602 bp, Homo sapiens
aacggtgtcctggtgtgttgttctgtttgtttcttttgaggcaggctctcgcttctgtcacccaggctagagcactcactgcagcccgaaactcctggactcaaagtattcttccacctcagcctcctgaatagctgggtctacaggcacaccccaccatgcctgcccaaatctttatatttttttgtagagacaaggtctccccatgttgcccaggctggtgttgaactcctggcctcaagcaatcctctcacctcaacctcccaaagtgccgggattacaggcatgagccaccacgcctggcctaatttttgtagttttagtagagacggggttttgccatgttgaccaggctggtctcgaactcctgaccttgggtgatctgcccgccttgacctcccaaagtgctagaattacagatgtgagccactgcgcctggccaacataggcctatttcactggtagacttggaatgaaaattatagtagggatgcagtggcacaaaacattagtaaattagatatttgatgattattggagatagcaataagaactaggtttttgttctttttgtttttttaaacttctgttagttcagaacg

SEQ ID NO: 157562 - DNA, 424 bp, Homo sapiens
tcacgccgcacgtcggctcaaacaaagccctacatctgaggtccacccagtgcctgccctgggtctctgcatgtcagctctgacatcaattattccagggttctgcttactcctcagggttgtgttttattattgtggtaacatacacatagcataaaatttaccactgcaaccattttcaggcgtacaattcagtagcattaagtacattcacaatgttgtgcaaccatcaccactattttcaaaactttttcatcaccccaacacaaactctataaccattaagcaataatttccatttcccctcaccctcagtccccagcatccacgattctactctctgtctctatgaacttgcctattctggatatttcatacaagaagaatcacacagttatttgtccttttgaaccggcgtgcgcct

SEQ ID NO: 157563 - DNA, 1091 bp, Homo sapiens
tcaggtaaccctccttcctccactgcacaatcacttagaaactgtaactcttcttgggcccaggtgcacaggtaaattcggatctttcccaaggtaagtgccatgtttaccttcgtgtttatgcatttcctatgcatttaacgtgtgtaaaatggtgctatcattttattcagcttctgtctttgttttcaatgttactggtaatattttgagtgttgtgctcctaaccccattcttgccacaggccctgcatgctaccgtgatttttaggaaccctatgtcacctcacagatctgagcatatatgagttgggctcgtcacccggccttctgggagtctcagtttccctatttgtaaaatggacatagtaaacccatctccatctcacagaggatagtaaaaagagccctggccttggagtctgggggctgggccacaggtcaggcttcaagaccccctgggccacgttggggacttgggttcctgagatccaatctctgagcatcagcttcactgtctgtcgcagaagcaccatttccccaccttgtccacctcacagaacagccaggtggcttagaggtgagctctcaaatgtcaacaggctttgcaaactccagtggtcagcattatgtgagtagttcagtctttccacagggatctctggggcctcgggtcacagcagaccagaacttgacctggaggctggtgtcccccaaactgctgtatggaccctgcaacagctggggagtcctcgtctcaacagccctgctgtctcccactgaggtcatctgctggccctcctggtggccctgtgaggaagccaggagtcactgatgctgctctatcgacggcgacagatggatcacagctgataagtgacttgcccagagttttgcagcttggaactcacagagcagaagctgggaatcaggtggggaagcacccagctctctgcttctcctaagccaagctctgcagcgaggtcctgcttccctcgggactcctctttcagcatgacatgaactcattttgaatgtaaaggcaatgtcaaagccctacagctatttataccagagcatgtgtttattagc

SEQ ID NO: 157564 - DNA, 255 bp, Homo sapiens
aggccaagagacgggagacctgtctggggtctcagagcaggctggataatccgataaatggccccacactgactctgcactgttcctgttccctgcaggcaccaagcctgccctgggcacagagaaaggccttttgagttaccctgcagactttagacactttggcaagtgtttccaatgacagctccaaagggaagcagggctcaggactgagtcataagacaaatgcacattaggtacatgttaacatcatct

SEQ ID NO: 157565 - DNA, 103 bp, Homo sapiens
aatggcttgcaatacttttatgtactatattattatttttctcaggtctaagtcaacaccccagagctaagaaacagaggaaagaaattcaatcacagtgtgg

SEQ ID NO: 157566 - DNA, 159 bp, Homo sapiens
gaaggggatggtttcagcctggcttggggtttggccagtcgggttacaagagtgagtgagaggtaaagcaattgaaaacgttaaggctgggcacggtgggtcacgcctgtaatcccagtattttgggaggcccagtattttgtttttttcttttttttt

SEQ ID NO: 157567 - DNA, 195 bp, Homo sapiens
gatgaagatcaaacctcccgcatgctcagtgcagtccagcttcacattgtctcttcactcagtgtcctggacacaccacgctccttccgcctctgatctgagctgtgtctttgcacaggctatttgctctgctgaaaacactgtgttcccccagccatccatccctctgacctctggtcagatcagaggccttcc

SEQ ID NO: 157568 - DNA, 490 bp, Homo sapiens
caggaggtggagattgcagtgagccaagatcacgccactctactccagcctgggtgacagagtaagaccctgtctctcaaaaataataataataataataagatattgccaaactgttttctagtgtggctgtactattttgttttcccaccaacaacacacctttctagtaggtatatagggggatctcattgtgatttaaatttgcatttctgtatgatcagtgatgttgagcatgttttcatgtgcttatttgccatctgtatatgttctgtggtgaagtgtctattgtaatcttttgccattgtttgttattaaactgtgagagttctttatatattgtggatataaatcctgaccagctatgtgttttacaagtatttactcctaggctgtggcttgttttgttcataacagtatcttttgaaaaacaaatgtttctgtttttataaagtccaatttattaaatttttcttttatggttcatgct

SEQ ID NO: 157569 - DNA, 240 bp, Homo sapiens
gctcaggggctcttctcacagctttttgaccttcttgttcagagccttacactccacacctcttgagccagtcatggcctcctctagacctaaaaccaggagctgccccagtgctgagctcttcagctctagatccatttctgaccaaagtctttgagcttctgtttgccttctcctctcttctgactagtaggcctgaggatcagtttagacctctggagcccttgctgtcctggagtg

SEQ ID NO: 157570 - DNA, 551 bp, Homo sapiens
agctactgattgtgaaatttcagttacaacattatcttgccaagtgaaaaagctacgccttaagaggggtaagagtctccccttgttcaattatcttgggaaaacctgtctacagtgcggaaccatcgacttctcatcctggtttgcagtttgaatgtctctggttaaggcattgggcagtttggtgaacttttctgtgtggctcagacttcgagtaccagacttgtcccttaaaattcatcgagtttcagcttatagggcttcaggaacagagcaatttctgttttaataattctgtggaagaaagttggattggaggaacctagaagaatttaggatctaggccagtttgcaggtagataataaaaactcaaatacagtgtacagggctacagtctaataatagatacagtagtttttctttagaagcataactttttatagtcatcccagtttctaccaatcagaataagacaaatttgtttataaaatagttttattagttttttgtctgattatttacataaatgcagcaagaatagctgttgacc

SEQ ID NO: 157571 - DNA, 298 bp, Homo sapiens
tctctagccagcccaccactggagctatcaagccagtagcaactcagcagttccttggacagagcttccaggagcaaatgaaatcctttctgccactgcctttgcagtgaactgcccttgctatcctcagaagatatatcacgggagcaaagaccctaagtgccatatcaacacctccaataagctgcagttgacccaaagaacaagccaatccatctcccacaggtggattttgctttacttgcactgacagcacacaggagggcagcacacaccccaacccacatcaactgccatt

SEQ ID NO: 157572 - DNA, 367 bp, Homo sapiens
aagacagggtcttactctgttgcccaggctggattgcagtggtgcaatcacagctcactgtaacctcaaatctctgggctcatgcaatccccctgccatagcctccagagtagaatcagatcattttaaggggatactgtaaatttactattatgcctcaatggaacatccatggtcaactgtaagaaactctgtattcttaactttgttaaaacaaacaagcaaaccaaaaagctcgcgaatatgtttgtactatggcataaaataaagttttaaaagttgggaaaaaaatttaatgagttccaaaggtccagtggtgcaataaaaaaaatacatcatcctgatgttccagagcttccccattttc

SEQ ID NO: 157573 - DNA, 425 bp, Homo sapiens
catcacagcctcctctgtatacaccaggcagacaaaacctcccgagctgtctctcaatgttggcagactgaccacttctcagtcttcacaggggagaaccagggaagaaacaatctctgccaaccaatggcattcagacctctcctgtcatgtttgatggatatgaggtggtccctcaatggaaataatggactcaggacactggcgagatgagcttgaaagagttatctgggtcacgggaagactggaatggtaatattgaagctttaggaactagggaaattcgaccttggtgaacattacaagggcaggccttcatggttatgtacgttcttctggaagtgatggaaactgaatataaaagactttgtggcatagcaggaactcagccttttactctgtcgacgcggccgcgaatttagtag

SEQ ID NO: 157574 - DNA, 299 bp, Homo sapiens
tccagcactgaaaccaatagactttggccactttgagcagaatcacatcttctttcatgacactgtggttaatactttccagatagattttgttttcaagaaaattaccttaacaccactcttctttaggccacttcagacaaaccagaatgtctgcaagttaagtcgtgctagactttttcctcctttcttctagtctgatcctcaaactttgaatgaatgtgtgggtaacgtgggagcaaaattgcataaagtcctacactcatctcccttttgtttttgccaaagctgtgtcccgt

SEQ ID NO: 157575 - DNA, 455 bp, Homo sapiens
aaaggaactttcacattaggcaaagatacctaatgcttatggagtgagtgaagatgtaaagaatcccgagtttggggctttaaagataagttacattctggaaggaatgttgtatatgcattgaggctggtataaggtgacttctttttcagggactatgaagagagggaaagtagtagtccttattatttagatgttcttagaatgaatttcttttaacacaaagagctagtgcttggttttcatggaagttgattcttagccagatatgtattacttcagggagcaaatgtttcttttaatgaagagaaatttaaccttagtgagatctttgaattgtaatgcaactagtaaggtaacctgaaccatcctgttaacattttacttctgcctctggctgaaagctgtgtaaatggccgtaccctgtgtttattctgacttttgttccatgaact

SEQ ID NO: 157576 - DNA, 431 bp, Homo sapiens
gaattaaaagtcaaccacacagcaagaaaaacacgtgacagcagttcacattttgaatagcatggatgttcaggaggctatcctaaatgaccactttagctagcaatgaaaaaattcagactcactgaaaagtagtaagtgggtagaaaagtggtccctcaaagatgctcacatcctaatctccagaccctaaaaatatttcacctcacgtggcagagacgacttcgcagatgtgagtatcctagatgagattatcctagatatccacagataatagagatccatagatatctattatctatggatgaaggggggccatgagccaaggaatctggttgctctacaggctgagaatgttcttcagttgtcaaccagcaagaaaacagagatctcaatgccacaactgctagaaaattaattctgccaataga

SEQ ID NO: 157577 - DNA, 563 bp, Homo sapiens
ccgcaggatgagccctaagacttacagagcaatcgagaggagaaagcatcacatctttggggtcttccagttgtcagaagcttgtggcccccaggaagccctacaggtttgggaacaactgaaggtcacagttctcgtcttctgggtggctggccctctgtggcaggtttgtggccacagtggggtcagtgccccctcccgccaccatgagattgtaacttaaggaaatgaggtcaccgttggttggatcaacatggctccagccccagcctgtggttatcagtgacataagacgcttattctggcctgggcctggtggggggtgagggggaggcacatttgtttgggtggttgggctccaacctggctttggacaggccgttaattatccttgggaaagaggccccacagagtgttctgaaactccgtgttttcagggagcaggcccctcctcaggcaacctggccacagaatgttccagcctctgactgcccagtctctgactgctctgaataattattaacctcatgaggatttatactaataaaatatagtaactggaa

SEQ ID NO: 157578 - DNA, 597 bp, Homo sapiens
  misc_feature (168)..(168): n is a, c, g, or t
  misc_feature (270)..(270): n is a, c, g, or t
gtactaatcagtttacacaaatgtgtggaggatgctactaaagtcaaaaaggaaagaaagacaaaatataagggaaaagttgcatacgaaagattatctacccttttctttttttacctactttcttttaaagaagcgttagggtaaactacaaatacctgaggagtnggttaccttttaatgttggctgacaaatgtatgaactattatgaaaattcccatatggggcccaatggtatgtttctaaaagtaaaatgacatggcttcttngattgtgtaaactgattaatcagtttacacaaaaaaatcagtagctcttctagctatatgtataatagcagccagttagaacatataattgaagatcccttttaccatggttaaaaaaaaaagtgctatctaagaatacatagcaagaaatatgtagagcgtatatgaagaaaacttttaaactaccaaagagtataacagaagacttaaataaatgagtctcttctgggataggaggacctctcagtatggtaaaggtgacagttttctctaaactctaagtttaatttgctcaacataaaaagagcaacatgatgttttttctgg

SEQ ID NO: 157579 - DNA, 238 bp, Homo sapiens
cttgggtcctctaagccctccacttacggcaactcttgatgtcatgtgggcttgctgactagtggagagcgcctctattgaaaccaggtgattccaccaggttgctgctatgatgaggccataaactattatccgtctagtagggaattttctttaaaaatttgaaattgtttaaggaaggtcttaaaattcatccgtagtttattattatatttttaactttggtgtggcaacgtta

SEQ ID NO: 157580 - DNA, 907 bp, Homo sapiens
cacactcttgggtgtaccagtattattacactaaggaatctagcgctttatcagaaaagttcttgaaaagggtacatgcaacatcaatcacaaatatttatgaaaatcagtacctacaaataaaaatgaatgagagtatttattcttgctagaaaaacatttaataaggattttccttaacaggaagtcctccagcatgggcaacatagactccaactctacaaaaaattttttaaaaagtagccaggcacacatgcttgtagtgccagcctctggaaaggctgaggtgagaggactgcttaagcccaagtggttgacgctgtgaccatgccactgcattccagcttcggaaacagggaccctgtctcaaaaaagaggaggagagagggaagttttctggtacatccatcttccataactctcaagaatattatctattatattaattgaggcacattcagcagttaaggttttttttttaaagacttaagactttattggaaaagatcatccttttgacacaaaaataagaccagtggtcacgtatcacaattcaaacacgcaaatatctgccaatctaggagtgtcacactttccacagattatagtttccaaatgctagtgcaacatactactgaacctatgtgcacatacatagcaattgcaaatatgtaatgaaaagctcaaatgtttcccaataaaattttactgcttttctttagcctcagcaataaaaggagaaattatttgcttgttcttgtaattatttatgaaaaaagaaaaaaaaagaaatgatcacttttaaagggatctaagtaaataattgtgatatttacctttgagacttggataaagacagtgtgacattcttgtccttggggtaagtccaggatgaccttatgggtta

SEQ ID NO: 157581 - DNA, 141 bp, Homo sapiens
ttgggagaacaggagacctccacgtagcagtggaggggccctcccagctccctgtcccatagccttccctcagtccaccctacagacgctgggatccacacactgagggactttggactagagggagaaatagcccgtccc

SEQ ID NO: 157582 - DNA, 399 bp, Homo sapiens
ggtgtttcctttgtctaacttacacatcttccatcttcagtaatgaaaggtatgtatcattttcctccttgtagctgcataaaaataacaaaactagtccgggcatggtggctcacgcttgtaatcccagcactttgggaggccaaggcaggcggatcatgaggtcaggagttcaagacttgcctggcctggatcttttctataatggacatttctcacttatttacatctacctttattcttaagtctgtggcacttaaatttgtttcacattacttttccttgtgaaaatagtaattgtatgttggtgtttatatacactttttttttttttttaagatctagtatctactagttagcatttttggtgcctttgatatctcagatcaaagattcaca

SEQ ID NO: 157583 - DNA, 173 bp, Homo sapiens
aatggaaggggtgctgttgtgtgttagacacagtgcgatgtggtggtttagacagactcagggactttggaagccttgggcaggcatttaacctccctgtacctcagtatcttcatctgtaaaatgcgtaaacatccctacattcagcgtttcctaaggattaaacaatttaa

SEQ ID NO: 157584 - DNA, 387 bp, Homo sapiens
acatcctcatggaatgatctgcttgaaaaccacacccacagagtcttataaatattttatctgcttttgacctcttcaatcagtctctgcaagattttgttaagattgtgatcttctttgttatgctccatccacctcttcttccacctgtcactgagttatttcacatagacactatttctccctgcgatttttgcagaagcttctgaactggaatatttgtttcttagtgtcttctatcaaaatcaaactctacgttgatggcagagaagctttttaatgcaatttagattatgtcacactcctgcttcaaacctccagtggctttccactgtctttgggatgaaatctgaagtccttctaataaagcatgaattactcataatt

SEQ ID NO: 157585 - DNA, 225 bp, Homo sapiens
ttgctgatttctgctgagttggcttaggtctcaatatctgagtgctaaggagatggagtcaatgattcgatctttaacctcctcttgggattcagctccaatggtaaacaaaactctcttttccaaaagtcaccacatctcattgcatcttttcggctctggctgagtcaagtggtcatcatggagtgagccactggagcagtggagaatgcactggggtccctg

SEQ ID NO: 157586 - DNA, 223 bp, Homo sapiens
gagacagattacagggaagatctcgtggggttgtttaaaaagtctctcaaatttgatagacaggaaaactctttgctttaatttgtatttatttgatcattagtgaagttaagcttttaaatttgtattagtcatttgtctttcttcttttataaattatagatactttaaaattttatgcaagaaaatctatccatattttcttttatgatttctacccttg

SEQ ID NO: 157587 - DNA, 537 bp, Homo sapiens
aaattcctgcgtctctatggtgaataaatggatttctcaactttcttcatctgtaggttgctgggctatgttttgctccttttcctagctgtctggtttcccagtctgcttgggcttcccagtccccttttccactagatagatgatcacggccaagtaacctatggcaaagtgcttactctttgccttttttctgtaaaaaaaaaagatttgcaaatcatgcccaggagataccaaggggctgtttcagatttcatagttcagaattgttttcgtgtgtgtgtgtgtgtgctgttttttttgagagagagtcttgctctattgcccaggctggaagtactatggtgaaattatgtctcattgcagccttgaccttctgagctcaaatgatcctcccacctcactcctgagtagctgagactacgggcacatgccatcatgccaggctaatttttgtattttttgtagagacagggttttgacatgttgcccaagctggtcttgaacccctaggctcaagtaatccacctgcctcgg

SEQ ID NO: 157588 - DNA, 388 bp, Homo sapiens
ttaaaaaaaagttggttcaatggagttatgccatatagatgtttatgcaaatttagtaagctctcaataaagagagaaaaagcatttgactggggcggcggattcctcccaccatgtcacttaataggcacatcatttagtcacccccacctcctttttccaccctcctcgtgagacgacaagacaccagcctcattggcctcactgttgctcctttaacttgtcatctcttgtcccacctcagggccttggcactcactgttccttatgcctggaatgttgtctccccatggctcactccttcaattcccagctcagacatgtgtgtccctctcaaagagatctttcttgtgagatcgtaccttcccattaccatgtcctgctcata

SEQ ID NO: 157589 - DNA, 742 bp, Homo sapiens
atatctttccgtcatgtctttttcaaccttaaataaggaataacagtaatgacaactttcattccttctctccacttttttccttgcagctgtaacacatatcactgtactcatgtttgccagatcctcttacagtgtctttaaaatacttcagcataactgcattgcacttcatggcttacccctttggaactcctcataagtcctcactgtttgtattcatttgtacagaagtctcatcatccctattaaattatacccaaaaaagtgatatagatgcaggcattagttttaatccacacataggaataactaattaacatttgatatcctaattacgcgtacacactccagggtggatgaggtagcatatgaacacctctaatcaaggatgcatgctctagaatagggattcttaacgtggatagaatgaatgggggggggggttctataaacacggatggggaaaaggttacacttttatttctcagtaacttacaaatgaaatttagcgattccttcaattattaacataggtaatgaattatagtattagcagtacctgtgactttgtcaccaatacaaatcacagctgttttcgtatcacattctcattgttacaaatatctttagatgtttacattcaacacaactttgaagttgaagcaattattcccaatgctagaccttgttagttaataataaataagccaccatgcccggccagtgatttacacttcta

SEQ ID NO: 157590 - DNA, 306 bp, Homo sapiens
tcacacacacatacacacacacaccctccagagtcattttctttctttaatagtcatatgttcactagtgcaaactctggactgacattgaacctgaacagtgagagtaacggttgtacaaatgatgatccatccaccgtttaaaatcaggtctacaaagagttggaaaacaagagacaatgattttgataaatctaaagtgataaaacaggatgcaacattgtcacaacagtatgatcacaattacataatgaatgcactcatggaagagaaagtgaaggaaggatgtcagaatgtgacggtggt

SEQ ID NO: 157591 - DNA, 189 bp, Homo sapiens
aggataattgcaatgatgtgtccggtgctttacaggtggcaacttgctttctcatggaatatcttggaagtcatctaatcattccctctacctgatttacaaataccctaccaatgtgtggtgtaaggtaccaatatggtttggctctgtgtccccacccaaatctcatctcagattataatccctgta

SEQ ID NO: 157592 - DNA, 351 bp, Homo sapiens
ggaagagagaaatagtagaatgacaggccatgtttggcccgttggaaatgcccaccaccctttgggaagatttactggccgtttatagaaggcctgtgtatataatatgaaaaagcttctctcaactccaccccaaccttttaatagaaaatatttgccatatttagcccttctatagatggaaaaagccacgctgttttacttttataagcaatattgcattaaatttttaataatgaagaaaatccttcctgggtcgagtggggacttagagaacttttctgtcttacaagaggtttgtaaaatgcactcccaggcttttcaagaaattaaaaacaatctcttgacagt

SEQ ID NO: 157593 - DNA, 492 bp, Homo sapiens
gagacaggctcggtctgtcacctaggctggagcgcgatcttggctcactgcagcctccacctcccaggttcaagcaattctcctgcctcaggctcccaagtagctggattacaggtgtgcgccactatgcctggctaagttttttgtatttttagtagagacggggtttcgtcacgttggccaaggtggtcttgaactcctgactgcaagtgatctgcgagccttggcctcccaaagtgctgggattataggcatgagccaccatgccagattgacctggtttttattcattaataccacatgcattaattaaggctaactggttgataaatatgcaatcactgtaacagtcaatcatctagtgtttaactgtgtacctagggtctcagtagtagaagaatacagatttatcatccatgccaaaaaggagtttgtagccaagtgtgagagaatgtattcacatgaaaagtgacaaagaggcaggaaaaacgt

SEQ ID NO: 157594 - DNA, 315 bp, Homo sapiens
agctgccgaggaggggtcaccagcccctcggtgcggcacctgagtaacttgtccactgcctgaatcccacactttcttctgtgggagggaagtggcaagtccagacctccttggtaggtacaggagtgtgagctgcagcctggcagcttccctggcatcagatcggctgatttccaggcttgtggcccagcctcctgctgccaggtgtgacgagcgcattggcacggtcaggaagcagcagagcctgcctctgctctggggctcacggacaccagctcgtgcccccttcacacatctgcagatggggagaccaag

SEQ ID NO: 157595 - DNA, 650 bp, Homo sapiens
  misc_feature (107)..(107): n is a, c, g, or t
  misc_feature (169)..(169): n is a, c, g, or t
agaagactctgactctcttccttgctcccactctctcctgcttccttgtcctggtgaagccagctgccattctgtgagctgccctggggatgggccctgtggcaggnaccaatggtggctttcagccatcagccagcaccaaactgaggccctgagtccaaggaaccangaggatctgagtcctgccaagagccatgtgctgctgggccttgaggtgacaacgccttgatggcagccttgtgcgagacactgaactgaggtgtccgggaagacagcagctgcgttgctgtgaggacgctccaaaccttagcactatcgttactatggaacatcagaaccaacctgagggtcagctataaaacctgttaccctagagactggtacagcttcatgatttgacgaaatgcctccagatgctctcagagtgaagttatggaaacaatcccatgctgaaagaagatgctgaggtgaggcacaacagagaggaagaatgccagggaaacctgtcctgctggagacatggccaagaatcacgcagggacttgagcatccttgggtttccatatctgtgggggctcctggaaccaacccccagggatactgagagacaactgacagaccaagtgctgagagtcacagatgaagatcag

SEQ ID NO: 157596 - DNA, 861 bp, Homo sapiens
  misc_feature (107)..(107): n is a, c, g, or t
  misc_feature (169)..(169): n is a, c, g, or t
agaagactctgactctcttccttgctcccactctctcctgcttccttgtcctggtgaagccagctgccattctgtgagctgccctggggatgggccctgtggcaggnaccaatggtggctttcagccatcagccagcaccaaactgaggccctgagtccaaggaaccangaggatctgagtcctgccaagagccatgtgctgctgggccttgaggtgacaacgccttgatggcagccttgtgcgagacactgaactgaggtgtccgggaagacagcagctgcgttgctgtgaggacgctccaaaccttagcactatcgttactatggaacatcagaaccaacctgagggtcagctataaaacctgttaccctagagactggtacagcttcatgatttgacgaaatgcctccagatgctctcagagtgaagttatggaaacaatcccatgctgaaagaagatgctgaggtgaggcacaacagagaggaagaatgccagggaaacctgtcctgctggagacatggccaagaatcacgcaggtgagccacaggagaagggcatcagggatgcagctgatgttttcttaggatattttcttctgtctggaaaagtggcaggtgggaggctggcatgaataaaccctggggaagaagttattgaaagaaaacccagacaatgaagtaagggccacaggatttcaaagtcaggaaaggagaaatcagtgaaataaacccaactggatttcattcattcattcattcattcattcactcattcattcctctataggccaggacccaaatagatctctatagacccttctaggtttatagcctttctccagagtaccaactggtacaat

SEQ ID NO: 157597 - DNA, 491 bp, Homo sapiens
gctgcgagactagagcatggctccggtgtccagaactgagctgtcgcggtgtagcggttgacagtcgctacagctgatccttgttctgtggcaccattctgattgtgtgctagtctacctgactgttccctggtccctaagggcctttcttgttccttccagctgttcctggctcacacagactgactgctgttggattctgctgactaatctctagtctcctgattcttccctgtccttggacagttccttgagtacatttctttctttccattctttccttctttttcttcctcccttcctgtttctgagacagggcgtcactctgccacccaggctggagtgcagtggcacaatcacggctcactgcagcctccacctcccaggctcagatgatcctcccacctcagtaccaccctacccggctgattttttttttgtatgtatatatatatatatatcacacacatatatatatatacacacacaca

SEQ ID NO: 157598 - DNA, 416 bp, Homo sapiens
gccataccctattggttggggaagccacaaaatttcacctagatttaagcccaggtgctatggcctgaatgtttgtgttccctcaaaattcctatgttgagatcctaagccttaaggtaatagtattagaagatggagtctttgggggacacttaggacatgagtgaagagccttcatgattgggatgatgcctttataaaagagaccccagcgagcttgcttgccccttccatcgtgtgaagatgcaactagaaggcaccatctatgaagaagaggaccctcaccagacattgaaactgctgacacctccatcctggacttctcagcctccagaactgtaaacaatgtatttctgttgtttagaagtgacccagtctaaagtattttgttgtagcagtccaaacagactaaacag

SEQ ID NO: 157599 - DNA, 309 bp, Homo sapiens
attgcgcctggtgatggatatgtgagaattataacttaaaagaagaggcaagaatttcagacctgaaatggaccttagtgatatctagcatagatttattttacatatgaggaaagtgaggcctagtgtcactacctgaaatcctagagaataaagactagaatttttgtaaatgtaacttttttcctggctatttaacattgttaccctttgttttagaaaaagccacattaaaagggatatatatctatatgccctcaatgtttcttcctcctatagggggatagccactctgacccacggcataca

SEQ ID NO: 157600 - DNA, 439 bp, Homo sapiens
tggtgcttgactctccccattgctggcctaggattcagttttcttaggtcttataaatcattttccactcttctatcagcttccaatgtatcatggctgttgtttctccctgtctttctcatcctttggaattcatacttttaaaaacaaatctggccgggcacggtggctcatgtctataatcccagcactttgggaggccaaggccagtggatcacttgaggtgaggagttcaagaccagcatggccagcatggtgaaaccccatctctactaaacataccaaaaaaaattagctgggcatggtagtgcatgcctgtagtcccagctacctgggaggctgaggcaagagaatggtttaaacccgggaggcggaggttgcagtgagctgagattgcaccattgcactccagcctgggtgacaggacaagactccgtct

SEQ ID NO: 157601 - DNA, 453 bp, Homo sapiens
gacagagtcttgctctgtcgcccaggctggagtacagtggcatgatctccgctcactgcaacctctgcctcctgggttcaagcaattgtcctttctcagcttcccggttagctgagattacaggtgtgcgccaccgtgcccgactaatttttgcatttttagtagagacagggtttcaccatcttggccagactggtcttgaacccctcacctcaggtgatcggcctaccttggcctcccaaagtgctgggattacaggcatgagccactgcacccagcagtgatcggtgactattcacgtgaagagactgttggaaaatgacagttaggtagaattattaaggaaatgtctgtaagtatgaaggaggtcaaagtatgaaatctgtagattgctcaggcttttaagtggcctgaccatgtagtgccaaaccgacttccagtatcaccgttgtg

SEQ ID NO: 157602 - DNA, 348 bp, Homo sapiens
cctaagttgaattttttctgactgctacccttttgagcaatcttacccatgaattgctgcctttaaaattcctctgataacttttttttttttaagcttcaggtttagccaaaaacatgactgaacctgactcccaaagtgctgggattacaggcatgagccactgcacccagcagtgatcggtgactattcacgtgaagagactgttggaaaatgacagttaggtagaattattaaggaaatgtctgtaagtatgaaggaggtcaaagtatgaaatctgtagattgctcaggcttttaagtggcctgaccatgtagtgccaaaccgacttccagtatcaccgttgtg

SEQ ID NO: 157603 - DNA, 588 bp, Homo sapiens
gaagtaacagctgaaaatgtcccaagtcttgtaagagatatagacatccaaatataggaagctcaaagattcccaaagagattcaacccaaaaatgtcttctccaaggcacactagtcaagttgtcaaaagtcaaagaccaagaattctaaaaaacagcaagagaaaatcttacatagaagggatatacagaagggattcccatcagatgggaacaacaataaagttgttcccagataagcaaaaacagggaattcattatcatgagactggacctacaagaaatgcttaaggaaatcttacacctggaagtgaaaggatgctatctaccatcataaaaacacatgaaagcagaaagctcactggcagaacagacacaaatgagagaaagaagtcaaatgttaccaccacagaaaaccatcaaactgcaaagataaataagataggaagaaagaaacaaaagatacagaaaacaataaaatgacaggaataagtccttacctatcaataaggaaccatgaatgtacatgggttaaattctccacttaaaagatataatttggctgaacagattaataaacatgaccca

SEQ ID NO: 157604 - DNA, 396 bp, Homo sapiens
cactccagttgtgtacctcaatgtttttgtgcttttttttgagacggaatctcgctctgtcactcaggctggagtgcaatggcacgatctctgctcactgcaacctccgcctcccaggttcaagccattctcgtgcctcagcctcccgagtagttgggattacaggcgcctgccaccacgctcggctaatttttggtatttttagtagagacggagtttcactatgttggccaggatggtctcgatctcctgacctcgtgatccgcccacctcggcctcccaaagtgctgggattacaggcgtgagccaccgcgcccggcctacacagtttgcattttaaaagattactttgtatacccctagagaggttcccccccatggaattctatattgtct

SEQ ID NO: 157605 - DNA, 544 bp, Homo sapiens
gcctgatctttttttaaacttgcagaaatttctttagtgatgcacttatttcctgaatttagcagaaccttactttaaaggggttcacattcttacaatgagcagttatttctgacagaaagaaaccatgacatctctaaattgtgcataatccctacagtctctatgactaggatatccaggatattttgaaactgaggaaagatgaagtccccaaacaagaactgagtctagtctattcatgcagctgtagggaaagagacaaacttctcgactgagatattggtttccctcccttttactgcattgccaacaaaaatggtggtactagtctattccagccagttaaggagtcatttcttcctgtctccctcctgtccttcctctaataaaagtaatagacatgttcgccacctacaaagggaatggaaggtaacagataagctctaatagcccatgacattcctaacttgtccatagggaataatcaactgtaaactagattggtttagaaatacctcctgttggccgggcgcagtggctc

SEQ ID NO: 157606 - DNA, 304 bp, Homo sapiens
aggctctgatatataaaagagaagtatttttcagcgcctcttaactactatagtaagaagtaatatttataagaagaaaaggaggaaaaaaagtatctaaaacaaactggttaggtaggaacatcagaagtagagaagtaaaagtttgtaagttctaaagccaagacattcaagaacgaaaagagaacatcacccctgagctgggacacattcacctgagaaccagccatttcttcctcttgctcttccctttgggattccttctcaggtgatattatctggaaaatcacatctgtaacttgag

SEQ ID NO: 157607 - DNA, 271 bp, Homo sapiens
tgtgctcccccttcgtccaatctcagggtgggaaatcaagataacagttatccttgcatgattttcctccccatcacttcctttactcttttcaaatgtgttacagcagaacattctctaagtagaacatactctgcctttccccaaattgactaggaagaaggactgttcaccactgtctcctatggggaagagaaagcatcatcagtggctctgttctcgtccttccccacactatgctttccggttgccccacgtcagcctactcctc

SEQ ID NO: 157608 - DNA, 304 bp, Homo sapiens
acccactcctctgcctcctcacctcgctcccaggaccctggctcactctgactgcagcagggccaggaccctcctcgtggccctgccatcctgccatctccgtctccgtctcactccccacaagtggttgctattgctggtttggttccgcgtcaaagttcccaaggccatgtaccctaaggagtcctcaccccgaggccaaaagagagcctctttttcatggcccacccaggagtgatggagccaggatgcaaccccaacacccctaaccccaaacacacacgcctcctgtggccctgaaaca

SEQ ID NO: 157609 - DNA, 541 bp, Homo sapiens
aattactatgagaagccacagtatgtcaactgagagatacattaagccaagtgaaaaaagtgactttttcttaaaacaactttagaaatctaccattgcacatcatattggtcagaaaattgataactttgaagtttaggagaagggaagaggaactggaaggcatgagatgatataaagcagcaaacaagaaccaaatcgtgtgtgcagtgcttctaatgtgtcattgctgcaggcagatgtttaggggtcttgccttgggagatggtaatcaatgaagaccagaaataaccaggacaacattgggtgtgtgtaggtagtgatggcatcaatctttataccaatttataattgtaatatgcctagcacctttttttaaagctttattgcaatcatcactaccccaaaaagaaacacaatacccactagtattccctccctgtctcctagtcctcagcaaccactgatctactttctgtctctacagattgcctgaatgtaaaattctggacattttacataaatgaaatcataccatgtg

SEQ ID NO: 157610 - DNA, 225 bp, Homo sapiens
tataatggaagggagacaaagacaagggtgtggatttgagctttttattttgaaaactaaaacaaaggacatgaatataagttgggtgtccagaatgagagaggaatcaagggtggcctcagtgtccatggtgttagcaaatgggtggtgaacgaggcaaaagtgggtaaaattgggagagaaacattttcttattttaaatcccaatttgctccttgggtacaa

SEQ ID NO: 157611 - DNA, 578 bp, Homo sapiens
agatgactgcagagaacccccgccctgactgcttcagcttcggaaaagttctgaagtcatggaaagttggggctgtgctcccagccaggggctaggccggatggcagccaaaacctgagctgggttttgactttatttttagcttttctgactgagacagaggagggaatacattctccggttctggaaggggctcttttttgcaggagacagacacttacattaaacaacttgttctgaggtgtggccagaggcctggactgagcaagtgtgcaggctgggggagcttcctctggcttctcatgtccttcccctgcccctctgagtgtcactctatcctcctccctgcctggtggggggaggtgggggtgactccttttttggactctcctaagcagaacactgcctgggtctcgtcctccagagcttctgcaaatctagccttccctatccctcttcacagtgaattgctgggcctcttggagtttaggacttttgtggtagaagaaaaatgttggcagggctgcttttctcctttccaggatagatttttccttctgcccacgcttggttttcct

SEQ ID NO: 157612 - DNA, 686 bp, Homo sapiens
gccttcagggtagagaggcctcttctgggaagccccagccagcctgggggtcagcccaaggagctcggaatctaagttgccccagttgcttcactttaccagcggtttttcttcattttccctcctccccctgcagctgcttcagcttcggaaaagttctgaagtcatggaaagttggggctgtgctcccagccaggggctaggccggatggcagccaaaacctgagctgggttttgactttatttttagcttttctgactgagacagaggagggaatacattctccggttctggaaggggctcttttttgcaggagacagacacttacattaaacaacttgttctgaggtgtggccagaggcctggactgagcaagtgtgcaggctgggggagcttcctctggcttctcatgtccttcccctgcccctctgagtgtcactctatcctcctccctgcctggtggggggaggtgggggtgactccttttttggactctcctaagcagaacactgcctgggtctcgtcctccagagcttctgcaaatctagccttccctatccctcttcacagtgaattgctgggcctcttggagtttaggacttttgtggtagaagaaaaatgttggcagggctgcttttctcctttccaggatagatttttccttctgcccacgcttggttttcct

SEQ ID NO: 157613 - DNA, 116 bp, Homo sapiens
agtgtccaccttaggctgctcgatgaagggggtgatacactcatcttcatccctagtgttcacacgagtggtcttttcacaaagcagtctccacactggataagccaattattttc

SEQ ID NO: 157614 - DNA, 308 bp, Homo sapiens
atccaaatctcatgcaatttttttatggttctcattagctcagacgcatgcagggaggcggggtctgggaaatgtaaagtccagtttacgtgacaccatacaaagtcactgtgtaacgcgtgtcacaaattaactacagagatttttattgcagtattacttgtgataataaagaataggatacaacctaacttccaacaatacagaaatggttaaaaatgtatgaaacatccacacattagaacataatatattacaaagggggctgggtgtggtggctcacgcccataatccccaactttgggagg

SEQ ID NO: 157615 - DNA, 317 bp, Homo sapiens
aaaaagtaaactatgaatagattcattacattttaaatttgcttgtataacttgtaaagtcttttcacatatatggtgaataatttagggactgaggactaacagcatggatcgcagtaacgtcttttaatctagaattcaagaactattcatttatcaagcatttatttcaaagtatttaaaaagtattcacttttaaaaattgaagtagctaaatctttagaagctaaacttttattgcatcttctcctcagaaatccatctattgtcttcctatcccacttatactgatgtcttacttacgctagactcaggtg

SEQ ID NO: 157616 - DNA, 240 bp, Homo sapiens
tactttcttttacaacaaaaaagtaataaaaatggttacctatagggtgatactgggaagaatgaaaacagagaatgcttctctatgtagaactttttatttaattttgacttcaaacctatttatatggaaagaattaatccagaaattgaaaactcagaattagagaaacagaaataaaccactattaacatcgaatcggtaaaatatctacacagaaaaaatatatgaagagacttt

SEQ ID NO: 157617 - DNA, 442 bp, Homo sapiens
ccacttccaggtatggctgagaagggtgaaaatgcatgcacccacagacacacacacacaccgtggaaatgaggaaaagttacttctctctgttgtaaatttaaatgcagtccagagtagtgaaggccgtttgtaaggtctgctgagctaatggattcataatgacttttaaagcttcactcggctgcactgggggagagcctgctgaagctgcttgaatctcaacactgtcatacccgccatctcattatctacagccacatctaaaacccacatgaaataccaagtcacacgcggctctgggaaagacattttacagagaccatcttatgagtttttaatctgcctcctgagaacttacaatctaagaaatagaaaactgattccagtaagcatgcccagaatatgctagcagcaagattaaaacatgaaactatgaaaa

SEQ ID NO: 157618 - DNA, 295 bp, Homo sapiens
ccacttccaggtatggctgagaagggtgaaaatgcatgcacccacagacacacacacacaccgtggaaatgaggaaaagttacttctctctgttgtaaatttaaatgcagtccagagtagtgaaggccgtttgtaaggtctgctgagctaatggattcataatgacttttaaagcttcactcggtacatcctatgtgccagacactgcgataggttctggagataacaacagtgtccaagaaacaacagtgtccaagaaacaggactttccctcaaagagcttactggggaagcc

SEQ ID NO: 157619 - DNA, 2462 bp, Homo sapiens
tcattaataagacaaactactggtgaaaaaaagaaccctttccgatattttagtaaacaagaattaagagagctctttacaatcgaggatcttcagaactctgtaacccagctgcagcttcagtctttgcatgctgctcagaggaaatctgatataaaactagatgaacatattgcctacctgcagtctttggggatagctggaatctcagaccatgatttgatgtacacatgtgatctgtctgttaaagaagagcttgatgtggtagaagaatctcactatattcaacaaagggttcagaaagctcaattcctcgttgaattcgagtctcaaaataaagagttcctgatggaacaacaaagaactagaaatgagggggcctggctaagagaacctgtatttccttcttcaacaaagaagaaatgccctaaattgaataaaccacagcctcagccttcacctcttctaagtactcatcatactcaggaagaagatatcagttccaaaatggcaagtgtagtcattgatgatctgcccaaagagggtgagaaacaagatctctccagtataaaggtgaatgttaccaccttgcaagatggtaaaggtacaggtagtgctgactctatagctactttaccaaaggggtttggaagtgtagaagaactttgtactaactcttcattgggaatggaaaaaagctttgcaactaaaaatgaagctgtacaaaaagagacattacaagaggggcctaagcaagaggcactgcaagaggatcctctggaaagttttaattatgtacttagcaaatcaaccaaagctgatattgggccaaatttagatcaactaaaggatgatgagattttacgtcattgcaatccttggcccattatttccataacaaatgaaagtcaaaatgcagaatcaaatgtatccattattgaaatagctgatgacctttcagcatcccatagtgcactgcaggatgctcaagcaagtgaggccaagttggaagaggaaccttcagcatcttcaccacagtatgcatgtgatttcaatcttttcttggaagactcagcagacaacagacaaaatttttccagtcagtctttagagcatgttgagaaagaaaatagcttgtgtggctctgcacctaattccagagcagggtttgtgcatagcaaaacatgtctcagttgggagttttctgagaaagacgatgaaccagaagaagtagtagttaaagcaaaaatcagaagtaaagctagaaggattgtttcagatggcgaagatgaagatgattcttttaaagatacctcaagcataaatccattcaacacatctctctttcaattctcatctgtgaaacaatttgatgcttcaactcccaaaaatgacatcagtccaccaggaaggttcttttcatctcaaatacccagtagtgtaaataagtctatgaactctagaagatctctggcttctaggaggtctcttattaatatggttttagaccacgtggaggacatggaggaaagacttgacgacagcagtgaagcaaagggtcctgaagattatccagaagaaggggtggaggaaagcagtggcgaagcctccaagtatacagaagaggatccttccggagaaacactgtcttcagaaaacaagtccagctggttaatgacgtctaagcctagtgctctagctcaagagacctctcttggtgcccctgagcctttgtctggtgaacagttggttggttctccccaggataaggcggcagaggctacaaatgactatgagactcttgtaaagcgtggaaaagaactaaaagagtgtggaaaaatccaggaggccctaaactgcttagttaaagcgcttgacataaaaagtgcagatcctgaagttatgctcttgactttaagtttgtataagcaacttaataacaattgagaatgtaacctgtttattgtattttaaagtgaaactgaatatgagggaatttttgttcccataattggattctttgggaacatgaagcattcaggcttaaggcaagaaagatctcaaaaagcaacttctgccctgcaacgccccccactccatagtctggtattctgagcactagcttaatatttcttcacttgaatattcttatattttaggcatattctataaatttaactgtgttgtttcttggaaagttttgtaaaattattctggtcattcttaattttactctgaaagtgatcatctttgtatataacagttcagataagaaaattaaagttacttttctcaaaaaaaaaaaaggggggggctaaatatcccgggggcagatagggaccgttttgaaaagggcctagggggcgattaaagccgggcgtaaagcggaggaaaggttgacttgagccactcggggaatggacccagatggcggaaaagtatgacgtggggagtgtaaagaa

SEQ ID NO: 157620 - DNA, 1911 bp, Homo sapiens
taggctacgtggagccggggtgaatcggacgaggcacttgcaagatggtaaaggtacaggtagtgctgactctatagctactttaccaaaggggtttggaagtgtagaagaactttgtactaactcttcattgggaatggaaaaaagctttgcaactaaaaatgaagctgtacaaaaagagacattacaagaggggcctaagcaagaggcactgcaagaggatcctctggaaagttttaattatgtacttagcaaatcaaccaaagctgatattgggccaaatttagatcaactaaaggatgatgagattttacgtcattgcaatccttggcccattatttccataacaaatgaaagtcaaaatgcagaatcaaatgtatccattattgaaatagctgatgacctttcagcatcccatagtgcactgcaggatgctcaagcaagtgaggccaagttggaagaggaaccttcagcatcttcaccacagtatgcatgtgatttcaatcttttcttggaagactcagcagacaacagacaaaatttttccagtcagtctttagagcatgttgagaaagaaaatagcttgtgtggctctgcacctaattccagagcagggtttgtgcatagcaaaacatgtctcagttgggagttttctgagaaagacgatgaaccagaagaagtagtagttaaagcaaaaatcagaagtaaagctagaaggattgtttcagatggcgaagatgaagatgattcttttaaagatacctcaagcataaatccattcaacacatctctctttcaattctcatctgtgaaacaatttgatgcttcaactcccaaaaatgacatcagtccaccaggaaggttcttttcatctcaaatacccagtagtgtaaataagtctatgaactctagaagatctctggcttctaggaggtctcttattaatatggttttagaccacgtggaggacatggaggaaagacttgacgacagcagtgaagcaaagggtcctgaagattatccagaagaaggggtggaggaaagcagtggcgaagcctccaagtatacagaagaggatccttccggagaaacactgtcttcagaaaacaagtccagctggttaatgacgtctaagcctagtgctctagctcaagagacctctcttggtgcccctgagcctttgtctggtgaacagttggttggttctccccaggataaggcggcagaggctacaaatgactatgagactcttgtaaagcgtggaaaagaactaaaagagtgtggaaaaatccaggaggccctaaactgcttagttaaagcgcttgacataaaaagtgcagatcctgaagttatgctcttgactttaagtttgtataagcaacttaataacaattgagaatgtaacctgtttattgtattttaaagtgaaactgaatatgagggaatttttgttcccataattggattctttgggaacatgaagcattcaggcttaaggcaagaaagatctcaaaaagcaacttctgccctgcaacgccccccactccatagtctggtattctgagcactagcttaatatttcttcacttgaatattcttatattttaggcatattctataaatttaactgtgttgtttcttggaaagttttgtaaaattattctggtcattcttaattttactctgaaagtgatcatctttgtatataacagttcagataagaaaattaaagttacttttctcaaaaaaaaaaaaggggggggctaaatatcccgggggcagatagggaccgttttgaaaagggcctagggggcgattaaagccgggcgtaaagcggaggaaaggttgacttgagccactcggggaatggacccagatggcggaaaagtatgacgtggggagtgtaaagaa

SEQ ID NO: 157621 - DNA, 2296 bp, Homo sapiens
tcattaataagacaaactactggtgaaaaaaagaaccctttccgatattttagtaaacaagaattaagagagctctttacaatcgaggatcttcagaactctgtaacccagctgcagcttcagtctttgcatgctgctcagaggaaatctgatataaaactagatgaacatattgcctacctgcagtctttggggatagctggaatctcagaccatgatttgatgtacacatgtgatctgtctgttaaagaagagcttgatgtggtagaagaatctcactatattcaacaaagggttcagaaagctcaattcctcgttgaattcgagtctcaaaataaagagttcctgatggaacaacaaagaactagaaatgagggggcctggctaagagaacctgtatttccttcttcaacaaagaagaaatgccctaaattgaataaaccacagcctcagccttcacctcttctaagtactcatcatactcaggaagaagatatcagttccaaaatggcaagtgtagtcattgatgatctgcccaaagagggtgagaaacaagatctctccagtataaaggtgaatgttaccaccttgcaagatggtaaaggtacaggtagtgctgactctatagctactttaccaaaggggtttggaagtgtagaagaactttgtactaactcttcattgggaatggaaaaaagctttgcaactaaaaatgaagctgtacaaaaagagacattacaagaggggcctaagcaagaggcactgcaagaggatcctctggaaagttttaattatgtacttagcaaatcaaccaaagctgatattgggccaaatttagatcaactaaaggatgatgagattttacgtcattgcaatccttggcccattatttccataacaaatgaaagtcaaaatgcagaatcaaatgtatccattattgaaatagctgatgacctttcagcatcccatagtgcactgcaggatgctcaagcaagtgaggccaagttggaagaggaaccttcagcatcttcaccacagtatgcatgtgatttcaatcttttcttggaagactcagcagacaacagacaaaatttttccagtcagtctttagagcatgttgagaaagaaaatagcttgtgtggctctgcacctaattccagagcagggtttgtgcatagcaaaacatgtctcagttgggagttttctgagaaagacgatgaaccagaagaagtagtagttaaagcaaaaatcagaagtaaagctagaaggattgtttcagatggcgaagatgaagatgattcttttaaagatacctcaagcataaatccattcaacacatctctctttcaattctcatctgtgaaacaatttgatgcttcaactcccaaaaatgacatcagtccaccaggaaggttcttttcatctcaaatacccagtagtgtaaataagtctatgaactctagaagatctctggcttctaggaggtctcttattaatatggttttagaccacgtggaggacatggaggaaagacttgacgacagcagtgaagcaaagggtcctgaagattatccagaagaaggggtggaggaaagcagtggcgaagcctccaagtatacagaagaggatccttccggagaaacactgtcttcagaaaacaagtccagctggttaatgacgtctaagcctagtgctctagctcaagagacctctcttggtgcccctgagcctttgtctggtgaacagttggttggttctccccaggataaggcggcagaggctacaaatgactatgagactcttgtaaagcgtggaaaagaactaaaagagtgtggaaaaatccaggaggccctaaactgcttagttaaagcgcttgacataaaaagtgcagatcctgaagttatgctcttgactttaagtttgtataagcaacttaataacaattgagaatgtaacctgtttattgtattttaaagtgaaactgaatatgagggaatttttgttcccataattggattctttgggaacatgaagcattcaggcttaaggcaagaaagatctcaaaaagcaacttctgccctgcaacgccccccactccatagtctggtattctgagcactagcttaatatttcttcacttgaatattcttatattttaggcatattctataaatttaactgtgttgtttcttggaaagttttgtaaaattattctggtcattcttaattttactctgaaagtgatcatctttgtatataacagttcagataagaaaattaaagttacttttctcaa

SEQ ID NO: 157622 - DNA, 1753 bp, Homo sapiens
tagtgttctagaggatccctggcttcctacaagaggggcctaagcaagaggcactgcaagaggatcctctggaaagttttaattatgtacttagcaaatcaaccaaagctgatattgggccaaatttagatcaactaaaggatgatgagattttacgtcattgcaatccttggcccattatttccataacaaatgaaagtcaaaatgcagaatcaaatgtatccattattgaaatagctgatgacctttcagcatcccatagtgcactgcaggatgctcaagcaagtgaggccaagttggaagaggaaccttcagcatcttcaccacagtatgcatgtgatttcaatcttttcttggaagactcagcagacaacagacaaaatttttccagtcagtctttagagcatgttgagaaagaaaatagcttgtgtggctctgcacctaattccagagcagggtttgtgcatagcaaaacatgtctcagttgggagttttctgagaaagacgatgaaccagaagaagtagtagttaaagcaaaaatcagaagtaaagctagaaggattgtttcagatggcgaagatgaagatgattcttttaaagatacctcaagcataaatccattcaacacatctctctttcaattctcatctgtgaaacaatttgatgcttcaactcccaaaaatgacatcagtccaccaggaaggttcttttcatctcaaatacccagtagtgtaaataagtctatgaactctagaagatctctggcttctaggaggtctcttattaatatggttttagaccacgtggaggacatggaggaaagacttgacgacagcagtgaagcaaagggtcctgaagattatccagaagaaggggtggaggaaagcagtggcgaagcctccaagtatacagaagaggatccttccggagaaacactgtcttcagaaaacaagtccagctggttaatgacgtctaagcctagtgctctagctcaagagacctctcttggtgcccctgagcctttgtctggtgaacagttggttggttctccccaggataaggcggcagaggctacaaatgactatgagactcttgtaaagcgtggaaaagaactaaaagagtgtggaaaaatccaggaggccctaaactgcttagttaaagcgcttgacataaaaagtgcagatcctgaagttatgctcttgactttaagtttgtataagcaacttaataacaattgagaatgtaacctgtttattgtattttaaagtgaaactgaatatgagggaatttttgttcccataattggattctttgggaacatgaagcattcaggcttaaggcaagaaagatctcaaaaagcaacttctgccctgcaacgccccccactccatagtctggtattctgagcactagcttaatatttcttcacttgaatattcttatattttaggcatattctataaatttaactgtgttgtttcttggaaagttttgtaaaattattctggtcattcttaattttactctgaaagtgatcatctttgtatataacagttcagataagaaaattaaagttacttttctcaaaaaaaaaaaaggggggggctaaatatcccgggggcagatagggaccgttttgaaaagggcctagggggcgattaaagccgggcgtaaagcggaggaaaggttgacttgagccactcggggaatggacccagatggcggaaaagtatgacgtggggagtgtaaagaa

SEQ ID NO: 157623 - DNA, 987 bp, Homo sapiens
  misc_feature (804)..(804): n is a, c, g, or t
aaatagagagaaaagggtttccttttgttctctcctggagctgggacactcttcatctcctgaacttggacattagaattccattctccctggccttgagactctgagacttacacaagcagccccacccaggttctcaggccttcggactcacattgagaattacaccatcagcttccctggttctgattctttagaacttggactgagccacgctactatcatcccagggtctccagcttacaagtgtcctgccatgggacttctcagcctccataatcatatagatgataccaaagcggccaacgagtttaaaactctttttgcgcagtaggaatgactccatgaagatttctcatcatggagcccagactagatggacccaaatctccagactcccagctcttctgtaaaccccatcctgattctctgagtctctgaatcttttatcctcattttcttcccaactgtccataatgtagaatttaaataaaagattaaatgtaatctttataaacaaaaaaaaaaaaagaaaaaaaaaaaacaaacaaaaaaaaaacaaagaaaaacataaaaaaaaaagggggggggggggaataaatatactcccggggggggggccaaattgatgggaccccttttttttggcaaaggggggccccaaaagggggggaataaaaaagggaagggaggggggcgggaaaaaagggggggggggaacacgcgagggggctctgggaggaccccctctttcggcggccaaggggaaccccccacgagaatgagggcgcggggaaaataacntgggtgttggggtacccagcgcattctggcgaaaagttgtctcactttttgatatggcgggtatacattaataggggatgaatgaacaagaaagcgtcagtatggaagagacaggtaatatctgaatcctcttgaagtcagtaaggaacccaacgtcaagaacgcagcatgtgcactacagta

SEQ ID NO: 157624 - DNA, 484 bp, Homo sapiens
ctgaacaaggcgcctccctctctgaggctgttttccaaatgcagacagggcacagtccccaggcctcttgaggccacccccaacttaccctgtgaccttgaccctccccgcctcaggggcatcagcaggtggcagcccctgcagcccctgccccgcaggcttcacctgaggactggaggcagcaatactgaaaaacgtgcaagggcgccccagcctctgttgggtgctctatgtgtgttaaataaacacaaacgattaaattatcagccactcagacacagtgagccccaagctcagaattctttgctcttttggccacacatcaagtgagttcccacctccaggcctttgccagcccctcccatcctgaaacattactcctctgtgaagcctttgcttggccccacctctgggctcccatagcaccaatcacacccggatgtttaccccactgcgatggaccactgtcatccccacggactga

SEQ ID NO: 157625 - DNA, 229 bp, Homo sapiens
catgaggcaacagaggacactggctacttggtgggtctggggaggctggactttagacaccgggtttcctgcctggcagaggttcaggtgccatgcaagtacagatatgctgattttaccggcctgtgggtgaccatgaggattttggcagcaagcacaacaggctagaggccctttgcttctgtgacatccgaggaatagctctgagggatcagtttctaccacaggc

SEQ ID NO: 157626 - DNA, 354 bp, Homo sapiens
actgaattgcacacttaaaaatgattaaaatggtaagttgtacattatgtgtattataccattaaaaaaaagatagccatacataggtgggaatgaggtggctgggagaagggacagttctggagctcctgtccaggacagccttccaaagccatctttgctgcactgtgtgtgcctttccaagggcctgggttgtacattaattgagaaatgattcctaataagtcccaagaagccacaggtcttttccttacaaacaggaaacaatcacatctcatggcagctcattacacattctttgggtaccatgagttgttttaaaaccgtgaaattagttctggcagagtttacaga

SEQ ID NO: 157627 - DNA, 439 bp, Homo sapiens
agcagatgtcaataagggtttagctgactgatggtttgatacatgagctctgtatctccatgattcaggtgttttcctgaaaactaatttttaaaagacaaattgctccaggccatcattaatcttttcctgagatactttcatacatttagatgctctgaaaaaatatgttgcccaaatagcattttgtgcctttacatttcttcaagtacgtataccaacataatccctattaaaataatccttgaaagtcactacctaaacctacgtattattctagtttgtttcttcaaatagcaattaccaggtatggtgtctcacacctgtaatcccagcactctggggaggccgaggcaggcacatcgcttgaggccagtagttcgagaccaggcctggccaacatagcgaaaccccgtctctactaaaaatacaagtggta

SEQ ID NO: 157628 - DNA, 489 bp, Homo sapiens
tctgaggctgtggtgagccatgatcccagaactgcactccaacctgggtgatagtgcaagaccctgacttaaaaattaattaattaattaatgagaaaatggctgaaaattatttcacagtagatgaaaggccatacagaaaaaatgctcaacaccgatgttaatcagtaaaaagcaacatctaatcacatggagataaatatttataaggaataaacacacatgcacacatggtctgccagttaatccatacatgccaacgggttttcctagcacatttaaatttatccataatccacaacccagcacatttccccctatatgtacaaaatgtataaagtgttagcatttggggacaaaaacaaagatgacattgtcaacaaagtccagcaaaaatgaaacaattcaagtcctatgagccgtggaatatgagagtgaagtgggtgacccacacctcagacagcagcatgaatcaaacagactgaggca

SEQ ID NO: 157629 - DNA, 209 bp, Homo sapiens
cttcgttcatacttggagatttactacactgctaggtgaaacagacaaaaaatataaaagatatagaacactgtacctcaaatgcaaaaatcacattattatctagtatatttggaacatatacaaaaattgactatattcccagcacaaaaacaaataacaactaatttcaaaggactgaaatcatacagggtaaactaaatttcaca

SEQ ID NO: 157630 - DNA, 299 bp, Homo sapiens
gctctcctgctgtggttcagtcttgatttttcaaaggcacgggtcaccaagtcgctgcccagttaggtggctgagggagaggctcgtggagaggctcgtggagcgcctcgagcatctgagctttctcaggactcggagctgtgctgttggcgtcagcgtgtgacaccaagaacctcctcacttggggtcagaaatctgcttgattcacttagctggtttgatgccagtcctccagccacacaccctgccctcctcacactgtcctgaggatgccgggttttcgtgtcctgactcctggg

SEQ ID NO: 157631 - DNA, 525 bp, Homo sapiens
gatttattggtctttgggggaatttgatgcatcaccactatattagaactgagccattaattttgtagcttcatcaatattaactactttattttcatgatgctgctgaggaatcagttctttctacagaggttcaagagaaagtccttttaagaagtgtgcaaatctcgtatatttattagattggtgcaaaagtaattgcagtttttgaatacaaaagctttatctactctgttgactttttcatcattcataacgtttaacttttttttccccgagactttttgctccccttgcccaagctggagtgcaatggtgcaatctcagctcaccgcaacctccgcctcccaggttcaagcgattctcctgcctcagcctcccgagtagctgagattacaggcacacgccaccatgcccagctaattttgtatttttagtagagatggggtttcaccatgttggtcagcctggtctcaaactcccaacctcaggtgatccgcccgcctcagcctcccaaagtgctgg

SEQ ID NO: 157632 - DNA, 473 bp, Homo sapiens
aaatgctttaccctctgccccaatgcttgtcctctagacattcccagagcaggttccttcatgccatgcagatttcagccaaaacgcacctccttaagaagccatctttgaccactcagtctcatttacctccccttcccctacagtcactgccacatcaccttgctttattttccgttcatttatttcttgtttcctgtgtgtcgcctgcctccttcactagagtcaaattccacggaggcagagacggggtcggtgtggctcacaggggtatctgccgaaccccaaacagcgctggacacacagaaggcgctgggagaaggaagaggcctctctgaacctgttccctcacctggaaagtggggctaatcacataaccctgcagtctctgaggtggttgtgagggggattcagagaggggacccggggagctctgagcgcagtgccaggcccggacgtggtcaccgccttgt

SEQ ID NO: 157633 - DNA, 653 bp, Homo sapiens
aataatgtatttgaaaatgttttataagctataaaacactacagaaacacaagagtatctttctttcaaattcatatcataaacttttttagaacaggaaggtttgttaagaatattcaagagaatgtaaacaacagatgtatgtgcatgtttataccaataagagaagtgggcagaatttctttctcccacaccaagggaatttcctgattattctttgggcttgggtttaatgaatattatatactttgtacgtaccagtgacgttttataacttcgagatgcctttgattaattaacaagtgaagtgaataaagtgaaacggggaaggccctctgggctatttaattgctgaaggatagagagcacacatagagcttgtgtttctcatgtgttgttctcatagatggatccagcgatttttgtacatgggaaatagaatggtaatgggaggtttgggggtaaagattctataaaggtatgtgataaaatggaaagaatgtgatttggagccagaagacccaaatgtggtcctgattatgccattcactggctgagttatttgggacaagccataaccctatgagaatcagattcctcctctgtaaaatggggtttttgtaaaaaaatcagacttctcctctgtaaaatgt

SEQ ID NO: 157634 - DNA, 344 bp, Homo sapiens
acatggccgatcagagattgaattacttcacataagaattagggctgcagcaagtctcgagtggaaggattcagaaagtcagtatgaaaccataaaagtaaatgcccccaaactcagtatttcggtacctctcacaaccatgagggcaaccactgctagataacaactttctcatttccttccttctcttcccagctttcaacacaaccctggagcattcagacacaacacagagataagaggaattgagaaatttgtgaaaatggaaaagaaactgatcatctgatcatgtgtccaatctctactacaggttttgagcttgaattaggctcatattgtcaaaa

SEQ ID NO: 157635 - DNA, 662 bp, Homo sapiens
agccaaggccagtccctcagttgaatccctccagagtcattttgcaggacaaggactgtagaaaggcataatagaacacccataatgttgatactagaatctcttctgtattggggttatctaagaaggaatctggtcacattgattctccctccatcaaaatgaggatttcaagagaattctcttaattaatgaacagtcacctggagcactcttttcatatgcaggttccggatcccacctgagattctaacctagtagactggtgatgaactcaggaatctgtctggttaaacagttctttgagcagtgctgataacctgccagatttgggaaccactactgtatggaccagttttcttcaattccctgccctcacaaaaactaaggagatgatggctaggattaacagttggccttgataaggttggagctgttttctccaacttccctacaaaagacagagaactttcactttgtgatccttaaagtagattcctttaaagtagaaaatattttacatgtaacccaaatataagatgagaattactttaaaatgagacagagtagtaaaattccattaataaagtctgtggccttttaaatgttgcatatgcttttcagtctgacataagtatccctcttttgactcaacttccttt

SEQ ID NO: 157636 - DNA, 403 bp, Homo sapiens
aaaattctatgggcttttctttgatactaccgttttcaacccgtgtgcacacatgcttcccagatagtctaccgtcctctctttctttgtgttcatgacgatgtgaacactggcatctgtttagtggcagtcctggctgtccttcaagctagcacagcactgttgaacaaaactttgccagcattacacctcctttccagaatcaccattcatccagtgatggctgccttctaacatccagttcctctgttcccccaaatcctttagtctgagtaccatgggttgatattgacaaatgccttccctcactctggtgcaagctactgccatctgttgccagccaaagctttttaagtggcttcctggccacccaccatgctaccctctcatccactgcctacat

SEQ ID NO: 157637 - DNA, 577 bp, Homo sapiens
gtttgaggctgcaggcagctatgatggcaccatcgcactccagcctgggtgacaagaccccatctcttttttttaaagaagtgatttttccctattctgatggtgctaaatcaattacttatttaattctaatgatcttatataaaatgttgacctgaaatagtcagctgtcccagcaaagcatcatctggggtaaaaaaaaaaaaaaaccatgtagatcagctttctgtcaagtacaacttccactgctataattatgcaatcatcaaccatcactgcaagacaacaaaaaccccaaagctgatgttactgaaattgctaaatacaataattactagggtctcaaaatcatgaccaccaattcctttaggaaagcaacagaaatctttgtaattataagggaaaaaggctgattagttatcccagatggtggtctctacagcagaaggtttttggtcactggccagaatggcagcatacacagaaatctttctcatattgctgttttctcacactcatactatgaaagcacaatatcaacaaaagaacttgaaagaaagaaagaaagaaagaaaga

SEQ ID NO: 157638 - DNA, 633 bp, Homo sapiens
aaaaggtaagacaattagaggaccagcctgagaggaccagcatccaaataagatgagagctaaaaaacgatcctgcagcaacaacaccacaaacaaaatgagaagacaagaaagtatattaaaaaaaaacaaacaggaacaattcccaaatggaagaagtttacttaatttccaggccaaaggatgaaaatagaaaaaagaaggtgtatcattaagaaagaatacaacactaaggaaaaagatcttaaaagcttctagagattcaacaggggagctctgatgcacaagatgagaatctgaaaggtatcagtcttaataacaatactctaaaggaaaagacaagtcttaaacatttggaaatacagataagaacctgaaaagagaattaatgcaaactaactttcattcctgaccacatttcctgtcaacaatcacaaaacagttttagaaatactaccagaaaagatttagacaaatcaagaaacaataagacaaacctagactgaattctggctcaacgtctcactagctctaatcaatcacttgcatctttgaatctcagtgtcaccatttttaataagaggctaataatatctaactcatagaattattccaagaattaaatgtgataac

SEQ ID NO: 157639 - DNA, 533 bp, Homo sapiens
caggtgttaacaagtaggttacattccgaacccctttccctttccctccagctctcggcctcctctgacctcaccagtatttattaacttttaactctgcattcttatccctccctgccaaacactcccaggaaaacctgaaacaacaaaagttctttttccaagttgctgcttcccttcagcgcccacacacataaatcaaggaggacagagtacagcaagaacagcacaggagtatatccggcagacacgcagaagaaacccgaggagaaacacctgcctcccatcgctgcccctgccaatcacagttaaccacaagaacacttcggctgtagtcagctaaggagaatcacataagctcagaaagcaatacaaaggggagctgacttctctgttgcaccttcaccctacttagggacactaagggttcctgcctggagaatgaaaacaactccttagatctaatcgttttatttgttagtttaggacattcctccagaatacattaaagtggctttcttcaaatacacctg

SEQ ID NO: 157640 - DNA, 714 bp, Homo sapiens
  misc_feature (293)..(293): n is a, c, g, or t
ctcagaatggcgggcacaggtttggtggctggagaggttgtggtgtgatgcgctgccgtattttgatcaaggttatgaagcctctggtgtgcaggaagcagctgcagtgctggtggagaagtaaactcgcagataccaacctactatgaactacctgagatacctgacagtcctggattattcctgccgtaatggaacactaggacattacatgacgacaactgcaattctgacacagaacttggtgtcttgggctatctgaaacaaaaccaaaaatctgaacacttatggcntacgagggggagttgcaaacagcgatatgaacttccagccccttcctctggtcaaaaaaatggcattactgcatggcaagaatgtgtaaacaattctatggcctagttagagcatcaagcagttacaactgagaatctgaaactaatgtcacagcatggatgtaatgcctggaaagtatacaatgaaaatctagttcatatgattgaacatgcacagaaagaacttcagaagttaagaaaacatattcaagatttaaactggcagagaaagaacatgcaactcacagctggatctaaattgagagaaatggagtcaaattggatatctgtagtaagaattatgagactgaacggactatttttcaactagaaaatgaaatctatcaaattaaacagcaacatggaaaggcaaacaaagaaa

SEQ ID NO: 157641 - DNA, 327 bp, Homo sapiens
cagtattatagaggtgaaaaataggagttgacaggggttagtgatggcagtggtgggaggtaggaatgtgtgtgattatgaaggaatagcatgagagtgttctttgtggcgatggaatagttttttcatcttgactggggtggtagttacatgaatctgcatgtgataaaatgatatggagctatccatgcacattttaccaaagtgaaatgcttggtcttgatatagtactgtagctaagtaagatataatcactgagggaaactggtgaagagtacctgggatctcaccatactacctttgtaatttcctgtatatttatatttc

SEQ ID NO: 157642 - DNA, 455 bp, Homo sapiens
cagcagcctgctccttcctttactcgctcatttattcaacataatacagcatcactatggctgaatataaaatgagcacttactttatgcttatttttatttatttgtttatttaattatttatttttgagacagaggcttgctctgttgcccaggctgcagtgcaatggcacaatctcggctcactgcaacctctgcctcccgtggtcaagcaattctcttgcctccgcctcccaagtagctggtattacaggtgtgtgtcaccacgcccagctaattttttgtatttttagtagagatggggtttcaccacgttggccagcctgttctcaaactcgacctcaggtgatcaacctgccttggcctcccaaagtgctggcctcccaaaatacgggcgtgagtcaccgtattttttttttttttggagacagattctcactctgttgcccaggctg

SEQ ID NO: 157643 - DNA, 191 bp, Homo sapiens
tggtagtaatatagaggatccaggttttattttttgtagatatggtgtcttgtatgtagcccaggttggtgtcaagtccttgtgatcaacctgccttggcctcccaaagtgctggcctcccaaaatacgggcgtgagtcaccgtattttttttttttttggagacagattctcactctgttgcccaggctg

SEQ ID NO: 157644 - DNA, 218 bp, Homo sapiens
tggggaggggatccttgtggaaaagggaggaagaaagggatgtggggagccctgtggaggagggcggaggagagcagagaacccggaagagggaggaggtcagagtcgaagcagatgtgaacagaggaagaagaaaaggggtcaggagagaacaaaggaaaagcttgaaacagaggtttttctggagcaaggactggggcaggcagcccaggtagggg

SEQ ID NO: 157645 - DNA, 332 bp, Homo sapiens
acatgtcttctcagcagaatctactctgacagcccacataccctgccgcctgcttcctggctccctccttggagtgactggtgtgtacaagacagacagagcttcattcagcacatcccattccattctgtggtccagtgcttgccagctcccatgggaccttagagtggctgattgctcttccctcctccctacaaatttacattcctgccttcccccccttcaactggaatcttaaatagtaaagctattcattgatctgcgagcttggaaataatagattagaagggaagaaacattaacacaaagcagaagtatcctgaatgcatcat

SEQ ID NO: 157646 - DNA, 189 bp, Homo sapiens
ccataatcctatgttctcgttgtcaaattgttaagcaaaggattacaggcatacaggaggcatggagagtatctgcgggactcacaaaaaagaataagttaactgtcatactattgattgtacactaggtgacaagtaaggaaatttgcaaaggaagaggaaagaaaacataggcagagggcataaagt

SEQ ID NO: 157647 - DNA, 410 bp, Homo sapiens
atcattcttaagatgatataagctacatttgaagaataccacaacagtggttttaaacatttttgaattgactagtcagaaatgggcatagtttttatatgcagttccaattaacaagtgaaaaaaattacgtcttgcaagtaacatattgaaagctgagtaaattttagagcatggttaagtagtaaataaatttatagaattatctaaatgtttcttgagggagaaaaagccagccgatcaagacattcggataattttttatattgtacagaccttagtaaagtcttcaatttaataaaaatcaaaaagccaaaactaaaaggtcaaggaaaccttgccattctctgtaatctaataaaatgggaggaaaacttttctcaattaggaaattacttctagcagttgaa

SEQ ID NO: 157648 - DNA, 493 bp, Homo sapiens
tctgtcagatctcagttccagaaaatagctgtccttcttctgaattactggttcatctgtaccttactcatgcccccaatcttatttctatctttgcactagctttgcagaagctcagaggcaactatgtagttcatgtctagcaggaggacttggattcgatttgttgatcccttggtttcacatgccataatttccttgcttctctacttttctcacttattttgttgtgagcattattgtaagcagccttaaatcctgttggaacaaggctgggtgtaaattaaaaaacaaatcaagcatccattcctctgagaggttatataatcactgagaataggcttccacatcaggacaggtttcatgtcttagccttgggactacatgttttctctttcccttctggacactactgacctctcattgtcatgttggacttgattctatcagttgtgctcatgctttcccttgaatctagataacctgtaacttc

SEQ ID NO: 157649 - DNA, 524 bp, Homo sapiens
ggattacaggcgtgagccaccgtgcccggccaggttggattttataagtagttgggccactaaaatttctgagttgtacagtttcatgtctttagttggcagaccaaagctgatccactcataaaattttatttagtgctctcctttgacgtgagacacgtggtatatttattggcaccgtaatactggctacattatttgacctcatatttcagtttgtgttgcaaggttttgggcattagagctaatgtataggaagccctgtgcttacatatgctgagtatgagtaagtagtgggttaccaactgtttttgatgaaatatctgcatttcaccaaattgccatataccagtctcaaaatatcctgaaccttctgaaataccttcctaagtgagctcactaacacctacttttctgtgtcctttgcggagaaggctgatttggactgagaaagccctgtgtgcactggccctagcaacccaccgttaggcagctagggagggacccacctagggcctagctcc

SEQ ID NO: 157650 - DNA, 650 bp, Homo sapiens
cattttcacacaaagaatcattcacacaggttactggttatattactttcgctttatgtaattaaaatatttaaaagctgtgaaatcaacatgcatctgaagctttactgggttacacatattgttaggtgcactattttgcaacatacaagggtccaacacgaagccacggtcacaagtgacacccgaacacccacaagagccctctgctcctcccacacaagttgacgagctccagtttcaggacgcctgtgcctgagtctctgtgaaggccgcatgtaggtgtgtgtattctccaggaaaagagtccactggttctcacggattcccaaagaagtatgtatctcaaaaagctgtagaaccatttctactctggtctgatgagttgaacaaatacgccttcatttctcatttaatatcaagcactatattatcttcaaaacacagatcaacctggattgaaactgagattgggccagatgaaattaagtgtcacaactgtaaaaatgttgggtatgtcatgcttcctcaggctttggaggcccaactttttttttttattttattttttcgtttttgagacggagtctcgctaccttccaggctggagtgcagtggtgtgatcgcggctcactgcaagctccgcctcc

SEQ ID NO: 157651 - DNA, 496 bp, Homo sapiens
tggggaccgctcctgttgggccccagcaaggcgccctgagacccctgctccatccctgccgctccccacccgcctgctcctagcctctgttctagctctgcccgcggcggccacagcctccccgagccgccggccgggccctctgctgccctctggcggcccgagcgcgcggtgccgagctccgcgcctgaggccctgaaaccccgcgtccgcccggcggtcgcctcccgggaacaagagcccggctggggaccggagcggaagggggctggggctggggctgtgctctgaggactgcaatatacggtccgcgcaagcactcagcaaacgctgctgcgcttactgggttacttactagattcctattctctggggaaactgagaaccaaagaaaataagtgtacgcgcgcgggaggtgcaggaatgggggtccttgcccgaagtcgcagagggacaggggcaccgccgggaccagaaccccgacgcccctgcggcc

SEQ ID NO: 157652 - DNA, 240 bp, Homo sapiens
ctcaggggcccaggacgtggctggtccccatcttcaggggtattcatgggacaggctggagacgccgggtgctaagagatactgggctgactgtgaaggaggctgggaccaggccccctgggtcctcccaggacaccctgcatgggcgggccagacttagcccgggtacgccctgctcaggtctacagtcaaacgcccatcctggtctttccccatctccctccttatggcccccacccc

SEQ ID NO: 157653 - DNA, 416 bp, Homo sapiens
attacaggtgtgtgccaccaggtccagtcttgggaccacattttgaaaactgctttacacattagtttttctaaaatgctaatctaatgaaccacaaacagggctgagaaatcaaagttctgacaactattctcccaccactgcatccagtgaaaaagctgggctctagagtcagactgctacctgtacctcagttttctcaactgtaaactgcaaagaataataattgattctacctcttgggtttgttgtgattaggtaaaacatgttaagtgctgagaatggtgactagcacatgttcaaaagctccataaacattatttaatataacaatttatgctcatggcagctaaacatagtatgattttatctttgttatctcctgtcacctattctttcgtcgacgcggccgcgaa

SEQ ID NO: 157654 - DNA, 360 bp, Homo sapiens
attgttattagcatccctgtttaactgaggcccaggggtaacttgcccaaggtctccagcttttctgtacgagctgggaatcgaagccatgcatttggctttagagcaccatgctcttgagcacatacttgcctgtctctggggaatgtgagcgggctcctggccgggcctctgcccactcctggctgctggtagcacccccacccatcatgaccacagatggaactagctcttctgttggtttgatcagtggcaccagtaccctctggctactccagctgagagtcctggattcattttcatcaactctctaactctgtcaactggtctcttggttactttggaggcctgctaagggtg

SEQ ID NO: 157655 - DNA, 108 bp, Homo sapiens
ggcaaatgcatcttattgttttagggcaaaaaacttaagctttcttctattaaagtgatttaataagcactttgtaagtgtgtaatgaggatgatttgggttttatta

SEQ ID NO: 157656 - DNA, 176 bp, Homo sapiens
  misc_feature (24)..(24): n is a, c, g, or t
  misc_feature (48)..(48): n is a, c, g, or t
  misc_feature (55)..(55): n is a, c, g, or t
cgttcacaaacatcagcaactcantatctgatgtatggggtggggganagggtangaagtcaatattgctggtacaaggctgggacaagagtgaattagggagaaaagaaagaataacattccagaaagaatagcacgaacatcaaggaactcaatatactgatgtattggggtgg

SEQ ID NO: 157657 - DNA, 957 bp, Homo sapiens
gtataaaaagagtattgagctggaacaaggcactaaggacctcataagagaagaaaagctaaatgattgctcagcccaaaggaccctcgattgagtagtcattgtctgccaaagaaagcattaatggcagggtgtaagtattctggagatacgctgacattcactttttcatcaagacgctggtacaataagtcttttagaaatcgattgcctcttaaaaaattatcatcagatgaagttgcacagttggacacatttcaaagtgcaacaatacaattcttacttgatgtatatgtgctatttcatctcaaacccttgtttcattaaattaaagagcatggctgaccggctggggcacagtggagaaattgattagttcagccttcagatcttccttatattcaaagactttcattaagcaagtgtgtttcagagttgaattttgcttttgtaactccgcactctttgatttttaattcatcatagatttcataatgttaagttatcgtgtacattagatctgttctcagatttgtgtttggaaagagattgtgattttcagggccttttattaataatgtaattgggcctttaaaaatgcagattttactatgatttacaaagttggtagcctactttatgttgggtttgtgcctttgtttttgtgtgtttctcagtggctagtgccttattcaggcacttgtaacttcttgatagtaaatgggctagaagatctgtggctaacatctatcgtcatttaagtgaattatgcaaataaacttggcctaggcggtttaatctttttttttttttttaatttactctgaagggcacttttttttggataacagatattatggaagagtaagaggagactgagctttttcttaaacccataaactcaaaggatttaataacctcattgactcttttacaagggaacaccacctcagtgtg

SEQ ID NO: 157658 - DNA, 363 bp, Homo sapiens
acaacgaatccactcccgacacaaaagcatattccatccacaggggcaaagcctcaggcctaatctcagaaaggccccaacacggttacaagagcaactcagcttccagcacgtgaactccggggcactagcagactccgcgctcagaacattggcacttctcatttgaactctatcttcacacaccctgcgtgaactgggaagcgccctcagcaaatagactcatgtggctacactaagcttgttcactttgcctcccgccttgcaagggttttgcccttccagtttctgtcagcttctgggtgatctctagtgccttcaaactgttgttttaatatctaatacagaagctatcatcgttat

SEQ ID NO: 157659 - DNA, 472 bp, Homo sapiens
tcttagcatctttaaattgctacataatatttttatagtatgtatgtttctacaatttatgtaacctaactctttgttgtcagagttgtttctaaatgtttgctattacacaaaaaatagtggtgctggcacttggcgtgtctttggaccattctgagtgacaccccaggatgtacttctaggagaggcgacttgctgagtcggaggcgcacactttaatgtgcactgtcaaggcttgctggggtcccagggctcacgcatccctttctctcgctgagggccagtccacccacatcagccgtcagtcccggtgccagcccggagcgggagggggcccaagcccgcagcacccggcgccttttgtgtggcccgagccctggagaggctgagggcgcggcgggcatgtagcctgcggatggccctggcccgcacctgccagaagtgtgtcgcgtcggcctggtgcggggcggcc

SEQ ID NO: 157660 - DNA, 335 bp, Homo sapiens
accatgtaattcagggaagctttagaaagaaaacctaggggatctgttggccatatcaaaaaagtacaagctacatggacagtgaggtgatactgtaatacttccacctgtaggtcaactggagagacttggttttttccaaatagacctagcttaattgtgatgacgcatgccaacctaattaacctcctaatgttacttgtctttgtttttgtattgtcaggaacttggtgtgtgggttgggaatattagaacataatagaactatgtgatgtctaaattgagctttaacacaaactggttggtgttattgagggaaagtataacttattagt

SEQ ID NO: 157661 - DNA, 528 bp, Homo sapiens
taaattttactttctaagatgagtaatacagatactcaagttaaccaggatgttagtctgtgggtcagtgatcaggtatctccaagtcaagacattcctcagccgcccctgtggttgtcctgtgaggtggttggtggtgagggtgggcctggggggagacaactgcaacaggaggacctctggattacatacccaagttccctctcaggaatgtggatgctaaaagtgaagtgctgataacaaatctcactggtatgaagtagattttacaagctgcttcagtctcaggctatatctcaatttatggggcggcgtcattgctgaaagttctgtgtaggtcttttaccatagtattgaattttacattcattataatgctttttattatgagctctaattccaagttagttatttttaattcagaaagaaagtaaatatttgctttctggaggtaactgcacttgagtatctgcaaggagagcccctcaagttctgtttttggggatcctccccttttgaaaacactaa

SEQ ID NO: 157662 - DNA, 270 bp, Homo sapiens
acaaaccactataccagtattggttcattaattttaacaaccgtaccatactaattaagatattaataatgggggaactgggtgtggagtatattatataggaactctctgtaaatccaaaatgtttttctataaatccaaaacgttctaacacaaatttcttaacttatgtaatttgaggcattaattaaataattcattcactcattcattccctactctgtgtcaaggtgccataatagtgaaaggaaatacaagattcctgttgtc

SEQ ID NO: 157663 - DNA, 502 bp, Homo sapiens
taagatattctgatacagtgtgtgtagaagcactacattaatttgttctttttttttcattgcctttggagattatacaccacattaatttcaatggtgacataggatttcatagtatggaggtagaataattcatctgatcacttatctgatagaatgagttctttagagggcttggtgagagtgagacctgggctaatgtccaggtttagagtcaggacacctgtgacattatttttttcttttttcttttctctcgcaattttgcccaggctgattctgaactcctgggctcaaggcatccttcctctcagcctccagagtagctgggattacaggcacgcatcaccgcgctgggcaaaaaatccgtgtaactgtaatggaagggcttgagagcagttgcggttcagggctggccttcttccgcagatctgcagtcttaccacggggcggcgctggtgagcaagcctgcgctgggacggctcctgcaggaaaggcgagg

SEQ ID NO: 157664 - DNA, 584 bp, Homo sapiens
aggaatgagacttcatggccaaggatgctgggagatggggaggatacagggagggagaccggtcctgggggcatcttgggggtccccagggctgctcccaggaagaggggccagccggacagaaggggaccgagcctctgtcccaaaagtccctcctttgtctgtcgctactctaacctaagcagagcggaaagcagccacaacagcggctccaatgattaacttcctactgtataccaggattcagttcccactgtataccaagctccagcttggtcctctacaaacagaataaaaacagctggtatttcctctagagagtcttaggtcaccccaggacatcccgcatgtcccaggagacccggctgacactgttctgagtctcacagatgagggcctgaggggtccctgacctttctgtgggtgaagggacctgcccataatcacctagccagtgagaggtgtagcctggggcccaatccaggccatctaccctcggagcctggctcagccccgccaccctttgggaatctgggtcaaaacatggcgcttccctctgattccacagctccacactgagaaca

SEQ ID NO: 157665 - DNA, 351 bp, Homo sapiens
tttctgggagtaagacagcaaatggagctgagctgcagtatccctccttaccagtggatggcaatgccactcacagtttgacctatttgtgctacgtggtcaagaaacgctaatgtttacgctttcattgcctttgatctgaggctacatcaggagctataaaatgaactcgtcccctgaaagctcagcaagtttgaaattcaataatttcaaatgtcagacaaaagccaccaccataccctgacaaggccagcctagggatttggattgtgctgacttggcatttgtggaataacagctggtcttgtttactgagcagcctcatggtgccagacactgtgctgggccctt

SEQ ID NO: 157666 - DNA, 331 bp, Homo sapiens
gaaaattgtaggttaaatgtttgaaatgggtacatgatatagatgttgaccaatccttcacatcacattgagtggtctgaacattttggttacagtaattttgtcttttattatttgttgttaatctgtaagtacttacttcagttttgccaactcattattatttctaaataaactattttggaagcaatgaaccaaaataagtgcatatgtttattgaaaacttaagtaccaaatctccatttcttaagaaagttgatgataaatgtataaattgcctaaaatatgtgtctacatttgccatctatcatgggagtcagagagatatcac

SEQ ID NO: 157667 - DNA, 369 bp, Homo sapiens
gcactgtttctttctgactggcttcacgtgtgttgccactacaggaagagaccaagtcactggtaaaaagctagggtaaccaggagaaatggccccttcagatgacactgtgagagtcaacaaggtaagaaagaggaagctttaaaatcaccaccatcatcatttttgaaatgtggaaagttagttatgcatggtgcttgcccttgggtaccttaaaattgaaaacatataagcaaaacaccatatatggcctggcacagtgactcatgcctataaatcccagcactttggaaggtggaggtgggtggatggcttgagcccaggagtttcagatcagcttgtgcaatatggtgaaagcctgtatctgcc

SEQ ID NO: 157668 - DNA, 656 bp, Homo sapiens
atcttagtcctgtaaatgaaaagcatgttaagttttagcaatatttgacacgttaaaacttaccaaattcccgatatgcctcaaaaaacatctttttagggttattcgttctaagagatttgaacacaaagtagcaatttgattataccaaggaattactgttaatttgcttagatgtgatacagccctgtggtttaacaatgtccattttaagagatgcagataagtttctgagatttgctttaaaatacttaagcatatacacacccaacactggagcacccagattcataaaacaagttattctcggcttacaagaagacttagccacacaataatagtgggggacctcaggctgggtgcggtggctcatgcctgtaataccagtagtttgggaggccgaggcaggtggatcaagaggtcaggagttcgagaccagcctggccaacataatgaaacctagtctctactaaaaatacaaaaattagccaggcatggtggtgggcacctgtaatcccagctactgaagaggctgaggcaggaaaatcgcttgaacctgggaggtggaggttgcagtgagccaagatcatgccattgcactccagcctgggtaacaagcgcaaaactccatctcaaaaaaaaaaaaaaaaaaaaat

SEQ ID NO: 157669 - DNA, 490 bp, Homo sapiens
tcgactctaggtaggatcccccaagcagttatacgactcaggggattggttccaggaatcccaccaatggcaaaatccacacatacccaagtctcaaagtccactctgcagagcccgcttataggagaagctgggcctctacacacatgggtttcacatcctgcaatattttctgtctgcaattggttgaaaaaaaatcctgagtcgaagtggaccctcgaagttcagatggtattgttcaagggtcagctgtgtattctttctgtcagggttttctgtaagttgggaatgctgaaaatttctacaactgtctaggtctaactgtctgcaggtgacaaatgtatttctgaaaattagatagtaaattaaacctgatcgtgatttaaaggctctgctgagctcatatgtaaagcaaaagtggttctcagtttaatttcaccaatctgtgaaaattttcttttttttttttggagtctgtatctctgtcacc

SEQ ID NO: 157670 - DNA, 316 bp, Homo sapiens
atgttggttgctggttcacagcacattgctgtagcacaggagttggcatgcttttttctgtaaaggaccagataataaatattccaagctttaaagaccacacatgattgatatctgtcatgtattcttttttgttgttactgttacaacccttaaaaagtgtaaaaaaaaaattcttaaaatctgtccaaaaataggatttagggcatatttgccctcagactataatttgctaatctctgctatagggcgacatcctaactttgcaaagcattccttccctgctgggaaacaaaagacacatacacacaaatgt

SEQ ID NO: 157671 - DNA, 391 bp, Homo sapiens
tgcctgcatctatgtggaacccctgtgtcagggctttcagagctggtgaatgcgcttgaccatcctcagtggctgcaaatatctctcctggaaaacaacagtgaacaaatgcaggggcttctgccaagacctcatgttccgtaaaaatccttcaattagaggatatgaggatagtgcactgattatactatgatactatgagcacacaggaaatgagctggctttaaaaacaatttgagaaaagcttatcacagcctcaagaactcttcttaaggccgggcgtggtggctcacacctgtaatcccaaagtgctgggattacaggcatgagccactgagcccggcctagaataatgttttttaaatgcataaaataaaatacataggaattg

SEQ ID NO: 157672 - DNA, 169 bp, Homo sapiens
taatagcggcattgtttctctttcccaaagcaaccataactgagacaggattagatgcaaaaaccacttgctgatacagtttagaattgcaaaattctaaattccaacagattcatattatacacaagtataaacagagtgtagccagttttcctcaaagagataacat

SEQ ID NO: 157673 - DNA, 176 bp, Homo sapiens
gcatgtgtgtgtgtctgtggttgtgtttctgtgtgtatgtgtctatggatgtgtgtttcagtgtgtggtatctgtgtgtgtgtgtgtctatgggtgtatctgtgtgtgtctgtgtgtggtatctgtgtgtctctgtgtttgtgtgtctatgggtgtatctgtgtatatatacctgt

SEQ ID NO: 157674 - DNA, 612 bp, Homo sapiens
tagcaactttttctcatgacttttttggcaacacactgctataaataaacatctctcactgcttaaacactagaaccgagttataatttaatcactgatattccagaggttaaaagtaggtttcataaagtatgttctacttcacagaaccagaaatcgaacacagtgaacaaccagttcaccaccctccgcaaatctatggaaatatttccattacaaagtaaatttctcctgccacgcaagttttaaactgtcactctgcgctgttagcctaaacaaaacataattggtaaggtacatctgccacatacagaagtcaataatccattccaaacccaaaatatttctggattatcttgctcctgaaaattgacactggtagaaaattagtgatccagaaataggcaacttccactaaaaggcaagtaaaattaggtaagtaaaatacaagactgacataattttataataaagggcaaaattttaaaggctcaaatgtcttagtgaatacaaaattaaaggaggaccgaaagagaagttaaaaattcagctttttacaaaagaaaaagcaccttccactccacctctagccctaaaaaagtctttcccctt

SEQ ID NO: 157675 - DNA, 421 bp, Homo sapiens
gatggggacatgggggttcatcctgatattttcaacactgttttatatgtttgaaaaaatttaagtacttgggaagtgaaagtgctcagagataccagaatcaaagtgggatgagattaactttgtttgggtgttgctgggaagactgcatggaggaggtgggaactggtataagatgggaagaaacggtattcccctaggcaaggaggccactgcttcctgagagtcagcgccatctgaagaggaagggagatgaagctgggtgccgaggaggaggaaaggttagaaagtggcctgagcagctctataaaacgattcacttcatttcttttgttttgttttgttttaagacagagtcttgctctgtggcccaggctggactgcaatggtgcgatctcagctcactgcaacttccagcctc

SEQ ID NO: 157676 - DNA, 401 bp, Homo sapiens
aaatgcaaaggacccagagtagccaaaacaatttagaagaagaagaataaagttggaggacttcaaaacttactacaaagcaacagtaatcaagagactatggtactagagtaagaacagagattagatcaatgaaacagaatagaaaggccagaaataaacccttctggttacggctaactgattttcagcaaaagtgtcaaggaaattcaatgagaaaagatggtcttttcaacaaatagtactagtaacattggatatggatatgtacatgcaaaacagttgaccctcacctcacaccatatacaaaaattaattcaaaatggatcacagacttaaatataagagctaaaactatgcaacttctagaagaaaacatgagaaaaattttaagatcttgg

SEQ ID NO: 157677 - DNA, 460 bp, Homo sapiens
gatcccacaggtccttaagtctctgctaaaggtcccatcccagcaaagccctcttctcctattccttaccagtactccttgtttttcgcctacatagcacctactgtgactttaaacaaataatgtatttattggcatacatgttgactgtccgtctcttcaacaagaccagaagccccaggaggggaaatgtttatgcttcggtgtctgcacagtacctagcacgtagccataaataactatcaggtgcatggataagccaccaatcaaaccgaccatcaggagcctgggcctcaagcctaggagggcaaggccctgccacatttcacgagcattcctgaatgtacagctattcccgtattggctagagctataaagttcttaaacatttcagcaattgggaacggtgggcagtattcagaagcatcacaaggctccctagatgtcagcaaacgagtac

SEQ ID NO: 157678 - DNA, 387 bp, Homo sapiens
ggacatgttttaatccgtaccactcaatgacttctggttgaagacaataagatataaaaaatatagttaaagatacccctgggaaaaattcgaggtgaatggccaggcacagtggctcacgcctataatcttagcactttggcaggctgaggcaggcggattgcgtgagctcaggggtttgacaccagcctgggcaacaaggtgaaatcccgtctctactaaaatacaaaaaattagctggatgtggcaacagcgtgtacctgtagtcccagctactaggtaggctgaggcaggagaattgcttgaactcaggaggcagaggctgcagtgagctgagatcgcaccactgcactccaacctgggcaagggagcaaaactccgtctccc

SEQ ID NO: 157679 - DNA, 568 bp, Homo sapiens
tgatgctgcggtttgatctagaggatcccgcgccactcttgtaccttaagtgatccacctgcctcggcctcccaaagtgctgggattacaggcatgagccaccgtgtctggcccagggtctcttaagagattgcaatcatttgaaaactttgagttaacttgtacgcagcaatagataacttacacatgtggtcgtagcctcatcactggggttagaggatccacatgagaaagagctcattcacacagctgttggcaaaaggcctcagctcctggcaacatggaagctgcctttccctggaacaagtgatcagagaaagagagagagcacactgatcggcactgtatctatataacctagtcttggaagcgatacatcaacacttctctcatattctattggccactgtattagccatgtctttgattttctttattctgatgctttgacatctggagccttgctgaccccactggagggaccacctcttccaagagttcttagggatagagaacaactcacctgagagtgtgcttttcaaatgcaaaccaaccagtccagagcgcg

SEQ ID NO: 157680 - DNA, 604 bp, Homo sapiens
ctttggcatctgacccccagacggtccccagtaggtgctgacgaatgtcccgcctgtcttcagacacactcgtaccgggcacaaagagagacccaggcatcagagatgttctcccagtggatacagagctctcagtagcacctgctgatcacacgagcaggtgtgcaccaccttacctgcttggctgacatctatgccttcccactctactacattcagaaatttccagtacatacaggtactggaaaggtcgagctgagccctgcctcagccccttcctaacgatgggagcttggactccagtctgagcctcatctttcccgtatggaaaatggcaacaacgataatcatcaaccttatgcggttgtggtgagggtgaaatggacatgatgagactagcagagctcctggcacacagtaggagctcaaaacacgccagtcctggcacacagtagaagctcagtaaacactagttctcttcccctttgcaacccaacgtggagactcagctcagcttctgagacttggccccacagcacaaagcaagaggaccagtagctgacagaggaaaggaggggagtggccctctctgggaccaggaaag

SEQ ID NO: 157681 - DNA, 623 bp, Homo sapiens
cttggtgcgtcggccgcagctccacgcctgtgtccctccctgtgtctggcgctgcgctcttcagctgtgcccaggaggagaggcccggggcggggtggggctgctgcaggtgtcggtcccaacccaggacaggactgagtgcgcacaggcaccagggcccgggagtcccaggcgtgtgccctacgtgcacggacgtcacagcacacgtgggtctcacacaggcacacacagataacgtacacggatgccacagcacacacagcctcacacagacatcacagcacgtgggtctcatgggcacatgcagataacacacacggacgtcacagcactcacatgggcttcatgggcacacagataacacacggatgtcacagtacacagcctcacacagaaatcagagcacacatgtgggcctcacacagacatcatggcacacacagacatcacacaccgatgttcacagtacacatactggcctgcacggatgtcatagatgccacagcacacatgtgggcctcacagacatcacagtatacatgacctcacgggcgcacacagaaatcacacatggacatcacagcacagacgtggacctcacgggcacacacagataacacaga

SEQ ID NO: 157682 - DNA, 548 bp, Homo sapiens
cttggtgcgtcggccgcagctccacgcctgtgtccctccctgtgtctggcgctgcgctcttcagctgtgcccaggaggagaggcccggggcggggtggggctgctgcaggtgtcggtcccaacccaggacaggactgagtgcgcacaggcaccagggcccgggagtcccaggcgtgtgccctacgtgcacggacgtcacagcacacgtgggtctcacacaggcacacacagataacgtacacggatgccacagcacacacagcctcacacagacatcacagcacgtgggtctcatgggcacatgcagataacacacacggacgtcacagcactcacatgggcttcatgggcacacagataacacacggatgtcacagtacacagcctcacacagaaatcagagcacacatgtgggcctcacacaggcacacacagataacgtacacggatgcacactgcaacacagagtaaccacatgctcacagagcgcggacactctggggcaatgatgatggaggggacccgagttcgaatacgcactcggggtc

SEQ ID NO: 157683 - DNA, 475 bp, Homo sapiens
aaatcctcctgtggctggagagctatcctgagtcatttttatttttacaacagcctactatttgaagaaagatcgtaaaagagtatacctctaaaatctctccatataccccacagccctgtctatgtaaatcctggatatgaaaagaaaatggttaaaagattacagaagataaaaaatcataataataaaggttaacaatagctgctttcacccctaatttctgatatggcgatagaccctcttagaacattaattagaatggaaagagagatgaaagaaatgcccaggagacataataaattagcctcttatgcaaattactcattcattttcatcactgacccagctagttgagtctctaaattacaggaagtggttagctcctttaacaaaaaactctgaatgaaagattatctttaaaaaaaatctgagggcttaacgcaacaaataatttctcacttttccttacaga

SEQ ID NO: 157684 - DNA, 499 bp, Homo sapiens
caagcacactgcaggcaccctcaggtgctggtcaggcagaaggcagtgcctgaacccatctgaaccttgctggcacgctttagagaacttaaggggcagaggattctaggcttgggggacactgccttcacctgtttatgcacaagcttccacagaggtctctgtgagaaaacaaagtgtgaaaactcatgcaggcaatagagcacgcaattgagaggcaaacagttgagtttcaaatccctgtggcaccctatcaccgatgtgacaatactgatcaccttccattcttcctgcctggttgtgcagatacgtggacagcacaggggaaaggtaagtggtggcagtgacagtgactagtgttggctgcagtgcagggactggaacaggtggaatgtagggtctcagccctcatttccatttctccctcctgtgtctctcacagccaaaggcaagtggatacaaatgagcaaaaatgatggcctttgattgcaacaggacc

SEQ ID NO: 157685 - DNA, 711 bp, Homo sapiens
ctcctgcttgtagtcccagcaaccctggagactgaggtaggaggataccttaagcccaggagttggaggctgcagtgagctatgatggtgccaccacactccagcctaggcaacagggcaataccctgtctctctcaaaaataaatttaaaaaataaaacgttttgaatttgcgttttcttcaacgtctttcccaaagcccaacttcttttattctaatggttgcttttaagattcattttgaggacaaatcaggctctctcaaataagatgcagtactaatcaaaatatattgacagcagaatatacctttttctgtccatattatgctgtaatggatatttaaattggtcctaggaattcttacaatctggttggaaattttgatttgagttttctttggatgtcactggaaggattaatgagtttctcagaatctttatggtgattgcttcacggtcttgacatatttccaacaacctggagcagaaatgtgagggcaaaggctgccatatactgttaagcaatgttcagaggaccttaatactgctccatatgttacaatatattttctatcttgagcttaacattgtaatacaacttgaaatcttgtgattctatctcgaaattaacatttaatacataatatgtcttgacattcttgtaattctatctagaaattaacattgtagtacatgtaatacatcttggc

SEQ ID NO: 157686 - DNA, 639 bp, Homo sapiens
cctcagcgcaggaagaccttcagactcccagcacggtggccaggaaacactctgcaagcaaaattgccacaatcactcagccttcaacagctaccaccctgataagtcagcagccagcatcgtggaagcaggaccctctaccagcaaaaagattatgactcactgcaggctcggaggattgttactgtcttttttttttttttttttagcaatgaagaaacctctaatgtcacgaaatacaccaatgggtccactctctgctagatggaatctacttaaaatgcaccacatggagcaaaaatctgccgttctaaagcaacgctttatgtagttcctggcttggacacatatgaccaggtggaaatgaccagcaaaaatatatggttaagttagagttggggaagcactgtttttttttcctaactgtagtttttaatatcttttttcctgttttatgaaaagacaatgacgttatcaaaaagtaaatgcaaaaaacatgggagaggagcagaaaagatatctattgggtacagagcttaatacctgggtgatgaaataatatgtacaacaaacccccatgacacacgtttacctccgtaacaaaccttcatgtgtacccccaaacctaaaataaaaatt

SEQ ID NO: 157687 - DNA, 516 bp, Homo sapiens
tttgggcaggcctactgggtgagcctctgtgtcataattcggcatgcattttctttgagctaagctccctggacctacaggccacacaaagcgttgccaaaaatcccaaaaccaaagccacacaattttatgtcctgtgatcacctcgatgtcaaggggccaagttcaacttcctcactgtaccaggttatctctagtgagcagtaggtggtgtggtgtgagctggaggcagggtccctgggggggagtctgggatgggagtggcaggactggtgggcaatgtgtgcccctcccccacagtctgccctggtgcccctggccactagagcattagcttgggtgatggggcatcctcacctagcaagccaagtgttttgaccaaaaatgggtgttttaagcacccaaagctattcatagcctcctgctggaaaactgcaaatcagggaggcaaattagcaaactggcctgccaagccaggaggtgtgttgacgtcacatgcacggtggcagaagtgcc

SEQ ID NO: 157688 - DNA, 474 bp, Homo sapiens
gtcgctctagaggaccccctcggtctacctgtctggtcaagtgattttgatgctggtgatccttggaccagacttggtgaagctcaatgcttagctaggaaagccccaaaaatttgctttattggattgtgtaatttgactacatccattgtttcttttttcaaatgtagagttatatgccacaaaaatattttccgtagcagtaggcatcctaattaatctcgatgtttgtttatagccccattgatggggctataaacttggcagcaaattgttttcccactaatttggcattttccataaaaaacacgtatctgttgttagctgcctagacgttagctggacatggtttaggttacttttctcttaaaaagtaaattttaattcaagttcctttaagccagcagtctcaacctggggcagtttttccctccaggggacattcagcagtgtctagagacatttttggttgtc

SEQ ID NO: 157689 - DNA, 671 bp, Homo sapiens
atccctccgacgtggctacatatactactctactagtacttctccagaagcatttaaatatgctagaaaatttctcccattaacaaaacatacgagccaggcatggtggctcatgcctgtaatctcagcactttgggaggccaaggaaggaggatcacttgaggccaggagttcgagaccagcctgggcaacatagtgagacaaacccttacaaaatatacaaaaattagctaggcgtggtggtgcatgcctgtagaggctgaggtgggaggatcgcttcaaccagggagttagaagtaacagtaagctgtgattgtgctgctgtgttccagcctgggtgacagagcaagacccagtctcaaatcaatcaatcaatcaatcaatcaatcaatgtagtgagaccctgtctcaaaacacacacatacacgcgcgcgcgcacacacacacacacaagagaacatttaacatgatacaggtatttgtaagtgccacactgagaggagaccctcttcgttcagtggaatgactgattttcagtctccttcctctgaacattttttgccagctcttccttccctaacctccctcacttttctgcttgaatatttttcatcccatccctgtactgtaaaagtccctttacagaatcatggatccctagcacatgtcag

SEQ ID NO: 157690 - DNA, 629 bp, Homo sapiens
tgatcactcctattttttagaagagtagagaccctcctaaaatcaatcttaaaatagcaacagcagcaaatgaactctagtgcttcccagaatttaatgtgcatgccgcacctggggaatcttaaaatgcagattctgattcatcaggtctggggtgaggtctgagtttctgcatgtttagcaaccgctgagtgatgctgaggctgccggcataagcaccgctctcagccactcaaggaactggtgcatccaaaagccctgaactaatccggcttcacgaggggaagatgcaactataataagggtggccgtggtgatgttgttactaggaggagtggttattgagcagttactctgcaccagatactccatgccactgtggtacaacagaaggaaaatctatccagccttgcaggattttcctaatctctctccaagagtcaacagggaaggaggaaactgaatataagaggattaacattttctttgcaatatgtctcactgccccatttgatagacgaagtaactgaggctggaagagctttggtagcttgccgaggtcccataactcacaagcagcagggccaggattccagctgaggtgtgctctggctttcaagaccatggta

SEQ ID NO: 157691 - DNA, 772 bp, Homo sapiens
gtgagtatgtaaagcagtaaaaatcatccaagagatgtgttcttgtcaatgagtgggagaagaggaaataggtaagagtttcgctgctttcttaagaagtttggcttaaagaggagggaagaggttgaaactggaggggagagattccaaagaacatgcttagaactgatcaaaatgcttcagtcaggaggatgaaggtatggaagggagagaacaaaatccatgaaccaagtccctaatgacagcccagattcagagtgtgaagtggcttcacttgctcacagaaggaagggcagggcacagaatcaggtgagcctgtggggttgtagtggaaaggtaggtgggggtgttgtgtgatgtggccgcagttggtctgtaaggaagaggtggaatcatctgcggagagtgagatggggacattgatgattatggcctccagattatttctttacgaaaaggtagagtatctgaaactggcttcaaattatccaatgtagtgagagttgagcagagtttagaggaaagattggctgtaagttgatgcgtgttgaagctgactaatgtatacataagctttctgctgttctatttttgtttgattgaaattgtctgtgataaaaatattttgaaaataaaagaacgtagggagtctttgaaatggctgcagtggtgaactgagagagacctaaccgaaaggacataaaggccagctggcagcagggaggacttgacggaattggggctcatggatttttagtgggccctgtgtatg

SEQ ID NO: 157692 - DNA, 314 bp, Homo sapiens
atgtttgaagaatcaaataaagaaaaatatattattttattagtgttagaatatcaaaatcttaggcttttatagtttagcacttgattttttaattgtatttttttcattgttttgttaaatattattttgtagactgtcaagtccttgtggacaaaattttgtcttaaactttttgtatttcttaagagtactgaagaattcattttaattaacaggataaaatatggtcttgtattcttaaaaagaaacaattttttctatatttactttgcctcatcttatggatcatgatacagactaaacacaggaaa

SEQ ID NO: 157693 - DNA, 346 bp, Homo sapiens
agggtgcggctcctgacaggctgagctgggtgggaaccttgagggacgtcccctcagacacccagacccaggaagcagccgtatctggaggcgcaggagaggctggaacacgggggccccagcagtcctgtccacccggcatgccatggcaaagtgcagcgtccactatggagagcatcctagggcaggcggaggggtggaaatatggtcaaagagaagaattcttggccttgaaaggactcttagccggctacggagatgagacgggcactcacgtacaccgcagcccaggccctggccaccacgcacagggcactgcaggcatcgtgcttgctcccagggcccc

SEQ ID NO: 157694 - DNA, 162 bp, Homo sapiens
  misc_feature (31)..(31): n is a, c, g, or t
  misc_feature (36)..(36): n is a, c, g, or t
  misc_feature (44)..(44): n is a, c, g, or t
atgtgcgcggtgattctagaggatccgcggncggcnctgagtgnctgggactacaggatagcagtgagattcacttcaaagtgaaaatgacaacacatctcaagaaactcaaagaatcatactgtcaaagacagggtgttccaatgaattcactcaggagcg

SEQ ID NO: 157695 - DNA, 328 bp, Homo sapiens
acagatgaaagctagaaacagcactcaaagcaactcgctgttgaagtttgcagaaatgaatgctttactggcacttggggaataaggaatggcatcttggaggaccagtgagtttacccggtctttggaagagaggtaaaatgtgatgggtggatacactgagtgtgggagacaggggtcttagtgagtctgtatgtttgtttaatgttcccattttggttccaacaatcaagcttgtccatctacagcgtctaaataaagttagacttggctagagcatattctaaagacctggttagctgcttttaaccaatgcaattagatcacc

SEQ ID NO: 157696 - DNA, 1112 bp, Homo sapiens
aggtgctgctggcagacggcgtgaaggtgaacagacatggggttttatgatatgcaaaatcactcatgaacaactaaactggaaaccagggaggagagcataatgagcttcccttcttagcttagatttctaggagaatcctcaggcataacaacaggaacacagccagtgcagctgccccacgtggatgatcagaggcgacgtcttactctccacaaagccaagtttggtcaagctcctcacagctgtttcccacagagaggaaatcccctaagttcccaggcagtgtaaactgaccgtgtgtttataaaatacacgccatgccccaagaacatgaaaacagtccagatgcatgaacctgcaatgcagcagtgattcaagacacttgggagtagggaggagagcgtgagtgagagaacgcttcaatgccgaagcagagtggctgttctctggagaacacccaaactgatctaaagccaaagttcaaaaaataacaaacatgcaagccttttgaaaacaaattgtgcctagatatctttgcaagctgagtggtcagccctcagacagtgctatgagggagtgattgcagaccacccagcacccaaggaattaggggcagttcatgctgtccctgtgtccaagggctccgagagctcagattaaaattctttctgctggaaccaaaagagcccacttgtgagaaggcaggggattgaggagggtcccctcctcccagtacggactgtgtggtgccttcagatgagctgttttgtttcacgctgagctgagctcacctaggcgatgaccttgtgacaagaataccaggctgagtccagatcagcaaagaggggacaggaagaggaagaggaagagagaagcaagtgcagccatgcgaagctgtgactgacagaagccaagtcagaactgctggttaacataatttttaatccttcatcagggctggtaaaatgttgacaaaggagagtccttgtagtgaatctctcagtctattaagaaagctgtttcagacccagggacataaggcaggtgtattggagtcatcagactctctacaaaatattagtcatcagctctgcaaaaaccccgtgggc

SEQ ID NO: 157697 - DNA, 400 bp, Homo sapiens
caggaacataactagaacccaagttctctatttcttatagcacgtactttccattacaccaagaggtctatcttgctttgtatttatggaaacccaggcacatccacttgtcagagcttggcacagacaagtggcacattgccttttcttattaatgtgaagaatgagccaaatggcttccttagcctatgtatccttagctatgtatagcctatctatccagatctaaaacaggcataaaatactataacttttgtagctctaaagagcttaggaaaacattttgtgtagtatacacacagacacacacacatacatatattcaatgctatatatgaattagagttttgaaatatttcaatgaatttgtcatagatcattgtttcatagaaaaataaat

SEQ ID NO: 157698 - DNA, 491 bp, Homo sapiens
ggcacgtgccaccatgcccagctagtttttgtatttttagtgaagacggggtttcaccatgttggtcaggctggtctcaaactcctgacctcatgatccacccgcctcagcctcccaaagttctgggattacaggcatgagccaccacgccctgctgcctttgagcattctacagtgagtggagataggcctggaccccagaaactgagctttcaagcatgatggctaaatgcaaaagcaagaatgaagagaggtattatcagctccaaggaaaagcatttaattccaaaggaaggaggcaggagtcataaggtagaaagaagcattaaggatagcttcacacaggtagacagtatttgtatgagccttgaaaaatgagtaaatatccactgggggaagttatggagtatatttgagaagctgaacaaagacatggagtagagaagtgtatggcctgttccagattgacaagtactgcagtataaccaaag

SEQ ID NO: 157699 - DNA, 488 bp, Homo sapiens
atccactccttagcaagtgcatcatgggggacctggaatggggtctgtgttcaggggagagggaaatgctgttcttgagatgatttgacagcatatccctcttaattatgtgctacctggaagaggtgtaaagggtagcaaggtggttttgtaagatcagaattgggtgcaactgcttgattcattcattcagtacatttgatggaacacctgcatgccagccattctgtaggagctggaccaaggaagagcttgtggtccaagccacagaccgggagggaagaggaagcctgcctggatgagggtggtctaagccgagattcctcaggtggctctgctgcatccccacgccgcagctgaagggatctttctgttggcagatggcccatgtttttccagtgggacaatgcccactgcttcctgcattttgctctgatggccggagctgtatttagttgtgtcctgcctcagtccctcccaagctgtcc

SEQ ID NO: 157700 - DNA, 210 bp, Homo sapiens
ggctttccttaacttgtggtagttgtttgaaatgaagacagtttagtgggaactgtgtccttcacctgtgaaacttcacctaaatctaggtggtcactgtcagaatgtcactgcacccatctacctgttcccaagagtggttttaaagtaggggtcaggaaggactaggacagttgctcaagttgggagggggaacgacgacgacgacga

SEQ ID NO: 157701 - DNA, 309 bp, Homo sapiens
ttcatgctggtgaatcattcaaggttgatgcagatatttatggcaaaccaataccaaccattcagtggataaaaggtgatcaggagctttcaaacacagctcgattagaaataaagagcaccgactttgccaccagtctcagtgtaaaagatgcagtacgtgtcgacagtggaaattacatactgaagtgggggtttccaagctagtgtgcatttttctgctgtaactcctgagataacaacaggtccttcaggtggccctggtctgtcaagaaccttgacattcacagtaactgatctttctcctgca

SEQ ID NO: 157702 - DNA, 329 bp, Homo sapiens
ttcatgctggtgaatcattcaaggttgatgcagatatttatggcaaaccaataccaaccattcagtggataaaaggtgatcaggagctttcaaacacagctcgattagaaataaagagcaccgactttgccaccagtctcagtgtaaaagatgcagtacgtgtcgacagtggaaattacatactgaaggccaaaaatgttgcaggagaaagatcagttactgtgaatgtcaaggttcttgacagaccagggccacctgaaggacctgttgttatctcaggagttacagcagaaaaatgcacactagcttggaaacccccacttcaggat

SEQ ID NO: 157703 - DNA, 396 bp, Homo sapiens
tttatgaggatatgaggaagggtctcgagtcacttcttccacagatacctaattgtcccaacaccatgtgttagactctccttttcccaactgaaatgtcttggcatctttgttgaaaaatcagatggcctcgaatacaaggatttattctagactccgacctgctggtctccatgcccttccttgcaccactgtcacactttatttttgagatggagtcttgctcttgtggcccaggctggagcgcagtggcacaatctcagctcactgcaacctccacctcctggttcaagcgattctcctgcctcagcctcccgattagctgggattacaggcatgcaccaccacacccggctaaattttgtatttttagtagagacaggatttcagcatgtt

SEQ ID NO: 157704 - DNA, 449 bp, Homo sapiens
tagcttacctgccaggatcggtggcagccaacgattggggttgtacactcagtaaataaaaatactttaccgctttcaaggagcgccaattagctgattgctccatgtggctgtctttaaggagaatgctgttttacctatcttcttgcacaaaggtttgttttttaatgtcttgtgaaaaggattctctttgtcttgattgatgtcaggaataaaagcatgatggtaatatccctttgaaagctattgtattgtcagccctcgctgacagcgggacggcctcccagcgttatagattggtgctgtgaaaacactgacattttctttgttacgttgctgttgttctacttgcaaagtcaattacacaatgtcggagctcagttaccaagttgactttggaggtaacaatgtctttcattctctttttaaagatataatttccctttaaa

SEQ ID NO: 157705 - DNA, 154 bp, Homo sapiens
agggcacgctccacaggcatctaagggtgaaaggtactgccagtctgttgggtttgttatttccatagagctacacaggaaataacaccaccaaaaataacacattcaaactcagagggcaatcttccctaactattcataggcacacgtcagg

SEQ ID NO: 157706 - DNA, 360 bp, Homo sapiens
ggaggagactgacatgtaaataaacactgtagggagataggagcaataatttaagtatatacaaagtctttgatgccatagtggagggagtgattattcagaatggggaacggaagctggtcagggacggtctcggtcttgtcacaagtggcattcaccaggtggacggtagatataggatcaggaaaggggaggcatccctagcaaagtgaactgaatatgcagggtttagaagtgtggaacatatgttagaggaactagggaaaaaaattcagaatggttggaggatgaaatgctattctgagtggaatgcaagaggagtgatggtagtggtaagatgtaacattggagaggtaggta

SEQ ID NO: 157707 - DNA, 218 bp, Homo sapiens
agccggacccctcataatgtgtgcccatacttttttcatttgttgccttgaatttacttagagaagagtagtacatttaaattaaagagttcatacagtttgctcaagattttttaaattatgcctctaatgttagtctgtcactcagggtatttctatattgttactgtttaaatttatggactaaaacgaaagaggctagcctctaagaaagaaga

SEQ ID NO: 157708 - DNA, 211 bp, Homo sapiens
ctctgaaatatttattcattcttggaggtgagcattgctccagtgggcagaattaagaaccttgcttctgcttggaaggcagatcttcccgtactttcgccaagtgtttttcttgcttgactgagtagcctgctttcttacatgtccgtctttacatgtggccgctcactaacttggttgtacagttttctttttgcccatgaacctctta

SEQ ID NO: 157709 - DNA, 463 bp, Homo sapiens
taagacactcagtccagtgcccagcatagaggaagcatgtggtatgtgctggctggcatgattccggccaggtttctgggagacctgttgtcagacccaaaatagaatagaccctgttctattttgcagggcttcagtttcttttctgggcaggggttggatagcagactggagatctctaaggaatcagcagtttgaaaacctcaaaggccaaaagctcaggagcttctgggagatataagactttatctgccgggcatgatggctcacgactgtaatcccagcactttgggaggctgagacaggcagatcatgaggtcaggagatcgagaccatctggctaacacggtgaaaccccgtctccactaaaaatacaaaaaaaaattagctgggcatgatggcgggcacttgtagtcccagctacttgggaggctgaggcgggagaatggcgtgaacccgggag

SEQ ID NO: 157710 - DNA, 209 bp, Homo sapiens
cttctgagcgctggattctaacctctgaattatccatacatttcaataagatgtagctcatgtttgcagctgagtggttttttcagtctgtttcctgcccatagaagccctggagccaagttctctttgaattgcatcctctcctaaccctgtaatcctaaactgatagtttacaccagaacagtttttctgaaactgggagtttgcta

SEQ ID NO: 157711 - DNA, 230 bp, Homo sapiens
cttagtcttctggaggatatggaaaacagacaacccaaacaaccaacaaaagagcaagatgctgcaaaaaaaaaaaaaaaaaaaaaaaaaaaaatttgttgttttcgcccaagtggcggttttagacccaaaaacttgtttttggggggaacgggttgcaaataacaggggctaaaaatctttactctttttaaaaaagggggggccccggcctcgaattcgaaataagg

SEQ ID NO: 157712 - DNA, 1237 bp, Homo sapiens
taagaaaaagtaactcaccaagtttgtatttgtactgttaacggatcaaatacaggttaagcaccctgcgtcccctcatcataacatcaactgtgcatttgtgagggttagtcttctcccattctcctcctcaggaaactctgtctgcatagttaccaccaccacgtgcacattctcagcctcagttcttgcttttcttttctaaaataatacaagctttattttactgattgcaaaaatgatccctgctcattgtaaaacattcaaaagttaccacaaatataaagtgagtcacattaattcccaccacccagagatgaccactattaacattttggtgactctttcaagattctgataagggcagaaaaatacaaatatacacacaaaaaacttaaaattttacgtatgattttgggggctccatacacttacaaaacttgtttgagggcccccttgggaccatgctgatcaacaaactgcttttttcacctcacagtttgtcctatacaccttccatttcaataaatgtgtgtccacaacagcaggtctaatggcttcacagtcttcttctatctaaatgtcccagtggacatttgcatattctcaccttatgctgttataaatagtgtggctgtcagcattcttgtgcacatacctttgccacttttgggattacaaaatcaaagaatatgcacatttacagtttttacacacactgtcttactgccctccagaatggccaatcctttgttcactaaggaatcccccttcaattcctggtcagcacccgatcttccaagcctcagttgctattcttcttggactcattttcctcctcgttaactgtgaggacctagttttctacctgttaagagtcaggatttgtactggatacctactgtcctagctgctgcagacccttgaggtgtagggtaaggttgtattttggtctgaaacctgaaagaataattcactttctccccagggacccttctacagttgtagccattgattaagaactaagttcagtttaccagctcttccggaaagaagagaaattaaagtcctaattggaatatgaggcaaagtggttaggaacatggactgttgttgctagggttaagtgggaacatatgtgcacatgcacacatacacacatttcttagttttgcacaagggacaacatgttgtaagtatagtacctccaacactcatagaaaatatctgcctgaag

SEQ ID NO: 157713 - DNA, 967 bp, Homo sapiens
gctcgtggtctaaggcttgcatcaatctaagatgaactgtgacctagtcttcaatgtcttctgcttgtatggcaatgtggagaaggtgaaattcctgaaaagcaagccgggggcgccatggtggagatggctgatggctacgctgtggaccgggtcattacccacctcaacaacaacttcatgtttgggcagaagctgaatgtctgtgtctccaagcagccagccatcatgcccggtcagtcatacgggttggaagatgggtcttgcagttacaaagacttcagtgaatcccggaacaatcggttctccaccccagagcaggcagccaagaaccgcatccagcaccccagcaacgtgctgcacttcttcaacgccccgctggaggcgaccgaggagaacttctttgagatctatgatgagctgggagtgaagcggccatcttctgtgaaagtattctcaggcgaaagcgagcgcagctcctctggactgctggaatgggaatccaagagcgatgccctggagactccgggcttcctgaaccattacctgatgaaaaacccaatggtccatacccttacactctgaagttgtgtttctccaccgctcagcacgccttctaattaggtgcctaggaagagtcccatctgagcaggaaggtatttctctttcctttatgccattttttggtttttgtttttgttatttgcaaaagatcttgtattcctttttttttttttttttttttaatgctaggttcgtagaggcttaaccttaacggaaacgctggaagtctgcagggggagggagaggggaactgatatctcccaagattaaccttcactttaaaaaaattattgtacatgtgatttttttttcctgttcatacatttgtgctgcccatctactcctggcacatttcaataaaattgtttggaaaataaacacagcacttgctgggaaaaaagaa

SEQ ID NO: 157714 - DNA, 979 bp, Homo sapiens
gctcgtggtctaaggcttgcatcaatctaagatgaactgtgacctagtcttcaatgtcttctgcttgtatggcaatgtggagaaggtgaaattcctgaaaagcaagccgggggcgccatggtggagatggctgatggctacgctgtggaccgggtcattacccacctcaacaacaacttcatgtttgggcagaagctgaatgtctgtgtctccaagcagccagccatcatgcccggtcagtcatacgggttggaagatgggtcttgcagttacaaagacttcagtgaatcccggaacaatcggttctccaccccagagcaggcagccaagaaccgcatccagcaccccagcaacgtgctgcacttcttcaacgccccgctggaggcgaccgaggagaacttctttgagatctatgatgagctgggagtgaagcggccatcttctgtgaaagtattctcaggcgaaagcgagcgcagctcctctggactgctggaatgggaatccaagagcgatgccctggagactccgggcttcctgaaccattacctgatgaaaaacccaatggtccatacccttacactctgaagttgtgtttctccaccgctcagcacgccttctaattaggtgcctaggaagagtcccatctgagcaggaaggtgccggtgtgtgatgttccccttcctgtgtccaagtgttctcattgttccattcccacctatgagtgagaacatgtggtgtttggtttttgtccttgagaaagtttgcgaagaatgatggtttccagcttcatccatgtccctacaaaggacatgaactcatcattttttatggctgcatagtattccatgatgtatatgtgccacattttcttaatccagtctatcattgatggatatttgcgtggtttcaagtctttactattgtgaatagtgccacaataaacatatgtgtgcatgtgtctttatagcagcatgattta

SEQ ID NO: 157715 - DNA, 198 bp, Homo sapiens
cattgtcctgcctttggactaaaaatttccggttgaaactaagtaacagtccttgtttgactggatttgccagcaaatacatgtagtcacaggccccaaaacatgctttctgataatctggaggaaaataaggactagaaatgtaactggcaatgctgggagcaatggtaggcacttctagtccaaaggcaggacctg

SEQ ID NO: 157716 - DNA, 381 bp, Homo sapiens
  misc_feature (1)..(1): n is a, c, g, or t
naggaccccctccatcccgggaggcagaggtggcagtgagatgagattgcgcctttgctctccagcctgggtgacaagagtgaaattgggtcttaaaaaaaataaagaaaatttaaccaatagcgtgagccactgcaggtcgccagtcattgaatttctgtgatgcactaggtctctgtgcggtgaaggtccaaggagatagattttcagcgaatcacctgaagacttctaatggctcagctgtgcaatgtggatcccctgctgaagtagttcggagcacagtgtctagcaagttagctgacagaacgttagaactttcttaccctgggtggaggtggacctgagaacctaccattccctttcatctctccacgggtgcaa

SEQ ID NO: 157717 - DNA, 236 bp, Homo sapiens
aggaagtggaactttcttagtagaaaaaatgcacacgaaccaaaaaaagaaaagaaaaactcagaaggcagtagcttcttggtccatacaatcaatggtcaaattgcagaaaagatagccctagaaaggacaggcttttctcggaaaagagatgatggagagagagggcataagtgtcagcaccagaaaggtgaatctttaggtcatattccactggctggagaagtgtgtcctcg

SEQ ID NO: 157718 - DNA, 302 bp, Homo sapiens
caggggagagccactgcaccgggccccctaggattttatgtagttagttcttagccttgattctttacttccagttagcacctcttcacttttcttcctctcgccttcagtttttcctgtttcttccctgaagctagtactactctttaggcagaaaaagtagtttagtaggtaggaacatataaaatcacctctcttcagatttgggactttcggttatattctcagaatttttgggaattaaggggtaggattaagagctgaatcctgtagctcagtctagggcaatttctactatagaa

SEQ ID NO: 157719 - DNA, 176 bp, Homo sapiens
ctgctttctgtagtctctatctattcccactacttctatctatgcatttgccattccaactaactaaatccgtacctatttcctaagccttgcccatcaccatggtgctggcaatgctgcaccttcccttctcctggaacatcctccaccttcccattcacctcattaaatcatac

SEQ ID NO: 157720 - DNA, 452 bp, Homo sapiens
gattagagaggtagtgagatccattccagttggctggtaacagctaataggtttgagttccacagacagagtaagaatcattgagtgctagcctggagtcataagataattatctgatggctgaaggtgaccaaagaataaacatttcgatgattgagaaaggattttttggaggtggtctgtgtgtggttgggttgggtgagagaaattaggctgagaggggaagtggggacatttccattcgtatgagagatgtccaggaacctgtagtggcttggaggcattatgttacatttaatgatggctggagaagtgtaatgacaaatgcttgttcccagaaaagaattgatgatggtaaaattatgatgggagtggacatgacccttgcaaggatagactggagcatattcagaggtttttctcacaatgggtatttgtctggtttaaaatgg

SEQ ID NO: 157721 - DNA, 255 bp, Homo sapiens
acatcttccccttcacaggtacccaagagccaggtaatgagcagttaaggtaagaacattaagaaatagtagttgtttatagcatggattaaggcaatgctgttgtaaactttttttcccccaaagctgatttatcaatcaattgccacgagtttgctgcacaaaactgcagccattatcatggttggctctgcagccacaacaaaattactgaaagccttttaccaggaaaggttgtcaggagggagaagagtg

SEQ ID NO: 157722 - DNA, 150 bp, Homo sapiens
tcacttgtgaccctcaatgttggaggaggggcctggtgggaggtgaccggattatggggcggagttccccatggcgtggctgctctcaggatagtgagatctgactgggccatgggtgtggagttcctcccggggctgctctcaggatag

SEQ ID NO: 157723 - DNA, 317 bp, Homo sapiens
ttcggcactgagggagatgaacaaaataccagatagaacaagttccctgagggcaggaatttttgtggccttcagcaccttggtgaatgctgacacatagtagttatttaaatgattgtagaataaatgaagacacagtttgagaccagcctgagcaacatagtgagaggcatgcacgctgggagcagtggtagtatgtgcctataatcccagctaggtgggaggattgcctgagcccaggagtttgaggctgcagtgagatatgaccataccattgtgtactccagcctgggcaacagcatgaggccttgtctcta

SEQ ID NO: 157724 - DNA, 369 bp, Homo sapiens
agaggtcaaaaaatatgcaagttgcaggattttccctaggtccccttactttacttctagtgctcttccaccaaaccacaattacttctgtgttgtgtatatataaatataaaagaggcttatttcaaaacaccagtggtaaaaaaagaagttacagagcttttcttagaaaatcatgagattatctgttattacaataacttaagtttcctctttataatgtctgaaacagaaataagcatgaaacagggtgaaatacactgaactatttttcttttctttttttttttttttttttgagacggagtctcacactgttacccaggctggagggcagtggcccaattttggctgcctgcaagctccgcc

SEQ ID NO: 157725 - DNA, 365 bp, Homo sapiens
gggcagtgccagggagcgctgatgctctggaaggaaagagaagatgggctggatgttggtcttgttgccagagacactgaatggaaagactgtgtaggagtcagtatgtttggagctcagatatctgggtttcggatgtaccttagggagccagcagcttagccatggtcatttatccccagggctggcttggagagagaaacagcctagggctgggtctggaagacttcaacatttacaaagatgggtggtggaaggaggggccagcaaaccagaccaagatgatgaggcagagaagtaggaaggtaactatgtgggtgtgatgccacctaggggacaaaaggagtgtttgcaggaggaaggaa

SEQ ID NO: 157726 - DNA, 643 bp, Homo sapiens
ccatcatcttgtctgctctggtgagctacctctcttccctatcctaccaaatttgctttaaagatcgaatacaaccatgtatgtaacaatacaagttactttcaactaggcaatttctatttaaggtatttttctcctccctatttattttcacttacattttgttttcttgcacacaaaaaaaccaaagatgactaaaaagacccaaaggaagagagtagaaaataacaattatgaagtgtggtgatgatttaaaatactaaaaataaagaagaggatatcatcatgccatctatctatgtgtacctttctgtgatttgtctttggcttcagtcagaagaatcataaaattatttatagtttgtctgttagaatttgtggttgggagggaattatctatgactttttataatttatatctcaattaatttaaaaaatggtagagtccctattaatgtgtcccttgaaagaaaagttgtctagatcatatgctctcctactaaaattatctttttcacaaaggacatatacgtacatgagaaataagatccttttaggaaatattagaataagattttcaattagaaagttgcatctgcataggcctcctggacagtaggaggaataactggactggaataat

SEQ ID NO: 157727 - DNA, 568 bp, Homo sapiens
tctggctgcttcaggctgttatgccctccccagcaagtcaccctgttctgctcatgcccaccctggcccctttccctgcctccaggccaaagagcagagtcagatcccagcatagccaagggaaccaattacaagtgaaaccatcaaggaaaagacacatacttcagagaacaaggactgtgccaacatacaccagcaaaaaccagggagaatggtgagaacggatttggagtgtccccgaccctgggggaagagcatcaacccaggccagggcaatgtactgctgcaggtgcgccccccatgctggagtccaagagccggcaggtgagctgttggttccctgacctcagcttgatagtggctccacaaagtgaaactgaaaagccaaaatcccttgaaggaatccagacatctgaagggatacagtgttggtggagaccgatcaagagcaacctgtacaacatccctaaccatgtctccaggggagccaaaaggacctgccccagccggaagcaccaagaaacatttaggaaggagaacaccaacagcttggaatattgccacagac

SEQ ID NO: 157728 - DNA, 387 bp, Homo sapiens
cccctcagacaccaagttaaagaaggaagggctttattaggccgggagctttggcaagactcacatctccaacaaccaagctccccaagtgagcaattcctgtcccttttaaggggtcacaactctaagggggtctgcatgagagggtcatgatcaattgaacaagcagggggtacatgactgggggctgcatgcactggtaattagaacagaacagaacaagacagggatcttcacagtgcttttcttatacaaataaccaattaggtcaggggtcgatctttaactaccaggcccaggttttggtgccaggctgtctgcttgtggatttcatttctgccttttagtttttacttcttctttctttggaagcagaaattgggcata

SEQ ID NO: 157729 - DNA, 262 bp, Homo sapiens
tgctctccccttctcttcactacaaagcaaaacaaataaataaataaatttccccaagaacctcaattttcatatcctttgctcttctattatcttgtttaatcctcactgccctgacaggtggacattatgcattatgatcatcatcactctcatttcatacatgaagaaactaaatccagagcagctaacagatttgctccaggccaggtgtggtagttcacgcctgtaatcctagcactttaggaggccaaggtaggct

SEQ ID NO: 157730 - DNA, 228 bp, Homo sapiens
aagcagtcaaatgtcaactcatcggttcttttcaaggctttcaactctcaaatgttattaaagtcattctttgtgatacattttaagtaacatataattgtaagagatgttttgtttgcttttcagagattttggattagcttattttacccccaacctggcacagcttgagaatttagaaaatatcttgacaaaaacctttcatatatttgaggcctttcctgtttt

SEQ ID NO: 157731 - DNA, 357 bp, Homo sapiens
tacctacttgcaagtgtgtgaatgtgtctgtgtgtgtatgtgtgcacatgtgttcttttgaaagacattcctctttttcatatgaaaatttcttttatttatttctttattttctgagatagggtctcactctgtcacccaggctggagtgcaacagagtgatcatgactcactgcagcctcaaactccagggctcaggtgattctcccaactcagcctcctgagtagctgggactacaggtgcatgccctcacacctagctaatttttgaaaatttttttgtagttatgggggtcttgttatgttgcccaggctagtcttaaactcctgggctcaagcaatcgcctgcatcagcct

SEQ ID NO: 157732 - DNA, 203 bp, Homo sapiens
ataggaggatgcatcctgctacttccagggatggtattccttacctctttcctcttccatcactagcttgagtgaaaatccaggaaagaaggctttgagtggtgtattctaagatagaggtagctgattgctgtttcctatcacatagctaggtgtatcttagctgcaagagatgctggaaactctaagcctcaaacatctta

SEQ ID NO: 157733 - DNA, 528 bp, Homo sapiens
tagttcctccactatcctccacgcttctcctctctcaaaaccatctccttccaccactctctcctctcaccattcatgtcttctctgacatatgggactccacaaacagtggacacttttagaaccaggctaacaatcttatcttcctcaccgccctctccttctgtcctcaggaatgtcaaacaccatggcaatgtgcgtccaatgctaaggcctcccgtgatttccatcctgctgcctctacgaatgttcacaaactccactcactgaggctctcaaggggtgtggtgaggcagagtcagcgttttccactagtgtcttttaccctgcttcttgaggcaggagaatcacttaaacccaggaggcagaggttgcagtgagccgacatcatgccactgccctccagcctggacgacaaagtgagactctgtctcaagaaaaaataaaaacaaacaaacaaacaaaaaacactgtttaccaaacttaccctaattcatagttgtctacttatctgtgtgtgtatttgtt

SEQ ID NO: 157734 - DNA, 470 bp, Homo sapiens
tctcctgaatgcagcctgctgagtagttgggagtggagatgcgtcccacatcgcctggttaatttttgtatttttgtggagaggggatctcgccacgttgcccaggcttgaagccagatcaagcaattgggttcttcggatttccgaaatagaccccaatattctgcctttaccccagaggatgcagatgtaccttctctcaggccgatgacctcaggcctccccggtccctggagctctaggaaaggtgagcgcgatctcgcgcccacacccagtgctctgggtcataagcctggatctggaaaaacataagcccataatcaatagagtcaagtgttagctttattggtgattttagtaaatcaaaataaaaacagagataacttttcttaacccatgttttagaccctgtggttagaatatcacatacacatgtaacatccacatcctttcaacatgtgtatcttagg

SEQ ID NO: 157735 - DNA, 139 bp, Homo sapiens
tacacccccgaactcacgaatttcactgacttactccccagtctccctcatgttctcacccccagccctcaggtactcttctgtctctctcagctactctccaaccatctccagatttcacctggagtcagcttcccgc

SEQ ID NO: 157736 - DNA, 186 bp, Homo sapiens
acccaggctggagagctgttactgatgttaggtaaaactgagactttgaagccacaaaaaaggattcctgggcgtcctgtgggaggccaggccgcctgtagcataaccctcccaggctgtgatcatagtgtctgcacctgtcaccgtcttcaaactgtctgacagcttcaaattgtagaaaactga

SEQ ID NO: 157737 - DNA, 420 bp, Homo sapiens
tgtataacgtgtaaggaggggatcagtttcagctttctacatatggctagacagttttcccagcaccatttattaaatagggaatcctttccccattgcttatttttctcaggtttgtcaaagatcagatagttgtagatatacagcgttatttctgagggctctgttctgttccattgatctatatctctgttttggtacccggctaatttttttttgtatttttagtagagacgaggtttcaccgtgttagccaggatggtctcaatctcctgacctcgtgatctgcctgcctcggcctcccaaagtgctggggttacaggcatgagccacagggccaagccttgaaagataacattttcagattatttggactattctgaaaactacgtaagcctgtcatttaaatcatcttttcac

SEQ ID NO: 157738 - DNA, 412 bp, Homo sapiens
atttattgttaacgtttaaattgaaattaaaatagacattctaaagcttttaacgatgcaataactttttttgtaaaaggtcttctctgtctcccaggggtgtggccaccagcagttgagaagtgccattcagatactctcagaggtctcgtctagtcaaacaatttgtgtcttagtaaattcagtcctgccctgcagcagcagccattcccatagacatgagggatgcattggagtgctgcctgagctacctattgtttcttgggatggtgagctagtctctgattcaggtagataatgggatataatgtttattattggaataacttcaataaattctattttctgatcacatactagtaataggtaccaggtatgattttctagaccagaggtttgcaaactacctata

SEQ ID NO: 157739 - DNA, 494 bp, Homo sapiens
gatttttagtgcgtcctttgtctcatctgatgtctttatttataaagcgggtttaattctggacctattatactgttgatttcactgatttaaatactataactttatactgtgttttaatatcccattggccaagtctcacttattccttctatccccactcaaccagaaagacaggatcttgctctgttgcctaggctggagtgcagtggcatgatcacgccaaccaggctgtcacctcagccttctgaattgctgggattacaggcatgagccaccacgcctggccaaaagcaccttatttcatctatattgtacacttcagtttacgatagggtttctccacctttattgttatacctaataaatcaatgcccagtaaatttcttgagatactattctgctgtctaacaacccaatgatttggggtgacatcaactattcactttcacatgtcacatttgctcactaaccagacatatggaaacaccggg

SEQ ID NO: 157740 - DNA, 1745 bp, Homo sapiens
gtcatgatacacatgtgtcctgaggaaatttcaggaggccccagggattagtgctgtggagaaccaaaagcaatttgaaaatgggttacgcttgcaggttagactgctgacctgtttctttttgtggaaggaaatataaagagggctgtaatcgattatgaagcataagcattcttgcaatcctacgataggatgataaaacatctattacatgaaacctttgggctctgggccagggagtgtcatggatctaaaaggttcatagtggtaacagcctgcttcattttatgtcatctccttcaaagtgattagagtgtttctagcttgccgaaactgcacccaaagggagacatttggagccatgttattggtgatttactggtgtggaaaattacctggtgttgtagccaagtagccatttccattctaacccagtcctatagtcctgaactgggctgaataaacatacctaaatatatgtttagaaatgctcctatgtatcagttttcccaggaacaactataatattatagaaatcttaaaattatttcctaataaaaaattataggatacaaaagaaaaaaaagaaatatgaagagggctggatgggcacaggaaaacaatcagatgagaacaacagatgaccgtgtctgcaggcagcacccagaactgatattcccctcaaacgtctaaatatattgttgagaaaattatctctaactgttctagtgggaatgtgggaatggaaaatatgcaacagccatggggccaggccctttgctgagcctgcaggttgggagtttgtgaatctattgaggcatcacaaatcttttctgatagcccctctgtgtctgtcagttccagtgtctcgccctgtcctcaccctcaggtctcctggggcccaggctgcagtgggggacctgctggagcttcactgtgaggccctgagaggctctcccccaatcttgtaccaattttatcatgaggatgtcacccttgggaacagctcggccccctctggaggaggggcctccttcaacctctctttgactgcagaacattctggaaactactcctgtgaggccaacaacggcctgggggcccagtgcagtgaggcagtgccagtctccatctcaggacctgatggctatagaagagacctcatgacagctggagttctctggggactgtttggtgtccttggtttcactggtgttgctttgctgttgtatgccttgttccacaagatatcaggagaaagttctgccactaatgaacccagaggggcttccaggccaaatcctcaagagttcacctattcaagcccaaccccagacatggaggagctgcagccagtgtatgtcaatgtgggctctgtagatgtggatgtggtttattctcaggtctggagcatgcagcagccagaaagctcagcaaacatcaggacacttctggagaacaaggactcccaagtcatctactcttctgtgaagaaatcataacacttggaggaatcagaagggaagatcaacagcaaggatggggcatcattaagacttgctataaaaccttatgaaaatgcttgaggcttatcacctgccacagccagaacgtgcctcaggaggcacctcctgtcatttttgtcctgatgatgtttcttctccaatatcttcttttacctatcaatattcattgaactgctgctacatccagacactgtgcaaataaattatttctgctacctt

SEQ ID NO: 157741 - DNA, 2775 bp, Homo sapiens
gtcatgatacacatgtgtcctgaggaaatttcaggaggccccagggattagtgctgtggagaaccaaaagcaatttgaaaatgggttacgcttgcaggttagactgctgacctgtttctttttgtggaaggaaatataaagagggctgtaatcgattatgaagcataagcattcttgcaatcctacgataggatgataaaacatctattacatgaaacctttgggctctgggccagggagtgtcatggatctaaaaggttcatagtggtaacagcctgcttcattttatgtcatctccttcaaagtgattagagtgtttctagcttgccgaaactgcacccaaagggagacatttggagccatgttattggtgatttactggtgtggaaaattacctggtgttgtagccaagtagccatttccattctaacccagtcctatagtcctgaactgggctgaataaacatacctaaatatatgtttagaaatgctcctatgtatcagttttcccaggaacaactataatattatagaaatcttaaaattatttcctaataaaaaattataggatacaaaagaaaaaaaagaaatatgaagagggctggatgggcacaggaaaacaatcagatgagaacaacagatgaccgtgtctgcaggcagcacccagaactgatattcccctcaaacgtctaaatatattgttgagaaaattatctctaactgttctagtgggaatgtgggaatggaaaatatgcaacagccatggggccaggccctttgctgagcctgcaggttgggagtttgtgaatctattgaggcatcacaaatcttttctgatagcccctctgtgtctgtcagttccagtgtctcgccctgtcctcaccctcaggtctcctggggcccaggctgcagtgggggacctgctggagcttcactgtgaggccctgagaggctctcccccaatcttgtaccaattttatcatgaggatgtcacccttgggaacagctcggccccctctggaggaggggcctccttcaacctctctttgactgcagaacattctggaaactactcctgtgaggccaacaacggcctgggggcccagtgcagtgaggcagtgccagtctccatctcaggtgggtgggtgttacctggatacagagtttgatgtcaatggctgtgtctcaccagcctggagatgtctgctgtgtgtgaagagggggaaggtgatctcagtgtccagtggcttctcttctccccacactaacctgaagagtacagactacacttcaatgatctcttacttgaatttgtatttaacatccctatatagcatttataagaagggcccaagtcttaaacctctggggctgaagcactgctttctttcctcaggacctgatggctatagaagagacctcatgacagctggagttctctggggactgtttggtgtccttggtttcactggtgttgctttgctgttgtatgccttgttccacaagatatcaggagaaagttctgccactaatgaacccagaggggcttccaggccaaatcctcaagagttcacctattcaagcccaaccccagacatggaggagctgcagccagtgtatgtcaatgtgggctctgtagatgtggatgtggtttattctcaggtctggagcatgcagcagccagaaagctcagcaaacatcaggacacttctggagaacaaggactcccaagtcatctactcttctgtgaagaaatcataacacttggaggaatcagaagggaagatcaacagcaaggatggggcatcattaagacttgctataaaaccttatgaaaatgcttgaggcttatcacctgccacagccagaacgtgcctcaggaggcacctcctgtcatttttgtcctgatgatgtttcttctccaatatcttcttttacctatcaatattcattgaactgctgctacatccagacactgtgcaaataaattatttctgctaccttctcttaagcaatcagtgtgtaaagatttgagggaagaatgaataagagatacaaggtctcaccttcatctactgtgaagtgatgagaacaggacttgatagtggtgtattaacttatttatgtgctgctggatacagtttgctaatattttgttgagaatttttgcaaatatgttcattgggaatattggcctgaaattttcttttccactgtgtctctgccagaatgtttgtatcaggctgatgctggcttcatagaatgagttaggcaggagcccttcctccttgattttttggcatagtttcagcaggattggtaccagttattctttctgcatcttgtagaattcagctatgaatccatctggtctagggcttttgtgttggttggtaagttttttattactaattcaacttcagcgcttgatattggtctaggaggggtttctgtctcttcctggttcaatcttgggagattgtgtgtttccaggaatttagccgtttcctccagattttcttctttatgtgcatcgacttgagtgtaaacataacttatatgcactgggaaaccaaaaaatctgtgtgacttgctttattgcagcatttgttttattttggtagtctggaactgaacctgcaatatcaccaaagtatgcatatagttgcaaaaatgtgatttttgacatagtaaatatgagtatttgcaataaactatgatattacttttgtaagtatatagaataaaatgtaaataatctatagatttgatact

SEQ ID NO: 157742 - DNA, 459 bp, Homo sapiens
aaggagccatgatgggtgagaggtgtctagctctgaatgtcctgtttgctggggttgcttcttgccagaggcttttcagcaggaatcttagctgtcactgctttggggactattgtgatccttctctctagagctctttcaacgtcctgtgctgactgccagctccttccagcccatcgaagggggtccagtgagcctgaaatgtgagacccggctctctccacagaggttggatgttcaactccagttctgcttcttcagagaaaaccaggtcctggggtcaggctggagcagctctccggagctccagatttctgccgtgtggagtgaagacacagggtcttactggtgcaaggcagaaacggtgactcacaggatcagaaaacagagcctccaatcccagattcacgtgcagagcaagtatcagtgaggctgagcctggagaaaaaaagataggag

SEQ ID NO: 157743 - DNA, 2586 bp, Homo sapiens
  misc_feature (78)..(78): n is a, c, g, or t
  misc_feature (86)..(86): n is a, c, g, or t
  misc_feature (88)..(88): n is a, c, g, or t
  misc_feature (90)..(92): n is a, c, g, or t
  misc_feature (94)..(94): n is a, c, g, or t
ggtgaccaagagtacatctcttttcaaatagctggattaggtcctcatgctgctgtggtcattgctggtcatctttgntgagtcantnannngncagattcgctgacccttgtggcgccctcttctgtcttcgaaggagacagcatcgttctgaaatgccagggagaacagaactggaaaattcagaagatggcttaccataaggataacaaagagttatctgttttcaaaaaattctcagatttccttatccaaagtgcagttttaagtgacagtggtaactatttctgtagtaccaaaggacaactctttctctgggataaaacttcaaatatagtaaagataaaagtccaagagctctttcaacgtcctgtgctgactgccagctccttccagcccatcgaagggggtccagtgagcctgaaatgtgagacccggctctctccacagaggttggatgttcaactccagttctgcttcttcagagaaaaccaggtcctggggtcaggctggagcagctctccggagctccagatttctgccgtgtggagtgaagacacagggtcttactggtgcaaggcagaaacggtgactcacaggatcagaaaacagagcctccaatcccagattcacgtgcagagaatccccatctctaatgtaagcttggagatccgggcccccgggggacaggtgactgaaggacaaaaactgatcctgctctgctcagtggctgggggtacaggaaatgtcacattctcctggtacagagaggccacaggaaccagtatgggaaagaaaacccagcgttccctgtcagcagagctggagatcccagctgtgaaagagagtgatgccggcaaatattactgtagagctgacaacggccatgtgcctatccagagcaaggtggtgaatatccctgtgagaattccagtgtctcgccctgtcctcaccctcaggtctcctggggcccaggctgcagtgggggacctgctggagcttcactgtgaggccctgagaggctctcccccaatcttgtaccaattttatcatgaggatgtcacccttgggaacagctcggccccctctggaggaggggcctccttcaacctctctttgactgcagaacattctggaaactactcctgtgaggccaacaacggcctgggggcccagtgcagtgaggcagtgccagtctccatctcaggacctgatggctatagaagagacctcatgacagctggagttctctggggactgtttggtgtccttggtttcactggtgttgctttgctgttgtatgccttgttccacaagatatcaggagaaagttctgccactaatgaacccagaggggcttccaggccaaatcctcaagagttcacctattcaagcccaaccccagacatggaggagctgcagccagtgtatgtcaatgtgggctctgtagatgtggatgtggtttattctcaggtctggagcatgcagcagccagaaagctcagcaaacatcaggacacttctggagaacaaggactcccaagtcatctactcttctgtgaagaaatcataacacttggaggaatcagaagggaagatcaacagcaaggatggggcatcattaagacttgctataaaaccttatgaaaatgcttgaggcttatcacctgccacagccagaacgtgcctcaggaggcacctcctgtcatttttgtcctgatgatgtttcttctccaatatcttcttttacctatcaatattcattgaactgctgctacatccagacactgtgcaaataaattatttctgctaccttctcttaagcaatcagtgtgtaaagatttgagggaagaatgaataagagatacaaggtctcaccttcatctactgtgaagtgatgagaacaggacttgatagtggtgtattaacttatttatgtgctgctggatacagtttgctaatattttgttgagaatttttgcaaatatgttcattgggaatattggcctgaaattttcttttccactgtgtctctgccagaatgtttgtatcaggctgatgctggcttcatagaatgagttaggcaggagcccttcctccttgattttttggcatagtttcagcaggattggtaccagttattctttctgcatcttgtagaattcagctatgaatccatctggtctagggcttttgtgttggttggtaagttttttattactaattcaacttcagcgcttgatattggtctaggaggggtttctgtctcttcctggttcaatcttgggagattgtgtgtttccaggaatttagccgtttcctccagattttcttctttatgtgcatcgacttgagtgtaaacataacttatatgcactgggaaaccaaaaaatctgtgtgacttgctttattgcagcatttgttttattttggtagtctggaactgaacctgcaatatcaccaaagtatgcatatagttgcaaaaatgtgatttttgacatagtaaatatgagtatttgcaataaactatgatattacttttgtaagtatatagaataaaatgtaaataatctatagatttgatact

SEQ ID NO: 157744 - DNA, 1496 bp, Homo sapiens
gtcatgatacacatgtgtcctgaggaaatttcaggaggccccagggattagtgctgtggagaaccaaaagcaatttgaaaatgggttacgcttgcaggttagactgctgacctgtttctttttgtggaaggaaatataaagagggctgtaatcgattatgaagcataagcattcttgcaatcctacgataggatgataaaacatctattacatgaaacctttgggctctgggccagggagtgtcatggatctaaaaggttcatagtggtaacagcctgcttcattttatgtcatctccttcaaagtgattagagtgtttctagcttgccgaaactgcacccaaagggagacatttggagccatgttattggtgatttactggtgtggaaaattacctggtgttgtagccaagtagccatttccattctaacccagtcctatagtcctgaactgggctgaataaacatacctaaatatatgtttagaaatgctcctatgtatcagttttcccaggaacaactataatattatagaaatcttaaaattatttcctaataaaaaattataggatacaaaagaaaaaaaagaaatatgaagagggctggatgggcacaggaaaacaatcagatgagaacaacagatgaccgtgtctgcaggcagcacccagaactgatattcccctcaaacgtctaaatatattgttgagaaaattatctctaactgttctagtgggaatgtgggaatggaaaatatgcaacagccatggggccaggccctttgctgagcctgcaggttgggagtttgtgaatctattgaggcatcacaaatcttttctgatagcccctctgtgtctgtcagttccagtgtctcgccctgtcctcaccctcaggtctcctggggcccaggctgcagtgggggacctgctggagcttcactgtgaggccctgagaggctctcccccaatcttgtaccaattttatcatgaggatgtcacccttgggaacagctcggccccctctggaggaggggcctccttcaacctctctttgactgcagaacattctggaaactactcctgtgaggccaacaacggcctgggggcccagtgcagtgaggcagtgccagtctccatctcaggacctgatggctatagaagagacctcatgacagctggagttctctggggactgtttggtgtccttggtttcactggtgttgctttgctgttgtatgccttgttccacaagatatcaggttgtatctaccatttggattctccatattttgctatgacctttccactactgatatagattgaaattacaaaaaaagaagagagaaaagaaaactctccaaaagccaataatttctttttatgcttcataattctgcaaggctctgtgcaatgctcaatgtggtcatactgctaattatacaatatgtcactgttccctgtgcatagtcactggagattaaattatttacacattctttca

SEQ ID NO: 157745 - DNA, 338 bp, Homo sapiens
actagtgaacaaaaccagccaacattcttgccctcgtagaacttactttgtcatagggtgggatgggtatgacagacaataagcaaataagtaaaatgcatcgtggccaaatgacagtgcaatggagaagaataagacaggaaaaggggtgaagtctgagcgacgaagcagtgcaacatttgatgcaacatttgagcaaagatcggaaagagataagacaatgagggtgtacatctgtgccaagcatggtggctcatgcctgtaatcccagcactttgggaggccgaggcaggtggatcaccagaggtcaggagtccgagaccagcctggctaacatg

SEQ ID NO: 157746 - DNA, 116 bp, Homo sapiens
atggcctttgggggaacatgtcttactcataattataggcagcggaaaatgcctgctagcgagtaggcactcaaacgtgtctgaataatttagtcccattttctccattcttaaat

SEQ ID NO: 157747 - DNA, 292 bp, Homo sapiens
gattctagaggatcccccgcgctcctgagtagctgggactacaggcgtccacaaccacgcccagctaatctttgtattactttattgtataaaatgggaaggcaaaagctagcaaatttcatgtggaagcccaaaagatacattctgaatgcatctcacactcctaagatgccctcctgcaaatcatttatacataggaagtgtttacatttggtgtagttacggagaccagtaattggagagttcccagaaaatccagaggaagtcaagatgcccaaaaatcaggagcgcg

SEQ ID NO: 157748 - DNA, 395 bp, Homo sapiens
  misc_feature (100)..(100): n is a, c, g, or t
attacagacgaacaaaaagaaaagaataaaaccaagtaatgagttcacatcctgcaaaatgtgaaaaattaaagggctcactaagtataacaaatacaanataggccgggcacggtggctcacacctgtaatcctagcgctttgggaagctgaggtgggtggatctcaaagtgctgggattataggcatgagccaccacatccgtccttattttcatgttttagagattgtgtctcattctgtcaccccaattggagtgtagcagtgtgatcacagcttactgcacccttgaatttctggacttaagtgattctcctgcctcagcctcctgagtagctgggattacaagcgcctgccaccacacttggctaatttttgatttttagggggaacga

SEQ ID NO: 157749 - DNA, 580 bp, Homo sapiens
cgcccaggctggagtgcagtggctcgatctcggctcactgtaagctccgtctcccgggttcacgccattctcctgcctcagcgtctggagtagctgggactacaggtgcccgccaccatgcctggctaattttttgtatttttagtacagatggggtttcactgtgttagccaggatggtctcgatctcctgacctcatgatccgcccacctcggcctcccatagtgctgggattataggcgtgagccagcgcacccggccaaaaaatcccattactctttatctgtagacatattaccatttggtattggtaccagtagacaaatagaagactactgaatgggattctttttttttttttactgtagcttttttctcctttgccttttgtacctcttccttacagactagatctgcaatgtccaatacggttgccactagccatatgtggctgttaagcacttgaaatatgactagtccaaattgagatgtgctgtaagtggattttgaagacatagtacgataaaaataatgtaaaatatcaataatttcttatattgataacgtgtgaaatgatatt

SEQ ID NO: 157750 - DNA, 321 bp, Homo sapiens
ataaaagagtcccccaacactagttctataaagggtgcacactgtatttacacatacaaatgcatgcagcacttgaaaaatattaagcaaccaaaacatacatatgtaaatatgtgcaaagactaatatacttctacatgtatgcccttattaagtacttttatgtttgactagatgtgcttcttttgaaatctttttagcttcattacatgtttttgtaatttcatggaagtaaattaaaagtaacatagttctaaatcctaaacagctaagactgcattaaattgccacctccatctacagaattgtatggcccttgaa

SEQ ID NO: 157751 - DNA, 498 bp, Homo sapiens
tcagcatagtgtccaaaacatttatggaggtaaaaatgctacactttgagttcgggtttatagagcaggtgtgtggaagtttattttaggcaagaagaaacttcaaagaacagattgggagacagtgtgaaaaaaagcaagtaaacatattatggaaaccgatcttgtcaaaggtgactagatcatacattggccttcattattggaaataatttggaaattggattcataatgaagtttccaccatttccagttagaagagcatcttacatcttttgtattgtgttctttgagatacatctagccttgcaatcttgtaatatttaccgaatgctactattttgcacacatttttaaaaatgaagaatatagttgttacgaatccctccgcaaaacctctgattagatttggcagaaaaatatggagagattgaacaaaagagatactaggtctgagatgtatgtatgttgtagatccgtatggtttattcaggaact

SEQ ID NO: 157752 - DNA, 382 bp, Homo sapiens
tctctgctctggctggtaacaaagtgccacagactggggtggcttaacttaaaaaaaaaaaacatttttttcacagttctgagggctggaagtctgcaatcgggtgccagtgtggtcgggttctgatgagaactctcttccaggcttgcagacttcttgctgtgtcctccatggtcagtgatgagagacagcgagcgagcaagctctcacaactcttttaataagagcactaatgcctcatcacctcacctaaacctaattttctgccgaaggcacatctccaaaccccatcgtattgggagttagggtctcaatacatgcctttggaggaataaacattcattccataagatgggcagatacaaggaaatgactggtacct

SEQ ID NO: 157753 - DNA, 718 bp, Homo sapiens
gttctagccaggacagttaggaaagagatgaaataaaagccattcaggttggaaacgaagaagtaaactactctatcagatgacatcttttatatagaaaatcctagagaatccactgaaataaaacaagcctttagaactaataaacgagtttagcaagtttgcaggatacaaggtcaatatagaaaatgaactgtatttttgtacactagcagtgaacaatctgaaagtggatttaagaaaacagttacatttaatatactatcaaaaataataaaatacttaggaatatgttgacaaaagaaataaaaaacttctctgagaattataaaacattgttgaaagaaattaaataagacctaaataaatggaatggtatttcctgttcatggtttagaatacttaatgttgtgaagatggcagtattcaccaagttgatctacagatttcaaatccttttcaaaatcccagctaggctgggcatggtggctcacgcctgtaatcccagcactttgggaggctgaggtgggcggatcacctgaggtcaggagttcgagactagccttaccaatgtggagaaaccccgtctctactaaaaatacaaaaaaaaaaattagccaggcatggtggtgcatgcctgtaatcccagctactcaggaggctgaggcaggagaatcacttgaacccaggaggcggaggttgtggtgtgccaagatcg

SEQ ID NO: 157754 - DNA, 398 bp, Homo sapiens
tgaactcctggcctcaagcactttccttttggttcatggaaatgttcattttgtttgggagcctgaggtttgtctttgtttcccttcatttgtttctgtggttgtcttgtgtggagcagaggtggcctctgcaagcatcatcttagtgacagatgaccaggtgtaccctgaactgcagccacgcaggtgcatttagagcatgagagaggtgggtgggcacagaagcccccttcatgccaagccttagggagttcgtcctgagggcactggggagccacagcaaggttgaagctgaagaagggtagaatcggattagagggttttcatttgtgtattttaatgctgcttagtacagaaggggcatagattgagaagaagatagtttgcaaacttgtcag

SEQ ID NO: 157755 - DNA, 348 bp, Homo sapiens
ggttcatgtactcgaaaaagttgaggtgcctctgaagggcagctccccgaggaaactcccaattttgctgccctctccaggtgtgcgtgtgagtgtactcatctgttgtttccatgtgttagttaacctgtattttgtgagctcctgtcgctactattgttgggcattggggaaaagagaaataaatgaagattcttgttttctcagcatcctgtttaaggaatataccatcttatatttggcgagctccataagagcagagctacccagaaaactgcccctatctatattggcgttttttccctagcttttctttatctctggaaaccacaggagcccttcgcctct

SEQ ID NO: 157756 - DNA, 412 bp, Homo sapiens
ggtttaagttcccatattattaggaaagctttagggtgcttcaggaaaacgctttttaaaaaatcaaatttggaaaatatcaaatggaattacaggcaataagcataacccagtggaaacatgaatcaaaccctctagagcagggttgtctaaattttgggttccttgggccacactgggaaaaaaaaaaaaaaaagacatttgtcttgggcccagcataatatacactaactgcaactgaaccgtgcgtgtaaagcttgtaaacaaaatctgtctgtaaagtctgtaaacaggccaggcgcggtggctcaggcctgtaatcccaacattttgggtggccgaggcgggcggataacttgaggtcaggagtttaagaccagcctggccaacatggtaaaaccctgtctctacc

SEQ ID NO: 157757 - DNA, 364 bp, Homo sapiens
ggcaaaggagaatggctgtgattagccatatatgcctataagaaggagcagagccatactgtccttgtgggttgggagaggggacacagaatccagggcaattgtctgaggtctcaaagtaagttaagccagagtcaaagccaaactccaagtcttggccaaggggatgagaaaagcaaggagctagtcttataggtcaaggaagatgaggtatagttaagagtcatcagtatcacagaacaggccagcagggctttattaggtatgtagaactattataaaccaaggatcttgggagatattaatatctgctggccagacctaaaaaaaactgaaggcccaaggaaagtgactggactcactg

SEQ ID NO: 157758 - DNA, 1207 bp, Homo sapiens
acactggattattctaaaggcagttgtgtatacagaagccaggggcgaaagaacttcgaaaatagcctagaggaaagaatgggacaaagagaggaaggggaaaaaaaggataaataggggaaaaaatgcaaaaactggagttttttggtaactaagaagaggggcattttaaaagccaaggcttggtaaaaacctagggaataggcttaagtagaaaggagatttgggaagctccagggcccttggacacctggcagtgagcatcagaaagaaaagtaagagttcttaagaaaaaccaatcaactttgcatttgccctggggctggcctggcagtgctgctatcagaattcagatactggcccagccctgctctagggcctgaagtttggctcttgcctcttcatttcagtccctttagctgcccatccaatctagatccccggagtgctcaaaggagaggcaacaagaagaaaaagaaaaagaaggacaaactgaaatgcaagcatggaccttagatgacgattctcacagctctcccccttcatgggaccttcagaattcattcttgtgaaagctgtaagtcaaggaggacacagccagaaaccgtgactcatcaaattcccaaagccaagaccagaacacacagactctggatccaaggactcgctttctgctttcagaacacgggatcctgcctactttgtagtatttcaatacaaagctgatcaagccgagggtccccatctactccccgccagcctggctgcccttccctgtcttcagagttttctaaatcatagagaagatagagtttaattccatggtgtttgagtcacaggaccttagaacacttcagaaaacgattggccttaaaacatggttgggtctgtacaagaaagtcactgagtacagaggatggcaaacatttctgtcatgggctaggtaaatactataggctttgcaagccatgtgttttctgttacatattattcttttatttgtttctttttgttttttgtttttggggtttttgttttttgtttttgagacaggatctccctctgtcacccaggctggagtacagtggtgccataacagctcactgcagcctcaacctccctggctccagggatcctcctgcttcggcctcctgagtagactgcaggtgtgcttcactacacttggctaatttttttattttatgta

SEQ ID NO: 157759 - DNA, 188 bp, Homo sapiens
ctcaaagtgctgggattacaggcatgagccactgtgcccagccaagattttttttcacctagaaataaaagtcagtattatatttttttgcatatacagttttgacttgtaaaatggaatcacctcaattgtgctactttaaatattaagcatagtttttaccttaactaaactttcaataagcttga

SEQ ID NO: 157760 - DNA, 559 bp, Homo sapiens
gggtttatcttatttaggtttttctctgcttcttaaatctgtaggtttatgtcttttgacaaatttggcaagtttcagccattatttcttcaaatactctctcagtcctactctctattcctctcctctgagacttccatgacacaaatgttggattttttcttattgtgcttgaggctgtgttcatttaattttttcagtctatttcttctttactgctcagattgggtaaattatattttttgtcctcaagttcattgactctctcctgtcatctccactctactactgagtccatttttggggtttatattatcaaattctacagtttcacaatttccatttagttctttttaaaataacttccatttctttgaaaagattttctggttttgtttgttgagtgataactgtgattattgaagcatttttacgatggctgctttaaaaatccttgtcagataattgcagcaactgattcatctttgcattgaggtcttctgatcatcttttttcatgccagtggtgactgtcctagttcttggtatgatgagtgagt

SEQ ID NO: 157761 - DNA, 329 bp, Homo sapiens
cagattctttctctacacgtaggctgcagtgcacaagctctcgggactccttctccttggcaggaggcttagctgcatctccactggctcctttctcacaggatcagaggtcttgatggacccagggctctatttccctggtaaagaaatgcacccattccttacccaccccatccctcttccctcaacacccctttcagctttgtggaaaggcaagcagaagaggagacttggaaaaggacttggacacacctaacccagaaaaaaggaaccttcccgactccctataatctagcccagttcactactttccatgcactgcggccaga

SEQ ID NO: 157762 - DNA, 165 bp, Homo sapiens
tcatcacgtcaactataaacaggtataaataactaagcaacataagcagaagaaagtgactatattttctcagttttgttgagtgcctagcaacataggccttttttttttttttttggggaaggggttttggtgctggggccccaaatgggggggcaggggcaa

SEQ ID NO: 157763 - DNA, 660 bp, Homo sapiens
tgacctcagctcagtgcagccttgaccttccaggctcaagtgatctcccacctcagcctcctgatagctgggattacaggcactcaccatcatgcccagctaatttttgtatttttgtagagatggggttttgacatgttacccagactggccttgaactcctgagctcaagagatccatccacctcagcctcccaaagtgttgggattacaggtgtaagccactgtacctggcctcttttttttgagacagagtcttgctctgttgccaggctggagtgcagtggtgcgacctcagctcgctgcaacctccaactccctggttcaaacgattctcctgcctcagcctcccaagtagctgggattacaggcacccaccaccatgcccagctaatttttgtatttttagtagagacagggtttcatcatgttggccaggatggtcttgaactcccaagctcaggtgatccacctgtctcggcctcccaaagtgctgggattacaggtgtacgctgctgcacccggccactctgcctcttatgtagattcttttccccaggtgacaagaataaaatcaatatgcctcagaaatgtataattctgagacctaatttcatccacttgtcattagtgcccactggccactcatcttttttgtcct

SEQ ID NO: 157764 - DNA, 191 bp, Homo sapiens
cagtcgcaagtgtccagctcgctgcatcccagagacagaacatagctgtgtagtcagcacccaggtggagacacagcagcacatcccagaacccccgaacccccactgcctccaccagagacaaccaccatcccaactgtcacagcatagggtcgctactgctgattcaggtagtaaaacttgtcatagga

SEQ ID NO: 157765 - DNA, 417 bp, Homo sapiens
tctctgtatgtccttgtgtacccatggctgagctcccacttatgagtgagaacatgcagtatttgactttctgagttacttctttttggcctccagttccacccatgttgctgcaaaagacacaatttattcttgttttatggctgagtagtattctatggtgtgtgtgtctgtgtgtgtgtgtgtgtgtataccacattttctttctccagtgctccactgatgggacacttaggttgattctttacctttgctattatgaatagtgttgcaataaacatacgaatgcaggtatctttttgatataatgatttctttccctttgggtatacactcagtagtggtattactgggtcgaatgatagttctagttttagttctttgagaaatctccatactgttttccataaaggttct

SEQ ID NO: 157766 - DNA, 364 bp, Homo sapiens
gcgcacacacgacacacacgcacagacgcgcacacacgacacacacgcacacacacgcacgcacgcacacgcacacgcacgcacacacacacgcacacacaaacgcacacgcacacacacacacgcgcacacacacacgcgcacacacacacacacgcggagggcgagccaagggaagggattcagaacaggatactcaaaaagaggaagaaccgtcgtttcaccacccgccgcagtgaaagctgaaattaagtgtcccctccacgacttcttcgacctctgagagaacttcgagtgcaggaacagtgctccaccaagcctgccacctgctttgtcgcgtcctaggctgggagcagtctgtggg

SEQ ID NO: 157767 - DNA, 350 bp, Homo sapiens
atatacttattaacactaaccaaacgtgtacttaaaaatgattaagatggtgagctttatgacatcccacccactctaagctatcggtcaaatgttccattcctacctagagtatcccacacacgggcatcactccgctgtggagagagggagtttccccctctgtctccgatacctgtgtagctccttttatcacctccccaggagatttctttatatttgaaacatcaggtataatggaattctaggcacgatatcagacataaatcactttagaatttcttctcagtgccttcaagtcacttgtggcttttttgagacttttgatttgtgttagaatattaccctcg

SEQ ID NO: 157768 - DNA, 512 bp, Homo sapiens
agtgcatggtgtttataaagtctacggtagtgtataataatgtcctatgccttcacattcattcaccactcactcactgactcacccagagcaacttctagccctgaaaactccattcatgataagaattttaacaggtataccattttttaattttttagatgattgtatttgtacagtaacttttctacgtatagttatgtttaaatacacaaatgcttcccactgtgttacaattccctgtagtattcagtatagtaatatgctgtacaggttgtaagttaggagcaatagattatgccatacagcctaggtgtgtagtaggctacaccctgtagatttatgtaagtacactgtatgatgttcacacaacaaaatcatgtaacaatgcagttcatatatccctgttgttaagcaatgcatgactgtatataatattctcaagtacattaacattttccaagataggccattgctaggccgtgtctctcaataaaagtactgaaatcata

SEQ ID NO: 157769 - DNA, 282 bp, Homo sapiens
gaagctgagggtgtttcatttgttccaagagctggcaaggccaaatgccaacaagcatatttatttctcaaacttccatttctgtaatggattggcactttatttatttttatcatagtcaaggttttatgcctgagttttgtagacactggaacctggcagccctatatctgcagtgcacttctcagggggacttgttaggttttatatatagtgagccctccatagccttggttccgcatctgcagatataaccaaactcagattgaaaaatttcacgga

SEQ ID NO: 157770 - DNA, 1096 bp, Homo sapiens
ccacctcagcctcctgagactgtaggcacactgccacatccagataatttttgtattttttgtagagatggggtttcaccaggctggtcttgaactcctgggctcaagccatctgcctgcctcagcttcccaaagtgctaggattacagggtgagccactgtgcccagccaataagttttaagtaggggagtaacagcacattttaattttagaaaattcactttggccataaaatggaaaatggtttggagaagaatgagacgtaaagtgaggagaaaagttagaagcctagtttaatagtccagtcaagagataatacacatttgaactaagggtgcatttgaacaaggatggaaatatggatgtggattttatttgaaagaagtttacaaggcaaaattgacaggatctagtaactcactgagtgattgggggaatggtaatggaacaggaatagtcttgtttctgacttgattgtctttagtcaggatagagaatgtaggagaagctcttaggatggagagaggagtggcataataagatgatttttggaaatgttgacttaaaagtcttttgggttattcaagtgaacttctccaactggctattggttgttggtatctgattaagcagatttggaacttctagatgtgtaagtaaagccataaatatagatgaagcctctacaaagacttatacatgaatgttcatggcagctgttttcagtcaaaaactggaaacaatccaatgttcgtcagcaggtgaatgaataagcaaattgtgatacaaacagtggaatactattggttgttggtatctgatgaagcagatttggaacttctagatgtgtaagtaaagccataaatatagatgaagcttatacaaagacttatacatgaatgttcatggcatctcttttcagtcaaaaactggaaaaaatccaatgttcgtcaacaggtgaatgaataagcaaattgtgatacaaacagtggaatactactcagcaataaaaaggaacaaactggctgggtgtggtggctcacacctgtaatcccagcactttaggaggccaaagtgggaggattacttgagccc

SEQ ID NO: 157771 - DNA, 317 bp, Homo sapiens
taagtgctgaatcacacagtgctttttagctcaggatgtagctaagcttatggggactggtgctggaaaccctttttcctaggccatagaacgtgctgaagccatggttgagctgggggtttaagagaatcccaatcacttgcaaagcattttcaaacaatatatgctcccctagaaattctgctgggaatccacatgaaaaatgagtatgtcaacaacaaccatacaagattttaagtctaacagatcttcatttatcagggactcttaactgcgaaagttaactgttgaggctaccgaaccttacattttgctag

SEQ ID NO: 157772 - DNA, 487 bp, Homo sapiens
cccaggctggagtgcagtggcgtaatctcggctcactgcaacctccacctcctgggttcaagcgattctcctgcctcagcctcctgagtagctgggactgcaggtgttcctgagtagctgggactacaggcgcacaccaccacacctggctaatttttgtatttttagtagagacagggttttgccatgttggccaggctggtcttgaactcctgacctcaggtgatctgcccgcctcggcctcccaaagtgctgggattagaggcttaagccactgtgcctggccaagagaaacagactttatgaacaaccacatgagacagtgagacaggtgatgaggacctaaactaaaacaatgacaagtgtggtgggagagagggggctgcattcccagcttgggaagccagctgtgcagcaatgctgttaaccagcatctagaaggcagagcagtgcgggactggaagtgtgagcatctgcgggtgcatct

SEQ ID NO: 157773 - DNA, 263 bp, Homo sapiens
tgctgggattacaggcgtgagccaccatgcccagcaaatgattcttaataaatatttattagactcctaagttccaagcagtgggtcagtaatgggaatataagcacatagaggggaatatatcatattccctccccttcagaagttcatttgtaagtcaggtatgcaaacatgaagaatatatcatgacaagtatcattacagagtcaggagcagagtgaaaacaagattgagtgggtgaccatgcattcactgaaagaagg

SEQ ID NO: 157774 - DNA, 321 bp, Homo sapiens
  misc_feature (119)..(119): n is a, c, g, or t
  misc_feature (122)..(122): n is a, c, g, or t
caccgacgttctctctgtgggggtgcagactgtagatgggaggcctgtgtgtggtgcagtgggtggggggcgtgggaggcattctctttaccttctcctgtccaccaccagtaggaccngtncttccttggggctgttttttatagccagtgattatagccttgagggttatcttcttggaaatttttctcactagccctgagattaataagcttctggaaacttcaatatcattatcaagaaaaacggagacaacagtacttgacttgggcttattctcaaagttcaatgaggcagagtccgtccccacagagagagcgt

SEQ ID NO: 157775 - DNA, 423 bp, Homo sapiens
gtaagatttggtttggattacaccaggcatgggtacttaacataattggtcatttcatcagttcacagtctttattttaaatgccatttaggctgctacagacagtttcagcaggctagagagcacttcaattcttgtacaatggaaaccaagcagagcattagaaggggacaagctcatttttcagaggggacccagggcaggctgaacagaagagtggcttattcagagccctgcaggcgtggccagctgacaggtgtccccaccgtgccttcttcttgtgtctgtgtgtctctgtgttacggtctctatgtgtttgaaacgtgttctttattttattcgtttaattcatttactaatctctcttattttgttaatgaaaagaataaagtcttttttatattttcccatttccaaactccc

SEQ ID NO: 157776 - DNA, 254 bp, Homo sapiens
ctccagtcaacagaattaactgagccttccttgaatcatcccagcccaggtgccagaagtgtgagtgaggaaaccttcaggtgatcacaacccccagctgttcccatcccccacagcttttgtgtcttcccagctgaggccgcaaacgtcatgaaacaaagacgagtcatccccactgtgtcctgccgaaattcatgacccacagaatccatgaacttcataaaatggttattgctttatgccactaagtttgg

SEQ ID NO: 157777 - DNA, 491 bp, Homo sapiens
accctgaattcattcacattgataatccaaatctctgttttacatcatctaattagtaaaacaaaaaccattaagctctgtatgtagtatatgaaatctgctaggaaatggaaattctagccataacttagctatgaaatactaattaagaaaaacaactcaaacaatctcagcgtatttgcaaagcacctcatatgcattttaaatacaggacccagagaaatagctgcgaaaggaaagccaaagttattaaatccaaagtttttcattttcttgacatgctctttctatttaatacagaaatgtactaatataggttgccttttggtattgtaatttggtcaaccaaaacttgggaaaaataggtccaaagtttttcattttcctgacatgctctttctatttactacagaaatgtactaatataggttgccttttggtattgtaatttggtcaaccaaaacttgggaaaaataggtttattaataaca

SEQ ID NO: 157778 - DNA, 615 bp, Homo sapiens
agccgaggtcatgccactgcactccagcctgggtgacaggcgagactccgtctcaaaacaaacaaacaaacaaacaaacaaacaaaacagagactttgacctgttactgaaaccaaacactgtccactagcaaacatggtgtttttcctccccgaaggtaggaggctgtaagagattattaggggcaatgtcagggaatttaaagtaaactactttggaaagaagaggctgttaacttttggtcaacgtcacacagaaagagactatgacctcttattttctcccaatgtctcctatattcactcttgtgagagaatgaaatattcctattaggcatttcacaacatcgaaagcaggagtgtccaattttttgccttctctgggccacattggaagaagaattgtcttgggccacacataaaatacactaacactaatgttagctggtgatacggttaggttttgtgtccccactgaaatctcatcttgagttgtagttcccataatccccagatgtcatggtggggacctggttcacaggaggtaatggaatcatggaggcagtttccaccatgctgttctcacgatagtgagtgagtttctcatgagatctga

SEQ ID NO: 157779 - DNA, 412 bp, Homo sapiens
ttctgtgactcattagacagggctagctacccttgctctccatctgaagagtccccttattttccttatcattgtattagtcaatcctgaagtatttattcaattagcagcccctatgctgtagacattaaactccataaaggcagggaccatttcagtcttattcaccacttgaatcccagtgcctatcaaagtacttggcacataaagatgcttaatgaatgtcagtttaatgagtgaatgatgcataacatgtggtaggtattaattaaatgtcatttatcgagcaataaaggccagtgcagtggctcatgcctgtaatcccagcactttgggaggccaaggtgggaggataacttcagctcaggagtttgagaccaacataggcagcataccgagaccctgtctctac

SEQ ID NO: 157780 - DNA, 507 bp, Homo sapiens
acagttactgcagtatgcttatttgactttgctttattgcttttattttctgcctgacatatgttaatgtggccaaatagggcatttcccagacaatccttatagtttcattctgtgctactttaaatgctgttctccttccctgaaatgtcctttttttttttcttttcttttttttttttggaaactcgcgtttccaaaaaaaagaaaaaatttgggagcagttctcccaagatgctgttcacgggtataccggtttgtgtttatgacgtccctccctccaagacaaacaacaacactgtgaacgtgggacccgggttcacaaagcaacggccaagggttatcggctccacggctatgtgtgtgtcggtgtccctccactttattaacttcgtgcactgcgggtgtaccccgcaaaacgaaacttccctatacgcttgtaatatcccatgcctcttacaactgacaatatattgtctctcttgctatcacattctcgcagggtcg

SEQ ID NO: 157781 - DNA, 430 bp, Homo sapiens
tttcataatcagtttggcatgttctataagaaatcttgtggggattttgatggaattgatctaattattataatttaattttatgtccaagaccatggaatacctctccttatattttactctactttaacgtctctcaaagttttgaaatcttccctgtaactttcttatgtgtagtcttggtactttaaaattcattttctacctcttgcttatataaagaaatgcagttgtcttttgtacatttttttatatatttgtttagaaagcttactaaacattctttttaaatctgataacatatttgtggattcttgggtatttttaaaagagatgatcattctcagcaaataataatgcttttgtttgttcttttccaaaccttatgccttttatttcttcttttgctttttgtgggctagaatctaca

SEQ ID NO: 157782 - DNA, 373 bp, Homo sapiens
agactgacatgttttattttcctcttaaatcatggctccttacagccttttacctctcagactgaaccatgaggcttcatgccctcggacggaggaccagtgatgcttagaataaataggccactggccagcttagaatcttaaaactttaaaacagccttaaaatgagacattatcaaggagggaaagggattttaaaaaattcccttagctcttttaactatggcaggacccaaccctggaggactagataacagagtttcaccacaggccctgtgtggagagcgctcgaagaagccaggcccctccagtcttagagcgctatgggagaaaggagggaaatcagaggccacagagttggattttgagaccc

SEQ ID NO: 157783 - DNA, 164 bp, Homo sapiens
aaagaccaggacattctatgattagctgccagattaatgatagaggcaacagaatgtcctagggatttggagagggagatgatcatgttagaatcatgggtcaacaactgctgtagagcaatggaattgactttattgatttttaaagaaatggctaaattcag

SEQ ID NO: 157784 - DNA, 125 bp, Homo sapiens
tcattgcccaggtccaggctttcattggctctcatttggactatcaccagaccattcgatctctgctcattccatcttctacgttacggccagatagcagtcctccttcaacacatatgtcatat

SEQ ID NO: 157785 - DNA, 231 bp, Homo sapiens
ctgtgggtccccaaagcctgaccaggggtttggctgatgttcctctgcagagcaggccagctgcctgtcatgttgttttgtgtcgtggaaatcccgcaaagagccagaagtaaggggctcataaaacacaatggagcctcttataatccataaaaagaacaggagttatcccctcctccccaaaacctaccatcatcattgctatcccctcagcaattttgtccaggtgca

SEQ ID NO: 157786 - DNA, 589 bp, Homo sapiens
tgagggtgagaggagtcctttgacagtgtccacagatgaagccaaagggaaatctttcttgctgtagcgacctgtgccatttctcatctgtactctggcaaagtccttttctctgacaccttggaggcgaatggaagggaaagcatttcactttctccttagtctgttccccttaatccctccctcctccagtatttactgcgttccaaaggtggtcccgggttaacccgggacctcctttgcacccgtcagaaaagtctagtcagtgtgccccagaaaggccatctcccactcccaggacccagaaccttccagtcccacagcttaggaaaaaaatcccaactgccaacctctgccaataagggtctgccaggcctggccctttgccttggtctcccacgattctccctctggcttccctgtgctggagtcccactgccctttttactcctggaacatcaagctcgcttctctgctcctcctgtcaggcgctgtcttcagctgattcttcccctaactcctcctcattggatctcaccaaaggcggtcccgggttaacccgcgaccgcattggctgtgccggccacag

SEQ ID NO: 157787 - DNA, 671 bp, Homo sapiens
attccattccaatttcaccactttaaaatttaattgaaattgctcttctggctcaaaagcaggagagcacacatagaaaacactcttaatagccacaaatgcaacaggttaacagactgacatctgttttttggccattcatatcagggaaaatcattaaaaaccactagtcaactcatcaaatgcacgtaaaaatatgcccactagtgagtctttagggaaacatgaaataaaatagagatttaggttagaggtctgaaaggaagtaaacatgaataattattctaaaaggcactaaagcacagagatcaatgtttacttaaaacagactttaagatactttggcccatcagctgatttttcattttgagaatatcctcacacaaaagtcaacttacttcttcgtaactggtgattctctggatggtctatacaaagtaatatcagaatgagcaaatgtaatccattaactcaacaaatagttaaatgcccaccaaatgttctgaaagcactccaaagtcaaatacagatggtccccggcttataatggtttgacttaatgattttccgactttaagatggtgcaaaagagatacgtgtttggtaggaaccatactttgagtacccatacaaccattcactttcactacagtacaaaaaattacaggaga

SEQ ID NO: 157788 - DNA, 367 bp, Homo sapiens
agctgccagaaagtagaggggtttagtaggcaaagcataagcagacccaggaatgggaggggagaaagtgattgacaggcagggtgaagggagtgaatgagtctattctggttgagatggtgtggctcagaggtagagaagagattgaggctcagtgatggggtttcccggatgccaggctgtggaatggaaatctgatccttttaggggaaggcggcatcaaagagtagggaattgacagggagttgctatttttgtatgtaactaagcagtaataaaaacaaggtttttgaatgagttttagaatggggtcttagaaagggatcagaagcatgctgcaaagtcagccagttaagaggtcaccttt

SEQ ID NO: 157789 - DNA, 716 bp, Homo sapiens
tttgtgatttatatttttctgtacttaagaaagtataggccatgtgtgctggtctccaactcctgggcttaagcgatcctcccacctcagcctcccaaagtgctgagattacaggtgtgagccaccatacccagcctattcaaacatgtaaagaatattacaaatattgattacctactggactacaaagcaaatcttaaccaataccaaaaaatattacatagattattttctctgaacacattacagtagaaatcaataacaatagcaacaaacttttagaaaacctcatatatacagaaatttgacttctgaataactctgggtaaaaaatctatggaaattagtaaaaacttagaaaaaatgatatttcaaaacatgaggaatagttaaaacaatacttaagaagaaatacatagctttaacggttatattagaaaagaagattgaaaatcagtgagataagagttcaacttaagaagttagaaaaagaacatgtaaacaaaaataaattagaagacaaataatttaaattacatatataaagcaaaaattaatacaataaaaaacaaagacacaatagagataagtggcaaaaccaaaaactgattatatgaagactactaagatacataaactattggcaagaatggttaagaaaaaacagaaggcacaaataaacaaagttaggaaccagaaagcagtaaaaaaaataa

SEQ ID NO: 157790 - DNA, 359 bp, Homo sapiens
ttggagttgtagaaccctggtattgatgagatcatttcctgttttaaaagacggcatgaattaaaagcaggaaggcaaagtcatcagaagattaggggagggagcagaaacagtcactagagaagggtgatagttgcctctgattttgctgtgagaagcaatttatagctttgggctcatgcagaggcacccacagttatgtcatatcctgaatccttgagaaaaacaagtgtcatttctttacctgaaaatccattcagaatgggattcaaggttatagctctaaaaatgtgggctagcagcccttcagccttatgttacataaacatacataaaagggaaggagctgttgcatttgt

SEQ ID NO: 157791 - DNA, 566 bp, Homo sapiens
gaaacacctcatttcttttctgtaccactaggaacagaaaatgttaaactcagaattagaaccatactagatatagaatgacactgacgtggaaaagttcatactttcaggaacaaaagagtggatcaaagtttttggccagcaagagatgtagcaaacaatttaacattgtggtggctgaggaaactttattttggtcaacaggccaatggacagtgaagctagcggtgataagggaggtaccatgcgaactccctgataccaccatagcagcattccatttctatcagccacgccacttagatctgacttatacttctagaactctcaattcctagcctataacctatgatcagttctcacagattatagctttgaataaaaatacatctgtaaacctgaattctaacctcccaaaataaagtagctatttttcattttcatttcattttactgggggcccttcagtctccttaaaaccacttaaagataacaaattgcttaaagtaatacttccccaaaatccagctcttcaccactatacctgtaggtcacttagtctgtat

SEQ ID NO: 157792 - DNA, 230 bp, Homo sapiens
tgatacttagcgcccagagcagagataagagggggccacgttgtcatgaggaacacctcaggagcagcccaaggagtgggggtttccttctgcggtgtccctgccaatcaggcagaaaggctctgggacaggttcacctcctcccttccccgaattcgtgttaaaaggaaatcacagctgggcacagtggctcacacctgtaatcccagaactccaggaggccaagatgg

SEQ ID NO: 157793 - DNA, 375 bp, Homo sapiens
gtgtggttctgggtgtctttgtcctgggcagtggtggtgatgacaggctccccaccaccccagctcaggcacaggtgatgccaccaatggctccttatttctcagacgcttgagacagggtctcacctgttgcccaccctggagaccagtggtgtgatcacagctcactgcagcttcaacctcttgggctcaagggattctcccacctcagcctcatgctaccatgcctggctaatttttgtattttttgtagagacagggttttgtgatgttgcctaggatggtcttgagctcctgatttcaagcaatccatccgccttggcctcccaaagtgctggaattacaaaaacggtgcccagcctatttttttttttc

SEQ ID NO: 157794 - DNA, 523 bp, Homo sapiens
tactggacatcccacaccactactggcaagactgctgcaaatagtactggatgctgttgctggtactagcacctctgctcaatagataccactactagtactggaattggccaaatgaatactcaacagacacctgctttgttgtactatttgcttcagatttaaagtccacaaacagctttagctgctaggactagagtacctgcctcttctagcttcatacagtagtagtgtggaagatgctgctagttgcctacacaatatccattcttcccttctgaaatagatgtccatcagaactgtctgcatttaaaaatccaagataatctacagagtattagaacaaataaaagggttttttgttttttaaatcaatccaaaaatgactcactgtatattgaatttctatataccaaccatagctgattggaaactacaataaaaatatatagcaacagaaatataagatatgtagaaacagatctaataaagtatatgaaagacattaaaccacaaattctta

SEQ ID NO: 157795 - DNA, 597 bp, Homo sapiens
ctgatcatatcaaactactcctgacttcgcaaacaagtccagcactctccatccacaggactccatctaaacgtgtcttccctcagcctgaaatgtctttccttcacttgcccttcaagagccaccctaagagtaaactctggaaagcctttccttctacatactatttcaaccatctcaccccatcccaccaagcccctaggtttatgccccaggcatacctctatcacctggcatttatcacactagactaggtattttatgaccatggaaaatggtaagtaccataaatgatgtctaatatacaaagttattttctaaaatgtacaaacgtcacttaaaagcaaattactaaacttcagccagagaaatttgtttagtttagttttgagacagggtcgactttcttgcccaggctggagtacattggcatgggcatgatgacggctcatggcagccttttgtgtgctgcctctgggtacccccagcccaacgtgacatggctgcagtgcagtggccacacttgataggtgtgatgaggcccaagtgctgcaggtctgggatgacccatatcctgagtcctgataccaggagccc

SEQ ID NO: 157796 - DNA, 519 bp, Homo sapiens
tgcttattatgtgttgatgagataaataaatgaatgagtaaataaatggacgaaggccttcaaaaatgtcctggggaggataagccttaattccaaagaaaaatgggagcagaaagtgtccagttaaaagtgtgcattctaaggagtgtgtgttcctcctgcaactaggagagcagcccccctcgcctccacccgcctggggtcctctcacgaggcaagcacccagccccctgcccactcctgccctttgtccaagcagtcctcaagctagctgtgcagcgtgtgtcttggggtgcttctgaattaacacatcacaggatgggagctgacagaggagggcagaaatccccacctcctcccaggctgctggcagctgtgtgctccagttatgccttctccattaggtgccactaatttccatgattactgttatgtctaaatggcatcctggtgtaatacaatttatattatctctgcttggtgtcggttaccattgttttcatgatattcaatgggatc

SEQ ID NO: 157797 - DNA, 501 bp, Homo sapiens
ccagttaagcccctctttcttgtctgaatcagctcccaggccatcagctcttctgctgagcctgatgactaacttactctcaggccgttcacctggaccaggttaatagctctacccattgccaggtacttagatgctccaaaagagtttatttctgtcaccagcaataagcatgagatgggacaactctaatggccagtaggataagaaattctgcccatgtttggaaatcactggtagctgtttatggtacatattttgcatattgaactctgtggctacacctgaacattagcatatttcactatttgacttgaattttgtttcttctttttttgatttttgtttttttcttttgctacattagaaggatggaaaaaatatttctcttcaccttccgaaaagtttaaactttaagcttttcctagcctcaaggaaaaaaggaaccctgatagttgagttgctaataattctggctttaggcttaatggaccataaagg

SEQ ID NO: 157798 - DNA, 207 bp, Homo sapiens
aaatgcgatatacacagttagcaatagtaacacagacacacaccgtgaacaaacatgccaggatcagggacatggattctcattttatgcgcgtgttaagtagacaaagacagatatatatgcatactgggttgcaaagtacaatgtctttggccaaaacctgaaaatccagttcagttctatatgttctcaatgtcaggttcatta

SEQ ID NO: 157799 - DNA, 177 bp, Homo sapiens
tatggtgaagcacattttccctcctctttgagagcagagtcgtcactcagtgacatcactgccttcgtttactatatggtcagccctctgtatctgtgggttccacatccactcattcaaccaactggggatcaaaaatattcgaaaaagcaaaataaaaaatgacaatacaacaat

SEQ ID NO: 157800 - DNA, 545 bp, Homo sapiens
tataaaacagaaggatgcataactacctagagaatctggatcagcactgctattcaccctgagaagggtaagaagagcacctggctggttttagtaagttcacaggaagtgagcaaaaaaaaaaaaaaaaaaaaaaaaaaaaaaatgtgtgtgggggcgcgcccggcggcccccggagagaaggttttcgagagaaccccatcgcggtgtggggcgcgcgcggcgggcccccagtgtggtgtttagagtggaaccgggggggcacaaatggcgtgtggctccccagagagagggagacatcccgtgcggggctcacagagaccactaaggggggcggggcgaatctctctctacccccaaatataaaaaaagcgcccgcgggggggcgggcacgaagccggagagcggcttctgggggaaaaacacaactctccagacgagtggggagccacctccgggcggagggggcccaaacctagcgggggggatccttatactcacaaggggggagggtctcccaaggaggaaaccggcgaaaatactaa

SEQ ID NO: 157801 - DNA, 316 bp, Homo sapiens
accatcaagcttaactcttctctggattctctttataagtcctataccagctcacgatggtagcatgctttaaagtttgtaatttgtatcagctcagacgagttcatttgagccacacaggactctttatgggatacacagattagggattctcttcattttaaagatgttgaaaataaaatgtagacaagtccttgtataagatcacatggctcagcacattcagacctgcatggggctgcccaaggtggcacactgaggtctgcttctctgatctagtgactcaatgaggagtttttgtcatggcaacaccaca

SEQ ID NO: 157802 - DNA, 337 bp, Homo sapiens
tggtcctatgcggtgctctacttactccggttgcctctactcatctactgactgaatggatgactgggtgaatgactgccttagaaaagctaacaggcaaggaagaaagccctgaatgagcatgtgcttggaccctgactgtcttgctgagtgccaggccaggataccggccccaaatcaattgacccttactcttggtcttggatgtaggctagtctgaagggaaaaagccaccgggagggaattagttttcagctaatacctcatgggacaaagggctaggaaagtagtagttctaactttgggtatggcagagaaaaccttccaatggccaggc

SEQ ID NO: 157803 - DNA, 609 bp, Homo sapiens
gaattaaagtgcttgtaaatcagatctggagttaaataaagtaagcaccacaaagcatatggcttgtctctttaaaggttctatttatatccattggatgacaaccattaggaggtacatagctcccttagccggagttatagacgcctaaaaatatatttcctggcttccaccaggaactggcagggtctcaaaaagaagttcatggtttggccaaaatacaaccattctttcagacctatgttgcctgcattacagaatggctaggtcctattagtacaagaaggaaatatttagatttgtgttagaaaattaaccttttcctctttgcatttgtagtctaaggcaagcattgggaatcatcggccatttgcctagcacaagctttaaagtaggttccagaatcagtcttatccacagaagtgctgggcttgcttctagagttttccctaccgaacagaactcatctgttattactgtgctccagcaaacaccaaaactttatcttaggtcgtgatattttttaactgtttcaccacctgataatatgacctagccacctggaagctgagtgaaatcctatcacaaacccacagatagcatgcccgt

SEQ ID NO: 157804 - DNA, 742 bp, Homo sapiens
gatcattttatttttaaagcaaagcttgtaaatattaaagttgattaccattccgttattcatttattattcaaccatttattaagccctatgcatcaggctgtgggctagataataagacaaaaattaaggaaaattttcacttttaaggagctctcagtttagtggcaaatggggccaataccacttaacattgttcataaggaaacagcttctgtggatctgcagttgtttagagttagatgtgttcttggatatgtaactaaaaatagaaacctttgatctagaaattaacctttggtgagtagcaagaatttatctttttaaaattaactttttaaaataaggttgattttgagactccttttaaaaattcctttggctaaaatagctttggaaaaaaaggggaaaatgtaaaaaaagaagctctcttgttccctaagtgagaggcaaagatattgcaacaggcaaatcttgctctcacctgcactcattttcatttgacatggtgcaatttttagatctttttatttccttaagaaatttgcatttgccggaaagaaaagcatgcaaatatctgtaaatctctaaccctgtttcctcatgttgggtatattctcacaaagccttctagattacaaagacattaagaataatataattcagctctattttctttgttttgagcagcaaatgtttctggcaattagcatgcatccattaattttctatgcttagagtt

SEQ ID NO: 157805 - DNA, 288 bp, Homo sapiens
tccttaactttcaaatgggtgccaaactccctcccttgctaccagccaactgtaactgctatgatttccatactcttgtgcagagctttttacttccccgtgatgctttacagttttgagttataataaagcttttcttttttttttttttttttttttacttttctgttgtgtcatttttcttgttaagtttatgctttaaggagttgatgccttgcgtatagtttggggtttggtaggatggacggcagtctgtgtgagcctatatgggtgtgtcaaatccagtcg

SEQ ID NO: 157806 - DNA, 402 bp, Homo sapiens
tttttgccagtaactactgagtaattatccagattactgcacgaaaagcaaattaaattaacgacatcacctgtgtaacatggatttggatccctgccagtttcctaaccttttaaactgagctcaagttaattaaacattttttcaatcactttgatggggatatgggggaggacggaagagaggagagggaggttggggcagtgaggaagccccttgccacacactcctttggaaatgagtatctgtccttcttgggaagaacaccagcaagggagaggggttgtccttgtgaaagcgctagatgtgtactgtgttagcacgttaagtttgtgaggttggaacatggatctgtctctggaaaagagagggtgacagctgaggccagggaatggattccac

SEQ ID NO: 157807 - DNA, 783 bp, Homo sapiens
aggatccacatggtagttccggttgtagtttcttttactttttttttagcaaaagacaaagggaaacaacaaccagaactaccatgtattgagggcttcctatatcccaggcactgaaagaaagtgaacttgctcgggcatgcttggggcccagtaagcaagccaaattaaatacaggcggcctggcatggaatccgagactgtcatcgacaataaagaggtgaaaactgtttgcagagagatttaaataaactgtttgaaagtacatccagtcatgcacagtccttcgctaacttcaagaagagcacattggtgttaagtaaggggaaagcatcagattgataagtaactgataatgatcagcactgatgtttcggaggaaatatgtgttgcagagaggcagagaaccatggtggcattttgcccagtgagatgtgtcatgcccactacaggcccctcctttagagagggcaccttctgccatcttcatctctccccttggtttttattcattgttccttccagtgcaagaggatgtcacatttcatagatatatgtgaaccacagagacccaccttcatccagggaactgcaattcttaggaaggcactggggcatactcaaggcaatgagaattttttcacaacagaactcctgtggcaacaggatggaacttaacaaaggggactgccctttcagaaacagtctgtcctgcaacagcatggagatgacaacagggacaggttctacttagtgatgacagggatacaggcatcctggctc

SEQ ID NO: 157808 - DNA, 537 bp, Homo sapiens
ctttgtatgacttttgcaagcttcctttctccttcagactcagtttcctcatttctggaaaatgggaagccaggtgccatagcacatggctatagtcccagctacccaggaggctgagacaggaggatcgtttgagcctagcaatttaggtctactgtgcaccatgattgcaccggtgaataaccactgcactccagcctgggcaaaagagcaagaccccatttctttaaaaatttatttattttttgagacagagtcttgctctgttgttcaggctggagtgcagtagggccacctcagctcactgcaactccagcctaggcgacagagcgagactctgtctcaaaaacaaaaacaaaaacaaaacattaccaacaaccagtagctgaacttgtttttagtcatacgagagttagtgggtttcatctgaatcaagagactcatgcctaattacataaaaactaccatctagatgtccttctcactttaggcatttatttttccacttattttccaataggattgtaaactttccga

SEQ ID NO: 157809 - DNA, 180 bp, Homo sapiens
aaacagttcagactaaaataaacaaatcattatctgcttgataaatcttcttggctaaaaccaatgtaagtgggaagaaagccacatgtagattgtagtttgaagaataaaatggtgaaaagggatggggcatggtggctcacttctctaatcccagcactttggtaggctgaggagggc

SEQ ID NO: 157810 - DNA, 299 bp, Homo sapiens
tctagttcttcaaggacaaaatccagaaaacttagctaagaccatgagccccttcattagccaacccttgcccatctttcatgtctcatttcttgtcatccacctgcaccacttttactctggccacactaacatgctaggctttcttttcctctttattctcctatgtacatatatttaaaataaatttccccatctcccatcctttaaaattcatctcaggcactgtttcctcttggagccctcctggacctccaaggttagcaccatccatgctcccagagcaccgtaggtttgcc

SEQ ID NO: 157811 - DNA, 461 bp, Homo sapiens
tgcagagagattaagtaactcgctacaagaagtcctcaaaccatttcatccctgcccatgagcctgtgcctttgactcaacaccttatttggggctctccagggatcagagatctgtgaactctcaatcccacaggatgcacttgcagacacagtactggcacagaagcattggccacccaggctagaacaggcctgcctcaaaagtcacagagtccgaaccagaatgtcatccttgactcttctgctcctcatttgtccagcgcctgctcacacctctgatgatggagagctcactacctttctaagataaagcttccattcttggcccagcctggctgcttctgaaagccatatgttgcattcagccataatctgcctcctgcagcttcctttaaccagccccagctcttcctccagaggccacagagatcttacctgctgctgaagaacagttcatct

SEQ ID NO: 157812 - DNA, 432 bp, Homo sapiens
accacaggtatgtgccaccatgcccggccaattttgtttatttttttgtagaggcggggtctccctatgttgcccaggctagaactcctggactcaagcaatcctcccacctcagcttcccaaagtgttgggattacagacgtgagccaacacgcctaacttagttacaatattttaaacttacgatgtatttatcaagatgtagccccatcatatgttgaggagcatctgtatattctcaatatatttcttttctctggcgagaccccagttcctaaaatgacccaaccttcttatttaccaacgggcaacttggggagaggatgttgaatttgacctctggcccctaactcagggttctctaaagtagaatttgggcttcgtgaactacagtgtgttttaaaagtccagcggaagttgctcctcatcccc

SEQ ID NO: 157813 - DNA, 406 bp, Homo sapiens
tgtcaattaatgaatcagcctacatgtggcttaaaaaaaaaggtgaaataataaagtaattaaattttaaaaagaagagaagagttattaaaccttgcaacctagtcccgttgaacacaattatggctctgaagcagaccttcccattgaatgggtgaagaaacctagtgagagctcattaaaagctgatgtaaactcaatacccagcctctggtgttcagtgaggacagcactcatagatgatgggttctttctttctttttctttttcttttcttttcttttttctctcctctctcccctctctcttctctctcatccagactgggtctctgttgcccaggctggagtacagtggcacaaccatagctcactgtaacctcaaatatcctgggctcaagtaattc

SEQ ID NO: 157814 - DNA, 185 bp, Homo sapiens
ttcagtggattggagtgggtttgatttaaagtatttcaagtctctttactattaaatataaagctaatttttaagattcagattttgaaggattgtaagagacccaaaagattgccttattgagttgaggaagttccctttattcctaagtttgctgactgtttttattgtgattgggtgttgga

SEQ ID NO: 157815 - DNA, 446 bp, Homo sapiens
caagctctcaccatggagaggacacactcccacctgaacagtgtacccgaactctcactgtggagaggacactctgccacctgaatagtccacccaagctctcaccgtggagaggacactctgccacctgcatagtgtacgcaagctctcactgtggagaggacactctgccacctgaatagtgcacccaggttctaactgtggagaggacactctcccacctgaatagtgcacccaggttcttaccgtggagaggatactctgccacctgaatggtacacccaagctctcaccatgaggagacactctcccacctgatcagctagacaggcagagctgtgggcagtccctcttgcctttcactgtgccatttctcttctcccttccctgggagtggaggtgttcctgcatgatctgctgctgcagggcaggggacggcagcttga

SEQ ID NO: 157816 - DNA, 286 bp, Homo sapiens
ctcgccgcggaacgggaatttcgggactcgtctacaaggggagccaggatacagagcgtgacaccaggaggggtcctggggcgatattgggaagcactcacagacagcggagtcgatggcaatgaggccttgaactgcgagaggattgtgggtgagaaggaggagcagggaattatttataaaaggaatagatagggatgaggtatccggagggtgatcaggaagtgtacctgggagatttacgggggtaaggaggagccagtatagtgatgagaccgtctagggt

SEQ ID NO: 157817 - DNA, 497 bp, Homo sapiens
aagcgagtctcctgcctcagcctcccgagtagctgggactacaggcacctgccaccatgcccggctaattttttgtattttcagtagagacggggtttcactgtgttagccaggatggtctcaatctcctgacctcatgatccgcccgcgtcggcctcttaaagtgcttcttttcgaaagcagctccaccagcaaaaggtaggaggaaagcgaggaaaccattcctcgcttggttaactcttgggtgaaaggacgccaaatgagatgatctaagaagcctcaaagaaagacagacaggcacagaaaaatcacagcaactctttggactgcaaacaccaacaccacagtccaacctaccagaaatcctgtggttaattggaggcttgccccgctagtcatgagatgattcagtgatcgctacaaacgctcctcacatgcatcctggacctggcacacctggcttgcccatcaccagcctggagacaccgccaggagca

SEQ ID NO: 157818 - DNA, 428 bp, Homo sapiens
gctatccgagcggacctgcgctatgcatcggcaccgtcgctatgcatcggcacctcgctattcatcggcacctgagacctgagactaagtaggaattactagagacagaaagagaaaacccatccagcagggaaaacagcttgtgcaaaggccctgtggctagagtatgggaagagaaaggaaaaatagtctgagatgtggctggagaggcaggcaggggccccatgatgtaggggcttgtgggtcacgtagagagcatggccttaaactctgctggattttctggcaggggatgacataagatgacttgtgggtaggccagtctgaggctggggaggtggcagggcaaatggagaagcatgtgtggacttaagagaggttgggaaggtatgtttgagtggacttggagtggccgtgagagggaggaa

SEQ ID NO: 157819 - DNA, 427 bp, Homo sapiens
gtagcaggagtaacatgactgagtttgaggaggaggtcagagaagctttccctgaagaagtcatgtttaaatgagacctgagactaagtaggaattactagagacagaaagagaaaacccatccagcagggaaaacagcttgtgcaaaggccctgtggctagagtatgggaagagaaaggaaaaatagtctgagatgtggctggagaggcaggcaggggccccatgatgtaggggcttgtgggtcacgtagagagcatggccttaaactctgctggattttctggcaggggatgacataagatgacttgtgggtaggccagtctgaggctggggaggtggcagggcaaatggagaagcatgtgtggacttaagagaggttgggaaggtatgtttgagtggacttggagtggccgtgagagggaggaa

SEQ ID NO: 157820 - DNA, 371 bp, Homo sapiens
gtaaaatctgtcaatccattatctacattcataattacaatattatgaatacaaatgaatctttttagcatgattcttatgttctgaacatataatctgtcaaagtgacctcattccctggtagataaactatacaagtcttactccaaaacagatggggcttccttcaggatctgactctagcctatgtttcctgtgactccccaccgcagactctaagctctagccttataaattattttcatttgctgggtattttgtgtctttctcatccctgtagcttttcccatagagtcagagtggtttttcagactacaaatttcatggttccacttctctctctttttcaatccttcaatgtcttcattgag

SEQ ID NO: 157821 - DNA, 331 bp, Homo sapiens
acgctgtctctttcttgccgtgtattattaaggtcacacgtggagattctgggcaattacagatagtgccttctcctcccacagaaatctccatgtcagacatgtagtagagaaaaatctgaagggaagtactgaaggtctaccaaaacttttcaagccatcagagaatgtccttttatgtactttcgtcagtcactgtcattcagatgcataagtagccagctgatggaaaaaatacacagctgggttggggaattctgagtttcaggattttgactaactggctcaaattcaatgcgttttgtcaccaatactggagatagtctccagc

SEQ ID NO: 157822 - DNA, 416 bp, Homo sapiens
aggaaaatgaatttcatactccagtagtgttaccaaactacatttccccatcatggtagcctaagccaggaagtggagaaaagagaaggatgtcattaagtggaaaataatcaggtaatttactcactctctacattttcccagaaagattgtcaatatttcttcagcaaacattattatgcacctgctaagtgccagcttctcttctcctttctacagataaaaagataatttagacatgattcttgccctcaaggacatgcataaaaaggtactctcttctcactgaaaaatgtgttcccactttcacttaaacctaggaaagttaaaaccacccccaggaggtttctttatattgtctgcagtcttttctcctgaatattttctttccagtattctggtcacaaagcagacag

SEQ ID NO: 157823 - DNA, 235 bp, Homo sapiens
ccatgcccagctagtttttgtatttttagtagagatggtgtttcaccatgttggccaggctggtctcgaactcctgacctcaaatgatccacccacctcggccttctaaattgctgagattacaggcatgagccaccgcacccgcctactctgattctttaatactggaaatgagagatggttaacatgacttctttcttgtcaacaaattgttaatgacttacagttgtattgt

SEQ ID NO: 157824 - DNA, 437 bp, Homo sapiens
attttgtcacttgtagtcaaaatccacccataagtggaaaaataacgaaaaatgaggaaagaaaaggcaaaacagtaaaagaaaagatagaaaagatatgactgtgagacagaaaagtagcaggaggttctcttgaaagaaaaataaagggtaaatttaaaaagaaatttaatagtcaacttgaaaatgaatacaatttttattcttaaccatctgcattcatctgtgtgccataatttattcaaatgtttttaaatgcctgtgaaataacagttaacactgttttataaagatgtggtcatttaattttgggaagaaggtggtgaagcttggaggagtaaacacaatctgaattagtgaatgtgaatttccacgggataggtctgttcactctgtggacattctcttctgggttttctgagacaaaacacattttt

SEQ ID NO: 157825 - DNA, 311 bp, Homo sapiens
ataacctccatggctagtaaacacaaatgtgtacatacacatatacacatatacgtatgcacataaatactttgctcccacaaactgatttcgtttttatttgccatgttttcagttcactaaatgcaatcatattttaaagataattaatgaatccaaaagttgaatctaggtattctgatgactatttatgtaacaagttagaaaagggtccccaatttttaagtagcacataccataaaacttcgttttaacttctacgtagccattaaaaaaaaaatgagatcatgttttttgcgagaacatggatg

SEQ ID NO: 157826 - DNA, 175 bp, Homo sapiens
ctaggtagaccttattattatgtttatccctattttgtattgttgaggaactgaggcatagacaggttaaatgacttgtccaatgattacagctaataaatggcagagttggaattctaactcagacaatctggttccagagtttatgctcataatcactaaataaataagatag

SEQ ID NO: 157827 - DNA, 405 bp, Homo sapiens
tttctttttccggaaagtctaaactagcatttagctcgtcctgattagagtcaggcaccgccaaggcatgggttggcatcttccagatcccgctcccccaaccgcggccacagcagatctggaggaccgggagaggacgcaaggaggaaaagccctgctctgcgagctgacagccggactctgcccacattgccaatggaaccacgtcttcaagccggaaactcagctggacctctcgcagcgctctctgcgagggggcacaggggttattttctccgatgttgtccacacccagaaaagcttgtctctcggggctactgtgctgagccccgactggtcaggttaggccaccggggttagctctgcaactcttgcttcacggttaacagcccggagagctttctt

SEQ ID NO: 157828 - DNA, 507 bp, Homo sapiens
tagaggccatggatggtggttcacgcctgtaattccaagactctggaatgctgaagcgggtagatcacttgaggtcaggagttcaagaccagcctggccagcatgaccccgtctctactaaaaatataaaaattagccggctgtggtggcgcgggcttgtaatcccagctactcaagaggctgaggcagaagaatcgcttgaattggggtggcggggcagacaccctgggagacagagcgagactccatcacaaaaaaaagcatgttagagttaatacggtgctgaatcatataggtgaagaagctaaagccttatacatataagtggggtgttgtgactcaaggttagataactatttagaattggagttgagattgagatccagtattgtttctacttatgattgagagtatgacagcatgaaattttatgaatgtctttgttctcaaattttgctggatctggaataaagatggaatatttcaagttctgaaaagttctaaaat

SEQ ID NO: 157829 - DNA, 394 bp, Homo sapiens
aagctgtacccctgagaagctgagaagtaagttggataccacctgcctcaactgggagcgatccacagctcaacaaggccatatactgcactcagtgcaggctcagctcattatttctgtgtggcatcctccgtggaggtgggctgagcaaaggacaccctgaaggacgtcagccaaacacagacacaccagtcacagggaagcacttgaaacacaagctatatttcattcagttctaaggtatggaggctcctctggctagcagaaactcaccagctctttgagatgagtgttctacccaagacacatgctaattaactccatgctcctcacatatgcacagctcttgtttatagtgtgggtgatacagagagatcagctttgaaggcacaca

SEQ ID NO: 157830 - DNA, 533 bp, Homo sapiens
agtaataaacaagattacaagaagataaacaagattaaaatgaaattatttcttactccaaatcaggattttccgccgtgtttgcagcagcgactctgagggaaatgtggcctgcaaagagtttactgtcatggtgccagtttcgtgtttgtccagtgataaatcagtggatttatgggtttaattacctcttattgccaactcccttcctatctgaatatacgaatttaaaagttaggatgtgtatctacaggtagtaaaataccattttgttctttctcagtggctgaatcctgcatggaatgaaaatcaaaggaaaatcttaaagatgcgtcagtgcattacgctgtagagattcatgtgcagaagactagctggctatgcactagttctgtcctgggaagggcttcgttctaacaattgttttctctggaaggtgatgggtgactccgtcttttcagatcacatccacacccatggtagctgccccagcattttggtctggctcctccaactttttttttttttttttt

SEQ ID NO: 157831 - DNA, 614 bp, Homo sapiens
tcttgaacacgttatatgaagtaaaataagccagtaacaaaaagacaaatactatatgattgcacttacatgaggtacctaagacaatcggatccatagagacagaaagttgaatggtggttgccaggagctccggggagcaggaatggggggtcagtgccaggagctccggggagcaggaatggggggtcagtgacgaatgggcacagagtttccgttggggaagataagaaagttctggagatggacaacggtgatggttgtacaacaatatgaaggtacctaatgccactgaactcttaaaaatggttttaaaatggtaaatttggccaggcacggtggctcacgcctgtaattccagcactttgggaggccaaggcaggcggatcacttgaggccagaagttcgagaccagcctgggggagatcccatctctacaaaaactaaaaaactagctgagcatggtggtgcattcctgtagtcccaggtacttgggaggctgaggcaggaagatcacttgagcacttgagcccagaaggttgagcctgcagtgaagcatgatcgtgccagtgcactccaggctggacgaaagggcaggaccctgtctgtgaaaa

SEQ ID NO: 157832 - DNA, 531 bp, Homo sapiens
gcacctagggagatagaatcaggaatcaggctctttgtttccattgcccacaagagtgctcaaaagccatttgtggaggtgggctgtgttttcagaggccctgtcaatagttaagatctgtacatgtcagaggccatgcatgccacctagactagggggcctttcacctctttgccatctctgataggttggaagaagcttgactgctggagtactgatcagtgggtgggcatatgcactcgattagccacgcctgccatggccagggcatgggggtggcagcatgcttactgtctgttgccatctcttcagcttataccaccaactgagatgatgacgatgcctggagactcttatttcaggcattttgaaaaaaggagacataacttctgtccctgggaaaattttaaccccatcagaaaggcagaatatatgcacaaggaggccttaatgcctaaagaatctcaacaatctcaattagcattagcattattagcataatttagtaataaccacccattacactctatc

SEQ ID NO: 157833 - DNA, 269 bp, Homo sapiens
ccacccactaggcttctggtatacacagacagatctgaatcccagtggtggaaacaacctaggctgattctgagtttcccactgcatttcttcttctaattgtccctcttttccattcctgtcctttccctcatcccttacctgctgaaaatgaatcttaccatttctaaaattccactcttccgggggcatccacagctggatcctcttcttcactgccattcctcaggccttagaacaggtccccttcttacacccacccatcggcg

SEQ ID NO: 157834 - DNA, 202 bp, Homo sapiens
tgtattccctgccataacatcttttgccacctatagctacttgaagtatggtcttggagcctgttgtacatttaagaataaattttcatttaaaaaaaaaaaaaaaaagtggttgggtactgtggctcaggccaggcgcatggctcatgcctgaaatctcagcactttgggaggctgaggtgggtggatcacctgaggtcag

SEQ ID NO: 157835 - DNA, 411 bp, Homo sapiens
gtggttgctacagtagttttaaacgccctttaaaataaagtcaaaaatactgaatgtcataaattccatctgtgctgccctctgctggctacatgaaaagattgttaaaagattgacatagaaattgcaccaaaaaattccattacctggctgggcgcagtggctcacccctgtaatcccggcgctttgggaggccgaggcgggtggatcacaaggtcaagagatctagaccatcttggccaacatggtgaaaccccgtctctactgaaaatacaaaaattagccaggcatggtggcacacacttgtagtcccagctactcgggaggctgaggcaagagaattgcttcaatccaggaggcagaggttgcagtgagccgacattgtgctactgcactccagcctgccaacag

SEQ ID NO: 157836 - DNA, 275 bp, Homo sapiens
aagattattcctgtttatttttatttctaatctttcaggacagctgccacttcccaagggcttaatatcttttcctactaggttctaccaatcacttttacaaagagaatggactccattccacaaggctcctaggaacccccacagtccaaatgtggttctgccaacccttacatagaccctctagtttcatctataaaaatgatcagcctgaacttcttattgaaaaaattcttatcttataaacttctgtttatggtcatgaatatgcttca

SEQ ID NO: 157837 - DNA, 444 bp, Homo sapiens
gaggtatttgactctatttgaaatcccacatgagcactttatttcaaagctgaaataattggtctaaaataatttggtctttatattctttatacacctttatactcttaaaaattttactgaggatacaatagagcttttgtttacatcagagtttctcatccttgacactactgacattttggaccaaataattatttgttgcggaggttgtcctatgtattatatttagtagcatctttggtcttgacccacttagatgccagtagcaccctcccaatcaaaattatcagttgggcatggtggctcatgcctgtaatcccaacattttgggaggctgaggtgggaggattgcttgagcccaggagttcaaggctgtagtaagctatgatcatgccactgcactccagcctgggcaacagagcaagactcttatctctaaaa

SEQ ID NO: 157838 - DNA, 104 bp, Homo sapiens
aaagcagttctaagaggcaagtttatagcaataagtgcctaaattaagaaaaaattaagactgcaaataacctaacttttgatctgaaagaactagagaagaaa

SEQ ID NO: 157839 - DNA, 532 bp, Homo sapiens
aagcagacttcaaaaagaattaaaccaaaatgccatttcttatcaattatttggcaaaaaaaaccctcctaaaatattgacaatatactctgttggcaaggctgtggggaagtgggtactttacacattattggtgggcatgcaaaatgatacaaacactatcaacatctatgtcttactgtcttcccattaaacgaagaccaggcctatacatattagagccaaattctattaaactttcaaggaacagattatttcaaatgtctagaaagtttttctgattaaaaagaaggaagtattatccaaaatgattaagcaggtaaacatgactttgaattaaaattagacaaagaccgtatagaaaaaaaatagactatcactcataaacatagattcaaaacaatcacaagattttgacagaataaatatgaaaaagcataacatatcctgatgagatagaatttgttccagaattgcaagcttggcttattgcagacaaaacaaaaaacctactgagataattcacctcata

SEQ ID NO: 157840 - DNA, 556 bp, Homo sapiens
tcactttcctcactagcctcattaaactgctctttgttttctacacaggctgtgctttcttagttctttttgcttttcttcttctgagaatgcccattagcccttttatctctggcaaattcctattaattagtgtttagaaatgggagtatagttgtccctctgtatctgcaggttccacatgcattcagccaaccttgattgaaaatatgtggggaaaaaaggcaaaaaaaaaaggtaaaaataatacaaataaaaaatatagtgtaacaactgtttagatatcatttacattgtattcagtattataagtaatctggagatgatttaaactatacaggaagatgtgagtagcttatatgcaaatactgtgccattttatgtaagggaagggacttgaatatctgtgaattttggcatgggtgaggcgggggtaggggtcttggaaccaatcccttgcagatatcaagagatgattttatggcacagtgcctgggcttatagaatcaaaccacttgtgttccagtccttacttggatacctattaactatgtga

SEQ ID NO: 157841 - DNA, 380 bp, Homo sapiens
acatgctgaaagatgtctggtcaatgggatgcatgcccctttgtttcccttacttttctgtagggcttgactccggaaaaaagtcaacaccatgagtaaattattcatgagcactgtctggccttccaatcggccaagaagcccaggacaaaagaatgaatagtcttctttttttccccttgggagaactgacttgatgactgcctccttcccagcctactcttcttggtttctgggccatggcaggttccagaccctccaaccaaaggcagagaggcaggcccttcccttgctgagtctcctaggaactgggcttctgttcctccacaaaatacaagtgaatacatctgagaatcagggtcagaacacaagacggaatg

SEQ ID NO: 157842 - DNA, 721 bp, Homo sapiens
agtagatctgggatgggttgagagtctgcctttctaacaggcttttgggtgatgtcgatgctgctggtccagggaccatacctctactcagaaggcctaacactgtatgccactttggtgtgacaagatgaaacactttgagcttcctcaggatcttcctttcccatttgcccagatgttcttcctctggatcttttctgttttttgtattttttgttttttatttttctttgagacaggtcttactctgtcacccaggctgcagtgcagtggcatgatcacagctcactgtagccttgacctcctgggctcaagccatcctcccacctcagcctcctgagtagctgggactacaggcgcacaccaccacacctggctaatttttcatttttttgtagagatgaggtctcactatattgcccaggctggtctcaaactcctgggctcaagtgatcctcctaccttggcctaccacagtgctaggattacaggtgtgagccaccgcgcccagacttcctctagatctttactcggctgtcttcctttcattcctatctcagcaaaaacgtcaccacctagagaaactttgttttctcccatggcccaaatctaaagtagctcccattgcctgttttagctcttagaagacagcctctgagatgatcttgttttgtatttctctctgtctctatgagaagaggagttctgcgagaacaaagcc

SEQ ID NO: 157843 - DNA, 131 bp, Homo sapiens
aacctcagggggttatatcgcaggggctaacacccagaacagcccagctgaatgccagttgctttggaagtactgattaacacagagatgaagctgcctcctttgcctccaaccagataggaacgattttg

SEQ ID NO: 157844 - DNA, 716 bp, Homo sapiens
aggaaagagttctgtggaaacaacccaaatatggagccatcttcaaacataaagatacctgacccagcatcgtttataactctaaaataaacaaagctaaatttttctccatcagggaatgataaattatccactagatcatttattattaagtctctaaaatgaatgaagtggcataaatatgcttataacatcagtggttaaaaaaagcaagatacgacattatacaaattctacaaagtctgaagaattgtacaaatatatatatttgtactatatatacatgtatttgtacatatacacatatatatttgtacaaatatatatatattccttgccaaccctaagcatggaaaaaaatacaaaggcttggaaatacatgccttaaagaatgaatagttcttatatttgtgtgataggtccctgggtgatttattttcttatttttttctttttctgaatttttctcattttacttagttagactttattaccttcttggtcagcccacaaatttataaactaatttttaaaaaaacatttccaacatcactggttgaaaaataggttgttgtcagttgtttaatctgaaagaaattattgataaatatgctgaagtttctgttcaatggttttggccaaaatgaagtcttgatttcccatttctttgaaccattttaaggatcctatactatacttacataaatcatgccaaa

SEQ ID NO: 157845 - DNA, 304 bp, Homo sapiens
tcagttctcatgaagccttccccaatttgcagcacattcccctttgcacacttcttctcgcactgaaaaatgtccttgtctttcatttgtgtctatgtatccgatttctttgaggctgcaacacctctgtcagggtgtgggtggtgtgggtcccttgtggtattgcaagttccatactgggtgctcagaatgtttaatgagctcattgaataaaattggcacactagactaacgatataggaagctggtgaggccgggtgtggtggtctcatgcctgtaatcccagcactttgggaggctgaga

SEQ ID NO: 157846 - DNA, 571 bp, Homo sapiens
tgtagcgatgattccagatccagtcagactgcttccttagttccgtgggtgaccccggaccccgcactcagtctggaggtgtggagcctgggggcccagggagatgctgggcggccaaattcagcaggcaagagcctgctagaggaacctcactggtgcccctgggtaaggaggttgacgcggttggtctcgtgatgttctgaagagacaacgcggcccgccaggttgctgaggactaacttagcaggagccaggggggctctgcttggtggggcaggagtccggtgtgagtctctgactcaggctactgacccggtgttgggacagagtgggggcgggtgtgatttggaaacgctagacagcctttgatctggtccttaccatggctcccttcaggctgtgtagatggcagagatggtgcatgggatctgggcaggagggtcccttgcaaaggcaggtgcaagggttctcacccccggcagagcctgtctccatagctgagtagaattcctgccctgatttcgggctgcccagctcgaggtccttcccaggagacgcctgtagccctccg

SEQ ID NO: 157847 - DNA, 169 bp, Homo sapiens
gagaagcactccccacttggagcagcgtgggaggtggcagacttccagccagagcaggtggagacccaacccagggcggtgtctcgggaggaacctggaagcctccactcaggacaccaggaacagctgaaccgaaagcgagaacgtcggcccttacccaagaatggta

SEQ ID NO: 157848 - DNA, 448 bp, Homo sapiens
taaaaagaaaactcatttcaattcttatggttgaactcaattaataggtctatactctacaaccacatagcttcaggcaagttatatacagctatttaaacctttcttttcctatattctatgaaattctgtctccactgagatggaattttttcattttacttttttttcagtgttgcaagtgaggactcttcattcctctagacctcagttttcttatatgtaaactactaaaaactacttcatatgctattgtgtaagtaaataagaacatatgtaaaagcatccactatagtgcctggtatacagcataaaagaatccaatctatctcctccctttcatttggataagtacaacagaggccaaacacccttttggtaactaaagagcttgcagtgtctttgcgatcctcccacttcagcctcccaaagtgctgggattacaagc

SEQ ID NO: 157849 - DNA, 657 bp, Homo sapiens
ggaggtgcaacgctccaatctctgcctccatcatagcacgagcttcttccttgtgtgtgtgtctcagtgttcaattgcacacactttataaagacatcagtcatcatggatttgtgccccacccgaaaccagtaggaccccattttaacttgcttccatctgcaaagaccctatttccaaataaggtcatattcacaggttatgtgtaggcatgaattttgaggagacactgttcagtcctagtacaagaactgatggtactattctcggtgggaggaaaggatcagatagcaggagggccaccctctcctcatcctcctgtcctgtgggctagccacgtctcagagctcaaggaggctgctgtgggaaatgggaatgtgcagggtaaggtgtgtgtgtcttggaggtacgtatggggtgaggtgtgtatggagcatgagaggtgtgtgcagctgtgtgtgtgtgtgtgtgtgtgtgcgcacgcgcgcacgcgtgtggacacacagcccagaaggagaccgggatggcgtgctgtgttctagcccactcattagctgctgttgtcagtatggctcccaggccttcctgggtaggagtccacatgctatagacaaagggaaacacggggttccctgtgtctgtatcgtgtgagagagg

SEQ ID NO: 157850 - DNA, 233 bp, Homo sapiens
cagctgatcttgtttccccctttacttaaaaaagatcaaggccacaaacccaaagtctcttgattccatctcagcattttacacccatttcacttccttcatcttccgcattaataaaagaagtgtccttcctctttttcaaagtagattccttcacttgtgtctggatcccttctgccgttgcttcaggattcaactttaaacctctacaaacactcaaagggtctcggaca

SEQ ID NO: 157851 - DNA, 557 bp, Homo sapiens
agaaaaataaatgttttccaggcctgcttgtgcatgactaagaaatttcctatcaacccagccaaatttaatctagctgcagctgagttcaagaaagttaatgcagctctgatgcctctagttctctcatttctcccaggtgggtcatcacagcttctaactaagaatcttaagtcaatccgtgattcctactaaagggcagaaaagtcctttggttccttcaatgccaagtaaatatttacatgcttgagcagtcggtgtaggttggtgagccctggactcacacagatccatgtggacctcacctcactaagcctcagctttgccagccgtgaagtgggaccaatagaaataaaaatcataccttaaatgtctagatttgtgcctggcctgtattgggcactgaataaagtgtatcgaatatttcagactgtccttttgttctgtgttgagttggtacagtagtttgttgcaacaaccctggaagtcaattgatactttcacctttgagataaagaatttgttctctaatcaactagcttttccattggcccaag

SEQ ID NO: 157852 - DNA, 458 bp, Homo sapiens
aaaaagttatataggtggtcttatttctgtcatattttaatatttctctttttaatgttttaatgttatttttgtctattttttttcttctgccttctattttggaaggcatcgtaacggcttttagttccaatatttacccataagttttcccaatgcattttgacttatttttttaatgtcaaagtcaaaaataaaatatctgtaatgtgtcacatacttaaggcaatgcgtttatcactttgatacctctcagctcccttattcctgtcttttcactctcttgaaatacagacatgaattagtattaatttttttgcttttactctataatgtttattctattcaattatattatgtcattatttgttagtttcacattatgtaaattatttgtcatgtcctatgtcatataaagtaattcaaaagcaaaaattaaaagtgtgtgttacgtgata

SEQ ID NO: 157853 - DNA, 618 bp, Homo sapiens
agcccacggctggagcgtccttctagggccttctgcctagcagtggctttgtgctaactctcccatcttccctcacagatcgccctttaccatcccctgatctggatctggagtcagccagtccttccccattttgtttataggctaatgcagggaatgtctgcagcttaaagcaggcctttgtggaggcagaatgccctcacctaacagagggagcctaagggttagggttctgggaaccgtgggagctgtgtgggggatgcaagacagcctggtggcatccgtgaatctaattacgtagtctacctggtgcaagagaagagtctctggagttagactggcttcatttctactgacaagctgtgcaaccctgagcaggttacttaacctctctgtgtttggttttctgttctataaattggggctatttatagtacatagcccagaaggctggtataaggatcaactaccatataaacaattaacccagtcccgaatacattgtaagtgcttaattaatataggataaataaaaagtaaaacatcattatacttttatgttcagtaacagccctctggggctgaccttgggctggcaaggatcatgccatcttattt

SEQ ID NO: 157854 - DNA, 561 bp, Homo sapiens
tcccaaagtgttcggattacaggcgtgagacaccacgcccgggctcaaatgttcatctctttcagaaataccctcagaggaacacccagaggaatgtttgactaactgtctgaacacattgcaacccagtcaagctgacacatagaattaaccctcacagaaccaataaggaagtggaagaaagtgcttcttttgctacaggatgaggtgggagcaggaattgtgagaggccccctggccaccatctccagtgtattgggttcagctcatttcctccccagcactgctactaatgttcaaggcattatttgttgaagccaggtgccgtctaagcaggctgtcgagggagagcaattttttttttgagacaggatctctttctgttgcccaggctggagtgcagtgacatgatcttggctcaccgcagcctcgacctcccaagtagctggaaccacaagtgatcctcaggtaatcaggtgattctttcacctcagcctcttgagtagctgggaccacaagtgtgtgccaccacacctggctaattttctttctttttaatag

SEQ ID NO: 157855 - DNA, 631 bp, Homo sapiens
agctcggtaccccacaccacctgagtccaatcattgtaacttcatcattcaacagttcaggtcaggtaggaggaacacaaaagtctccacactcaagtgcacacacacacacacacacacacacacccacacctgcttataatgtcctctcattcttaggttatgacccaatatcagaaaggggcaaaaataaattctgttcaaaatgtggcaggatttgaaacataattcatgatatcagctacataaatcataaaatcccaagtttgtcaattgcaaaatgtcctattaagcattaagctacaaattaggagtgccatcttgtggacacatccaccacttccacatcatgtcacctcctagccaactccgtggctgttctcactgtggaggtctctgccacaactccagcattttattgcagaagaaaacccagtccttgaactggtttctgcgtagaacacactgaaagccctgggagaggaaaccagcagacaggaaaagagtagacatggaagagcagatgagttcattgctggaaagctcgaattgttagtttcgttaatgtggggtccaatttgactctatggagcctaactacctagcctgagcgctcgcggtgagtatgggg

SEQ ID NO: 157856 - DNA, 245 bp, Homo sapiens
tctctacagactctgtctgtggggaggaagtgggccttcacataaataaattggatcattattaaggaaagagtgagaagggatgtggtggggattccttggagaagagagtgtggaagtgctgttaggatacagaagggcacatggagaggagagatccagggccatatctcagccacatcatctttgcagtcatttggttgttgcactgcaaggaggtcatctggaaacagctgcaccatcag

SEQ ID NO: 157857 - DNA, 382 bp, Homo sapiens
ctccatgttgaccaagatggtcttgatctcctgacctcgtgatccatacaccttggcctcccaaagtgctgggattacaggcgtgagccaccacacccagccgagttagtctttttggaaagggaaaggactttactcctctgcccctacccacctccaatacacaacacacttttacctgtttttattttgggccaggcacagtggcttacgtgcccagcactttgggtggccaaggtgttaccagatggaaagtcttgactgtgagttgtccaagttcttggtgccttgagcaaagaattgaacaaaacgcacaaagcaatggaagacgaaggcatagatttgttgaagtgaaagtacactccacagagtgggagcgggc

SEQ ID NO: 157858 - DNA, 126 bp, Homo sapiens
tgaggagaaaagcctcccatttcctatttatgaaagtgatattaaggtgtgtgtcacaatttcatcaagaagtggcttatgacaatacagctttggtttaggtattaaaataggactcttttctgc

SEQ ID NO: 157859 - DNA, 207 bp, Homo sapiens
  misc_feature (13)..(13): n is a, c, g, or t
ctctagctcggcncccccacctgagtctcctggaaatctggttggaaatccccggccaggttgcttcatactgctaagtttgacagacaggactgaccctctgagttgcttgagtggccttatgcctatcattaatcttatagccataatatatctcattgtataccacactccacccctgaccctgagggggtcaataattgagag

SEQ ID NO: 157860 - DNA, 356 bp, Homo sapiens
aagctcggtaccggagacacttacggtggatcaatgaatcagatgaagtatatcaccgaagaagtttgcttctttttgctttatttcccattacccccactgatcacattatttttctttaacaatcgttcaggtttagctcttcctcgccttgcccagaccactagcctagttctgaactctacgccatggacttcacacaaagcctcttggtcatttgtcctcttttctcacttccctttaccccctgagttcagccactcagttttcccaaattaccggctttgtcagggtgctcctgtgctaaagacagtacatcaagtggaaacttctgtcgtaagtgtctccggtttttc

SEQ ID NO: 157861 - DNA, 203 bp, Homo sapiens
attgatgttgctgttaaagtaaaaatgtccatgggcccttaaagcaagaacgggagctgtgtgaggacagggataaatatgtaggtttgggactgaccacttttagaggtttgggagtaggaagaacaggagactccaggaaggaaatatgaaataaacttttaaggaggcagttgaaagcaggggcaggaaatcctaagagg

SEQ ID NO: 157862 - DNA, 410 bp, Homo sapiens
atatgtgtgactccagagcccaagctgtaaatcactgtattactttatatgtgtgagttaatttcatcctaccaactctctttgaaagaagtgatggttttcccctttataaataagaaaatagaggcccaaaggggttatgtggcttggccaaggtcacattgctgaagcatgaccaaccaggaagagaatccctagaaaggatgtacaattgctggggtctgtagctgcaagttctcactagaagagaacccttctcaataggatagaggggaaaggctgttgtcctgtgtaaaggcagggaccatcatgtcagctgattgcccagtttctggcatagcatctggtacatgctgagcacctgaaaactttggaaggaagagagggaatgaggaaaggcaatgctgacc

SEQ ID NO: 157863 - DNA, 634 bp, Homo sapiens
tcccttcccagttatgacaataaaaaatgtctccagacattgtcaattgaccagtcctagctggtcaaaatctcctctggttgagaactactgccttgcaagaattattgaagttgtcacttgtggaaaatttgcttgcagggacaaatctttccctgcaactcgtctgtctatgctctgctagcatatcaatcaaatctttgtgaggtgttggtggtggtgcggggcagctgattgaggttccttttcagtggaaagttgtgagtggttgtactgaagaaatggtacatgccaccacacacacacacacacacacacacacacacacacatatctttgtctaagtctgaacaatcatgtgacgtacacttttcttagagggatcacaagagagattatggaaagagtgccaaagtaaccatctctgtcaagccatccaaattctccacccaccaggcagtggtggctcacgcctgtaatcccagcactttgggaggcaaggcaggaggatcgcttgaacccaggagttcaagactagcttgggcaacgtattgagaccactgtctctacaaaaacaaaaatttttttaattagccagttgtggtggcatgcgtctgtagtcccagctactcag

SEQ ID NO: 157864 - DNA, 142 bp, Homo sapiens
taagttcaaacataaagttaatttatcaacattcaaagatacaaacagatacccaaagaattgtccacatttatttgtgagtggtaaatcatagcctttcttaaaggaaacagaaaattagaattagtcctttaaatgggct

SEQ ID NO: 157865 - DNA, 281 bp, Homo sapiens
cccttaaattgccaaactaaaataattttatacctttaaataaaaataccagaagttttccagaaacaattttttccttagctagactgtaggagtcacataaaataactgactggagaaatccttctgcaaagcgaaagaaagtagtgtgaagaattcatctgttactcctcttgagattaaggatagagagcattaaggatcagagagcattcaaggcatggcagcagcattcaaggatagcagcagcattcaaggcataacagcagcattaaggctca

SEQ ID NO: 157866 - DNA, 295 bp, Homo sapiens
ctttctaccccagagccacctagaccatccatcagaggcctccctctaatgaggagtagggtgggggcaccccatggtgtcctttgtgccctaaaccctttacaataacaggtgttggctgtcacctgaagcaggtttcaaccatcactcccttcccaccatacacacactcccagctcattttgattccttttcctgcaataaataacagattcttgcaaagtggttagaagaaattagtaagttaagcctcacactagggttattttgccaggagaccttcctttcctaggta

SEQ ID NO: 157867 - DNA, 406 bp, Homo sapiens
tcatgctcacctgctgttctctgcactccaccagccgcctttcaggccatcaggcagcctggaatccactatcagcctcaggagtctaaaaagcacatcagaccttggtaacccttcttgtccaaactgtcaaacaaaacctgccctgcgcttttgcacctgacttacagttagccagctgagtcctgctggccagctcccactgccagccccctttcagaatgtcacctcaccccacggtgcttcaggcagagctcatgacaggctcctcatggcctccctgcatctccctaacagcactcaccctgccctggagccgtcagtcctgccggtgggactctgcccgccgcctgcgagacgacgtgagtgtgttcacttttatacacacccagaagtggccctagtg

SEQ ID NO: 157868 - DNA, 405 bp, Homo sapiens
tgggtcgaggccagggatgctgcttagcaccctgcagtgcccaggacagcccctccccagggaacgagccagccccaatgtctacagtgctgaggctgagaaacctgtattaattatgtagaaaaaaattgaggctgagtgtggtggctcacacctgtaatcccagcactttgggaggccaaggctggaggatcgcttgagcctagtagtttgataacatagggaaaccctgtctctacaaaaaaataccaaattagctgcatgtggtggcgtgtgcctgtagtcccagctactcgagaggctgaggttgggaggatcgcttgagcccaggaggtcaaggctgcagtaagctatgattgcaccagtgcactccagtctgggcaacagcgtgagaccctatctcaa

SEQ ID NO: 157869 - DNA, 334 bp, Homo sapiens
atacactgaaattgtttatcccaaatggcattaatgcccttacattttgatatttagatctgcctcaaaagacctttgaagctacatgataaacttcatgcctacaaagcttgagttagaggttatctttgttaaaataatactgtttggatgctcagttttggaagtttcctcataattctaaattaagatatttagccgtaagagtaatacacttatgtgtatgattctatagcacttgttctatagcacttgtacaagcataatgatcttgagtggaacaggctttataatgagcaagctatgatctgtctaacagcgatactctgcaaac

SEQ ID NO: 157870 - DNA, 315 bp, Homo sapiens
cagacagagagaaaaagggagaaggtgagaatacatgcatgctgtgtgcatatgaatgaaaaagatgagtaagaattatttttccagtcctctccctcaccagggtgtgaggctgttacacccaggaaatcctagagcacactcaggacacacacacactgtacgtgctacttttcaccctgagacacatcaagtccatgctcagtgtaaactagcacacacatgcctggaagcatccctgccacctcacagacactgtacgcacatgtgcacacccaggcacacatgcatacatgcctgacaaacacagatgca

SEQ ID NO: 157871 - DNA, 607 bp, Homo sapiens
actctaaaattacctacgatcgtgttatcccaatggtataacatgtcaatggcttacaatgtatcatttattttcataatccatccttcatgaaaaatattacctaaagtgtttaccataaaagtgagtgaaacctaaggcaaagaaaaataacaaaaatagaattaaagagaaatgactcagaggatggaagacattgatttaggaagaatgaatgaaggagttataggaggatcctataatgttaagttgttacatcttgctaaaggccaagctcattctgcatatgtgaagagttgattgcattatttacatagatgtatcctgggatttgaacaaagttgtaagtcagtatagaggaagttgggcattccagggtgagcctattagcgtactccagagtagaaatattggaatggtctcatacagaagagagagaatataggataattcgtcattgatgacttcctctgaattaggatatatttataatactgtttttaaaccagataaaactagagaaaatctcaagtaattagtcaatttattgtattccccatctttcttctctgaaacattccctaggtatacagtagtgcaaatataa

SEQ ID NO: 157872 - DNA, 515 bp, Homo sapiens
aaaaaaaaggtcaatgtaaataattctaagtatagtaggccaatcttagtgtagggatctcaaacatctgagtgtggaagaatcaccaagaagccttgttgaaaatacagatctgtaggttcgaactcagcaagtctgtagtatgcttggtgttctgtactttaatgagtgtcccagatgattctgataccagacacttatgggccactctttgagatacagtcagagatttttggatacacaggaagcagagcgagtgattcagaagcagctgcagagtccatggccatgtctggcggggcccaggaaggaacgtgtatgcagtagagtgtctgggagagggagacgggagacagcaatggtggggtccacatgccaggtggggataacaagaagcaccccccaccacggaataccaagttcagcctggaaagaaagaaggggatggtgggctggggcagaaggatctgtctgtcttacgaggtcttagcttatttgcagacaggaagaatcta

SEQ ID NO: 157873 - DNA, 209 bp, Homo sapiens
gcggccctcctcaagactattgagaagtagccttttcctgcagaccgcgcccttctagggaggaaaccaagcatgggggcaggagaggctggaggctcagcagtccttccacatctttctgagtcagacactggactgtcacaagtctgggcaacagaggtgcagttacccccattttacaagtgaggatgaaaacgtccagaagagaa

SEQ ID NO: 157874 - DNA, 491 bp, Homo sapiens
tgtaaattagcatattgtaatttttttctacacatcccccattcataagcagtcagaaaggtgtattagcatgggactgccattcagttagtggtctgctgggaagatcatcagcctgtggctttctagcatgtatgtacaagctaaaattttctttcttaaagcatcagaaagctttccaagtagctgagtcacacctcttataagatctcaccctacatttgaagtgcccagtagtttcaaggaaactttacagaatctctggacttgtcagtcctcttccagaatactgggccctttgagtccatttttatctaccaaaatgtttcttccccctcttatccaacaggtttttaatgatgcaaacaggggaactgtttattataaagcaccttaaagagaaatgaacagtaatgctgactgagctaatcattgttttcttttattacagaacacaaaaactatattttaataatatacctgggtaacta

SEQ ID NO: 157875 - DNA, 673 bp, Homo sapiens
gcagctgttattaagattgagataatgtctcaaagccgtgcattacattctcagctattaagaaactgccgaggacagtatcttatatgtagtaaatgctccgaattggaagtctcattaataagagcactctccattcaattgcagcagaagtcttaccatcacagtgttttgctcacattaatccaccaaacacctctgggaagtgggcacccatctcctttggagaggtttctgccaagacacattttattacaatgaaaagggagatgaaaacagccgcttatacctgttttaactgtaattgaccttcagccaccattttgctgcatcagattcgagagcttctaaagcttccaccctgcttcatgttgaggtgtgaatttgtcaccttaggagcctgttgtcacagtctttaggatgtatttatgtgctctgatcttctggcctcctgacactaaatataactctttcttattggtactcagctgatatacacaactcaggctctttttgtgaatgtttgctgaatgagagatttgttaacacctactgtattctcagctctgagaatattaaacctctaagatacaatgcaagcctctgagagcaaacagtcttctctgtgctatcaaaaagctaagaacttggtcattagggaaatgcaaatcaa

SEQ ID NO: 157876 - DNA, 351 bp, Homo sapiens
ggaagtcgagattgcagtgagccgtgatcatgccactgcagtccagcctaggcgagagggtgacgccctgtctcaaaaaaataaaccaataaaaatttaaaaacatgcatcaacaagggactggctcaggaagttactgttaggttcatatcacaggacactgagagaggaggatggaacggcagctctgcaggtggtggcacggacagcgctgctctgctggtaagagacaaggattctcctttgcacagaaagaaccactgggcctaggtgtgcccagctgcacactgtatctgctaacgtctccttggcagtttctgtggtcacaagacaaaacattcactaactaat

SEQ ID NO: 157877 - DNA, 107 bp, Homo sapiens
cccctggaatgcattaaccagagtttctaatccataaacaacctctcctctcctagcaagagtcagagggtatgggcggctggggcgctgtttcctccacttcccca

SEQ ID NO: 157878 - DNA, 403 bp, Homo sapiens
tgggtttgcccaatttctatacattaacaaagaatttgaaatggagaccaggttgcggttttagaataagtcggagtatgttgtgctctttgtgatttgattaccatctgcagttgtttcttgtctagcaggattcatatgtcttctcacctgtgtttcttcgtctgcttttgtacacagtgttctttattttatgaggcagatgactttttaaaagaagactatatatagtacatacgttcttgtagtatggagttaagtaagttcccttccttccttctgtccgtatactttctttttcttgggttttgatcctccatgctaatgctgaacctgaaattcagcctgttctccttttcaacataaagtgtttctcatcctaagctttattgaagatgcctct

SEQ ID NO: 157879 - DNA, 443 bp, Homo sapiens
ggtgtctagagatcccctctggatgcagagtgccaagtgatgactgttgactagtgatcaggctgctccatccctcaagtactccgcctatactgcagagagaaggctgttgtgggcatggatcgccacacgtagggggatgatggtgaaagataagtagccatgcccatggccgaaaactttggtctattagggtcatagggatgacatgattgctcttaggagtctgtcttagactttcagtttttcctaattttgtttagtgatccattttaaaccttcttttaggaaaaccattttggttagtgtcttacaccctgaagagatggggggatggaaaggtaacaggctagggagtaaaggtcccatggtgttgcattgttagtttctttcctcatgcatctatgattagtgataactggaaacattcaaaacctgttcgt

SEQ ID NO: 157880 - DNA, 225 bp, Homo sapiens
tcatcctagagatgcgaccttgagctgctagaaatcatgttagtgttttgttcaaatctttataggtcaagattgaggctgagaaagggctccaaggagtctggctagagtttgatcaaggagaaaacctgtcaatggtgattactggttctatcagtgaaaaacaaccattatcaatatttgtattttcccttcaatgccaataataggacctacacactgacg

SEQ ID NO: 157881 - DNA, 347 bp, Homo sapiens
ctgagatcacgccactgcactccagcctgggcaacagagtaagactccgtctcagaaaaaaaatacaaaaaatacaaaaaacattagccacgtgtggtggtgggtgcctgtaatcccggctactcaggaggctgaggctggagaattgcttgaacccaggcggtggaggtcgcggtgagccaagattacgccattgcattccagcctgggtgacaagagtgaatctctgtctcaaaaaaaagaatgctcagtgaaattctgcaatacttaaaaattggaaaacaacccaaatttctatcagtaggatgatggttacataaatcatgctactgacattccatgactac

SEQ ID NO: 157882 - DNA, 172 bp, Homo sapiens
tcccctcaggaagagttttggaatctgtcttggcacacaggcaaaggagtgattagggccctgagtgtctacacttggctacagaaggcaagtttttagagatttatatccacatgcttgttttgggctctaaaaaagttaaatgaggctgagcacagttgctcacgcctga

SEQ ID NO: 157883 - DNA, 690 bp, Homo sapiens
aaaaagcaagggaggtggagagtgtgtgagagagggagtgagaaagggctcagccatttgtctgggcaggtctgcggaactcaaatccggctcatctgcatctcctcaaataaacttctgggaagtgaatgcctgaagcaggcagagtgcagagaagtcagcaaatatgtgcgtagtgaattccaagccttctgttcccagctcctgggaggggccgcagtgccttggggtgtcctgccgtgtctccatcgggtcccctgcctggctgctctaaccctgaggaatggcctccactgtgggcctgtggaaacagggagaagaatctcttatccagcaggtctgagggccacaggaacataagtaacactgaagagtgaggctgatccctggggtttgcgcgagcctgcaaatgcatgattcaacagcactcgcctggtgcctctgggaggcaagctggatgaggatgttgttcccattttatagatgaggaaactgaggctcattgggaagggactttcccaaggctatgttatgagttagttgcagagctttgaacttgggcccagactgagcctgaaacctgaccttacactgagtcccagccccagtccctgaacatggtctctgaacatggctcagattttgccccaaaagcatctggaccaggaggttggagcggcctgggatacc

SEQ ID NO: 157884 - DNA, 159 bp, Homo sapiens
acatggccttctagataggaatgtatttaattctgggagaagtattgaggataaagtgttggtattcgcatttgtatgggaatcctaaagtcattgacagtggaggctagctgctgcagaactggcagtcaagtcaatgaagtggagggtgaccaggga

SEQ ID NO: 157885 - DNA, 342 bp, Homo sapiens
ctctgaacaggggaattcacacacagactagcttagacagtgcaaggccagactgaaatactagtactttcacatcactgaaagttactggccagagatgagtaacttcttgtctttttttaacactgaaaaataaaaggtgattctgacaatataaaacaagcaaggttgagaatcaattaagtagaatcaaagtagatgggcctaaaagaaagctgaacatggcccaagaacagccttgtcactgcaagaaaatggaaatagtatgtgctaacacggtaagccaattgaagctttactgcttcccagctatttacttagtggattgtcctgtcaatatct

SEQ ID NO: 157886 - DNA, 486 bp, Homo sapiens
tagattggggtgggcaaactaccacccatgagccaaatccatcctgctcctgtttttataaataaagtttattgggacacagccatgcccattcatttacatattgcttaaggctgctttcatgctacaatggagttgagtagtttcacagagactgtctagtccacaaagcctaaaatattcactatcttgcccttcacagaaagagtttgctgattcttattctagataatgcattttttgaaaggaaaagccttgttttctattgatttagaaactacgacaatttaccttccatataagaccttgggaaagttacttcagctcaagtgataggaatttagtcatcttcaatttctgcaggatgcacttacactaggcatctggaacagtatcatgactgcaatggctggtgggtaacaagggaaacttttagccattcttctgagaacagtgaaaaactgtactaaaagtggacaaagggta

SEQ ID NO: 157887 - DNA, 1055 bp, Homo sapiens
cattttaacttcaaaattaaactatgtgctatgatttgaatatctgtcccctctaactcacattgacagaattcccaatgtggcagtattgagatgtgggacctttaagaggtgatagaattaggagggctctgccctcatgaatagattaattcaattacggattaatggattagtaaattatcatgagagaggaactggtggctttgtaagaattgagaaaactgagatatcacctaagatatcaccagtatgctcagccccctcactctgtgatagcctctatcaccccaggatgccccagagagtccccaccagcaagaagactctcaccagatgtaccgcctcaaccttaggcttcccagcctatgtaactctaagagataaatgtatttcttcttaagttacgcggttataggcattttgctacaagcagcagaaacagactaaagcaaaatgattacaattgcttacatgttattgaataaaatagaaacccatgagtccatacttgtatcaataaatagaaaaataaagatttaatgaaaattggaaatgtattaggctggtgcaaaattaatcggttttagtacaaaagccgtgattacttttgccccaacctaatacatagtttcaaggtatcttcccacaagtatttattaattataaaggaaaatagagtaactttacatggaagaagtgacagatacagctatttttctgagagatcaaattaaatattaccagtgttcatatacactgaaattctacatcatggttagcatgcaatgagaagaacatagcagcatttttgttatattattgccaaaccattagagtcagagtctaaccattagaaaatctaaaaaaaaaaaaaagaaaaaaaaagaaaaagctaagtgcatactcaaattgtttcccaaacctggaaatattctacaaaaacacttgttccatagttttagaaattatacagaataggaaagtcaaagtaatttcaaagaaaatgagacacatgacaactaaaagcaaacagttttattttgaactggata

SEQ ID NO: 157888 - DNA, 229 bp, Homo sapiens
tggaagagaagctgcgggcatgtggaagggagaggagagtccctgcaggaggagcaagcagtgtgcaagcatgtggggcagggagcacaggtagtgtgtgcacagtgtgtacacaaaacagtgagagatggggggggagtgggaaacacagccagtggcaatactggaggtctctgggtagcagatgaaagagtctagcctaattctttctttttctttcttttttttt

SEQ ID NO: 157889 - DNA, 166 bp, Homo sapiens
gcgagccgacagatccctgggagtggggggtgggacgaggcggggtggcttcccactgtgaccaggggctccctgggggatctggggctcccagccccccaccccacagccctgtgtccccgccctcccagctcccagggccattgatgtatcagtcctgtcttga

SEQ ID NO: 157890 - DNA, 565 bp, Homo sapiens
aggcttgcaagactgcattcctcgaacaagaggctctagatgtcaccatagataacctcagtaccagggagtgattgcctccagcaaaccttctgtcggcaggagcagtcgtgagtttgcccacatcctgcattcatgataaacagtttgctgtttgatcatatagcctccagtggaatgccgagttggtcatttcccatgggccttcggctccctgcaataaaactatgagcagtgattgaggacaggactggaggcaggctgggctcagatactgcaggttctggtagactgtgttagggaggcttttgttgttattactcattccaagtacaatgggcagcaattcagtgagcaaactgttatgtctgtcgaaatggcccatttttctgtgcttgaaaaagaaggaaaacagtcagaagcaagacactaggcttcctcgaaggaaggaggagagacgtggggcatcttatcctgggctccccaagaagcagaccttcagtcacggatttgagtgcaagtagtttatttcatgccaatcagtactgtaggggagtgtgaaccg

SEQ ID NO: 157891 - DNA, 571 bp, Homo sapiens
agtgcagccttcagtctgtggccaaaagcccgagagcccctggcaaaccactgatatagagtcaagtgtccaaaagctgaagaatttggagtctgatgttcaagggcaggaagcatccagcacaggagaaagacgaaggccagaggactcagcaagtctgatccttccaacttctgcctgctttattctagctgtgctggcagctgattagatggtgcccactcaggttgagggtgggtctgcctctcccagtccactgactcaaatattaatctgctttggcaacaccctcacagacacacctaggaacaatactttgcattcttcaatccaatcaagttgacactcaatattaaccatcacatatggatttacagaaatgttgcaaagaaaataaggaggattcctgtatatccttcatccattttcccttaatgttaacatcttacgtccatggcatgtttgtcacgactaagaaattaacatttttttgtatattatagaactttttcagatttcgccagtaatgcccctaaagtgctattctaggatttaatctaggatcctaaac

SEQ ID NO: 157892 - DNA, 398 bp, Homo sapiens
agtaacgttttaacacaattttacaatttttttttttgagacggagttttgctcttgttgcccaggctggagtgcagtggcacgatctcggctcactgcaacctctggctcccgggttcaagcgattctcctgcctcagtctcccgagtagctgggattacaggcatgcgccaccacgctcggctaattttgtatttttagtacagaaggggcttctctgttggtcaggctggtcgtgaactctcaacctcaggtgagccacccgcctgagcctcccaaagtgctgggattacaggtgtgagccaccacgcctggccttttttttgagacagagtctcgctctcgcccatgctgtactgcagtgacgcagtctgggctcactgtaacctccgcttccc

SEQ ID NO: 157893 - DNA, 266 bp, Homo sapiens
cccagctacccgggaggctgaggcaggagaattgcttgaacccgagaggcagaggttgtagtgagccgagattgcaccactgcactccagcctgggtgacacagcaagactctgtctaaaaaaaaaaaaagaaaatcagtgaatttcaaacatgagtgaccattctcccaggtgatggaaatttactcctcgtcataatgagagtgttcccctttctgacagcaagcagggagggctgtcatttagtgtcaaggcctccagaaagg

SEQ ID NO: 157894 - DNA, 246 bp, Homo sapiens
ccctgaaccaccatatggaagaccatcctatgtcagcatgaatgggaaacacattttccctgtgttaagccactttagttttgagattgttattggagcagtgaggactacagcagctgctgttgagagatgataggagcctaaatcagtgggtggaacagattcaagcaattttagggcaataccgtaattatcacttgacaatcaattccatgcaggatgtgacagagaggaaggcacatctag

SEQ ID NO: 157895 - DNA, 530 bp, Homo sapiens
aatcgagccggtcctgtttgagcctgctgagccagtacataagcttcatagaaaatttcagacatgcaatcataagatcaaagagtaaggtcctacacctttggccccaagccaaaaaacactactgaaaaaccattaccatttacttgctttaggaaaaaagccaagactacttagacctttcccacttgcagaaaaatttacatgtttctgaatatggatctaattttaagttccatcttaatgtgctctttctttcagaggtgaaacaactaatacatgtgcttctgagccacagcttaaaaaaaaaaaatctcctgatctcaatgtgtatcaacagccattaaaatatccacactcttggctgggcgtggtggctcacgtctgtaatcccaacactttgggaggccaagggtggatcacctgaggtcaggagtttgagaccagcctgaccaacatggagaaaccccatctctactaaaaatacaaaattagctgggcatggtggtgcatgcctgttatcccagcta

SEQ ID NO: 157896 - DNA, 234 bp, Homo sapiens
agatggttcccgctcacgcccacgtggactggtccaaggaaatcatggaggaatttggttccccagcaatgaaaggaagatgagaggaagtcaggagagtctacggcacagcgacagatggcgacttgggcactcaaggccaggctgacaagccgggagaggcttttaacgaagatggaggccggacatggtggctcacgcctgtagtcctagcactttgggaggtcaaggtgg

SEQ ID NO: 157897 - DNA, 111 bp, Homo sapiens
cctttaagaccatttagcagcaagaaaaagctagagaagccacatctgaactagaaaacacaaaggggcccaatgaaagtgcaaactagattttctcaaaaatgaccagaa

SEQ ID NO: 157898 - DNA, 167 bp, Homo sapiens
gtggatttggggatgtctgtgtgtagacagtcactaatggggtggagaactgaagagagccttgtgttcagggaaaccaagtcaggcttgagaaagtagaaggctgagtccttcaaggtagaagagcctgagctccagacataaaagggaaactggagacttgtttc

SEQ ID NO: 157899 - DNA, 302 bp, Homo sapiens
ttctttttcactataacaattaaaaataagtatatacaataaaaacaaaaactcctttcttctacatagagactcaattagccctttggtacatagttctgttttaaatctacattcctgattttaatctcacacaattaaaagtattaggaccacatttatggtcactggatttatgtaagattggggtttatatagaactaccttatttcaccataaacattttagggaatagtagtttaaacctcattttaatctgcaatgtgaattttcctattcttctatctcagtattgaattctc

SEQ ID NO: 157900 - DNA, 328 bp, Homo sapiens
acaatctcctttagggaaagaactgctttcaggaaaatattttaataagttacctgtaataaaagtgagaggcctttaaggaaggaaaaaaagaatatttatgctgcctctttatgggaaaacaagagggatttgtcacttattttttcctactgatggggagtggggctaaggaggaaagagagacaagagccagtgagctggtctgagttggggactgcgggaagtcatggtgggtgagtgataatattttaagcacagggacactcagagtttaatctgaagttccattgctgtgatgtaatccactctcttccttcccacatgt

SEQ ID NO: 157901 - DNA, 208 bp, Homo sapiens
gctatgaacaaatgtacttaaattcaacttttacagaaaataacagatccaagcactatttttgtggttggagtggagaggagggggaagagagacaggctacaaatatattagtgtctaaattatttcctgaatatgaatttattccacaaactagtgatttttttttaacattaggtttcatatacatttttaaagagttagggaa

SEQ ID NO: 157902 - DNA, 269 bp, Homo sapiens
agcatatgtttctttatttgtttcccttcatgttactttaaaaattgaattatctttttctgggaatatcagatatgctgttgttaacacgtttctccttggcaaaatgccattaacaaataaggcaaattataagagtatggtccacattgtccttccactgccctatagttccagcttagtccagtcctgctgtatattaaattagtagtagcttcagtagtgttttcttggtcaccaataaaacatgctccctttgtcttttccaa

SEQ ID NO: 157903 - DNA, 134 bp, Homo sapiens
tgctcacaacccactgagccttcttgggtgcttggtcaggccaaatcatgtccaggctggacaggtagcatcaatagctgtcacgatcctgttcaaatgacctggttattcctgttattgtacaccttgctgtt

SEQ ID NO: 157904 - DNA, 237 bp, Homo sapiens
cacatctgattagccccggccactctagtcacatctgaagagggctctggactgagcatgtacctaagtctagctctgccgggtgttatccagaaagatcagtcactgtgctttggagtccatgtcactgaagcactccttagatgaagcagaacccagatgactcttgtgtcaaggcaattccaagacaccatctcctgctcgcctgctgtataaacgaacctaacatagaacaaa

SEQ ID NO: 157905 - DNA, 768 bp, Homo sapiens
agtcagcagtgatcacgccactgcactccagcctgggcaacagagcgagggccctgtctccaaaacaaaaacaaaaacaaaaacaaaaaaatggtaagctctgtggagtgacgttagctaagagccatactattgtgtatatagggtctactaaatgtggctgtatcagacaggacttatggttatagttaccagagaacacttgtggtcataagttgtgaatggcacccagattcttcttgaatatctatcacatgtctatcagtaattctgaagtatgtaaaaatgaaacaaagatttatttgggagttagcactccagaagattagtgttaaaacagaacagcagaaggagttgtgacatgcatctataaacaattgtaatgatttgacagttatttagccctctattcctagccctttcattgaactgacagcatgcctgcaaagatagtgaggcctgtttcagccacattaatgtcctcttaaatggtagcctgcagtctggggaatgataaatgttcagtgattgatgatttttttagtccccggggattctgggtggtttcaggtttctgtgagccagggtagttttttctcttacttgggcttcgtatacgtttttccggtctttaccatgttggttttagattggcagagatatatatgacctgcagttttaattaatagagttcaaagccttgtttagaaacaatatgattttggaggtaatgctgtacttaaagagtgcgtaaaagtctgagaacca

SEQ ID NO: 157906 - DNA, 195 bp, Homo sapiens
ccgggagcccttaaccctccgcgagcccttaaccctccgggagcccttaaccctccgggagcccttaaccctccgggagccatgagatgagaatatctgcaggaggaaaatcctagctaggagagggaaaaaagcaagtgctaaaatcctgaggctggaacatgcttagtgtgtttaaagaacaggagagaggcc

SEQ ID NO: 157907 - DNA, 489 bp, Homo sapiens
gtgacaggatggaaggggagtgactggctggcaagcagggccaagggtgatctgtccgctccaggtttgggtgtacacagaatgttcatggacagacaggaggcagcagggtcacaagctggcttccagacttggggaagcggccccaggttcccttgtctttaaagctgggttcctgactttaccgactacataaccttcaaagttttttaaaaaggacttgtttttcaaaatgggatggttgagcagagaagccttcaagctgccttccaaactcccaaggccccagtgttgccccaggtggctgaggggataagtgtggccaggcagggaggcccatgcggtgctgcacccaaggggctacttggtaactacagacaagggttgggcaaataggctgctcagaaggagacagtgacaacgtccccatagctggaaacacacagagaaacagatattgcatctagcagccatcccctttgagagcaa

SEQ ID NO: 157908 - DNA, 318 bp, Homo sapiens
gcccacatgaggcatgcgtcatctgacccatcttagctggctagaagaggcaggtggaagaaggtgggataaccttgcttgctgagtctcttggctttcatttttatcccgtgctggatgcttccttccgttcctcctgcccttggaaatcagactccaagttcttcagcctttgcactctgggatttacataagtgtttggccaggggccctctgatagtcagtttggccacagactgaaggctgcactgttggcttccttcttttgaggcttttagactcagactcagctgctactggcttctttcttccccagcc

SEQ ID NO: 157909 - DNA, 554 bp, Homo sapiens
tttcttctaaccatatataatcaaacaaaatattaataaagcaaccatgaagctaaaatataagaattttgacttcctagagaatcttactcttttttcaattttccaacccattctattattacttcagtttttacatcttattattacattcatcatttatctaaggtaaatagtctttacgttccctttagagagattagagggaaggtgagagacaaagtaaggaacacaacagttagacaggattctatatggatactaactagatttttatccttagtgttcttcctaaaacagatagaaataaagttcctatactagtcaccgttctctgagcctcagactctcagtgggcatttgttctagtcttgctctgatcttatccctgaaatgcagcacagtacacaccatgttcattgctgttcctacgtctttgtgctttatttcctcacatattgcctacctccatctccaaaagaaggccctccctgtcttgtcatgtccatttaattcctactaatccttcatcaagactcctctgactactcaga

SEQ ID NO: 157910 - DNA, 242 bp, Homo sapiens
gagggactttcagacagaaggcattccaggagaatgaatccatgaaccagagatcagaagcctgaacagtgaggagaccttgtacacaaagggggagctaaaaagaaagggcttggaagagcttttagaaactatactaaagagtttaaatattgtaagtcattggaatccaacaaaggttttagataaagagacttacacagttagatctgactttgtaaagattaactgtagcaatgcca

SEQ ID NO: 157911 - DNA, 517 bp, Homo sapiens
tttaaagaatactctgtttatgttttatgactctaactgctttaggcaagttggttttctccttttgagtatatttgagtataatgtaaaaattataaaataatggttgcctcacaatggcctattaagatgtgacagtcgatgtttttgtaaaggaatcttatctattatatacaaatattacattaagtaatgatagccagccagccaggattgagaacagttgattcctgctaggaataacatgcgttaaaagttttaaggcagctaaattgatagaattgattaaacagcgaaggcaacagtgtaatgtagttgaaaaaacattgtgtggtcagatagaactctggtgttctttcttctcccagctctgccatgaactatgtgattctggatcagattgtcagcctctctgaaccctattgccatatgagaataactatttaggggggctatcagtctgtgattctccccacgctcatgttaaatgaatttgtatgcctttcctcttgttaaa

SEQ ID NO: 157912 - DNA, 601 bp, Homo sapiens
cctctcacctcagcctcctgagtagctgggactacagcctgccaccacacctggcttttttattattattatttttggagagatgacatcttgctatgttgtccaggccactctcaaactcctggaataaagggatcctcccacattggcctcccaaagtgctgggattatagataggtgtgaaccatcatacccagctttattttatttttttgtagagataggggtctcgttcacttgcccaggctggaatgtccggttttactttcctgttttttcttggtggcagataccatttgtttgctttcagatataacattcccctaagcacttcttgtaggccgagtctagtggtgatgcattccctcagtttttacttgtctgggaaacactttatttctccttttcttcttcagggagttttaatttttcttaaacatgtggtcactctctagaggtgggacacccccaccccatttttggcttagatcttctcgtgtgttgacttgtgtccccctagaaggagtgttgaagtcctaacccacagtacctgtgattgtgatcttttttggagatagggtgtgatttctaaaaaattata

SEQ ID NO: 157913 - DNA, 403 bp, Homo sapiens
ttaaatgattgttttcctcttttttaaaaaagtcataccattcatcaaatagttaaaatgcattctaacaccaatttagggtggacttaaggaaaaatgtcctttttactactgtcaaatatttggcccagctgatctggtgttttgaactctagttatttgttcatgggtctttctagcaaatgtcacattgcatttagtttgaattaattgggtaggtagaaactccatatggtatggtcaaggggtggcaagatcatcctcaccaaagagactatgtcctcttctggtccaacacctaaagtgactacctgtaaagggatttctttgcccaaagacattgaaaagcaagccgtagcctaactctctgacatgaccccggtatcatttcagcaataagaca

SEQ ID NO: 157914 - DNA, 450 bp, Homo sapiens
gtcattgctcccttcctcacaacagcaacaacaaaaagctaaacaaactgaaaatcaacaacctttacagagaattgaggtcacagcagaaaatgctgccctgaaaaatggagaaatggacagctatacacagagaaccaaagcctacggggagcagaggcccacagctaaaacctgtattggtagaaacaataaactgtaattgacaaattgctggaagctcagggagaactgacatgagaattaaaaaatatatccaaaggggagtgcagtctctggggacagagggcactatttggggagttttatttccaggagctctaacagtttctgctaattttttattgagagccagacataatgtatcagacaaaagaaagtgagattgagaggcctttaaaggaggtcttatacgtttaggaattaggttatgcttaccatttgctggag

SEQ ID NO: 157915 - DNA, 643 bp, Homo sapiens
gtggacttttctttcttcaatttcttcctggccttgtgtttgattgccttctctggagtgtgtcgtctgcctttctcattggaggttttcctcggatgtctggcgatgccatctgcctgtgtgtgatgggagtcagcaccagccggcctcagaggctgggtgtgtgcacccagggtggggcccgaggggcttcagagcaggtgtctgtgggcagcagccccttgcctgtggactccgtagaacgtgtgggtcagtcggtctcttctgggtggtcagtgtcccagccttcactcttgcccaggtctgtcccctggggctctgggaggtgagtgcgaaggggctaggtgactctcttctcagtgagtatttggcatccccgagacaggggcccctcggctccgtttccccagagccttctgctggcctggagtttggggctgaggatgcatcagggaggtcccgtttctctttgtaaagacatttgacagctcccctcaccaccttggtcttcaggctgcctggcccggtttggtctttggcaggtcctggcacctctcgggcttctctgtggctggtgcatttgttccctggcctccagcccccaggtttccttgctgtctctccgcggctgccttctcttctt

SEQ ID NO: 157916 - DNA, 161 bp, Homo sapiens
tctggcgtcgtgtaaatccttcactcttactccctgttccctcctgctccagcccctggccaaccaccaacctattttctgtctttctgaatttgactgctccaggtaactcagaagtggaatcatttcaatggctttttttttttttttttttttttttt

SEQ ID NO: 157917 - DNA, 551 bp, Homo sapiens
aaggggatggttttttgtgtgggactatcatactgttagatgtgggatagtagcaaaatcataggttttgttctgggcaatgggtttgcagatactcattaacatcattaaacataactacttacacaactaaagaaaaggaggctatgatggaaaacaaacagaaatgatcatccttgagaggcatgtaagattacaacatcggatgaccgcagttttcctcaagataggaatccagctcccattccaaaatgtccaccaaagttgcaacatagtagcatttgccatataaaagtactggagttattaactggattccagatgtctgaaactgatgtatcccttcactgaatcccgactaggatctattttgggtatagcacttcacacaggttgctgttcttaattaaaacttctctgccttaagagctttatgtctgtgagatagtcatccaaatgttctcctctccataaatgtgctcttatgttttattttcacagcaaaatgcttgcccagattttaataaacatgtccgcagtagtaatataca

SEQ ID NO: 157918 - DNA, 265 bp, Homo sapiens
ttcttggtcatgaacactttgcctaagccaatgtctagaagagtttttccaatcttatcttccacaggttttcagtttggggtcttagatttaagtctttgattcatcttgagtgttgtttttttttttaataaggtaagagatgaggacctagtttcattcttctacatatggcttgcaaattatcccagcaccatttgttgaatagggtgttctttcttcactttagggtttttgtaggttgtcaaagaacagttggctataa

SEQ ID NO: 157919 - DNA, 642 bp, Homo sapiens
acaggtggcttcttggtcaatgattttgtatgctgctgctggtgtgagcatgctgaattgctccatgcctgcagctccctctaaaactgatggagagccctgtgctgagatgaaatggggggaaaggagaaatttgttgccactttgagagtcaaaggcagtggtctttccaaggaagagtgaactagcagaatcactgcaggagaagcaaattctggaggctggatgccaagaggtgctgtaagaaaagttgtaaagatatatgtgggggaaaccactgctcccatcccccttgggagacaattggtaaacaatatagttggcaaaggatagggactgggagggaagtaaaagaggagacagagtacaatgaacagaatagatgccaatggccttatcagctttaacagatgatctgaaaactttaaagtaacaaggaagtttttattcccataattgttagtagtgtcttttgctagctcctccgatgtgacagtgattgaccattggcagctgggtcttcaaactctcttctaaaatgttgcatctctatggggacacatgaggaacttagttcttctatctggaagtaggtgtcctctaagatttcttgtgttgtgtactctgtatcctttttttttt

SEQ ID NO: 157920 - DNA, 362 bp, Homo sapiens
aagcaaggtagtttttaagtatatcagaagccatcatagaagagtgtcatataactgggcatgaaaaataggcaggatttggacatgtagtgacagggagtattatatctgaagtgtacagacagtgtcagcagaagcacaaaggcagaatataatgaaacatttttgggaaatgaagatgagcgcattattgcgcctgtagtgggaaacagagctggaaagacaagtaggggctagaccacagaatcttaaatatcaggctgagtttgtactttagtcaataagcattgggagtcacacatttggagttctagatgatagaatatttaggaagccgtgctgggatcgggggtaccgagctc

SEQ ID NO: 157921 - DNA, 966 bp, Homo sapiens
cccaagaggcggaggttgcagtgagccgagatggtgccgctgcagtccagcctcagtggcagagcaagactccatctcaaaaaaaaaaaaaaaacaacaccccacaaaagagggatatttactaacaggattccagagggcagggaacccaagatcaggagatggcctcagacctcacaaggcactggaagaggtcaaaaagcaaggccctccctcattccctctggggccacagggtcccccatctccgcttcccactgcacatctgtgcttcatctgggagacctgatacccatgcttttccacacacctggcctgctcctgagtgtgcagagtgtcagttccagccagttccccaggctaatggacaggcctccgttccaaattcccaggaaagagaatcaccattggccacagccacaagaccaggttcccccaacagaaatgggtgggttggacttctctcccacccttgaagctgaaggctggcattgagccctcagcgtctcagacagcgctcaggtatggcaagacagtgtgcaccagggacaggaagtcccgggattggcacattttctgggatgacagtttttttgccaatattctgggagaaatcctaccatttttatattaaacatggctatgttatggagtagcatctaaagtgatatgaactaaaaaaaaaaggccaggtgcggtggctgaagcctataatcccagcactttgggaggccaaggcgggtggatcatgagatcaggagtttgagaccatcctgtccaacatagtgaaaccccgtctctactaaaaatacaaaaattagccgggcatggtggcgcgtgcctgtagtcccagctacttggtaggctgaggcaggagaatcgcttgaacccaggaggcggagcttgcagtgagccgagatcgcaccaatgcactgtagcctgggcaacagagccagactccgtctc

SEQ ID NO: 157922 - DNA, 665 bp, Homo sapiens
tcgatctcctgacctcatgatccatctgcctcggcctcccaaagtgctgggattacaggcgtgagccaccgcgcccagccctcttcctgtacatttcttgacccctgtgtgggtccctttcttgggaaatagtcttagagaccacagtctggagactggggtaagcgctgttattgggttgggacttacgaactatcgatctttactggcgtttttgtgaatttcctgagggacggacatgcgtgtttgacctgccatccctcctcagagctatggagagcacctcgcgctgaagctgacattcaaacgcctgaacggtcataactgagacccattccaaacgctgacttacatgtgatgtcattttcccccagtgttcttaactgaattgcaactgttgtatcataccatggtggggaggggcacgcatgcaaagtagagacgaggtagagaaagtagaagtattctttaaggtaaagatataaaaatattctgtagataacatgtaacttaagtggccctaccttggagcttcgtatgtaggtgagtttttatatgccacttctgtttctctcatttagatggatatatgcaatgccaaagacaaaagcttatgttaacaatcactgtaagttaaattatgcttgggtatgaacaacagtgca

SEQ ID NO: 157923 - DNA, 403 bp, Homo sapiens
cagttaacacctcagtgccaacctcaactcacccaccgggaacctgctctagcctattacttcatgcccacaggaagctcctagacttgggctccatcaagacctccacagttgtgacatcaaagggtccttgcccttagcagctggggtcctggctgggaatctggctctgtgggcagtgttatagcctgcagcttctctctgcctttgaagatacaatcgcacatctgagggtccttatatgagagaagcaaggttagactggttctacttgacctcagagagtcaaaccaagacagtagtagaatctacaaagaaaaagagttcaaccaacgagttcctgtgaataccaggtgctcaaaaagctagagtaaacatttaaaataaaaaaaaagtcaacccc

SEQ ID NO: 157924 - DNA, 530 bp, Homo sapiens
tcaaaatacggtagtattacacttattgagtgttttctacatgctagatattgcctttctctcatttgcataacaacctcacaaagtaggtttatcaacctgtaaaaaatctccgttttacaaaagaagatgaaattcatgaaggttaactaaattgccacagttaattataacatcccacattttaacattgctcaagcactttcttatacctcttttaatcctcacaataaaccaatgatgtggcaggccctgtatcattatttctatattacagataggaacctgagacgcagatagatgaaatgacttgcccaaggtcataatactagtgagtgacaatgtcaattctgaaagtcagactctcagcgtttctatcccaacacatcgcatccctaaagatggatttatccatacattcagtgggtatttgttgaacccctactgtaagtgggtacttgggtactgtgctagcgcctggggacacaatggtggacaaaagaacaaaagcatcagccaggcaatgtggc

SEQ ID NO: 157925 - DNA, 369 bp, Homo sapiens
catttgtgagaccgtgtgcagtgttgtacttggtgggcctgtcctttttccttgctgtattgtattccattgtatggccgtgctgcagcctcgtgtccctctacctcggtgcacgcttgctgaggaagtggccggtgcagctgtggcttgttgctctggaggcacctgtgtctgtgggttggctcttctgcaggttctgtgcccaggagtgagccggctattccagcagctgtgactgttccagtcagcagataccaacaaacagctttccaaaatgaaggtggccacggtgtgattttcaggttccttagttttgtgtcgagtagataatttatctacccagccctctctgaggagtcatcgtattta

SEQ ID NO: 157926 - DNA, 401 bp, Homo sapiens
tggtgactacatccttctcgttgttcaagccaaggacttggcagtcctcctggaagcctgtgtttctccaaaccctacatccaatcaggcagctcatcctgctgccttaacctttaaaacatccagaatccaatcactgctcgccacttccactgcaccacactggtctgagccaatgtcacctgtcacctacatgatgacatcagccccctaaccgttttccctgcttagcctggttcccctcccatctattcgtctactcccaatctcccagtgaagcagctaaagtcatttttttattttttatttttggagacagggtcttgctttcacccaggctggagtgcagtagtgcaatcacagttcactgcaccctcgaactcccgggttcaagcaattct

SEQ ID NO: 157927 - DNA, 741 bp, Homo sapiens
cagacacttcatactgaagagtaaattgaaactgaaataggaaataggtcaggtttaaggagaagctgcaagaaagccaacagtaagatctgaaaattatttaacatttttacaatatatagtttgtttaaagtatctttcaggcttaaaattcttggactcttggtgtgacctttgaagaacgggtaataacgctgactaggtttcccaggttgaaccacctgagcatgttaaaggtgaaaataggaatctaatcagaacatttattacaccgtaaagcaattttctgaaaatgttactcagttctatgacctcattaccaggcatctgttcgcaaggtcactgtacaagtttattttggctgagcaaagcataaacatttgaaggaccttcaaggattttgctgaggatgtacagcattccatagcttttcacatgagaaacataggtggtttcgtgcagatgagcaacactactgccagatgaaggacagatgaagaaaagtactgttagttgtattaaccatgtctttgaatttctctggcagcctttttttggtgaatttctttagcagatataagaaatcagttaccacagacttttgagctttacaggtaaaattgttgaaatctaattaactttaaatgatcccgattaggtcaaaaatccgaacatcttactgtctatgactttctgtttgtgaatggctttgaggatatacagcttagtattatacactta

SEQ ID NO: 157928 - DNA, 320 bp, Homo sapiens
gatagacagtgtccaatcccaaaagtccaggcaggcacacatggaaagggcatccttctcccatctctgcccctgccagctccccctctgaggcagtcactattcctagttcctaaccctccacagagggaatctaccaggggcatgtacttttcctttttttctggcttcttgtttacatctctgggctctgctggggtctgtacacatctaagaagctgtacccagccactcagcaaactacacatccatgagtggtcctgggaccactcactaccaagcccagcaaagcaaactcagccctaaatccagaccccaca

SEQ ID NO: 157929 - DNA, 523 bp, Homo sapiens
cacaagtgaaaacaagagggtttcatgtaattctgtagataaatttaggtccatccgagccacagcatccagtgatttaggcacagggactgtaaactgtaccctcaagcagcactggcttgatggatttctctaatatctaatttaataggaaggagaggctgggagaccagtaaatttagactgatgtagagcaagagctgagtttgtgggggaggaggtagatattgaaattcaagcactagggaaagaataggaccccaaagaattttgctagattgtaggagaagggagtaccaacacggtgcctgctctcactgactggtctcttgtttcccggcctgtgcccagccatcttctgggataaatttaaacacacctgcttatgagtgtctgcagcagggaaacagtgcttctgcagaggtcttccaccataacctcatggaagaaagggtttttacccagatttatgggactgtaactactcaaagctaaagggatcatggaaagaacaattggctgc

SEQ ID NO: 157930 - DNA, 632 bp, Homo sapiens
catgggatcaggtggctgaggaagctgaggaatagaaagattgaggatagatggatcatccacatggtgactgatgcctccaaaagcagagtcaggaacaggggctcaaaaggagcagtaagccaggtgttaaagtcatcagtgggtgagggacagaagatggggaatggggattcaagaccagtagaagaaaagctggggactggagtttcatctcagatttgtgtgttcacgttacggcctctagataatagcatcttaaagaagtgaaacagggaaggttttctgtcttttctcctactttgtctttccaccagatagcatgaagtctcttatgtcttatgtctcttatgaggtctaaggcggacatggtgatggggacacacagctttgtgaagactaatgctatcaggtttcactatgctttagagaagcaggatgaggcctagggttgggctaggcctagggttgacccagcatgggagttcctggcactgctctgtctgcccaggctgatgatggtccaagctgcagctgctgagggaacccaggcatcctggtggacccttttgattaaaatagagcagaaggaggccaggcgcaatggctcatgcctgtaatcttagcactct

SEQ ID NO: 157931 - DNA, 197 bp, Homo sapiens
ctatctggtgtttgaccacacgggggcagcagagacagcccctgcccatccaacggctgcctgggtggagcgcaagtctgcaggaagaagagctgacgttgactcaggtgttggggactaactagggagggccagctgtcactcaggcttcagaatcagatggcgcccactgacccagaataccttcctaccactca

SEQ ID NO: 157932 - DNA, 729 bp, Homo sapiens
gccactgcacctggctttatttatatgtgtatttatttatttatttatttatgagatggagtgttgctcttgtcgcccaggctggagtgcaatggcgtgatatcggctcactgcaacctctgcctcctgggttcaagcgattctcctgtctcagcctcccaagtagctgggattacaggtacctgccaccacacctggctaattttttgtatttttagtagagacgaggttttgccatgttggtcaggctggtcttgaatgaatgtgttttcttcacattcttgttccaatggaaaccgggctgttccccaagggcagtgcttattctgcattcctcaattgctggtttatgtgtctctcaactcatgtacctctctgtactgccatttcttctctcttctccatcagaaacttagctctaatcagtcatggttgcatacacacgtagtcctaggtactcaggaggctgaggggggaggatcacttgagcccaggagttcactgttacagtgagctatgatcacaattctgcactgcagcctaggtcacggagcaagaccctgtctcagaaacaaaacagtacaaaacaaaaaacccacaaaaacccaacccagtgcttttgaaatatatatcactaaactactgtgtattgctcattcttgttatttggtttcttgtctactcacatttattcacttacagttttagtaccctgaatattcctgagga

SEQ ID NO: 157933 - DNA, 500 bp, Homo sapiens
tagtgaatttttcatttcagttattgcacttttcagctccaaactttttatctggtctctttgtaaaatttctacctttttattgatgttctctatttggggaaacctgcaaccaccatcttctgaagctctgcccatgtcaagaggtctgtgcatacctctctcttccatcccccagttttccaactttattttgctcaagttcctgactgaccaagcaacccatgagccactgcccatgactcattcattcatgcactactggggcatcatttcacaccctccaccttgcatgggcctttttgggttttgattcctagttcctggctcaacagccatttccaaagctgttcttgcgttagctcccaagcctactgctcttgttgtagattctcctcttaatgtctgagtcacagcatttatttcatagatttttaataattggactaattttttccaatgcagcatttctaaggactttcagtaatggagattctata

SEQ ID NO: 157934 - DNA, 278 bp, Homo sapiens
taggttgtcctggtctgagctagtgtggttggagccaggtgctctagcaaggccttattacatgactgggactcagctgggataaccaggtccttcttcatgcacctcaaaaaggctagcctgggcttttcccatggtgacagtgttccaagtgaacaaggcctgtgagtgctagccttggaacatctatagcatcactcccttccatcctgttgctaaaagcaaatcaaggccagctgagattcgggggatggggaagtatatcctacttcctaaac

SEQ ID NO: 157935 - DNA, 306 bp, Homo sapiens
tgagagtagcttttacctcataacattttatggggtcagtgcatctgaataacacaagactaagaggaagaaaatggaatgcaaaatgttatcagtgccatccatgttcaacacagtgattacagatacaaaaggggagtgggtgggagccatagaaagggcagtccacagggacagaaggcctatggtgaaaaactactgcctctttgggactaaatatcactatgtggtgcagcattttgtgagaaaagctaatttgagcagcatttttttatcctgaaattttgctatggttttttttttttt

SEQ ID NO: 157936 - DNA, 382 bp, Homo sapiens
taaaagcagtaaaagcaaaacaaaataaaacttgctacgcaaggtggctcaggcctgtaatgcatcactctctcctgcaccctctttgccctttagccccacctggacagtttcaccgacggcccgcctggccccaagcccctgctctgcagcacagcttggtggttgagagatgaactctgaagccacactgcctgggtttggtctctggctctccacttgctggctggcaacctgggcaaattgctttacctctttgtgcctcatttgccatctagtagggttgtgatgaggactgaggaagttactatttgtaaaggacttgaaatgtgcatggcattcagtaagtactgagatgtaagtactaacatgaacatgtgtt

SEQ ID NO: 157937 - DNA, 584 bp, Homo sapiens
ctcccttttctcaagtgcttgggatggagagtaagagtaaagtttttaacacttgcctgctatgctgaacaggagtgtaatgagagagtgtcctcaggcacagaagtgtgccgcctctgtagtgtaaaatcgttggctcagctttcttctctcacattccagaatttctcaagctgtggccttcatggctgtgtgcatctttccattttgtaccctcctctctccttatcttttaatccagaagccacagtacctctagacaagtattattacttaaggctgcatggctgttttttgaaggttttatcccagtctctgcagatcctaagtgatcatcttctcacccatagtggtgttgcctacggagtgtgaaggaagagtcttttccaaagaggggcgtggtaccacttgggggatgtgaccctgtggtggttagggcaggagtacacgacgtcagagaacccacagcatccatgctggagtcagaggacggtaatgaagtaggaagcaatgctttctgtcccagttcttccagagatagggcctcaagtgaggagtttagcgtggccctttacatttactgg

SEQ ID NO: 157938 - DNA, 623 bp, Homo sapiens
cgtttcccctccttgtgcttttctctcgtgtgccatgtgaagaaccttgcttcctctttgccttccaccatgattactcttaccagttgttttaattgctaagacaacccagttctgcatgagctacagccaacttcacaaagcttcaggtgcctggatgttgaggggcaaataggactgttcactgaaggagctagagaatggaagagaaggttgtgtcagatagaaataacagaagctttctgaaatgaaaacagaaatgttacaacttgcaccacagtactggactgaaacgaagatgtaacacagccataataatttaaattaatagcaaataaataaagaaaaaaagaacttcattgtgaggaccatagtcatgggatagctctgtcttttcggggaaagtggagtagagggacagagtcaccccaggagaaaaaatgcttaaattaagactccctgagagactgaataagagtatgattagttcagccttgctttcatcctccacttccccctcccactgtagacttcagttttaataatgattaaagaataatgcagcatgcggcctgcaaacgtgggagtccttaaattgttcgacactcgtaacatgccgtcct

SEQ ID NO: 157939 - DNA, 660 bp, Homo sapiens
  misc_feature (17)..(17): n is a, c, g, or t
  misc_feature (23)..(23): n is a, c, g, or t
  misc_feature (34)..(34): n is a, c, g, or t
  misc_feature (38)..(38): n is a, c, g, or t
  misc_feature (40)..(40): n is a, c, g, or t
  misc_feature (42)..(42): n is a, c, g, or t
  misc_feature (59)..(59): n is a, c, g, or t
  misc_feature (61)..(61): n is a, c, g, or t
  misc_feature (75)..(76): n is a, c, g, or t
  misc_feature (87)..(87): n is a, c, g, or t
  misc_feature (93)..(93): n is a, c, g, or t
  misc_feature (101)..(101): n is a, c, g, or t
  misc_feature (103)..(103): n is a, c, g, or t
aggcctccgaggtgctnggcagngtcagtctcanccgntnanccgagaaggagtcagtnanagaccttgggccanngttccaggggntctggnagtgtctncnagactcttcagaggttcctgctgggcctcccactgctccagtgcttttgatgaagctagactattccctgcagcagttccttttcccatgttttggcctctgaggatcaacagtacagctctatcttctttttgatgagatctttagtctctcttgatagaaataacagaagctttctgaaatgaaaacagaaatgttacaacttgcaccacagtactggactgaaacgaagatgtaacacagccataataatttaaattaatagcaaataaataaagaaaaaaagaacttcattgtgaggaccatagtcatgggatagctctgtcttttcggggaaagtggagtagagggacagagtcaccccaggagaaaaaatgcttaaattaagactccctgagagactgaataagagtatgattagttcagccttgctttcatcctccacttccccctcccactgtagacttcagttttaataatgattaaagaataatgcagcatgcggcctgcaaacgtgggagtccttaaattgttcgacactcgtaacatgccgtcct

SEQ ID NO: 157940 - DNA, 258 bp, Homo sapiens
tgcatatacatatagataatattcccataaaacaaggagaccacggtgaggtgggacccgcacatattgaaggccttccttcttcctgcggctgacttgattctcagcactgctagggcaatgtagctataagagatgaggataagacacaaaggcatcaggacaattactaccgataaggtgaaaacagtgctctccatagccactgtgtccacacaggtgatttttattagagctggcatctcacacaggaaatgt

SEQ ID NO: 157941 - DNA, 638 bp, Homo sapiens
ccaagctggggctcccatacatgcagagggactcaccagcgtgtgctgagcctgaagctccacctccagggtgttcaccgagcagctcagctccaggatctccaaatgacagcactgcagctcctagagcaggacatggcctgcaggctgatgccttcagactggagcacagagagacacaattacctccctgcccaggtggatgccgagtcctccctactctgcagcctcccttcatctgggcttggaaccactgctccacatcctggcagctggtctccaccacggcctcatactggccccatatctcctctgactgctcaggtccgcagtgggctcagtccccaactcaatccggagcttgtcctctgcactcctcagagtgcaggcttcctatgtacacaaaaagagcagactctgcattcattcagccctccaccaaatgtcttgcccacctgaagcacagcatggtgactgctcaggcacttcaccccaggagagcagcagagccaccccagcagcccccttgtcagcatctctctccatgtctgaaatgatctaataattatctctatttttactttatcacaaagagtgacacccatacagagttgcctctgtttcaatcattatctggg

SEQ ID NO: 157942 - DNA, 283 bp, Homo sapiens
taaagagaatcaagagtgagtgcttttacatttgaatgcaaaagttctataggtcagtgatttccttcctgacttgtgtcccaaaatgtatataaaatgtgtttgattacaacatttcttcttttcttcataaattgccattatgaaaattttattgggaaattggagaaattggctattaagctactagaaaaatgtcagaatccatccataaggcttcatagtttaaaatacaggtttacaaatgtgtatgtgtgtgtaatttgggcgtacggggataact

SEQ ID NO: 157943 - DNA, 188 bp, Homo sapiens
caactgggctaacctgtaaggacaaagggaatattcctttaaggacacaggaattgactagggcactgaacatttgtttacacactgaccacagtccctgaatgctagaatttaagtgccatgaggtgtatactgcatatagagccgccgctaccaccaccatacatgggagcttaagccgcataaga

SEQ ID NO: 157944 - DNA, 941 bp, Homo sapiens
acgctgcacgagcgttcaaaataaaaataaaaagaaatcgtttctagaaactgttttcccgtgtgtaaactagtggcactgcagcctgaggcaggtgctgagatggggacctggaaaaggcaacaggcattttgagtcagaaacaatgtgactttcctgctccaaaatgtgcaattcaaaagtctttcttagttgtgactaaaacaaactttgaacttactatttcaacagtattataaggggaagacccaaggaatgggactggcactgggaaaacagctaggaagctgctctgcacggccagggagtctggaagcatcctggtactccagagcgaacaaggctgagcgcttgatgtggggcttagaggcttaaccaacttggttcgaatctagccactgccacttattagtgacagtgacgaaaggctcagtctcctgatatataaaatgttgggaggatgaaactaagttacacgaagtgccttatacagcgtgtcaggcatccaacagaggccattatcaacattaaccacactgacagcatttcaagcagagtatccgaacagttaccccatcttcaggcctactgagttccaatatttgcttaacaagagcagccagtaactcttacctggcctcaactggcagcagatattctgggcctcaaatatctatctaataggaaatggtcacagacacaaaataagcttaacaaaaggcagtttttttttgtttttttttgttttctgttttttgagataaggactcactctatcccccaggttggagtgcagtagtggcgtgatcacggctcactgcagactcaagtgatcctcctacttcagcctctcaagtagatgggaccacaggcgtgtgccatcacaccaggctaattatttttcttttcttttttttttttttgagacggagtttcgctct

SEQ ID NO: 157945 - DNA, 535 bp, Homo sapiens
tagctcggacccacaccacctgagttggtcaggagatcgagaccatcctggctaacatggtgaaaccccatctctactaaaaaagacaacaaaaattagccgggcgtggtgttgggcgcctgtaatcccagcactttgggaggctaaggtgggagggtcacgaggtcaggagttcaagaccagcctgaccaacatggtgaaaccccatctctactaaaaaaataaagacatgaattatttttctgactgtactatttgactttaaaagttgtagcaattttaatattgttacacatgatgacactgccattgcttcatgaaaaacttaagtggcatactacctatccagatactctgctgagttctcattctcatcagttgatttttttctctgtatgagcagtttccaatttacaccccatatatgtgtatcctctccatttattaatgaaaagatacataatagagaaaaatgaagaacttttacccttgatctggagccagatgcctgcaggggctggtggttacctgtgtg

SEQ ID NO: 157946 - DNA, 453 bp, Homo sapiens
taaaatcaagacatgggccaggcacggtggctcacgcctgtaatcccagcactttgggaggctaaggtgggagggtcacgaggtcaggagttcaagaccagcctgaccaacatggtgaaaccccatctctactaaaaaaataaagacatgaattatttttctgactgtactatttgactttaaaagttgtagcaattttaatattgttacacatgatgacactgccattgcttcatgaaaaacttaagtggcatactacctatccagatactctgctgagttctcattctcatcagttgatttttttctctgtatgagcagtttccaatttacaccccatatatgtgtatcctctccatttattaatgaaaagatacataatagagaaaaatgaagaacttttacccttgatctggagccagatgcctgcaggggctggtggttacctgtgtg

SEQ ID NO: 157947 - DNA, 351 bp, Homo sapiens
tgaaatttagcaaaatcaaaggaaatgaacaaataaaatatatcaagtgttctacggtagagatttctgattctgagcaaggaaacactagcacaggctccccttctgagggccaagatgacctccaaggcccctttcccagccccctccctggctctcttggctgccctcctttctgggccctggagggtggtaggaatccttgtaccctctgaggacaaatacctcacaaatgatggaaccaaacccctttgtttcagttcacttctctcagtgtctaagggacctaagggctccactgtccctttttgggtcagcctcagtgtcctcactacatgccatgggtaccga

SEQ ID NO: 157948 - DNA, 451 bp, Homo sapiens
  misc_feature (8)..(8): n is a, c, g, or t
cgctcggnaccccacaccacctgagtcagattcttgccttggattatgaattgaattttatgcttccccttcctgtctaatttaacacattttggcacaaataagcacaaggtcagtcctgggaagattctgggcctggaagagttgaagtgttaaacattagctgtgggaggatgtgtctgggggagactgttgcctgcagtcaggaatttttttcccactttgtatttagatagatgtacaattcaaactgaatttttaattgaattcctgctttggtttaaaactgcacagcgagcttctttttataaatttttaagtgtgtgtgtgtgtgtgtgtgtgtgtgtagagacagggtctcactatgttgccccggctggactcaaattcctggcctcaagcaatcctcctgcctcagcctcccgaagcactgggattacaggtgtgagcc

SEQ ID NO: 157949 - DNA, 413 bp, Homo sapiens
atcaagcttgaaaggaccacagtggaaaggaaagcatctacatgtttaacacgggcatcctgaaattagaagagatctgttcctccaagaaccaggaaccaagaagaaacatcccaagaacatgtaaggctcctaagaccaggggaccaaatgggagactaatagaaacaactactaaaaaaatgaaagatagtgagtaagaatcaaagttaggataagacaaaaggaagaaacaacagataaaacctcaaaaagaaaatcaactgtctctaaacatgaacaggacaatatgaggccaatcatggcctaatttcagcataatgagggaaaaaaaatacttttggtatctttgtaaaattaaagctttaatacctattccctattggttccaataaatcttaacccaaggcatc

SEQ ID NO: 157950 - DNA, 305 bp, Homo sapiens
tgcctgcgtgtttgctgggacacaggtgccctttgcaccagagggtggtttctcccacgtcagcctttcctgtggtcagcctctccccgggtctctacctgggttgtgtggcccgttggcagacgttttcccggcggttccagtttgggtttgtgaaggcctgggcaacatgggcacctgcgtcggacccgcagggattttcatcccctccctatcctgagcagcctctttgctgggatcaagacgaccacaccccagccaaggacaaagtcctcagaggggctcattgtccacccgcaggaggg

SEQ ID NO: 157951 - DNA, 237 bp, Homo sapiens
ttctgctatgccaggcctcagtttccccactgggatcatggggcgctcagtggcgagggagcagatcaggagaggctaagaggagagagtggagactcccaaaacagagggggaggcctccagcccgctggccacagcagcacctggtcctcagggagcccttctgagcatgtgactggcatcctgggattacgagctcctcaaagcaatggtgtacctcctccacctcccacatcc

SEQ ID NO: 157952 - DNA, 605 bp, Homo sapiens
cgtgagctgcagtgcactggctgaaaatgattttctgattaagtgaggaagctgcccagtttgctgataaacacgtggggctccagtgtccacttctgtctgacctgcgccaatgcctgtgacatcctctcacttaggtcagtgtcatgaaaatacagcccacacgcacgtcagaactgcacgcatttgtcagtcctgcgagtctcttgctgaatctgacagtgacgacgtttactcattgtctatttttgccaaatcttgcttgatttgcagccatagtgtgtcagcctgggttccatcaggagagagaaaccccacagtgatttgaacagggcaggttttatttaaaggtttgttcaatttaacagaggactgccgtaatgaggagttgaggattaaggagtacagagaactgcaaagaacatgagagaagctcatacaggcgccagcactgaagaagccaccagcccagcaccaccctacaagggggcccagccctgaccttctagcccagcccactggagctggcttagccgcaccttttctcctgccaggcctcctcggcgccctctgctcactgtgctcaacactgcactggcagacat

SEQ ID NO: 157953 - DNA, 341 bp, Homo sapiens
agagacaagatacgaatcgagccggaccccagagagggaggggcaagggcttctcactatgctcactacgtgggtaagagagtcaatcgttcctcaaaccacagcatcacacagtatacctttgtaacaaacctgtgtttgttacacaggggatacgtgtgtatccccgaatctaaaataaaaattgaaaaagaaaaaataattaaaaaaataaaaggtatgcgccaaatgttaacagtagttatttcaagaaagtggaaatatgaattgttcttatattcagttttgcttctgtatgctctactttttctataatgaccatggattatttgtaaaacaag

SEQ ID NO: 157954 - DNA, 177 bp, Homo sapiens
tctaaagtcttaggagacaataagattacccaggaagagtatttaaagtcaggagagggccaaagacagaaccttgagatccaacacttaaagatcaagaagaagagagtttcctatcttctgtttcttaaaaaataaataaataaataaagcatatcagcataattcagagtcaca

SEQ ID NO: 157955 - DNA, 367 bp, Homo sapiens
atcaagatggtgcttgcatttttctctagcacagagcctggcctggttctcccagggcaggaaggagccagtgccagggtgggcagacccgcagggctgggacctgccttcgagggaggctagggagcctcgaagcctccttaatgcgcctataactcattccctgggttcactaatgttcccggctattagtgccgagcacagctaagcaaactttcctctgactcaacgatcaatttccatattgttacaaatggagtccacgcctgccacggttcatttttcttataggccctttttctccccttcccttttcccagttcagtgaggaagtcattactgggagttatgaatttcacaacgtgct

SEQ ID NO: 157956 - DNA, 425 bp, Homo sapiens
ccccggactggatagaagggaatgggggtgtccactctttggtgcagcagtcgcgcctaccttctgggatgtactttggctgccaagtcccagacatagaccagggggtgggaggtggcctgcttcccccttcaggaaggccagggtaagggatgacgagttggttgccagggtttctgtaacctacacagaaggaacccgtttggaaagctgattcatacagaacaacagagccagaaggcaccctgaaaatcacccagagtaacccctcagcctgacagatgagcaaactgaggcccaggcccaggctgtctgcaggatcttcccatcgtcctggggcaggatgagcttcagaggttcagtgatggcctccacttgcgtgctgaatcctgggtgggctggaatttgggaggaagggccttaag

SEQ ID NO: 157957 - DNA, 151 bp, Homo sapiens
agaattgcttgaacccggtaggcagaggttgcagtgagccgagatggcaccattgcactccagcctgggcgacagagcaagactctgtcttaaaaaaaaaaacctgaaaaatcctaggacttctacaacaaatgaaacctggatgttttac

SEQ ID NO: 157958 - DNA, 368 bp, Homo sapiens
agtatgaatgtggtggctacaggagcagagagatactgagaaggctgttgcattgacagtatctctctgctactcaaaggctgactctctgctactcagcattgggagtcagttatctcaactctgcaggatgaggccacatgcgtgaatgggatggaagccagagggtctctacctagctggattgactctgcagtaataacctcaaagcccagtactacacatggtgcagaggtggacatctcacctaagactgtggaggggaacaatgtgattcaccataataaaatccatcaactcaaattatctgctctaataacatatgctctattgacaggaagggtagcaataaaactaatggcaattta

SEQ ID NO: 157959 - DNA, 536 bp, Homo sapiens
agacggtccctcgctatcatcggcacagagggtggaaagaaagggtcattcggtgttttatttcaatccccaaagtatagattaaggcagcagtattctaggtcttacacaatcataggaggtgggtaacatggcaggagaggaggaaataatattcgttgactgtttactatgggcaagacatcttaccaacagtttaatactctttgcaactctgagccagtgggctctctctgtatatcactttgggaaaagctgaaattggtaaattagtcccaaactctaggtcagagggtaggggagtgaaggaaggtttcattaaataaatggccctggggctagtaattaaagatgactatgagttacctgagtaacaaggggagggaacagtgttcttagtagagggaacaacatttgcaaagaatcttcagtgggatggagcttaaaaataaggcaaacatggctgaaggacagagagtgtgggagagtactatataagctaagagggaggatataggcaggagctagatcaggca

SEQ ID NO: 157960 - DNA, 600 bp, Homo sapiens
ggccactgtaggagcctccagggagttctctttgaggctggaatgcagtagcgtgatctctactcactgcagcctcaatctcctggtctcaagccattctcccacctctgtccttcaggtagctgagactacaggcgtgcaccatcacacccagtgctcgaatgtcccaacctgaagctgaagaagccgccctggctgcaagtgctgtcggccatgattgtgtatgctctgatggtggtgtcttacttcctcgtcactggaggaataatttatgatgttattgttgaacctccaagcattggctctatgactgatgaacacgggcatcagaggccagtagctttcttggcctacagagtaaatgaacaatgtattatggaaggacttgcatccagcttcctgtttacaataggaggtttaggtttcatattcctggaccgatggaatgcaccaaatatcccaaaactcaatagatttcttcttctattcattggattcgtttgtgtcctattgagctttttcatggctagagtattcatgagaatgaaactgccgggctatctgatgggttagagtgcctttgagaagggctatctgatg

SEQ ID NO: 157961 - DNA, 517 bp, Homo sapiens
tgctgggattacaggcatgagccaccgcacctggccgccttttcctttttttgagactgggtcttgctccgtcacccaggctggagtgcagtggctcgatcttggctcactgcaacctctgcctcccaggttcaagcgattctcatacctcagcctcccaagtagctgggattacaggcacccaccaccatgctgagctaatttttgtatttttagtagaggcggtgttttcaccatgttggccagtctggcctcaacctcctggtctcaagtaacccacccgtctcagcctcccagagtgccatgtttacaggtgtgagctaccgcgcccggccatatgtagccttttcagttcagcttctttcttttagcagtatgcccttaagattagcactaagacaacagataatgttctgttgtctgaatgtgccatggtttagttacctgttcacctactaaaggatgtctttgttgctttcaagttttggcaattatgaataaagctgctgtaaacatt

SEQ ID NO: 157962 - DNA, 693 bp, Homo sapiens
atcccagaactttgggaggccgaggcgggcggatcgcctgaggtcgggagttcgagaccagcctgatcaacacggagaaaccccatctctactaaacatacaaaattagccgggtgtggtggcgcatgtctttaatcccagctactttgggaggctgaggcaggagaattgcttgaacctgggaggcggaggttgtggtgagccgagatcgcaccattgcattccagcctgggcaacaagagcgaaactccgtctcaaaaaaaaaaagaaagaaaagaaaagaaaagaaaagggagagcagaatcaaggggccggaggaaatatcccatttcctccaagagtgaacactgctcctcgctcctcttcggctccaaggattcaggtggtcagacagtagccaagaattcctcaaaatgcctggcatggcagtcatccagtaaatatttgtaaaagttatgaattaaaaatacatgacctcaggttgagcacagtagctcaatgcctgtaatcccagaactttgggaagctgaggcaggtggatcacctgaggtcaggagttccagaccagcctgaccaacatggtgaaaccccgtctctactaaatacaaaaaattagccgggtgtggtggtgcatgcctgtaatcccagctacttgggaggcaggagaattgcttgaacctgggaggcggaggt

SEQ ID NO: 157963 - DNA, 389 bp, Homo sapiens
gcatataaaggattaacgattgtaagaatttcccagccaacatggtggctcacaactgtaatcccacacttcgaaaggccaagacgggcggaatgtttgagcccagaaatagcccaccaagacatctcccagtcacactcacccacaagggatccccttacctgagctttcttgctcttgctcagtgcctaaagtgggggtgggtgggaagagagctaaagtgaacagagatggactgccttactaggatatggagacaattgtgccaagcgttttgggaggacaaggatgacaggagttgcaggatgtgagcatcttcaaccacagaacatgtgtgacaatttggagcccagaggaatgatggaatgagtgtgtgagtgagtgaatga

SEQ ID NO: 157964 - DNA, 253 bp, Homo sapiens
ctgtagtcccaactacatgggaggattgcccaggaggttgaggcagtaattagctgtgatcatgccactgcattccagcctgaaattttaaaataacatattatgtaatagaagttatacgcattattcttgtttgttttgcagaatgattagaaactgacaaataaggtaatctgagtaacttcttatgcttcacaggcccttggggaaataacacgacagaggcaaggccccacacatcttatccatcaag

SEQ ID NO: 157965 - DNA, 314 bp, Homo sapiens
acacagagacacaccacacagacacagacacacacacacactttgctgagctgcctcacatcctctgtctcaccagctgccatggagggtggtttctggtgtttatatcatgctttgtatttgtttttatgggaaagttcagggcaaggaagggctctgaggtgctacaggagagcacagaaatggtatcgcagcttcccagtgccccaagtggtatattttgggacttttcctgtcatagaccttggccctgaactccgcgtgccagggattgaggggagaccccacccgtgccccagatgtcactcacccca

SEQ ID NO: 157966 - DNA, 374 bp, Homo sapiens
aagcagtgtccacactcagttggtgtgataatttcatgaagtgatagcagcatccctaaaattacacatagcttttgaaatataaaagtataaaaatgatgctttgctggactattaaaaatgtttatgaggttcaaagtttcatctgataaatacattctcagagtctttccaataaaaagaacttttcactgaaatgagtccaacccattttcattatattccaaacaagatagcaattttacctataatatttaactatgatttatataactttgaaactttctaacactgcaatagttcaaactgcttgtctttgaaaaatgctttgaaactacattttcttcaatagaatgagtctttcaaaatctgtg

SEQ ID NO: 157967 - DNA, 689 bp, Homo sapiens
gtactttgggagagacagagggttgagagagaggagaggtgagagaacatcatgttgaagtgaagttcagaccacatgaagaagccacacataggtgttccatccaacagccaacatcagctggtgtacatgttgtttctcctagatcgtgtttcctgagaagcaaattttgagatggttttgagtgatggatgtctacttaagagtgctcctgggaataacatctataaaatcctggtggaggcagagaggaggagactttggactgggagggagttaatatacaagtttccactgatcctgtgagactggaatgacccctcaaatttgtctcaatttgaggcaacttggtcaagcattagtatcctacaattgataggttattgggtgcccagagagagagagagagagagagtgagagcaagaatgagagtgagactgaatatgagataacgagagatgtagatatacctcaggatataaaatttattcattttttgtgtgaagtgtaagatttgcatctagtatctttattttgcataaggacatcccattgttccatcaccatttgttgaaaaggtatctgtcctctgaattaccactatactttgtcaaaaatcagttgactatatttgtgtgggcccatttttggatgctatattttatctttgaagataatctttccaaat

SEQ ID NO: 157968 - DNA, 566 bp, Homo sapiens
agtagggaaaaaaataacatttccactcaacaaggtctttacatacctacctgccagaccccccttctcaggaagctattgccagctgtgttttgggctcttctctcatgagtcattctggagggaagaagtcattctcgtgtgctgttcccaaaatgagggaatgactcaggagagaagaggacttggatccaggaaatggaatgccttcatcctacaaagaggaaggaagttcaccatgtgtcaggcatgggtctagaccctcggagacagtggggaagaagaggccccccactcccagattccagaagacaaaccacacagaagacggacaagtaaatgacatggatatgtgaagttgttgaatgctggataatccacgtcaaggaatgaaccaacacaggtcctattaaaacaacagaggcgagagtgggatttgtatcgactcctcaacagccttagttgatggagagagaaaaatcctcccatggtctccctgctggaacagatgtgataagtttgactgtgaaatccagttaggttacgtgcacaacagaggattaaaa

SEQ ID NO: 157969 - DNA, 152 bp, Homo sapiens
cattgcaacgctgatttttttttttcaggtagaagcatttcttagtactttgaattccctgaatcttgaatcatttaggacttttaaaatagtagctttgaaacccatccaatcttaattaatgcaaatcatagtaacatatgtttaaaaag

SEQ ID NO: 157970 - DNA, 609 bp, Homo sapiens
ccaatatacacattcacaccattgagacagcataggcctgtgaagcctgacaaacttgaattcagatattgtttcaacagttcatatctgtgtccttgatcacttcataagcctcagtttcctcctctataaaatcagaaaaataattgctactttacatggttgttagagataacgagtatgaagtacctcacactgagcctgtatatagttgatcctcagtaaaacagttatcattataagtaaaatgaggttgagaatgttgctctgttatactgatctccaaatggggctaaaacaatttgcataatctgattcctctatctgtccatgcgtatatatttatatcagtgtggacagacttttccactctgcaatatattacttaaatatatatcagaaagtttgcctatcttattattcctaatctcctgaaaaaaaaattcacaataaaagagtactatttttaaggctttgtccattatacttactctagatctttatggagaataatttgtctccctgttttgacctaaatacagttatatttcaccaaaatatatggatggcattattttaaatacttaattcttgagaccgggtgcagtg

SEQ ID NO: 157971 - DNA, 495 bp, Homo sapiens
ctgtggaaggcaagcatacggaactccgtctggtatttcttcctggaaacaaacctactctcagaaaacccattgaagtccctgttttacaactaacataatgggcgtgtggaaatgcctctccatccaccagggggcagaaacgaaccctttgattggccagagatctttggacttcaactttgatttggaatagttgtaatttgcatagccttttcactctcagacatcactctttctgtcactaggaacataaccatatagacttttcaaagaaacctcttaattctgtgtgaaactctaaacttcactctaccaataaacttccccacattcacactagagagatgtgatgggaatgctgggtcttacatatggtggtcttcatattttcgtggatttgtcttttgaggcatggagtgcctgacctttgcgtatgcaagattcgctagcatgtaaactctgtcactgtctcccaagaacacagaaacaggg

SEQ ID NO: 157972 - DNA, 583 bp, Homo sapiens
tggatatcataattcctttttttcctatcaccccaaccaatgaatctctctagagccgacctcctaaacgtctaccccacctacattagcctactctttgaccactgtaaggttacacttggattacttatttactgcaacagtctcatttagcagactctctgcttctccccttgtcttattccaatccattcttcagagcaaccagtcgatcacgctaagcaaaaaactgttcataatacttccaacataaaccttcaatggccataaagagccaattcctggcactatataatgtcctccttataatcacgatcccccacatgcctgtcaagagtctcatactccagcttactggacatttcctaaatgacaggcacatgcttgcctctgattcttacacaggctctcacctttgccctggatggtcctcctacccaccttgcttacacggatgcatccttttaaaattcagatttcaagcaagtaacctcctttaggaatgcccttcttgaatccagacccttcctcccccagttaagttagatgacccttccatatgttcccagaggactcaatcaca

SEQ ID NO: 157973 - DNA, 522 bp, Homo sapiens
tgtagatgaggcagcaaacacactcatgactcgtctgggtttcctccttggagagaaagtcacagaagttcagccaggtgaccaatacagcatggaagtacaggatgaaaatcagacctcagcaatcacccagcggataagtccttgttccactctgactagcagcactgcctctccaccagccagtagcccctgctctacactcccacccatcagtacaaatgcaactgccaaggactgcagctatggggctgttactagtccaacctctacccttgaaagcagagatagtggcatcattgctacattaacaagctattctgaaaatgtggaacgcacaaaatatgctggggaaagcagtaaagaattaggatctggaggaaacataaaaccttggcaatctcaaaaatccagcatggactcctgtttgtatcgagtagatgaaaacatgactgcttccacctatagtctgaataagatcccagagagaaatttggaaacagtgttatctcaatcagtaca

SEQ ID NO: 157974 - DNA, 344 bp, Homo sapiens
ttcccagagggcactaatcagactgtgtacttggaggatatccagcaggtgttttctgctctgattcaggccactatcctgaaaggtgcagtccatggggagagaactgcattctagtattagaataaattgtaacttcattttattcccctgaacagtctaataaaggtaggcatgcccttatacatgcagctattcccagcagtgtttgcaaagcgtttgcacagagtaggtgcttaatggaatggtaatttctgaaggaaacattttgcagccaattaaaatacagcacagagtttccatttctctttgccactgtctggaaaattgtagatacatatgac

SEQ ID NO: 157975 - DNA, 461 bp, Homo sapiens
caagcttcaggttatcaaacatgtgagaaccaaaaacctcaaagggtggatgtcaaacctaaatcttttaccagaactctgaaacctgagtaagagacgctcgtgtgaaactgctgtgcatatgccggagccaggtgtctggcatctcacccaggtgggctccccatctacagagaatcctaggcagggtgcagtggctcacacctttaatcccagcactctgggaggctgtggtggaggactgcttgaggccaggagttcgagaccagcctgggcaagacagtgagacccggtctctacaaaaaatttaaaacttagcaaggcacggtgttacgcatggcaactactcaggaggctgagggaggtgagaggatggctcgagcccaggagttcaaggctacagtgagccatgatcgtgccactgccccccagcctgggcaacagagtgaggctctgcctct

SEQ ID NO: 157976 - DNA, 296 bp, Homo sapiens
gcagggacacaggaggagacgggagtccggcggtgaccacagggaagtgatgtctcagggccgccaccgctagatctggggttccagatctagaaacacagctacagctggtttaacaggggtcttcaggaagacgccagagcctcaaaaccagtgtcaccacacgccgacccgggacagggcccccttcttcctgcctcagctgccaatgatgggctacgcttacttctcagctcctgaaatgaatttatcccagctccagatcagtgtctgtttccctgttccttcctttcact

SEQ ID NO: 157977 - DNA, 296 bp, Homo sapiens
tcaatggttctgcaaaaatcataaacactcagaaaaatacaaccctaaattatgtctgcacgttctcagaaatctttaacttcttacgttagttctacttctcacagcacaatgaaccttagctttccctcaaaacaaaatattgtatgaaaccaaagaatatactcagcagataagctggtttataagtatcaaaaccagaagtctgtgtaggggcaattccgaaagttttctttcttctttttttttttttttttttgtgtgtaaatttcagagaaacctctgctaaaactctt

SEQ ID NO: 157978 - DNA, 540 bp, Homo sapiens
atttccaatctggacaagaggcacatggtctgccatgcagcggggccacctgtttcccttcttttccttctcactcaaatgttctccatcatcttttcaccttcaagattctttctattcatggattcacctcctagacatgtttctcttttagcataccaagcctctccactgtcacaatttaatcatcagcctgtccccatcccacgttggcaaaactcctggatcttacgtatctcataatgtggctatgcattggtacagacaggtgaggtcataaatattcccctgctggtctcttctgagaattacttgatccttcctccattcagggacttcttttatgttaccacctgttttctcctgctagggaattaatttttaaatcctcggtaacaattgttcctgacccaccagtatagacccagagaaagaagccagacttgggaagcttgctatcagatcagcgactgctgtctcccattcagagtaaaggttcttttacagtcaatcaacacatgtttattcagtccctgttat

SEQ ID NO: 157979 - DNA, 497 bp, Homo sapiens
ttgaggcagcagtgagctatgatcacaccactgcactccagcctagaaaacagagtaagaccctgcctctaaaaaacaaaaaagagtgtcaaaacacagaaggagtagagcaaattagtaaaaatcctccaaagcacctataatggcagaaaggaagcacaaacgagaaaaaaagttaatgagtcaaaaaagaacttgctatagtacttggtcaaagctaactttaaaatactattaggaaatttaaaacattcataaaagctatgaggttcaaaactaattttacaaaacactagctgaattatcactatattacaaacaaatgcaataaagtaagagaaacagatattcttagaaaacagaacatggaatatgttaataaaatcaaaaggacacaggatcaccttttagagtgactaaaatccaaaaaataccatcagcaaatgctggcaaggatgtgaggcaaaagaaaccctcattcattgctggtaggaatg

SEQ ID NO: 157980 - DNA, 607 bp, Homo sapiens
cagagtgaggttctaggctgagaacaggtggagtccctagaatgggttctgacagggctaccgtgcaccaggagctgggatggagcgctgcccatggtagtatggatttggtgggaacgtaaggagacctgctgtcatcaggggatgaggatggcttccaggtagcccctcccacaggtacacccgtgccaggaggaaacatgatatcgccctctagtgagcataaggtagcactgcaagggcgtgtaagtgcagatgcacttgtggaactgcttggaggaccttcctgaatgtgcagccgatgcatccttctgtgatgtgcacaccctcccaggagccccctgcatcccacagtcagaaggctcacagtggcccaggttttagttttcaatgtctcagctccctgttgtcctgctcccatttttcctgacccagtggggatgccaggttccttctcctgccttagggaaagtgaatgtcctcccctctgtgtctgtctgtccagatgtctctgctgctgccctcggggcctgcagtggagctgaggagctttatgatgtttcctttgcttaccacagtacttacccagccattcatcacccagact

SEQ ID NO: 157981 - DNA, 318 bp, Homo sapiens
ccagcactgagtctgtatgcccctgacgttacgggagaaggagatggaattcaacactttaaaaagtgtgggggggttgcttgaaaagagtcttctaggttcagcggccccaaaaagtccctcctatgaccactgtcagggagcgtgggaatccatgctgtccaatgttagaatgacccactccgaaatgcaaggagttgaacaatcattcagctggctgcatttcatgtttatttacttcactttttgggtggagaacattttcactacacgctgctcaagtgatcccctgaaaatactgtttgcatgagattggat

SEQ ID NO: 157982 - DNA, 199 bp, Homo sapiens
aataaacgtgcaccaggcctccactgcatctccatcagactcttgtgtttaaaaaaaggagcttgtctgaaagccacatggttgaaaggcatttaatcccaaagaatgtttatggccattcctccaatttcaattaattctgaacatagcataggtcaaggggcaggttgatctaaagggaaaagcaaaatcaagattt

SEQ ID NO: 157983 - DNA, 701 bp, Homo sapiens
tctgacagtcactatgctaactagtaaaggtgttgatcaaactatagagagtgctgcactgatggcagcccctggagagtgcacccttgaagatgtaaagctaggtgacatcatggaatgtggatgcttcattaatgtaattcacattcccctgaagttgaggctgaaactaactggcaaatatatactatcagatggtctatgaagaagtatttttaaataaattacagacatcataactccatgataaagactttaaggatgatggaagtcagcgaagagttttaagctggagacagcattactgttaatagatcttaggtgagaggaatctgaccaacgttatggccccccctgtaagctttacacacatagctctactctgacttctccttgcaactgtactgtcccctagccatatgtggctattctaatataaagtataacttaactaaaactaaaacttcagttcctcagtcccactagcaaatttcaagtgcctgatggccacatgtggcttgtgtcttctgcactgacaatacagacacagaacatttccatggtcacaaaaagttctactgataccgctgatctagaagaataaagtttcaagagaatgataaatttctggggatggaaaataattcaaggccaggcatggtggctcaggcctgtaattccagcactttgggaggccgagg

SEQ ID NO: 157984 - DNA, 180 bp, Homo sapiens
gttttagaaaccgtattattaacaaagtaactaaagccacaccactggtaaccaaaaataaactttattaaacagttaacttatttcagctaactatagaaattctgtatttcaaatgaatattagttattctgcatatattacgtattctctatattttttatatgtaataaaaaatct

SEQ ID NO: 157985 - DNA, 475 bp, Homo sapiens
tgtcaacccctgctttagtgccgcagattgtcattaagtaatttttaaaagaaagatgtatttattttttaatatttggattaattttacagcaaatacttgattttgcatttaccaaaaaagttaatttaagaaaaattttgagcaagttatatgggaaaaaaagtgaactaaacaacttagacagacacagagtcaccaggagcctggacttcttatgaactcaatatgtatatgaatacatgcgtgtgtgtgtgcatacacacacacacacacacacacacattttaactaataccaggagtcaaaataacaaagtagtcaacataaactaaccaagtgactattctgcatataattcagctctaggttttaaagaggacataaacaagtattaagtagttcttcccttcatagagtttaccatcttagtgggaagacaaacacatattaaaatactaaaacaatgagaaaa

SEQ ID NO: 157986 - DNA, 154 bp, Homo sapiens
atataggtaggctacattatttagttaatgtgttcatctagaaacttagaaaaagtcagcatttaatatttattttttgagatgtagggtttcactctgtgcccaggctggagtgcagtagtgtgatcacagctcaccgcaggctcaaactttt

SEQ ID NO: 157987 - DNA, 142 bp, Homo sapiens
ccacctcagccccctgagtagctgggactacagttgctctccaccacggacgctctctctgcgggggtttctacatgctctgtgaagacatcgcccatggctaacagaacacacacctgtgtatcctcagttttaatttcta

SEQ ID NO: 157988 - DNA, 226 bp, Homo sapiens
ggcttcagtcttagtcttggtggcgtgtaccccgccttatggacaaaggtggcttgtcctgcccatatgctcatgtcattccatctggatatggggacagtgaggctggaataggcaaacagccatctagaggcagacccagaactctcagttcttgctgtcaactcaggtgctttctgcctagagactcctgaaggactctacttactgaaatccacaaaatcta

SEQ ID NO: 157989 - DNA, 329 bp, Homo sapiens
cacctgaaaggaagcatccagctcttcgaagctaagctggacaaaggagcccggatgctctgggagctcgccattgacttctcccctcgatgcagtgagaaccctgagaagatcattgccacggagcagaacacgtgtgcaatggagaaatcagggcggatctacacggaaatcatccggatttgggacatcgtcttagatcactgcaaactggctgattccatcaaggccatctgcaatgcctacaaccggggcttgtcctgtgtcctgcggaagaagctgaaaggtatcaataaaggccaagtgtcagctaacatgaaaattcaaaa

SEQ ID NO: 157990 - DNA, 199 bp, Homo sapiens
gacagtaaagtagaagagagaaagggtaacagagtctttatatttccttgacttatgatggaaaattttaagcatataaaaaagttagtgatcataaggaattgctgtgtaaccaacttcaacaatgatcatggtcaaccttgtttcaaaggtcaacaatgactcacgtttcaaatgtacccctgtctactccccccac

SEQ ID NO: 157991 - DNA, 216 bp, Homo sapiens
cacaggaattggagaaagaagacttgggattaggtcctgccccatccctacatgctgtgaggtctttcaaatcacttctgagcctcagcttgcaaccaggtaaagtggaaggaatagcatgtgcctctcccttctcctgaggaggtagtgagaagttaatcagatgagatgggcttctcgtaagctgtacagtgttattctaatttctggatttaa

SEQ ID NO: 157992 - DNA, 409 bp, Homo sapiens
ggtatcatcaatatggaattagggaactctgtagaacaggcaatattctttccccattgccttccaacctcagcattccaacacacaagattccaagagagtgctgtcaccccctgaatccctaatgttcaaagacagaactattttctttgttcccataccaatacaagattagtatgcttttgtcaatcattaaacttcctgtggccaggcgcagtggctcatgcctgtaatcccaacactttgggaggccaaggtgggtggatcactggaggtcaggagttcaagaccaccagcctggccaacatggtaaaatcccgtctctactaaaaatacaaaaattagccaggcgtggtggcaggcgcctgtaatcccagctactcgggaggctgaggcaggagaatcactt

SEQ ID NO: 157993 - DNA, 472 bp, Homo sapiens
aggcctggcaataactaaaaacgtgttcacttgaagggtaagagaaagacacagaaatggggaactctgcccttcgcaccccaaaacccagaggagattccaggcctgtttctttgtctgaaagtggaaataatccctgccacttccttacagaaccactgagatgtaaatgtgagcagtgcaaagttctctgcaccctttagcatattcagagttccaaggcaagagacatgtaattttagccttcatgttacagacaggaaagactggccagctgaggccttaaggggagctgacctgcctggaggcacacagcaaacagtgatgggaaagtcattttacaagggttacttttaatcactgcactatgcagagcacaaaattctgtggttaggacactattttgttaggcaaatagctgtgacttggagagcctgggaacaaaatacccaggctcatgtacctaggctgc

SEQ ID NO: 157994 - DNA, 781 bp, Homo sapiens
agagaggtggatttgtctgcggttatgcagtgagtaagtgatatagcagggattctagcccaggttttctgagtctgtattctgatctagtgcttctcaaactttgttatatggatcacctaaggatcttgttaaaatgcgggttctgactcctcatatctaggtggggcctgaaattctgcaacttttaataactcccaggtgatgtcagtgctgctgatccttggaccacacttgattagtaaggctagtctttcactacatccaactgctcttgagccagatttgggaactacaggtgtcctgtgcccttaaactgattcagtattgaaagtcattatttttaaatattatcaactggaggtgattactatagaatatgagtcacgctttgagtggcttccctcaggatattttagttgtgtacacttgttctgcaggtaaactgtacaaaaccaagattcaaacctcaggggtgtaaggaaaggttgggggaataaggaagtgaaaaaaaatattagataaaagtattgaagtaatggtaatagatatggatggtgattcatagtaattcacttgttttcttttaagttggctatctttctaacctaagtttaggaagcaatgtttattatatatagagatgtgggccgagtctgttctgaccacaaggggaagcattttagattgttaaatattattttggaaggtttttaatgaagggttactgtaatttaaggtattttcccgtatgttttttggaaaaaaaaaaaattgtggg

SEQ ID NO: 157995 - DNA, 624 bp, Homo sapiens
ctcttcgttgatgctctaattaagaaggagaattgtatagaagaaagttgttctctacctagattatcttgtgtgactatctccaagtggccagctcgcagctgtgctgttcatcatcaaattaattataaaatatcagcattggaaggggcctgaaagatcacctagtattcacacacccttttttgcctctttatagtcctctgcctttagaaaatcacacttcattgtaatgagctgttgaatgtctgtcttagccatagcattagcataagcgtaagaagagcagggtcaagacctggtgcagaatccaacaaactgctccaaaatttagaggttgaaaataaccatcttatttactcatggatttgcagtttgggcagagttcagggggaagacttgtgtcagtgactagagcaagaggatctacttccaagatggcttaatcatatgaatggcaaactaatgttgcctgtgaattgggagatcagctcaattctcttcaacatgggcatccctatgtggcttgggcttcctctcagcatggcagctgggttccgagaaagaggaggtaaaggtgcctgttctcttaaaatatggaagtgaaacgggcacaggatcatt

SEQ ID NO: 157996 - DNA, 487 bp, Homo sapiens
tgtctacacaaccaacactgccactgacctggccagcagcaccgactcttcccactgagctaaacctggaagtcaggcagtccctctctgaccagccctcctgcgatgctgctggccattcctctgccttggctcagggatgttcggctctcctggttgtgcttcctgctctctcacctcctcctccaaccaatcagtacctaaggagagctctgagcgttcctacctctgccaaggtaagaacgtcttcttagctgcagtccaatacattaaaaaacagtgggggctgggtgcagtggctcatgcctgtaatcccagcactctgggaggctgaggtgggcggattacctgaggccaggagttcgagatcagcctggccaacacggtgaagccctgtctctactaaaaatacaaaaactagctgggcgtagtggcgggcgcctgtaatcccagctacccaggaggctgaggaagaagaatctcttga

SEQ ID NO: 157997 - DNA, 1109 bp, Homo sapiens
  misc_feature (29)..(29): n is a, c, g, or t
  misc_feature (87)..(87): n is a, c, g, or t
cattgccaccggccccctcaggtcacggntcgatagcttgtatcgaattcggccgagcaagcctgtgtgcattcataagaattcggnatgtctgaaagagcagcagaaacgctactttcagtattttcagacagagtggtatatactccagaaagcctctacaaggaactcttctcacaacataaaggactcagagacttaataaatacagaaatgcgccctttctctcaaggaatattgattttttctcaaagctgggctgtggatttaggtctgcaagagaagcagggagtcatctgtgatgctcttctaatttcccagaacaacacccctattctctacaccatcttcagcaagtgggatgcggggtgcaagggctattctatgatagttgcctattctttgaagcagaagctggtgaacaaaggcggctacactgggaggttatgcatcacccccttggtctgtgtgcctgaattctgatagaaagcacagagcgtttacagttcgtatttacaaatttaccctgaatcctataacttcatgaccccccagcacatggaagccctgttacagtccctcgtgatagtcttgcttgggttcaaatccttcttaagtgaagagctgggctctgaggttttgaacctactgacaaataaacagtatgagttgctttcaaagaaccttcgcaagaccagagagttgtttgttcatggcttacctggatcagggaagactatcttggctcttaggatcatggagaagatcaggaatgtgtttcactgtgaaccggctaacattctctacatctgtgaaaaccagcccctgaagaagttggtgagtttcagcaagaaaaacatctgccagccagtgacccggaaaaccttcatgaaaaacaactttgaacacatccagcacattatcattgatgacgctcagaatttccgtactgaagatggggactggtatgggaaagcaaagttcatcactcagacagcaagggatggcccaggagttctctggatctttctggactactttcagacctatcacttgagttgcagtggcctcccccctccctcagaccagtatccaagagaagagatcaa

SEQ ID NO: 157998 - DNA, 443 bp, Homo sapiens
  misc_feature (48)..(49): n is a, c, g, or t
agctctgaagggctgatacgatgcgtttgtcaatagaaaggggaatgnngggaaagaggagagatggattgtgctgtgtctgtgtggaagagtagacgtggcgactccattcatcgttgtagtataattttgtgtgtgtaaaacaaaacaagacaaaaatagcctgttattttcatgatagaaaccctcttatttccatgatataaatcttggctgatggatatcaatggtgagaggaagggaatggagcttttcggcttatcttagggtatctaggtttagaaggaatgacgctgattttctggaagggacgtggtgtggacagaggagagcggctgtggagtcagatggggttgctagggcaagaataagaagcttagagccaggccctacgtagtagcttcttattcttggcctagcaacccccccttttccacagcctt

SEQ ID NO: 157999 - DNA, 505 bp, Homo sapiens
gagcctgtgcgtatggcagcagcacggggctccgggaggacgtggcaggcgagaggtgggagtgggaggggagtgacccccacctgcctccacggatgctgaactccagccctggaactcccaaggcccctcctccagaggaagcaacaaggtttgggggtgtctgagaggctggctggggtcccacaccccagtgcagaccgaggggttctggcccccagcactgtgagaaccccccaggtgtcctgggccagggtcaggaaaggggcgggatccctagggcccagacttgtttggggaggccagggtgggctcggcgtgtgcgagccactaccaccacccccatgtcaggggcccgccactgggaagtgggtccccctacctttgcctcgtgggtccccttgcacaagtggggggtccagggtcacagtctttggctaggcctcagccccccatgcggccaagctggacacgtggccccagcccctacccatagcacactcgg

SEQ ID NO: 158000 - DNA, 535 bp, Homo sapiens
aacttgcagccagtgccgagccttgactcccttgcagccctttgctcagctctgctccagcctttgcctccctgaagatggcacttaccattctctgctccaagatgctaagtatgcagaaaggaaacaaactgttgccaggagggcagaacgaagaatatcttttctctcagatgcaacaaatatacataatactctggtttatacaaagatgtccttgctaactcttgtaaagagaggttaaaactggaaagaatccccatgtccagtgacagaagtagttacattatggtgcggccacaggacataagggcagacagtcttaacaataaggatttgttaatgatttgaggtaatgagcataataaaatgtcatgtggaaaaagtcacaataaaaaaatcagctaggttttatgatatgtatgtcttaaatatttttttaaaagactatgccaggcatgggggctcatgcctgtaatcccagcactttgggaggctgaggcagatggatcccttgaggccaggagtttgagac

SEQ ID NO: 158001 - DNA, 162 bp, Homo sapiens
ttctcaggttacacagattaaactaaatcctgcagcaagtgatgtctataagactgcaattcactagcaaaggagagggaagcaataaaccacctcattaatgcaaattatcatcatcaaattttatctatcaagctcccgcaggtatggtatggtcagcct

SEQ ID NO: 158002 - DNA, 526 bp, Homo sapiens
gaccccacactctgaatcatcgtggggtttatctcccaccctctgaagcacgtgtcttaccaaggcctccaatacatctgccccttcttggtcatccagtctaatgaacacaatgccatcaatatagtggatcaatgtgatgatgttcaggacattcagatgatttgggtcccttcagattatattatcacagaaaaggaagagttaacatagcctcaagataagaccttaaatgtattctgtcgtctgttccatgtgaacgtaaaccacttccgcttctcctttctgagaaagatgggaaagagcacatttgccagatctgtagccacacgccctgtattaataattagctgtgttcattggctgggtaagatactactctggcgcagtaattgcaagtggagctactacctggttgagttggcagaagtcaactgttaacctgttttgtttgtttgtggttttcttgtcttttttgtttggccagaaactgattaatttaatggggatatgatgaggctcacta

SEQ ID NO: 158003 - DNA, 390 bp, Homo sapiens
cttttgcagggaagtattactgaaggcttttgaagagtcaaacatgtagctcaagggaagccagcacacactaattattaatcctgttgaagagccctggttgaccagagagtaggatttctgtttagttttccctcgctctgttgtatttgcacatccttgatgatttcatgcctttattatgggctttattgatttgctggtatgtagatgagactcctggtttgtcatgtaggagtgcttcttatcctgaggaacttgatggtgatctaactaccttcgagcaaaccagtggccatttactggaaggggtgggacatcttgggccataacactaaacctatctttggcagtcattcagaagcaaagcataggtatccttcaagactg

SEQ ID NO: 158004 - DNA, 362 bp, Homo sapiens
ggattagcctgctaagccccgggtgaggagatggcctgtccatgctggctctgactcaagagacagctgccccgcaccaaccgcagcagcaaacagcagccatgtcctcccccaggagagcctgtgttaaaagctgaagatacaggttttctgcttcaaagtcatggtgaccttgggtgagcccctgcctggcttcttagccttctcatctggaaaatggggactattccaagcctaccattcacagggttgagacaaggtataaaaaagatgaggtcctcgttaacacggtgaaaccccatctctactaaaaatacaaaaaattagccgggcgtggtggcgggcacctgtagtcccagcta

SEQ ID NO: 158005 - DNA, 360 bp, Homo sapiens
cttctgagtttgggaggtaacactggccccgcccctcacgccgtggctcctccctcccttccccttcaaggggctgaagacaaaaggtgcccctgtcctggtcaagccaatcgacccagccttgttatgggttggggtggggagaaatgtgtcctcctgatggctggggaagaagaggggttggatatttctagccagggccatgccaggaggctggtcactctgcaaggggatgcagaggaaagcggtgcccactcactccagctcttttctcctcaaggcagaatccttacccctcctgctcaggttcctccaataggcctttctctagcccaagagagaaaggtcctctggagtgag

SEQ ID NO: 158006 - DNA, 427 bp, Homo sapiens
gtactgagaaaaatggtaaacttctacttcctgaaattaagcgtttctgaacagagattcatcaaatctgcagaaaagagaaaggcagataaccgtaggttctgaggctcggtgtttcctccctaatggctttgccaacagaaatactgacaggttttgtctgtcacgggccttactatttatcaccttttcctctcctacctcctactgtggtcttgcctcatctgtacttcatgtaccttaagcctaatagtgaatgttgaagaaatgtctctctttggaaattatctgttttattttattgatttaaggtcaaattaagaaataagataatgagacttgtcaaagaaaacgaatacatagaagatgaaacttgcaatcctaatgcctctcctggcaaagaagacatttcccaccaaatcactaa

SEQ ID NO: 158007 - DNA, 471 bp, Homo sapiens
tcgtgcctcagcctcccgagcagttgagattacaggtgtgcaccaccatgtccagttaatttttgtatttttagtagagacagagtttcgccatgttggccaggctagtctcgaattgccgacttcaagtgatccaccctccttggcctcccaaagtgctgtgattacaggcatgagccaccatgccctgccataattctgataattctttggaaggaaacagctatttaaacccaagctatttttccccaatataatgtttattttttacttataaatatatgctgattatgaaaattgtggaatatatgaaaagtatatagaaaaagttagaatcatctataatctccccatcagacattaacattattaacatcttgatatattttcttctttaataattaacttttatttatctagtcaccataagactttataaaatctctccaagagagaaactatctttctaga

SEQ ID NO: 158008 - DNA, 323 bp, Homo sapiens
tctaatctgtcaagtggggatgtgcagtggtttctatggcacaggtgcctgtgaggagtaaatgtgtatacatcacgtagtatagcatgggacataacacacatccacgcggtaccttgcagctatggttcttggaagggaaaataaaactcagatgtggaatagtttatcagatgagggtagtttagagctcaatcctgggaggaacaaccaatcaatcaatcagcaagaacatattatggaacaccaagacgctttgccagggattgggtgcgattgccagaagctgcaatggatggcgaggaagagctgcttcttgtggg

SEQ ID NO: 158009 - DNA, 778 bp, Homo sapiens
ggctgaagggtcagtctagggatggctttctgacaagtcacagaaggcggcactgatgactgcagacaccttaactgaacaatccttcagtacttatcactgttccctccaagctactgtctttccagattcactgggcattgtcaatccctggtaaatgaactgtcaacaaccaacaaaaatcttacctgatctaacaagttcaatattccaactaaacttgcttcttgtagaagtctggaaggcttgccctttactcaggcactcatttattcatttatttattcgcaccattcacttatccgatcaacaaatattctcaaccttaaaaaatcctgagatgattctggataataacaagaaagtttagacaaagcagcaatcagcagcacaagagctggaaccaggaactaaaggaatacctaaccacatattgtgcctggaatatctttctgcccaactgcagtgtcactctacaggaatctttctaaatctcattttaggaagaatgtctttggatattcctctattaatatccttagtgtaatgcttatgatattacattgaaattaaccgcttccactcaccagactgagctccttgagggaaaacaactgtgtcatccaatcctctttgtgtccctggtatccagcacagggcctggcatatagaatttattaccaatgcagcagttctctagattccaatgaagctaacagatttctaggtattatcagacctgcattgttcagtatgatagccactagctacatgtggc

SEQ ID NO: 158010 - DNA, 647 bp, Homo sapiens
caatacagtgtcctgattccagtcatatactttcattttctacagtagctggtgataaaatatcatggtagtcactggttttaggtagataaatatgtactacaagacatttatattgcttaatgagattattgtgaagcttcaataacattgtacaactatcttctctctcgtttatagctaatgattgaaatcacacgtcatcaatcacattataaataataaaaaaagactaaatgcaaattttcaccaattttcttcaaaaaatcatctgcccagggagatcatttcaaaaatttcatatccagtttcttattcttacctttaaaatttctggctttgttttttccatcacatgagtcagactaaaaagatgaaatagagcttcccgaacaaagaatgcccgttcactgtaacgcttcagtgcttctgcaatctgagtttcattggcttccccagacacctgtgaacataaccagattagcttttagaattctctctctttctctatctaattatcatgtgtggccaggcgcggtggctcacgcctgtaatcccagtactttgggaggccaaggtgggtggattgcttgaactcctgacccaggtgatctagctgcctcggactcctacagtgctaggattac

SEQ ID NO: 158011 - DNA, 194 bp, Homo sapiens
cctagtttagaagttcaatagcacattgctgctctggaggatctggagaattaaggtcagcaatgcaggcactcagtcatgtctatgtaaccaactcccaataaaaactctagacatggctcaggtaatctgcctggttggcaatattccatgtgtattgtcatacatcattgctcatagaaataagtgctatc

SEQ ID NO: 158012 - DNA, 235 bp, Homo sapiens
ccagtggtgggcctacaggagtgcttgataaatgctcattaagtgcctagatgatctccagggacccttctagctgagatttggctttgtgtttgggcataggtgaccttctgaatcccaataagaaaatgagttaaatttgagacagtgcttcttgtaggcggggtagccatagggacttattggaggcaggggaactgggccaggtctgtgaaggaaggtcagcatttgaaca

SEQ ID NO: 158013 - DNA, 170 bp, Homo sapiens
tgacattaatattagtcgatgtctgttttttaccctaaaaataactcgagtatccaatgtattaaccacccctttattttaaaacataacaacacaggaggcgaaggtgggaggattgcttgagcccagtagtttgagattactgtttctaccactgctctacagcctgg

SEQ ID NO: 158014 - DNA, 238 bp, Homo sapiens
gtcaggagtggggcaagaatattagaaatccaccagatgaaaatccttcaaataaacgaccttattacccccttgacctatataatcagcatggagcaaacaggaataattgccctgtgcaacccgagtgtgtgagtttgagggaagggggacagaggaattcaataaccaataacccacatttacctacttcttccctctgaatattttacattagaaatgacagaagatttgggtt

SEQ ID NO: 158015 - DNA, 400 bp, Homo sapiens
ggagaaggcagtgaggggagggcagtgggggcggagatgagggaggaggcatggccagggcaggtctggcagggtcttgaaggccaggctgagggtaataaaagttagcacagggttatttattggggggataaaagaagtaacacacgtgaaatgttgaatggcacagacattgtcatatacttaaaaagtttaatactgacttataagagactagacaacagttttataatcatgtccctttcctggctttaaatggaaattaggtagagattatattttgccctccttcagaccacagactagagttgaaatggtgagaagtggtgagatttgaggtcacttttaaaagtagagccagcggcctctgcaggtaggtggggatggaagaagaggaggt

SEQ ID NO: 158016 - DNA, 653 bp, Homo sapiens
agatttttcttctcacagactgcaaagtcatctgacatcggactatcttcatagtacattttatcactgcctcagtatatttccacttggaataataatataattctgcctttgaattatggtaaagggttttaagacaacttatttggaagtaagggtgatgacagaggtggtgataatgaatacccaaagtctgttttactttatctccccaaaatgtaacagtaataacagcaacagcaggtaacatccattgagtgcttaccctctgccagatcacctctaagcattttacaaatattaatcatctaatcatcacaacaatggtatgaaggagctattaatacctccattttacagctgaaaaagctgaggcagaaagaggctaaatgatttgtctcagatcatacaagtgaatatgtggcaaaactggaatttaaacaaggtagtctggcactgaaacccatactcttaattggtatgttacactgcttcgaacaagaccaaagggtactaaaaggtgatttataagtaacaggttccacttaggctcagaagctctaatgataatcctagtgaaagaacatatgtgctgaaggatgcatcatttatttggggaaggtaatactgtatggttttgtcagaggaatgga

SEQ ID NO: 158017 - DNA, 413 bp, Homo sapiens
aaagaaaatgaaagaccatgagaagaggccaagaaaggcaatgagaggcccgagcaaggacactgaggaggctgcgcacggggaggttggagcggaacggccttgggctcccacctgcacagtaggatctcacccccggattgaccccggccctggccctcctccacactcttgacacaggaggaggcacgcctccagtgaattctgcctcacggtggctgctgccctcctaagtgcaaggctgggcttgagaatttcaggggagaaactcagtagtgagtgcttctcctcagctgcagcagctggtacttagtggctcttaatttccctgctttctgtgctacttcccaaaggcacacagaaagcggactggacatctgtgccagagatgactagcttcaggagtgccgatg

SEQ ID NO: 158018 - DNA, 125 bp, Homo sapiens
ttttccttttgcagtctgcaccatgatgatggcccatcacctgaccagcctgactttaatcatctggtgccttggtcttagcgtggctctgtctttgctttttcacaagctttcctataattgta

SEQ ID NO: 158019 - DNA, 354 bp, Homo sapiens
cttaaagtataattaaaaaaaaaaagaaaacagaagctatttataaagaagttatttgctgaaataaatgtgatctttcccattaaaaaaataaagaaattttggggtaaaaaaacacaatatattgtattcttgaaaaattctaagagagtggatgtgaagtgttctcaccacaaaagtgataactaattgaggtaatgcacatattaattagaaagattttgtcattccacaatgtatatatacttaaaaatatgttatacacaataaatacatacattaaaaaataagtaaatgtataagtttttacacattatatatatgtttatattgctactcatgtatctatctgga

SEQ ID NO: 158020 - DNA, 185 bp, Homo sapiens
acccagatatttaggacaaatcagaaatcctcgttggatgctctttctatgcatgtgaacacattttggttggggcagggcgaggaacctctcagagccatggatggggtggccgtgaggagggggagttgcatgctgggtatgccttatgggtgggcatgaactttgtggaccaaaggccacag

SEQ ID NO: 158021 - DNA, 310 bp, Homo sapiens
gcttagaggacccggctcattcattcataagctgtctagggcaaaaaaatgaaagcatttataactaaatttcaatttagttctaaacttagttctaaactaaaaagcatttagttttattattgtgatagaagtattatcttctcaaaatgtattctttctgtcctttatcttcagggttttatacgccttttagttttttaggaaaagcacagctcaaacagaaaatacctttctctgtccttgcttgaactgaaggagaagtttctaagttactggccagtaagcagtagtcatgtatgtgtttagg

SEQ ID NO: 158022 - DNA, 535 bp, Homo sapiens
gaggtcttgtgagtctgaaaatgaggatccgccccctgcacccatcattccagctgagtcaaattactgtgtacctcctcatgccaggctatgctgcttcagcacttggcacgcgctgccgtctctgtttcgaatgccctttcccacctaactcattcctcccacccttccatacttagacaagtctgagcttttctgaccagtctttcctgaacagtcctccatcccatcatcaccttaactactgagagtgaaagcttcttcctacccaggctaccggggttcatgcaccctctttggttggtttacttatctgtcactaaactgagatctctttaaagcaggaacaagatctctttttacctaactcataacacagggtaaacagacaacaaatgtgctgactaaaatgctaatataaaaaatcccttagtgaaatgtgcaatgttacatgtgaatattggtaaggcaacataatagcaaatataaatttaaagaatatcttttaaaaaggtaacattccctaagagtatta

SEQ ID NO: 158023 - DNA, 408 bp, Homo sapiens
ctaatctctctcagttatagtttgttctgtaaaagagaataataaaataaatcttctgtaaaagaggataatacaataaagaagatatatgtttatttctattgtgtgtagaaggcatactttgattgttgtgaggattaaagaaacattgtaagtacctaaaatattaccttgcacatatttagcacttagtaaatgttatctattactaacccttaggaaaattttgcaaggtaaatattgttatacctactgcgtaaatgtagaaactgaggtacagagaaggcatagcttgtataaaaccacacagtaaatagtagaagtaggattcatatccatgccttatttccaaattcatatgcttgtcatattgcctggtaaataatggagaagggaaaaaatcagaaa

SEQ ID NO: 158024 - DNA, 209 bp, Homo sapiens
cacacacacacacacacacacacagtgctcatgttatgtaaggatcatcagtcgatgtatttgcatttccaatcataattctatttggccaaagctcgctctttattaaatgatgctaaacatacataacactttttcttcctttttttttttttttcaaaaattcccttatatacactctgatgctcagaaacccgatggaccgataa

SEQ ID NO: 158025 - DNA, 436 bp, Homo sapiens
atttctccctcttgacaaagtagataaaatcctagggataggaatcagtgctttactgatagaaaaactaaaaacctgatatacttggcagagcacacacacagcaaggtctctaacctaggtaactgaggccagacttgatagaaagatatgtaaaaagcaacagcactgtcaaaaaaatgaatgaaatgccaatctttaacctcagtcccttcacctagtgagtaagaaaaggaaaagcaacagttacatctcttgccatagattcatgtacatcccatgaaatcagtaaactcccatgctacatattagaatattgctgagttctggctgtttattcaggaaagtgaaaaataataataaagaaaaaatataacctctaaatattgcagattgacagtacggccaagaaaagataattttcttatatgctgaa

SEQ ID NO: 158026 - DNA, 472 bp, Homo sapiens
tcgcaccactgcactccagactagcccacagagcaagaccccgtctcaaaaaaaagtatagcagtgtagaataaattggtatagaagcaacagtcccaaatgtctcaataaggctctgaggacatcactctattaaaattcatatcagcatcgatattcattttaatgatctcaagataaaatcaagtaaagataaaactgcactccaggctcaccactgcactccagactaggccacagagcaagaccccgtctcaaaaaaaaagtatagcagtgtaaaataaattggtatagaagcaaacagcactttgggaggctgaaggtgggtggatcacttgaggtcaggagttccagatcagcctggccacctggtgaaaccctgtctttaccaaaaatacaaaaattagccgtgtctggtggcccatgtctgttaatcccagctactccagaagctgaggcaggagaatcgctt

SEQ ID NO: 158027 - DNA, 378 bp, Homo sapiens
gagagcttaggactctacagagacaggtctcctggaccccagagttgggaaattcaggactccctttttgtcccatgttcagacatcctctggctctaccttaacatgggattgtggaatccaagaaagtgggagcttgggagtttgaagcagcgagtccaacccctcagtgtagagctggggaaactgaggccaagggagtgaaggtcacaggacaatcaaagacagagtgctgggctgggaaaccggaccccggggctgtggttacagggttgccattgcctggctgtgagcctttgagcctctgggccctctggcccgcgcacttctccttgatgctcgtgagctatacacacctcctctgaggatgcaggctca

SEQ ID NO: 158028 - DNA, 624 bp, Homo sapiens
tgaaacagcacctgctgatggcatgggtgctggaaatgagagcagggtggcctcttcttcatcttcacagcctctccataagctcagctcagagaggtcaagtgacccgtgcatagctacatagctaggaagccatctgaaagtcctactctttcctgcacctctctgttaccacacttaattcattcactcaacagagggcagttgagctacactattttggttcctggggagatgacatgtggctcacacatgggtttggctcctaggggatcaaatgcctctgtggctagcttgaaaaacagcccccacaagaatgtccatggcctatcctcagaatctgtgaatatgtttgcttgagatgaggagactgtcttggatcatctaggtggggctaatataaccacaaaggtactgggccttataagagagaggtagggggaccagagaaagagatttgaagataccatgctgcaggatttaaagatggaggaagagaccatgagccaaggaatgcaggtgacccctagaagccagaaaactaggaaaccaagtcggcaggttgttttagcatttatatcctcatagctaggtagcattatatctctagatccagactattca

SEQ ID NO: 158029 - DNA, 272 bp, Homo sapiens
acggtggagtctgaacagggcgcgggtgcgaggagtcggctgggactcggggaacggaagactggcgcgggcctgccctcgtcctcgttccggcacaatcgagtagggcagtggggcgggtggcccaagggtgtcagagcaaacttggcgggcactgggcggacagctgggcttggagctccccgaagggtggcctaaggatgaagccccctagttatgcggaattggcgaggagcggggagaggcgttgtcattcgcgggcagggtttgtg

SEQ ID NO: 158030 - DNA, 663 bp, Homo sapiens
atgagcaggggacccccacatccctggccaggacaggaggtgcctccgcagggacttgccccaaaggggcaccatctccagtcatcctcagagtcaggcaggcttgccaacctgtcctttcatctctgtcttgctcccaggcaacccgtaaacccctcggggcccagaggccacgcctcactcgacagctcgggagagccgggcacaggggcagaagcgacttgccgaggtcatgcagtgacatggagcctgaactgaaagaccatcacagcttgcaagccacctccctgctctgttgctggctctccttgaagacaagtgtttttcaattaaccaaagcggtgcatggcaatgtgataggggaatgaaacacagcagcagattcaatgccccacgctgggcaatagccgactttctgttcgctcccatcccttccttccctccccgcctccttcccctgctccttccattccacaaacatttattgagcacccgctgtgtgccagccactgttctaggccctgaagacacagaagtgaacaaaaaaaagagtccctgtgcacatcctggagggactttccccgtgtgtgtgtgtgtgtgtgtgtctatacagtgtatggagacagtggataataaaagctgtttatcaggcactttctctga

SEQ ID NO: 158031 - DNA, 381 bp, Homo sapiens
tccgaggagagtcaagccacacagctcctctgttcctctcctctgcttgctgcatggctcttccaagtatgtacatctggggagaacgcacaactcaacgctttatacttccgtcactcttgctgctgggtgaaggacgggggaagtcggggaggctactaattgcagtgagagaggatcagggcttaaattaggggtaagaggattgagaaaaatgaagaggcagagtcaacctgacttcatgattagcaagatgggggtaaggagatgagagagaagcgggcttaaagttgtctccaagtttttgactccagtgatgactgggtagcctcaacgctttatacttctgccttagacattgttcaatcatcccctcattca

SEQ ID NO: 158032 - DNA, 581 bp, Homo sapiens
ataagcttgattcaggtacgggagtgggaatgacactctgtagagtttctgcagcctgaacctactgagatgatggcttctgaggggttatcctacttgtgttctcacctgctgtaagcaaactgaatcttgggtaggaacactatgaaatgtgctctttaaattgccctgtctacactggtgataactgaacactctttgtgtctatagtttgtggtgggcaccgtttttcttttttattttattttattttattttactttattttattttagtgagacagggtcttgttctgttgcccacccaggctagagtggcgtgatcacggccactgcagctgcagcctccaggctcaagcagtcctcccacctcaacgtctcaaatagcttggaccacaggcatgcactaccacactcagctaagttttttattttttatttttgtagagatgggttttcattgtgttacccaggctagtcaagctatctgcctatctgcccacctcagcctcccaaagtgctgggactacaggtgtgagccactgcccccagctggaatcttagtactagttgttacaatgt

SEQ ID NO: 158033 - DNA, 120 bp, Homo sapiens
ataaaaacattctcctgtatttttatctaatatttgaattttcaattcatataaaatttatttgttagtacagagcactatatatgatctaattttgtttcattttagatggttagctga

SEQ ID NO: 158034 - DNA, 135 bp, Homo sapiens
tctaatcactctttgataaaaaaatgagcatggcttcatgtcaagctgccatattctttccactctcttgacagtcctttggtgccaattggctactgagagccccagtgaccgatggcgtccttagggtaggtg

SEQ ID NO: 158035 - DNA, 631 bp, Homo sapiens
aagtgtccgtgtcatcttggttgctattttgaatgcctccttattttaaggtatctttcccaacagttccctaatcttggatgatttacttaatcattctgcaaagaaggatagtaatttaattccacaaacactatgagatggtgaacttgagttcttctgttataaattatgtcacataagctgtaattcatagatatttatcatcattttattatttttttttttgagatgcaatcttgccctgtcgcccaggctggagtgcggtggtgctatctcggcccactgcaacctctgtctcccgagttcaaacaattttcctgcttcagcctcctgagtgtgcaccaccatgcccagctaatttttgtatttttagtggagctagggtgttgccatgtcacccaggctggtctcaaacccctgagctcagattgattccctcaccttggcctcccaaagtgcagggattacaggcatgagccaccacacctggcctattgtcatcattttaactcgtagctattatcactattagtcctgattattatgtgtgccaaatataatacataacaatactgagaaaatactttaagggtataatatctaattgtagacactatagctttttgat

SEQ ID NO: 158036 - DNA, 493 bp, Homo sapiens
taagacatactaatttaaaaaaaaactttcatctgcagaactacaaaagttggatgcatatttgtaatcttgatgtctaggcaatgattaactttagaatcaagtggttaatattaaattccagggagcacttattttatctgattagagtgtgattatcagttttattcttctttcacatattctctgaaagtacatatgtacttgatttttatggaagaatcctaagtgacaaatggctgatacggctttcgacgattataacttttttacgcattagcaaatacaagttagggtctgttgctttgaatcttagtagaagtacagaattaccagtgacgtagtataaaaaaatttgatatcagctagtcctagcacaggtactggtcttgcagtcatacctattagtttatagctttggacaagtcactttatcttcataataaaggtaaagatacccatcttagggttttgcagagatcaaatgaaatgc

SEQ ID NO: 158037 - DNA, 377 bp, Homo sapiens
tttttccccatcacagccattcatatatttgaagacaaccaaatcctccaggctataaatttctcaggctcagtaactactcctcatttgaatgaagtttgagttctctcaccattctgctctgaagacactcaagttggtttctatttctctacaaatgtggtgcccagcagtactacactgtattcctggtgtggcctttcatcacagagtgcaaatgagaccaccacttccttggtcttatgtatcgtgtttccattaatgcagcctaatgaggaattacttgtttcgtagtcacattgcattgctggttcatgttgagtctgttattaactaaaactcctagatctctttgcatgcgttgctgctaaatcatc

SEQ ID NO: 158038 - DNA, 193 bp, Homo sapiens
ctgatgcgggcattccccattggcagcacgagtccacagtgtgaaatgcattggccttgcagtcagcaatgttagttaccagaacaaactgagatgtaccatctgagcgctccagggcccagtctaaggggaggacaagcagagggttgtgggaaggtgcattggcccagaacgctggcccggcatgagttcg

SEQ ID NO: 158039 - DNA, 176 bp, Homo sapiens
agttttatggtgtttttttttcttccttcatcctcactcccacttcccccttattttggcaccttttgaaagaggatgtagcaattatttggtaagaaagaattaaaagtgttctaatgagtaaataccccagatcttagagaggatttgtctgactagagtggagagaagaaacc

SEQ ID NO: 158040 - DNA, 301 bp, Homo sapiens
acccacatttctcccctcaccccatccgtggaaaaattgtcttccacaaaactgttccctggtgccaaaaagtttggggactgctgaggaagggcacccatgcacaaagacctggtgcagtggagtcataccataggagtaacaataagttaacatttattgaatacttcgaatctgctacaatgtctaacagatttttacatggacagtctcatttaattttcttacctcttattctggtcatttaacatgtgaagtaaataaagcataaaatagtttaatctcttgaggaagtcacaca

SEQ ID NO: 158041 - DNA, 927 bp, Homo sapiens
caattataaagaaaaatagagcagagtagcaagagaaagagttccgatgttactcaccactttggaaatcccaggcaagcccccttgatgagttaggagtttttcctgctgatgggttcgtggtctcactaacttcggagaatgaagctacggaacttcgcggtgtatgttacagctcaaaaagagtccacagaccaggagagtgagcagcagaacagtttattgaacaaagtgaaaggaaagcttccacatggtggaaggggacttggaagggttgctattgctggctcgggtggctaaggcttatatccctgtgttaccccctcccctttctttctttttgtccagagagtagttctttttcaatcctctcttggagtggttaattttgaatccttcactcgattggttaagaactcaaaacactgagtcatagggatcttttgcaaaagtccctaaactggccaaggaagtcctgccaactccacccctcattctgaaaggtaagaaggaggcaaaaactataggagaaaaaagcaagatacttagaaacttttgaaggtttctgaaatggaggctctgtttcttgcccctccccatcagattcacaccaaggagggataacagagccatcaataggtgtgagagtctgagaacagtagggaggtttttcttcctctttcctaaaaccatgacattgcagttcctgttaccaccttggtgtgggggcaagaaagtagaaataatcactgtacgtagtagacagagagcttcggtatcaggaactaagggggccctagcccattatgtcaggttttctgcctgtccaggctgagaaagagagatggccaacttagagtggtttagagttgtgatgaatgatgattttggtggaaataaagcagagtatataaccagagtctggca

SEQ ID NO: 158042 - DNA, 170 bp, Homo sapiens
agctgggccagggaccccatggcgtgagaatagctgttgtgaagggccttgtaatgtctggtttggcctgaggaaccagagaagtctgggatctctaggctttgttcctggaacatagtgactgatttgaagccagaactctgggtgatttgtacctgagttaagctaag

SEQ ID NO: 158043 - DNA, 182 bp, Homo sapiens
gaatttgtgttctgtcagcttagctgaggtggactacacctcacagaattctctttcccttgttgcaaattagcaagagatactttgctcaagatgtggatggcagccatgaaggagcagtcttattcctttattctttttttttttttttttttttgagacagcatctcactctgtcaccc

SEQ ID NO: 158044 - DNA, 453 bp, Homo sapiens
ggtagcgttcagaggatcccctcggatgcaaagtggtggtggggggatgggggaagagagagaaggagaggcgagaactctggaactcagcaggagagtactttcaaatcttcctctgagaaccgatctgcatacatgtgtgagaagactactgacaccaagaagaactgctggaaagacaggcggatcaatctccagagcacacacgggtccaggaatagcttatatgcccactagccagagtggaaagacctcctaatacagggggcattaggttcagttctcagaagggtatttatcactagtggggccatattacacctagactaaagggcacatcccacaaagcctaaaagcaaacctcaaaagtatcaaatgattccaattgactaaattgcatcccagaaaaaagcccctaaatacttaaagaaatataaaaactatcaattaaca

SEQ ID NO: 158045 - DNA, 391 bp, Homo sapiens
gtcacccaatgctctatgctcgtgtggtaaaagctgctaccgggggatccctgtactcatagcagatacatctctagaaagatgtaatcttcttagagttaaatcccccacacagcacaaactgtgcttgtcaacctttcttacacagtgccctatacagcacggattttacgggggtgtttttatatgggcaattgtatcatcttttcttcatgtctggaattttccttatattagaaagcccttccctattgtaattaaataattatttcttattgattttattcttggttacttccttctccccttttccatttatttaaaaagccccaacttttcaataatagaaaatttcaaacacacacaaagtttgaaaaaagagtataatgaa

SEQ ID NO: 158046 - DNA, 425 bp, Homo sapiens
attaaaggctgacactgtgcaaggtgttatgccagtaaggcacatgctaataggaagaaaaacaagaaatggtccttccttccttcattcttacatttgtaccattttttttccctgtttctttctgtatgcattatctaatttgatgtgcataacaacttatgagatacaaaagaaggttgttattgaccccacatagaaaagaaaggcaagtaatttcaaaaagatcaagcatttattagaaatttctagacttagtgaggaaggaagaactaagactatgtaagatgttattatcgttacatattgattagtgtgcactgctcgtgaataccatatttttaggcctgttttcctgaaccacataatattgtcccactgtgaaacaggcattacaattttgtatttacttctaatggttctca

SEQ ID NO: 158047 - DNA, 306 bp, Homo sapiens
agactgattggttattattctgtatacctaaagtgcaataccctcaactctttaaaaatggagaagaaggatcatgtttaatcacctggaaagatacttatgatgttatttagtaaaaagactgggttataggacagcatgttactctatgatctcacgtaagtaaaattgtgtacccatgtctttgaatgtatggctaaaggtatacccattgttgttggatagtatatttgggtcatcttttccttcctctttagatgattttgtgtagtgtgagcctttctctctgactctgtatcagttata

SEQ ID NO: 158048 - DNA, 426 bp, Homo sapiens
tccccagggaggaaactaacttctttttttttttaatttacaaaaggtaggctatgattattagagtcatacacagttgactgtctcagtgtgactcaagaccacaaaaaaaccatttttccttcacttctgagtcctggggttaagacctagaccagcaagcgtactgcttggggtcccttcacaggtttacaagtttttcattgagggcaatctgtgactgtgtgaggttggccagttaggtcaccatcaacaggtcattgatgttgctgtggagcatggtctcgaagtcatcgggaactatttttggtacttggttaaccaggctcatcaggaagtggcccaccttcctgatggtattgtcagctgacacctttccagatagtatatcctctgcatattgcaacactatgctcagggtatcct

SEQ ID NO: 158049 - DNA, 651 bp, Homo sapiens
agccttcaggaggaggaaattctgacacatgctgcaacatggatgaaccttgaggacattatgctaagtgaaataaaccagtcacaaaaggacaaatacatgattggacttacataaggtacctagagtagcaaggtctcttcatagagacaaagtagaatggtggttggcagagggagggagagagggatggggagttagtgtttaatgggcccagagtttcagttgaggaagatgaaaaagctctggagacagatgttcttacaacaatgtgagtgtacttaatgccacagaactttacacttaaaaatggttgaaatggtaaattctatatgtattttgccacaataaaaaatccagatacaaactagtacatactgtgcaattctttttatatacagttcagaaccaaggaaacctactctatgatgttaaaagtcagggcaacgattgcctttgttggttgtggggtagtgactggatgtgagtatgaggagggactacagtgctactcaggttctaattctttgagtgcttgttacacaagtgtgttcatgatgagaaaatttatcaatgtgaactcttaggatctgtgcttttttttcccatatgtattttatacttgaataaacaagactttttgccttctac

SEQ ID NO: 158050 - DNA, 558 bp, Homo sapiens
cttacctcacttaagtcccttaagcttatctgactgcaagaaaaagaaatacggtgttacataaaacacagttcataatgaccaagataaaatcattctgagccttacaaacctttcattacattttcattgccaaattaacagcccatagtccagtgagatatttatcactcttccataaaactaaagccaggttatttttctcataattttctaaggaaaagacaaagttaagagccaaaataaaaggtggtgatagaaaggacatgaataaacgtgcatcttattttgggagaaattaaaaaatcatcatttctcctgacatttgatttcctacgtcaagtttcattggcacagtcagacctattattaacttggttttaaagctcttagtttttcactttgagggaacataaagagttttcaatatgaagctgtcaggtgcagtggggtctcaggaaagcaagtgtaagagagaatgctgataaagaacgaagatctgagacaggagaaaaacataaaattgaatggtagagggcttaaaggggacccttgggg

SEQ ID NO: 158051 - DNA, 141 bp, Homo sapiens
tttttttttcttatattttgaaacaagggtgattccaagtcatgcttagttaacaggaataatccttgaaatcaggatgtgtactaacaagaacttggaacataaactcacctaagagaaaaagcactattctatctactg

SEQ ID NO: 158052 - DNA, 183 bp, Homo sapiens
ctcagtttcatttccttctttccaaggcctaattttctcccctatttaattgtcatgaatctttagactttggagctggaggctacctttaagaatcatctgacccagaactttccattctcaaatggagactcccaagcccagagagggagcagcatctgcctgacttcccacagctgcctg

SEQ ID NO: 158053 - DNA, 343 bp, Homo sapiens
agggcacattcttactgcaaggtagagtgaaccaagatgcacctacttcatgctattggaaggcatcattttcagtgcaaaaaagcttagtctcagacatttatcttaaggtgaaatcttattgcaggtcagtgttaactgatatcaatgtaagcaatgcaatacacattaacctcaaaggcatattcttactaaaagatgagaggaatcagaatgaacctgagtaggagtttggatgagaattcctgttagtacaacaaactcaggcattcttattaaaaccaactcctcatagcttattgagggagatgacagtcggcacagcaacacactcacatgcagg

SEQ ID NO: 158054 - DNA, 240 bp, Homo sapiens
agccaccacgcctggctgactgagtccttttcattcttaaggtcttagtgtaaatgtcagctgaccaccctatctaaaatagtcctctccatctcagcaccttacacactttagaatgtttatcataaaccatttaaattttttttttttttgagatggagtcttactctgtcgcccaggctggagtgcagtggcatgatctcagctcactgcaagctctgccttctgggttcacgccat

SEQ ID NO: 158055 - DNA, 245 bp, Homo sapiens
tggaagttgggtgggaaatttgacgattaggatttattcaacacagtttgccttttactattgatcacttctttccggaattataaacatgtttgatttattataatctatttcatagccaagtttccaaatctagttgtcaaccaatgttaatagtttctttggttctatttagagtgacaataaatattttggaggcacaactaatatgaacaaaggtactgcaaatgtagacatatgttggg

SEQ ID NO: 158056 - DNA, 148 bp, Homo sapiens
tttcatttaaacagtctcacgattagcaaataacaagaggtatccattagtacaggtctcattgactaggctgatcaccgataccaatcggactaaaaaagctacactcagaatcattcctcaatcactcatcagaaagtagtatgga

SEQ ID NO: 158057 - DNA, 610 bp, Homo sapiens
atattctagagaattcaacttcaagaacacctttaaactttttctttgtagttaaaaaaggaaaacaacaaaactttaaaaccaaagttagatgtgaaataactactgatgagttagaacaaggtcatattatatttgaaaataagaaatattatatcaagtttattcatcaagtgcatagcttttagcttttaactgaatttttctgggttcagtaaaagaccttttgaaaaaggaaaaggatcatttttagaatttttaccatgagaaacaatatgaactttctttattctaataaacagtttccttgttttttcataaaagtattgccgtactgctgactagaagtgaggacagagaggctggccagaggtcaaatgggactcagatatttctgaattaccagatatacaagctttggacttcaaaattaatagctaccatatctttaatgtcatggattccttgccaaatttccacagttcatattagtaactacatttgcttccgctttgtttcactgttgaagagaatgaaatgcttgtttggattaccatgcaagcatgcaaataatctatgctctctgtatttaaaaattcgtctatttgaa

SEQ ID NO: 158058 - DNA, 556 bp, Homo sapiens
aagacttctccttaacttcatccagaggactcaaagggaaggccactcaaccagaatcacacagcagaaggagcagagccaggcctggggtcccattttctggaggcactggcccctttttctacactaccatgctgcccccagcccctgggctaactaagactcccccattctaaatgtgagtgcccctgatggaccgcataggctggatgtgcccgtccttgctttgcccagcagagccatgtccataaagatggcatcccacgtcaaatcctgtagactactgcaaaatatccatcagccaatttcttcaccaaaacgctctgagcagccactgaactggcagtgccattaattttcagacaatttcagactaagttaggttacctttttggggggattttgttgctgtttagtttcaacaccattattgactcagtgatactctagggcaagtgttctaatgatccaagatagcttttaggagaatttctgaagctcttgaaatttgtatgcatagctttaatcagaatcccaaaggtgctcctatcggtaa

SEQ ID NO: 158059 - DNA, 118 bp, Homo sapiens
catatagtgtgccaaaaggaatagaggtgattgctgggatatgccaaataactgccttaggctctagcctatgcactatggagttggcatgggtggtggtgtgggaatctttgattat

SEQ ID NO: 158060 - DNA, 269 bp, Homo sapiens
ctatggtgtgaatgtttgtaccctgccccaaattcatatgtgaatttcgtgcctttatagtctatataaatttacaaatgtactgtgtctttatgaaagagaccagagcaagcttctgccatgtgaggacacatagagggtctcttgtatgaggcacagacgctaacagatgaggaatctgccagcgtgtttgttgatcttggacttcccatcatccagactgggagcagtggagttccgttgttcatgcattacccaaactaaggtgt

SEQ ID NO: 158061 - DNA, 443 bp, Homo sapiens
tgctaatatgatgcccattgatggctgtggcaactgagacctatagaggagaaggtaggaagcagtggagccaggactgaaaccacggtggatgggaccctgggcctctgaatcccaccctggctttgtaccttgctgtgtaccttgccagtcctggcgcctgaggccggagatggggaaggttagccaggggcccaggagcatgttggggaggctgagtctagcccactaacaaagcagaaggccagcgagcagtaagttgctgggagcttgggagtcaagtttaaagcatagaacatgactgttctttaaaagcccctcccctgccctctcttccatcctcgtgatctatttgccagggggttgaagggcaatgaaaatttctctggtgcccccttgtaccaggcattttgcctgttggatcccacactacccccatggtg

SEQ ID NO: 158062 - DNA, 388 bp, Homo sapiens
aaaccccgcggggtttccccgtcgcgatagcaggatctctctctgtgtgttatcaggtctgatcacgatctttgtttatagatgacggttccaccaggcctaattaccacacaccagcaaaggcaggctatgctgtagtacaagccactagcccgcctcttaaaacctctcatttcctttccatcatagaaatctatcctcaaggaaataacttctagtgtaaccatcacctggcttgctcaggtctcgctgtgtgtgtagcagcttgtctgaatttcaagcctagtagtgagtagaaatgaaaacttttgaaatgtgccagccttgcttgtaaatatgaatcatttaaaatggtggcatttgtcctcattcacaacaaaattcatag

SEQ ID NO: 158063 - DNA, 513 bp, Homo sapiens
agttacactgactcacttacatacaatctatggttgctatcacactaccatggcagagttagtagttgctacagagaccaccataaagcctaagttatttaccgtctggtctttcacagaaaaagtttgccaagccctgctctggaattcagacagcctctcagcgccagccttctccaggcagccctcgcttgcggcagctaggttttccttaggcgggaactgacctggagctgggcgcccactgaggtttgcaaggctggggagctttttaaataaataggtgggaaggaatgaggcaaccctctggcccagattcagcctcagtgatctctgtcccatcccctgagcctctagctgggggaaagccctgtcccgttcctccagagctcagggcaccccccctccctaggttcttggctccttgggttgtttcttggctacttttctcggtgaagggggcaggtggtctttaagttcagagcctgtgggctgaggctgggaccagggaca

SEQ ID NO: 158064 - DNA, 541 bp, Homo sapiens
tatttttaaaaaaactttaaaatctgaaaacaacacatgcatcagcttttgttcttggtgaattttctgattaatgtattatgttagtaacagaagatcagtgtgttccaggagtatagtttgagattctctagtctaaagggtctaaaagtgaaagttgggtaaaagaataacagggaggaaagtttttgcttccagttttttatttttatccagcagtaaaattttagaagactgtagggaaccaaagagtgtaggttagtttttacctcttccatggcctaggaatcacagaaaccctcatcagaggtttgaggggacagcggtggaattctgggaagcagaatgctttagctggttggtgggaagaaaatgggagaccagtcttcccagtgcttctctgagaaaaatgttcccagagaattgggtcaatagatgatgcaagttcttcacagcttctaatcccctgtctcctggaaccacattgctgtgcatgaggaccaccagcttcttacctcagagggtctgcttccaccctctg

SEQ ID NO: 158065 - DNA, 383 bp, Homo sapiens
  misc_feature (11)..(12): n is a, c, g, or t
ctgcctttggnnggactcctcctttttctctctctatcccctcccacaatgatctctggccaaactacaattccgtgccttcaacattccatgcctctgccctctggcccattatacatgctgttccctactctttaaatttgcatgtaaagttcttcatgatcttaccccatgcacctccgctattagctcctcgatcacctccttactctcctttttctctctctatcccctcccacaatgatctctggccaaactacaattccgtgccttcaacattccatgcctctgccctctggcccattatacatgctgttcccccaaggtgaactcttctcacatttctccctggtcagttgtgatacggttgtcgaggcttcaat

SEQ ID NO: 158066 - DNA, 120 bp, Homo sapiens
ctgatcctaaaagttacttttcactatgccatgatcctgcttacaaatgtatagttatactaacattaaaagagagaatgggctgggcatggtggctcacgcctgtaatcccagctcttt

SEQ ID NO: 158067 - DNA, 238 bp, Homo sapiens
ggtgcagtgacacctgcacctgacagggactgtttctttcttaaaggttgtctagaggctttttacagtttgggtgtgatgaaagtaaaaacctcattaaatggttcaaaaggaaatgggagggagaggaagtaaagatagcatatgggcacctcaagacatgtcactttggaaagcagaggaaggggaagcaggaggcagatgtggtgggcacacggggcagtttcgactcattttg

SEQ ID NO: 158068 - DNA, 413 bp, Homo sapiens
ggcaatgcttactagttcctcagggaaaacaaagtttgtcctggcattaaatcttaaaagaaatctctcagggggaggtggcaacccctcccctgaccaatcaatcaactgatcaagcaagcaagcaaattaagatctggtttcaaggatttaccaacaaatgcagaagcagttctatagaaggctcctctaggagaatgactacggggggtaaggtgacacaccccattgaagagcagtttcacctctaggctgagcattttgcacagctggggtggtagacgatggcacgtgcccacggccttcccttcaaacagccctgctcctggccagatttctgagtctgtgctaatctctcctcccagtgcagaggtgttggagacgcaggaacctccagctccagcctttgtgga

SEQ ID NO: 158069 - DNA, 690 bp, Homo sapiens
tcccctggactttaaagttgctgggcatgctgacatcagaccttatagactctagacctgacagccttgctggatcttgcatgcaaatctgccacttgagattttgttaaaatcctgttaagacccattacctgtctagatctatattacctgccataacccactggaggcctgcacacatgcactcctaggcaagctgggtctcattacccactctaacccctgtgacatgctatcagttataaatatgggcagtagtaagccccagaccaggatgacagggtttgcatccatgtatttggccacaaacagacctggctgaaacgtgatgcaaagatctattgctaaagggaagtggctacagtaaaatggataccaccatagctgccctgggatacaggaacctgttggcctttggaactgttgatatgatatctctaaaatcaactaaatccattctcaggcataatccatttgtcttaataaagctaaaacaagcataaaatttcaaaaaagaactctggctttagaatgaagcaattccatagcagatttttcattcttcatcccaaagtcttcaacaccacacacaaaaacataactcaaaataccatcaacttgaaaaagagaagcacttttgtgtagccagctcaaaggactggtgttatataccagaggtatgtcatattc

SEQ ID NO: 158070 - DNA, 731 bp, Homo sapiens
atcccaacactttgggaggccgaggcaggtggatcacctgaagtcgggagttcgagaccagcctgaccaacatggagaaaccccacctctactaaaaaaatatttaaaaattagctgggcatgatggcgcatgcctgtaatcccatctacttgggaagctgaggcaggagaatcacttgaacctgggaggcggaggttgcggtgagctgagatcacgccattgcattccagcctggacaacaggagcaaaactccgtctcaaaaaaagtactagtgagaaaatcatcaagaatatagaaaatctgaacaacacactcaacaaaatcaaattaaaacatacaaatactacaccagaaaaaagtacccattgaatattcactaagatagaccacgtcctgagccatgaaacaaatctcaacatatttcaaagagttaaatcaatatagaacatgttatctaaccataattgaatcaaactattaatcaataacagaaagataatgagaaaatctctaagcacacttctaaataatccatgggtcaaagaagttacaaagaaagtctaaaactcataaaactgaatgaaaataaaaagacaaacaccaaaatatgtttgatgcagctaaaatcaagaggaaaaagaaactcatatcactacatgcttacattagaaaaaaagtcttaataatgatctaagttcttatctcaagaagtgaaaaaagcaaataaac

SEQ ID NO: 158071 - DNA, 274 bp, Homo sapiens
gggcgtctccacggggagtccagcaagccggcattcactgctccctggccttggtgccctttgccggagcctgtgtctgggctgctggtcccataacacgtcgacaaccctcaggatatggggcagggttgctgcaggggtggatttgggcagtggagagtggctggcaccctggaggctgtgtaggcccagctgtggctcttctgggcctgacttcagggtggagaagtgaagggggaggttacacagagatctgtctctacgcacacatatc

SEQ ID NO: 158072 - DNA, 683 bp, Homo sapiens
agaaacttattgctcacagctctggaggctgggaagtccaagatcaaggtgccagcagaatcggtgtctgttgagggctctctgattcatagacggcagtttgttgctgtgtcctcacgtggttaaaggggcagtggcactcccttcacctctcttataagggcattaatcctactcatgaggtcacagccctcgtgacttaatcacttcccaaaggtcccacctcttaaaactattatattgggtgtgagattccaacatatgaatttaggagggcaccaacattcaaatcacagcacacagcaacctggatgactctccagagaactatgccgactgcaaaaagccaatcccaaaaggttactagttgcttgattccatgtacagaccattcttatggtgacaaaggtataaagatggagaacagattggtggttgccagaggctgggggtagatgattgtgttagaaacaaacaggaggggtggccaggcacagtggctcatgcctgtaattccagcactttgggaggccgagacaggtggattacctgaggtcaggagttcgagaccagtctggccgacatggtgaaactctgtctctactaaaaatacaaaaattagccaggcatggtggcaggtgcctgtagtcccagctacttgggaggctgaggcgggagaattg

SEQ ID NO: 158073 - DNA, 117 bp, Homo sapiens
tagagacctcattggagaatatgctaagggaaaatccaagggaataatactcatggattaatgaactgattccttctcaaaggatatgaacaactccatcagtctttgatatggttt

SEQ ID NO: 158074 - DNA, 302 bp, Homo sapiens
aaaggggatgtgttctgcttccgtttatgagttaagcaaagttctaaattaagttgagaagaggaagcaggtaaagtcagggatagcagagaaaggagacatcaaaccctattgttgtaggatatttatgtgaaggaatgagcaacgtgataaaacacatttttgcttgctgtgacttgccatagggtgcattttcagtactgtgtggataatgtgtggcatgttcattcatcagtcattctgtgacatttatgtagcttacacttggatctattttcaacaacatttcagttccctaaaga

SEQ ID NO: 158075 - DNA, 137 bp, Homo sapiens
ggctgagttttctaagagcacgcaggtggaaagtgatcaagctgagtcctcagcttcatatcttctcagggtccttgatcttccgcaccctgtagttctggttcattttaggcaattatcagaagtcacctcaaatg

SEQ ID NO: 158076 - DNA, 275 bp, Homo sapiens
tgaacagcaaatgatatactttgattattgtcaaacaggtttgccttccagggtagaaataacactggaaaatagataacatggttctaacatattaccttcagaaaaagggaaaatgaacttcattctaaaggcttaggaaaacaatatgtttcttgaatatgggtaagcacaagagaatatattagaaaattgcctgatatttaaagttcatagaacaaaaaaaatgtaagtttaagagattttataaaaaaaagtagcagaaagtcaaaagg

SEQ ID NO: 158077 - DNA, 400 bp, Homo sapiens
gacaaaatagtcaccatatcaaaaaaagccactgtcaaaaaaatgaaagcagacaattaaaaggtagattctaaacttttaaatttgcttacaaattcagcattttgaaggggaaatgtgatgatatcactaactttcagtctttaagcctgtgaatatttctgtttaaatgttggttaaaaacggatcacgaggtcaagagatcgagaccatcctggccaacatggtgaaaacccatctctactgaaaatacaaaaattacctgggcttggtggcacgtgcctgtagtcccagctacttgggaggctgaggcaggagaatcgcttgaacctgggaggcagaggttgcagtgtgctgagatcgtgccactgcactccagcctggtgacagagtgaggctc

SEQ ID NO: 158078 - DNA, 487 bp, Homo sapiens
ttgcaacggaggaaacaggtgaaaaactctcccaggtagcatagtcaaaagcttctgaattctcatccctgctctccccacttaacaggctgccatttcagtctttttgagacgcactgctgagatctacagcagcttctggtaccagtggccagcaagccaggacccctccaagcctcatactactcttcaagcacacacatttttcaacaaccgatcatccaatgacaaccaaccccccgccccccgcatcctggcaagccccttcaatagcaacaggaaagcccctgaggtgcgaaaaacagcgcgccccacttagggcgcggcgtagcataggggaggcaaccggccagtaaccagggcagctgagctccaagcccgagtcagcagaggcacaggcaggcccggacggcccttctagcggcagccccggatgcccccagaatcctcagggagcccaaagcccccgctcccacccaagcacccc

SEQ ID NO: 158079 - DNA, 288 bp, Homo sapiens
aagtgctgggattacaggcatgagccaccatacctggcccatgcactgggctcttctgtatcaaaggccaagcggcaagggagcagaacgctgtgctctatgtgcatgtgacactgcacaaaacccaaagtgggggaagtaaaccccagggtatatggtgttggcacagctagcatagctatatgctatgatacatgctatgccaacaccacagattgcatcaaaatacatttatgtgtttactgaatgaatcaatgacctagtttcactagagtcaggattcgtgat

SEQ ID NO: 158080 - DNA, 176 bp, Homo sapiens
atgagatgggcccaggaatttggattaaaaagctagtctgaaatgcattacattcctgtaccacattctaaaacaaaacaaaacaacaacaaaaagaaatgtggccataaggcaggagggagcagaagcaacatttggactgtgggcacatagagtaaggtttcagggcagaaaca

SEQ ID NO: 158081 - DNA, 658 bp, Homo sapiens
gagtgtgtagctgtgagctgagggtatgggggtaggcctgggcaagtaaggtgaagcggggagcagtgccagacattgtggggacaccagcatgggaagaccatggatctgtggggcaggcacccccagagatgccaccttgtactcatcctattctgtcctggcccatggttctgcctctccacctgtctcggaaccggggggccgttatggtatctccccaagccgcagttccttcatctgtaaagtgaagatcactactgtgttagtctgttagggccgccttaaaaaagcaccacagtcggccgggagcggtggctcacgcctgtaatcccagcactttgggaggccgaggcgggcggatcacaaggtcaggagatcaagaccatcctggctaacacagtgaaaccccgtctctactaaaaatacaaaaaattagctggacgtggtggcaggtgcctgtagtcccagctactcaggaggctgaggcaggagaattgcttgaacccgggaggtggaggttgcagtgagccaagactgtgccaccatactccagcctgggtgacagagtgagactccgtctcaaaaaaacatagtgataacaattagcggggcatggtggtgtgcgccagtagttccaggtactcagcaggctgaa

SEQ ID NO: 158082 - DNA, 187 bp, Homo sapiens
caagaatctgcatcatgcttttctgaaactctttatagaattgtcaggctggaaggggccttcatgaacattgttttctcctctttttccttctaacagtcgtcaggcctctcttttcagttcttccctaagatgtgctttcagaatccctcaccatcacggttacttatcttaggatacactttag

SEQ ID NO: 158083 - DNA, 270 bp, Homo sapiens
tctgagatcccctaaagcatcactccccgatagttgaatgtctttctacctgtcagctaattcttaatattctggtctatctactttcctttgtggttcttctttttctcattactttgttagaatgctttatagaggaaagaatatcaaactttcactttttgtgggttatacatattttttcagttttttgtttgttttttgtttttgtttgtgatgggctttattttcttttaccatatagaaatttaaaattttttattgcctaca

SEQ ID NO: 158084 - DNA, 444 bp, Homo sapiens
gtagctgggattacaggcatgtgcaaccacccctggctaatttttgtatttttagtaaagatgggatttcaccatgttggccaggctggtctcgaactcctgacctcaggtgatccacctgcctcggcctcccaaagtgctggggttacaggcatgagccaccgcacccagcctactgttttaattttgatttaattgcaaatatagttgaatgtctttctacctgtcagctaattcttaatattctggtctatctactttcctttgtggttcttctttttctcattactttgttagaatgctttatagaggaaagaatatcaaactttcactttttgtgggttatacatattttttcagttttttgtttgttttttgtttttgtttgtgatgggctttattttcttttaccatatagaaatttaaaattttttattgcctaca

SEQ ID NO: 158085 - DNA, 502 bp, Homo sapiens
agccacagttctcagccatgatgctgaagaggcagacagacatctgagacacagaagcaggtttacatctgagtcgtgtctactgcaaggccgccagaccgtaaaaggggaagtttggaaggcgtgatctcctacagagtgagtgccgaagtcctaagaagctgatcagtagtcactgccattgttcaaaggcagactatgaaggacactggtccctagaggtggttacacccccatcacccacatgctcacaaccacgctgtcacacatgcccacacccagcacctaaacttgtgcctgtgacatcttcaccctctatccacggagggaactgcgttccaccaatcccatcgccgtccacgggctgcaggagggctgctggcctccgaggacactgtcacaggaggaagccctcaggggagctgaatgagtggcaggccactgagagatgggcagacctgacgtccttgccctagccagggaagccacagcacagcagcca

SEQ ID NO: 158086 - DNA, 381 bp, Homo sapiens
gttccccacacacgaggaagagggaaccaggacggcttggagtgaggaccagacagggccgtggggacaaggaggcagggggcggccagcaaagcaagacctgggtcaccggggaaggaaaccagctctgccgcatgtggagacgagccaacgggaacacaggcaggggctcacgaggcactcaacaggccccgccctccaaagcagccagcgctctccggaactgcaagttgccatggtgcccatctcccaggctccatctggtgcccgcctggcatcagtccacacccctctaacaccttcgcccatgccctcctggcccctctcctggcgggccttccctcatgggacacactggatgagtgaaggaacctatctgtg

SEQ ID NO: 158087 - DNA, 440 bp, Homo sapiens
gaggagaatcagtggggaggttgcttaagggttgagagggagagtcaagggagagtcaaagttttgtaagatccttgaatccttcttgttagtctcattccaataatccaaattccagtatttccctaattgcttaacagaagtgacacggttgtgaattcagtgtggggaaaagagaggtcagactgttactgtgtctatgtagaaagaagtagacataagagactccattttgttctgtactaagaaaaattctgccttgagatgctgttaatctgtaaccctacccccaaccctgtgctggcagaaacacgtgctgtgtcgactcaaggtttaatggatttagggctatgcaggatgtgctttgttaaacaagtgcttgaaggcagcatgcttgttaaaagtcatcaccactccctaatctcaagtacccagggaca

SEQ ID NO: 158088 - DNA, 506 bp, Homo sapiens
ctgccatggcaacagagagtggatggatagccacctctgtagactcacagacgtgggttcgaactcctggtctgtcacttactacctatttaaccttgaatgatttacttaactccttagagcccaatttcctcgcctgaggaagctgctttacagagaggataaaagaccctaagaccgctaatggttcagaagccatactcagtcacttgtgagtattagaaacaatgtatgtaaaatggtggcctccatgcacagcacctggcaggctcaacaaatgtggctgtgttaaaagagggattctcttcatctcccctggagaagggcaggccagtttggccatagaccaacagaaagcaattgtgggtatgattggggtatggtgccagatcccctcacccaagaaacctttcctctcagatctggtacaggacacaattccaggttggagtcacatttttgtggtaaactgatttgtgtcctgcgaccatgtgttagaattgtgc

SEQ ID NO: 158089 - DNA, 373 bp, Homo sapiens
ccttggtttgcactgtgtttggtttgctctccttctgccaccattcactccctccaagttccatccaaactttcaaagggcttctgtcctgctgtgccttactatgacaggcagtagaacaaaagttttacacactgtggcctttttgtttgtatgcaagcaggtttctgatgtattgtcctttagggccaagttctggacccaaaggcattcctaaagttaatttgggggtggtacacacagtggcagggcagccggaaaggaggatgtggttttccttttccttttggaagaaaagggctcagtcagcctaattgtcccttgaagtgcttccaacttttcttttaagagctttaattggtatgtttgcatg

SEQ ID NO: 158090 - DNA, 168 bp, Homo sapiens
tttctcaggagcaaggagaaataaccactccttaaaattcttctatcccaagttctaaggacacatttctctctctgctttcttctctcatcttcctcaaccttcctcctcagtctggccagattcttcccttctctacataccccctgactccatgggggatctgtc

SEQ ID NO: 158091 - DNA, 355 bp, Homo sapiens
cagctcagaattagcctgggactgaccgccttctccctcattccgagagacccagggcaggggttcagggggttgtgtacctgtatgtctgcagaggcaggaaggcggctagggatgggagctggtgagcccgagtgtgagcgcaagagtctgtgaggtgtgtgagtgtgtggtgtctgtgagtctgtatgagtgtgtgtgttgtgtctgggtatgtgtgttttatgtgagagtctgcatgtgactgtgtgggggtgagcaagtatatgagttttatgtgactgcgtgtctggatgtatgtgagagtgtgtgtgattgtgtgtgtgattgtgagcacatgactgggtgtgtagag

SEQ ID NO: 158092 - DNA, 527 bp, Homo sapiens
ccatcaactcacaaattaactattgaaaatgagatgcataatcttagtcttctggtcaggtatcaagctctatattatacatttctctcatgtgttaagtagtaatgactacctaggcaatccatttggctgactggagaatattttaatagttaagaatcatgctacaataaagctaaaccaaactagaacctttatcaaatcttttctcttttgagacagagtttcactctgtcacccaggctggagtgcagtggcatgatcctggctcactgcaatctccacctcccagtttcaagcgattcttgtgccttagcctcctgagtagctgggattacaggtgtgcaccaccgctcccagcctaattaagctttctgtcagaaccatcagaatagtcactatgcttttataaataatagtctgatgtatggatagactaaactctgccaactctatgctattcagagcaaattgccagggtaaggggaactcaataaacttctgagcatattttgagatggaacgtc

SEQ ID NO: 158093 - DNA, 545 bp, Homo sapiens
cccatgacattttaacctttattcaggcagttatgatcacaaacatgcaatacctatatgataccatttctaaccattttatatacagatgcataaacgtatgacagtatttcctttcccttcaaaaaacaacatggcaaaataacttgcaagatctctagccaattaagaaccctggatctgaagactgactccgtgggatttcataaaacttggctccccatcaaaaggccacaattactctttcttgactacaagcatcatctctggattatccacacctcttccatctccaaagataactaaaaaaatacagggtaactaaatgagtataaaaacacatgaacctggccaggtgcagtggctcccccctgtaattctagcactttgggaggcagaggtggatcacctgaggtcaggagttcgagaccagcctggtcaacatggtgaaacccgtctctacaaaaaacacaaaaattagccggacatggtggcacatgcctgtaatcccagctattcaggaggctgaggcaggagaatcgctt

SEQ ID NO: 158094 - DNA, 277 bp, Homo sapiens
gtctacttactgacttgccttctacccagtgatgggccatgtgctgtgagggcacacactgtgtgcccatctattcattcctctgtgcgtgcgttcattcattccttactgaatgcccaccaagtgccaagcattggggtacgaagaacaaggcagacggggcctccctggcctcttccagctcgctgtagagtgttgtctaccctactcatcctcacatacccatgcctgtcctatgtggcactcaataaatgtcggatggatggatgtgtcccct

SEQ ID NO: 158095 - DNA, 247 bp, Homo sapiens
aagggaacggcagttagaaataggtaaccaaagggaatataagtaaaatgagagatactttgtacggactgatgcgcctggtaaaaccacgtactaaagaatattattaatctcctgtatttgaggtccaacaacaaatgttggggttagtgtcagccagaaatcctggggggaaatggtaaactccaactctgatgccctcaggaacaaaaactgttaaggttgcaaagaaggaatttttcatatc

SEQ ID NO: 158096 - DNA, 508 bp, Homo sapiens
ccatccacaggccaaaaaataaaaattacaaagctgattcccaccctcatcaaactcaagaggatgggacccacttctccctcggggagcagttttcttagtggaacactcagactttctgttgagcattggcagtaaaggctttcctgcaaatctcaatctctctctctctcctgatttttttcagacagctccttcgtttttaaggcatctgctctgtggaagctcacagaacaccctcctccaggtcctgggaaggctcagctttttgctgctgttctctaggtcctcgttcccaaatggaacaagtcctgcttgtgataaacacagaggtcctgaacttgggtctggttaagacaaaaacaaaaaggacatcaagtacagttaaaaaaaaagttcccaagaatctgcttattactttaggtctgaatttagtgcagacacgtgagcctctctgagtcaccatgttctcatagtagctcgtggaatagctccgtgaagaatgctg

SEQ ID NO: 158097 - DNA, 518 bp, Homo sapiens
ggagaacccaagtgactggataaaggtcagtagaaataattactaagatcgagagtcaatgaacattttcactaaatgagcattttcattgaaaatgaaacaatgatggtcaatagttaccattcaaggatagcagatgtggctgagtctgaccacagacaacacaaagaaaactgactaaggaagccccaactgcaggacaacctggccttcagcctgagagttaaatgtaacagaaagcactgctgtctattccaggatggactggaggcaattttctgcctgaaattcagtcctcccaatggagacctctctgttcatccttctgttttgaaggtcagagggcacaggtggcataggcaacaggaacctctatctgtaggcagagaggcacaggcaatgtgttcaaacacagatttcagagtctgagctgagtatgggccagtcacaggactgtcatgtggcactggcaagtgacaaaccctctctctataccttatccttctgacaaaggcaag

SEQ ID NO: 158098 - DNA, 508 bp, Homo sapiens
ctagctcggtcccccacaccacctgagtcgggggagggagagcatcgggataaatagctaatgcatgtggggcttaatacctcagtgatgggttgataggttcagcaaaccaccatggtacacgtttacctatgtaacaaaactgcacatcctgcacatgttccctggaacttaaaataaaataaaacaaaaataaaaaaagaaaaataaatgaaaaagaaaattttaaaaagttaaaaaattatgttcttgatacagagaaaaatctttagtttattagttatttttactcttgccatgtttctataaaggcaagaaaattaagaactgaaaagcaaacatggtctatttctttcatcaccccacactatatctctgtaatttatttctataatgcaggaagggtactagggaagatgacaagtattatgaaaagatatatactggccaggcacggggtctcacgcctgtaatcccagcactttgggaggcccaggtgggcagatca

SEQ ID NO: 158099 - DNA, 1372 bp, Homo sapiens
gaacaaagaagtataactatcttcgcccatttgtgttgctataaaggaatatctgaagctggataatttataaacaaaaaaggtttatttggcttatggttcttcaggctgtacaagaagtatggcactggcatctgaatctgggaagagcctcggactgcatccactcttggtggaagggggagaggagctagcctgtgcacagatagtgagagttgaaacaagggagacagagaaagaaagaggaggcattgtcagactcttttcatcaaccagttctcatgagaactaagagtgagaactcattcactcccgtgagaatggcaccaagccattcatgagggatctgcctccatgacccaaacacccccaccaggccccatctctaacattgggcacgaactttcaacatgagacttggtggggccaaataagccatatccaaaccgtagcaataactagtcagccaattgaggaggttaacggaatgctaaaaaatgttttcaatccaaaagattgtaggaatagagaactgaacaaagaacagatgggacaaattgaaaacaaagagcaagatggtagccttcaactcaaacgtatcaaagtcattatattaagtggaaatggactaaatgctccaattaaaaggcagagattgttaggttgaattaaaagcaagggacaattgcatgctatttataaaaagtgcacattaaatctaaagacacaggttacaaataaaaagatgaaagtaagatgatataccatgcaaatactaatcataaaaaagctagagtacgtatactaatagcagacaaattagacttcaggacaaggaatattatgtaatgagagatgtttcacaatgataaggaggttaaatgatgaagaagatataacagtgctaaatgtgcacacatctaataacaaagcttcaaaatgcaagaagcaaaaactaacaaaactaaacacagaatggtaaatatgcaagtgtagctggaaatttcaagactccttcctcagaaattgacaatcactaaagatatagacttgaaaaacactaccaatctgacctatttgacatttgtagaacacctgacaagtgcagaatacacataattttcaagtgcacattggacattcaccaaaatatatgatatgttaggccatatttaacaaatttaaaagattgaaatcatacataggatgccctgtgctataagggaattaaattatgtatcaataaaaaagataattggataatccccaagcactttgaaataaagtaacatacttctaagtcatctatatgtaaaaaaaaattagaatattagaaaacagtatagctgattttaaatgatattgaaaataa

SEQ ID NO: 158100 - DNA, 554 bp, Homo sapiens
caggcaggatgacgtgtccaatatggtagccactagtcatatgtggctatttaaatccaagttaacaaaaaataaaaaataaggtcaggtgctgtggctcacgcccataatccccgcactttgggaggccgaggcgggcagatcatttgaggtcagtagtttgagaccagcctggccaacatggtgaaaccccgtctctactaaaactacaaaaaaattagctgggcgttgtggcgcacgcctgtaatcccagctactcgggaggctaaggcaggagaatcacttgaaccggggaggcggaggttacagtgagccgagatcgcaccactgcactccagcctgggcaacagagtgagaatccatctaaaaaaataataagataaataaatatgcatgggaagctattctggggagagctgggaataggcccctgggattggagggggccaaaggggctgggtagcagaggcttggtgccatcgggtcaaaggatccataggatgcatgtgttgtgtagagggaagcatgggtcagggttggagccacagtccctc

SEQ ID NO: 158101 - DNA, 483 bp, Homo sapiens
gccgactcttgaggatacagtatccctactgtatcctacctaggctacacacttgtacagcatgttatggatctgtaggcagttgtaacacaatggggagtatttgtgtatctaaacatagaaaaggcacagtaaaaatacagtattaggctgggcgttgtggcgcacgcctgtaatcccagctactcgggaggctaaggcaggagaatcacttgaaccggggaggcggaggttacagtgagccgagatcgcaccactgcactccagcctgggcaacagagtgagaatccatctaaaaaaataataagataaataaatatgcatgggaagctattctggggagagctgggaataggcccctgggattggagggggccaaaggggctgggtagcagaggcttggtgccatcgggtcaaaggatccataggatgcatgtgttgtgtagagggaagcatgggtcagggttggagccacagtccctc

SEQ ID NO: 158102 - DNA, 388 bp, Homo sapiens
ggccaagtgggtaacagaaccaatcactagtattatcctttgtggtttccctacactctgcccacactattgtaaatagtcacttgcttagtgaccttgagcaagtcattttacctcacttataaagtgtcctccaattattccagtttgagtgtgacatctgttttctgctgggaccctggcttatatattggcctattagcctcaaacgcctcatggaagcaaggcagcggaaaggttagacacagtgctgagactagcatgagaaaaactgataagaatactcaattggaaagaagaagagaaggaataggtaaaagaaggcaaaggggacaaaaatggaggaaccacagttctgattatgacttcttccaggtatagggaaact

SEQ ID NO: 158103 - DNA, 2366 bp, Homo sapiens
aaaaaaaaaaaaaaatatatatatatatatatatatatgtatatgcacacacacatatattcgtatgtatatatatacacacatatacacatatgtatacatatatttatgaaaaggacatagaggtggcatatgatcgcatatgtatacatatatatatatatatatatatgccacttataatagctcaaaaaaattaaatggttagatgtaaacctagcaaaccatgcacaagacttctgtgctgaaaactgcacaatgctgatgaaggaaaccacagaatatttcaataagtggggagacatactgttttcatggatggaaaactcaacctagtagagctgtcacttctttccagattgacagacagttttaccacaattcctatcaaaatctcagcaagatttttttgtagatatagacaacataattctaaaatttatgtggaaaggctaaggaaccagaatagccaaaacaactttgagaaagaattaagtggaaggaatgaggttacctaatttcaagacttattgtatagctacagtcatcaagactgtggtgtggatggaggaacagacacttaggttcatgaaacagagtagagaacccagaaacaggcctacacagatatgcccagctgatttttttgacaaaggtacagaagcaagtcggggaaggtcagcctttcaacaaatgatgcgggggcacctgggcacccacaggcaaaacaatgaacagccaccaaaggctcacactttatacaaaaattaacttaaaatggatgatggacttaaatgtaaaatgtaaaacatagtattttttaaaatgggagaaaatctttgggatcactaggcaaagagttatgaggttaggacaaaagcatgaaccataaaaggaaaagttgacaaattagactttataaaaattaaacatttttgctatggaaagaacctgtgaagaggataaaaaagacaaactgcagagtaggagaaaaggtttgcaaaccacatgtccaaaaaaaggaatatcatctagaatgtatataatctctcaatactcagcagtaaagaacaaacaattcacttagaaaatgagccaaactattattaaaaagtcgaaaaacaacagatgctggcaaagctgcagagaaaaagaacatgtatacactgttggagggaatgtgaattagttaagccactgtggaaagtagtttaaagatttctcaaagaactgaaaacagaactgccatttgacccagcagtcccattaccggatatacacccaaaagaaaaaaaatcattctaccaaaaagacgcatgcacttgtatgtttatcacagcacaattcacaatagcaaagacatggactcaacctaggtgcccatcaacagtgaattggataaagaaaatgtgggacatatacaccatcgaagtactccgcagacgtaaaaaaagaaccaaatcatgtcctttgcaacaacatggatgcagctgtaggccattgtcctaagcaaattcagtatcccctgaatttaaaataaaagttgaaattaaaaagaaaagccactgactaaattaaataaatggatttttattcagtaggaaaaaaaattagaaaatggttcaaagaaaaaaagagacatgtcactgaagaggacgtagaggtggcttatgagcacgtgaaaagatgctcaacatcattagccattagcaaaatataaatttaaatcacacctatcagaatggctaaaataaaaaatagtgacaacatccaatactggtgagcatgtggaaaaactagaccccttatacgttgctggagggattgttaaaatggtacagctgctgtggaaaacaattttggcaatttcttaaaaatgaaaaacctacatctgccatgtgactcagtgattgcattcctgggcatttatcccaaagaaatagacttatgttcacataaaacctgtacaggaactctttttactttaatagccccaaactgtagatgtccttcaacaggccagtggttaaacaaattgtagtacctcaataccatggaacacttctcagcaataaaaataagtgaattattcatacacacaacaacccggatgggtctctagaacattaggttgagtgagaaaagtcaaaacctgaagtctgtatagtgtatgattccatatatgtcacactttttacatggcaaaattgtagacacagagaagagattcatgtctgctaatggttgggaggggcaagagtagaaggggaatggagtagccaaaaaggcaacaggagattggcagaagagtggtggagtaagaggtcgggaaggtggagccaggccaggagccgttctctgtagtt

SEQ ID NO: 158104 - DNA, 379 bp, Homo sapiens
tctcctagatttcttctacctcactaaccattcaagatgctcagtctgcatcttgaattcctctccatccacatatcccctataaaatgttggcatttctggggatctttttgttgtcaatgtccttctgattctatgtacatttcccagaagattttatccacgggagtgccctgtactaggttaaatagagtcctccaaaatttcatgtcaacctggagcccgtgaatgtgaccaggacattgcagatgttattgatttaagatgagatcatactggattagggtaggccctaacctcatatgactagtttacttataagaggtaaactgagacaccgagacatagagaggagaatgccacatgaagatggaggcag

SEQ ID NO: 158105 - DNA, 210 bp, Homo sapiens
cctgacctttgtctgattcccgtcacttagcatgttgttaaacatgtcagtgattttggttcctttttattacatagtagtagacttagtagtcgaagtagtagtctactactaagtagcaggcttagtagtcttctaagctatataggaaaaatacactaaatatataatacggtatataatgaagtgtcttatatagtgtgtctgttt

SEQ ID NO: 158106 - DNA, 369 bp, Homo sapiens
acagaaaggagatgctgtctgcttcacccaggccaggaagggaactgtggcttaaagtatgcgggacttaggtcagacacactgaagaacttcctgatggtggtgttgggatcagggcaactagaatgggataattgaaagctcagaatgcccccctcacatttcatctgcctgcccattgagtctgagataacctctgatttttccaccctgaagtcaaatctgtactggctgccccactccctatatcccccaaacccatcctggctcccagagggacgaaggtcaaggggagtggaggacgatttgagaccagaaaggagatgctgtctgcttcacacaggccaggaagggaactgtggcttgaag

SEQ ID NO: 158107 - DNA, 510 bp, Homo sapiens
ccctgaagatgaatgaaatccagatgattctatctacattccagattattgttaggcaattaaaggttgaaaatcacagatctagttactttaattttagaatatgtaattcagaccaggcgcagtggctcgcgcctgaaatcccagcactttgggagaccgaggcagacggatcacttgaggtcaggagttcaagaccagcctgaccaacgtggctgaaaacccgtctctactaaaaatacaaaaattagccgggcatggtggcaagcacctgtaatcccagctactcaggagactgaggcaggagaatcacttgaatctgggaggtggaggttgcagtgagctgagatcgtgccacggcattccagcctgggcaagagcgagcctttgtaaaaaaaaataaaaaataaaaaaaagtgtaattggccaggcacagtgactcacgcctgtaatcccagcactttgggaggcccaggcgggcagatcacgaggtcaggagaccaagaccat

SEQ ID NO: 158108 - DNA, 455 bp, Homo sapiens
ttacacaggcacagaaaactagacattactcagcagtcaagaagaaactggctgaggcgggaaggcaagcatcaggtctggagatagcctggggctgcgtcctggctctgcacttagtgcgggcttcctgggccagtgccacctccctcagatgtaacctggacaagcggggcaccaggcagtctcaggaccaactggatggagagacctggcaccctgcagactgcgaggtacctgatgcgttcagtgggctctggggaggcgccgactactcccctagtcatggccacagtcgacttcttcctgtgcctgctctttcaagacgtgccccctgtgtgaggaggtctagaggggcagggacccccgctcggcagggcgagtccaggtgcaggcgcctgaggtacaccaacagcgcctcccaccatgccaggtgccatgctgggcactctgtcccc

SEQ ID NO: 158109 - DNA, 336 bp, Homo sapiens
gtctgaaccttagaaactgtctccctgtctggaggtagagatacttaccttgtagtcctacaacctctttcaaaatgtgtattctagccttatggctatgtaaaaatatactgaatacacatttcttcatcttagctctgatatctggctactttttctttcttgtgagatcctcagtccccttcctcctcaaggcatccccacatatagcccttctagcccatattgtcacccagcttcaccctaaaatcctccacttaggccagccttctggtgcaaaatttcccatacccagaaacctcttgaattggtcattatcatagaagaaattaagtc

SEQ ID NO: 158110 - DNA, 537 bp, Homo sapiens
cttaggaggaggttacaaggtctagtccaagcagtaggaagaagaaagagatgacaacattaagatcctatgaacaagggtaaagaagttaaattctaattccttaagcctctcttaagtgtgaaaatcaagtgagttatttctgtggttaacatcaagaatgaacctcatgttactttccttgggtggaacaggtgtggaatttcagtatgttgataaaatgtcatggatctggtttagcctttcacagtccttgacagctattcattttcggtagaatgtagcatggaagaaagtgctccaatttgggtcagactacctaggttcaaatcggtgccttcccacctgtgtgacttgaggctaaaagttaacctctccagtctcagctggttggagagcacattaggttagtgggcagcatgagtatagtatggtcccttggaggatggaggggtatccacgaagcactgagtacgtagtaagtgctcatgctcactaactaggatgccagttgttatccagattcatgtttctcaa

SEQ ID NO: 158111 - DNA, 409 bp, Homo sapiens
atgcctgcaatcccaagcactctgggaggctaaggcaggaggattgcttgaacccaggagttccaggctgcagtgagatatgacagcactgcagcacttcagactgtgctacagatggtctcttaaaaataataatataaaaactagttgggcatagtggcatgtgcctgtagtcccagctactcaggaggctgaggcaggagaatcacttgaacccgggaggtggaggttgccgcgagttgagattggaccactgctctccagcctgggcaacagagtaaaactctgtcccaaaaaaaaaacgattacacccttgcaggatgtctctcctgtagacagcaagaggtagaggaggcagagggctctttcttagaaaagaggcctttggtgagcccagaggtttgaaacc

SEQ ID NO: 158112 - DNA, 463 bp, Homo sapiens
actgcactccaggctgggacgacagagcaagactccatctcaaaaaaacaaaaaaagaaaaaagaaaaaatgttttcttcttatggaagctaaggaacttatgcccctccttgcatctcctgtgaaggcagcatcttcttttttcttgtggcttctctccatctggctcagactggctgctgggatcaagccaggactttctctagtccccaaccttgagctgctacacataagccacctcccacaaggcctcttcctcttatgtaaatcaactcataaaaatatatacccgagggctgcttgcggctgccaatttgtatatacatgaaattaacatcttaactgttccagatatttccatgtgtttttcctgaagcagagttgttaatcttttttttctttttctgatctctttccatttccctgaacctttcctccttcctgccctgataccgcccgctag

SEQ ID NO: 158113 - DNA, 654 bp, Homo sapiens
gttcattcagtaaacagatatgaaaaagtattaggaaatattccctggctctaaggaagggtaaaaagatagaactgcaaaatgattggtgaatctttgtgacatctgtatatagctgaagtcctgacattatgaaatgtgttctgccgcactgccccttttttttttttttaaaggtaacttgacttttgacatttaaagatctgttgggtttttgactctcggtgatggcacaggtacccatactcatagttcctctttacccacaatagtaccctttacccaggggggaatattatactctagaaatgtgattcagtttcacagtatgattcaggaagtaattaaccatagccatgtccttttctccctcatgattttttgatctaaaatcagaatctttaaaaatagatctattttagggaagttaagagcatccttttaataaaatataaagtgatataatcatgtctgtttctcatgggagattgtattcaactattgtaatagtatgtaacgcttttactacacttaaaaaattgagatataatttatataccataaatttgctccttttaaagtgtataattcagtggcatttattatattcacaaggttgtgcaaccttcaccactgaccaatcccagattattt

SEQ ID NO: 158114 - DNA, 342 bp, Homo sapiens
tggggatcacaatgtccattggggattaaaggcactgacaagtcctgtgatagagggacctgtttacttttgtttcagccagcatcatgcaaaatgttttgaccataaaattctttttttcactgctaaatatctctttaacatcttgcagaacacacatactggtcaagtgccgtgcaaatacagaacctaaccaatgccaggaggaaaaggatgtgaacacagccaagttctgaatcttaagctcatgcacataaaggacccagggttatgcttagtgcttctgaaactgtttagacatttttgacatgtgggtgccatgttaagatactttatctgctc

SEQ ID NO: 158115 - DNA, 266 bp, Homo sapiens
agaggagggttgctacagctgaggtctcagctggtgcagcacaaaagtgaaataggtccatggatatctgaagccatatgtggttctgtgtggctatggagtcattccgggagacgttcacaggatgatttgggattaccactgctattgtaaaccatggaaattctgtgttaatgttggatcctatttgtatttgtcaagcatagtctggatgcttatccacattttggtataaggccagaattgaaggcccaatatgatgtgtc

SEQ ID NO: 158116 - DNA, 597 bp, Homo sapiens
tgtgttcattttctccatatccctctaatatttgcagtaggtcgtggaaaaacattcaactagaaaataggaaaccaagctcttagtcctagtttcatcactaattggttatgtggtcttagataattcattcactgtgtatttattacctattgcaagtcaggtaccgtatcaagctctgggtgtgagacaacgcacaagggagtcaccacggaactaatgaaatgaataagtaaacaaccactgcaatatagtatccagacaactgagtggtgactgtagtgaatgtagagtatcaaacaagatgacacaacactgtacctctgtgaagtcaggagaggtgccacggaggaaacgatgatgaatcttacaagttaaagacacgttgagtcgaggtaaaccctcacctctctgacatagcttctgtgagaataaaataaggagggttgccagagcatccctcagatccccttgtccattatagtataatatgtgatccaatttttctgtaatagaaacagagctgaagaaatgcttgaaatgctatccataaaaagggagaaattctgtgcttaaattgcaggatgaaaaggagcg

SEQ ID NO: 158117 - DNA, 740 bp, Homo sapiens
accagacaaacttaaggtgttgttctagctgagatattagtaatattactgagtctgtgtagaaaataacttcaatgatggtcatttgtcatcagattaaaaaaaactgagatatacaaaacaaaaaacaaaacaaaacaaaacaaaagacaaaattttgtaaagtggaaagggagcattagattgctatcattcaatagttgtgaagcttggatccagaatagaggatgctgcagtgtcattgtgctcttttcttgtcaggcctcatctggaagagaggcaatagcaagctgcaggtggctggaaagagaggagggatgacgaatctttatcacctgggaaatgatgaaagaaattgaggatgtgtactctggaaagcagtagatttagacagacacaatatgtatgttctcagatgtttaaaagtactgtcatgtggaagatggattagaataggtatgtgttgctccaaagaatagcctgtggaccaagactagctgtcagaaaggtatttcagctcagcatgataaaaaggtttctgactctgaattacatagtgttagtgagtgcttcattataagacgtatcctgttctgaaaaagtagactaggtatgatatccaaggtcacttctgacactaagaaatctttgatttttgtgaattaaagtatattttaaatgtccattctcagttttagtaaaaagccctgtgcatagttttaagataatctgaaaaattt

SEQ ID NO: 158118 - DNA, 323 bp, Homo sapiens
ctacaaaaaatacaaaacaatgagctgggcatggtggcatgtgcctgtagtctcagctccttggggggttgaagcaggaggatttcttgagccagagaggtgaggttgcagtgcgctgtgatcatgccactgcactccagcctgggcaacagagcaagtctctgtctcaaaaaattaaaaataaaaagcattctcaccagaaaaaaaggtaacaatgttaggtgacagatatgtaaacttaattgtaatcatttcacaattgtaatcgtttcacaatgtatatatatgtcaaaacatcatattgtacaccttgatataccgtt

SEQ ID NO: 158119 - DNA, 240 bp, Homo sapiens
gttaagaggataccaccctctagaggaggctccctgttggttacctgctcccctgtagcagcttccaagatgacctccaattatccctccctggtattcatgcccttgtgtggtcccctccctcagtgaatcatggttggtatgtgtgtccaattaaaaaaggcagagtgatggcatgtgacttccaaggctaagtcatggctctactctctgtctctcgctaagtcatggtctctctct

SEQ ID NO: 158120 - DNA, 598 bp, Homo sapiens
gtaattcagcaacatttagttcagagagttcagtacatcccatagatgccaatggcaagccaaaagcatgatcaaaaataggaaaaagaggagaaaactaggataacgtagggaaaagaagacacagcacagcaggaaaagaggagaaacaacaaaatatgcgtaaccattgggggaaactgggtgaagggtaaacaagaactccctgtacattttttgcaacttcttgtgaatctataattatttcacaataggaagttaaagaaaacaaaagaagaaaaaagtggaaagacacatgaaatggaaaggctcttggttccagtttcctaagttcactgagtacttaatgtaccaggcaatctgccaggcactgccctcaacaagctccatgttcactgcagagagaaagacaagtaaataatctattccaccaagtatatcaagacgctttcctgcaaggctctacttttccaattccttaggaaacatggaaaaaagaaaggctacaacagtgaaacaaatataagggcaccactaggtaaagctacaccttaggtgtacctgagcatgagaatgcaggctttgcttattgtccctc

SEQ ID NO: 158121 - DNA, 467 bp, Homo sapiens
ggtatataagatcacaacaactttttaaaattatctcccttaagctagtggtcagtggttgtgtagtacagtaggtacctctttttcttggcaagaaaatgtttgccaagccaccctgtggaccatacataaatgagctcgcctatcaagagagttgaccagttttccatccctattgcagaggtagtatcactggtctttaccaatttaccactgtcatgtcctgctggtcacccatgttttgtacttcaggattccttcccaaagggacctcagtagagctccttgagaatgtggagggtttcaggtggaaccttcccacctgctgcctggttcctgccataagtcagtgctctggaattctgaaccatgtgaattggttctaggatactaggtaggccacactggatgagttgcttctccacttcagcccttcatttcctccactgaaagatgacacaagggat

SEQ ID NO: 158122 - DNA, 267 bp, Homo sapiens
gcggccgcctactactactaaattcgcggccgcgtcgcctgagcagtgcctaggagggagagggagaagcagtgtgagcctgcaggcacgcaggagtccagttgtacacggaggcgaaacactgttcagatcccgctgcagtgttaactatggtaaaggcagagttgaccaccggaggagtccttcagcgtggaggccttcagcgatcttggcaagcaccaattttcatggatgtaggagaatgggagcagaggaactggaggctgc

SEQ ID NO: 158123 - DNA, 181 bp, Homo sapiens
gtggatagatatccttcaacagttctgaaagatttccagccattctcttcatatattatctgtgctgtattcttgtctctccttttagaacttcgattagtaaaaacatgtttgatgtcttttcccactcttgttttttgtttctcccatgctgaattctgtgtaatttcttttgaactat

SEQ ID NO: 158124 - DNA, 190 bp, Homo sapiens
aagtgccaggcatggtactaagctcttcacacccatcaactcatttcatccttaaaacaactctttgagataaacgttactgctttctccattctctgacagaaagagaataagcaacacaccccaataaatgccacagctcagattctaacgcaggcagtccagctccagaggctagataaccacattg

SEQ ID NO: 158125 - DNA, 308 bp, Homo sapiens
tgtctgtgtgtttttaaccaatgctacatcgaatctatggggaaaccaaccaagtaacctaggggagctttggcccaggcagactctctgtgactatctgctagggctgatagcagaatgggtagctgtctgtcccctctgctgccagcaaatggaaaacagtcttgactacacattcactagtgaccgtgagtgatcttattttatgcaagtacataactgctttgaattacttgagaacgcaaaaaataataactacagaaaactctatatcctgattcagatacagtccacctcttcccagggtc

SEQ ID NO: 158126 - DNA, 373 bp, Homo sapiens
aaactgtgcagtgttctgtctgtcaatgtccttgttgcatttgcagggcaggttttctaccagtggctggggacttagttttactgggccgagggaaggttaggatttgagggtcttgttaagctggatatgggctgcatttcaagcctcccctggctgtctctatcctgcgtgttgatgccaaggctgaagaagactggatttgcaggcaaaagactgtcatttgaggcctgttttcaccccttaatcactgtgtcttggtatgttgtgggggttgaggtaggcagaggttagccaaccttttctggaaagggctggctgataaatacttgaggctttgcatcccatacactgtctgtggcaacccctaact

SEQ ID NO: 158127 - DNA, 347 bp, Homo sapiens
gttacaatacattacagtgtggaaaaagcaagttacaaaacaagggatataacatatttgcagttttagtacatcctgctgtgtcagggcccgaaattctgaattgttaacaatttccttagtgttgtcaatgctgctggtctgtggaccacactctgagtagcaggttaaagtgtacacagacatctctgtgtgaataaacacttggaaatacacgtggaaagtttcctgagatggtgaatctggatatttacttttgtctttgtgcttttctgtattgtttaatacttcataatgcatctgtatcaagctttacataaacaataaagctgggttttaaataataa

SEQ ID NO: 158128 - DNA, 130 bp, Homo sapiens
gtgatcagagcagaagcacccttaagagatcacccaagagagggctccccaaactcacaatccaaacttgcaggcccctgcgtgcaagagtgaacgttataccaagtccaattttttattttatagcttc

SEQ ID NO: 158129 - DNA, 539 bp, Homo sapiens
cacagatggggcctttaaaggataattaggcctgaggactccttcttcattaatggaattaaagcccttttgaaacaggctgtatacagtgttcggctagcttgctctcttacccttccaccttctgccatgtgaggatgcagcaaggaggccttcaccacaccaaatgctggtcccttgaccttgggctgctggcctcccaaactgtgagaaaatcattttcttgtctcaataaattacccagtcttgggcattctgttactagcaacccaaaaggaataagatgctaagttttatgtaaagccagcttgttaggggaaaaaatcagaatcatcagctagtctcagagtagtaacacacacagaaaactggaactaaccattttggtctgagcttagtgctagctgtgtttgatgaatagaactaggtgatggcttcagctcttttggccttacgcataggaaaaactatctttttttcattctaaatctgcacatttggcccggccgccccgtctgggaagtgtggagcgcctctgc

SEQ ID NO: 158130 - DNA, 297 bp, Homo sapiens
gtagagatggggtttctccatgttggtcagtactcccgacgtcaggtgatccggccgcctcggcctcccaaagtgctgggattacaggtgtgagccaccatgcctgagcatttattttattttatttttaagagacaatgttttgctatgttgcctaggctggtctcaaactcctgagctcaagcaatctgcacaccttggccttccatagtgctgggattagaggtgagccgctgtgcccggcaaaatattttaaacttattttgagatttcttatttgacccatgtgttatttag

SEQ ID NO: 158131 - DNA, 506 bp, Homo sapiens
gtgttgggattacaggcatcagccaccatgcccggccccagcagttttctatggatgttagtgaagtcatgtataaagatgaaaaatattctggagattctgacaggcctcttgaagccacctttttttccctccaatcagaccactgctgtaaaccacactgacactattgtagtatgcttttttcctatacccataacacagtgggagattaaaaataattttgtagggtaggaagagaagtggatagagagccaggagatctaggtttggtgctgctggtcctgcagttaagcaggcatatgtctttgggcaagtcatttcacttgtttagattaattttctcacttatgaagtgagggatttggactgcttagcgaggtacttttcatctctaaaatttatgaatctaaaatacttgcagtaaatattaaatattacaaatggttaatattttaaaacttactcagatgagtaaaaactcaagggagctccaagttgatgaa

SEQ ID NO: 158132 - DNA, 403 bp, Homo sapiens
cacctgctcagaatggaggtaggggcagagcgctttctcatctttgaactctgcggtggacagggatgggggtcatgttcctgggttccgtggatcctgaagaaggaaacaaggttatttctgaaatgggttatctgtgtcattgtatgatctctcttgtcacacacacaagacacatacacgccaaagatcataaaagatgtatttttaaagccccagtgtgtacattaacttacatagaataacctgattagctttgaaggctgttggcttaaagagaatgaagatttccaagtaaaagcagaggaggaatgctcgatgtcattgagaactcaaggagaatttccttccagtgaagtctcaaaaaaaccaaaggaagaagcagcctctgattatataattt

SEQ ID NO: 158133 - DNA, 355 bp, Homo sapiens
ctgatttagaggctgcagtgcaggagtaagaaggctgtgccccctccttccaatagagaataactctgaagggctatctcagcttcagatctccttttacaatcagatgatgcctttttgtgcctaaatcccagtccagcttctccctccagtcatcccggcttccttcccttttcccacaggtgttgactccaccaggggtcccaagaaacttccttctcagaaactctctttctttcttttttttttttccctttggagacagggtctcacttggttacccaggctgaattgcactgccagcctcccaggggaactcctctagaagtctcgaccgtgcaggcttgcaacctgg

SEQ ID NO: 158134 - DNA, 471 bp, Homo sapiens
agtgggctctgttccaaggagaacaaaacacactcttgggaatcccacactacagagactccttttgtctctctttttgtgaatctctaggttgactctcacagtgctcatttttcactctattgcaataacctcgcacttaacatctaccctggcacatcagcagactatcagcaattggaaaaattaaccaaataccactatctcagatggagacatctagacagagaagtttaaggacactaacgtctaatttcccaaataaagggaacctctttactctcacaactgcttctctggtgcgaccccaacaaaggagggggtggtggtgagagtcccacctctaaagcaaattgtcagacagatgaaaaccagagctgctttctttcttttaacattatggggagtaggggtgtgtgtgtgtgtgtgtgtgtgtgtgtgtgtgtgtgtgtgtgtgtgtgtgtgtgtgtg

SEQ ID NO: 158135 - DNA, 540 bp, Homo sapiens
ggagacgaggatgcagttcaagatgcacagcttgatccaaggataaatcctagactatctagagaaagtggtggctggcctgcttctcaacccactctccgaaatgctgtttttctctccatcgcacctttacttcatattgggcagtaggtggttaaggcagccatccccagcaaggtctgactcagctggttgttgggttggaggaaactctcatttaatttagagcagccatcatcaggcttctttgactatatgcccaaccagtaacaaggtttagtatgcccccagtaaatctaattttttctttgttatatgcaactagcttaatctactatgtattttgtaaatcataccccaaaataagtaattgaaagggatgagattcaaatcaacattggcagaagctagtactttctttctcttctgcaggggattgtcttttgcagtcctgaggctgggtacactcccctttggatgcttgttgctctctgagagcatttttctggcttcaggaacatcctgctggaaggggcagag

SEQ ID NO: 158136 - DNA, 511 bp, Homo sapiens
tgggactcgcttatggatcggacttcgctatgcatcggcacctcgctattcatcggcacctcgctattcatcggcacttcgctattcatcggcacctcgctattcatcggcaccacccttacccccagaaatagctgcggggctatggtagcctgaccctttcctgacatcctgctcatgcggcaccatgtcccccatcagcagggaaccacgaggccaagaggtcaagggtcttgctgggaggcacagcattggtgtggaagaaagcaggccctgactcacagcctcatgccgcagtgccaaagctctgcagcctgcagcagacatgattgtgacacccgagctctccaaatatgacagtcaccagggaccctccaggcgtctgccgtccctcggggcagggcggggctgcaagtgtccaggctccctcatcctctcccatttgttcgtcctcagagccttcagacaaagacccagagccttcaaacagccagatacctgcgggcatcaa

SEQ ID NO: 158137 - DNA, 127 bp, Homo sapiens
taggcgaggccctaaatcttgtagagcacctcacacattctcaaggtcatttgccttgtttccttgtttaatgacagttgcctaagatccaggaatgagtctgtgacctgacctcagcaactctgaa

SEQ ID NO: 158138 - DNA, 193 bp, Homo sapiens
cttatatggccactctgttgactgagatgtaatctaatgaaatgagatttgtctgtcttccccacactcagcctgctttggtacaagtcacaggaggcctttgactgctcataggagaatctctgctgatacacagtctttcattgacaaatatcaatcactgtatttgcaccatatccaatgactagagtgg

SEQ ID NO: 158139 - DNA, 406 bp, Homo sapiens
taatagccatagactcaatattttatcttagggaagtcattcctcaggcccctacgactccatctcacctctcagactcccatgactctttcttacatctcattatgttaaatttaactggctctctgtttcccactatatgctgctctttccatcctaggaagcagacgtcagtcagttctcaacatctagcatttgccacaaacattggtttcataataggtcaacaagtatgttgacctatataaccttgctaagaattttagggaaaggatgagattcctaatttgtagtctcccttcatccataattggtgcccgagagaataggaccctaaaatgattgggattgcagggcattagtgagattgggcatgttttataagaacccatggaacagttatctc

SEQ ID NO: 158140 - DNA, 236 bp, Homo sapiens
ttctgatgttatattgcagagtttttatggtttcaggtcttagattttaagtctttgatccattttgagttggcttttgtttaaggtgtgagagatgatgatccagttttattcttctacacgtggcttgccaattatcccagcagcatttgttgaatagggtgtccttttcccactttatgtttttgtttgctttgttgaagatcagttggctgtaactgtttggttttatttct

SEQ ID NO: 158141 - DNA, 358 bp, Homo sapiens
tgatgaatgcttttgcatgagcagatttccaacacgggaggggacttcatgagagatgccccacttccgagagggtgttgtctcaggggtggcattctcaatcctgacaggactaggacttctgagcaagcatccctgctcctcggccagcagttcttgcttacatggttggttacagccccttgcgggagctctgcttgccacaggagcaaatacaacttggcaacatcagatcccccaaaagctatttgttttggttaagagggaggactttgggtaaattagagagggaggaaaacccacagacggtgatttgacataccgagagcagagcacaggaccaccagccaatgaagtc

SEQ ID NO: 158142 - DNA, 608 bp, Homo sapiens
atgaaataatgaaatttaaaaatatgtattataaattaaactatatacttactattctcattataataaaatcctagggataaggaactagtattgcaagggcaccattcccgttttttattattattcctagctggaattttattcctcaaggcttagctctaagtgactatataatgaatactgactggcaaaactattgggattctaatttaagaatcatcagattctgcacaagaaatcttgaagcatgtcatcagtaacatgtggagaagctgtctaaaaaggcatgcctttcttttaaatgtccatgagccctggatccacagattatgagacatgaaggatcacgcatgctcaaacagggcttatttaggtgtcatctatagaggggctgctctcttcagctgcccgtcccggacccgggaattatgtctacagttttcagtttccacatgtctttgcggcaatgctaccatgaattattttacttgggactttagattaaccacaaaagaaactaattgaaaataactaagatcattctgtcatgtgagccacagtttactacagtcaacttaagcacaattatatatgataaactatag

SEQ ID NO: 158143 - DNA, 559 bp, Homo sapiens
  misc_feature (192)..(192): n is a, c, g, or t
agaggatgcagagaacccaggagtttaagaccagccacaacaacatagtgagattccatctctacaaacaattttaaaaatgagccagccacggtggcgcgtacctgtagtcccaactgcttgggaggctgaggcaggagaaccacttgaaccctggaggcagaggttgcagtgtgcggagatcacaccatngctctccggtctgggcaaaagagagagactccatcacaaaaaaaaataaaataaaataaaataaagttggttccatggatccagcatccccttttaacaactaaatcctttttccctacctcctcttttgcctgggggtgctggaatccccccactgcctcctgttctgggccagtacttgatttacagagctcataaatccaggccatgctcgggggaaaaaagcaccatgattctgaccttaaaatcaaggtttggctgggcggagtggctcacacctgtaatcccagcacttcgggaggccgaggcaggtggatcacctgaggtcagaagttcgagaccaacctgtccaacatggtgaaaccta

SEQ ID NO: 158144 - DNA, 293 bp, Homo sapiens
gttggcggagtgaagccagagagtgtgggctctctgagtggccaggaaaggcagccacctggaagggctggcagaagctccacagaggactgagaatccgaagtatttgagacaggtgtcaatcagttagaaagcttattttgccaaggttaaggacatgtctgtgacacagcctcaggaggtcctgacaacatgtacccaaggtggttggggcacagcttgcttttatacattttagggagacgtgagatataaatgaatatgtgtaagacggtcacaggtagagacaaatg

SEQ ID NO: 158145 - DNA, 171 bp, Homo sapiens
gctggtttaatctggaagaggctcactaattcagtaaagggatgggtcaaaactaaattcataaatgttcttacttccaaacagcttctcttctagggctccatatctcatcttcccatcagtcattcaaactaaaactctctggctcagtgtcatcgtgggtcccactct

SEQ ID NO: 158146 - DNA, 339 bp, Homo sapiens
tcttgcaagagtgaggtggtatcacattgtggtttcgatttgcatttccctgataattgatgatgctgagcattttcccatatgcttgttggctatttgtatatcttcttttgataattgtctaaaagtgggctaatgtccttagcccattttttgatgggattgtttttttcttgctgatttgtttgagttctttgtagattctatatattagttctttgtaggatgtatagattgtgaagattttctcccactctactgattatttcttttgctgtgtagaagccttttagtttaattaagtctcatctatttatcatttttgttgcatttgctttc

SEQ ID NO: 158147 - DNA, 691 bp, Homo sapiens
gcattgtttttagtcaactggtagtaaaaaggaaatcattgtgatcattactttttgtttctattgctggccttcatgatgtcttcatacactgaaacccattcccttcaactcttgaggtacatacccctcttatttagagttcatggcactctcaatctctaattactgctttgttgttttctagcttgctctgtctttcttctcaagctctgcaggtaagatttaagtgaagcatcagtgaactaaatttagcgccgtggagttgtgaagtaagtgttactggcagagctgaatcatcattctttggacattctcctactcttcactaacttagcattttttttttcaaagcaggttctgttttaaaaaaaataagctagatttatttgcatgattctttggagaaagagccttattttaggagtgaattgtacgtggtaaagaaaagaagggagaaatggatgaaggggaaagagatgtggggtgattagttatctcaatatcccttcgacaataccgtgatccttgttttctcagcctgagttttcatcttgataggaaactagtactttatttttctgtatcatagttaaatggaatatatctataaatagttttttccttgatagtggtaggagacatttcaagagcttactttgcattaacctcactagttttcttctagctt

SEQ ID NO: 158148 - DNA, 247 bp, Homo sapiens
ctattaagcacccagtaggtggtttaaattgaatggaaccagaagcagaactttggccaaagagatggggacaaaggaatgagagcaaaggtgaaaaaggcaaaatgtcaaacaatatcattcttttggataaaaatgtggtcttttcccttgcaatgaggtaatgctaaggaagttttttccccacagtctgcatatgcttagtacagttaaaattaaatcatcgtaaaatagaaactacaactag

SEQ ID NO: 158149 - DNA, 131 bp, Homo sapiens
cacgcagcttgagcaccccagccgatggccgcgtcccgggctttgtggccccgtccccagcgtcgcggagcagcgggtttgcagggtgtcaactctggggacgtgcgtgcgtgtgtgtgattgttggggag

SEQ ID NO: 158150 - DNA, 256 bp, Homo sapiens
atagatgtggggggaccctggatccagggaggagctctggtagggagggttggggtgaagccctggttcctgcctttctctgactgcccctgacttagctattgattccctgccatttctccttcctctggccctacctaccttatagggatggtgagatagcacagcagaaatattctgagctcacgaaaggaatgccgtcacttagatctgagaggtactatacccctttcaaagaagatcccacatgggaaga

SEQ ID NO: 158151 - DNA, 624 bp, Homo sapiens
tgagagacactctgctagatgctggggccataagagtgaaaataatagtctctgccccagaggggctcaggtctggctccttgatacatttcacagatgaggaaactgaggcactgaactttctggtttctttctctgggctggttatgctgtactcccttcactgagtattttcctcccttcatgaattttcaagagtttcactcttgttgcccaggctggagtgcaatggcgtgatctcggctcactgcaacctccaactcccaggttcaagcgattctcctgcctcagcctcccgagtagctgggattacaggtgcccgccacaatgcctggctaactttttgtattttttgtacagacagggtttcaccatgttggcaggtttgtctccaactcccgacctcaggtgatccacctaccttggcctcccaaagtgctgggattacaggcgtgagccaccgcgcccagctgcacaaaagtttttaagtttgatgtagacccacttgtctattttttgcttttgtttcctgccaagagagaatcttacatcatgtgacataatcatgggagtaacatcctatcacttataccatatcggtcagaatcaagtcacaggtcctgt

SEQ ID NO: 158152 - DNA, 130 bp, Homo sapiens
aaaataaaatcgaggatctagtcctcactgtaaattcagggcttagccattatatcagtggcttctaaacgttttctctcctgaacacttaagtcgcttcccacggttttaggaattgatgccacaaaag

SEQ ID NO: 158153 - DNA, 162 bp, Homo sapiens
tctgcatttggctattgtagattttactgtattgagcagcctaaaacataaatttttgtcttagttcctgattttcttttttctgcaacactaattcctacaagtggaacatttgggtcaaagcacacaccttttttttttcttttaatagccattccttag

SEQ ID NO: 158154 - DNA, 253 bp, Homo sapiens
ggcgtctctcaccttcaccttcctgagccatagacttaggggacttcagatatgtcccacaagtccttgtccatgtcacatgagcactgaagaaaatacttctttctgctttctggtctgtgattccctttgataatgtcatggaaatttgttcaaggtttttagtacttgtattttcctgagcatatactttattttctgtggtttcattgaggatattaactaaaaattgcttcatttggggaggcataag

SEQ ID NO: 158155 - DNA, 412 bp, Homo sapiens
ctgagacagacaaaagtcatgaagtgtcacaccacattcaggagaaagtgaggcgttcagtatgactggactacagggtagactggaagacaaatggggcccaaccataaagcagcctgaacaagctagggacatgttccctagatttgagacttgatcttccagttaactcgaagatagcctgcctctagtgttcccacaatagaatggcataactctattgtggcctttatcgtactctactgcaatgtttatctttctgcaccatccactttgctgtgatctctttaaagacaggaaatcttgtcttgttcattttccagggcactaagcataccaacttacatggcacatattcttttttttttaaatcccccaagacggaatttcgctcttgttgctcaggctggag

SEQ ID NO: 158156 - DNA, 642 bp, Homo sapiens
cttggatgtgtgtgtgtgtgtgtatatgtgagagagagagagagaatgagagagagagaatgcttaagatgtactctcatagcaaatttcaagtatacagaacaatatttttaagtataattctcacactgtacattagaacctcaaattgtattcatcttattactgaaggtttgcaccctttgcccaccatctcttcatttcccacagctccagtccatggcaaccaccattctactctgtttctatgagatcacaatggcagtatttccttcattttatgactcaataatattctattgtacatacataacacattttttatccattgataaaatccaatccaatgttcatccatccaatgaacatgagagtgtagatatctctttaagatactgatttccgtgacttcagagctatactcagacttgggattgctggattatatagaagttttatttttagttttgtaaggaacctccatactgttttctatagtagctataccaatttacattcccaccaaaaatttgagacagttttcatttatccacatttttgccaacgcttggtatcttttgatattttttattagagacatcctaacagatgtgagattatctctcattgtggttttgattt

SEQ ID NO: 158157 - DNA, 478 bp, Homo sapiens
ccttttttctgtgtcttcatcaacacatgttatcttttatcattttgataaaagccattctaacaggtgtgaggtgatacctcattgtggttttaatttgcatttacttagtgattactgatcctgagcattttttaatgaacctgttagccatttgtatgccttcttttgagaagtgtctgttctagtcatttgcccattttttaatcattacttgttttcttgctaatgagttgtttggattcctcatatattttggattttaactccttatcagatgtatagtttgaaaatattttttcccattctgtgggtctgttcactttgttgtttttgtttttttgtttgtttttgtttttgttttgctatgcataaactttttagttttatgcaatcccatttgtttatttttttttggttccttttttttttttgggaaccagagttgggtccttattggcccaggctgttgtccaag

SEQ ID NO: 158158 - DNA, 323 bp, Homo sapiens
atagtggcatttactgagatgggggttctgcagaaaatacaccttgaaaggggaataaaaagttagttatgttttgtcccagaatcacagcaataataaattagtcttaatgcattaagttttggggtggtttaataggcagaaatcgatcactgaaacattctagtaagtactgtttccttgatttcaggatgcttttgatggagtaatgagcgtcaattaaatgcacacatcaaatgaaaaacacatcacgattttagaaacctacttaatatcttctttagagaaatgtctattaaagtccttagcccactttttaatca

SEQ ID NO: 158159 - DNA, 1296 bp, Homo sapiens
gtgaggcgggaggatcacttgactcctgggttacagtgagctctaattgccactgcacttcagcctgggccacagagtgagaccttttctcaaaataaaataaaataaaatataaccttttgggcaggcatggaaaggggctggagagaataagaggaaacagagataagccccctccctgggagcacaagggactcatccccagacatggcaccacaggcaaacagacactgtcacaaaactagcatattctctttcctagaagtcctttgttttccccaagtgccctttcccccaaccttttgttggtttacgagctctcaattctaacctcctagtacacgaataaaaatgtctatcggggtggtggcgtgagcctgtagtcccaggtacttgagaggcagaggtgggaggatcctctgaccataagagttcctgaccagcctgtgcaatactgactccatctcaaacaaaaaacagaaagctatacaactccgtttctcttgctaatttgtcttttgtcagtttaatttgcaggccccagatgctgaatctaagagggcagaggaaaagcttttcctccctgacataaccatccaggagaaagtctggaatggagggtcagaggggtagggaatggagttaggagaagtagatagattcaggacagtctttggagaatgtacatcactgaggtcaagatgtcctagggaatggcccttctgggttcacaattctgcttccgtcggttaacagcaacttagtcccttctatgcctgtggggataatcagtcaggataggctggattatgctgctctaacaaccccaaatttctctgatctaataaaagtatactcaaagctgtatacccttcaagggtcccctggggtctctgctcattgtagttcctgccctggctacaggcataaccatgtggaaatcaaaggctttcttggcaaagagaaagagagctctagaagctttagcactggcaaataaataaatgcttggcgtataggtgatatatggctcttctggctcaggtccttggccagaattaatcacatggtctcacctcaagggaacaggtgagttaaatgcagaaaaatattcaagctgggtgaggtggctcacgcctctaatcccagcactttaggaggccgaggcgggaggatcgcttgagcccaagaagatcatggttgccgtgatccatgatcataccacggcactccagactggggaccaaagtgagaccttgtctctaaaaattaaaatatttagaatgtttcctagca

SEQ ID NO: 158160 - DNA, 368 bp, Homo sapiens
gctttgtactaatccttggtcattcagtaatgtataaaacgtgattcttgcccacaatcacacaacaaatgatataatccctttgccaatttatgtttcttcctgtccctgtggacctcgaaagctacacacacacatacatttcacttcgttatcaaaaccaatcccatcattgtttgttcttctcctctacagtcatcctaccggtaaccttcatctcattaatcgcctgtctgtggcccctaccccagcccctaattcctttctattctctggagggccaattgcccttccttttaaccttctggttccctggctacttccttcttacgtcccttttcttgtttatccagcgggggtgcgggtct

SEQ ID NO: 158161 - DNA, 536 bp, Homo sapiens
ttctagctcggtaccccacaccacctgagtcaaggagtgactttcattttaatggcaggctccccctggcttctgggcagagaatagcatgtatgggtgtattcctctggggtcacactgctgtaaagaactgcctgacactgagtaatttacaaaggaaagaggtttaactgactcacagttcagcatggctggggaggcctcatgaaacttaacaatcatggtggacggcgaaggagaagcaaggcacctttttcacaaggctgcaggaaagagaagtgccaatcgaagggagaagagccccttctaaaaccatcagatctcatgagaacacactcactatcataaaagcatgggggaactgcccccatgatccaattacctccacctggtctctccctcgatacgtgcggactatatggattatggggattacaattcaagatgagatttgggtggagacacaaagcctaaccatatcactatgtaaccttaaccagagaatttctccaagcctcagttgactttttgtaaaa

SEQ ID NO: 158162 - DNA, 265 bp, Homo sapiens
agcttgtttattgcatctggcctgcaaacaaaattaattgacacacatgctttattccagattgtggtgctattacatgtattgtcattattatgattttagccataagtgtttggtttgaggcagaagtagtgggatattgctgtcaagtaaactggggccactaaccttgtgggaatcaacttagcattttaaaattatagactcgaggtttttagaagaagctgaagggttctgtatgctgcatggaagattgagttcaaat

SEQ ID NO: 158163 - DNA, 443 bp, Homo sapiens
gcatgaaggtgagatctaagcttactaattagatcgaatgcagtttgacttaaagagcagacttgataattaaagaatttcataccaaatatacattttgaaaacatttcttttcacatccttgaggtaaaatgagttttcctgaattttttcccttcttttcaaatagaaatttctcttacagaaagatgatcaaatcttgtatcgcttgttagaaaatgacaaacctctcatttgtttgtcatttagccaacatcctgtgttcaggttattctaattttttttcccatccaagtagaattttgaattgcacggaacgttgtgatgaacacaagttgttgtgtcttgtgtttttccccccaccaagttgtttgatgctgttgaaatggaaggctgaagtagaaggggcacttaagcagtgaagggtttttctttgtaaataa

SEQ ID NO: 158164 - DNA, 370 bp, Homo sapiens
tcccgccagtaagggtgtgccaatcaagagagcttagcgtgtaaaccgccatttcgcctctcatctaaatcatgatttttttgtaaatgtgtgacattcccttgtgcattctcaactgaaatgctatacaggtgatgctgtgtctttcttagggtactacatctgcaggcacatgatggccttttgctcctcattggtgagatgaactctcattaactggactgtccactgtctctgctgtatagtcactattttcctcattgcaattgatacctgctcagtaggaagacctcttgagatatgcaaatatcctgctcctcatcaaactctcaaaatctctctcctcctcaatgcatgcaaaactcttctt

SEQ ID NO: 158165 - DNA, 585 bp, Homo sapiens
cccttgaccccaggaggtcaaggctgcagtgagccgattgtgccactgcaccccagcccgggcaacagagcaaaaccttgtctcaataataattataatgttggcctttccaataggtgtgttgtggtatctcatcatggttttaatttactgaagctgttcttttactaggactccctgcatctgctcttgttctcctatagcctgttctgcttacagaagctggagtgagcctttatctcctcatctcacttggacgaggagccacagtccttacagcagcacagtggcaggcaaatggggccatgcacactcacagagacacaaacgcacacaagtgcgcacacacacagatgcatgcacacacacacagacacatggacacacgtgcacacgcacagagacacacagatgtacgtacacacacgtgcacacagcggcaggcagatggggccatgcacacgcacagagacacatgtgcatgcacacagatgcacacgcaaacatgtgcacacgcatgagacacacacgcatacatgcacgcacacacagacgtgcacacagcggcaggcaaatggggccata

SEQ ID NO: 158166 - DNA, 577 bp, Homo sapiens
ctgatgttccatctgttagtaggataccaatccatggctcctcactttctaggagtctcagaggagacagtaggccctggagacacccatgatacaaaaccagagcgagatgaagacgctccactcacctctcccctcattcttgcccagaaaatttgctctatcttccccattttttaccctgcccacattacccaccacaattagacaaaaggcctcaagaagtctgcagaggggcaggatgagggcaggggtcagctttcctctttcagttgttttctgattactttagacttggtccagccaggaagaatccgtcactctcagcaggcagtgggtggggagaggtaccagcagacttagaagtatatatggaatgtattaaaccgtggtgcaaaaagaaaggcctgagaagctaaaccaaagagggagatgcagttgcacaaagttaggggattgaaaagcccccaagtaacagaaggtgcaacatagtaagaattttaaaggtgataaaggtaacttgctgtcaaaaaggcagatattactaaagaaacaagtgaaattgattcctttctca

SEQ ID NO: 158167 - DNA, 474 bp, Homo sapiens
tttccaaatgaggtcacgatcacaggcacagcgttggtgggtaaatgttcaacatatccttttggggaacatagttcaacccgtaataatcatcaagggcagcctagatcacaaataggaagacataagactttattttctggcagagcataccacctattggcaaagaattagacataaatcagagtaagtctagatctacctaccaatttacaggaagtagagagtacaaaaaggcatgttaaaaaataccacaggcagtagaatcagcaagatccagaatgtgggaaactctacaggactaataacttggtttcttcaacaaataaattgcaaggaaattccaggagagagctctgtaaattataataaaatggacataatagacgtaacaaccaaatacaatatatagattttgtttgaaaatttgaatacttactagatatttaataaaataatggcttatcgacagtt

SEQ ID NO: 158168 - DNA, 283 bp, Homo sapiens
aattctgataagcccagtcatacatgaaagtcacccaggagcatccttctctctgtcagtgaaagtcaagagcatgccttatagatactcaatgcgggcacttgatacactctttgcagctgaatcctggcacgtgcaattattaatggtatggctactagtatacctcttgcataaaactatatttgacagcaattcacctacaaagaaacaacacctcagccaaaacaggcacacatggtggtgacattcaccccattatcaatcacttttgtggcactat

SEQ ID NO: 158169 - DNA, 496 bp, Homo sapiens
cccttagagttatgaaccacatagcacatggttggtacatgcttggaaaagttactctggggctaagttcaatttcctcacctgtgaagttaagaccaaattaccttacagttatataggaatttgtagttttcacagggttttggcttgttgcctctcaggtgagttttacaggaaccccgataggcgggcagggaaggtgtcagcgccctgttttatagttgtggatttcttaacagttaaagagatcacatgaaacactgtaaaaacagcaaaagtatcaatacgactctaagatgagcatgaatccccacgttcctagtccttctgggaggctatacttaaaaagagtgacaatcacaatggctgggtgattaaataagtcaattactggaataaaaggtttttaaaagactaaacataaaaggaagcaaatgaaagtcgacctttctaaaagcatagtcagaatttaagtacatgcatagaaaaatatcta

SEQ ID NO: 158170 - DNA, 415 bp, Homo sapiens
tttgcttattcactgagtatttgagcactgctgtgtgacaaacatggtggtaggcactaagttctggtcacagagctgataaagagcagtgttaggattgactgaaagtcagctgtgtctgatgccggagactcagcacaatccatttctccccggaggcagtgggctactcatgcttcgccctccattttgctctctgatctcagaccagtttctcctcttcccatttctatagctgggatgagagaccacaagggatacagaaaagggcacagatgagttggggaggggagcaggtatctgagtcaaggtccctggacaccactactgccatgggagaagagcatcttaggcccctgaaagtgaggtccccaacgttatccctaggaatgcatttcatgagtacagggcaatc

SEQ ID NO: 158171 - DNA, 220 bp, Homo sapiens
tgaatattgagcagttcaactcacaaaaacacacatagtctttaagaggttgtcaattctcagatgatcaatttttttcattttgtctgaggggtggtgcactttcatttgatagttaatgggagtataatataatgcattatctcacagccaaatattggttctaagtttactttgatacttcaggttaaagaatactaaactgcaaatataaaacagt

SEQ ID NO: 158172 - DNA, 194 bp, Homo sapiens
cacattactgccccaaattcatatgggatatattgcaagctctctctaggctctgtccatctccactgaagtgacaatacaagaagggcctgtaagcactcttggtctcaagattgattctcttgaagccaccctccccacttcctgggcttggggaaaaccctcactgttctccccatgaggagaggaagtgg

SEQ ID NO: 158173 - DNA, 459 bp, Homo sapiens
cttttacaatacaaaccgaggtctgtaaactaagtctgtcattctccatggttaagatatgtcattacctaagatatatactgtagaatagaatcattcttacaatacggtaaaaaatcataactttgcatatactctcatatggtatgactgtgtccccacccaaatttcatcttgaattgtagctcccataatccccacttatcatgggagatacctggtgggaagtaattgaatctgggaggcagagatctctccctcccagcctttctgttatgaatctatgagaatcaattctgggcagatgaaaaaattctacaattgttatttttaactactacttgactatacttaaaacccaatgctgttgcatttctactgccattttactacttcctgagttcccacttcagtagttctcaatcttcactatctctaagtaggataaattagaaatca

SEQ ID NO: 158174 - DNA, 157 bp, Homo sapiens
tgctgggattataggtgtaagccaccacccccagcccattaataggttcttgggacaggaaaagcatcacgcataagctgagtatgtgacattcacagttataattatcaagacgaaaagatgtagggagaccaaattttgaggaaggtggaccaac

SEQ ID NO: 158175 - DNA, 363 bp, Homo sapiens
attgtattcgaggggagcaaggaggccagtgtgagcagctggggcagagtaacaagaatgaagtgatagaagatgagtgaagaaacaatgggggggatgtaagctcaggtgggaccaatgaggccatggtaaggatctaggctgctctgatgaaggagatagaaagccatgtgaggatttgagtaaaaaaagagaacacatcctgatgttcattctaaaatgatcttctggttcagtgtgagagtaccctataagaggtttgagggtaaaagtaaaggaaccaattacgaggtgattgtaataatcccaacaaaaagcaatggtggtggctcaggatggtggcagtcggggagatgagaagtg

SEQ ID NO: 158176 - DNA, 494 bp, Homo sapiens
gatatcgtacagaggctgggaaggacagcagagaggcagatagagatcggttacaaatacaaaattacagcaagtaaaattccattgaataagtgtagtgttctgtggcactgcagaatgagtacaatggcaataatacattttatattttcaaatagctagaaaagcagactgtgaatgtttctaaacacaaagaaatgataaatgattgagatggatatgctaattaccctgatttgatcattactcttagcacacatgtattgaaatatcacaccaaaccccataaacattgtcaattaaaaaacaataaaagaaacagaaaggcaacatgtgtctgtaggtaaagatgaaggcattgcctataaaccggaacaatataaagatggcactgactggagagcactcatttgtacattcataagtgctcatgatatccttgtgagcacttgtctctcctttggccctccatgcacatgattctcatgagaagg

SEQ ID NO: 158177 - DNA, 242 bp, Homo sapiens
ttccatgaaatttctaaattatccaaaccacatcagtcacatattcctgtaaattacattattattactgtccattaccaaataatttagcaattaattaacttctaaggttttttttttttcttccctttcatttttatctccagtgctttggtctttttttccccaggttttcccggggggggcccccccaggggcagggggtccttttagggtcaccctgcgggcttccagtttgggcc

SEQ ID NO: 158178 - DNA, 425 bp, Homo sapiens
gtttctcctttacatattcttttcaccccagcatcagccaacacctggtcactgggcctaaccactcctctctttttcccactgccttagttgagctgccagtatctcccttcccaccagcccctaatgcataagtggattttttcaaccctatgccagtcctgcttaaaacacgtgaatggctccttctcatcactgaatactggatggctcctctcagcctggctatggtagactgagatatataatggcctccaaggatatccaggtcctagttcctagaacctgtgaatattactatatatggtaaaaggaactgtgcagatgtgattaggattttcaaacagaaaaattatcctggattatccaggtgggccctaaatgcaatcacaagtgtctttataagaggtagacaaagggagcta

SEQ ID NO: 158179 - DNA, 290 bp, Homo sapiens
caggctctggggtggggggtctgtgagtcagccacggctctgcccacgtctccccacgaagcttcgagccacgcagagcagcacgttttgcagtacgccatcttttccaaaagccaccacctctcggcagcatcattaacccaaggcaggctgtggcctcagaagccccggctgtcctccacctggaactggacacagctgtccctgctgagcttcagcagccagggagccacaagtggagaggcacctgcgtgagccccccaggaaggctactggtgacacccagacag

SEQ ID NO: 158180 - DNA, 373 bp, Homo sapiens
aggtaatctgcccacctcgtcctccccaagtgctgcgattacaggtgtgagccactgcgcctggccaagtttccttactcttacctgaacagtatctcatttcctcattatctgaaaaattttgctttaaatctgggtccaaacaatcttcatgtgctaactttggttgttatgcctcttttaatcaaaactggcctctgcttactatttttatttcccatttcatgaattctttgtggaaagttatttcttttaaaacagcatactcatgaggttgaaggggtaaagaacattgatcttgtggttgcagtgtggatgaaaattcagcctgaaatatgcctgtttgcagcagccagtggaggagggttattaa

SEQ ID NO: 158181 - DNA, 234 bp, Homo sapiens
cacaccaggcgagcccaagccctactaacaatcagcaggtagggacatcagcaagagatccctcagcccagaagcactctccttccccatcaggcggacctgagacacccctcccacaaactagacacaccctgcaccaagggaatccagcaagtgggaccaccatcaccagcacctggcctaggaggcactctccttccccactggtcacgggactcctctccccactgaggg

SEQ ID NO: 158182 - DNA, 562 bp, Homo sapiens
catccctggggggcaggaggtgggtctgagcagaaaaccacaagcctgtgggaggagggaagtgttctcccactacaccagagtgggctgaggcctgggagcacctgccaggagcctcctgatgggatggatgctcttttcctcatccccttctacttgctggagagaacagtagcttcagaggcagaacatggtttgatgggggaagggagggatgggtgaccagcgggaggaaagaagctgaatttagggagggaagctggtctgtaaagcatagcctcagagccggcaaagcagaaatactgctgactctcctggctgttcacggaccggaggggagaaagttaagagtttgcacttactccacttgcaaaagcattcaactacagaggcggagggacggaggcctgggttcaaatcctgccctgccaactctccacatcgttgcagtgctttatgctgcgattttaggccaactgtttacaaaagcaatgaatgaatgtctacaggcagcgctcaaggagtaattttagttttgtgtgtgtgtgtgtgtgtgtgtgtg

SEQ ID NO: 158183 - DNA, 283 bp, Homo sapiens
caccgtgcccggccccaaagtcactttcctacaaggcccagatcctgattagggtgcacctgaggagagggggagggggcagttctgcctgggagataagaaaacttttgggaggagatgacactggacttggggcttaaggagaggagtgagggtaggctgtgggggatgctagggaaaggcccccagtagagggaagagtgtcagtgacagcccagagacacggaggaaggatgcctgaggaatacaaagggtacacatagacagcgcttgcgtgtgcctg

SEQ ID NO: 158184 - DNA, 118 bp, Homo sapiens
acacagagagaaggggtggggggtgcttgccccccaggaaagtggagagaaaagagagggtagagacacggagagaaggggtgacatgagcagccctgggctgcaatgtgggtgagca

SEQ ID NO: 158185 - DNA, 470 bp, Homo sapiens
cacccactccccacctctccctgctgtccccaacaacggaggttcatttgactctgtgagtatgccatttcctttgggacctttggcttctaacccttgtctaaactctgtagccctggaaccctctctcctgtttgagtgtagactcagcttctattcctcatatgttatagtttgggttgcctaagcctctgagttttgtcacaacttgccgattggttttgcaagagggttaaaatagcttttttctgtttcatagtaaaactggaattctccatcatattttaagtctttgtattttaaatatggaagagtccaaattttgggaagtgtcatgttgcaacgtgtgtgatatttggtattctctattggcatttttttggcatttcaagggtttttttaaatacataattgtatatgggttattctttataacttagattatcaaataaaatgttttgatatgaaga

SEQ ID NO: 158186 - DNA, 310 bp, Homo sapiens
aatttaggctcaagcaggctgacatgtcttactcagattaccagagccaactgacccactgaaatcctgaaacagaccctcctacctaagccctggccctgggcttagcagagacagctcagctccatggtgaccaataggtaaagctgtgtctaggcgctcagggtctgaaagacctgtcaagttagaaggtcatcacttacagatgtggggatggcacttcagagagtgggggactgaccagggccacagtgggaagcacccagcccttgcagtcatgcactaacaaggagacactggagaggaaaag

SEQ ID NO: 158187 - DNA, 209 bp, Homo sapiens
aatatcagtaagtattggtggtgttcctgtatacaaccctgaaaatggaccataagtaatagaatatttaattgtatcatcatttattaggcacgtgagtccttctaaatattgaagtcagtctccctattcccaaataaatgttccaagggtcactctttcattcacagatttgtgcatttatccacttaccctaagtttactgagca

SEQ ID NO: 158188 - DNA, 545 bp, Homo sapiens
gcccgttgtctaaataacagtcagtcttcataaaccaagctcagactacgttttaaaccagtaggactatttgccaaattgtatcttttaaatatatcttaatatttacttcacatattcaaaagagaatttgtatcaaacccattaattaaaataaattgtgaatgtaatttggccggcttgccacatttataggattaccattctattaaacaagttcttctcaggatcaattagctccagcaaaaagaaaagatacttataatttatatgatggagactaagccaatacaaaaataaattataaaagcactactggggaggctgaggcaggagaatcgcttgaacccgggaggtggaagttgcagtgagccaagattgcaccattgcactccagcctgtgcaataagagcgaaactccgtctcaaaaaaataagataagagttggggctgggcatggtggcgcaagcctgtggtcctagctactctggaggctaagtcgagcggatcccttgtccaggagtttgagactagattgggaaaca

SEQ ID NO: 158189 - DNA, 357 bp, Homo sapiens
ttttttacttcatgatctaggaccctgctattcaaaatgtagttcccaggcagttaacagcattaaggcaaattctcagcccccaacctacatctactactttagaatctcaattttaagaagatcccagggtattcctatgaattttaatgtttagaagtcactgctctggaacttgatcagtttttgtaaagcttatagattacaacagtgtttttattttaaaagcttatctgtttatgaggtaaaattttctctctaataatgtattttggcaagttgtcgtgttgaacctctatgtgctttttattttgagaaatctgaaggagatgttaaattttccagtatgattctaca

SEQ ID NO: 158190 - DNA, 379 bp, Homo sapiens
cacccggggctcctccatccactatctgggactcctccatcatccctcacccggggctcctccatcatccctcacccggggctcctccatccctcatccagggatcctccgtcatccctctcctgggatttctccgtccctcacctggggctcctccgtccctcatctgaggctcctccgtccctcacccagggctcttccatcatccctcacccagggctcttccatcatccctcaaccagggctcctctgtcatccctcacccagggctcctccgtcatccctcacccagggctcttccatcatccctcacccagggctcccggagggttaagggctcccggagggttaagggctcccggaggttaagggctcccgg

SEQ ID NO: 158191 - DNA, 232 bp, Homo sapiens
cctcagcctcccaagtagctgggactacacgcttgcaccaccatgcccaccttatatttacttaaaaaaaacaaacaaaaacaaaaaacaaaacctactatattctgaaataattttagatttacggaatggttgcaaaaacagtacgggaagttcccttcattcatcctgccctgatgttgacatcttataaccatagtcattcatcaaaacttccttattactggtgaaa

SEQ ID NO: 158192 - DNA, 214 bp, Homo sapiens
aaattttcaacattgctgtgttaatgtctcctgagataattagatgtgaataatttttataaacagaatttcctgggtggaatttctcatcttcaggagctccataaataaccgtgtcccaagagaactgtgaatttgggaactgcaggaactgagtcccaactcgtccagcctggaagtttttgggtgatcattcttgcaggtgacttcactg

SEQ ID NO: 158193 - DNA, 457 bp, Homo sapiens
ggttgtacaaagtgatcataaagaatggagaatagggaaaaaataagaaaaaaaaaagtgccagtttgtgtatgtcatagacatcatactaaagcccaattcagtaaaagctgttggtggatggaaactagaatgactatggcttttgagttccacctctgcttttcaagtcaacagcccctctttggtttcctcatttgtaaatcacagataatggtcaattttacctctcccaactggtttgtagaaaatgaaatgacataaactttcagagatgttactaggcttcaaatttaatttgcttgaagtaaatgttgataaaatacatgcagccatccctagataaaattacataataaagctggttatcttgttcccaggagaacactgtcattttcgcatcacccactggtaccgcagatacattcctaatttaggacaaaacagacttagttta

SEQ ID NO: 158194 - DNA, 410 bp, Homo sapiens
aattctccaccaggaaggagcagtgatttttgaataataatggcatctatttacatgtatcaaattttatttctttgctttccgggattacctgggagcatctggtgactgtgttcccagtgacttgaagtagcttgagggaataaagctagttgtaggcagagaaacgagagacaagaaaatgtcctggcagctttaatttgtttctcttctccctgaggctgtcctggttcctgaaattttcctttgtgtctgtaagctaataggagagtgtcatgatcagatgtgcattttagcaagattacttcagatgcaatatggagaatggggagaatgcattcgagtaaaagcaggaagaacagttagtgccttgtgtagaaagaatttttagtaatctgtttcagatatag

SEQ ID NO: 158195 - DNA, 311 bp, Homo sapiens
tcaccaccgcatgaatcacttccccctctggacttcagtttccccatttttaacatgagggcgttggactagactgtctctaggattccttccagcctatgctctgtgttgttttgatgtagtggcagatcccagattgatttacataaatttgcatgttcaatcagaaatcccaaactccaagtatagaaaatccaatcagtccattaatgcagccagactggggctcggggaacctgccaggttcgggtgagggttgtcgaaggagacagtgagagcggtggtgaactgggggagggggctgagaagca

SEQ ID NO: 158196 - DNA, 188 bp, Homo sapiens
ctccttcaggtatgagcatctttctctccacttcacctgtcccattgatgctcaatgttcctcactcacatttcacttctctgctcctagagagcagggttggcacgactgagggtcatgtccccaaagaccttgctcatacaatttaaataaacaaataaggctgggcaaagaggctcacacctgta

SEQ ID NO: 158197 - DNA, 417 bp, Homo sapiens
cagggtggacaaaagggaagcacaacaaaggatcaggagtaatggggggaatggtgctttaagatcttcactcagctggggctgcagagaaggggcagggaggacccagaaggagtgctttctaagaggtccagagaacaaggcctcctccagccttggctgatagctatatcccattacaatgcgcttcatctgtcagccatgacatattatattcacaatagtgaggctgtcatttccaatatgtcctttgctgagaactgagcacttactccatccagacagagatggataaggcaagccgcaagacaggcgaagcacacatcacagcctctgcctcccatcctagtggtctggggagatgatatcttatcgggctccctgactcaggtctttattaacctatgcaccacatct

SEQ ID NO: 158198 - DNA, 410 bp, Homo sapiens
ccttcagcacaagttaccagttttgacaacactcccggaattttggctttgcttcaattctggaatacacacctatgatagttgcctaagtgtaacacttcacatagttatatggctttaatgtaatcatcaataaacaatacaagatcaagaaagattagaatttattttctgttaagtcaggatttccggaaaccatagagtcagattggcagctctccacttctggttcccaacttccctgctcccatctttcccaattatttataattcagggcaaataagagtagaagaaaccatatccatctttctcttcttactttgtacctttgaagatcaggaaagatagaatttctaagtttgaaaacaggctaaattagaatcattctgtctatatttttaaaagacga

SEQ ID NO: 158199 - DNA, 385 bp, Homo sapiens
agaaatatgggactcattggaattttacctgttggcatttccacaccactctgtgaccaaagcctgccttcagggcaaagtagagaaaggaaatggaacaatattaaaacagaaactcacccctgtgtgttttgcttcagcaagtttttgaccctataacctattataaagtgaaatgaaaatgtggacacctgtgaagcggtccgagtgcaaaatttgtctagactttcaatttttttccccagtcttttagagttgtctcctacctaattcaacaacaattttagtggcttgcctttttgagtttttccagtgatttcagctgatcttctcagaattgctttcttcatctattttgcaagttaattgaattacctaatagcta

SEQ ID NO: 158200 - DNA, 507 bp, Homo sapiens
acccctgaggagacaggaggttcctatcatcatgggagatacaaagatgaattaaagtttcagccgctcaaagggctgccagtctggaactgggagccacggcgcccggaacagagtctatccctacacagaggacccagcaagcctcaagggaggggcaccatctgggttcccagtacacaattggctcgttgaatcacaaagttcacaagaaatagtggccacacaatctgaattttaaaagacaagtccaagttgcaaacattttctcctattgttataatagagtatgaagtgccccaaagaatccattattgtggcacctaaatgacctctcacagccaggtggatcacaaaaatctatgttataccacacgtcctaagcttgacttggggaaagaggatccccattatgctagacacacagatgccggctgcccccagcctcagcctcatgggtgtatgcaggtccacacagactaataccagacaagacaaagggtcacc

SEQ ID NO: 158201 - DNA, 321 bp, Homo sapiens
tgaaaggggaacctttggggtacgagtaagcattcctggaggcacctcatctggcctgcgtgctctagtgaggtcccgcgcacatgttttctggacctgaagttgtgacttgcctacaggtggggtttttctcttcacccccgtctccctctttctctataacccttgtgcatttctcttctactccttttctgccaggctcctttgggcctctggcccactcccctggcagatcttatcacacgcccctgtcgtttgcctgtggacttcctttctactttttcttgtctccctcaagcaccctccttcccttacttattc

SEQ ID NO: 158202 - DNA, 234 bp, Homo sapiens
caggtatgatcaggaagacgagctagtacccgttggagtttgtcacattgaccccgtctccctctttctctataacccttgtgcatttctcttctactccttttctgccaggctcctttgggcctctggcccactcccctggcagatcttatcacacgcccctgtcgtttgcctgtggacttcctttctactttttcttgtctccctcaagcaccctccttcccttacttattc

SEQ ID NO: 158203 - DNA, 402 bp, Homo sapiens
tgggccttggccctggcagtgactccctgcagccaggtcttcctggggagcccctccttccagcctgctgactgaatcgtctcttgatagagcaatgcaactagtgttaagagtcttggctgggcgcagttggctcacgcctgtaatcccagcactctgggaggccgaggcaggtggatcacttgaggtcaggagtttgagaccagcctggtcaacatggcgaaaccccatctctactaaaaatacaaaaattagccgggtgtggtggcgggtgcctgtaattccagctactcgggaagctgagtcaggagaatcgcttaaactgccaggaggcggaggttgcagtgagccgagatcgcgccactgtactccagcctgggccacagagtgagactctgtctc

SEQ ID NO: 158204 - DNA, 921 bp, Homo sapiens
tgctgggattacaggcttgaaccacctctcctggcccgaagaatgacttttaaccccaggaaacatagaaaattcatactctttccactttatcaagaaggagcatggacttggaataaaataggagttttcactacttactactagttgatgagcttgggcaagatactaaatacttctggtatataggtagtatacttatttataaaaagaggccattacctcagcaggtgttgaaaggattatatgataacttcaaggggaagagcaataatgcacaactttcttccccttcaagatgggattttcttctttcagataaggagaaacatttcctcctgctatctgtcctaaagccaagaaaggaccttaacacttctgattgatttatttatagattgacatgctctgtctccctgttgcttatctcaaaaggaagacatactccaaacttgatgaaaagaatgccttattggtcttttcagggttttgaggaattgggactgtgtaaatctggctcaattacatgcttccaccttttccaagttattttcaaatgatgggcaaagaggtgggggaatgccatagattgaaagtttggtgagaagctgctattttctttctttctttctttttcaagatggagtttcactcttattgcccaggctggagtgcaatggcgcaatctctgctcactgcaacctccacctcctgggttcaagcgattctcctgcctcagcctcccgggtagctaggattacaggcatctgccaccacgccaggctaatttttgtattttcagcagagacagcgtttcaccatgttgaccaggctagtctcaaactcctgacctggtgatccacccgcctcagcctcccaaagtgctgggattacaggcgtgagcaaccgcacctggccgag

SEQ ID NO: 158205 - DNA, 533 bp, Homo sapiens
ctgtgtttcacagggaagaaaggttggaaatagtattcccagaatagcatgaagatgtgccactaaaatgtcccttcaaacaattcatgatgaaattgtcctacattactcaaaatcgaagattctcttggggatgggggtggagagcaagagtttaagaactgtggtctcttgaatgctagataatctgtatttggccaggaaatctgaaatcacttcagtatggtaattgttctccaactttgaaagtgataaagtagaacactgaaaatgaaaccaaagcatgagggcaagagcaaaagctacagagaacgacgattcatgacagaaagagcctcttggggtataagggcaaatgagatgcctaggttgagagaagaggttgtagttttagtaagcaaaatgtgtgaggctcagagccaaacatcactgagtttgtcttaaagtctttgactattcctgaatctagacaggcagtctgtatttgtcgattatttacctttataaacaaaaggatacatcacacatcatcc

SEQ ID NO: 158206 - DNA, 214 bp, Homo sapiens
aaaagcatgttatttcaaaattacaatgccagactgtacgttattacccccaagaggaacactgtatatgctactattttatcacccaaattgctcatcgtgacataggtaaggaaagcaaagcatcattagataattgtgaaaattatagaaggaattcctgacagacaacttttttttttttttttttggggcccgggaaactccaccctaa

SEQ ID NO: 158207 - DNA, 265 bp, Homo sapiens
ttagcttatagaatactattaagcgtcttaactagacagttaaatggacttgaaagatcgtgtatttggtttccatagaaatttaagggtaaattttataacaacatatattttgtaacagtggtttggattattctgtcaaggtatcctaaagagagaaatagctgtgtctggcattacgtttggctgaaatgatacttaataccagtctgtctattagatactacgtgatgtcatgcttgcatgtgactgagagatgttgtac

SEQ ID NO: 158208 - DNA, 401 bp, Homo sapiens
cgtcgcgcttcatagcgcaatgggccaagtttcccctaacaacattctattatttcataagtaagatttaatcccctcttatctattacctacttttgctaaccttgctgcgtctcagttttctcatctaaaaaaaaaagttggacttgatctctaaggtctctttctgctcttaaaattctgtggatttgtatgtccttttgccatctgaagaaaggagtagatctataggattctacccaatttaagcactacatatgagaaatacaatttttttattgatgattttatttcatggtctttctttgttcgtttctgtgatctcaaacttttatagatggttaaagtaaaaagagaactttaatgatcactttgcctttggtcatttgtccttcaatttc

SEQ ID NO: 158209 - DNA, 531 bp, Homo sapiens
cgggtcaggattatgggatctagagtcaagtcaagactgcctgttagaaaccacgtggccttgagcaggtctctgctaccctctaggcctcctaggcttggcatctatagggcgagtggtcctactcgatgtgaccagcaagcgcccctggagcgcctcctgttacacggcagtgcacaaagcagaccagtgcctgccctcacagagctcacagtctagcaagataggcagaaaacacaccagaaaagtaggtacttgtggagaagaacagagcgaggtccagagcatggggacgccagggggacgaggctgacacttagggcccagcagtctgggatgttcttgatcagagacttacaggaaatggcagcaagctgtgtggctcctgggcagtgtttctgtcgggcagagtctgtgtttgggagaaaagtaagcagggaattgggtcccggagcaggtcagagggggagctcatgaggtgccagtgtgcaggattcgctgtgaatgaagccttggagacagcagttccct

SEQ ID NO: 158210 - DNA, 547 bp, Homo sapiens
aatgtctcataagtcttgggagataagagattcaggtatcccaagtaaggattctaacttcgaaaatgaatatgtcattgagttttacacgattcaagattcaaacgtgggcaacagaaatctctgttcttggaaacagatttatttcaggatgtgaaagcccagctgtgggtttcagagtttgcacacctgcatttcctcacccttcatctgtggccatgctcgtagatgcttttcttaggaaaatttgattaattgaactttttttgttctaaatgcaatctgaaatgagtagagactaacgctggctgtgcgtgcgtgtgtgagtgcatggtagtgaggggttggggagccttccagctgattttgtttcccttaagtactaatgaagaatttacttgaattgttctaacctgtacatgtattttctttgacctatcatttggacaatgttctgtggttaacatcttaaattttttttttttttttttgagacagggtctcactctgttgtccaggctgagtgcagtggcttagttagagccca

SEQ ID NO: 158211 - DNA, 126 bp, Homo sapiens
cagttaaccacagtccaaaaataataaatggaaaattccaggaataatgaatgaattttaaattgccatcgttctgagtagcgtggtgaaatctcatgccatcccagtccctcctaccaggtcatg

SEQ ID NO: 158212 - DNA, 328 bp, Homo sapiens
gtagggtatgaggtccacctcaccctcttcccccatcaccaggactattctcattaactcaggcttctgcctagcagggcctgcatcacctaaaaatatccctcctgggagaccaaccctggaccacactccagtctgtgacttcttagaatgctctgagtcaggaatgtcttcacagaacccacaaatgaaaaggggctgatggggtagaagagacaggatgagacaaagaaccccctagcatttctaagaatggcagccgtggcataacaaggcaccagaaattctagagggaggaaatcccatacctgatacattaagaggagtc

SEQ ID NO: 158213 - DNA, 425 bp, Homo sapiens
aagagacaaaggggaagagagacagagacacacacacagaggaaaaaagcagagaccaaaatggggagacagagaccagagagggagacagaaaagagagagggagacagagatgagggagaaacagggaggaaaacagcagagagagaagtgggcagagacacagagtgacagagaaaagagagacagagacagagacaatcacaggcaaccaaatcatcagggaaagaaataaacagaggcagagatggagagagacacacagagaggaaaaaacagagaccaaaatggagagagagacagagacaaagacaaaagagagagaggtgaggagacaaagatgagagacgcagagataaaagagacagagacaagagacagaaacaagagggagacagagataagagatggagatgagacagcca

SEQ ID NO: 158214 - DNA, 144 bp, Homo sapiens
tagaaggagcttagagttgattcagctcaaccctctcccttttatagatgaggaaactgaggtgcaaaggaggaaggtgaatggcccagtgtcaattaccgaaagccagcagcagcattccagtcaattctagctgctgatcta

SEQ ID NO: 158215 - DNA, 593 bp, Homo sapiens
ttgaatgcaaaaatgtctactgtatatgggaaaggatcgagtcctcctccaggtatggaaccaaatgtgataaagatgaactcacttactgactgggatgtacacatattaaattcataggaaggtggagggggagcaacagaggccctttcacacgtgggcacctgcttttgcgtagctaacatatccagtcctctcagaagccctcaaaggtgaagttcttggagctaggacatggagaaccctagccactgggctcgttggtttcttccttgctcccgctggcaggatgctaaaggtgctcttcaatcccaaagttgtatttgctatcagttacccaagacttaggtgagtgtgatagagacaaacaggctagcagatgacagcactgtaggtgggttgcagctatatccacaccaaaacaacctccactcagggaccagacattcccagatgactgcttgtcacctttcctgtgcacctgtttttcctactgggtttgaatctcagggagaggcatgtgccccaaatctgagtgtccaccttctccttctctcctggccttatacccaccaagctatagagtcctgtct

SEQ ID NO: 158216 - DNA, 415 bp, Homo sapiens
tgtgtcaagtcatgtggaggaaagttttgatagagttgacctgcctagaagaaaagactatggaagttcttttcaagattgcatttaaggtgaatcaagaaaagtgagaagatacaaggttttgcttgttttcgtaggatgttgtccttggtggaggaccagtttacacagagacttccgggctggcaatggtttgatgtgttcagaaaggtgaagaatgtccacataattggaatgatactttaacttttcttctttggaaaagttgaaattctctttaagggcatgaagtttatttacctttcaagggcctcgtctcttcttgatttgaaaaagcaggtacaaggctacattgtggttcaagttttccacttgccattactactaaactctaaggggagtgatcttcaaattg

SEQ ID NO: 158217 - DNA, 595 bp, Homo sapiens
ttatataatccattatttaagcctacagaataaatgagtgattattaaatttctagtgttgcaacacgaggccaaattcaatgttaagtttagaacaaaaacaaaattgaaaagaaactttagatcatactctattatgtttaaaccaagacagatggtgtatatttatgagtatgcaaacaattcccaggacttccaagtcagaggcagccctaaaaccatatatcattgatttcaagacacattttttcatatgttttgaaatcttcaaatgaatcacattttgcaatataattacctgtgtttctttttacgtagtacataaaacaatggtatgacttgcaagcggtcatcttagattcattgaaataagaccatgttactattagctaacacatattgaacacattatgtaccagacagtgcatgtggattatttcatttactacccacaacaacactgaagtgattccagttatttccccatttttacgttatgttattattttaagatggtctcaccctgtcacccaggctagagtgcagtggcacaatcacagctcattgtagcctcaacctcttgagctcaaacaat

SEQ ID NO: 158218 - DNA, 424 bp, Homo sapiens
  misc_feature (412)..(412): n is a, c, g, or t
aagatatggaggtagaaggcaatgatactgataatccagaccctgtgtaagcctaagctaatgtgtttatcttagcttttaacaaaaacagttccaaaagaaaaaaaaaattggccaggtgcaatggttcacacctgtaatcccagcactataggaggctgaggcaggaggatcactaaagaccaggagttcaaggctccactgagctatgatcacaccactgcattccagcctgggcaacagagtatgaacctgtctctaaaaaatgaaattaaaaatagcaaaaacctgtgccgggcacggtggctcaggctgtaatcccacactttgggaagctgaagcaggctaatcacctgaggtcaggagttcgaggccagcatggccaatatggtgaaacccccgtctctactanaaatacaaaaat

SEQ ID NO: 158219 - DNA, 393 bp, Homo sapiens
cctcccccagaaaagacctgtttgatccgactacaaactataagacattaagttactcttctctttatttctatgatatcttggtcataattctatcactgttcctcctattgctttctaatcagcaggtaattacattatgcaaatcatgcacaagtataagttacttgagatcaggacctatgttgttttatcatgttaaactctcactaagtcattttacaaaataacttgttattagctgaatacagtgcctgaccagtgaatgatcagtgatgagttcatctggggccaaaaataagtccttccacccaaatgctccaaataatgacactgaccagctttgtgtttacttctcacccacttcctgtaagtatatcaacctcatcgaac

SEQ ID NO: 158220 - DNA, 140 bp, Homo sapiens
gagccaccatgcccagccggtttgatttctttaagtagttgtatttctatttattattcttataggaaaatacagccttagatttgaaaaaaatgtctgtggcttctctggtaaatctaattctgacggttaaagtattt

SEQ ID NO: 158221 - DNA, 315 bp, Homo sapiens
cataaaatgaaagaaccttcccagaaagcaatttggcagtacgtatcaagagccttcataaagcttgtacccctttggtagaataagtccattttcagcaatttctcataagaaaatagaaatgtacacagaaattttaagttcaaatttttatttttatttatttatttatttttgagacacagtttcacacttgtcacccaggctggatgtgcaattcagtggcattaattacattcataatgtggaaccatcaccattatctatttccaaaaccctttcattactccaaacagaaactctgcacccattaag

SEQ ID NO: 158222 - DNA, 1368 bp, Homo sapiens
tagatattcaacacatggacaagtgtttaattattctttgtatattcctgttgtttgtaaaacagcttataatttttaaaactattttaaagggaatgaaagtaggaattacagggaggcagttatcaattagatataaggatgaattctctagtagagttagatgtaataaagatattgccacactctatccatatgtttatacatcaaatttttactgagtacatacatcatgagacaaaataaacttcctgtcacaaaaggtgcttgaccaaaactcaagaatcacctttcagggatactgttaaaagtgttcccacatcagctaggagttagctctagagggcttttaagatctttggccatcccgaaattctatgcttgaaacacgttttctcatagaaacgctcctaccaaaggccagtgagagaactatcactttgtgaagaatttcagaatgcccactagctctcctgtagccctaaaaggtaatgagagtctacctgttcagactgagagctccggctgccttgtgctacagaagcagtaagtgcatgtaaaggacgccatatttctaagacaaaagcagtaacaatgactcaaggatgatgcccaatagacgatttaacctataactttgctaattgtcatattttcaaaacagccctatgggaagggtacacaaatgtctggggagtatttcctgctttttagcacccagggaactacaaccaggagcccagcttattttggattggggatggggatagacaagaagagatggggcagggagaagagacggctggtttattttacatacacatattttatttataatacatctctgtgtctaggcgtctctatgctgttctcataaaatctgaattatacaaataaaagtttaattcctggctgttttggatgacttgggcctgtattacaaaattaatcagatacaattatactatcttcacaacaacaatcatctacattggttttgacaatgtacaaagtacttccatgtgtattatttcgtttatctttaccacaacctttgaagtaggaagacatgatgatccccattttactgcctaggacagagagacatcaggaggttaactgacttgttcactgagaaagcggaggagcacagactataactccaacagtttgaccccatactgcatacgcatcagggccttaatcatgagactgtatgacccttctgagcctgggattcacttgcaactgggtattccctcttctacctcaggccccctataccttttcaaaaagtgtccttcactgtaaataatcttcctggtggtgaccctaaaggatctgacaacctggatctatgtaaaaaaa

SEQ ID NO: 158223 - DNA, 227 bp, Homo sapiens
gtttccccatgttggtcaggctggtctcgagctcctcacctcaagtgattcacccgcctcggtctccaaagcgctgggatttacaggtgtgagccagcgtgcccggtctgccatatgcagtttactggagagacgaactgctcactggaagatgattaacatctcagagtttttaagcagatacttgcaacatttgagctcaccatagtatcgacaagaggcggcta

SEQ ID NO: 158224 - DNA, 137 bp, Homo sapiens
ctgtctcttcaggagtcaaattcaagtcatgacccctcaacatgcctatcggtcaccaaatcctgcagattctgccattttcaggatctctgtgtgacatttgtcccttctcctccattgctaccgccttagttcca

SEQ ID NO: 158225 - DNA, 543 bp, Homo sapiens
gctttacaatggcttggtgaggtcaagaattagagcctggcatggtggctcacgctggtaatgccagcactttgggaggcagaagcaggtggatcacttgagttccggagtccgagaccagcctggccaacatggtgaaactcagtctctactaaaaatacaaaaattagccaggcatggtggcgcacgcctgtaatcccagctactcgggaggctgaggcgggagaattgctggaacccaggaggcggagattgcagtgagccgagatcgtgccactgcactccagcctgggtgacagagcaagactccatctcaaaaaagaaaaaacaaacaaacaaacaaaaacgaattagagttggtcccacccatcttcctttcatgaattttcatgcaaactggagcgctatcctcttccctttctcctacatggccttgattcagcaggcagacaaatctcctgccattgtcccaagggggacattcccttaacgcaaatcccaggaagaactttgaagtaaaatacgattgttcttttccttttc

SEQ ID NO: 158226 - DNA, 255 bp, Homo sapiens
tgtccttggaatccctgcccttatctgacagccagggcccctctgactgggcactgatgctctctgcccagaggaagatggtgttcctcgggggccatgagacccctctgcaacatcacagctttgctcttgtttctctttcctactaaggcttccacattgtcaaaaccatgtatggggggagcagattttgcagccgaggggaaaattaccataaaacctagtctccgtaggtggtaagggatcaaggagcat

SEQ ID NO: 158227 - DNA, 604 bp, Homo sapiens
ggttgttccctttgtctgctaactgtagacgagaaagcagaaacagggatatgaaatgtcagatgagtgttggaatttcagccggggtgaggcggggacagggctgtcctgcttgagaacagctggagagtccagacccagaggacacgtcagtgtcgggaagagccgtcccagaggtgacttctgtgtgggttaatttactgagaaaatagtttccaacagtttgtctcttgggtggacctgtttggatgagtgcccacaatcccagccacacccacgtcctctgtgcagcgctgtggggagtagtcattgtcaggcttgcaggaagatctgctgctgactcttcccaggcgtgtgcacatgtgtgcacgtgtgtgtgtgcacagtggtgcgtgttccaaataaggaagaaagataaaaggagtatggaaacttcctaggctggacaaacactgctcttaaacacgtaccttcacagtcaggtcagcagtgatgccaaggcggagacagggtttcccctctgttttgtgaatacactgtgaccagtccctggggggcctggtgtattcaggctctgactcagcacggttttctttacaaagga

SEQ ID NO: 158228 - DNA, 139 bp, Homo sapiens
cagggtctgcccaggtgccctctgtgggcttgttagcctgcaggagctggtttctgctggctgatgttaagtcaaagaggtctcctggctctaactcagacacttcctcatacagtcttcttagtgggcttcctgctga

SEQ ID NO: 158229 - DNA, 578 bp, Homo sapiens
agtgatgctggctggctgtcctaacactgagttctgaccctcttgttctgctttggaacctcctttctcttctccatgccagtgttggagccacctctatcccatgcacagacacatctcctgtgtccctggctttgagggccccagcttgagtagaaactaaagtacctcgtgcggggtcagaatgtgtatgaagaagaggtttaaggctacaaatttggtaaagagcgtttcacatatgacagaaaatacctaccatctgcattcaagaaaggagtggttaggctgggcatggtggctcatgcctgtagtcccagtgctttgggaggccgaggcaagaggaccacttgaggccaaggcaagaggaccacttgaggccaaaagtgtgagaccagcctgggcaacatagtgagatccagtctctacaaaaaataaaaagaaataggccagacgtttgtggctcacactttgggagaccaaggtgggaggattgcttgagactgggagtttgagaccagcctgggcaatagagcaagaccccagctctacagatttttttttaaaattagccaggcatg

SEQ ID NO: 158230 - DNA, 432 bp, Homo sapiens
agcatcctccgagcacaatggccgtgcaggcttccccggcacaaagccggcgcgctgcccactcggctgcctccgagaccccccttggagcgcctgcatttttttttcctctaatccatgattttatttttttttttggctttacctggaggctggctgggctgggctcccccggctctgccccgcttcacatcgtggctgttgcatgggatccgagcggagcccgagcgccagcggctcgcggcgtgcgcgcgccggccgggctgccgggcgggcggcgcgaggacactcactgcggctcgcgctcccctagctcccgctcgcgcgcccccccagccggtgacgtcatcccttccgccagcgccgccgccgccgccgccgggtcgggggcagggccggcccgtgcgcgtcactgcgcagccgcgcggccgc

SEQ ID NO: 158231 - DNA, 354 bp, Homo sapiens
gttgatggccactgagcacagagcctgctggagaccagctagcagcttagctgcctctactgtattcagaacccagggttggctggggtacagggatggttgtgagacactcacaaatctgattatttgacccataccagatgggagcaactgagcagtgccccacaatgggaattctcgaagggcacaccagagggggcctaatctcaaacagcactgtctctggctccgggctcctaaagagagacatgttcttctactcttagtcagatgcatctgtgggctaagggacaatacaagctgtcaccaaagggctagccaaactcaactctctaggggcttgcatcttggtgg

SEQ ID NO: 158232 - DNA, 273 bp, Homo sapiens
cttctgtaaactggactataaatcaaatgagtgtctgcatggaaaaaataaaacaccctaaacaaatccaaagataaatgactaattgggaaaggatatttgtaagttacatctctgacagagtattatcactgatataaaaggaacccctaaaaattaaaatacaaatatcaaaattttataaatggcacacaaaaaacccagagttcccagaagaaaaatttaaatggttcttcaaatatgaagcttttctcagtataacttaaaatgcaa

SEQ ID NO: 158233 - DNA, 252 bp, Homo sapiens
agggccacttcagagtacacttccagattatttcagattagttattttaatgaaaaattctagcagggggtggctggagctgttcccttctgcctaaaaactagaccacaaagtaagtgaaggtaccctcgtctcttacaggtggtgtgggcggtggggtaggatgattttaaagactgtaagaggaggattttattggagggaaagtccaaattctatattggggcagtagagctgcaccatgtcagacac

SEQ ID NO: 158234 - DNA, 223 bp, Homo sapiens
gcggcgcctactactactaaattcgcggccgcgtcgacctccagcccagaaagcacctgctttaacagccttccaaggagctccaggacccttaggaaaaatctacactaagggccattctctagggtctggccctgccaacccttctagcttcatctttagcacacctcccacacaccacgccgatttccagccatgcctaaatgctggcagtcatctctga

SEQ ID NO: 158235 - DNA, 486 bp, Homo sapiens
aaatattgactcaaatttgtaaaaagctctatgtagccccaactaaacatgtctgtgggctagattagccctttggctagctggccaccagttgaccatttctgtagacaagattctcagaaaggcaaccacagcctcaacttttacaggattattttctacctaaagaggcatgtgcataaatggcaggatgcccagcacacctcattttactgtgtttcactttattgtacttcacaaatattgcattttttaacaaatggaaggtttctggcaaccctgtgtcaagcaaatctatcagtgccatttgtccaacagcatgcactcacttcctgtctctggatcacattttggtaatttttgcgacatttcacagtttctcattattattatatctgttatggtgatctgtgatcagtgatctttgatattactattctaattgttttggggagccacaaactgtgcccatataagatggaaaac

SEQ ID NO: 158236 - DNA, 150 bp, Homo sapiens
tgagtatttctgatggacttttctcttttaatcaacagaacagtcctgaggtaggcactattagacccactttacagatgaggaagaaaggctcagagaggttaactaatttgtccaaggtcacacagcaggagttaaaacccaggcttt

SEQ ID NO: 158237 - DNA, 226 bp, Homo sapiens
cgaactctgagttctctccagtgaagatacttatcgtccttgaaagaaatcaagacaagctagtctttcagggagctaccagggagttcggcgctctcacggtggctcagaatcaaagtctgagggaacgggggcctgcgaggttcctcctcaagggtggaggggcccccgactctcagggactgggtcccggggccggacccgcggccgaggcacccctgccgct

SEQ ID NO: 158238 - DNA, 247 bp, Homo sapiens
ggcattcacatttaaggataaaaaccatgtaaccttagaaatgtcaccatggatctgggcctgtgcctcactgttccttacgagagaaggcaggcgttaatgttaccctgtcagcctcagaagtttggggacataccctcccaaagactgtttgctcctctccccaacttccaccccaaattgatatcacacatcttatcagcagaatgtaatcatttgaagagatttcccagtttgcttatacagg

SEQ ID NO: 158239 - DNA, 172 bp, Homo sapiens
tccctcaaaatcagcatttccagaccaactcccaacatagcaagagaagacagctaggtgggcttgttcctcccttggatgaaacaataccaggggaacatgtccccctgtcaagtaagattaataaaagctctgccagcaaaggtaaccatggggggcaccccatccccta

SEQ ID NO: 158240 - DNA, 426 bp, Homo sapiens
caggatccttgactattttactccccactgtttgctcaagaatctcctctggggtgactttggaccatgctgtcccatggaacctggcctctccagcatcaccgtctctcactccatgctgggcacacctggtgctcttcccagcatctgtcctctacccttgcttgtggcgacactcctcctgctctcagggtccttccacagccctctcctgtgtctcggcttctttactgtggacacacctgggatcaaaccctggcctccgcccctctttcattgcattctctttccccaaagaattgacccatcttcaaggtttccattctaatggcttctttaattctggaatctttcacttccagtctccacaaacttccctctggaattctgatcctgggcttctaacctacaaacagattcaagctg

SEQ ID NO: 158241 - DNA, 574 bp, Homo sapiens
gcactagaaagtagaaagaatcactcaattcagggaaaccgttttctcttaatgtgaacatttacattaatgccatttccaaaacctttctgggacttcttaaatgcaaagatgctatctgctttacttcatgctgcctgtttttaggagcttggagtgctttaggaagcttcccaatactggtttagcagtaatttggttgactgatcaaggcatgttttaactttgacactgaaattttaaaaagacaacagttatcttgcccggagagtcaagtttctgcttccaaggaggtcaggaattgttctctttggtgatgtggctgtgcttggtagcccttaaactgcaacagctactcagctgcttaagctagcctacaagtacagaccagagacaaagcaagaggagaagcagaggctgttggcccgggccgagaagaaagctgctgacaaaggggacatcctgggtaagagtccacgtgtccttagagccgccacattaactctgtcgccaccttggtagagaaaaaaaaagttcagctggtggtgattgcgcatggggtagcccttaagct

SEQ ID NO: 158242 - DNA, 555 bp, Homo sapiens
tgaaatatgccaatcacaaaaagacagataccatatgatttcacttatatgaggttcctaagtcaaattcatagagacaaagtagaatggtggttgccaggggctagtgggggatgggagaatgggtagttatgcttaatgggaatagagtttcatgtttgccagataaaaagcgttctggaaatggatggtggtgctggttgtacaacattatgaatgtatttaataccactgaactgtacacttaaaaatggttaagatgacaaattttatgggggaaaaatgtgccaaagatggcaagaggtgcataagtggagggatggtggtatcattgccaagtacaggaaagatggaaaggataagtattatttgggtgaatttgaggtggtagctaaccctcctgtctgttacactgtattgatatttgtctttacacaaaatggtaccaaaattcggctagatatgcttgcttaattgtctctttttccttcttttaacagttgtgtttccttctgcagtccatagttttatgcttctaatctgctgtcacttatt

SEQ ID NO: 158243 - DNA, 396 bp, Homo sapiens
taaaaaatatgctgttgttgaagggttaaactttgccctccatttttcagaagtagcttgaggaaggttgattgagcacactgaaaagactgtagaacctttctgacccttatagtttggtggaaaataaaacaaaaagtaggcaagtattcagtgtgttaaatactcctgaaatatcattatttggacaaaattagaattttcaactaaaggtgcagaataacttcttggatcccaaaggtagttattgaattaaattaatgtttgggtctaattcatccaaacgtcgaacggtgagaaaatgagccaatgactgaaattttttgagggggtaatcctttttgtttcatttaatttaaaaaatctgtaagttcaaaagtttgatcaagtcatcct

SEQ ID NO: 158244 - DNA, 208 bp, Homo sapiens
aactaactacccacagcactgcctccctccagccttgctgggatcaaggggatgctcactcgggaggccgagtttcctctgcgcctcttgaagtattttggggctgtgctggaagagccccatctcaaccatgactgaacgcaagcaccctcctcagtaggtatgaatctcacaagatcccagcctgtaggggtgcacagctgagcag

SEQ ID NO: 158245 - DNA, 548 bp, Homo sapiens
acagagtaacctgacggctgctgaagccgggcgcagcggggggacagtaggcacttgtgacgtgtgtgatatgagagctgtcttggctttggttctgggataacccccatcctgcttgctgtggccgccctcctctttgctctgtttttagaaacttcgacaagcagagctcacagaggagtggaagccgcaagagcccctcctgcacctcccaactccctggtgtgtggccgcttccttctctctgcaaggtgcgctttgtgttacaggatctttggggtggtgtttttctggccagaaatctctgtggccggtggcgcctttgcccaagttttgctcaggctgggcctggcaggccacgtttggctcacactaccagcctgggtcccatgcctgccaagggcgagtcaggcatggagtggcgaggggtgtgtgaggagcacggggtctggccacaccagtcaggcacgctgggtgctgcagcagggtgggcagctccaggtgccagcatgggtgcgggctctctgtgaggctgcggccagaccaga

SEQ ID NO: 158246 - DNA, 421 bp, Homo sapiens
cggccaggcctgagcggggcccccgccaggatcggtctccgcaggcccgagcgcccatgaacttggccggagcagccttcacgaacgcgcgcgcgccgggccgtactctcttctggcattcgatttccgagcgccccacccgccccgcgcccccaagaacaaagctcgccgccgccccggcccgtggcctccccgcgcgcggtcaggtgtcgggcggtcggggcgccgctgtccccacgccccccatcgcgcgtccccgccccgcgagggcatctccgcttgccctccccctggcggccccggctccgggactcgggggtctgtcccctttgcagagtccgaccctcccggcgccccctctccggaaaggcgagacgcagagatgccgccggggcctccccgccccccttccaagccccaa

SEQ ID NO: 158247 - DNA, 585 bp, Homo sapiens
tttaagttctgggatacttgggctgaacatgcaggtttgtcacataggtatacatgtgccatggtggttggagcaatgtgatttttctaaaccctgaagctataaagaagatgcaataaacaacagcattttaaatgccaaatttgaatgaataaataaatgaccttcccacaagaaagcaggctcccttgatattttagcaaatagagttgtaactaacagattcccttattcatggaaaatgaagcttcattaatattgaacttctcagttatctacatgagtaacatagatttttgtgcaaaggaagatgcacttattagtatttacctctttgtatggtacccgtacctgataagttagcataaccataccctgagaatgaccccgtatggcagatacacctgaatgtgtgtttggagtgccaaactaaggaatctgggagtagccaacctggagattcattccttacctatgagaaacacctgaacacccagttcatcccatggaatacgggcctacaggagatcgaggctctcttgtttgggttaaatgaaggttgccaggtggaggtttctagggtga

SEQ ID NO: 158248 - DNA, 206 bp, Homo sapiens
taagactcggtacctggtatgacaccaagatacaacgttctaatcaagactatgccggaaagctcaggaactaggattatcatacccaacgcatttgatttgctagtcactgttgccccaaccacatcctgcgttttccctcctctctggccttgtccaggatatgtttctcctctatgctttcatcaggagaaattagatcaaga

SEQ ID NO: 158249 - DNA, 465 bp, Homo sapiens
aattatattgacaaggtgaaaatactctttcaataaaatgttataatctttaagtgtgtttttgatatgttagatttttttttccagaagtaacacatctctaaacaaagcccaagtcagtgggaaagtctgattcatgtcattaacattcactttatactctttacaacatcatatcatgtttaaattgaggtcagattcaagactagtctcaggtaaagttataaagtaagaaattggttctcttcttcattgttagtaatggtataaatatcttttacagaaggcagtttagctataggttttataacttaaataggttcataacttttgacttagcaatttcacatataagaattctaaaacaataatcagaaaggcataaaaattcattggaatgtgaggccattcaggatagagttctttatactagtgacaaaggaggaatataaatgcccacaacag

SEQ ID NO: 158250 - DNA, 309 bp, Homo sapiens
caagaggcccaagcttggcgtggaggagcccaccgactggagaccatttggggcctgcagatgccattggagggcaggagctgagcttggagaggccaccgtgaggcctgacctgggcctggggagcttggcttcgggaagttgtgggtctaccagggccgctgggagctgggcaggaactgggccaaaaaaggctgttgtgaggcagcagttgtgcctgtagacccagccaagaggaagaggtgggcctggagaagcccccataaggcagaggttgggcctgtagacgctgacaggaggcaggagctg

SEQ ID NO: 158251 - DNA, 251 bp, Homo sapiens
tatatgagactactggcatgtgacaccacgcctggctaatgtttgtatttgtttgtctgtctgtttttggtagagatggggtttcagcatgtttctcaggcttccagtgagttttatactttcttgtttttgtgttgctaattagcatccttttctttcaacatgaagcactctccttagcatttcatataaatttattaccgtcagacctgtctaagaaatataagacaggtctggtggtgataaactcc

SEQ ID NO: 158252 - DNA, 344 bp, Homo sapiens
tgtttgactcagcacattgaaagctatgttgggttttatttttgaaatgtctcaatatgtatgaggtgccgtcctagtctgtgtgataacgagtggttataacagtgtgaatagccgtcttctctcctacgtggcacccctggtcctgaacttcatggacctgttgaagtaactttcctgtagtacacatctgctgtggtctgaatgttggtgtcaccccaaattcatatgttggcatcccaagccccacagtgatggtattaggaggtggggcctttggaggtgatgagttcatggagacagagtcgtcacaaatgagattagtgtttttataaaagaggcct

SEQ ID NO: 158253 - DNA, 103 bp, Homo sapiens
cttttcaacctatttgtgtctttgaatctgaagtgtgtctcttatagacaatacatagttggatcctggtgtttttttttttttaatccagtctgacgatctt

SEQ ID NO: 158254 - DNA, 339 bp, Homo sapiens
gtggggaagaggctggacaggaaagaggagcagatcaacaattttatgactgagtgtgtggtgtcttggcgtgcgctagaggacggttttagcacagggcattttgagcccagccccgtgtggggaggcactcctctggacagcatggcattcccatgcgagcccagacagccctggggagcaggatgaatgggcttccctcccactctcatgcccgccggcctcagggtccagatttctctctgtgaaatgaggtcaggacagtgatgcctggaacaaaatcatagtttcttgaggcagcggggcctggggagatccctccgaggaacaggggagcag

SEQ ID NO: 158255 - DNA, 497 bp, Homo sapiens
cgtttttagaagctgccttttgggattgccttgagcagcctggggtcattttgtgacagttccctaccagtggttggccaaggaaaagtcaatgtgttttagctcagttgtttgacctttgggtgtatttgctctttagtaagcatccctcatatggaccacatgagttttacctgaagtcttaactgggttagagtctgcctttttgaaacaacatgatgaggaggccattttccaaaaggtgtatcttctaagccaggcacggtgactcgtgcctgtaatcccagcactttgggaggccgaggcaggtggatcacctgaggtcaggagatcgagaccagcctggccaacatggtgaaacacgtctctactaaaaatacaaaaattagccgagcgtggtggcaggtgcctataatcccagctactcgggaggctgaggcaggagaatcacttgaacctgagaggcagaggttgcagtcaaccgagattgtgccact

SEQ ID NO: 158256 - DNA, 414 bp, Homo sapiens
tacattcagtttacataaccatacaaacgtgccctctcagaatatgtcagcaggtaagggagtaaggggaaccacatataaaaccaccgtggaagccacacaggtcccctgagaactccttaaacaaccaatataccattttttaagtctacacagttccaccagtatgaaaggccatgactcctcatgcccaagatcactggctagaaggaggcctcatcttgcaaaggttactttaggtctcacccccaggcctccctaaccactgcgggtaaagaagagggtaaaaacacaggctatgatgttagacacaccagttgttagtttctgacttaagaaacttaagagctacagtgatgtaaggcaggtaattggacgtatgtgaccctcaaattgctcttgtgtaaactgatg

SEQ ID NO: 158257 - DNA, 594 bp, Homo sapiens
gacgtttgtctcctgggaaagagaacgcaacactggccacctgaggcgtctatttacctactggagaaggtgggggggacgggaataaagaggaagagctagttcccaccatctccactccgaagtctaacacacatccctctaaacctaacacggccagaactgagcccctgggtctctaccctgccagaactagctcctcttatgcgtcatccttgcttctgctcacggcaatgctgttcttccactcgctccggcaaactacttggtcacactcgagtcctctcttctacatcctacgtctaatccatcagcagtttctgtcagctccaccttccaattatacccagacttccaccacttttcaccactagcttctctcaccaagatcattctaacagcctttacctggactcctggtttctgttgttggccctcctattcctccttcccaccatctgttctcaacacagcagccagtgctcaggcacattaagtcagatgatctttctcctctgctcagaactctccagtggctctccagctcactccaagttaaagctggagatgtgacttcacctgcacgtggcccca

SEQ ID NO: 158258 - DNA, 252 bp, Homo sapiens
cccggtgggtacactggggtgacccgctcgcccgatctaggtggtgctttgatacctcttaaagcattttttggagtttgcccttcaccttggaaagctgggtgggggattctgtcctccatgaataacggcgccaggaaccttgggcgatcttgagaaaactccttcctgtaacctctgttttccacgttggatgtgttttaggccacagtcaggcctggcttttttttttttttttttttaagacttatt

SEQ ID NO: 158259 - DNA, 660 bp, Homo sapiens
acaagaaggagccagtaacagaaacggacgtcctagaatctggaataagaagaaagagtaaagtttcaagtcatagtatcctaaatgagcatttcagattggctactgagggcccgtggaacacaagaggaatctggtactttaccttcgtagatctactttttaaaaatgagttccagaactctcagctcttcttacaattcagggcttgagatactggtacaagttcagttcaaaagctggcaaaaggcaccttaaaaaggctctgtgaatgtactttgctggtaacgttttgaggagggaaaaaaaaaggaatcctctttaccattcttttatcctatttgcatggaacagctggaatcctgttccatgcctatcccgtacatcacagccacttgctgagccaacatcccactgcagtgcctcggaatctgcagtgtcactcctcttctgcttgttctctgcaaagtgaagtcacagggacggatcagccaacctgacttctcactgccctgcccagaatcctttgtgaactgaaatgagtcatcgctccaagaaaagctacagcctctgtttgtctgtgcaggctcctttgtctgtgcagtgcggagacgcgaggtcagaatgtaccccaggcgcggggtggcgaggggcacactc

SEQ ID NO: 158260 - DNA, 415 bp, Homo sapiens
tctcactgttgtttatttgggtcatttttgtccctcctgccctgtctttatcctatggaatatcttcaaaacagtgacgaataggaggtcaaatagaattaagaggctcaaagcagttggaagttttttcctcaactttttatgtcctgtgctactcatattcacacatctattcctcagtatttcctgtttgagaaatattgtggctcagttcatctatttctattcactgaatgcattcatcagcaaataatgaaatatggatgggacgcttccttcccgatgccaccatttctatcaccggatataaattagccacttcctttctgaaagataccatatatttctgtgcctttctgaaaaggcaggggattttcagttacagtaatggccatgtgatggcagtctctgtgag

SEQ ID NO: 158261 - DNA, 171 bp, Homo sapiens
ctaacatataagaattgggagacaatacccaaaacaatccaccttgcaattctgaaagaaactattttccccttgacccttccttcactgcttcccattcccaaagactactttgtgccaaagaagtgcaataatccaatctttcctctcaaagagctctgagaagatctc

SEQ ID NO: 158262 - DNA, 293 bp, Homo sapiens
ccttccagttcactggtgagtgttaccagaaatcacagtggctacgctggtgctgcttttctcagaatctctctgtattagtctgttctgaaaaagaagtctaatggaatcatagtttcacgtggctagggaggcctcacaattcatggtggaaagtgaaagacatgttttacatggcagcagatgagagaatgagagccaagcgaaaagggaaaccctttataagaccatcagattttgtgagacttattcactaccatgagagcaacatgggggaatctgcccccatgatt

SEQ ID NO: 158263 - DNA, 587 bp, Homo sapiens
caaaaatatccacatgctcttttgttcatctctaattactattatttttctgaaacagaccaatacactattcttggtgattcctatcaccaagaatatcaagcattccttctctcttggtatttctgtgaccgtctttctaggactttaggagcaattttctaagtgcctctcaagcccaaatcttcagctattaatgaacattcaaagagaacatctttaaatccccaacttgaatttttatatttttacttctttagaggtggaatgttgagagattccatatatttggttaaaacaaatatgaaaagattccttatttttctccacccttccttacattcctcatgaccaaccatcctcccaaaaggaagcggggtacaatttgtctacattatgccaaatatttcagctttttagtttcaccatggaaaaagcattaaactcagctgaattattcatgagatcctaggtaacatgatcattgtttttggcctttggcttcaatactttcagccttgcaactcattttagagtttctgaatggggttaacaagggactttgctatatacacatcattaaactg

SEQ ID NO: 158264 - DNA, 455 bp, Homo sapiens
tgtaaatatacaaaggcttcctaaaataactgtacacttctagggaacatttacattgacttgttcttaaccattacctttaaagctatggatagcttcagaattaaaaatatattatttaccttccacacttttgaatttgaattatgacacaatataataacagaacaagattaaggttgttcacaatagccacagaggaaattacattgctcttttgtatcttgaaaaataagacacctgtaagtaggtcatgcgggttctttagggctgggaagagatctacactccagcacaattaatattcctattactttctcttggttttctgtatcaaatagcagctaaataagtactaaagttattgacgttccctatttgtaaaaaggcaaattaaccttttgcatccaacacatgctgcagatatttttccagtacgtcactttttttttttt

SEQ ID NO: 158265 - DNA, 378 bp, Homo sapiens
attaaatctgagtgatgacatttgataaatgctatattttccagagttggaaggattttttcaaaaaacaaatgatgtctatgcatgacagagacatctctttaagtgttaaacactgttatttaggtaattatttagtgataaacattttaaagagttttggggtttttttttgttctttcttttttttttttttgagacagtcttgctctgtcccccaggctggagtgcagtggcatgatcttggctcactgcaacctccgcctcccaggggggttcaagtgattcccctgcctcagcctctggagtagctaatttttgtatttttagtagggacagggtttcaccatgttggtgaggttggtcttgaactcctga

SEQ ID NO: 158266 - DNA, 152 bp, Homo sapiens
gagcccaccagcatgcaggaaagaatctcacttttacctaagtgaagggcctctgccacggcgccctaaaagatggatcctttgaaggcattttgagtccagctgtccccctctggaaaggggcaagcagactgccctaaagcccttaaata

SEQ ID NO: 158267 - DNA, 448 bp, Homo sapiens
ccgtctcttagaagttagaccagttctggcctgggcaacatggtgaaaccccatctctacaagaaaaaaaatatacacaaaaaaattagctgggcatggtgatctgcccacctctattaaaaatacaaaaattagcctggcatggtggcatgttcctgtagtcccagctactcaggaggctgaagtgggaggaccagttgagcccaggaggccgaagctgcagtgagctatgatggcaccactgcactccagcctgagccaaagagcaagaccctgtctcaaaaaagtaaaataaaatgtgttctaaagttttaaaatgtactttaatataaaagcctatgcaaaagaaactgtatgtttttaaatgtttataaaaagaataaactttcctttttgaagaaataggaaaaccaaaacaaaacacttgatttctaagagagaggtaaga

SEQ ID NO: 158268 - DNA, 439 bp, Homo sapiens
gtttattgagcgccaattctgtgccaggacttcagacacgtaagctcagataagcaaacttcagtttcttccctcaaggaagatttatagcctctaagtcagcaggaaaagcagcaaacaagcaactagaatccatggtagggcttgctacacagaaatatgcagagttctgtgataacctgggagaagccacaaactgactgggagtcaaggagactgcacccaaactgacttctatagagaggataggagaggagggtaagcgcaggtgatgaggtattctaggcaaggggatcatcacgtgctccccttagggaggggatgggggtagatcattcagaaaatttataatttgttttgcatactgctggagcttggagggagagagagaagaagtcagggggatggaccatattaagagatgcgactagacaggggg

SEQ ID NO: 158269 - DNA, 480 bp, Homo sapiens
tcactgcaacctctgcctccagggcttgtgattctcttgcctcagcctcccgagtagctggggttacaggctcccaccaccatgtctggctaatttttgtgtttttagtagagatggggtttcagcatgttggccaggctgttcttgagctcctgacctcaggtgatccacccatgttcgcctcccaaagtgctgggattacaggcgtgagccactgcacctagccaggtgctaattcttgagctgcattgttagaaactatagagatagccacagatgttagttttggaattttccacccaaacgtttttttctttagttagttttagtagtttttatgtttctagaaatttgttcatttcatctaggttatataatttgtttgcctacagttcttagtattcccttataaaccttttttattcctgtaagattcatagtgatatctccttttcatttctggttttagtagtttgaatc

SEQ ID NO: 158270 - DNA, 380 bp, Homo sapiens
  misc_feature (232)..(232): n is a, c, g, or t
acccccaaggattctgtttgtgttcatcaaatacgtattgagcacttgttatctgccaagccactgagctagagtccagggacccagagatatgagtaagatatgactgctgccatgagggagctcacaggggggacagcatgtaaatgaataattattctattatgagaaatagtaggaatatggcctggttacaaaggcggtcccgttaacccgggaccgcctttggcantcagagctcctagttcttaggcctttgttctcagactgaatgacaccaccagctttcctggttctcgggctttgagacagcatattgtggaacttctcagcctccataactaaatgagccaagtcctaatcccctcttatatatttac

SEQ ID NO: 158271 - DNA, 187 bp, Homo sapiens
cctatccttgtcctctcacctctgatcacccagtcctttctctggggacagccatgtgattcgtttattgggaatccttcaacagctgtgttagaggtatactggcaaagtgtttttatctactcctcttttacacaaatggcaacatactaaccacgtgggtttggactttgcttttttcccttcg

SEQ ID NO: 158272 - DNA, 361 bp, Homo sapiens
ctgcaaatgcagagattcacaaagcagcaatgtggaaacttgtcagttcacttggagaacaactcaattctcatttgaggggaggagcatcctgtccccaggctgagctgaagtgggtggcgagaaaagagtggggaggagctggctgcaggccatacccacactggtgaatggttccactgagtggtaggtgcctctgcaatcaggatgaggtcttccccaaaaggttgttgtgtcctgagaggagagttggggagtcacctaaggaacactggagaatggatgctgggcaggtggaacaacacaccacagcttccaactaagctgaggaaagcaggtgcttgccaacccacagcctgtc

SEQ ID NO: 158273 - DNA, 363 bp, Homo sapiens
gggcttcagtccagttaaagggttctgtgagctgtatggtgccaccattgtgtgcggcacgtgtcaagcagcttcatggtcactgcaggatattttagcactgaggcattttagaagcagtccaggccgtgccaccagctggcatgaactcactcattaaacacttactgagggcctgctcatgccaggagctgtgtgagcggctaaggttttgtggtcactatttggagatatggagtccttgggaacatagctgcacaccagtcctagtggcgcaggagttgccatagggcgttgtttacagggtccccacgcgagcccagagcaaaggcctcctgagtctgccaaggaggcagaggcttc

SEQ ID NO: 158274 - DNA, 281 bp, Homo sapiens
tcaatgtctgtcgggcttttcaagattataaagcactttcatatacaacaactctatgttcctcaggaaaggagattaaagctagggaaggttaaactgtacctttagatcaccaagttacaatctggctggaccagaccttgtacccatattccatctacttgtcattcttttttttttttttttttgaagatttctctagagaatgttggtaaggtactttaagttctctccactccctcaaaaggagagaggctacagggagctgtcagcttcttacc

SEQ ID NO: 158275 - DNA, 322 bp, Homo sapiens
gttttataagcagtgtgtagcagcatgtactcacgtgacactgcattcatgtgtcaatgtcaggtgacttttgaggagtcacattaatatgctatgagcagaacccgaggattctgaagactcgaacgggtccactacttgctagctttgtaaacttggaagtcatttacccagtctgacctgggtgtagttgggcatgtatcagtgagaatgcctgtaaactgccttttttagcatttgaacatggtttcctagtgaggcctacctgatcccttaacctgtatgtcctgtttctgtgtcagtcacaatctgatagtttctt

SEQ ID NO: 158276 - DNA, 120 bp, Homo sapiens
ttatcagttgggagaagagaaaaattgagagagaatcaattaattttggcatttagggtttactgaaatatactatctagacagtcataaatagattatttccttggggaaattatcatc

SEQ ID NO: 158277 - DNA, 380 bp, Homo sapiens
gggaagttcaggaggagatcagatttcaggtccttatggctccaggcacacaaagaatgtcagacagccaagggtgggaggtcaggtgcttctcattgcagcagggatgatgctggtctcaaaaatggtgatgggtgagtctccctaggacttggaccacagcatttggtacccactccagatctggagatactgactccagatcaaagagtcccttagagcaatagcaggtaaggacttgggccaaggggcaatacagcaatcctgtgtaattgtgtcggcgatattggctttattttagcaatagcatgattcctcctattctccaacacatgagaatttcaacaaatatttattttaaaccccaaccccagtactct

SEQ ID NO: 158278 - DNA, 336 bp, Homo sapiens
gtgttgctcgactctagcaggatgccctcccacttaatcttaaatttggaaaggaaaaggagacaaaagtggtttttgtctctttattcatgtgtcttttctttttactagtgttccgtgtgcgttgataaatttttccttttctcatgtcaatctgccttttgtcagctcattttcagcaaaactttagaaggtggaggggaggctacctttgtgcctattagcaacatctgtgctcagatgaaggcgcatcatccagaatttttgtactttttccagcccccaaaatataatcatctcccatttccagctcaagatctcgttccctcttcttcc

SEQ ID NO: 158279 - DNA, 131 bp, Homo sapiens
tgagaagggtgggaaaaaagtgactatgtggggaatattttctttgccttatcttatcacgtcagcaatatatgtaggaatagtttgagttaaactcccacttcccatttactttttctgtttagtcgtga

SEQ ID NO: 158280 - DNA, 537 bp, Homo sapiens
catccatggggtaaatactcccaccataactgaccgcatgactgggtgtggagctgggaatagatacacacagttcagctgttgctggtgtgaacacaccactgtacagtaatgtgtatgtgtgtgagagagagattgtacggtgggtgggagtgtgtttgtgctatgtttaggagtggggcagggggtgtggctggaggcactgagaccctaactcctttcctttggggggctaggatgaaggcagggtctgtgcccagagagccatggtgcaggtcaccctacagtggacgtagagagcctaaggagtcctgggttaacccgggaccgcctttgtgtccgtcaaatgcactctctatgaatgtaagctacagcatggtccttggcaggccagggttgtgggatcaggcgtcctgaaggcaatttgactttcaacaggaaaaaaactattccattgccatcaactgaacacaccaccctcgtccattgtctcacagatgccaggttgaaaggggagcggatcagaggctgtgctga

SEQ ID NO: 158281 - DNA, 286 bp, Homo sapiens
gaatatcctgcgtgagtgtggtacgttgtttcaattgaggaaccaagttatgttataccggtataacataacttggttcccaccatctgcctcctcacgtggcctctcctcccccaacgccacacaccagcaagttcctttctccacctctttgctcatgctattttaccttcctcgaatgcctttgccttcccagcacaagctctgtttgtccttccatgaccaggtctaagttcttccccgcggtttcccgtgacaacctccaggccccagagtccagcactta

SEQ ID NO: 158282 - DNA, 255 bp, Homo sapiens
gactcagagaaagcaaagctaaagaaagacattgacaaaaattgctcaggagtctgagtcggggggcctccctaaaaggagggtttctggggcaagaacgtctacaaaagaggagacccttgatcaggccatgcaggtgaggccctgtatctggcaaggagggtggcaatgtgggcgccttggggccaggaggcctttccaaattccgaggcttcagtcctacaggcagggcctgggcagaactcagatgtttag

SEQ ID NO: 158283 - DNA, 643 bp, Homo sapiens
tgtgcgtctagctatgctctgaggacaaatgtaggaaggcagggtgccattcgggagccttttgcaacggtcctactaagagctcggtgccagctgaacaaaccacatttttttcttggagttttagcagaggaggagagtagccactgttctgaaccagagcaccccattcatgcatgcatgcagtttacacttaatgagtggctcctatgttccatgccacgtgctaggtgcaaaacatacaaaccaatgtggttctggtgcttaaggagcttccactgagtgtccctcctgctcagctctctccaaaatgacactggagattgcttctgtggccaaagtttaatcgggagaagcgatgggggctaatttaaaactaaaaggaaagagaaagcagaagcccaaaccgctgctgtctcaaagtgggagaaagggaggctggctgtgatgttctaagggtagaaggggccctcagaaattctcacctccctccctcacttgcagatgaaacaactgtcacttccacagagaggaagcaactggcccagggtacatagcaagctagcagcagacagaactggaattgccatcccggccagggccggtgcttttagaagcaccctgtgttttctccttttgtcgt

SEQ ID NO: 158284 - DNA, 432 bp, Homo sapiens
tcaggttccccagtgagggtgtgtgttcaggagcagatgatccccctttcccatgttcacagtttgggcactcagtgtatttgggctgtcttctgggtcctgcaggagcaatctgcttccttcaaagggtctgtggattttcttggctttccttgtatatccctgtagtagttctttgggcagaaattcatgacacgagtctccacatgctgctgtgtccgtccaagtgggagctgcaatttagtcctgcctcctatctgccattttgtttctagatgcagcctttaaagtcacttcatgccttgctaccctccaaggtgtccctttgccacaggaaacatcaagtatttgttcactgcggtttgaataaatgatgtcctcctttttttgccttgtaattgtcattcctgtcactgtcatttgcttaaacaa

SEQ ID NO: 158285 - DNA, 226 bp, Homo sapiens
cagagagaaaactataaaatgtacatttcagtgttgaagagaagtttaaaatgaaacaagaatagttaatacttaacaagtacactgtcaccaagaaacaattatactagacatatactttctatacaagagaagtaagcctgacaagattagtaaaggtttatttctccagaaatgtagccagtgttttgttaatgataaccatcagagtacacagcatgggaac

SEQ ID NO: 158286 - DNA, 283 bp, Homo sapiens
cgggccattggagagtagaggatttggggttccctgctgtgcttgttgacgtagacccccccacctgaccttttgtttggccctcatgcatatttagggtttcacctggtggagtgggggaggggaggctccttctctggcgtttcctctgtgaaattctggagtggggtcagctcctgtttctgccctacggccgcatgcctcttctggttgctcaaccaccctggaagaattcccaggtcattttatacccacatcttgatttttgtaactgggtggacca

SEQ ID NO: 158287 - DNA, 183 bp, Homo sapiens
tgggtacattcggccaggtcacctctgcaggccgttctggatcagacagtccacagcccctgacttgaggaaggaggcactgcagtcactgatagcagcatgccacctcacctctggtaccgcttgggctaggaaagaggcttcgagtcagagcatcaggccctaccctgtattttgcatatg

SEQ ID NO: 158288 - DNA, 173 bp, Homo sapiens
tccgatggaaaaacaactacaaatcaatgccttgcgtgggtcagcagtgttagccaacgctgcattcagaggacagtattcctttaccgcttacattaaaaggccaagaggtagatgatttggggtcagctggtgcttttataaattatgaaaaaagttgagaaggtaaccat

SEQ ID NO: 158289 - DNA, 331 bp, Homo sapiens
cagcaaaggggaggcccagaaagagctatttcaggcttcctatttttaaagccggggtcagggtgccctgctcaccaccaacatttccagtactggaagcttcaaaaacttcaactccctccagcccagcaccagagacaggctctgtgcacagggctgtgcagtgaccatgggcagccaggagagaggcctccagcatgggtggaggaggttttggagtgccgtggtgcaagaaaagccagagaggttgaccaccatgggtgggatagagccctgggttcaaacccagctttttcattttccaccagcatggccttgagcaaatcatctc

SEQ ID NO: 158290 - DNA, 325 bp, Homo sapiens
gtcaagtcattcgccttcccctaagccctagaccccaaagattcatccgagtggctgtgtgtgtctgtgtgatgggtggtggtgtcttcaaggtcctcctcgcctccctcaatcagctttgccccctgggcggtcacctttcaagcacttccaggctctaactcgttttctgggtcgccctctatagaccaacagacgcactgcgatacctgagtctatgggcagggaccaagcagggctccttttccagggagctgcccctttgacttggcctggtcatccacagaacctccctgggttctgggtggggagtcgagccagagac

SEQ ID NO: 158291 - DNA, 479 bp, Homo sapiens
gcaaagccacagaagactcagctctcttaatgagcaattcccaaaccccactgtaatcttttcctcctccactaacgagatcgtgaagaagcccagaatcttcataaagctaaagatcaaaccaaaacacagcaatctcttctccaagtctctactaacagaaaagcatagaaaattcctaattctaaagttaccttccctgcttggctccctctctgaaattcccaaatgtgccccaaactgggctttctttctttctttaggaagagcatggggtgggtgcggtggggatgaattagaaagaagttctcaagcgggtgaaaccctccagcagctaggcaatcatcttcctgtagtgatttacagcgttcctctaaaaatatctatgagatcacagtacattaagtgcatgacaccaaacatttgtaactaatccatgaaaataaagggcgtcacgttgcatggggaacgtggtggaa

SEQ ID NO: 158292 - DNA, 517 bp, Homo sapiens
acatcactgggagtcatcttggaggctggccttgcaggaagttaaatggaaatttttagatgttcactgggacttcaagattgatttttttaatttgaaaaattttgttctccccagtcagccctgtctccctgtcttctcccaaacctttatgtctctgaaattgtccaatatgtatatggcaaatatctctttctcttcctttgctgtctcagccataagcgctagtaaaaactttccgtttttctaaagcaagccagtaagcatgatcgatctacctcctctacccgttttgctgggacatccatggcagctggtcaaaggaggcttctgctcatgagagcacttcaactggattcagataatcctttgtggtttctccacctatttactactgatcctctaaaatttggtgcaaatgaactagactgactagagttacagtgttaccatgtttttttcagactgagatatataatgatataatgatatgagctctttttggattctatccagg

SEQ ID NO: 158293 - DNA, 118 bp, Homo sapiens
aagaggggtcccgagcgcggatgcgtgaggattatgacagcgtggagcaggatggcgatgaacccggaccacaacgctctgttgaaggctggattctctttgtagctggagtccatga

SEQ ID NO: 158294 - DNA, 866 bp, Homo sapiens
ggtgggcaggcgcctgaggctgacggctggcaagcagggcaccgcggtgcgctgaagctagagattccgaaagggggttcgggtagttcgctccggagaagtctgagaagggtggctccggtgatcccagccctagctgtttcccatattcctttatccacctgcctttgaaggagaccagactccggctccgcccggcccgtgccgggtggtctgcggccccgagtccgtgaccaagccctccgagtgatcggcctgccctcgggtgcacccgcgggtcccaacgtgggggatccctccatccgcaaagccagaggtctctttggtcatgatgtagttgagctccctgaggtcctggctggctctggattgctcctgctgatcctgctctgacagcgtttggggggctagaagtgattcattggcagagtctgttagagtcctcaaagaacagccttggaaagcacctgaggaaacgtctctaagtttccctagaacaggaaaaggataatgccaaggcctcactatgggtcggtggcaaatatgggccccaacccaggtcatctggcttgtctgtctccacctcatcctgctgctcaatgtttagtcaacaaagaacaaggagtactgagtgcctgctgtgggctcaggacacagatggaagaactagaaagacgcagcccctcacctcatggaattcactagaaagatgtggcccctgaccccatggaactcactagaaagatgtggcccctgcccccatggaactccatgaaactaggaagacgcagtccctggctccatggaactcgctagaaagacactgacccttaccccatggactcgacccagtgtgaggatcctct

SEQ ID NO: 158295 - DNA, 3118 bp, Homo sapiens
ggtgggcaggcgcctgaggctgacggctggcaagcagggcaccgcggtgcgctgaagctagagattccgaaagggggttcgggtagttcgctccggagaagtctgagaagggtggctccggtgatcccagccctagctgtttcccatattcctttatccacctgcctttgaaggagaccagactccggctccgcccggcccgtgccgggtggtctgcggccccgagtccgtgaccaagccctccgagtgatcggcctgccctcgggtgcacccgcgggtcccaacgtgggggatccctccatccgcaaagccagggtcctaaagatcgctctgggaaaagggaaggatgccgctcttcttccggaagcggaaacccagtgaggaggctcggaaacgcctggagtaccagatgtgtttggcaaaagaagctggggcagatgacattctcgacatctctaaatgtgagctctcagagattccatttggagcttttgcaacatgcaaagttctgcagaagaaggtgctgatcgtccacacgaatcacctcacttccctgcttcccaaatcctgcagcctcctgagtctggcaaccatcaaggttctagatctccacgataatcagctgacagcccttcctgacgatctggggcagctgactgccctccaggtcttaaacgtggaaaggaatcaactgatgcagctcccacgttccattgggaacctgacccagctccagactctcaatgttaaagacaacaagctgaaggagcttccagacaccgtgggggagcttcgaagcctgcgtaccctcaacatcagtggaaacgagatccagagattgccgcagatgctggctcacgttcgaaccctggagatgctgagccttgacgcctcggccatggtctacccgccgcgggaggtgtgtggtgccggcactgcggccatcttgcagttcctctgcaaagagtcagggctggaatactaccccccttctcagtacttgctgccaattctggagcaagatggaatcgagaactctcgggacagccctgatgggcccacggacagattctcaagggaggagttagagtggcagaacaggttctcagactatgagaagaggaaggaacagaagatgctggagaaactcgagtttgaacggcgcctggaactggggcagcgggagcacacccagctccttcagcagagcagcagccagaaggatgagatccttcagacggtcaaggaggagcagtcccggctggagcagggcctgagtgagcaccagcgccacctcgacgcagagcggcagcggctgcaggagcagctgaagcagacggaacagaacatttccagccggatccagaagctgctgcaggacaatcagagacaaaagaaaagctccgagattttgaaatcgctggaaaatgaaagaataagaatggaacagttgatgtccataacccaggaggagactgagagcctgcggcgacgtgacgttgcctccgccatgcagcagatgctgactgagagctgtaagaaccggctcatccagatggcctacgaatctcagaggcagaacttggtccagcaggcctgttccagcatggccgaaatggatgaacgattccagcagattctgtcgtggcagcaaatggatcagaacaaagccatcagccagatcctgcaggagagcgcgatgcagaaggctgcgttcgaggcactccaggtgaagaaagacctgatgcatcggcagatcaggagccagattaagttaatagaaactgagttattgcagctgacacagctggagttaaagaggaagtccctggacacagagtcactccaggagatgatctcggagcagcgctgggccctcagctccctgctccagcagctgctcaaagagaagcagcagcgagaggaagagctccgggaaatcctgacggagttagaagccaaaagtgaaaccaggcaggaaaattactggctgattcagtatcaacggcttttgaaccagaagcccttgtccttgaagctgcaagaagaggggatggagcgccagctggtggccctcctggaggagctgtcggctgagcactacctgcccatctttgcgcaccaccgcctctcactggacctgctgagccaaatgagcccaggggacctggccaaggtgggcgtctcagaagctggcctgcagcacgagatcctccggagagtccaggaactgctggatgcagccaggatccagccagagctgaaaccaccaatgggtgaggtcgtcacccctacggccccccaggagcctcctgagtctgtgaggccatccgctccccctgcagagctggaggtgcaggcctcagagtgtgtcgtgtgcctggaacgggaggcccagatgatcttcctcaactgtggccacgtctgctgctgccagcagtgctgccagccactgcgcacctgcccgctgtgccgccaggacatcgcccagcgcctccgcatctaccacagcagctgagtgctgcccgcccacctgggcctggtcctagccctgcctcggccactgtgagccccgggctcctgctcagccttgtgccagccagactcgtatgaggctcccccctgccctgggccccttccccactgcccaggagcccccatcctaagctccaagcatgtctgggccaggcagaggtgctcctcatccatgacaccaccagtctgaatggtcctgggggctggggctggagaggccgctgcaccaccacccgagcctgggagccagcgtcccagcctaatcacggatctgctgcctcccagctgtcttgactgaaggccaccgcccctgcaggagcttgggtcctcatctgggggccatgcacaggcccgtcccaccctgcatgtgggaagggagcaggagggcctggctgggtgaggggaggccttcctgggaaggcgtgtggtgcaggcctgtgctcacagtggcaccagcaaccctgggtctccctctctgctgctccccagaaccccggggccctcctgctctccacaactgtccctccttaccccatgtagctcgatccgaagcaggagtgtcaataaacctgtcttcagtgcg

SEQ ID NO: 158296 - DNA, 3377 bp, Homo sapiens
ggtgggcaggcgcctgaggctgacggctggcaagcagggcaccgcggtgcgctgaagctagagattccgaaagggggttcgggtagttcgctccggagaagtctgagaagggtggctccggtgatcccagccctagctgtttcccatattcctttatcgtgagtgtcaccccggtccccgtcacccaatcccagagccccgcccctcccctgaggggtccgtagtcccattccgagaccccagtaccgcggcgacccctgctccctcgagcacttgttgtgtgcactttagttatcaaaacagtctatgtggaaatccagtcccgctcttcattcggagagtccgcgattcctagagcctcagacttcgtcatcccggtctgcgtgactttatgagattctgagtttctgttcccagcacctgcctttgaaggagaccagactccggctccgcccggcccgtgccgggtggtctgcggccccgagtccgtgaccaagccctccgagtgatcggcctgccctcgggtgcacccgcgggtcccaacgtgggggatccctccatccgcaaagccagggtcctaaagatcgctctgggaaaagggaaggatgccgctcttcttccggaagcggaaacccagtgaggaggctcggaaacgcctggagtaccagatgtgtttggcaaaagaagctggggcagatgacattctcgacatctctaaatgtgagctctcagagattccatttggagcttttgcaacatgcaaagttctgcagaagaaggtgctgatcgtccacacgaatcacctcacttccctgcttcccaaatcctgcagcctcctgagtctggcaaccatcaaggttctagatctccacgataatcagctgacagcccttcctgacgatctggggcagctgactgccctccaggtcttaaacgtggaaaggaatcaactgatgcagctcccacgttccattgggaacctgacccagctccagactctcaatgttaaagacaacaagctgaaggagcttccagacaccgtgggggagcttcgaagcctgcgtaccctcaacatcagtggaaacgagatccagagattgccgcagatgctggctcacgttcgaaccctggagatgctgagccttgacgcctcggccatggtctacccgccgcgggaggtgtgtggtgccggcactgcggccatcttgcagttcctctgcaaagagtcagggctggaatactaccccccttctcagtacttgctgccaattctggagcaagatggaatcgagaactctcgggacagccctgatgggcccacggacagattctcaagggaggagttagagtggcagaacaggttctcagactatgagaagaggaaggaacagaagatgctggagaaactcgagtttgaacggcgcctggaactggggcagcgggagcacacccagctccttcagcagagcagcagccagaaggatgagatccttcagacggtcaaggaggagcagtcccggctggagcagggcctgagtgagcaccagcgccacctcgacgcagagcggcagcggctgcaggagcagctgaagcagacggaacagaacatttccagccggatccagaagctgctgcaggacaatcagagacaaaagaaaagctccgagattttgaaatcgctggaaaatgaaagaataagaatggaacagttgatgtccataacccaggaggagactgagagcctgcggcgacgtgacgttgcctccgccatgcagcagatgctgactgagagctgtaagaaccggctcatccagatggcctacgaatctcagaggcagaacttggtccagcaggcctgttccagcatggccgaaatggatgaacgattccagcagattctgtcgtggcagcaaatggatcagaacaaagccatcagccagatcctgcaggagagcgcgatgcagaaggctgcgttcgaggcactccaggtgaagaaagacctgatgcatcggcagatcaggagccagattaagttaatagaaactgagttattgcagctgacacagctggagttaaagaggaagtccctggacacagagtcactccaggagatgatctcggagcagcgctgggccctcagctccctgctccagcagctgctcaaagagaagcagcagcgagaggaagagctccgggaaatcctgacggagttagaagccaaaagtgaaaccaggcaggaaaattactggctgattcagtatcaacggcttttgaaccagaagcccttgtccttgaagctgcaagaagaggggatggagcgccagctggtggccctcctggaggagctgtcggctgagcactacctgcccatctttgcgcaccaccgcctctcactggacctgctgagccaaatgagcccaggggacctggccaaggtgggcgtctcagaagctggcctgcagcacgagatcctccggagagtccaggaactgctggatgcagccaggatccagccagagctgaaaccaccaatgggtgaggtcgtcacccctacggccccccaggagcctcctgagtctgtgaggccatccgctccccctgcagagctggaggtgcaggcctcagagtgtgtcgtgtgcctggaacgggaggcccagatgatcttcctcaactgtggccacgtctgctgctgccagcagtgctgccagccactgcgcacctgcccgctgtgccgccaggacatcgcccagcgcctccgcatctaccacagcagctgagtgctgcccgcccacctgggcctggtcctagccctgcctcggccactgtgagccccgggctcctgctcagccttgtgccagccagactcgtatgaggctcccccctgccctgggccccttccccactgcccaggagcccccatcctaagctccaagcatgtctgggccaggcagaggtgctcctcatccatgacaccaccagtctgaatggtcctgggggctggggctggagaggccgctgcaccaccacccgagcctgggagccagcgtcccagcctaatcacggatctgctgcctcccagctgtcttgactgaaggccaccgcccctgcaggagcttgggtcctcatctgggggccatgcacaggcccgtcccaccctgcatgtgggaagggagcaggagggcctggctgggtgaggggaggccttcctgggaaggcgtgtggtgcaggcctgtgctcacagtggcaccagcaaccctgggtctccctctctgctgctccccagaaccccggggccctcctgctctccacaactgtccctccttaccccatgtagctcgatccgaagcaggagtgtcaataaacctgtcttcagtgcg

SEQ ID NO: 158297 - DNA, 2479 bp, Homo sapiens
ggtgggcaggcgcctgaggctgacggctggcaagcagggcaccgcggtgcgctgaagctagagattccgaaagggggttcgggtagttcgctccggagaagtctgagaagggtggctccggtgatcccagccctagctgtttcccatattcctttatccacctgcctttgaaggagaccagactccggctccgcccggcccgtgccgggtggtctgcggccccgagtccgtgaccaagccctccgagtgatcggcctgccctcgggtgcacccgcgggtcccaacgtgggggatccctccatccgcaaagccagggtcctaaagatcgctctgggaaaagggaaggatgccgctcttcttccggaagcggaaacccagtgaggaggctcggaaacgcctggagtaccagatgtgtttggcaaaagaagctggggcagatgacattctcgacatctctaaatgtgagctctcagagattccatttggagcttttgcaacatgcaaagttctgcagaagaaggtgctgatcgtccacacgaatcacctcacttccctgcttcccaaatcctgcagcctcctgagtctggcaaccatcaaggttctagatctccacgataatcagctgacagcccttcctgacgatctggggcagctgactgccctccaggtcttaaacgtggaaaggaatcaactgatgcagctcccacgttccattgggaacctgacccagctccagactctcaatgttaaagacaacaagctgaaggagcttccagacaccgtgggggagcttcgaagcctgcgtaccctcaacatcagtggaaacgagatccagagattgccgcagatgctggctcacgttcgaaccctggagatgctgagccttgacgcctcggccatggtctacccgccgcgggaggtgtgtggtgccggcactgcggccatcttgcagttcctctgcaaagagtcagggctggaatactaccccccttctcagtacttgctgccaattctggagcaagatggaatcgagaactctcgggacagccctgatgggcccacggacagattctcaagggaggagttagagtggcagaacaggttctcagactatgagaagaggaaggaacagaagatgctggagaaactcgagtttgaacggcgcctggaactggggcagcgggagcacacccagctccttcagcagagcagcagccagaaggatgagatccttcagacggtcaaggaggagcagtcccggctggagcagggcctgagtgagcaccagcgccacctcgacgcagagcggcagcggctgcaggagcagctgaagcagacggaacagaacatttccagccggatccagaagctgctgcaggacaatcagagacaaaagaaaagctccgagattttgaaatcgctggaaaatgaaagaataagaatggaacagttgatgtccataacccaggaggagactgagagcctgcggcgacgtgacgttgcctccgccatgcagcagatgctgactgagagctgtaagaaccggctcatccagatggcctacgaatctcagaggcagaacttggtccagcaggcctgttccagcatggccgaaatggatgaacgattccagcagattctgtcgtggcagcaaatggatcagaacaaagccatcagccagatcctgcaggagagcgcgatgcagaaggctgcgttcgaggcactccaggtgaagaaagacctgatgcatcggcagatcaggagccagattaagttaatagaaactgagttattgcagctgacacagctggagttaaagaggaagtccctggacacagagtcactccaggagatgatctcggagcagcgctgggccctcagctccctgctccagcagctgctcaaagagaagcagcagcgagaggaagagctccgggaaatcctgacggagttagaagccaaaagtgaaaccaggcaggaaaattactggctgattcagtatcaacggcttttgaaccagaagcccttgtccttgaagctgcaagaagaggggatggagcgccagctggtggccctcctggaggagctgtcggctgagcactacctgcccatctttgcgcaccacccacccgagcctgggagccagcgtcccagcctaatcacggatctgctgcctcccagctgtcttgactgaaggccaccgcccctgcaggagcttgggtcctcatctgggggccatgcacaggcccgtcccaccctgcatgtgggaagggagcaggagggcctggctgggtgaggggaggccttcctgggaaggcgtgtggtgcaggcctgtgctcacagtggcaccagcaaccctgggtctccctctctgctgctccccagaaccccggggccctcctgctctccacaactgtccctccttaccccatgtagctcgatccgaagcaggagtgtcaataaacctgtcttcagtgcg

SEQ ID NO: 158298 - DNA, 2681 bp, Homo sapiens
ggtgggcaggcgcctgaggctgacggctggcaagcagggcaccgcggtgcgctgaagctagagattccgaaagggggttcgggtagttcgctccggagaagtctgagaagggtggctccggtgatcccagccctagctgtttcccatattcctttatccacctgcctttgaaggagaccagactccggctccgcccggcccgtgccgggtggtctgcggccccgagtccgtgaccaagccctccgagtgatcggcctgccctcgggtgcacccgcgggtcccaacgtgggggatccctccatccgcaaagccagggtcctaaagatcgctctgggaaaagggaaggatgccgctcttcttccggaagcggaaacccagtgaggaggctcggaaacgcctggagtaccagatgtgtttggcaaaagaagctggggcagatgacattctcgacatctctaaatgtgagctctcagagattccatttggagcttttgcaacatgcaaagttctgcagaagaaggtgctgatcgtccacacgaatcacctcacttccctgcttcccaaatcctgcagcctcctgagtctggcaaccatcaaggttctagatctccacgataatcagctgacagcccttcctgacgatctggggcagctgactgccctccaggtcttaaacgtggaaaggaatcaactgatgcagctcccacgttccattgggaacctgacccagctccagactctcaatgttaaagacaacaagctgaaggagcttccagacaccgtgggggagcttcgaagcctgcgtaccctcaacatcagtggaaacgagatccagagattgccgcagatgctggctcacgttcgaaccctggagatgctgagccttgacgcctcggccatggtctacccgccgcgggaggtgtgtggtgccggcactgcggccatcttgcagttcctctgcaaagagtcagggctggaatactaccccccttctcagtacttgctgccaattctggagcaagatggaatcgagaactctcgggacagccctgatgggcccacggacagattctcaagggaggagttagagtggcagaacaggttctcagactatgagaagaggaaggaacagaagatgctggagaaactcgagtttgaacggcgcctggaactggggcagcgggagcacacccagctccttcagcagagcagcagccagaaggatgagatccttcagacggtcaaggaggagcagtcccggctggagcagggcctgagtgagcaccagcgccacctcgacgcagagcggcagcggctgcaggagcagctgaagcagacggaacagaacatttccagccggatccagaagctgctgcaggacaatcagagacaaaagaaaagctccgagattttgaaatcgctggaaaatgaaagaataagaatggaacagttgatgtccataacccaggaggagactgagagcctgcggcgacgtgacgttgcctccgccatgcagcagatgctgactgagagctgtaagaaccggctcatccagatggcctacgaatctcagaggcagaacttggtccagcaggcctgttccagcatggccgaaatggatgaacgattccagcagattctgtcgtggcagcaaatggatcagaacaaagccatcagccagatcctgcaggagagcgcgatgcagaaggctgcgttcgaggcactccaggtgaagaaagacctgatgcatcggcagatcaggagccagattaagttaatagaaactgagttattgcagctgacacagctggagttaaagaggaagtccctggacacagagtcactccaggagatgatctcggagcagcgctgggccctcagctccctgctccagcagctgctcaaagagaagcagcagcgagaggaagagctccgggaaatcctgacggagttagaagccaaaagtgaaaccaggcaggaaaattactggctgattcagtatcaacggcttttgaaccagaagcccttgtccttgaagctgcaagaagaggggatggagcgccagctggtggccctcctggaggagctgtcggctgagcactacctgcccatctttgcgcaccaccgcctctcactggacctgctgagccaaatgagcccaggggacctggccaaggtgggcgtctcagaagctggcctgcagcacgagatcctccggagagtccaggaactgctggatgcagccaggatccagccagagctgaaaccaccaatgggtgaggtcgtcacccctacggccccccaggagcctcctgagtctgtgaggccatccgctccccctttccccactgcccaggagcccccatcctaagctccaagcatgtctgggccaggcagaggtgctcctcatccatgacaccaccagtctgaatggtcctgggggctggggctggagaggccgctgcaccaccacccgagcctgggagccagcgtcccagcctaatcacggatctgctgcctcccagctgtcttgactgaaggccaccgcccctgcaggagcttgggtcctcatctgggggccatgcacaggcccgtcccactcctgctctccacaactgtccctccttaccccatgtagctcgatccgaagcaggagtgtcaataaacctgtcttcagtgcg

SEQ ID NO: 158299 - DNA, 2857 bp, Homo sapiens
  misc_feature (4)..(4): n is a, c, g, or t
  misc_feature (6)..(8): n is a, c, g, or t
ggcngnnnatcaggaagggggtgcaagagggttagtgattggggagcagaaggggtcctaaagatcgctctgggaaaagggaaggatgccgctcttcttccggaagcggaaacccagtgaggaggctcggaaacgcctggagtaccagatgtgtttggcaaaagaagctggggcagatgacattctcgacatctctaaatgtgagctctcagagattccatttggagcttttgcaacatgcaaagttctgcagaagaaggtgctgatcgtccacacgaatcacctcacttccctgcttcccaaatcctgcagcctcctgagtctggcaaccatcaaggttctagatctccacgataatcagctgacagcccttcctgacgatctggggcagctgactgccctccaggtcttaaacgtggaaaggaatcaactgatgcagctcccacgttccattgggaacctgacccagctccagactctcaatgttaaagacaacaagctgaaggagcttccagacaccgtgggggagcttcgaagcctgcgtaccctcaacatcagtggaaacgagatccagagattgccgcagatgctggctcacgttcgaaccctggagatgctgagccttgacgcctcggccatggtctacccgccgcgggaggtgtgtggtgccggcactgcggccatcttgcagttcctctgcaaagagtcagggctggaatactaccccccttctcagtacttgctgccaattctggagcaagatggaatcgagaactctcgggacagccctgatgggcccacggacagattctcaagggaggagttagagtggcagaacaggttctcagactatgagaagaggaaggaacagaagatgctggagaaactcgagtttgaacggcgcctggaactggggcagcgggagcacacccagctccttcagcagagcagcagccagaaggatgagatccttcagacggtcaaggaggagcagtcccggctggagcagggcctgagtgagcaccagcgccacctcgacgcagagcggcagcggctgcaggagcagctgaagcagacggaacagaacatttccagccggatccagaagctgctgcaggacaatcagagacaaaagaaaagctccgagattttgaaatcgctggaaaatgaaagaataagaatggaacagttgatgtccataacccaggaggagactgagagcctgcggcgacgtgacgttgcctccgccatgcagcagatgctgactgagagctgtaagaaccggctcatccagatggcctacgaatctcagaggcagaacttggtccagcaggcctgttccagcatggccgaaatggatgaacgattccagcagattctgtcgtggcagcaaatggatcagaacaaagccatcagccagatcctgcaggagagcgcgatgcagaaggctgcgttcgaggcactccaggtgaagaaagacctgatgcatcggcagatcaggagccagattaagttaatagaaactgagttattgcagctgacacagctggagttaaagaggaagtccctggacacagagtcactccaggagatgatctcggagcagcgctgggccctcagctccctgctccagcagctgctcaaagagaagcagcagcgagaggaagagctccgggaaatcctgacggagttagaagccaaaagtgaaaccaggcaggaaaattactggctgattcagtatcaacggcttttgaaccagaagcccttgtccttgaagctgcaagaagaggggatggagcgccagctggtggccctcctggaggagctgtcggctgagcactacctgcccatctttgcgcaccaccgcctctcactggacctgctgagccaaatgagcccaggggacctggccaaggtgggcgtctcagaagctggcctgcagcacgagatcctccggagagtccaggaactgctggatgcagccaggatccagccagagctgaaaccaccaatgggtgaggtcgtcacccctacggccccccaggagcctcctgagtctgtgaggccatccgctccccctgcagagctggaggtgcaggcctcagagtgtgtcgtgtgcctggaacgggaggcccagatgatcttcctcaactgtggccacgtctgctgctgccagcagtgctgccagccactgcgcacctgcccgctgtgccgccaggacatcgcccagcgcctccgcatctaccacagcagctgagtgctgcccgcccacctgggcctggtcctagccctgcctcggccactgtgagccccgggctcctgctcagccttgtgccagccagactcgtatgaggctcccccctgccctgggccccttccccactgcccaggagcccccatcctaagctccaagcatgtctgggccaggcagaggtgctcctcatccatgacaccaccagtctgaatggtcctgggggctggggctggagaggccgctgcaccaccacccgagcctgggagccagcgtcccagcctaatcacggatctgctgcctcccagctgtcttgactgaaggccaccgcccctgcaggagcttgggtcctcatctgggggccatgcacaggcccgtcccaccctgcatgtgggaagggagcaggagggcctggctgggtgaggggaggccttcctgggaaggcgtgtggtgcaggcctgtgctcacagtggcaccagcaaccctgggtctccctctctgctgctccccagaaccccggggccctcctgctctccacaactgtccctccttaccccatgtagctcgatccgaagcaggagtgtcaataaacctgtcttcagtgcg

SEQ ID NO: 158300 - DNA, 3019 bp, Homo sapiens
ggtgggcaggcgcctgaggctgacggctggcaagcagggcaccgcggtgcgctgaagctagagattccgaaagggggttcgggtagttcgctccggagaagtctgagaagggtggctccggtgatcccagccctagctgtttcccatattcctttatccacctgcctttgaaggagaccagactccggctccgcccggcccgtgccgggtggtctgcggccccgagtccgtgaccaagccctccgagtgatcggcctgccctcgggtgcacccgcgggtcccaacgtgggggatccctccatccgcaaagccagggtcctaaagatcgctctgggaaaagggaaggatgccgctcttcttccggaagcggaaacccagtgaggaggctcggaaacgcctggagtaccagatgtgtttggcaaaagaagctggggcagatgacattctcgacatctctaaatgtgagctctcagagattccatttggagcttttgcaacatgcaaagttctgcagaagaaggtgctgatcgtccacacgaatcacctcacttccctgcttcccaaatcctgcagcctcctgagtctggcaaccatcaaggttctagatctccacgataatcagctgacagcccttcctgacgatctggggcagctgactgccctccaggtcttaaacgtggaaaggaatcaactgatgcagctcccacgttccattgggaacctgacccagctccagactctcaatgttaaagacaacaagctgaaggagcttccagacaccgtgggggagcttcgaagcctgcgtaccctcaacatcagtggaaacgagatccagagattgccgcagatgctggctcacgttcgaaccctggagatgctgagccttgacgcctcggccatggtctacccgccgcgggaggtgtgtggtgccggcactgcggccatcttgcagttcctctgcaaagagtcagggctggaatactaccccccttctcagtacttgctgccaattctggagcaagatggaatcgagaactctcgggacagccctgatgggcccacggacagattctcaagggaggagttagagtggcagaacaggttctcagactatgagaagaggaaggaacagaagatgctggagaaactcgagtttgaacggcgcctggaactggggcagcgggagcacacccagctccttcagcagagcagcagccagaaggatgagatccttcagacggtcaaggaggagcagtcccggctggagcagggcctgagtgagcaccagcgccacctcgacgcagagcggcagcggctgcaggagcagctgaagcagacggaacagaacatttccagccggatccagaagctgctgcaggacaatcagagacaaaagaaaagctccgagattttgaaatcgctggaaaatgaaagaataagaatggaacagttgatgtccataacccaggaggagactgagagcctgcggcgacgtgacgttgcctccgccatgcagcagatgctgactgagagctgtaagaaccggctcatccagatggcctacgaatctcagaggcagaacttggtccagcaggcctgttccagcatggccgaaatggatgaacgattccagcagattctgtcgtggcagcaaatggatcagaacaaagccatcagccagatcctgcaggagagcgcgatgcagaaggctgcgttcgaggcactccaggtgaagaaagacctgatgcatcggcagatcaggagccagattaagttaatagaaactgagttattgcagctgacacagctggagttaaagaggaagtccctggacacagagtcactccaggagatgatctcggagcagcgctgggccctcagctccctgctccagcagctgctcaaagagaagcagcagcgagaggaagagctccgggaaatcctggaagaggggatggagcgccagctggtggccctcctggaggagctgtcggctgagcactacctgcccatctttgcgcaccaccgcctctcactggacctgctgagccaaatgagcccaggggacctggccaaggtgggcgtctcagaagctggcctgcagcacgagatcctccggagagtccaggaactgctggatgcagccaggatccagccagagctgaaaccaccaatgggtgaggtcgtcacccctacggccccccaggagcctcctgagtctgtgaggccatccgctccccctgcagagctggaggtgcaggcctcagagtgtgtcgtgtgcctggaacgggaggcccagatgatcttcctcaactgtggccacgtctgctgctgccagcagtgctgccagccactgcgcacctgcccgctgtgccgccaggacatcgcccagcgcctccgcatctaccacagcagctgagtgctgcccgcccacctgggcctggtcctagccctgcctcggccactgtgagccccgggctcctgctcagccttgtgccagccagactcgtatgaggctcccccctgccctgggccccttccccactgcccaggagcccccatcctaagctccaagcatgtctgggccaggcagaggtgctcctcatccatgacaccaccagtctgaatggtcctgggggctggggctggagaggccgctgcaccaccacccgagcctgggagccagcgtcccagcctaatcacggatctgctgcctcccagctgtcttgactgaaggccaccgcccctgcaggagcttgggtcctcatctgggggccatgcacaggcccgtcccaccctgcatgtgggaagggagcaggagggcctggctgggtgaggggaggccttcctgggaaggcgtgtggtgcaggcctgtgctcacagtggcaccagcaaccctgggtctccctctctgctgctccccagaaccccggggccctcctgctctccacaactgtccctccttaccccatgtagctcgatccgaagcaggagtgtcaataaacctgtcttcagtgcg

SEQ ID NO: 158301 - DNA, 1225 bp, Homo sapiens
acaggttttattaccattttgtgactaacattgcctgcttcattcctggcagacggagttagaagccaaaagtgaaaccaggcaggaaaattactggctgattcagtatcaacggcttttgaaccagaagcccttgtccttgaagctgcaagaagaggggatggagcgccagctggtggccctcctggaggagctgtcggctgagcactacctgcccatctttgcgcaccaccgcctctcactggacctgctgagccaaatgagcccaggggacctggccaaggtgggcgtctcagaagctggcctgcagcacgagatcctccggagagtccaggaactgctggatgcagccaggatccagccagagctgaaaccaccaatgggtgaggtcgtcacccctacggccccccaggagcctcctgagtctgtgaggccatccgctccccctgcagagctggaggtgcaggcctcagagtgtgtcgtgtgcctggaacgggaggcccagatgatcttcctcaactgtggccacgtctgctgctgccagcagtgctgccagccactgcgcacctgcccgctgtgccgccaggacatcgcccagcgcctccgcatctaccacagcagctgagtgctgcccgcccacctgggcctggtcctagccctgcctcggccactgtgagccccgggctcctgctcagccttgtgccagccagactcgtatgaggctcccccctgccctgggccccttccccactgcccaggagcccccatcctaagctccaagcatgtctgggccaggcagaggtgctcctcatccatgacaccaccagtctgaatggtcctgggggctggggctggagaggccgctgcaccaccacccgagcctgggagccagcgtcccagcctaatcacggatctgctgcctcccagctgtcttgactgaaggccaccgcccctgcaggagcttgggtcctcatctgggggccatgcacaggcccgtcccaccctgcatgtgggaagggagcaggagggcctggctgggtgaggggaggccttcctgggaaggcgtgtggtgcaggcctgtgctcacagtggcaccagcaaccctgggtctccctctctgctgctccccagaaccccggggccctcctgctctccacaactgtccctccttaccccatgtagctcgatccgaagcaggagtgtcaataaacctgtcttcagtgcg

SEQ ID NO: 158302 - DNA, 2450 bp, Homo sapiens
ggtgggcaggcgcctgaggctgacggctggcaagcagggcaccgcggtgcgctgaagctagagattccgaaagggggttcgggtagttcgctccggagaagtctgagaagggtggctccggtgatcccagccctagctgtttcccatattcctttatccacctgcctttgaaggagaccagactccggctccgcccggcccgtgccgggtggtctgcggccccgagtccgtgaccaagccctccgagtgatcggcctgccctcgggtgcacccgcgggtcccaacgtgggggatccctccatccgcaaagccagggtcctaaagatcgctctgggaaaagggaaggatgccgctcttcttccggaagcggaaacccagtgaggaggctcggaaacgcctggagtaccagatgtgtttggcaaaagaagctggggcagatgacattctcgacatctctaaatgtgagctctcagagattccatttggagcttttgcaacatgcaaagttctgcagaagaaggtgctgatcgtccacacgaatcacctcacttccctgcttcccaaatcctgcagcctcctgagtctggcaaccatcaaggttctagatctccacgataatcagctgacagcccttcctgacgatctggggcagctgactgccctccaggtcttaaacgtggaaaggaatcaactgatgcagctcccacgttccattgggaacctgacccagctccagactctcaatgttaaagacaacaagctgaaggagcttccagacaccgtgggggagcttcgaagcctgcgtaccctcaacatcagtggaaacgagatccagagattgccgcagatgctggctcacgttcgaaccctggagatgctgagccttgacgcctcggccatggtctacccgccgcgggaggtgtgtggtgccggcactgcggccatcttgcagttcctctgcaaagagtcagggctggaatactaccccccttctcagtacttgctgccaattctggagcaagatggaatcgagaactctcgggacagccctgatgggcccacggacagattctcaagggaggagttagagtggcagaacaggttctcagactatgagaagaggaaggaacagaagatgctggagaaactcgagtttgaacggcgcctggaactggggcagcgggagcacacccagctccttcagcagagcagcagccagaaggatgagatccttcagacggtcaaggaggagcagtcccggctggagcagggcctgagtgagcaccagcgccacctcgacgcagagcggcagcggctgcaggagcagctgaagcagacggaacagaacatttccagccggatccagaagctgctgcaggacaatcagagacaaaagaaaagctccgagattttgaaatcgctggaaaatgaaagaataagaatggaacagttgatgtccataacccaggaggagactgagagcctgcggcgacgtgacgttgcctccgccatgcagcagatgctgactgagagctgtaagaaccggctcatccagatggcctacgaatctcagaggcagaacttggtccagcaggcctgttccagcatggccgaaatggatgaacgattccagcagattctgtcgtggcagcaaatggatcagaacaaagccatcagccagatcctgcaggagagcgcgatgcagaaggctgcgttcgaggcactccaggtgaagaaagacctgatgcatcggcagatcaggagccagattaagttaatagaaactgagttattgcagctgacacagctggagttaaagaggaagtccctggacacagagtcactccaggagatgatctcggagcagcgctgggccctcagctccctgctccagcagctgctcaaagagaagcagcagcgagaggaagagctccgggaaatcctgacggagttagaagccaaaagtgaaaccaggcaggaaaattactggctgattcagtatcaacggcttttgaaccagaagcccttgtccttgaagctgcaagaagaggggatggagcgccagctggtggccctcctggaggagctgtcggctgagcactacctgcccatctttgcgcaccaccgcctctcactggacctgctgagccaaatgagcccaggggacctggccaaggtgggcgtctcagaagctggcctgcagcacgagatcctccggagagtccaggaactgctggatgcagccaggatccagccaggtacaagcacagctccagcctcttccaggcagggctccagccgtatgtgtgggctctggtggggacagtcatttgcttacatttcaggatgactcctgagggctggttctagcctctgctggtcggtaaggtttcctcccaaggagcaggcttagggatcagtgagcccattttacagatgggaaaaatggg

SEQ ID NO: 158303 - DNA, 172 bp, Homo sapiens
taatgtctgttattcctttttgctaccttcagtaaattttagtgcccttagtttttgcttctcaaaatcacccatctctgtctgggcatctcctgcagtgcacagagcagcacagtggatagtttggagtttcagtgagtgctgctttacaccacactctttgttgagacag

SEQ ID NO: 158304 - DNA, 483 bp, Homo sapiens
cttaaaaacctgaggattttagccagaattttcctgttctaattagacctatgtcagtggttctcaattggaagtgattttgccccccaggggacatttggcagtcttataggcatctggtggatagaggcaggggatgcacaggacacccctctttcccacctacccacacaccaaagaattctccagctggaaatgtcaataatactgagattcaaaacccctggtctacatgtgcttgaggaacagtgaagagataatggagcctagccacctgtctaccatttgttttatgtgaccaatgcctcaaggagttatagggctgggctgtgaacagttagtaagtggcatatgattaattattcagtcctgagttattcagcgtacttcagtgaaaatcacagtctaaaccagggacttaataaaggattactgacaaaagagaactatatatgaatgaaacatcatctttttgtacttgac

SEQ ID NO: 158305 - DNA, 836 bp, Homo sapiens
ccagagctttgggagagcccctggaatttgagagtgacgccacaaccagcatagtattggacattcactggaggactgaaattcctgggttgactgaatggagagaattttctgcgcattttggtcccggtatgaccattatcccgtattcgcgcccggtatcccccggccgggcgagtcctcaagctctaagataatctctgccctggtgaagctggtaatttggttagggtgacagatcaggtatgacaataaagaacatggatttcccttaaaccagccacaacagaagtcaggcatcaccggcggcgtagccattcacacagtagttacctagtttgccttacagacttcttccagtgttgctaccaagtactcaaaatagcttgtcctttttgagtataaaaagcaacatcatacccaagtcccagtacagtaatacacattaaatgccacacagcatttttgcctcggataataacagccgtattaagttgttacagacattgcctctatctcatctctggaggtggtataggattcttctggaacgaatcacagtctgggaaagcaaacccagaccccttgccccattggttcagctgcttggaaaaattccccacttaattaagatactcttcttgaaatatggagtttcagagtaggctaagcaatgaccaggccagagctttgggagaggcccttggaagttgagagtgacgccacaaccagcatagtattggacattcagtggatgactgaaaatcctggttgactgaatggagagaatagtcgggcagtttcttcgagaaaagtcaatagcctgtgagggcgcc

SEQ ID NO: 158306 - DNA, 348 bp, Homo sapiens
tatatttatcaaaaccgatagaacaggcaactccaagagtgaaccctaatataaactgtagactttgagtgataatgatgtgtcaatgtaggctcattggttgtaagaaatatacctctctggtatgggatgttgatcatgagggaggtttgcaggtgtggagacagggaatgtatgcatgctgtctatattttctgttcagttttgccatgaacctaaaactgctctaaaaataaagtttattaatttaaaaaaattaaaagaagttaagtaacaagggcaaattatgattagattagaatacatgttttcgcacgtgtagagttgtaataagactcatgtgtactg

SEQ ID NO: 158307 - DNA, 176 bp, Homo sapiens
acagatatttaatacatactcaggtaagctctttctgtgtacatttgccattaaaatatatgcagttcctactagggaattccatattactcagataatatcaaggtatagaaaagattttcgttttagtgatttttcagaaatttttaagccgttcctctttcccctgcagttta

SEQ ID NO: 158308 - DNA, 665 bp, Homo sapiens
atatctgctcgttctcccatcggacggcagctccgtgaggacaatgtctggctccctgccctctctcccctctgagaacagtacctggtacctagtatgtgctcaagaaatctgctgggattacaggcgtgagccaccgtacctggccctgtttttaaatttttaatgtcatcctgtgcttgacaaaactccttatgttccctacggggttgccacactcaccaaactcacaggaaagctgttcttacaccagaattcatgcacgtgtccatctgactgatatttcctgaggtcctgtggtaagccaggccttctgctgactgaccagtttccaaagggcctgacacattcctggcaccggaatgcatatgcccaccttccgagccactggtctgaggtatcttggggtcagcaggagactggccagtgtgtgtggcctcagagaaagggactggatgggtctgagtggcatcccactacagtagtggtgactatagtcatggtgacgacaccactggacctaccagcccacgccacgcacactcccagactagcacctcagcttctgggcatcacggtgcaaatcctcacgggttcttattccacagtccccctttgtctggactctgggatgacttgcccccttggctaatgccatctttgtc

SEQ ID NO: 158309 - DNA, 389 bp, Homo sapiens
atatgactttttctattcctcgttctttgatttgtgcttcctctgccctaatctcacctcccaatattccactttctcccacgcttttcctctgtgtctctggaacctgaattctgacaatttccctgacatctttgatttatgccaaaaacattcgcaccatctcctgtcccttgaggatactccttccctctcacatctgtctcagatttgggagtcagaaggtgacatccttggcctcggtgccattttttggctattaattcccttctagatataaaggagactgctgtgggctccacttctccaactacattgctctctgctccacctcactgctatcatccactgactgcctggttgcccctattttattcaagacttgtgca

SEQ ID NO: 158310 - DNA, 420 bp, Homo sapiens
gttttggacctcttgggggtgagctaaagagcaagtgagtccgggattttcgagacatcatggctgtgaaaatgctttgttttccctaccgtggaggatctcaagcctggcgtccttcagggtcaccctagggggcaaactgcacatgcaggtgcctgagctccatttcagacccaccgtgggggatctcagaggatgcgcccaggaatatgccccttttccccagtagctttaggggtacatgtggttttgtttccgtgggcaaatcataaagtctgagattctagtgctcctgtcagccaagtagtgcacgctgcacccagtatgtagctttttattccttagccaccttctaaaagaagacttgggtaacttgaggcctggcccagtgacaacactctggcaaagtcgtgcacggtg

SEQ ID NO: 158311 - DNA, 268 bp, Homo sapiens
aggtgggggagggatgcagtaggaagtgcaggtgcaaggaccaacatctagccgggaagtactggtaagtggttagaagtaaattgcctggtgcggtggctcgtgcccataatcccagcactttgggaggctgaggcgtgagccaccatgcccagcctcaagtagcttttaaacaagctcactgagatgagaggtgaggcggtgagcttagaataggtggttaggaagtgattaaagtaggggtttccagtgctggctctatactaat

SEQ ID NO: 158312 - DNA, 228 bp, Homo sapiens
caaacaccagttgcagaaaaataaagctagtgggaacactttctaagtgacacatgcagttttcctggaaggtggcataaatggaacacttttaaaacgtttgagtgctttcccaaaagctggtaggttcggtgggctgaggaactggcttatattaatatatttgttttgttcagccttcacagtgctgtaaagactttaagccaatagagaatcaggagactggca

SEQ ID NO: 158313 - DNA, 300 bp, Homo sapiens
cgcagtggcttccttttcccagtctctccccggggcaagcaactgcaccctgcacactcactaggttttctaagccctgctttcatgacatctcttcttgatttaaccattttgaatgggtccccattggttactcaatgaagtcaaatttctttttttttttgagacaaagtctcgaaaaaaaaaaaaggaaggaattttttttttttcaggtttttttttatagcaaggggagaatgactaatacaatcttttgcacccgggggtcatccaaaagagcaccatcaaagttctgttttg

SEQ ID NO: 158314 - DNA, 585 bp, Homo sapiens
gggtcccggtacactgaggatgatcgcgtctgagtgcggtatcctcctagactggagcatgtgtccgtggtgaatgagtggatggggggattttctgcttctctgaagaattggaagacctggcaacacagggtctttgttcccacctaacttgggcccaggggaacagccccagcctggggcatccccttcccccagtcccaggccccatgggcagtcatttgtggccctgctctgtcgtctctcctcatcaggcttgtcaacaatctatgaaggcccagcccatatgccagcccctcccacaaacaactcttccggtctcccttgcttacacacagatacatcctctttctctgtccctcccaagaactcacagagtaccttgcctggcaccagctatttctctcttggtttaaggaattgtgaccaatcaagcaagacccagtttagttaaagtcccatccaccttaccaccatgtctaatgtgtgccaggcacagtgctaggcacaggggctgaagaggggcatctaggtccagctggtaagacccgagtctggctggaaaggcagccgttgtgggctgcg

SEQ ID NO: 158315 - DNA, 665 bp, Homo sapiens
atattttccttggctcgcggagtggtttttaaaattctgaactagtcgccaacactttgaattgggaggttgtacctaacaggctgagaaggcgaggactgcagtgtctcgccgtgtgctgtatccccagggcagggcacgtgtccgtggtgaatgagtggatggggggattttctgcttctctgaagaattggaagacctggcaacacagggtctttgttcccacctaacttgggcccaggggaacagccccagcctggggcatccccttcccccagtcccaggccccatgggcagtcatttgtggccctgctctgtcgtctctcctcatcaggcttgtcaacaatctatgaaggcccagcccatatgccagcccctcccacaaacaactcttccggtctcccttgcttacacacagatacatcctctttctctgtccctcccaagaactcacagagtaccttgcctggcaccagctatttctctcttggtttaaggaattgtgaccaatcaagcaagacccagtttagttaaagtcccatccaccttaccaccatgtctaatgtgtgccaggcacagtgctaggcacaggggctgaagaggggcatctaggtccagctggtaagacccgagtctggctggaaaggcagccgttgtgggctgcg

SEQ ID NO: 158316 - DNA, 536 bp, Homo sapiens
acttccacatgctctacctaacaattttagtgtaaagtttcattttccttatcaaattctatgtaagtgagacattggtgttttagccaaggtaccctgctttatggagtatctgtgttcctagaaaatttgttttgaaatatgattttgtaaatcagattgtattgtaatatacttggtgaccttttgcttcaaatcaccttaaaataaattcatttatattatctaattcatattttataaatcctaatttttatatgtactcatttttcttgaattgggggtaattctacaaacaataaacaaggtaaatgatttttttttgccagtttgtactaagagaacatgttattttgtttcgggtgaatgtatgtatcttaatacactgtactacattagacatcaatagggaggaatgtaacgcatttttcttttgtatggaaatctgttgaaacctatcttaaagagttttgagcagaaattgaaggatgagcctgaggttttctgattagttggagaatattgttttcagtaga

SEQ ID NO: 158317 - DNA, 323 bp, Homo sapiens
tacaatcttcaaatctggtggagaggaaagcgtgtggacttgggaccctgagttggagaatctgctctctgccctgtgaccctggccaagtctctcagctccaagcctgcatttccgcacctgtaaggtggagctaacgggacacgtgcagcgcagaccaggccacggtgagcacaggcaggaggccacggggtgcagtgctcaggcctgtgaggagtcagatcctggctccgaggagttgttactggatgcccagaagcacagtggcctcatcctcaaagcagtggaggtggggggtggtaagaacagggccgatcttgcag

SEQ ID NO: 158318 - DNA, 200 bp, Homo sapiens
ttttaggcccctccctcctgaaaatctgattctacctaatctggcgtagttgcagaatgctagggtataatacagttacactctagaattgtttctttaatgcaagcagtattctaaaactgtttcagatctagtttccctttctataaaatacttttcatgctctctttgtcatcctaaatgaatttcatggggaaaaa

SEQ ID NO: 158319 - DNA, 571 bp, Homo sapiens
ttacttcctaagccccaacttttttttttttttttgagtcttgctctgtcgcccaggctggagtgcaatggtgcgatctcagctcactgcaacctccgcctcccgggttcaagcgattctcctgcttcagcctcttgagtagctgggattataggtgcctgccaccacacccggctaatttttgtattttttagtagagatggggtttcaccatgttggtcaggctggtcttgaactcccgacctcaggtgatctgccctccttggcctcccaaagtgctgggattacaggcatgagccacctcactggcctagccccaacctttgatcttgggtttggcctccctagatttgggctggggagagcagatagagacatttaaggtctaatgagagaatttagattgctcctgccaagcccccagctgaagcagcttccttcacagaaaggaccagaatctgaggttaaacttctaatatatccccattctggttagatagtttccttgcctgcattctcagtgtgataaggagtgaaaactgtcaaagataacttcagttccaaacatgtc

SEQ ID NO: 158320 - DNA, 149 bp, Homo sapiens
aaacatcctcaaagggacttctcatctcattcatctcttcctcccacacaatcctcccacccccaccccaaaatccacttgtcaaaagtcaagacaagctctaatcctacctgcattaaaccttcccgaagcctcccggtcagaactat

SEQ ID NO: 158321 - DNA, 311 bp, Homo sapiens
cttgcctgtaaaagcaaaaggcaaagttggttggagaaatgaataaaaataactacctccttgggttattatgagtgttcaatgaattgaatgaaataattgatgcttagtgcttaacacagtgactagcaccatccatatcaatgggattcagctattactgttgttattagagttgttagttggtctccccagccttgctcatgagtttcattatccatgtgtaaatgaataagtccccataacaacttctgccgtatggatgctggatagctttgctcatgtgagaagcaactcaaatcaacacaaat

SEQ ID NO: 158322 - DNA, 325 bp, Homo sapiens
ctcaatttctgcaaatagggcctaggaagcaaaatatcacaacattatcattgccattaccaccattgaaagagctgaacatttactatgttctaaggcagtagtttccaaaccttagctgcatcagaattgctggaaagggtggttaaaacacatactgctgggcctcacctccagagtttctggttcagtgggtttgggttcacaaatttgcacttttttgtctttttaatcttttgtagaaacaagttctcgctttcttaaccaggctggtctcaaattcctatcctcaagtgatccccatgcctcggcctcccaaagtgct

SEQ ID NO: 158323 - DNA, 155 bp, Homo sapiens
aggtcataggacaacagcggagggaaggtcagcaggcaaacaagtgaacaaaggtcctgctgcaatcggagaagcttctcaagaccaatgctattgttaccagggaaacgatactttatcatggaaatatattattctaagagtctacttaattg

SEQ ID NO: 158324 - DNA, 534 bp, Homo sapiens
tgtgttcctctgaacgttattacaaaagaaaagaacattgttctctagaaatatgaaagaaaaagaaaagaacaaggtgttactctagcatagttttttctcaattatctgagttgtgaaaaaaaaagtaatgaatagtggagcttcctcaaaacagattctgagcgctgtcagtagttaacagtaactactgtggtggaattcctgtgtggatctattttggcactgtgttacgtaattatttttatcttaggatcagatctgaatcattcaaagccaatgtcttcagggcactggtgtgactccaggtgttctcacatgcctgtctttcttctcagatcactgcccaacactgaatctcaagtgatggacctcagtgcatatgaattcggggcctatatgttttgtaacagcaaatcctaccccactggtgaaaaagtctaataacctgactgattttctattttgatgagccctcaattgagagattatattgtggtagtaggttacacctgcccaccatgtgaaaaacaa

SEQ ID NO: 158325 - DNA, 434 bp, Homo sapiens
gttcaagacgagcatggccaacatggtgaaacaccatctctactaaatatacaaaaattagccaggcatgatggcacacgcctgtaattccagctactcaggaggctgaggcacaagaatcacctaaaccgggaggcggaggttgcagtgagtcgagatcacaccactacactccagcctgggcgacagaatgagactctgtctgaccaaaaacaaacaaacaaaaaaaacaaaaaagtaaactaaaaagtttttagaagaaaacatagaaggaaaaaaatcttcataaccttgagctaaaacagagatgttagaaatgacaccaaaaccatgatccacaaaagaaaaaattggtaaacggaacttcattcacatttttttttctctgcaaaaaaccagttaacaggttgggtccggtggctcacacctataat

SEQ ID NO: 158326 - DNA, 131 bp, Homo sapiens
tcagctccatgtatataatcccacatgttctttgacctatgagcaaggtattaatgcaaaattgactcatctgctattggtttttaccttcctttcagtttgtctcctttaatatatatatgtttgttctt

SEQ ID NO: 158327 - DNA, 628 bp, Homo sapiens
acttggtttcacataatgcctgataatgctgatgtttatcacttctgaacgaaaggtttagatctggctaacaggttcatattatatagaccagacattattactcaaaagccacaatcaggtcaatttcaagttaagatcagatgtgacatttattgccaaaagtgatccatcttttcccgtcattccgatggcttgaagtagccctatcgccagtggaaaaggggcagcagagcctcatggtccccaccctcacgtgggtgcctgggccctcttcccatcatcccaatgcctcgaagtagccccatcgccagtgggaaaggggcaacagagcctcatggtccccaacctcacgtgggtgcctgggccccaccccttaccctttcctcttcccgttttctttacttggccatgttacaattccacatctcttactctctataatctccttcaatagctctgttttgctttttaactgcttttcaacatttcactaaccttttgctgaaaatgaaataaaacttcactcagtggaatattattcagccataaaaaggaagggaaattggcagggcatggtggcacatgcctgtaatcccagcacattgggaggccaaggtaggcagat

SEQ ID NO: 158328 - DNA, 290 bp, Homo sapiens
tgggaaccacttttctagtttataatacaatccacaaacttatgtaaacaagaaaaatgtaatctgtaaaattcccatgtacaggaataccaaatacagtgtgccaaaagtggtaggacaattgaagacttcattgtcaaccctgctgtgttgtgcagctgccacttttccctcagaatgtgtgtgttcacaaggtgtgttgcttttgtagatcaacataagaaatacttactagtaaagtttatttcttatctgtttttaagataagtaaattaacagttcactatttt

SEQ ID NO: 158329 - DNA, 273 bp, Homo sapiens
gtagccgaggtgctaaggagagttatcttaacagggctagtcataatcatgcagcctgagagagagctccaagtgggctgcaggagatcccagtggggagctgtcagccttccaagttctttctgtgccaggtcaccacagggcggcttcattattttgtttgaagtagattcctaagacatcagatgttctcatttgtaagttcataaacacattcccaagccagaagtaaatgacttttacttagccacagctcaatacccctttgtgctt

SEQ ID NO: 158330 - DNA, 609 bp, Homo sapiens
attcttggctgcagtgcaaggaaagcttggactcccagtcaggagacttgaattcaagtcccagctccacacttagatgtgtagcctgggcgaccccttgacctcccacttcccaccttacaccttacctgcccaggtgtaaaacaggaaaaaatgatacttcccatgtggtatacagattttgctctccttatttctaaattgtgttgtccactgcattatcttaaaaagcaaactataaaaacatccgggccgggtgcagtggctcatgccagtaatcccagcactttaggaggccaaagggagcaaattgcttgagcccaggagttcaagaccagcccaggcaacatggtgaaaccctgtctctacaaaaaatgagccaggcttgaggaatgtgcctgtagtcccagctactcaggaggctgagatgggaggatcgattgagccctggagttcgaggctgcagtgaaccaagattgcaccactgcactccagctggggcaacagagcaaaaccttgtttcaaaaaatgaaaaagaacagggaaaaacaaagaaaatatccccccagcacacaggagagggttgctatttgggagagcgaaatccat

SEQ ID NO: 158331 - DNA, 278 bp, Homo sapiens
ggggacacgctaggcgcgtgccctcatccaaggaccttctacaggaattccagggcagaatccatgtggaactcctgctgtgattctccaggggctccccggctcttggaaaggcttctgtgttccaggggtgtgtgtgaaagccctacattgagcgaccccacctttcatccaggcccggagaccttggctgctgcaaccctattgccagcttaccatgggacccagctcttaaggcgagaagggcttgaggcctcttccccacagggcttacagac

SEQ ID NO: 158332 - DNA, 327 bp, Homo sapiens
ggcaacttcaatagctatgtggatggatccactcaaaactcttagctcacaactgattccctgacatcaattccacttccacttgagtcacccacacttttgcacaaaccctgaacctggcgtacccatctcaaaaccttgccctctactgtctgaccacaatttcccttcctgtctatcttttgaccattcactacctgacagctgctctctgaacttggccaggcctctgttcccttaggcctttttcctagagtatatcagccacctcttggcctttccttctgccaatccaggctgaaatccatgattcatcacaaatggatc

SEQ ID NO: 158333 - DNA, 423 bp, Homo sapiens
ttgccagaggctggggagagcagggaatagcaagttattgtttaaggggtacagaatttctgtttgggatgatgaaaaagttcagaaaacagataatggtgatcactgcacaacactgtgaatgtacttaatgctaccaaagttctgcacttcaaaatcattaaaatggcaagttttatgttaggcatattttaccacaataaaaaaatgcaaaagaaaaaagtattttcatgttaattcattaaagttaggaattctctctagtctgaaattcatgcaaacaaatatgctcttaaaattggaccaggggagcactggctttggtcatctgatcactgattcaaatccagtgtttactcttcctaactacggagtcttcatacaagttatattctaaacctcagttttctccccgggatacag

SEQ ID NO: 158334 - DNA, 202 bp, Homo sapiens
gggggtgcgccgtcctcgctgaggaaaggagaacgggcagatggctgtaagtgatggctctgtgaagggcctgctgagtgtggtgcggggctggagccgtgggccagccccggacccgtgcctagtgccactggctctagaggcactggtaggtgcagtccatgtcttgcatgccagccgcgcacctcctcgtggcccagag

SEQ ID NO: 158335 - DNA, 418 bp, Homo sapiens
tccaaatagtggttccttcttgaaggaagtattgactgggaagtggcaccagggaattttctttttagaaaaaaattttgtagagatgggggttttgctctgttgaccagtctggtcttgaactcctggactcaagcaaccctcccacctcggcctcccaaagtgctggaattataggcatgagccactgtgcctggctggaactttcttgagtgatagaaatgttctctgtcttgatctgggtggtgttcatgtgggtttctatgtatgaataaaaattcaatgagctgtacatttaagactcgtgtgctttactgcatgttgagtatatgtcagttacaaaagcaaattgataatggcttattcagagaaaggaggaaaggaagaaatggaactggcctcgcagtgccaaagctgg

SEQ ID NO: 158336 - DNA, 180 bp, Homo sapiens
ggttctggccagtgcagtgtccgctacaggagacttgctcatttatggtttacaacacttaaggtttctcttagcaccaacaagagagtgctttcaccttagcttctatagagtgaggagggagaactagctaataaaaacagtgataatagtagctgccattgagtgcttactccatgt

SEQ ID NO: 158337 - DNA, 1166 bp, Homo sapiens
  misc_feature (934)..(934): n is a, c, g, or t
  misc_feature (987)..(987): n is a, c, g, or t
  misc_feature (1061)..(1061): n is a, c, g, or t
  misc_feature (1074)..(1074): n is a, c, g, or t
  misc_feature (1077)..(1077): n is a, c, g, or t
  misc_feature (1144)..(1144): n is a, c, g, or t
cccggtggacggaagtgggtgttggaggctttaaggtagctttaaattcgtgttgtcctgggagctcgcccttttcggctggagtcgggctttacggcgccggatggctctggacgtgaagtctcgggcaaagcgttatgagaagctggacttccttggggagggacagtttgccaccgtttacaaggccagagataagaataccaaccaaattgtcgccattaagaaagtcccactctgtcgcacaggctggagtgcagtggcgtgatctcggctcactgcaacctccacctcccctaggctcaagcagttctcctgccgcagctctcaactgctgacctcaactgatctgcccaccatcggcctcccaaagtgctgggattacaggcttgagccaccacacccagcctgcaacttgtaattctgagtcaacattatttccgaaatcctctatatcagacaaggtttcactttgattgtccagtctggtgtcgaactcctggccttaagcaatcctccagcatcggcctcccagggagctgggattacaggagtctctgctggtagccactacagctgtgaatgtgctgtgtcatacctgaagccaatatgtctcggagttcacctgaggcccatgatcaaacttggacatagatcagaagctaaagatggtataaatagaaccgccttaagagagataaaattattacaggagctaagtcatccaaatataattggtctccttgatgcttttggacataaatctaatattagccttgtctttgattttatggaaactgatctagaggttataataaaggataatagtcttgtgctgacaccatcacacatcaaagcctacatgttgatgactcttcaaggattagaatatttacatcaacattggatcctacatagggatctgaaaccaaancaacttgttgctagatgaaaatggagttctaaaactggcagatttggctggcnaaatcttttgggagcccaatagagcttatacacatcaggttgtaacccaggtggtatcggcgcccgagttactnatttggaggctanggntgtatgggggcggtgttgggcctgttgggcgggggcggatattagcgaaggtactccaagggtcctnttgcgcgggattcagggcgaga

SEQ ID NO: 158338 - DNA, 704 bp, Homo sapiens
  misc_feature (472)..(472): n is a, c, g, or t
  misc_feature (525)..(525): n is a, c, g, or t
  misc_feature (599)..(599): n is a, c, g, or t
  misc_feature (612)..(612): n is a, c, g, or t
  misc_feature (615)..(615): n is a, c, g, or t
  misc_feature (682)..(682): n is a, c, g, or t
cccggtggacggaagtgggtgttggaggctttaaggtagctttaaattcgtgttgtcctgggagctcgcccttttcggctggagtcgggctttacggcgccggatggctctggacgtgaagtctcgggcaaagcgttatgagaagctggacttccttggggagggacagtttgccaccgtttacaaggccagagataagaataccaaccaaattgtcgccattaagaaaatcaaacttggacatagatcagaagctaaagatggtataaatagaaccgccttaagagagattggacataaatctaatattagccttgtctttgattttatggaaactgatctagaggttataataaaggataatagtcttgtgctgacaccatcacacatcaaagcctacatgttgatgactcttcaaggattagaatatttacatcaacattggatcctacatagggatctgaaaccaaancaacttgttgctagatgaaaatggagttctaaaactggcagatttggctggcnaaatcttttgggagcccaatagagcttatacacatcaggttgtaacccaggtggtatcggcgcccgagttactnatttggaggctanggntgtatgggggcggtgttgggcctgttgggcgggggcggatattagcgaaggtactccaagggtcctnttgcgcgggattcagggcgaga

SEQ ID NO: 158339 - DNA, 758 bp, Homo sapiens
  misc_feature (526)..(526): n is a, c, g, or t
  misc_feature (579)..(579): n is a, c, g, or t
  misc_feature (653)..(653): n is a, c, g, or t
  misc_feature (666)..(666): n is a, c, g, or t
  misc_feature (669)..(669): n is a, c, g, or t
  misc_feature (736)..(736): n is a, c, g, or t
cccggtggacggaagtgggtgttggaggctttaaggtagctttaaattcgtgttgtcctgggagctcgcccttttcggctggagtcgggctttacggcgccggatggctctggacgtgaagtctcgggcaaagcgttatgagaagctggacttccttggggagggacagtttgccaccgtttacaaggccagagataagaataccaaccaaattgtcgccattaagaaaatcaaacttggacatagatcagaagctaaagatggtataaatagaaccgccttaagagagataaaattattacaggagctaagtcatccaaatataattggtctccttgatgcttttggacataaatctaatattagccttgtctttgattttatggaaactgatctagaggttataataaaggataatagtcttgtgctgacaccatcacacatcaaagcctacatgttgatgactcttcaaggattagaatatttacatcaacattggatcctacatagggatctgaaaccaaancaacttgttgctagatgaaaatggagttctaaaactggcagatttggctggcnaaatcttttgggagcccaatagagcttatacacatcaggttgtaacccaggtggtatcggcgcccgagttactnatttggaggctanggntgtatgggggcggtgttgggcctgttgggcgggggcggatattagcgaaggtactccaagggtcctnttgcgcgggattcagggcgaga

SEQ ID NO: 158340 - DNA, 651 bp, Homo sapiens
tatctgtgggaatccattctgaagaaggattaaagtaagtctattttccccaaatgatcaataaccacccagacctaatcactatctctgattacatgatgaaaaagattctggaagcagcacagcaaaaatatgacaatgacagagaactcaaaggtgaccctgtactcaccatctccatgcagacatcacaagtgcagggatgagtaagccctttagttggagatctatgttgctaataacaagacattctgagttttcttcttcttagtgagagagccttccatgaccattttcccatagtttgcctttattcgtttctaagaaactatttttccagttttgaccatggtgctgtaacccacagaggcaccgttacactgaaactatgcaaccctatctgttaagtattatccaacgcccacttgggttttcactggctcatttagagaagcacctttgagtacaatatccaattaaacagtaggtttacatggagtgcttcctgctcgtgttaaaaatctcattctggccgggcgcggtggctcacgcctgtaatcccagcactttgggagcccgaggcaggttgatcacgaggtcaggagatcaagaccatcctggctactacggtgaaaccccgtctctactaaa

SEQ ID NO: 158341 - DNA, 467 bp, Homo sapiens
cagataaatcccagaaacactgccacataaagattcaattgagagctgtctctgaccaatagcttcttctctcatcttctctctctacctccatccaagacttcttatagaaagacaatcctgaaatggactattttcaatgaagtaatgttaggatgtcttcagagaccaatttgtttcacttattaaaagtggaaaagaaataaaatcctaactaaatttcctaacacccaaaccatgcagccagaaagctcatgaaattttctgtggttcccactgaaacctccagccaagtcttcgagaacaatctcaggcctccacaggtaggtcaaccaaccttaaggaactatgagaagaaagtctaatttaaaagaactgggaagaagtattacatttccatggtttttataagccaataccattgttaactccctaggcccaaacactcaccactcctgagactttta

SEQ ID NO: 158342 - DNA, 367 bp, Homo sapiens
ttggtttccctacttcaaaatgtagcatttgccttcttcatgaccaaaagtaaacatgtttgtaaagctatttatcattactattaaagcttgacaaaaccagtgaatttggcaaatcagtgattcagcaaattggctttcaacacattttgttgatgattttatgtcaattgactattcaatacatttatattttctcaaactgaatttcagctacttgtctgcttctttcacatcacaaaacttatttcactaaattgtaacaatacagaataactaacatttattatgtttttaatttgtgccacttttaagctaactgctggccgggcctggtggctcatgcctgtaatcccagcattttggg

SEQ ID NO: 158343 - DNA, 107 bp, Homo sapiens
attcacctatttcctatttctcagcactaaaaagtctgacaattttacttcctgacaaatgtctttcttaaaaggaattataaaattttatatagatctatatttat

SEQ ID NO: 158344 - DNA, 471 bp, Homo sapiens
gcactttgggaggcctaggtgggcggatcacttgaggtcaggagttcaagatcagcctggccaacatggtgaaaccctgtctctactaaaatacaaaaagtagccgggcattatagcgggtgcctgtaatcccagctactcgggaggctgagagaggagaatcgcttgtacccaggaggtagaggttgcggggagcagagatcacaccactgcactccagcctgggcaatagaacgagtctccatctcagaatgaaatgacatgacatgatgaaatgaaataatgaaattaataatgaaatgtgggtggcgcactccagcctgggtgatagagtgagtctctgtcatgaaatgaaatgggaaatgaaatatgaaatgaataatgaaatgctgggtgcactccagcctgggtgttagagcgagtctacgtcatgaaattgaaaaatgaaatgaaatagatgaaatgaaaaaa

SEQ ID NO: 158345 - DNA, 493 bp, Homo sapiens
aatcatctctcctctactattagtgacacagtttctcattcatatctcccttatgtcacccattagcttgtataacaattttgtgaacacactcacttggatagtctctgtaggtctaaagcttcttacagagaagatcctagtgtgtttcacttttgcatatagtacccacaactcttgcttatagcacccactcacctaggattcagaaatgaaccagtttgttcatatatttccaagttattagccagtaaagttagaactctctaatttctcataatcaaatgttaactttttgttcatcctttttgttagatgcagttgagatggagacgatattatttttgttaggatacacagctgaactgttaggataaacagtgtaactgtcacccacttgaagatattttaaattaattatatactagtagacgtatttgacataaagtgtaaaacaatgtaaaacatcaaataaataaaatttttcttctaa

SEQ ID NO: 158346 - DNA, 417 bp, Homo sapiens
  misc_feature (378)..(378): n is a, c, g, or t
aagttctcgtattacttttacactatttttttttaaactgcatcctttcgaaaatttcaacttttattttagattcaggggtacatatacaggtttgttacctaggtataatattgcatgatgctaaggtttgggtcactcagatagtgaacatagtacccagtagacaagtttttcagtccttgtctccctccctctctcctgtcaatagacacctgtagtccccactatcaattgttcccatctgtatgtccctgtgtacccaatgtttagcttccacttatgagaacatgctatatttggttttctgtttctgcattaatatcttaggataatggcctccagcttgcatccacgttgctgcaaatgacatggttngtcgacgcggccgcgaatttagtagtagtaggcggccgc

SEQ ID NO: 158347 - DNA, 232 bp, Homo sapiens
agactccacaggcgtgatcctgagccagagctaccctggaagctatccccagttccagacctgctcttggctggtgagagtggagcccgactataacatctccctcacagtggagtacttcctcagcgagaagcaatatgatgagtttgagatttttgatggtccatcaggacagagtcctctgctgaaagccctcagtgggaattactcagctcccctgattgtcaccagc

SEQ ID NO: 158348 - DNA, 415 bp, Homo sapiens
gagggggatgtgcaggcacagatttattatgcaacatctgagaagccagatgaccgtatttctggagggttcaccagagactgctttgactagtggggggtctaggcatcaatgggcaatcggcatggccgtcctctgaggccagggtagaagagggcaaataggactggagccgggctcggaaaggtcagcaggagataggattccagagagcagaggttcggttgatgtgactgtcagaacaggagcaaggccagagtggctgccagggatcctgggcgcacaggagtctctggtgaatgctagtagaccacggtattcccaggggccacggaagccccaacactgcttgactgcgctaagcaaagaaagatcaaaaacaaaaaacgagcgaacaggacagtaatggcagctg

SEQ ID NO: 158349 - DNA, 156 bp, Homo sapiens
gctttagtaggggaactaacaaaggcagatagacttctaagctagcattctgtactttggctggaatattccacaagctcatggctttgggccataagcccaaaggagtcatttcccaacttcagtattttgaaacattagatatcctgtttcctt

SEQ ID NO: 158350 - DNA, 345 bp, Homo sapiens
aaaaaaaagaagataccctgggtaaaagagaaggagagcgagtccttcttgtgtgcttttgacccctctactgaagaaatgctaaatagtaggaacagcaacccaaccactgagggttttgaatatatacttcaaaattctaagggaaaaaccttcatgcttatagttgaatttataagggtgagtgatgtggaaaagagcgttgggaagcagcgcctgtttgtgttctagtctggggacttggtctcgtttggaacaagcagcagtttgcaaaggcctaagcctagtgcttcactttgacttagtggttctgtttccttttctccgtagttagaggcacgtgat

SEQ ID NO: 158351 - DNA, 529 bp, Homo sapiens
tctgtcttgttttcctgccaatagaagaactatgataaatttattcatagcagtgtgataagaacttgatcttaatcatacactgtagccctcaaatcgtgtattatgctggcttgtttttggtgtccctagtaatttcatcagattgtgagctccttgggagcagagaccatgtttatttgaaatggtggcagcacagttcctagcaggtgcttgcattttggtagatattcaataattatttttcggcttattaatctttgctctccaaactgccatataaaagaaaacatcgaagaggagtgatgttttacacccaagaatggatccctcctggtagaatttcaaataatgacctggggttccactgcctttcaaatctgtaaagtgttaactaccacctgcattgtttatacagcaagtaggtgatttctagaatgaatcttttcttgagtatgaattaacctcaaagtttagaaggaactatatttcttctgatgagaaagtcaaatggcatcatcaaagtact

SEQ ID NO: 158352 - DNA, 569 bp, Homo sapiens
gcctcccgagtagctaggactacaggcacttgccactacaccccactaatttttgtatttttagtagagacggggtttcaccatgttgaccaggctggttttcaactcctgacctcaggtgatctgcctgcttcagcctcccaaagtgatgggattacaggcatgagccaccacaccccacctaactctgctcataatgcaatgtttcatctgggcaatgccctgcccctttctgagtctcacttttctcacctgaaagaggaggttactgttgatgacagtgaacatttaggctgtgctgagttttacactaagcatactgtctctaactctcccaacactcccacaaggcaggtgctattatccccattttacttttgagaaaattaaggcctaaagaagtgagaaagcttgtccaaaccgctatagctcttgggcaaaggcattagtgaccaatgtgtatttgactccaaagcccaggatgttagccacagtgcagggctactatccttttatacaatctgtcagccttcttccatccgtggcatgtattcatctaattttattaa

SEQ ID NO: 158353 - DNA, 198 bp, Homo sapiens
taggcagcttgtctgtgctccgttttcacagcccacagctataaataataccattaggaaagcacacattgccttagatggaaggcacaaagaaaagcactttctctgatagtttagcaacacattcagatttcatgtttcaaggtaaaaataggcctaacaaatgaattaaatttggaagctgagctgaagtgaaga

SEQ ID NO: 158354 - DNA, 398 bp, Homo sapiens
tgccctccctggtggggagcagctgccccatgcaacaaggcaaggggcccactgagctgataacgtaccgctgtccacggacgacggaggttagcattgtaacacactctctggggcttcaggggtcgcaggcacccctacctggtctggccgaggggaccccacagagcctgctcctgccggcacccaaagcagccagctgggtcctgcactcgctctctcatgaactccatcctacaacaggctgagcgaggcgctccaagtaaacagtacccctgttgcaagtctgatgaaggggtcaagagaaaactcctgcatcatcaagaccctggtttctatcgcctatgctgttcttgagtttcctagtgctttagggaactaatatttattacacaaaa

SEQ ID NO: 158355 - DNA, 544 bp, Homo sapiens
gggaatgcttccagtttttgcccattcagtatgatattggctgtgggtttgtcatagatagctcttattattttgagatacgtcccatcaatacctaatttattgagagtttttagcatgaagggttgttgaattttgtcaaaggccttttctgcatctattgagataatcatgtggtttttgtctttggttctgtttatatgctggattacattgattgatttgcatatgttgaaccagccttgttacagatatttctaaactaagggaaacattgcatcaaacacatatttccttggagactttgcttactaaaggtctatatttaggttactgaattcaaaggttttataagttaattacttgtgtgtaattatataaaatattaataaccagttgagttaaattgtttctgctatttgattttaaggttttctttttcattatttgtggtacaaggtttgtcttgacttacaaatattttcgtggttcaaaagttctgtttctctctgataatactcctttatctcaagttagctttgtc

SEQ ID NO: 158356 - DNA, 561 bp, Homo sapiens
accttatagcagcagctgaggcgactcaggagacagtggagtccctgatgcagaagttcaaggagagtttccgcgctaacacgcccatcgagatcggtcagctgcaaccacccctgcgcagcacatcggcagggaagaggaagcggaggagcaagtctcgaggtaggccctcctggcacatctggccaggaagtcagaaggttgtcctctgattccaaagatgctagggagatctgtgcattcttcccttgcttccctgtgctcataaaacttgtgccactttctccctgataaatccccttggaggctgcagacctatgctccctacacccagagctaacctctctgagccccaggtgcctcaactgagaatgagaatggatagtataaattttacagtgattgagattagcaactatatatggaaagtgtgtagcaccaggacctctgcaaagtagatgttctttaagttgttgccggtcagagagtacaaagtggcagaacattctagtaggagacatcctcagtctgggagccagaaacaggggtctgcgcctactt

SEQ ID NO: 158357 - DNA, 576 bp, Homo sapiens
gcatgttaatgtattattaaatatcagtgggaatagtctgcatgctatttcacatctcaggcacacttaaggaagaccttgtgatgtgcatgttgctcatttaatctagaaaggataccaagattcatttagaacttctttatgcacagtttttttttgagtatgttatgtcctgaggcattaagggtattactaaagcaagcagcgggacttctcagagaaattaaaggtttcatatcaaccacacgttgtcaaaatcttcactttgaataggattaaatgatgtttcatcagtattcttggcacacatgacattgtttttaaaataacagttttattactcttggctgtgacagtttctcagactttccttaatatcatacaattctccaatttaaactgtatagtcagttttacaatattttaattaccctgtattcattagcactttcctcattttctactacctcctccccagctgcccctaccctaggcaatgccaaatctactttctgtctatatatttgcctattcttgaaatttcaaataaatggaatcgtataatatgtggccttt

SEQ ID NO: 158358 - DNA, 260 bp, Homo sapiens
tactggtaatcaagaattattatacaatctacttatttattcaggtgcctaataaaatagtttagattcttaggggttttagtattttcttcctacttctgtacctattacattgctcatgagcaaaggcttgcaaacaaaatgcatttactaaaaccatattatattttatatatcagcagttcccttttagaatataatccatttgtaattcaactgtttggaactcagaattcattttcccttaaaaacaatgttgt

SEQ ID NO: 158359 - DNA, 457 bp, Homo sapiens
aatgatttctactcatcagtgaattttctggaagcctaaaaattgatttttaaaatccagccaatgttagtttgttttattcccaacaaggttttacttgctgggatactgaaaccactgagctgctcctagtccagtggtacaatgttaaaatgtaaaacactttgcaaaacatgtttatgtatatttttatttaagtattctaataactttatgagataatatgacaggtaggatttttattgtaactcaaattaagtgatggtagttggacttgaacttaccatttccgatgcctagtttagttctttttataatagtttcatagtgtttttccaacacacaatttaatatctaggtatacttcatttatgcagcagatttattgctgaaaaagtcatgtgcaaataagtgtttagaacaagtgttattttaaatgtgactagagtggctttct

SEQ ID NO: 158360 - DNA, 305 bp, Homo sapiens
agggaccaggcaccaagcctggccgagttgaccgataaaaccatcacagtgagggattggtacccagagacatcacctctcatgctgaaggtctgaccggtaaactgtctgggttccctgtctccagtagtccttctctctcttcggtagctgcatgacatgatgcaggaaacttgaggctgtggtgtttcatgcagagatttttgatacaaggtcttttacctgggggcaagtgcctgttgaagaaatgacattggtgagatgatgaaggaagggaagtcacatgtattgctgcagctgctccc

SEQ ID NO: 158361 - DNA, 373 bp, Homo sapiens
aaatcctgtggactgataagaatgctcgggagagcatcagacactgagccaaacacagaaaaaaatcaaagaccaaattctgttttccacgcactccttcaatcaacagatatttatggagcaccaaacctactcccaacactatgttcataagctcaaaaccaagatgggctctgatctcgtgggcttattgacaaatgatgcatacaaacaaggtgatgtgatagaagtttcaaaacggatgtcatgagggcacatatgagggacatctcatccagatttgaggagttcaagaaaagaccccagggagataagacctaggaaagagccatcagctgggataagagagatagaaggagtgtttcagggagtg

SEQ ID NO: 158362 - DNA, 422 bp, Homo sapiens
aagctgctctgactagctgtgtccccactttgagagaggccttctatagcgcaccagctaagcaatcaacccagagtagaggagggaaggtggaggcatgaaagacaggaattcacccactaaacggggagtggggtggagacagcggacccaatgcagaggaactgcaggggctaaaggaacacaggggaacagcagaagccaggagaggcaaagcccaagctgaatgtgagagggtaggctgggggcagacggtgaaaactcagttgcacaaacaggaatcaggcccagctcggtgcaaagtgctggaacagcggaggataccgaggtgagcagagcctggcccagtagcctgcctcagtttgaatcccatctctgactctccccatgtgggtggctcccagccagttactctgtctccc

SEQ ID NO: 158363 - DNA, 398 bp, Homo sapiens
  misc_feature (60)..(60): n is a, c, g, or t
  misc_feature (62)..(62): n is a, c, g, or t
  misc_feature (66)..(66): n is a, c, g, or t
  misc_feature (70)..(70): n is a, c, g, or t
  misc_feature (82)..(82): n is a, c, g, or t
gtccgaagtgcggtacgttggggagaggggtgtatagggaaccacatctttgggggaaancnatgnatcnggagaggacttngtttctctggacatttatccagaagaaagaaaagtcaagggtgacaaggacagaaccatcaaccagccagagctatagtcatgggccatgtgtgggccagacccagcctatagacatgctgtttggcctacacaagattcccaacggtgaccggcgacttcgaagtcgccggtcaccgttgggtgggggatggtctctcagcattttctctcagtgctgaaaagattccattactttatgtctggtctttttcagaaccttttaaagtcaaatggactccccatatggggtgattaccagttttcttttcttcttc

SEQ ID NO: 158364 - DNA, 431 bp, Homo sapiens
cagcagctacgtctggctccagccctacagccagggctggccagactctagccaacacttcttgagggacttggctcactccttttagtctccccagctgcacccaagtcgatatctctccactccaacaccccctgccatccctcactgcagtactgctggagggctgagacctgtcagggtccttgaaggaagagacatcagattcttccaaacagccctgggttcctcaggctgttcacagccaacctagagactcacctcaaatggacagaggagaagaagaaataacaggaagcagaattggccaatcttccctggatagcaacgggagcagcatggggaagaggaaccccccacccccaccgaaacatatgagcagagagaggcgaccactgtgtggccagaggtaggatcccataggtacctcc

SEQ ID NO: 158365 - DNA, 639 bp, Homo sapiens
ataaatgatggatagctctctgaagcatgttagggatttgggctcagtccaaaagacagtggaaagccattgaaggctattattattaatttattttattttattttattttttcgatagagtctccttcccaggctggagtgcagtggcaatcttggctcactgcaacctccgcctcccaggttcaaggaattcttgtgcctcagcctcctgagtagccgggattagaggcatgtgccaccacgcccagccagttttttgtatttttagtagaaacagggtgttaccatgttggccaggctggtctctaactctgggtctgaagtgatccacccgccttggccttccagagtgctgggattacaggcgtacacaccatcacacccagctaatttttgtgtttttagtagaaacagtgtcaaccttgttggccaggctggtttggtactcctggcctcaagtgatctgcccgccttggcctcccagagtgctgggattactggcatgagccaccatgcatagccaccattgaagggttttaagcagaggagtgataaaatacttgccctttggaaaaaaatcattctggcgtccacattcagactggtttagaggagagtaatactgaagacatgcccc

SEQ ID NO: 158366 - DNA, 592 bp, Homo sapiens
attcctgtgtttcaacagagggtggagcacagaaggcatggggtgtttggagatagccagaagccaaaggcaggaggcaaagggcagtgaaatcaccactactgagtgatgtacagggtacaggccagcaccttactttatacagattacctcagtgaagcctcacaacaaccttatggacgaggtgaaaggagccaactggggacaactctgatccttataacccccaaatcttagaaaaacgaggctgtccagtgagagtccaactataaaaccaacagggcatgttagagacacagcctccttaaggaggcttaaagatggttgggcacagtggctcacacctataatcccagcactttgggaggccgaggcaggcggatcccctgaggtcaggagatggagaccagcctgaccaatatggtgaaaccccatctctactaaaatgacaaaaattagctggacatggtgacaggcacctatagctgagatccattgtgagtgccattgcactctagcctgggcgacagagtgagactccatctcaaaaaataataattaaaataaaggtcgattaaaaacaaaagagaca

SEQ ID NO: 158367 - DNA, 249 bp, Homo sapiens
atattttgtcagtaaatacttcagaacaattgccatggggtgccactgaaggacaaataaaggatggatcttcaagggaggtgcattatccattgaaacaagaagagagatttttgtagtttgttcagtaggccaagttctggctgggccccatgtgggcatgagagacccagactcccagccccacctgcggcaggaaagctggtactataatatgtggcttaaaagtgtaaattgtccccaaaagcc

SEQ ID NO: 158368 - DNA, 113 bp, Homo sapiens
acctattgaagaaaccacactggctgagaaattgggcatgtcagaggtgtcaagggttggcagaggaattatgaccagaggaacttccattcctgcttggcattcagtaaatt

SEQ ID NO: 158369 - DNA, 453 bp, Homo sapiens
cccagatacttccagtgtcacttcttagaacaattgtgaggataaaatgaagatgggtggtttattgtctacttgtcctcattggcgagccactttcctgagtccccacaactttcctggctcattgaggccatcccatggattacttaacatacttcttcataaactcagagtgggaactacagattaaattaccttagcattttggcaagagcccagagcctggaaattagtatgtgaatgtaatgtgagcccttaagccttcagtgcaagtgatgtctctagggagagccctcagcgtttttcaggggaaatcagaatccttcatcagttccagtagggaagagctgaagcttacagatttaacagaaggcggtagcccaaggaaacctgttccagtgtgagtggaaggaatgtgctgagcagagccggctaatggtgcctcttggtggc

SEQ ID NO: 158370 - DNA, 579 bp, Homo sapiens
cagggatgctgttgtcttgtgctttgagacacccagggaggaggagagtatttgaaagcccactcatccttgggtaatgcccaggggatattaagtggccatcaatacgttagacgtaggctgaaaggagatcagaacaagtccagggtttggagtagcagaagctaaacatggtccaagagtgtccttcactcccagctggctggttagtggaccgacctctggatttgagttaggggatggaattctcatcctggctctgccaactactggccaggtggctttggacaagggattgaacctctctgtgccctagttttctcatctgcaaaatgtgagtaatattctaataagtgaggatgagaaagagaatgtgagggtactttttcaatataagatttggaaggatgttcacacaggtgatggacttgtgggggttcatcctgtgttttttgcttgtctgttatatctggttgtgtatgagagatggcaaggagacagacagagagggattaatagatattgctttagtaatcactcaaatgacaaagttattccataaaatgaaaaaatataaca

SEQ ID NO: 158371 - DNA, 511 bp, Homo sapiens
atgagtcaccacccacagtttaaacagcactgaatcatagctagaaggatggaggccaccattcgaacctaaatagtagggctccggagcctaacctctccatataaaggatggcttgggaaaggagagagaccccgaagtcttgaggacagatggacactgtgctgctgaggagactggaggcctcaagaatcccactgccctgcatcactcccttcccacattccagcaaaagatcatacaaaattcactaatattgcctttggaaaacaaacttgttggcgtagacacacggttgttcttttactttgtcttcacatcagcctatgaaggaagtaagaaggactgagaaactgactcacgcagtttaagtgatttgacaaaggtcacagagcccagtgtcctgttgcctggtccagggagtttttgatcccatcctgagctcacccttgcagataacaatggtgagggtggagctggtggtagagagaatgggatgacagtggtaacg

SEQ ID NO: 158372 - DNA, 288 bp, Homo sapiens
attcagaggagatattcagccatggatcatactctgaaagaacttataatctaataacagagttaagattcatttacaaataagtctaatacaagagacaaagtgatgagagatgtagcaaatcatatgcagaatgagaggtggcagggacaacttctagataggaaggactccagaacgatttctcagagaaggcagtacttggctttcacactcagaaatgaagagggtggaccttcgatgtgatgaagcagaatcattacagacacagaggatgggaagcaaagg

SEQ ID NO: 158373 - DNA, 353 bp, Homo sapiens
gggtgtgtgcacacttgcaggggtgtgggggttgcattgtgtgtgcacacgtggacacatgtgagtgcacttgtgtggctgcatgtgagtgcgggtgtatgtgtgcgcgggtgtgtgggtgcatgtgtgtgtgggtatatgcatgtgtgggtgcatgtgagtgggtatatgcatgtgtgggtgcatgtgagtgggtatatgcatgtgtgggtgcatgtgagtgcaggtgtatgcatgtgtaggtgtgtgtgtaggtgcatgtgtctgtgtatttgggtgtgtgcatgtgtgcaggggtgcactgatgcatgtgtgcatgtgtgtggggcctcgtgtgggtgcatatgtgtagg

SEQ ID NO: 158374 - DNA, 381 bp, Homo sapiens
gagcaacctaaaagaaaaatcataggcgattcacaggaaaggacggctaacgaacatattaaaagatgctcaggttcatgaaaattcagaaaaatacaatctaaaacactgagatactacttttgaccatcatgttaacaaaaatttatatggttggtaataccaattgtttataagaaattgaggctgggcacagtggctcatgcctataatcccagcactttgggaggccgaaacagaggattgcttgaggtcaggagtttaggaccagcttgggcaacatagcaagactccatctttacaaaaattttaaaagtgaaaaaatcagcctggcatggtggtgagcacttgtagtcccagctacctaggaggctaaggtca

SEQ ID NO: 158375 - DNA, 428 bp, Homo sapiens
tggtgaaaccctgtctctactaaaaatacaaaaaaattagctgggcgtggtggcgggtgcctgtcccagctactcaggaggctgaggcaggagaatcacttgaacccgggaggcggaggttgcagtgagctgcgatcatgccactgcactccagcctgggcgacagagcgagactccgtctcaagaaataaataaataaatagataaataaataaataaataagacttctctcatgaggtgatggaatgccttagagatctgctatttccaaaccaccaggaccagccccagtgagccaaatccttaatgcttacatctttcctcttcctacaacacatggacgggggcatgtgagtaaccaaggaagccaggcccaaagagaaacttcctggtgccaggatcattttgggtgagccacttgtttttt

SEQ ID NO: 158376 - DNA, 1037 bp, Homo sapiens
cggcccaggaccatttgttaaactccccatcctctcatcaaattgacttgatactttgttcaaaacaagttgattgcatatgtggatctatttctggattttctcttttattctactgatctctttgttgatctttatgctcataacacactttcttgactactgtagctttataataaatcttgaaattaggtagtaacaaaaaaacaaacccaaacaaaaaacaaaaacacaaaaacaaaaaaacaacaaaaaacaacaaacaacaaacccaaacacaccaaacaaacaacaacacacacacacccacacaaccacacacacacacacaacacacaacccaacccccccccccaccccacccaaccacgcgagcgcgctgtggcgcggcggcgagcgacgactataacttcttgagcgactcgccgacttgactgcgaagccgtagtgtggacggcgcgttgactgtgtctgttcgcgggtcagtcgggcgagctactcgacggcggcgagaggaagcgcgcacgaggggcgggcgcactcgcggatcgccgaaacagggggaacgagggggccaaggcaagcgaaaggagagagagggaagaagaaaggaaggcgggcgcgcgagcatgggagaacgatccacaccaccgtctgcctagagggcgcgagccaacctgccgatgagtcggcgataggcgtacggcgtagcgcgagtagaagcgtagagcggggctctacgaggcgcaagaggccatagccgaccgagtggtgcgaacgaccagcgatacatagtagagacttgagtgcggtgcgaagcccctcagcagcgcgcagtgccatggtcagatctggagcaagaagtgcagacgagcagggggatagctagacaggagaggaggagaacgagcacgtagtcagggtgagagcagtagcgaggtagcggcgttgtaggagaaggcaggacgaagctcgtagtagtacacgcggcaaagcgcgcgggcagtgattcgatcaccagaccgagtgagcgagcg

SEQ ID NO: 158377 - DNA, 646 bp, Homo sapiens
tcttctctttggttggcaggcatttgaagaatgaggatatttaataacgccctctataacctttcaggtagcctcttattttttggtttcaagtaatcagaaagacttagcctcaaagaaaaaaatgttgtgtttatttagctttttgtttaaggactatcccaaggaaagggtgggttgatagcctttttaatctagggtttgttgaactcaattaagtccagtgtccaggtagaacaggtggtttatctaagaaaaatgacaaattttgctgacatttttgaggtcacccttgcagccatgaataaagtggctcatagtaccaatatgagttacaataagaagttacttaacctctctgtgcctcagttttctaatctataaattagggaccctttctgtttgaggggcatggcacatttaggagccaggactagacttgcgtctccaggatggtcatatctcactctccatttagctatggagtgggggagagactgccaatctaaggcttaagggaagtcactctggctgtctagcatcttatctcccttaaatcccatccttgtctcttgactctacaactggcctccttctgacaccctcatcgtcttatgtgggctcaggttggcatcaatgtctgttg

SEQ ID NO: 158378 - DNA, 608 bp, Homo sapiens
acaggtgcctgccaccatgcccagctaagtttttgtatttttagtagagatggggttttgccatgttggccaggctggtctagaactcctgacctcaggtgatccacccacgtcagcctctcaaagtgctgggattacaggcgggagccattgcgcctggcctgcttcaattttttttgcttgatgtcatgtttttcttcatttgccaggcaggtgttgttttctttctagaagttgttctttgtccttggttctgaaaaattcatttatcttgctagttatttcttaaattctttgtttcctttttattcatagtttttttttaatgatctctttcatttgctactttgcttaaaatgtttgatgattattagttcatatttaagaatgaggcaataaaaagttgtttgagagttaggtgtatgtgagcagtgcttattgaacggctgtcaatgttctaggaccctgaaaagccaaatatcttttggtgccagaacccatattagctccttatttgtgtttgagagaatctacctttcctttttgtttcggtgtcgttgttatgtttatgtgtttgcttatattcatgtagacaactgtgcattcaa

SEQ ID NO: 158379 - DNA, 614 bp, Homo sapiens
acaggtgcctgccaccatgcccagctaagtttttgtatttttagtagagatggggttttgccatgttggccaggctggtctagaactcctgacctcaggtgatccacccacgtcagcctctcaaagtgctgggattacaggcgggagccattgcgcctggcctgcttcaattttttttgcttgatgtcatgtttttcttcatttgccaggcaggtgttgttttctttctagaagttgttctttgtccttggttctgaaaaattcatttatcttgctagttatttcttaaattctttgtttcctttttattcatagtttttttttaatgatctctttcatttgctactttgcttaaaatgtttgatgattattagttcatatttaagaatgaggcaataaaaagttgtttgagagttaggtgtatgtgagcagtgcttattgaacggctgtcaatgttctaggaccctgaaaagccaaatatcttttggtgccagaacccatattagctccttatttgtgtttgagagaatctacctttcctttttgtctctagaacgtggcccgcacatccgtactgcccggggagtccgtctagagcgacctcgcaagttgga

SEQ ID NO: 158380 - DNA, 623 bp, Homo sapiens
taactatatgtgaccacactggataggccctaggtctgcctggggtcacgcaggaaaaataagtattcccagacagatcattatcatgctgtactctggaaactttgttcatctcttgtcttaaataaattcttatgtgaaaaccaacacataaaggtagagacgtttcagctgaaacgaaagtctgcagtctgctgtggtaggcatcagaatccttgaagacaaggcgaatacagcatcaccccctggacaaggtcactatgccccacggacagggtgcctgtgtcccacagacaggactcctatgccccatggacagggtgcctgtgtcccacggacagggctcctatgccccatggacagagtgcctgtgttccatggacagggcacccatgcctcatggacaaggcacatatgccccatggcattgacatcttatttccccaaaggcggtccgggtttgcctacctgggcgtatggcactgggggtggtgggtaagccggttggtgcatcagggcaatcctcaagcctttcgggctcaggggagtcaggctccaggtaggagtcatcctcatcgtcgtgctcatagtcttcattgtccgtggggaacgggaaaggctgt

SEQ ID NO: 158381 - DNA, 756 bp, Homo sapiens
ctcaacctcccgcctcggcctcccaaagtgtggggagtataggcgtgagcccccgcgcccggccaaaaaatgcccgtcttaagaacaacaaaacagcctccttcaccctcgctatcctccagttacctcctcctcggctccggtttgcagccaaaggccttagtctaccctcactaatgccttttctcctccaagtcttgaacccttgagcctctagtcaggctttggtctccaccactccactaaaaaggcttcttgtcaaagccaccagtgatctctaggtggccaaattcattgttaagttaggtctcagtcctgttcagcatttgatgctgtggatcactgcccctccttgaaacactgttttcatttggcttgctgaacgttctcttcctttgcctctgctctctctggcttctcctctgctgattctaacctaggcatcatctcacatttttgtttttattagagacacgttctctgttgctcagactggagaacagtggtgctattacagctcactgcagcctcaaactcttgggcttaagcagtcctcctaaccaaagcctccccaaatgctggaattacaggcatgagccaccgcaatcccagtttcacattttaaatgtaaatactggccaggcgcggtggctcatgcgtgtaatcctagcactttgggaggccgaggtgggcagactgcctgagctcaggggtttgagaccagcccgagcaacgtggtgaaatccagtctcttct

SEQ ID NO: 158382 - DNA, 787 bp, Homo sapiens
tcatgggcaaggccgcaggtgctatatcccaagtgtatactgcttttatttttacatgtacaaaatattagaataataaatatatggtaaggcttctagaaatgaaaactgttgtcaatctgtaatttatagaaaatttatgtaagaaaacttatgttgtcttttaagcaattctcctgcataataacttagtttagagtaagaaatatgcatcttatctaaactgatttatagaccacatgctatttttacaaatatttaagaaaattcctagataaactttggaaccaaaaacaatgtagcctaataacaatgtcaactatacttacagtataattttatatataaccttttatctttataataataaatactatcacagccatttagagaaggcaattttagtttacctctattgcttaaaggctttagctattatttatgcacaacaagaattctgactttttaaaattagttttaaaattttggatcagctttataaagaaacacattgttgttaagtgcagacaaatgagaaccttgccatttctgcatttatgaccagaagccaacagagtcaattttcatgtttatttattctttgctttagaatgttatgtcagttgacagtattcagggcttgtgttgatgtaaattgccataaagcaaggaaacacgggctatagtactgtcagggaggctcagcactgcagaacaacacaatttaagaaaagcatttgcagaaagattcagtgtcagtcttcggaagttgactgtagatgcaaat

SEQ ID NO: 158383 - DNA, 180 bp, Homo sapiens
taacacaatacaactgtaatgccaatcctgtaaggcaaaggggcttagatctaaacccaaagattggcttcaggtagtcagtcacgtggaaccttcaaaactagatgccagtgttttatatatgtctatattttctacactacaaatcttcagtgctcagattctccgaaatgttctttt

SEQ ID NO: 158384 - DNA, 653 bp, Homo sapiens
aaactcccgacctcaggtgatctgcctgcttcggcctcccaaagtgctgggattacaggcgtgagccaccacgcccggctatttttttttgagatggagtttcactcttgttgcccaggctggagtggagtggtgcaatctcagctcactgctacctccgcctcctgggttcaagtaattctcttgcctcagcctcccgagttgctgggattataccggctaattttttgtatttttggtagagatggggtgttaccatgttggccaggctggtctcgaactcctgacctcaggtgattcacctgcctcagcctcccaaagtgctgggattacaggtgtgaaccactgcacctggcctgctgtaccctttaaaagagtgtggtcaaccagtgtacctgctattgactgaatgtgtgcacccccaagttaatatgctgaagtacgaacacccaaggtgatggtttgaggtggtgggggtatttgggaggtgactgggttatggcagtggagccctcatgaatggggtttgtgcccagagatctcctgcacctctcccaccatgtcagatgcagagaaaaggcagcatctatggagcaagaagcaggtcctcacagccggccaatctgcgggccgctggtctcggacttccagcc

SEQ ID NO: 158385 - DNA, 275 bp, Homo sapiens
ggacaaaatctgtccatgtattatccatgcattcttttttttttttcattcttattatcagatcccagaataatgaattgctgtttgaaaatgcatggtttatgtttatcttttccagaagcacttttatacgcatctctccctagtactgtttgctctttcagaggctggttttgttcctaagcaattaagatgcttccctgtgttttggaataaatagtagtatctaaatattttgctcttctgtttatttcctataacagatatttacacat

SEQ ID NO: 158386 - DNA, 119 bp, Homo sapiens
ccctgtctcaaacaaaacaaaacaaaaaaatcattctggctactgtgtggaggatggaattagagagaccagttaagaggagtgacagtgtctaggagagaagaagggggctttggtta

SEQ ID NO: 158387 - DNA, 422 bp, Homo sapiens
tactaaaaatacaaaaaattagctgggtgtggtggcaggcacctgtagtcccagctacttggaaggctaaggccaggaaaatggtgtgaaactgggaattggagtttgcagtgagcagaggtcgtgccactgcactccagtctgggcgacagagcgagactcagtctcaaaaaaaaaaaaaaaagaataggtggaattgaattgaggcggtcagtgaacagtcaggaacattggaaggctcatccatgtgatctgacaggaggtggagctcaggcaataatactcactcgcccgcggctcaactcctgctgtgcggcctggttcctaacaggcagcagaccagtactgtccacagcccaggggttgtggacccctaccccaacagacagcaaaaataaaatgctcaaccctattgtagtttg

SEQ ID NO: 158388 - DNA, 248 bp, Homo sapiens
acatggcctgtttccatttcttgttcactaggacttctcatttactaacacacagaatttcctgtagtatgtccacttaatcagttcaagcctaataattccttgatttgggtatagtgctttgcatttatatactgatggtccgagcggacggtccgctcggaccagatctttgtgagcgattcctccaccacggtctgagatcctgatgatcagatcgacatcattgttggcgatggtgatgacca

SEQ ID NO: 158389 - DNA, 441 bp, Homo sapiens
agtaaggaaggatcaggcaacattgaaagaggaatattgccacacagttgccaatctgatgaaaatactgcttatgctaggtcgaattgagactctgaaaggtatttgggagccagacacttatgagaatacatattgctttgaatattggaagaaagcaaagcagtcaaacgaatttcttcttggcttggagttttgtttacttttctcaggttagaattgatagttctaatggttttaagaagtcatggagaacaggcccaccatgaacctgaatatttggttctgagtttatagccattgtctagtaaatactgtttaagggttattagcacacaatgatcataaaatcttgtaatacttttaagaggtgtaagaaattgaagtcacctgagaatacctccttctgattttacagtggagaaataaaggaatcagagt

SEQ ID NO: 158390 - DNA, 288 bp, Homo sapiens
ggagcacatgagaacattgatgtgaggttgtcttgcaagtgccagtgaattaaaagtggattgtctgctgtgagggtcttctcttctttcagatgactagagaataaatgaaatataggaaatgatcagctgaggggtgtgatggagaatgaatgctggtaaggaagtagaaataaagtgagaaggaggatatactaatatttggaacatactgtttgaactttaaaatagggtgatttttgcatttattttgtgtgcattttaaaatacggccttttggttatttat

SEQ ID NO: 158391 - DNA, 426 bp, Homo sapiens
gcttttttgtttgtttgtttgttttgttttttgagatgaagtttcactcttgttgcccagaatggagtacaatggtgtgatcttggctcactgcaacctccatctcccaggttcaagcaattctcctgcctctgcctcccaagtagctgagggaggagaatcgcttgaacccaggaggcggaagttgcagtgagccgagatgcaccattgcactccagcctgggagacaagagcaaaactccgtctcgaaaaaaataaaaataaaaataaataaaaatagcagttgctatctgcttcaaaaaggttatatatttattgtttatgttatgcttcactaagcttcaaattgttatacaatagcactcctaataacaactgtttctggtactccgtactgaaatctctaaggactgtgactcagtgtgg

SEQ ID NO: 158392 - DNA, 235 bp, Homo sapiens
caggtaatgggaaaaactcagaaatttatagtgttttgggaagcaaaagtaggacattttactgatctgcttatttgttaacttacctaatttatctgtttctatagcacatactctgtaccagaccctaatgtccttactttacaaatcttcactcattctattctctcaacaaccttgtgaggtagagagtgtaattttactcattttatacataaggaaattgaagcccaga

SEQ ID NO: 158393 - DNA, 542 bp, Homo sapiens
gtttcctcatctgcacaagggggaaaataatacacactccacagggcttttgcaaggatgaagtgctctattaaagggctttgtgcagtgtctggaacagagtaaatgtgcagtaaatggtagtttaaagaaataaacttctattcacagagtctgattctgttctcctgaaggtggttgactttgtgtgaatgatgacgatggcacccctccctggatcatgccagcagctcctctgaggattttacccattatgttttcctatttgcagcacttccactataagactctgagtgatgactcttgagccccatgactttccattttgtctcttatgacgtcagaaatggacgtgccaatcacacaagagatggcagagtgaggccgggcacaatgtctcatgaatgtaatctcagcactttgggaggccgaggtgggtggatcacaaggtcagaagttcaagaccagcttggtcaacatggtgaaaccccatctctactaaaaatacaaaaaattagccgggtgtggtgatgcacgtctgt

SEQ ID NO: 158394 - DNA, 191 bp, Homo sapiens
tgaacatatctatgacttatatatccacttcaccccctactaacttgcctacaatgttaaaaaaaagaggaattattataacacaggaagatgtttaatactcaggattttttatatcatcatatttaaagtctttttctgcacagctaaatctgattccctgctactaaatctgattgagttagcaacta

SEQ ID NO: 158395 - DNA, 393 bp, Homo sapiens
tgaggcatagagaggtttagaaacttgcccaacattacacagctaaccagtggcagaggcaggattccaaaatgtctggccccagagtccatgctgttaaccactctaccaacagttgttaagcagcacccgcagcatcaggaagctggttagggaagtgaattctcaggccacagcctggatttactgcatcggaaactccagcatgctgcctagcgactggtgtttagtgagctttctgggcgattctgctagatgctcaagtttgagaaccaatgcagcccactctccggcctctcagatgtggatgggtgtattgatacaattcagaacgctgagaagtgttgactttcagctcagcttcccgctctcggatggcagctgtgcatggtg

SEQ ID NO: 158396 - DNA, 393 bp, Homo sapiens
cacagctcattgcagcctctatttcctgggcttaaacgatcctcccacctcaacctcccaaatagctaggactacaggcaaatgccaccatgtcaggttaatttttattttttgtaaagatggggtcttgctatgttgcccaggctggtctcaaactcctgggctcaagcagtcctcctgcttcagcctcctaaagtgctgggattataggcatgagccactgtgcctggcctatagctttaaaaatttccccagtgtataccatcctcactattcccaggcacagttctaagtaattgaagtctactgaggtaggtatcaatattattcccattctctagatgacgaaactggtgcatgtagcagttaggaaatatgcccaaaggtacactg

SEQ ID NO: 158397 - DNA, 694 bp, Homo sapiens
tcccagtgtttcattgaaggttagacaagatcatacaattcaatgagtgtgaccaccagtgcatggcacatttaagtactcaaacaaggcaagttttcttcccttatccatgctccccactttctcccttacttcctcctttaaaaagagttgttttaaatagctatctggattttttttctgcaccacttcaaagtcaatgaaaatcagctttagcttccttctttctcttcttcccctctcataatgggcatggctccggggctgggtctgaggctccgttctcaaccaggaagcacagggctgggctgctcgctgttggtttcggtaacttcttctcccaggaagggccctgctccaggggcttgcagtggcctcccctcacttcagtctgtagataccttgctgtacatatttgctctcccttggcttcctgggtctcactgggtgtgcagctggcttttcttcctgggtgggatttggtgatgataaagcaggcacttgttgagggctgttattacttgggagttttttggtttcaaggcacagaaaccaaacttgaatgagcttaagcaaaaatgggatgcatagcttatgcctctcataccaacactttgggaggctgaggctggaggagcgttcaaggccagcagttcaagatcagcatagtcaatatagcaagagcttgtctcta

SEQ ID NO: 158398 - DNA, 199 bp, Homo sapiens
atgaggatttgtgagtcccacaatgacctaagtcaaaagactaaagacttcagtcttttggtctagcctaaatgaattcagtgtgtggaatgatacgataaccggaatattaacaaaaagttactttgctttctcaaggtaaaattaaaattctaattgaggaattgcacatgtaccccagaacttaaagtataataaa

SEQ ID NO: 158399 - DNA, 363 bp, Homo sapiens
ggaagggcttctatataactgactttccttattctttaaatgtatagtacaaatgaccaagtcagtcatccgggactgaaggtttctttgtgggaagggtgttaactaaaatttcaatttctttaatagatacaggactatttaagctatctatttcttcttcagtaagctgaagtagtttaagtcttttgaagaatttgtctatttcatctcagctgtctaatttattggcataaagttaacaaattcccttattgtactttgaatggctataagatcacagcaatgtcccttttctcatgtccatactaaaaatttgttgcttctttttctcctgatccatttggctaaggggctaccagt

SEQ ID NO: 158400 - DNA, 516 bp, Homo sapiens
gtcaccacgctgtgacggtccagaattatttttaaatgcagtctgctttgccatgtctttgcagcaagtgtgctggaatttccggccttcctaagtgagtctttggaagtcctttgcctgaacgacaaccacctcgacacagtccctccctcggtttgcctactgaagagcttatcagagctctacttgggaaagtaagtacacatctggaggggccgtgctggctctgctggcccagagaggcagaacgcccatccctaaaccaactgggacacagaaagccaggcagaaagaagccatctactttccaagaagcagtagtgagattttcggaacagggcttgatcaaggaggtggggagagaggaagacggagtagcaatgcaatgatacacactttcactacatcacttgggctgtgatgaggagaaccactcaatcattcatcctttcattactgagctcccattgcatgccagctactgccaggggttctaggcagtgtgcaaagcttgat

SEQ ID NO: 158401 - DNA, 447 bp, Homo sapiens
gttggtgtcacagaattacatctgtatgtactctgtgtcctaaaaacataaagtaataattactttaaatgccttaatttctgaaattatgtaggaaaaatttggagttacaaaccaaagttacaatatcattagcttttaggctaatttttttaatgtaatgtttcttaaatgacatagaaatcaaaaggtagagttataaaccactatcgtatttaccattattgagatctttatttcttcatattgcttcaagtctgtctagtgtgttttcatttcactgtgcgagaaggcccctttaagcatttcttacagggaggtctcatggcagcaaactccctcaccatttttttttttttttttttttttaagaaatggtgtcttactcttttggcccaggcgggcatacagtggtacagtcatagctcacttaagtctcaaactccc

SEQ ID NO: 158402 - DNA, 353 bp, Homo sapiens
taataaagtcatacgactccaactgataccagatgctacgctccagctgatccagatgtatatgctcctgctgatccagatgcccagaggccccatcgtccatcctcttcctccccagtcggctgaactctccccttgtctgcactgtatcaaacctctgccgccctccacacctctaaacatctcccctcccacctcaaaataatgacgctgtatcactaaattctttccatttaattgtattgttcaaagctgtcttctttctctcaggtaaacttccatcacctaaatttacattctcttgaatatgctacacaaagttctttattactacatactaaagtaggggatcc

SEQ ID NO: 158403 - DNA, 560 bp, Homo sapiens
tatacgttttcagagttcaaccagtttataaatgcagtagaacaattgtacataacttcaaccagaaaagcaagtctctgaagtcgcttgatctggcatgtacctttttaatccttagcactggcccagataaaatgacatcagtagtctttcactactttgatatatctgctgtaactcacctttcaatggtggtgtcattgaagacaactgatgttattaatctgggtcattgctaaagaatatatctatacacacacacacacatacacacacacgtgaatatatgtatgtgtgtatatatatatatatataggtatatcctttatatatatatttagtatatatagatacctacatacatgtatgtgtgtatatgtatgaacatatctatatacatatatctatatgtgcatatatagatatatacatatctttatgtacatatatgtatctatatagatatattctatagcactgaccccaattaataacatcagtagtcttttatgtatatatactttagcatatagacatgcatgtatatatatagatacgta

SEQ ID NO: 158404 - DNA, 399 bp, Homo sapiens
accagctgtccagagcctcagtctcgctttgctccaattccccatcggctcttccctagtatttcaatcctgggagagacgggataattttcacgccttggatagggcatgaaagcaccagccattggaaaaagggctctctatggcaattcacaactgctgacgaatgcaccaacccggtggggctgaactcctgtgagctgcccccgggagtctgagtatctctagatggaaagaaagggatgccagcactgggaggaccaagggtgcagccttgaccagaacctgcactgaggatggccaggctaggaggtctttggggcacctggcggcctttttcactgttgcgaccttgctctctgtttcttcaaactcctacagctacaattagaccctctc

SEQ ID NO: 158405 - DNA, 171 bp, Homo sapiens
atacaataagagcacaataaatgtgtgacattattaggtctctgccatgaaacaccagcctcaagtgcactctcaaaaccatgtgattgggtcctgaaacaaccagaaaaggttctaaataaagcctttcttttcccttcttctatgctgaagacaggactacagcatact

SEQ ID NO: 158406 - DNA, 469 bp, Homo sapiens
agagctttatttttagatttcccctctccgcctatcctgtgttagagttctctctgcctgggcagggggagtgggacattggctcccgatatggagcactcttccctggctcaggcaagggaattaaagggatacacttagcttaactctggggcgagggtggagaccatgactgtgtctagtgaatcagtttatataatctgcccgtaaccttctctagataaattatctgtatcctctgaggaaagtagatgtggttaggaaaatagtaaccatttgtgatcactagatttaatcaggggcacttaatgtcttatggctaaagcattgagctgaggccctttgctaagctaacccctttatcagaacctggcttactctcttcccttttgttcctgattttggcccttcactctacacttggttccttttcttcagcatgtaaacatatttaagcttcttccattct

SEQ ID NO: 158407 - DNA, 418 bp, Homo sapiens
agggttgagaaatcccactcttcagttcatacagcatcatcattgttccatggaggcctcttattgtttcctcatttgtgcctcctttcctccatgccactggcaaccatattcgtgggttaaatataacagaaatctttaattttgcatgtttttaaaaaataaaatgtgtattgactgtagataacttatgtagatggaattgtgttaagatatctcattcagttcttttccagttaaccctatgctattaaaatcaattcatgttgctatggatccatctattctgttgctttgaattgctttcctggtactccttggagtgtgtagcagttagtatgctttgtgatgaaccatcccaaacttagtgacttaaaacaatggtcactcctttttcgtgagtctgtggggttggttg

SEQ ID NO: 158408 - DNA, 414 bp, Homo sapiens
aagtataaagacagccacgtgaatcctttaatcatgggcggatctttttccctggataaaacccccgctcttcttatatctactgggaatttctctcctgctacctttctctttcttcttaaccctttagacctcttgctttatgaaaccatatccttatggtaccagatttcccctattcagacaattcagtcttgactagaggaggcgtctctgagggtgggtgaagtggcagaaaagtagaaaggggagggaaaaggaaagaaatagttccttagttgtcacttctcatttctctcccgctgctggtttctttgctgctccatttctcacggcccagctcttgccgatggttgcaagttggaaggagattgaagagcggagagaatctactctgctatttatactaaggga

SEQ ID NO: 158409 - DNA, 539 bp, Homo sapiens
aaaaacagccttggagaaggcatacccactcagaccttcctcaaattggaactggcatattacttccgtttgtgttccatggagaagagttagtcacgtgacaccactgctccaatgcatggggttgggaaacctggagaagtgcatggatatttagtgagtgctggtcatctgtgctgcataaggactaggctcttcttatatctactgggaatttctctcctgctacctttctctttcttcttaaccctttagacctcttgctttatgaaaccatatccttatggtaccagatttcccctattcagacaattcagtcttgactagaggaggcgtctctgagggtgggtgaagtggcagaaaagtagaaaggggagggaaaaggaaagaaatagttccttagttgtcacttctcatttctctcccgctgctggtttctttgctgctccatttctcacggcccagctcttgccgatggttgcaagttggaaggagattgaagagcggagagaatctactctgctatttatactaaggga

SEQ ID NO: 158410 - DNA, 130 bp, Homo sapiens
ggagtctgtaggggctgagtcgaggatggccaggctccctggtttgagcctttatcacttaggtgtggccaggtgttttcagctgagtcgtgatgtggccacagagaggaaaattaactgatgggaactg

SEQ ID NO: 158411 - DNA, 454 bp, Homo sapiens
  misc_feature (174)..(174): n is a, c, g, or t
ccttgtatctcctaacactagaccatagttggcattcaaatatttgttaattgaataaacgtatttattttaaaacagcttcattgaggtataactgaaatacaataactgcacatatttagtgtgctattttggtaagtttacacacacacacacacacacacacacacacantgccctcttcacacacattcaccctgtggatgagaatgtgagaatgtggcaggaggataaaagtctgagaagatgactttcaagagtgaatctcaccgatttcttttatagtgctcaggtcacaatatgattaacagtgaatcgaatgtgtatatacagtgaagttagggtcttgtggccatctctgcccattatttagaaataagcatatgtttacttccatattgaatctaaaattttctttttctcttgtgtaatgtgagagatacgggtaccgagc

SEQ ID NO: 158412 - DNA, 476 bp, Homo sapiens
ggcgcctagaggaccccggatacccagcgtataataagtagtttattgaggacatctccgaaagaactctacaggatgaatgaaaaaataaatgtcctaatgttatactaattctaggattgggaacattatcatgtgatttggggagagccaatatctcacaagacttggaagtgaagaagatgggctcttcaaaatgccaaatgatgacttacagtagcactagtaatagcatttcaaagatgcacattaagtgtgaattacattatttcatgaatggacagtagaaaacagcagcgttcctgagttcatatattggtatgacttttaaatatatagttgtaactattaagtacagacatttaattcatcaccatctttagaagtttacccactcaactagatcacaaggtggtttcttcttttaattgggaagattaacagttaattattttcccatgccgctgtgtattccg

SEQ ID NO: 158413 - DNA, 228 bp, Homo sapiens
tactctgatttagtcccctttacaacaaataacccctgcgggcacttgtctgtgtgcgttctcaaatgtgttcaagatagtttttcctttaaaggagtaacagaagtgttagttgatgaagcacaaagaacatagaaaatgcatagaaagaacatttctcgttcttttaatttgctaaatacaggtaagcccaaagcaatgcagtctatttaacatgctagtaacttt

SEQ ID NO: 158414 - DNA, 548 bp, Homo sapiens
tggtcggtaccagatatagactttaaaatttggttcaaaccagaagtgtggtatagaaatacatagaaggaaatcctgctccttaacagggtgacaaaatctaagatcatgaatgtgttcaagttccaagaaaacttttgtataactctgttattttcattcagaatgcaagactattcaaagtatagaatttgtgatctttcaactacagctgttctgcagtttaagcaaacaccataaatgaaaataatgacttttgccagttgaactggattctctatccagaaaataatgtagaaaatccaggccaggtgtggtggctcactcctgtaatcccagcactttgagagattgggagaggaggattgcttgagcctgcccatatgagttcgagaccaagctgggcaacatggtaagaccccatctctacaaaattaaaacaacagcaacaaaaactaaaaaagtccagtctacctcctcaaagaaggcaattgtttttgttttgattttttttttaagacggagtctcgctctgttgcctcagctgg

SEQ ID NO: 158415 - DNA, 394 bp, Homo sapiens
gtggtaaccaacatgttttgagcatttgctaaatgggaggcactgttgagtgccttatgtgcattatctcatttagtgctctcaacagcccatgaggtaggaattattataatatagactttgccatcaagttggtcatgatccaatataagaaaataagcaaaataattacaaaatcaagttcattgattctgtacttaaatattcatccaatcgtcccatctgccattaattaagacaaataatctttctttttggactgtcaggtagctccctacaatttctcccacctatacacacctactaatgagatgtgttaaatttaaatccagtcatctcctctgtcctgcccaaatactttcaatggctcactattagtaaaggatgaagtctg

SEQ ID NO: 158416 - DNA, 922 bp, Homo sapiens
agtcctttcccaaagggcaggggctaatgacctatgtttatgagaggtataaaagcacaagactacaaaacaaatgtcaatactgtttaattctaatattctttattattaatttccaactaatatgcaaacatgagatctgttttgagccagcaagcaaccttaggcattattcccaagcatatatactatgttactgttcctcaaaatgaactctgcacttcccaggctctgttaactttgttcaagttcttctctctacctggaaggcccttaacccaacctctgccagaggaaatcttacagccatagagcctctgccaaatgctcccagttgggaagcagtttctcctcatcctccacatttagaaccctatctgaggggtatttatgatcttccagctggtctgtttcatgctgtatttatattcatgctgtatttatatatacttgtttatcttccttgactcatgggcaaaccttctgtcttgttcatcttttgtatccatcccatctcctctctaccaggactagcctaaaaacttgaacataaagatgagtaatttgttggaataaactaaacagaagggaaaatactgatgcctgtgctttgtataatcatttttctcatacacagtaataaactaccaatggaatcattctggttcaaacctaatcttcaaggtaatcagtcctcctacctattctccctccctcattttcacatcatcaattactagtgtcaaattctgatggtacttattttgtaatcacctgaactgctattacaccactattaactctggaaaccagaactaaggaataacttacctgaaatacgtgcaaatatattcatttttatggatatcttaagattatttgccttatacatcaatacaacaattctaaatctaacaattac

SEQ ID NO: 158417 - DNA, 759 bp, Homo sapiens
aggctgaagtgggaggattgctttagcttgggagttcaaaactgcagtaagccatgattgtgccactctactccagcctgggcaacagagtgagaccccatctcaaaaaaatttattcagttaaaatctttaacaataaagcaattttgagtcgtattttgcgacattctcaatatagttttccaacttgcattaaaatacattttaaacatttttgaagactaaatttatttttttaactgacatttatgtttcatttgacaaccttttgctgtatattttatgtggacttttaggtattgtagtgattcctttaatgaagaaataaaataattgtcatttaaaaatgcatattattattaccttatgctataaaaatagttttaaaatagagtatgtttattaagatttaaaaataagtatagtcatgcactgcataacagcgttttagtcagactgcataagattacgatggagctgaaaaattactgtcacacaaatacttaccattgtgttattatttccatacactgttcagtacagtaacatatatgctgtacaggtttgtagcctaggagcaacaggctatacagcatagcttaggtgtgtagtaggttataccatctaggtttgtgtaagtacactatcatgtttgtataacaacaaaattgcccaacagctcatttctctttatgtatccatgactgtatattttttattgtggtaaaaaacacttaacgtgagacctaccttcttcca

SEQ ID NO: 158418 - DNA, 262 bp, Homo sapiens
tgcaacagaaagggtcctgactaatacatgcatcttccagggaaagaaaatgacttactgtaaatccttaacacagaaactaatttgcagtagaagtgtgctatgaggaagcaggactgatattcttagaaattagagttgttttgtctcctctatttgtaagagtctaacagatgacacagcaaaatctccagccctcctaccttccataacgggtttgctcatccatggaagttcatgaagttccagttatgccacttat

SEQ ID NO: 158419 - DNA, 305 bp, Homo sapiens
gcctttttcacttaatatttcttggcagtgtgaaaagagcttccacgtcattttttatgaaggccgtctattttagatatctgttttctgtttctaaggatgctaaaaaacagtcttatttaggcagcagctttgctggagatcttaaagatcttgtgaatatttggaggcaaatatttttcttttctgtgagagcccgggggaggtgcaggggagcttctaaaggtcagctgagaagggagagctggggcactggagagtgaggaacgcattggtccttgggcccttcttcgccttgccgtctg

SEQ ID NO: 158420 - DNA, 320 bp, Homo sapiens
tacagtatgcaggctatgtactcccgtcgatggaacaacgtcgatgtactggtgaataatctccgtgtcggaacataactgaagcaaacaatgatattatttctaattatatataaacctgtgagtcagccttccaggggcggcctgctaaggtagaatcattggaatgatttggccagggtttggataggagagaattggcagcagcgttaagattgacccatgataaataatgctatgcaggtagcagggagtctgactaggagcaaaatcaacgaacttatcccttgcctaacatagtatctgtggagtcagaaaga

SEQ ID NO: 158421 - DNA, 119 bp, Homo sapiens
tagtaagtaggtaagggttttatttttattttcaagcctgctctagactttcaggagccaaaagttcaaatcacagcaggattgattcagccctttcacaagcaatttagtactatgca

SEQ ID NO: 158422 - DNA, 276 bp, Homo sapiens
agcacccatagagatttaactttatcaaatgtaacatgggaaggggagaatagccaatatatctaagacctggaaataggcttaatccacccactgaccctgggaagcattctagagagtggtcatttggccattttaataacagtcttgcaatgtaaatgctcatctattgaaatagaacatttctgagcactagaattaattctaagtgaatctgtcagaaataccttagagtaacatttccaaaggctctaatagtcaaatttaggagtcgac

SEQ ID NO: 158423 - DNA, 221 bp, Homo sapiens
actatgttggctaggccggtctcgaactcctgacctcaggtgatccacccgcctcggcctcctacagtgctgggattacaggcatgagccaccacacctggtccgtttccagtttttatctacagtttgaatctttcctcagtgcctctagtctcatatatacaaaatacctgcttaacactttcacttgcctgtctaaattaacttgtccacactcagac

SEQ ID NO: 158424 - DNA, 374 bp, Homo sapiens
gtgactccagagcctgaccaccttctgttatgtcacactgcctcctggttcctggttcccccagatgacaaaccaccaaatgaaaaagaactttgatgattaatttccattcctcccctggaacccctttggggtcattcctgaagagctgggtttggtgccaagccagaataggcacagacactcccatggtagggctcctttcttgtgagggaagctgagagtcttccagatcacaaactgcagatggcaaggggaatgttcctttactccctctctgctgtccctgctgggacagaggagcctgtcattgcctcagctggtcttgctgctgcatgtaaaatctttcattcatctcttgtattacctactct

SEQ ID NO: 158425 - DNA, 350 bp, Homo sapiens
atttacaaaatgcctcaatacctcagccttccaccatgacttctacctaggactctaaattaatcttttatagtctctgcatcatacaaacaggtttcaaaacatgtaaactgggagtacatcacacccatcattgcagagtattcattttcctgcctactccatacttctctttttctcccagcaagcaagtccttcaaggccagagtcaaaccttacctactctgtaaccctttctaattgactcagctttacttcttttaatccttagtctttagtacttacatgatattagctttttttttttttaagcatacttcctacctctaggatctcagcccttggaaaca

SEQ ID NO: 158426 - DNA, 139 bp, Homo sapiens
gggggtcaccagcagctctcagggaccgcagatgggctgaggctgcagactctggcttgttctgagtggggaggggcaccaggggctttgagcaaaaaaaaggctccgggcagacttgggcgtcgaaggccagctccgg

SEQ ID NO: 158427 - DNA, 176 bp, Homo sapiens
aggctggaaaatcgcttgaactcgggaggcggaagttgcggtgagctgagatcatgccattgcactccaccctgggcaccaagagtaaaaaaaaattataatttcatgtgctgtgctgtgaaaacaacaacattgttttcaccgcacagtaataaactactgaaattaagcttgac

SEQ ID NO: 158428 - DNA, 186 bp, Homo sapiens
catcaccatagtcaagatattagagctgttccattgtcccaattcctccattccttttagagtcaacttctagtccctggcaaccactcatgtttttctgtttaactatagtttaacctttgtcagaatgtcatacaaatgcaatcatgtatttgagattcatacgtgttgttgcccatgtctttt

SEQ ID NO: 158429 - DNA, 221 bp, Homo sapiens
ggattgagataaggggttgaacatatagttctaccatccttctagtccttgaagtgatttttaaaaggttgctaagaaagactaagtcctttgatacaagattccttcaccagggagcagaaatgttgatatactcttgcaacagaaaagagtatagggtttggttttctacagggtagagaatgtggggcactgtgtgtccctgtaatcccagccactgg

SEQ ID NO: 158430 - DNA, 299 bp, Homo sapiens
gtcaggctgttctcgaactcccaacctcaggcgatccacctcggcctcccaaagtgctgggattataggcctgagccaccgtgcccaccctcacaatttacttttaagtggccatgtatatggcagcttaaaatactctcaaaactaaaaacctacatttcctaaaaatactcttgtgcaattcaggcttttcattaaatctggcttgatactgtacccccttgtgtatttacaggattaaagcattaactttgaaattagccatatctaggtttgaggtcctgactttacccctatcg

SEQ ID NO: 158431 - DNA, 312 bp, Homo sapiens
cgatatagttgggtctgtgtctgcttttgattgcgttcttcactccatgcacatctaatggttcgattgatatagctgggtctgcgtctcctttgattgggttgttcactgcattcacatgtaattgatatagctggatatgtgtctgctttttattgggttgttcactccattcaaatctaatggttcgattgatatagctgggtcttgtgtctgcttttgattggggttgttcactccattcacatctaatggtacaattgatatagttgggtctgtgtctgcttttgattgggttgttcactccattca

SEQ ID NO: 158432 - DNA, 177 bp, Homo sapiens
gccctggcctccccacgtgctgggattacaggcgtgagccacctgagagacagtctccagctgcagcccacaagttctcaccagcatggtcctgcctgtccaggtctggcggacatgtctgggagtcaccgtttttccagacgtacgctgggtattttggtggcctgcttactccgc

SEQ ID NO: 158433 - DNA, 291 bp, Homo sapiens
atggtttaaaagtgagctaaaaatgaatcatcaggaagattacaggcacaaccttgatatgctgcagatttgaatcgcctttttttcttaacagaacaaaatacagtcacaagatcagggcaagatcaattaagtcatgacactcttctctgagttacagttttggttttcttaagtacaggcatcaaagatagagaaggccaacaaataatagaatccaattgcttaaaacagatgagaaaaccttgaatacttgagccctaataagccttaacttcaaacactagaata

SEQ ID NO: 158434 - DNA, 328 bp, Homo sapiens
tagtagtgggttggaagtgaagactttgagattttgcttcaaatttcagtttcataattaattgtacaatatcatgtatactgcttaacttatctaaaactgttttctcaccagtaaagtgggattaattccaatatatgctatatcagagaattttatgaggatagaatgaaataatgtacatacaaaggttttgtgaattctaaggtgccactcaaatatgaattatttggttgtttttgaaactgtaatgttgcttcaggaaagtcattccactggactaatgtaagcctcttgccaaaaacaaatctctacacacagtttcgtc

SEQ ID NO: 158435 - DNA, 545 bp, Homo sapiens
cttttgtttgaacatctgttttcaattctctgggttgtgtcccagaagtggaatttctgggtcatatggcaattctatgtttaactttttggggatactccaaactttttcccacagcagctgtaccattttatattcccaatcaggaacatacaagagtcccaatttctccatatcctcaccaacagttgctgttgtccattgaaaagaaattactatagctatcctagtgggtgtgaagtggcatctcttggtggttttgatgtgcatttcctttatgactaatgatcttgaacatccccttttgacttgaggccatttccttctactctatctctattttcatctctatgtctaaaattaatcacatttttttttttttgttttgagatggagttttgctcttattgcccaggctggagtgcaatggcgcaatctcagctcggtgcaatttcggctcactgcaacctccgcctcctgggttcaagcgattctcctgcctaagcctcccatgtagctgggattacaggcatgcaccactatgc

SEQ ID NO: 158436 - DNA, 329 bp, Homo sapiens
tcctcacacatctcattctaatgtagctcttgccaaaggatccagcagagaggctgcttcccagagcatagagcccttggaagtaggagaaatggggatcactgaggtagagtagccggaaaaactgagtctcccttctcgggagtataaggcaagattggccaagccttggccaggttcctgaggtttgcctatgtccttagttctccagtattctacccaaggactgttcagagtctcctatgctgtggctcttcattcctagggaacgggtgtgaatttccatctgcaaaattagtgacttttttggtccacatgttaaaggttct

SEQ ID NO: 158437 - DNA, 1105 bp, Homo sapiens
  misc_feature (270)..(270): n is a, c, g, or t
gtactcctctcccgtacgcccaaatgtcggatcccagaagtctgagggctcgtcatgtctcacaggatctgctgttccactccccaacacacactgatcacaagtctgggcctccagtaactctcttgaccgactggctccaagttggagttcccacaagcccctctttgggtttgtatttgcatggagtgcctcatagaacacttacttttactggtttattatgaaagatactgttaaggatacaggtgtgcagaagtctgcttgggntagggtgaggcatggagtaaggggtgcggagcttccatgccctcccatgggtgtgccacccttcaggaacctgaattttgattttaaggcctagtaagatatattttccatttgaatgctctgacttctttttaattatattgttccctgggattgggttgaataaggaaactaatttattgaggactcctaatatggcaggcatgtattagatgctttatatttttgttttagtttattttaaagttgggtttattgggggtataattcacccttttaaagtatacggttcgatgagtttctaaaactatatatagtcatataaattaggatataaaacatttgcatcacctaaaaagttctctgtacccttatacctccacctttagccatgtattattggcaaccactaatcagatttctgtccttacagttctgccttttccagaatgtcatataaatggaatacacaatatgtagcctttggtgtctggcttctgtgacttagcaaaatatctttgtgattcagtcataatgttgcatgcatttctcctgtttactgctgaatagtagtccattgtataaatgtgtaccacaatttatttatccattcagccgttcaggtgcagaacatttgggttatttccaggttttagtgattatgactaaatctgctataaccatcagagaacaggtttttatgtggaaataggtcttcgtttctcttgggtatttacccaagagtcttttgttaatactcagtctattgttgggtcatgtggaaatatatatttaacttcataagaaattcccaaactgttttccaaagtgactg

SEQ ID NO: 158438 - DNA, 697 bp, Homo sapiens
  misc_feature (67)..(67): n is a, c, g, or t
gcatttctgctacattgatatgtccaagaatccctcttagaaatgacgaggcacagatagcaagatnaaattctttatgcattaggcttaaatttaatgtatcttaaggttttattgcaaaatattgccttgtttcctttttaagatgatacaatttataatatgcaaatttgctgtctgtcccctccctttatgtacatagaaaatgagcaaacaggtggccatgaaacagatggtcatagaattgtttcagtgcttgtgagtgcagcaacccaagagtgtcttatctgaaataccaccaggaatgtctggacacagtagacaaaggtttttcaactggatgccttaggatacatgcttccaaaaacaaagtagccaaaaagaaaccagagtcacagaatatcagagccagaggaacatttggaggtaattcagtacctcctccttttcagcctacaggggagatagtggaagagaagcagggatgggtctgccttctgtgcccacaattcattggagattgttgtggtgaagaatttcttttatgatgaaggagaaataaactcccatcagctttaattcaggcaggtttattgaaaaggtgaagaagcatcttgcagaagcaaagcatggctgaggcttgtgggctctgtctggacaaatgagcagctgacagtggctggtgctgcccctgact

SEQ ID NO: 158439 - DNA, 407 bp, Homo sapiens
agccaggctcttctgagaaagaaatgagagcttctccatataaacatctatttaataaactgtaaagtaccaaacaaatgttagttggagccactgaccctgccagaatatggccgtgatagagtgctagtgagtcatgcagagccacagcgtctatccttcaccctcagaaagcaggagctgctggaggcttttccttagtgctgagactcattcttcagtatttccgtaggattttgtgtttttaatgtgactctcattgtttattctttccgacctcctgccttttgaggaggaaacagaggtttgccggaggattagcatgttggggccaccagagagtttccagcagggtggggattagaatttcccacccagtgttctctgctcccacagcccctcacatg

SEQ ID NO: 158440 - DNA, 1435 bp, Homo sapiens
tcagtctcctgactagctgggatttacaggcgcatgccaccatgcccagctaatttttgtatttttattagagacgggtttcatcatgttggtcaggctggtctcaaactcctgacctcgtgatccacccgcctcggcctcccaaagtgctgggattacaggtgtgagccaccgtgcccagccgaaaatgtttctttgcaaggataaatatatgaagataaacttgccgagcgtaaatatgttcatgaatatagccacttaaggaaattcaaacatgcagagatgttcagctgtatgcagttatgtattcatgaagtattcatgtattcatgaagccttatttgatgtagaatctgagggtgctgcctatacataaacttgcttaaaggttaaaacttaaggaatgttcatcaaagtcactttcttacacctaactcctgatttcatgaatataacacataggtgcttatcaaactgaataccttggagatgagctgctccagcaccagaagataaaattcagtaactgtaatccttgaggtacctaagtgatacattttttttaagactgagccaaaataaaacagctttcctccttccctaccctctccgaccaaacttttagccattttatttatttatttatttgagatggggtctagccatgtggagtgcagtggctattcacaagcatgatcatagcaaatgacagccacagactcctgggttcgagcaatcctgcctcagccactcaagtaactaggactacaggcgtatactggggcttctagccatttatatggtattaagtgacagcttctatagttacttagtacttgtccctgtaaaactgcacagtgtgtattctcttggctcaattattagcatattctgccatttccttgtgaatgttttgtattttatataggaaaacttaagtttttaaatatcctgaaataactgaagaattttgtttttgcctttaagtggtaatgtataaagtatactattgcagagatacttacagagtgctttcattgcaattaaaatactgcagctaactagcatgttccatatgtgtaatctaaatgacatactggtcatgtgctatttctatggaatactaacagtagtatggtacatttatgcagtctcaacagtttaaagtgttattttggtgataaactgtttacatttatttgtttttatatttggcagtctaaatgcaagagtctccatttcagctctttactctgcatatctttaatgttgggcattatgcctctttcttgagtttcagtcctatgactgttccattttcagtattcatgtttatgtgtctttctaaaattgttttgcttctgtttcttgctgctcttgagacaatttatgggcaaattttgttacttttcaactggccgtgtatttccctgtg

SEQ ID NO: 158441 - DNA, 397 bp, Homo sapiens
tagtgtgcaccagcattaccttgagagcttattaaaacccatattcctgggctcgaccttcagagtttctgattcattagttctggagtggaatccgagaatttgcagttctaacaagttcccagatgatgctgatgctgctggtctaaggatcacactttgagaaccacttgattagaaggttgagcagctagagtcagaaactgtcaaataacttgtttcaaaaaagtgcgtgtgagtcaggtgtgggggtatactgacataggagagttctggaaagatatataccaagctctaatggtcctcacttctgggagtaagatttagaggcttggggaatttacttttttacctttctatattatttttgcattgtgcacataatgcttttgtgttt

SEQ ID NO: 158442 - DNA, 411 bp, Homo sapiens
gagagcccaagtggagttcttcagcacaccctacaccatcccctcactaacacccccacctgtccagtcttacctgccttcatatcaaaagcactcagttaacccagagggcttcagccctgccctgcctgactttctaggaaacccctctctccacccaccctaatcagacactgtctgaaggttccccctcatcattttaaaaggaagagaaatttttctgacacagaggttctggtgaagtggccagctcccacatcacagggtgatggtggtttggactggaccaggatcagacagtgctgtcctggggctggccatctgataaggggctccagaaagggcagtgatggacccctgggaggctttctgctctcctgatcacaggtttttggtgagaggacctattgg

SEQ ID NO: 158443 - DNA, 354 bp, Homo sapiens
acagcaacctgccgagccagaagcaaagagtctcaaaacagaggaaggaaagagtccaatccccccagggttcccactctgtttgagctaaaccaatttttagcatgtttccaaactaaaactaactttagaggtcacctaatttaaaaattttatgtcccccccaccaaacactgagggtgattgcctaaagttacatggctagtcggagcagtcaggacaataattcagttctactgacttaatctaaccaacttccttcatttatgaggccaggcttcatttaaaaaataaaggagccaggtgtggtggcacacgcctgtaattccagctactcaggaggctgaggcacga

SEQ ID NO: 158444 - DNA, 407 bp, Homo sapiens
ctggtctatatcatgagcctatcctgttgatcgtatatatgtactgatcacatatatatgttatactctctgtaaagaagatgatcttgaatcttctttctagcagatgcagataatatggaacctcagagcatactgttaatgtgatgaacatttcccataatgttcttacaataaatatagcaatgagatttactaaatgatttcttatagtgttgccctgtggttgaaaacctaacaaagtacaattttgctggtggccacatatcacatgtgtttttgagtatggactgaataggctatatattttctagacagtcctgcataaattattcctttccatgccaagtctttcataaatgttgaatggcagtaagtttgaggttatagtccctgagagtacctag

SEQ ID NO: 158445 - DNA, 282 bp, Homo sapiens
aaacaccaagtccaaggaagcaccctactcatagtccctgcttcagcacaggttggcaccgacacttccaattaggcagagcttccagccaggaatgagactgactgctggtgctaaatgtgggaactctatccaaagaaagcagaactccaaaacctggcggcagagctccagaccttttcctggcaaaggcaggcagtgggctcactgacattaaagtgggcattccaggaagactctggtcctagaaaagagctggactggtaaaataaccattgagaa

SEQ ID NO: 158446 - DNA, 474 bp, Homo sapiens
ctccccttcccccacctagagtcctcagtgttaactgtttatctctacctccaatgtagttagttcccacataaatatttgacttagacaagcaagctccagatggactggggagaatgcagattggctcatggaatctggtcccacatgcctttgacccatcatccgtgaccccagtgacacagatgggtcctgggttggtgctggctgtggcagccccacaagtgcctgacttgcttttcagcacattcctgctccttccactgtgtgagccactgtggactaggacaggactgattggtttcagaaattatccaggcaaggatcaatccaattaggctgtccctggagatgtgggaaaagagaatgagagagattgagagattgaaatagacagatagattggggagaaggaggtaggggaagggatacacataagtatgggataataaagtcagaagtttgggaatgagg

SEQ ID NO: 158447 - DNA, 823 bp, Homo sapiens
ccagctgcattagtccataacgagtccattcttttttggatttttcataaaatcagcttttggttttattccttatatttatgaaagttgttctccattttattaatctctgcttacatgtttatgtccttagtttttcttttggtgcacttttgttgtttttctgtgtctaaagttcacatcatttattatcaatcattattgtgtcctagtaaatacatttaaagttataactttttctctgaagaaaatgcacactgtatcccatgatgtgtgtagcattaccattaatgttgatttctgtgtagtctgtgatttgagttttgatcatttaatccaaaatcacttagaagaatgtcttaaaatgtctaactagttttaggccaggtgcggtggctcatgcctataatcccagcactttgggaggccaaggcgggcggatcacgaggtcaagagatcgagaccatcctggccaacatggtgaaaccccgtctccactaaaaatacacaaattagctgggcgtggtggcacgcacctgtaatcccagctactcgggaggctgaggcaggagaattgctggaacccaggagtcggaggttgcagtgagccaagattgccaccacactccagcctggcaacagtgcgaggctccgtctcaataataataataatgataatgataatttttaaaaatgtctaactagtttcttctgttgtatattttgcctttaaaattaacttgctatttattgagatggatgttcagttttagtaaatgctctgtgaggattttttaaatgttcatttcttatttaggggaag

SEQ ID NO: 158448 - DNA, 258 bp, Homo sapiens
tcctaatttgttcactgctacatacctaatgcataacacaatgcaggttaaaaagcaaaagctgaataaatgttcttactaagatgaactatataattatgcccatttataaacaaggaaactgaggttcaaagaggttaaataactatgctaaagttatcaacaactgaacttaaattgagccatatctgattccaaagcctatgcccttaacctaatggttttccatctctggtgcactgctgaatcctctaataa

SEQ ID NO: 158449 - DNA, 140 bp, Homo sapiens
atcttcattgcctcaaccaacctcctccagcttctaccccattcatttatatcaactacccaattatcaataaatctaggtatagcagtcccctgtgagcaggtgcagtaattacaggcttccactttaaaactaaaatc

SEQ ID NO: 158450 - DNA, 200 bp, Homo sapiens
gagttccaacacgtcgcgtgcataggcctttggcactttatcgacgtggaatcaggcaggaattagcataaaggtggtcaggagccattgcagcacgttgagccgaggagcagcacatcttgtctgtgatgtagatgggtcagtgtggcagtggcgtaagttgggaacagaggaagggaggctggagtctgggagagaga

SEQ ID NO: 158451 - DNA, 350 bp, Homo sapiens
aggaggcagaatggggccgagaggaggagctgagctgtgaggcaggtcccacggccaactccccagggcccaggagttgtgagctggaatggcctcccagaatcacgtggctgggactttgtaccccgcatcccatcagtcactgagcatgagtgtccccaggaggacattgcctgcagggaagcaggtcctgcagctctgtctgcaccgcccctgcagcgaggccccgtccctcagggttgtcgtgcagaggacgaagtgtgctgtcaggatgtgcacaaggcttgtgggagctcaaaggatgggggcagcttgggggatggagtgcagtggggacatcttgaggaggc

SEQ ID NO: 158452 - DNA, 683 bp, Homo sapiens
cggcttatagaggatcccgtctctgctcccagaatcacgtggctgggactttgtaccccgcatcccatcagtcactgagcatgagtgtccccaggaggacattgcctgcagggaagcaggtcctgcagctctgtctgcaccgcccctgcagcgaggccccgtccctcagggttgtcgtgcagaggacgaagtgtgctgtcaggatgtgcacaaggcttgtgggagctcaaaggatgggggcagcttgggggatggagtgcagtggggacatcttgaggaggcaaagactgagccaggcctttgaggtggagttagatggtcagagggagcagaacctgggggtgcccagaggcacatttggagctgtcagtgggtccgatgttgagggaggcaggtgagccaggccctaacgagtctgtctgccgtgctaaagggtgtggacattagcataaaggtggtcacgagctgtcagtgggtctgatggtgagggaggcaggtgagtcaggccctaacgagtctgtctgccgtgctaaagggtgtggacattagcataaaggtggtcaggagccattgcagcacgttgagccgaggagcagcacatcttgtctgtgatgtagatgggtcagtgtggcagtggcgtaagttgggaacagaggaagggaggctggagtctgggagagaga

SEQ ID NO: 158453 - DNA, 513 bp, Homo sapiens
ataaaatccggtcaatagccagacatgctagccagaagcaagctaaggcaatgtgccgtctctgttccgtgtgtcttgaaagtgtgccttttttggataatgaaaatctctacaatattttcttgggctaatgagaagtgtttatttgtatttttaatatgaaagagaacatctttgcctctgggaaatatttatgaggaacataactaaatggagactaagctttccttttcatttcccttctgcgtcacagattcttgtgtttcttccaagcactaatgaaatatttaaagctgttgtcaatgcagaaatgttcctccctaacatgtttcaatgagctggaaaaaagcggagaataatttgctattgtctacatattcataacataaggatgtcaggaggtattagagtcactttcgatgtgtctgactccacagcattggtaatattagaacactttcagctttcaaggtgtaaatttttcatctcctccttttcacttccttccattgg

SEQ ID NO: 158454 - DNA, 547 bp, Homo sapiens
tttcaattaaacatttcatttgatatgaactactgtgtcaccaagacagaatctttgctcattcacataacactttttcaagaagcaggaactggccagttcctgcttcttgaaagtgtgccttttttggataatgaaaatctctacaatattttcttgggctaatgagaagtgtttatttgtatttttaatatgaaagagaacatctttgcctctgggaaatatttatgaggaacataactaaatggagactaagctttccttttcatttcccttctgcgtcacagattcttgtgtttcttccaagcactaatgaaatatttaaagctgttgtcaatgcagaaatgttcctccctaacatgtttcaatgagctggaaaaaagcggagaataatttgctattgtctacatattcataacataaggatgtcaggaggtattagagtcactttcgatgtgtctgactccacagcattggtaatattagaacactttcagctttcaaggtgtaaatttttcatctcctccttttcacttccttccattgg

SEQ ID NO: 158455 - DNA, 442 bp, Homo sapiens
cacaaaacagctcaactatttatccttaatatagtcccttcaacctgtctggcaaaaccacgtaaaaatcttatgctttcagcaggcttgctctgatgtgtaaatcagttctaaattgagttcaatcctccacaaacattctttgtctttgttactatatacgtatgatttatagttctctctctggggaaataaaattaagttctttcacaattcttagaagagaaatatgaaatacggctctatgaagttatttcaaagatgacttctaactaggcctaggatcctcatgccattagcataatgtctaaaatttcctctgttctcaaattcattctaatctatgaaagaagatatgagtaggcatgaagatgtataaagatgataccaaattacacctgggtgcagtggctcacacctgtaatcccagcactttgggagg

SEQ ID NO: 158456 - DNA, 432 bp, Homo sapiens
caaagcgagcacctgctcctcccgccggtcctcgcaggaggaccccaggctgctgcgccccggctgcctctccgggtccctgcgctccgcttctccggagctgggggaccgggggcgccccgggacccgcagccagggtccgcccagcgcttccgagccgtggtaacgcgcctccccaggtgcccgacaccccgcccggggccagcatttttcgcttcctagggccgggccgggggtctggggctgcgtcaagggcctcgtcaggcacccccaggcctgcgggggcaggatcctgagtcaccgccgcgcacgccctctcctcccggcttccatcctggggccacctccagcccgcaggtcgggccccggcgcagccggctctctgcgggtctgctgtgcgcccctctccccagcccgagtcactgcggccgc

SEQ ID NO: 158457 - DNA, 336 bp, Homo sapiens
cagtgggcgagtggcgggaaatcctcgtcaagttgtcttgctgtttcctgccatgatggcgatgagcacctgataggagaagggggaagactttagatagtgtttactttgaaaacctaattaagcatagcctgaagagaagcccccaggagcctagaggcccgggaggggtcccagctccttgacccactgtttctgtgaatttgaaccctctgatgggcctcgatcctcttatccatagagccaagggcttccactgtgatctctgtaagatcccttccaaatctcagctcctgtgacctggaggccatatattgcaatgcaagctgaaatcac

SEQ ID NO: 158458 - DNA, 180 bp, Homo sapiens
agtacagttttaagaaaagaaccttccaactaaaggctccaagtctgtggagagtccccaccgccttgcttagctcactggatcattaagatacacattggatcattaagatagatacacactgcatcattaagatagatacgggggctgggtgcggaggctcccgcctgtaatcccaac

SEQ ID NO: 158459 - DNA, 158 bp, Homo sapiens
ggcaggtgattgaattatgggggcagcccttttcctgcactgtttttgtggtagtgaatgagtcccatgagatctgatggttttaaaaaggggaatttccctgcacaagttcttctcttgtctgccaccatgtgagacgtgcctttcaccttctgcca

SEQ ID NO: 158460 - DNA, 251 bp, Homo sapiens
cttctcaaagatgtgaaaacaagtctcagaagggttaactaacttccctgatgtcacggattgtaagttatcagaactagggtgatattcctggtctattttagatccatgtcttgctttttctcactaaaccagtgctgttagctattggctgaattatgactacctgtgcttttcaaatacttctgcaaaaacaaaatatataacaacagcataaaaggaaaacaactctggttgaaatggaagtgaag

SEQ ID NO: 158461 - DNA, 549 bp, Homo sapiens
tcggcctcctgagtagctaggattacaggcatgtgccaccatgcccagctgatttttgcatttttagtacagatggggtttcaccatgttgaccaggctggtctcaaactcctgacctcaggtgatccacctgccttgccatcccaaagagctgggattataggtgtgagccaccgtgcccagctgcaccaagcttttcctgaaggctgactatgctgggccactgttctaagtgccaaaaatctgggctggacagggcaggagggatgcagtatggataaacaggtacttattgagcacctactctgtttggggtgaggtactctaagctcttggacatgagtgatgtcacccacagacaaggacatttgtgagctaaatgtgtacagaaggcaggaggaagaaaggcctagagtgcccagaaagtcagaagaggtggtcagagttaagaacacgggcttcttgcccttttaaatctcagctctgtctctcgtgaggtgtgtgaccttgggcaagtcacttcacttctctgagcctcagtttcctcat

SEQ ID NO: 158462 - DNA, 687 bp, Homo sapiens
accaacaatgagatatccacatgctatggtatgaaggttcccccaaaattcatgtgttgaaacttaatggctaagaggagggaccttttgagaagtgattaattataaggattactgccttataaaagaggtgatacaaactagctttaggcccttttgcccttctgtccctaccagcatgtgaggacacaatgtttgtcccttttggaagattcaacaacaaagggccaacttgcaagcagagaccaggctctcatcaaacgctgaacctgctggcaccttgatcttggactcccagcctccagaactatgagaaacaaacttccattctttataaattacccagtctgtggtgttttcttatagcagcacaaatgaactaagatatcatgtttaatttgcatttatcttaaatcatgctaccaaacaaatctctcagccaaggtgacaatcaatgaacagattccttctatgaactccaagtttgatatgaacaaagatagcctcttatctgtcactactcatttccttgcctagtaagtttcttttgatattaactccagctagtaagtttcttttgatattaactctaaaaagcatctcaacctcagaagtgttaaaatgggggctggagaggaaaagaacacaacacacccaacagagtggccaaattttaaaagagagaca

SEQ ID NO: 158463 - DNA, 151 bp, Homo sapiens
gttcgtgccccttcagctcttaatatacaggtggagagaaggaagaagttaaccacccggcgggcctggggcagtgaggaagggccttggaggagctggccaggaggagcagcaggaggaggagggggccaggcagagggagcacacaagg

SEQ ID NO: 158464 - DNA, 219 bp, Homo sapiens
cccccaccatcaacagtatacacaaacacacacacacgcagggagcagggctctctgagcccgagactagacccacccccactccctttagggcaatgaagcccccaatttccagaaaaggagttacaaggttcctaaaccacttcccctcgggacctgaccactggtcatctgcaacttctgacccagcacagacggggggagggggggccatgacac

SEQ ID NO: 158465 - DNA, 423 bp, Homo sapiens
gtctcgtggggaggtggtctcgtggggaggtggtctcgtggggaggcggtctcgtggggaggctgtctcaggtcacctggccgccctctcctggggcactcagtcctctgttaccctctaggggatccggctgttcttacaaatgcttggaggagagccgccagggaggctgagtgggtagcagttatttccagaagataggttttattattttcaagcatattcgcgattcctgccagcttctcaggaaagcccaaccttggagggacccttcctctgcgaggaggcggcgagtgagcgtgggtgtgtgtgcgtgctcaccacacagttggcatcctgtggggcagctcagatacaggcggagcaaggccctgctggaggcacctgccctgcggtcacacagcacacacctgaaaccacagc

SEQ ID NO: 158466 - DNA, 225 bp, Homo sapiens
ctgggtgctgtggtggtatcattgaggcttctcaaaggaagctgtgctgaggctgaggcatcaagaatgaggagtcagccaggcaaagttgtaggggagcagggcatgtgccaagatcccaagtggaagagagtgtgagatggggaagcggggccaaggctgagagaggagactggtgctcagcaggggccagatcatgttggcttgggcatgttactgaaatgc

SEQ ID NO: 158467 - DNA, 515 bp, Homo sapiens
tggctaacacacatgggaaaggtgctaaagtgctcagtgccttacatctaagcaagacagaagtggtgaggaggtgaaggagccaggcatatggctctctgaggaaagagtgttgcaggcagagggagcagcaagttcaaaggccagggcctgttggggaaggagcagggaaggcagtgcagctggagtggagagtggccgagtgcagctcaaagaactgcccatgagcaaggtggagcctgtggagcttgctggggctttggcctcaggatgtctgcatctcttcagaccttaatctcatcagaccttcaagatcttgccaatctgacaggggtaaaacagtatttcacgaatgttttcagctgtcagagtttacgttttacattttttcatgtgcttgttggttatttggactggcccttctgtgaatttttagttaatattcttttcccagttgtccctatggatatttagtataatttattgctttgtagaaatgatgtatatgttctggt

SEQ ID NO: 158468 - DNA, 729 bp, Homo sapiens
gtcccagctattcggaaggctgaggtgggaggattgcttgagcccaggacatcaagccttcagtgagccgtgattgtgccactgcactccagtctgggtgacagagcaagaccctgtctcaaaaaaaagtgatttctcattttataaaagaattctgttcaaagtagcaaactcttaaaaatctaaattactgtttaaagagcagtatattattcaaatattatattgacaaacacagattagaattatctaaatccctggggccaaattgtttggcattcagaatttttcagatcttagagaggcaatatgatacatatatgtccagaagtgtctggagagtcacacgctaatcaaactcattaatattttttcagggaatcctaacaattttcatattaaatataaataaggtctacaattaaactcataccagatcactgtagattttgcaaccaaattagtttgtgcaacaaataacaataaaaagtacctgccagtgtttggagcttttggatttcaaaattatggataagggattatgaaattattttttatttgaacacatactgtcaggtaaatcagtctactatataaatttaagtagaataaaataatctaagaaagaaaaagtgtagcttgtatgctgatgtcacgtagataaaacatcactggaaatagaaataacttttatgaaaaccgaaagacaaaaatctggtgaacaaaaaa

SEQ ID NO: 158469 - DNA, 962 bp, Homo sapiens
atgtgcctcttgccttctgccctgattgtgaggcttccccggccacgtgaaactgtcctgcatactgatggaattactacaccagcttgtctgtaagaccccagtggtgccagctggtctgaaggataccactgactcagctgatctgagggtccccacgagaagtggactcactaaagaatgcagtttctatatcgtgatgatatcaccctccttgccctgaccaatcaacaaccccaattttccaatccttcaccctcaatgatccccttaaaaatcccagccaagaactcctcgaggagatgggtttgaggatgtcctcccatctccttgcttggcgccctgcaaaaattaaactctgtctctgctgcaaaaaaaaaaaaaaaaaaaaaaaaaaaaaaaaaaaaaaaaaaaaaaaaaaaaaaaaaaagggggagcggtattatttattggtgcgggggcgcgggcgaaaaagagagtgggagtagaatgagaagtgcgctaactgggtgctaacaattgggtggttttgctgcgaacccacatgttttgttggtaacagggggggaagaagagagcggggccccccaagagggaggggccatataatttgccacagcaccgggttttgctgttgtttatgattcgatgtaggaactgaaggggagtaagaagagaaagacgggtgagaagtagagaggatgagaaagtcaagaccagacaaacaaaagacgacccgaagaagcacaaccacgcagggagcgacccaaccacggtacaagaacgacgagacgcaaagaaaaagcaccaccacacaaaaaccatcccacccaaccgacgaaacccatccaggataccacaaacccagacataagcacccacagcgatcgccaagcgagccgacgcagaaccacagcgagagacgagcgcgccgcgagaagcagaagagaaaacaagaaaag

SEQ ID NO: 158470 - DNA, 420 bp, Homo sapiens
atgttgccatgtacttctaggccaggatttagtaattttttgccccctgcgtctcccagcttgctgactcatgcatctctatcagcacatgctcatccacctcctgagccgctatccattgtctgctcacaatgcgccctcagtggctgctttctcagtgggacagaccactacactctggggatgcctgcaatggtttttgacgtgtctgagccactgctggggtttcctctagttttgttaagttgcaggcagagattgtgcatgagcagtggtttctccaagctccatgaagaccgggaaacctgaacagggtgggtgaacttttcatggcgtgcatgcagtatccttggctggacagtccattgtgtgacagcagaatctttttgcagctttttttccccctttttttaaaagaca

SEQ ID NO: 158471 - DNA, 218 bp, Homo sapiens
taccacagtgcctactgaatggctcttcttgactttcttctcatagacatctcaaattgaacttaggatcattctcctaattttgcttattcaacagggttcccctcttagagtttcttgtgccagaaacctgggaattgttctcttttccctccgtctctcttggtgtttcttctgtcttacatactcactcacctttcccattcagttctatcatc

SEQ ID NO: 158472 - DNA, 576 bp, Homo sapiens
tttttttttatgaacataatttaaagatagaatttattctctgatggtttactcatgcaaactgcacataaaagaaaatagtacagtttgtgtaacattgcaaatataaggactgaaaatgctaggtacagaagtagtatgacatcctgaaagtcaaaatggaatttgtgtttatacaactaataatgatttttatttgctcagtacagactgatttacaatgaaagttttgctaaccttggtaagcttgttaaccgtttacatgacttcttacatctatgtagttttattttacagttgcaagaattctgttaccaaagaaccttaacttgcataagtaataagatgaaagaaaaatgtactgaaggacttaagagtgaaaaattgaggcttttcctaacccattcaaactacaataaaaaatttgcggcccatttagacacccagatgatgggtcaagcaacagatttcactactactaagttttgcctactacttgttttctagatatcaggaattcacagcactagagacggggtttcaccgtgttagccaggatggtctcaatctcctgac

SEQ ID NO: 158473 - DNA, 334 bp, Homo sapiens
ctcactaaatatcagtgcatttatcagacactaaattttaaatgcaggcacctgcagagctagtgagttctaaagaatcccactccctaagtttctgggcttcttcttacctctcttccactagcgtctctttttccaccttcagcacttggacatacggctacatagagaggaaactgtctccctgcttttgcttgctagttcccaatttcaagatgttgtattacacctgatttatggcctgacagggctcattctagtccacaaccctgagcttgcagaatgcacaggggaaaatttactaacgatttcgttcatcttaatgcactgtagg

SEQ ID NO: 158474 - DNA, 632 bp, Homo sapiens
cttaccattgtaatcccacttctagaaaccttaggtagggaaataataaacaatgtgaacaaagatatatgtgtaaacacatgagcacctagatgcttaattataggaaaatggccagatgaagcttagtacagctgtaagataaaatatctagcagttatcaaaattatagttaataattttaacaggaaaataattatgttaaaatagcaagtgaaaaaaaacatgcagtatttttttcaattatatttttccaaagtatagaaataattggaaagaaacgtatcgaaatgctaaaaaaaaaaaagagggcatgaggaggagggcctgtatggcagaaaaatggctaagaggtgagcaatgaggaaatgaaatgtgtcaagcagaactaaggaaaggaaaattcagttttttgaatactctgtgcaagcaatgaaataagcatttaataattcttgttaataattaaagataaacattggagtaaggctacgaggagaaaagagcctctttccacaatgaacagaaacctcccatcttggcttagttgaaagaatggaaagctaagatactttgaagtctgaatgagtacatgagatgactcaggtggtgtggggtagcgagctccatca

SEQ ID NO: 158475 - DNA, 127 bp, Homo sapiens
ccccagtaactaggactacgagtgtgtcctaccacacctggctcatatgcaacaattttgaaaatagactgcaacaatattgaatttatgttgattctgattctttgtgaatatggctatttgatgt

SEQ ID NO: 158476 - DNA, 350 bp, Homo sapiens
gagagtagaaggatgattggagtcagagaatctagagtaagatccagagaggactcgtgatttgcctgaagtcaaatggcttgttatctgtagcttgaaataagggcagtgacctttacagaacttcttttcctcctaacagtgctcattgtatttctttcacctgatcacgtgctaattgacttattaaaattttctccaagaagcaaaaaagggaaataatataaatagatcagtttgttgattggtaatttagacaggctttccttaattggttctgatttaaaagactatactttaaagtgccttataagctcactctttcatcagagctgttagccgatcaacat

SEQ ID NO: 158477 - DNA, 476 bp, Homo sapiens
tgactgtctagagtgggaactttgattctctttaaatatagaacaacataatttgagagaatggcaagactgagaaaggtttctgtagcatggtgcatgcatgtgtgtgtgcgtgtgtagggagaggcaaagggttctgacaagaggaagaggctgaggaagcaggctcatctccacaacgtgctgctgccacccaatcatagggtctcttgcagcaattccagtcctgatctcacaaacctcataccctaactacggtccccctaattggggtccctcctcagagctttcctaaggctccctaacttttcccctcacctcggttgaggcctccatggtttggacttgctggttttgccttgctcttcccttgataaatacaccatttattccggttcagcccttggaactttaaaccttaacccaagcctcctccaccccactatattagcccaagcctagagtatcagatctgg

SEQ ID NO: 158478 - DNA, 605 bp, Homo sapiens
  misc_feature (22)..(22): n is a, c, g, or t
cgacttctagaggatccaccgntatacgcaccgtggtatacttgacagatagtcccctttgcttaacacccaactcctccaccctgtgcagtttaacttgtgccagtgatcacaggatttgctgaatgaattaccataattggatttaattcaggaaggggatgttttctgtacacaccaaacaggctgcatactggattattttccctagatgacagggatgaagaaacccaacaggaaatacatctttgcaaattagaaaagttgatgaactcctagtgaccccctggcaccttggctcacctcactgcacttcacagccagaagcatactaggtggattcacttttttacctccctgataaagcaataggaacttgccacacccagactcacatccattctcctttcctacttccactgacctcaagtctgataaaaacccagagtgataatgctattgaggtacagaccataaactatatcagcatgtacgtaagtggagggaggggaaaaggggaggaaaaagcaaaaacggccaaatggagagttcagctttacctctatgtgaccttggcagcatgtggagtggaagggaaattgcca

SEQ ID NO: 158479 - DNA, 643 bp, Homo sapiens
  misc_feature (22)..(22): n is a, c, g, or t
cgacttctagaggatccaccgntatacgcaccgtggtatacttgacagatagtcccctttgcttaacacccaactcctccaccctgtgcagtttaacttgtgccagtgatcacaggatttgctgaatgaattaccataattggatttaattcaggaaggggatgttttctgtacacaccaaacaggctgcatactggattattttccctagatgacagggatgaagaaacccaacaggaaatacatctttgcaaattagaaaagttgatgagctaagtcctgcaaacattgggcacttatccaagatgaactcctagtgaccccctggcaccttggctcacctcactgcacttcacagccagaagcatactaggtggattcacttttttacctccctgataaagcaataggaacttgccacacccagactcacatccattctcctttcctacttccactgacctcaagtctgataaaaacccagagtgataatgctattgaggtacagaccataaactatatcagcatgtacgtaagtggagggaggggaaaaggggaggaaaaagcaaaaacggccaaatggagagttcagctttacctctatgtgaccttggcagcatgtggagtggaagggaaattgcca

SEQ ID NO: 158480 - DNA, 549 bp, Homo sapiens
accgtgcccagcctataatacgtaactttttaaaataacagtgtagtgcttgtttctgcaacacatatactaaaattggaaccatacagagaacattagcatgagttcccaaggatgacacagaaatttgtaaagtattccacatttttgttaaggtggtagattttgttatgtgtattttaccacaattaaagaaaataacagtatgaatcatttgactgaaaccacagagacagatttcaataaagtggggcctttgtcactaattcaaatgtcatccgtctctgtttaaacgaatgttggtttttcctttcgtctttcaggaaaaactctaacttttctcactggtagcagttttaggtacagacacatctccagcggcctgtgaccccccagcgctccacgtttacgtgtcccccgcggaatctctctgactgctctgtgtgaagcacgcagctccccaccccttcacgcagccctctggagtccaggcattatccactctgcagggccgccctgctgatctcaggggacgcgtccagctctcta

SEQ ID NO: 158481 - DNA, 279 bp, Homo sapiens
aaacacgtctgtgggccagaatcagcttgcaagaacccaatttgtgaccactggcttaagatgtgttgataaatggatctattggtccttgactaaagggaatctaggaaagatttgttttatttttggggggtaagaacataacgcataagaaagaagtcacttactcatttttacctgagagttgtttatttgtcttgtgaaatactgaaaccttagcactcattgagcgctctgtggtagcaagtgatttgtgatgatggtagtatttttggagaa

SEQ ID NO: 158482 - DNA, 137 bp, Homo sapiens
ttgatttgaccaacattaggaataaatagtccaatgttatgaaatacggaatgtaagtgatactattttttgttgctggtgaattttaaaaagtgatgtttttaaggcagcacaaaagttcctgataacttttcttg

SEQ ID NO: 158483 - DNA, 288 bp, Homo sapiens
acttgtttgtaatataagtgtatcgctactgtggtggtgatctttaagtttttgaacaaaaaaaattctagacaaacaggacacaataagagaatgctatgaacagatttgaattccatgaggataaatgtggtagcagtatggaaggtcggtgggcagaggtgagggctccgagcacacatggtattgtgtttgtgtgaggcttctccagcccagacagtgagcttgatgctctaggacagactctgtgtcatgtagctcccagtcccggcacttggcacacagtag

SEQ ID NO: 158484 - DNA, 527 bp, Homo sapiens
actggagtgtagtggcacaatcccagctcactgcaacctccacctcttgggctcaagcaattctcctgcctcgcgcttccaagtagcggggataacaggcacgcaccaccatgcccagctaatttttgtatttttttagtagagatggggtttcaccatcttggccaagctggtctcgaacttctgacttcaagtgatccaccccacctcggcctcccaacatgctgggattacaggcatgagccaccacgtccagccaatacaatcttttttaattagggtgtatacattattcttttagacataatgctattgcacacttaatagactacaatataatacaagcataactcttatatgcaccaagaagccaaaacatttctctgacttgacttattgcaatacctgctttatcgtggaggtttggaactgaacccacagtatctccaagatatgcctgtaaccaccagacacatttaaacataattccaaatagactgtgggaaccgagtagacaaagggaaaca

SEQ ID NO: 158485 - DNA, 324 bp, Homo sapiens
gtgcttatgtggaatctgaagatgtatctgagagaatatgtgtttttatgtatttagaatttgagagttataaattgcttccttttctagtaatcctgaaatttcttcttcagagattgaactcaatattctgagattgaatctcagaatattagaattgagttggctgtcatttaaagcagaggaagctgtggaactcacataaaggaagtgatttgcccagggtcaaggagcgataaactagtatcacagatcttctaactcccagttcagtgcttttttcactgcactagtggctttccaattttttcagcttcaggaccc

SEQ ID NO: 158486 - DNA, 549 bp, Homo sapiens
cgatctagagtatccccaagcagtgaaaacagactcaacagttgctagtaggtctacaattctctcattcactggctcttcagagaactacaacatttgccatactcctgcccctctatccttcactccttacagcacaactaatcccttcacaggcactcttcttctcacacaaatgggccgtggggaagccaacagggagttgacaatgggggaatacctggaaaaaggtattctatccttcactccttacagcacaactaatcccttcacaggcactcttcttctcacacaaatgggccgtggggaagccaacagggagttgacaatgggggaatacctggaaaaagggtattctaggcagagaaagcagccaatgcaaagaacataagatagaaacatgcttaatgtattcaaggtagagcaaagtaaacaaagtggagagagcagataaggtcatagaagtaacttagcttactggatcttactgagctggatcttgtaggaccctgaaggccattataaagactttggtttctactataagtg

SEQ ID NO: 158487 - DNA, 328 bp, Homo sapiens
actcactgttgggttgagaccagttgattctgttcccccaatcccttacccctccccagaagtcccctttcttggtcaggtaccacctcctgctggtggcacagaagaagtggccacaatccgggtgtcgggagttggaaataacatcagctttgaggagaagaaaaaggttctaattcagaggcaggggaacggcacctttgtacagactgacaaacctctctacaccccagggcagcaaggtaagagtcacatatttggggttcgactaaaacctggggaaaccgctgtgcacaggggtaaagaggggatttgtggtttgacagta

SEQ ID NO: 158488 - DNA, 262 bp, Homo sapiens
atatgtacaaaatatcttttaaaagtcctatgttgatatatttgtgataatgacaaacgataaaagaagtcatactactgacaacctttgaaattttcatttgtcatctttcacattttcctctagcctagaagcaaatcagaagaattacgtctgatagactttctccaagaataataatcaagagaaatagcaattcataataaacaaagcattttcttagtttttaatgaagaaaactaagaaagtaatttcaaaatta

SEQ ID NO: 158489 - DNA, 397 bp, Homo sapiens
ggacagtattgctgctttccccgacatcgtggacgcccacaggcagatggaaaggtcaggaatacagatgaggaaagagccgatctggcctcagctcagaagccttcacaagctacagaggccttaccagagaaatctccctgcttgctcagttttgcaaccggctctggaacaagtgacctgtcaggcttctatgcctaggacttgaagggacgtggaggcttctttacttggaagctgatagcgtttggctgtgtcgccacccaaatctcatcttgaattgtggctcccataatccccatacttcatacgtgggacccggtgggaggtaattgaatcacgggggcgggtctttccggtgctgttcttgcgatagtgagtaagtctcacgagatct

SEQ ID NO: 158490 - DNA, 146 bp, Homo sapiens
catgaatatatcttgttacatatggtaagagtcaaattaaggactggccagctgggcagttgcccatgacacttaaatagaaaatatagaattttcaaaatgaaacaatttggaaacatataaatcagccctgctttcacttagag

SEQ ID NO: 158491 - DNA, 465 bp, Homo sapiens
gcggccacctggtagaagctggagccatgctatgccttcccagcaggagctggaaccacagatgaaaggtctgtctgctagaagctggagtctcagagaagacactgtggttaccagaaatacagcctgaagagagaagcaagcacttaaactccttccttcttccttcctgatttcagtcttctacctctctctcccatgggctgaacccaccaggatccagggaacaggagaaccaaagaaatgcagttttctgcaacacggaggatgaccaagatgaaaggggaatagagatgagtgcaaacaagctcatggccggcttggaaggctggtctggtaggtagcacttgaaaggagacctcaaggaagtgagggaatgagccatgtgggcatctgtgagaggaagattccaggcagagtgaggagtgagggtgagaaaacctggaagggaagcctgcttagtat

SEQ ID NO: 158492 - DNA, 697 bp, Homo sapiens
gcagggaaggtattctggcaaaatcctgaatggtcaaacggtaaattactttatttcagaaaaaatgaaatggctttgtaaacactcaggctcacaaaaaagaaagtctattagttctatatgtagcaaaatcccgaaattctgacacagagtaatgcagcatgattagaatattctaaacgaaaatgttaaatgaaaatcttgatattaaaaggcagtacagggtagtgtttaagagtgtgaaccctggagcctgggttcaaatccatatttcataatttactgctgtgtggtttaggtaagttacttaacctctctgttccttagcttcctcatgaatgaactaaggataatgtcagtacctgcccagtggactgttgtgaagatcacacaaagaaagtgaatacgacatgctcgtaacagtcctggaacaatcattattaaatattatcgtctgctggggtaagagctgtcattaatagatggacacatgaagaaaacagggtaaattctatgagggagactcagtcactcactcactcattgccacattctaaaagacgacactgtggcaggcactgggctgggcagggaggaagtgccaccgacaaagttcctgtcctcaacaaggggaaggtaactggcattccggggtgcgcactaggtgtcagagactgtggtagaaaatgatttcatg

SEQ ID NO: 158493 - DNA, 122 bp, Homo sapiens
cagtgttcaagtctgacttttaagaaccatgctgtgctacagaagcaataaggattttttcctatgtagtcacaagctggtccactcttccagttagttagcccacacccttggccctctgg

SEQ ID NO: 158494 - DNA, 1148 bp, Homo sapiens
atataaagaactacccaagactaggtaatttataaatgaaagaggtgtaattgactcacagttccacatggctgggaaggcctcaggaaccttacaatcatggcaggaggtgaagaagaagcaagtaccttcttcacaaagcagcaggaaagagagaagtgcaaaggaggaacttccaaacacttataaaaccattggatctcatgagaactcactcattatcatgagaacaatatgggggaaacagcccctaggatccaatcatctccctccctcaacaagcagggattacaattcgagatgagatttgggtggggacccagagccaaaccatatcacttgtgctggtggagcctgtagaaataaaggagtgattgtgtttgtgtttcagatgaaatgagagtggctcttatcctggataactatcggttggctaattggctggatccctcactggattataaggaacactgtcatgaaaccaggggccttgtcatgatcatcatgtagaatcgtactaggaaactaattcaaactcaataaacatttgttgaataaatacaagaatgaacagcacacagcagctgcaggaggacagggaatgctttggatttgagagctgggctgataacagacatttatagacagtagcaataggaccctttttgctgtttatccatcaaccctcaaatcccaagtagagtactggacttcccacagttaatggggaaggagctcaagcagttccatttggacatgaacagaaaaggcccccaaaagaccacataactcaggggcaatcagtttccatcatttttttatagttatctttcatattagattttttcaggtaaaatttacatatagtaagtgaaaggcaaatatcctaagtgtacttgatgcgttttgacagtattctctcatgttaccaacatataaacaaaatatagaacatttccatcacccaagtaagttccctttgtgcccctcttccagtcaatgcccaacacctttctcacagacaacacgttttcttatgtcattcaccatagattcatttaacctgtcacaaatgtcatataaataaagtcaatagcgcacactttttgtttggcttcttttgtgcaacgaatgtttttgagatgctt

SEQ ID NO: 158495 - DNA, 437 bp, Homo sapiens
ccaatgagcctgggttcagtgaggttaactgagcaaccagttcaggcacaagcctgcctcaggtcacccctgggtaactgtcacccattacacagccacgtatgcatgtcctgtgtgtgctgggatgaacagttagtcctgccctaacataagtgggaccctaaaaacgagctccctctgcagagttgcaaagtgtgatgggaactgcaggttcatgggaaacagactcagggtatgacattcaaaaacttcctcagggacacctagaaaaagataggcaccgactctaaacagcagcgccgttacgcgcatattaagtggccgagaattacatgaatgccacagcaaatcgggtactgaccttggaagagacctgaggctggtttgtggatctggtggcagcctgtgaattatgtgaaggccgggaggaggtcatc

SEQ ID NO: 158496 - DNA, 315 bp, Homo sapiens
gtctgggaaccactcagtctgtgtcagtgcagcctggtgagttcagaagactcctttgttttgagctgtggaacaagaggaaagggtaaaattggcccctctgcctgcggctggatgcagcatggtatcccaggccagcctgccactgcagtagtttaaacaaggtttgtggtcttcacgttccataccagaggaggagcgatgtcccgtagggaatagcaagtagatggtaacatcagacacttaaacgtgggaagcgggcagcccacagactgacaaggtggactctgccctctaatacttaggcaacctcgg

SEQ ID NO: 158497 - DNA, 204 bp, Homo sapiens
ttcttccactccaagagcccaaatgttagcattttaaccactgtgaaagaacgatgttctcaaaatatattagcttgaaccatatgaaattaaccttctgtatgtcaaaaatgctcaagtactaacaatttcacttggatcaatggcagtacatgcccttcaactttcttctacataggggtgggcaaattttttcttaacagg

SEQ ID NO: 158498 - DNA, 397 bp, Homo sapiens
tcccagctactcaggaggctgaggcagggggattgcttgagctcaggagttggaggcagcagtgagccatgatcacaccactacactccaacctgggcaacagaggaagaccctgtctcagaaaaacaaacaaacaaacaaacaaacaaaaaacatggtgaggtttgaagtagtattcgctatcaggtgacctcaaatgagggaagtactgagaaagagaaactgccttctctagcaactagaacttcaaaaaactcacatgacaccaagtcatatggcattgctgttataacaaaattgtctaagataggcttatatttaaaaaattgacttatgatacccgggatacaccatgtaggtaggaaaaggaggttctgagggtgatcttgaagattta

SEQ ID NO: 158499 - DNA, 391 bp, Homo sapiens
atggagacaggttctcactatgtagctcaggagtttgagaccagcctgggctacatagtgagaacctgtctccatatgtagcccaggctggtctcaaactcctgagctcaagcgattctcccacctcagcctcccaaagtgctgggattacaagcatgagccaccacgcctggcccataatcaattttagaacctcttcatcaccccaagaagaaaccttgtaccctttatagtcactccccacaactccctcatactaacatatttttaaacatgaagactccaagagaaaaatgaacaaaggatgtaacaattcatagaagtacaataagaaatggaaatggctaatatgaaaaattataattcaataaagatgattcaaattaaaaga

SEQ ID NO: 158500 - DNA, 176 bp, Homo sapiens
ccagcccattcccactggcatgtgggaggacatttgtgaaattctcacctgcttatggaaagtcattctgccatgactgtcagacaccaatgactgtcatcaaagccaaagaattggatttgcaatagatgcataaacaagactctgctcctcgctttccatcaccatctcctaca

SEQ ID NO: 158501 - DNA, 314 bp, Homo sapiens
catacgtgctggtattagagctccttggacggtgatgtgctgttttagaggagaaaaagctgagatgaaacaaaaatggtggtggcagttacccagggccacgtctgtggatgccatcctcaggatgccattgcatctcgggccagcctccctctgcttttgcaaaagcacaaccgtctggcctctacgaccaccaacacacacctctcatactctggaatttgatttctggaatgcttttttattcttcctatatctgtaagattttctgatatttaaactggctgcaactaatgaatagttttcagttttgt

SEQ ID NO: 158502 - DNA, 676 bp, Homo sapiens
tcattatctaccttatattgttgtgagagtgtctgaaggcactgtaaactgtaaagtgccatgatatgtaacatgtaataattgttttttatatgtacaaatggaatcatatatgtaattatgaatccacatgaacagttaagtaatgggaaatgcatgaaaagaacacattaaaaagtcaagtaaaaatacacagaccacgaatctggggaagcacttcttcataagaaaccaaagcaaagatcaaagtctgttttcaaaggaatacaggatttctaaagcctattaacaattaagccacaattctttttacttatactcacgaattttgattggatgtattcttagggacagtgtcaacactggatgtactgaaggagaacaaaaataagaattatacagcaaattaacaggagtaaataattagccagaaagtcctatatgtgggccacaagccccacattgaatatccaataattggtagttctaaaacgaactcttgtttctttgatcccccattgaaaattttgacttatggagacgatttcataaatgtaaaacataaaattgtagacttttttctcttcagtttttaaactaaagaattcacagagctctcaatagttaagatatcacaaaggataaatgcttgaggggataggtactccatcatcca

SEQ ID NO: 158503 - DNA, 311 bp, Homo sapiens
gcaggcttctggctttctgtgcactttcagacattttggacatataatgctcctctgctatctgttctctcagggcttccatattctagtcctgagccctgtgtttcaggggtatctaggaaatcttgatttctttcaggtgttaacatctcaagttcctttgcttcatattcacacttgaaatcagatataacattccttactttttcctcctgttatttttgcatgcaaattaagagattctccaattgctctgtgtcatacgttttcttacgaataacagggcttatagtttcacttgagtaattttt

SEQ ID NO: 158504 - DNA, 120 bp, Homo sapiens
atgaagaagctagagatagaatgaagaggaggtgcggcctggtcaccgggggtcagcaggggctggatgcccaaagtattaggtttaaaggaactgggatgtatctccagagcaactggg

SEQ ID NO: 158505 - DNA, 574 bp, Homo sapiens
agggtgtctaacttggtcaacatggacttcagaatctatgcccaattaagtgctatcactttttctaggccccacagagaaatgtacaaacatatgagacattcttatctacattggtcacgtgtatgcaactacgcctctgttaaatttgactttcattattaggggatccaggaaacagtattgagcaccagttgtcatttcagtgagcacaggggtgggatgaaaataggatcacacatttcccccttgagtgtcatacgaatagtggagaggaaatcacatggatacagaaatggagctcatgttaaaaatcttatagcaggatataccatgctacatctcacagctttatagatgattcctggactctaccagcctgtttcaaattgaacgtctcatatgattattcttactttgcgcttgtagatccttttaattgtagtcccattctacctctagctgagggtaacagctatctcccttagagagctctctagcttccagcaggggcagctcactggccagaggggagggtaaagcattgatatggcacaataagggaacctccgga

SEQ ID NO: 158506 - DNA, 442 bp, Homo sapiens
tccagccgtgttaatgtcctgaatttcaccgttgactgacagtgtacatgtgggaacttgtccctgtttgtggaaaatagagttaggtatttggtggtgcagcatgtttgcgacttattctcaaatggttctgaggcaggaaaatagggtctggaggcagggaacataaggctgattcacacttcagctatgacaggaaacatcctctccatttacatagggcgtacagcaagtaaccaatggaaacctctagaaggtatttaaatgccaaaaaattatgtaacccagcccttgagcccctatgctccgccgcacccacactgtggggtgtatttttattttcaataaatctctgcctttgttgcttcattatttccttgctttgtgcgttttgcccaattcttcattcaagagaccaagcacctggacaccctccatcggt

SEQ ID NO: 158507 - DNA, 594 bp, Homo sapiens
ggtctagcatagtgtattagtccatttgccttgctataaaggagtatctgagattgggtaatttataaagaaaagaggcttattttgactcacagttctacagcctatacagaaatcatgatgttggcatctgcttctggtgagagcctcaggaagcttacaatcctggttgaaggtgaagcagggagcaggcacacagcatggcaagaatgagaaagagagagagggaggagctatcaggctcttttaaacacccagatcttatgtgaactcatagcatgagaactcactcattaccatgaggaaagcaacaagccattcaggaggtatcctaccctgtgatccaaacacatcccactaggcataccttcaccattggaggtcccattttaacatgagatttggagtggacaaacacccaaactgtatcacgtaggtataaatagattatcaaaggaaatgagagtgaaaaaggagaagcattatgtgaagaagttatggttgagactttttgaatacctctaaaagacataaaaccagtttcaaggagtgataccaattttaacaacaccaaatgctatggaaaaattgatt

SEQ ID NO: 158508 - DNA, 482 bp, Homo sapiens
tgctgggattacaggcgtgaattactgcgcccggctgccttttatttctttctcttgactgactgcactggctagagcctccaatacaatgttgaatagaagtggtaagaatggccactgcggccggcattaagtatgagtttttaagttagcccactttgttaatgactatgagtactaatagcttaagataaagaagtttctaggtaatcttgtttgaaggatgatgtaaaaatataaatttaaactgtgagtgacaaaataaacttccttaatatttgcctacatttagagaaatggagcattcagctcagaaaggaagaatgtctgtggttttaaggtaaaatccatattccaagactcagtgaagaaagttcagtgataaagaacagactactctcatcttatgaagaaatggagcaatttcacttggaaagactaggaagacaaaatgttacagacgtatttgttgtgccacaaaa

SEQ ID NO: 158509 - DNA, 386 bp, Homo sapiens
cagtgcaaactaacccagatacataactctttcatcatatgaaatttctctattgaagaaaaataatggaacccgtggtatatccaaatatttgtagctctaccacaacaaagtcctctactacttgctcatacatatgatttattaaactacagaaggaaaatgtcttgaatgtacgctagtttctcattttaaagacctttagagttacagattaaaggataatcattttcttatgtctgaaacctccaactacccaattctcccttcataactgaactttttacagatttagatcttgcctatatttataactgctgcatacagtccaacaaacatactccacacaataagtttgaatctgaactcttgtgcaagtgtccctc

SEQ ID NO: 158510 - DNA, 150 bp, Homo sapiens
ccacccaccctcccatccattcagcagagtgaccacggcgcctgcaggaatccagtggcagcgacatggggatgactccgccccatttcacaggtgggaaactgagtcatggggagactgagtaaaggcaacaagggcgactcgggggac

SEQ ID NO: 158511 - DNA, 406 bp, Homo sapiens
gtgacatggattatggctgtggtgtctttaattttgatgaactaaataaaaagtattgcagtttgagaataataaaccatcataactctctaacttccaaaccatggatgaattaaaaatatgtgcaagagtcagagatgaaaacatcagccttctaatttggaagactggattgcaaaatgtagcttgaacacaaggtcagaagtctttctatccattgactccatgtttataacttggacctatagattgttgagaattgggttttcaggacagacaggcagagaacttcatagaaaattccatctcctcaccccttattgaccactgtgagcccaagaagagtgactgtacatgcgcagtgatgcttaatgcactgattttactcagcagaagaacatggacc

SEQ ID NO: 158512 - DNA, 170 bp, Homo sapiens
actaaattctgggtttcaggcacagttttgtttgggagaagacagttttgctggactagtgtcaagagagacaaaaggaaagggctatcacacatggagtcttagagtttagaagtctcagaaaatagtttccttatgggtcgctttaaaatattgtcttaaggctaaga

SEQ ID NO: 158513 - DNA, 547 bp, Homo sapiens
tttcctatgcctatccctccttatgtacttatattgagcttccgagataggacaggaaagaaacaaaaacaccatctcccttaacaatacctattctttacatttatcttaacactgaaatcctatttctatgaattcaccttgatgatatacttccaataatactgcacaagattattcattgaacaattatttctaatcagaaaattttaaaaacagcctaaatgcccaaacatagcaggagattaaactatagcacatccacacaacagaatactatgtagttggaaaaaataaaaaggatgaccttcatgaatcgctatggagtatttccaggacatattattaagtgaaaaaagcagattataagtgtatatgcatattatactactatctgtgcaacaaagaactatttgtataaatatgcttatttttgcaaaaagaaatactgaaaggataaccacaatccaatgacactggttatctaaataaagggatggataggaacggggtagaagggagagaagcagtaagacaaagggaaaca

SEQ ID NO: 158514 - DNA, 393 bp, Homo sapiens
ccctttgcttgtttctcccttttgcttttcgtttctcccatatttcccttcctcttatttaacaaggccttgaatgagtgccctatgctagttctcatgatataagagggctaatatgattcacgtctcatgcagcctctgttcctggaaggtgtgtggaatagtgtggggcagaaaataagagaatgctttaatcagaaattaggataaatgtttaaagcaaaataactgaaagctgagaggatatgagtagaagagcttttgatgaggatttttgggaaggtgctttaaaggtaagcctgagggatgtagagaataaggtggccaagagtagggaagaacaaagatccagaggtcttaccacatgcaaagaccccgaggacaagagcatgt

SEQ ID NO: 158515 - DNA, 281 bp, Homo sapiens
tgagcccaggagtttgaggctgtagtgagctacagttgtgccactgtactctagcccaggtgacagagcaagaccctgtctcaaaaaaaaacaaaaagaaaaaacaaacaaacaaaaaagaaacaaacaaaaaatgcttacacaagagaaggtatcaggaggtaacttggatatattttcattctctcattctctctccttctctctctctctctctctctctctctctcacatttttcaagttagaaaaaggcaacgttcccccattcgaggctttgtta

SEQ ID NO: 158516 - DNA, 302 bp, Homo sapiens
gcggccgcctactactactaaattcgcggccgcgtcgacccgtcctgtggtctgcctcagtttatcacttaataatacaaagcaaacaagaaagcaagttagtggattacctgagagagcaagacatagagaagatgttaatgcagggagctggccttctccaaacatatccctaacacacaatattcaagcaattcccaaactgtgatcagagaaccactgggagtaagacctctgatctatatttacaagtctataggtgagcaaaggtagaccttttcctgagtctgagatgggaatat

SEQ ID NO: 158517 - DNA, 179 bp, Homo sapiens
tgggggacaggacctgaggtgtaagtgacacatgctacaacatggataaaccttttaacatcatgctaagtgaaataagccagtcacaaaaggtcaaatgagattccacttacggagagacctggagtagtcataattcacaaacaggaagaagacccctgattaccaggggctggggg

SEQ ID NO: 158518 - DNA, 340 bp, Homo sapiens
tacaagaacttgcaaataaatgggttgtttgggcaagaaattttgtaggtacgtaaaaccagaactaatttatagatcagtcaggctccgtctcatgcttggcagagaggctagaggtcactggtcactgaggaaaaaaatgcttacaaactgatttccagcccagttagcaattttaccagaactctttattctatcaaggctgcagaagagaggtaatgaggtcccatatgtacaggtgtgcaacaaattaggtcaataaatatgtctgttaaaaatacttaaataggaaaggtaaaaattacttaaacatgataagaaccattcagcaaaattcaat

SEQ ID NO: 158519 - DNA, 457 bp, Homo sapiens
ttatcttccctaccattacagtccaggaagacgccatagaaagtggtgagaatgctggggaccaggggacaatacccaactcaagtctcaagtttaaaggctcctgcaggtgagggaagagaaactaggggacctcatgctatttacaggcacacctcatattactgaactcacttgattgtgctcagcagatgttgcaattgtacaatttggaggttgtggcaatcctgcatacagcaagtctatcagagctatttttccaacagattgtgctcactctgtgtctctgttgtcacattttggtaattctcacaataattcaaacttagtcattattactacatctgttatagtgatctgtgatcaatgatctttgatgtcactattgtaattattttggagtgccatgaaccacgcccacagtgaactcgataaatgtcgcgtgtgttctgactgc

SEQ ID NO: 158520 - DNA, 204 bp, Homo sapiens
tttcacccatataattactattcagtctttagagctcagttaaaaaattactttttcaagaaattatctctaaagtgaactaaatcatatcagaatgctacctattttcatagcaatcttaactttcctctcagagcacatattatagttaaaattatacatttgtatgttttatgttgctccaaaattagccttgtgttccat

SEQ ID NO: 158521 - DNA, 267 bp, Homo sapiens
tgggacagcaaataagtgccccaaataagtgcaaataagtgatccaaatatcccccaatattctgaaacatcaaccgaggtatcaataaaaagcaaaaacagaggcattttagtagatcagttattgagcaaaagaattatggaaatgtttcacttgtccactctttatcatcaaataaaatgtttctgtcacctttttctgggttcattttaaatgatttcataaggcattttaattagcaacgtctactcagaaaagcagtattg

SEQ ID NO: 158522 - DNA, 319 bp, Homo sapiens
gcatgtgccaccacacccggctaactttgtatttttagtagagacggggtttctccatgttggtctggctggtctcgaactccagacctcaggtgatctgcccaccttggcctccaagagtgctgggattacaggagtcagccactgtgcctggcctagtttctcatttcttgaacaggtgttgattctaccaaaatctggaaatgaattgagtggtctgagttagggatgactcagatgttgcaatgtccatctgtgatggaagtgtcagtagttctctcttgatcttagagccaagtccctatgccaggttttctta

SEQ ID NO: 158523 - DNA, 422 bp, Homo sapiens
atttatatgaggacttgggtatttctctaacttttgatttcttaattctggggttttggtggggtgagctggtgcatagtgttgaatagttcaagttgataatcatattgtagttttcacataatacactgttatagtggtttactagatttgattgccgtaagcaaggaaaggaaattactttaggcttgaacctcacaggcttcccatgacccagcccttctgctagtagtcccactgacctgtccagtatggtatccccatctttctttgtttaactattaacgaggacttgcctactcttaattacacttacacattaactcttgtgaatcctggtagtgttttggcagatttcatgaaggtgagactacaagtattgtcaaatctctaaaaatgtattatcatttagacttttgtga

SEQ ID NO: 158524 - DNA, 562 bp, Homo sapiens
ggtgggtcatctgaggtcaggagtttgagaccagcctgaccaatatggtgaaatcccgtctttactaaaattacaaaagttagtcgggcatgatggtgtgtgcctgtagtcccagctactagggaggctgagacaggagaattccttgagcctgggaggcagaggttgcagtgaggaaaaaacaaaacaaaaaacctggcttgggaagtcgagactgtggttagctgtgatcgccactgcactccagcctgggcaacagagtgagaccatcttaaacaaaaacaaaacaaaacaaaacaaaacaaaaaatgtgactcaacaaaaagatctccctctcccgagctgagctgccttactctttgaaattcctaccctgtatgccactccttgactgcctctagagaagtgtttgttttagacagacagagtattttgtcacctgggaagggcagtatattagccagctaccactctagtaagaattagtttctgtaattaatcgttgttaagacatggagtatggaagccttagagattgagtcctaggccaggaaggtttggt

SEQ ID NO: 158525 - DNA, 677 bp, Homo sapiens
attactaactggtctctcctgcttccctttgtctgtgaactaaatacagggggcctcaagataattggtagctccatcactgacccaccaattatagatcagcagggaaggcagcccagggatggtttgtggttggcacaggctgcccacctagaaatgtgagttattctctacctgccaccaagttgggcttgactagatcgatcctttcctaattttggactttggcatctctaattgcatcacacggctccctggtttacaggtttcagcctcatttcatccctacacgtgctgctggtgtctttcttagttcatgcctccttggcatgtctacaaagtattaatttgcagaggttttgtttgtattttcctttgaggttccctggtgcctagaatggttagatggcaggctgcagataaataattctgttgaaacagcaggtttctgtgcatttttgtctggtgtgtccaagtaaaggagggaaagaagtcttcagggttgaagtacagtcagtaacctgtataaggagaaacctctgcaaactattgttgtagctaaatatgtttgacttcggcaattgaggacatgaatctgtgtgtagagtatcaacttctgattcttagtttgtggttggaaaactgtgtaggcttcattacgggattcccaggtagtg

SEQ ID NO: 158526 - DNA, 155 bp, Homo sapiens
ccgcctcaacctcccaaaatgctgggattacaggtgtgagccaccatgcccggccttcatccatatttttaacactcaagggaagtttccagctttcaggagtgactggctttatgaattgactaaataaatgattcctgaagattatttagtga

SEQ ID NO: 158527 - DNA, 548 bp, Homo sapiens
atgtgaggccaataaccctaatcctgggacaacatggcttcctaaattgagattcagttttcagcagccccaccccaagattgtcaagcagcaaagtctgtaaggtgagggagagcagtgtggttgtagtgggaggggacacaatgtttgtttagttatcatttatcgaacatcttcactatgtgctgggcataatgctaaggactttacaggtataaccacatttaatccccaccagaaccttatgagtaactatttgtgtctacattttacagatgtggaagcagactcggagtttaggccaaattcacacagctctatccaattccaaagttcatgttctcaaccacaatgacaactttctcctcaatgagattgttccccttatacccacagcaagtctgaatggcacttttgagggggaaggagtctttgtgcagacattgctaagctgatgtggacagcacaaacccaacaccgaagaatatcttagaccagatgttgatcaacttgctagaggaatgtgccaaagattcattcacacccag

SEQ ID NO: 158528 - DNA, 1058 bp, Homo sapiens
aaatgttctctggggagtcagagtgaaatccctcatattcaccaccaaaagtgcgtcccctttccccaaaccaggctgtgggagggtcatggggctgcatgaagtctccggaagggagaggaggcaggtggtccttccctctgcctggccccagtgccaggtgccaggtgtccgtgtttggagcgggcaggcttggggctggctgggtctccggggcctgccggtctgggtgctctggccaactgcccaacggccctaggagcaggaggtctggggcacacccttctagcctttccaggactcaacaagctttaaggtcattcagatgctaatttagactgcccttgtgtcagaatactaaggtgggaggcggagcggaggtgccagtcactctgggcgaggccttactgcgcccatgcatcccgggcccatttgtcagcccttgctcttcagtgggagcccagctgcaagcccagagtctggccactccatagtcctgcacccctcttttgattggtctttcctttgcccagagaggggctccagagggagataggtggtgaagctcatgcagggattctgaggacctgatgggggagggcctgcgaggggtccaagcctacatcaagaggaattcagtaccagggggagctccccaccaccccggaaaagggagaggcccagagatggaggtggcttgtccagggccccacagtaagttgggatttggagccagatgctctaagcccagcccttccgtttcctagctgggtgtcccttggcagatgccacctttggagcctgccccacctcgggacacagcgagcttcgagtgcagtcagcccctgtggagtgtgtccacagttacacagacaagtggggaaaatttcacaaaactaaaaaatggcttctcagccctcctttttcagtgaatgatgtggagccccacgcctagaaagcctggtccatgggcgagagactttgctgagatgagaagccagctggggctgctgcccacccaccctgcccaggctcctgaaggtggcctcaccttccag

SEQ ID NO: 158529 - DNA, 455 bp, Homo sapiens
ctaaggcttttctttttttgatacgggcattctttaagctctgacttctcttttcctctttcctctgccatctcccgtcaatctcttccagctgctggctgtactctgcaggggagttcagagtgagcgtgaagtacaaatcaacacctgcacccactccagctctgtctccaccttccaaccatttcccgtcctgacttttctatttctgtacctaacccaccccaacccattctgccattgtttttggcctcaaaacttggagtccgcctcacattcccactttcttctgtaagttctcaagtcctatagattctgcttttaaaatgtatagttcataaacgatgagctttgcctcccagatagattaaattggactgtggattggcacacggtaagtattcaattaatttttgttgaatgaaggaatgagtgagtggctcctccttaaacca

SEQ ID NO: 158530 - DNA, 394 bp, Homo sapiens
cttgttctcttcccagatttgtctcaaagtagcagccatgcccactgcttttccaattccagctaccacgcactggcatgtggggggcctgccaccagccaggccagcactctggacaggaacagccccaccaagctcagtaacaagtcccttgacagagacacagcaggctggaccccctacagctatgtgaacgtgttagactcccatttccagatcagtgccctggaggccaggtacccgcccgaggacttctacattgaacttagacacctcagccgccccgctgagccacactcaccagataagccttggatccaggagaggacagacaggaccagagctgagaggtgcttgtggaatggatagacgtcagaacacatacattatggac

SEQ ID NO: 158531 - DNA, 545 bp, Homo sapiens
tagtcacatagggactcaggaatcgggccaaagccagaaccagatctcctaacattagaggggttacacgcatctgaacccaggcccaggagacctgaagcgcaagaaggccagccccaggctcaggccctccctctgcccgcagctgccctcatgatggaggagctgaatccctacaccaagatcagcccagcactgggtgcagagcggcactcggtgggtgctgtcacaggcatcatgctcctgttattcctcattgtggtgctgctgggcctatttgcctggcatcggcggcggcagaaagagaagggccgagacctggctccccgtgtctcctacacacctgccatgaggatgaccagcaccgactactccctctcagcatcaaccacaccatggtggcctgtcatggaacacctagctcgccctttctctcaacggcctaggacccagctcagtaacaagtcccttgacagagacacagcaggctggaccccctacagctatgtgaacgtgttaggtcagtagtggtgtgagtctggtcc

SEQ ID NO: 158532 - DNA, 115 bp, Homo sapiens
gaataaacggaagataaaatgaaaacagcagacctgataatttgttttagaaagtttggataggcatatttaattttctttcccagaaaggatggcataaaaaggtacatgtgct

SEQ ID NO: 158533 - DNA, 239 bp, Homo sapiens
ccttgaacaacatgcctgcgctgaacagcaaaacctgctaccctggaatcgagagcaacagctcctgccaagcctggggcccctgtgaggtcacacacggccagctccttgtgaggggccaggaggccggcatgtggggtccggatccgctagaccctcaccacgaggctgtggtgatgctctggagggcacaggcctggcacccaggcacctcccacagatctccaggtcgcaagctc

SEQ ID NO: 158534 - DNA, 421 bp, Homo sapiens
ttctcctgtctcagcctcctgagtagctggaattactagctgggattacaggctcgtgccaccacatccgactgatttttgtatttttagtagagacagggtttcatcatcttggtcaggctggtctcaaactcctgacctcaggtgatccgcccacctcagcctcctaaagtgctgggattataggcatgagccactgagcccagcccttctttcttttttattttgtcctatctcattgtacattactactactagtagtactgctatgactagtactaataactactactagtcatcatcatcgtagtagtagtagtagtgataataatagtttggttttttggtaaagcacttcagattattttgtaattagataagtttataaaggaaagtatggattatttatatatgtctgtaa

SEQ ID NO: 158535 - DNA, 265 bp, Homo sapiens
ctttgaaaactgcacaagaaagagcttttcttctcccagaaaatgcacacaggtacatacaggcaaacaatctcaagggatatagattcctgcactaacatcacctcagtcttttctgctattgaaacttctaaaactaggcctagttttagaagtttcaatagcagaagcagcaatctgtacagtaaaatgcagtcatggaaaaaaaatctctctaaagcatctgaaatacttaaaaatgtttaactttaaaatgcatagtgat

SEQ ID NO: 158536 - DNA, 168 bp, Homo sapiens
tctccctcctatcccagataagaagaattgccttctttcctcccagctgatttgcttttctcgtcattatatggcaaaccaggctgcactcccctcctaaggcaggcggtggttctctttgggctctgagtcctcagtgttctgcctcttcgggtgccaaccaggaaa

SEQ ID NO: 158537 - DNA, 132 bp, Homo sapiens
ctgccttccatctccgggcccagtgctcccctgccccgcgctgagctgtctcccactcgctaccggcgatggggaagggacatctggggagaggacaggggacgcccttagtttttgaaggctgtggaagga

SEQ ID NO: 158538 - DNA, 739 bp, Homo sapiens
actcattgtttcttgtcttgtggatgattacagtttatgtccactctttgtctaatcaccttctttcttatgcattaaagttattatttcagaagaacatagaaacttttccctgttcagagaaggaaaactgatagagaatttagcctgttcaactaacaaatacagctgttgcaaatattgaatactgatatgttattcacagtaaaaataatcttagttgtaagaagtctatttgaattataaaataaatatatttcatacctgtcatggattaaaaaaattttttttaattgaacccgggaagcggaggttgcggtgagccaagatcgcgccactgcactctagcctgggtgacagagcgagaatccgtttcaaaaaataaaataaaaataaaaataaataaacaaatagaagaagttttcctttttcaaccttttggtcaaggctttatatggtgttattttcctgcaaaagagttcataatagcactttctaaaacataatctttcataagcatcggtatccaagaagcaaaatgtatgctcactgatcaaacagatgatcagctaaacgaagcaacagagagatgttcctcaagtaagcaacaaccagcaaaacctgaaggggtgtttatttctttaaaaattttggacatttttctttaaatcccatctgttgggcagcataaaatcgtactacttggtgaatcactagagaacgagaagactttggaaag

SEQ ID NO: 158539 - DNA, 239 bp, Homo sapiens
aaggccaaagaaggctggaggagggagagagcagagtagcactggtgtcgggagagaaggaatggagttggtttggaccatgaagaatgggtgggattgagtaggcagagggtaattggaacagcatcaccaagtatatttgggtgatggtgagaatgcccacctgatgagtagaagaggcagaaaaggcaggaagccctgataagcctgatgcactagaatggatgtgaggtgctata

SEQ ID NO: 158540 - DNA, 354 bp, Homo sapiens
ctgaaactttgcatgactgttctatgcacttcatttattaaaatcattcagttcataattttcattcagctagcagtgcgttctttgcagcctagcgggtttctatattgacaattccaaccacccttctaagaataccacagagcagtttcccgttatgctggtttatatattctcagcagtcgtttttactctcctttcataaaattattataccgggtcctcaattctggtaatcttgctaacttatttttatactgttctcatagctactgcagttccatcactaggaaatctcacaggatgttagcgtcaaatatactgacttctaatttgttcattccccattaactc

SEQ ID NO: 158541 - DNA, 686 bp, Homo sapiens
aagcagtggatgccgatggctgagttctccaggtgcttctggatggagtagttgttggtcatcaccatctccatgagcatcttcagggtcgggtactcctcccacgcagccaggccgatgttctctgggttgaatgcggcgacgaccagcaggaggggccaggccttccagtagagggtagagatggcgaggttcggaggctggtaccccggtgggagctggatgttttcagggtgatggtaggtgcacagattcagaacggcgtcgatcagctgggtcctccccaccttcagcacctccacatcatccgcctgcacggcagccaaccgcatcacccgttgaacgggtgatgcggttggaacgggtgatgcggttgtcagatgcacacacttagaaatgttctgagcataggcacctgccacggaatcaccttcgcaaattcttcatttaaatttatgcctctggtagcataagggagaagagatctgcctttggttctaactgtcagtcatcctcacgcccaggccggggttagaggtggcgtcccttttctctggctcaggcacccctggcctagtggggttactggtggcgttcccctatctcaggccacacctggcctagctggtgttagtggtggcatccccttgtctctggcccacagaacccctccggtccacacacac

SEQ ID NO: 158542 - DNA, 432 bp, Homo sapiens
tgggggaaggtggggagtgaagtggtcagaacgtgcccacaccccttcctacatacagcccttccagagcccagctgggctgctgccaaactaggacggggccattctctgtcgtgcggttgtcagatgcacacacttagaaatgttctgagcataggcacctgccacggaatcaccttcgcaaattcttcatttaaatttatgcctctggtagcataagggagaagagatctgcctttggttctaactgtcagtcatcctcacgcccaggccggggttagaggtggcgtcccttttctctggctcaggcacccctggcctagtggggttactggtggcgttcccctatctcaggccacacctggcctagctggtgttagtggtggcatccccttgtctctggcccacagaacccctccggtccacacacac

SEQ ID NO: 158543 - DNA, 668 bp, Homo sapiens
tcgtgccgctcgtgccgctcgtgctgtttggtctttgaccccggttcccaacaaacagctcctactcccttggaatttattgggtgatgggagtgtcttgttctaatgaagcaactctaatgggctcctggacggggctggtcaccagaaagaccaggttatgctgagaagcttgaaaccgtcagtcccccgccaccccatcctctgggaagggaagaggagctggagatcatgcccatgtgatgaggcctccgtcaaagtccttgcactccgggatgtggctgccggacatgcggaggcgctgggagagcggcacacctggagagggcgtggaagctccaacaccccacctccacaccgcgtgctatgcatctctcccgtccagctgctcctgggtttcagtctttcctaatgaacaggcttctgcacttctgatgactccatccagatctccagcttgtcctgtggacccatccatgcagaagcagactcggcaggcacaaggaccattttccacacccctatgattgcacctcatccaatcagcagcacccactccctagtccccagctccctccagattatccttgaaaaaccctagcctctgaattttgggggagattgacttaagtaataaaattccagtctcccacttagccaaaaaaaaa

SEQ ID NO: 158544 - DNA, 430 bp, Homo sapiens
acacagaaaggagtgacctctccaaccttccataaatcatcagaacactgcagagtgacagtgggaactccagagattaaacacggaggtgaggctggccagggatcacaagaggcccaacacccagacagtacggaacctgggtgggcacctcgtccgttttgtcatccacagaccagaggcttctgcacttctgatgactccatccagatctccagcttgtcctgtggacccatccatgcagaagcagactcggcaggcacaaggaccattttccacacccctatgattgcacctcatccaatcagcagcacccactccctagtccccagctccctccagattatccttgaaaaaccctagcctctgaattttgggggagattgacttaagtaataaaattccagtctcccacttagccaaaaaaaaa

SEQ ID NO: 158545 - DNA, 590 bp, Homo sapiens
tcgtgccgctcgtgccgctcgtgctgtttggtctttgaccccggttcccaacaaacagctcctactcccttggaatttattgggtgatgggagtgtcttgttctaatgaagcaactctaatgggctcctggacggggctggtcaccagaaagaccaggttatgctgagaagcttgaaaccgtcagtcccccgccaccccatcctctgggaagggaagaggagctggagatcatgcccatgtgatgaggcctccgtcaaagtccttgcactccgggatgtggctgccggacatgcggaggcgctgggagagcggcacacctggagagggcgtggaagctccaacaccccacctccacaccgcgtgctatgcatctctcccgtccagctgctcctgggtttcagtctttcctaatgaacagatgagtcaactgaggtaaagagcaacctggctgaaggtcaacagcagggctttttaatcagatccatgctgccccaaaataatgaaaccctggatcagcttcttttccaaatcttgagaatacaggctcctgggctgtgaaatacaatttgaaaatgtttctcttctaaca

SEQ ID NO: 158546 - DNA, 419 bp, Homo sapiens
ctgagccacaggggttttaggagcatctttcattctagtgtttggtctttgaccccggttcccaacaaacagctcctactcccttggaatttattgggtgatgggagtgtcttgttctaatgaagcaactctaatgggctcctggacggggctggtcaccagaaagaccaggttatgctgagaagcttgaaaccgtcagtcccccgccaccccatcctctgggaagggaagaggagctggagatcatgcccatgtgatgaggcctccgtcaaagtccttgcactccgggatgtggctgccggacatgcggaggcgctgggagagcggcacacctggagagggcgtggaagctccaacaccccacctccacaccgcgtgctatgcatctctcccgtccagctgctcctgggtttcagtct

SEQ ID NO: 158547 - DNA, 458 bp, Homo sapiens
cttactaagaaacttggaatggagtctgatcaggcctgtgtcagtcacctgaggtcatgaactccaacagcctgaaacatccaggtctctctgcggggctttcaagaagttggactaaacctcagctagctgaggcttaggcatgtccttgaggctgtcttggggtaggcttacatgaaaatgctctaaaatgcagaaacacatagacggagggtatgaatggtaactggggtaatgaacagagagatgatttgccaagatgcagaggcagatggtggataaaaaccaaagctgagagtcaagaaccagattacacctgatccaacggaagcagaaagggccaatgaagagagcctgggtatactgctgtgaaccctgtggagggttacggctcacttctatgggctgctaggctgtctgactggcccggagacaaaggttgtaaggaagcatgaacc

SEQ ID NO: 158548 - DNA, 199 bp, Homo sapiens
agtgtttctagtgtattgtgagtttaaacatttctttttcatttattcaactgtgttgtgtatgtactgtatgcatatataatataaaggagaggaatttccaaggatatttctgaggctattaatgtgacaagtacattaaagacaaagcaggtaaagctcttttactctagtttataaggaaattgttgctctgttc

SEQ ID NO: 158549 - DNA, 394 bp, Homo sapiens
gcaagagaagagctggagcttaaacctgaaatgtgtgcctctctgaagcccataattattccactacacaccgtctctcttaaggactgtgagtgacgaatgaagcagagtcactggtatcttttgagcaggtggtgacaagttcataggagttttaggagggcaaatgttgcactaaggtggattgccctggggagaaaatggagccaggattagaccactttgcctagtctacatcctgccacctgctgttacaacgtccttctgttgtcagggtcactcatgaaatgcagtaaaagagctgtattagttggtgcaaaagtaatcgtggtttgtaatggcaagaaccgcaaatacttttgcaccaatctaatacatccataaatggatatat

SEQ ID NO: 158550 - DNA, 507 bp, Homo sapiens
ttcacagtttgacaggaagaatgtattcatgcaatccttgcaatttggttgtttgcaaaaatagctctaattcttcccatgcctgcattccaagccatatgtgatgtgactctgcagttcctcatagcaaatggtggagcctattctcccatctcttgagcctgggctggccacctgacttgatttggataaagaatgctgtgtcagccaggtgcggtggctcacacctttaatcccagtactttgggaggccgaggcggctgtatcacctgaggtcaggagttcaagaccagcctggccaacatggcaaaaccccgtctctactaaaaatacaaaaattagccagacacagtggtgcgcgcctataatcccagctacttgggaggctgaggccccagaattgcttgaaccgcgaaggcagaggttgcagtgagccaagatggtgccactgtactccaacctaggcaacagagtcaggctctgtctcaaaaaaaaaaaaaaaaaatg

SEQ ID NO: 158551 - DNA, 226 bp, Homo sapiens
cattctctcacctgattatcacttttgtttgtttgtttgttgtttgctttaattttttaatttttttatcttttaagttctggggtataagtgcaggatgtgcaggtttgttgcataagtaaatgtgtatcacagtggtttgtggtacctatcaacccttcacctaggtgttaaccctagcatgcattagctcttttctctaatgctttccccactcccctccccc

SEQ ID NO: 158552 - DNA, 269 bp, Homo sapiens
cctcactcgctggctcctggccggggacccctgatcctgagcacacagtgggttcatttgcatcacaactatgttactacccccctgaaatgtcgactgtctggcaggaccctctctttttgatacctgccttctctccgcttacatcacaagcatgtgcagttgtctctctgagcagccagtgacctcaagaaacctctttcttcccacttcctgaattactatgaatgagatacagcaggttcccaactccctccacaggctccgct

SEQ ID NO: 158553 - DNA, 216 bp, Homo sapiens
acaggcatgcactaccatacccagctatttttttgtgtttttgtagtggagacgggattttaccatgctagcatgaggccatgctggtctcaaactcctgtgatccacctaccttggcctcccaaagtgttgggattaaagacatgagcctctaatttgatttgtaatgaaaccaaacagaaacacttatgaaatgatgtcagcctgtctcagctg

SEQ ID NO: 158554 - DNA, 246 bp, Homo sapiens
cactacacctggctaatttttgtatttttagtagagatggggtttcaccatgttggccaggctggtcttgaactcctgacctcaggtgatccgtcctcctcggcctcccaaagtgctgggattacaggcatgagctactgtgctcggcctcttcaaaagcctttgaaacctctttggtttttgttttgtttcgcttttgtttttaaagagatggagcctatgttgcccaagctggcctcaaactcc

SEQ ID NO: 158555 - DNA, 497 bp, Homo sapiens
ataacggcggacatctccatcagcccagaagacatcaattttcagaagacaatctttcctaggactgtaaaacaaaaggtacaaaatatattagtttactaactctactttgtcatacactggcaacctctttaacatccagaaagactagatgttgtcaattaggactcgtctgtcctttatgtacactatatacacagataagtaaaacaaaatgcacagacataatgattcatcttgcctcgctgtaaacaggatggcatagagctctctgcacctccccctcctctctcctcccctgaaccactgcacaaacacaatgagtattactcaacaggtgattttgcagtggttcaggggagtacagagtcctgggagagtgtatactggtggccacagcttattctaagtggtctgataaagtccttgaagtgatttcaaagtgagacccaaagaaggagttagcagaagatcttgttcagggccaaaggataaaa

SEQ ID NO: 158556 - DNA, 187 bp, Homo sapiens
cattccttcatttttaaatttctctgtacattgggatactctagaaagttaattttttggcatcaagtttagaactttaaaattctactcacagctttgagcttaagctgtttattagcactatttgaaacagtgaaactttgtgaactctctcctcctcaaacaatgacatatataactgtattta

SEQ ID NO: 158557 - DNA, 374 bp, Homo sapiens
gcaatacctcttgagaaaggcaggggaggggctaggagaataagaaaacctccacacctggggaactggcttccacatctgttctcagtgatgcctgagacagcagccagggcaatgtcctccccgcttggcagaccctgcccatatacccatctgcagcaaaggcatcatctctggacatgcggagaaacaccatgggaggtcaagccacactacacagagagaagagtgggaagcagggcagggaccaaccgtgcagtgggaacagagccgtcatcaaccctggtatccctccagctctggccttgagtggggcccctgcagctgccaccaccccctcatggacccctcctgccacagctggagggtctccc

SEQ ID NO: 158558 - DNA, 363 bp, Homo sapiens
gtctcactctgtcacctaggctggagtgcagtggtgtgatactgggtcaatgcagcctcaaccctctgggctgaagtgatcctctcacctcagcctcctaagtagctgggactacaggcatgcgccactacacctggctaatttttgcaatttttgtagagacgaagtttcaccatgttgcccagttctcatgcctccttgaactcctgaactcaagtgatctgcctaccttggcttcccaaaatgcagggatcccaggtgtgaggcaccgtgtcctgccctctccacatctttcttaagcacactgactaaattggtctaagtagagcctaacatcaactgaagggagagggtaatttccag

SEQ ID NO: 158559 - DNA, 460 bp, Homo sapiens
gcccgactctctctctgtgggggcttttcgcgtgtcccccgagatgtcgaggaagccaggtgagttcctcgcgacaggcgatgcctattgcaggaggggacaggtagctgaggcgtggacagagtgacaggccaggctcaggggacacaggtgagaccccctcactgggctgccagttcccgggcttggggcatcccagtacgtcagcgtctgcgaccttacctcctgacacctaaggccagagacagagcaggcccgcgccctgggaggtcctgatgtccagcctgaagattgaggacaaagccaccacctttcacaaaatgaggccagaccacctgcctccctccagtccctgcggcctggagacggagtcaacattcttatctgtgttggatctgaatgttcctccttgcaaaggaaacaaggagtggacgttcaggctgatggccagcttcaaaga

SEQ ID NO: 158560 - DNA, 398 bp, Homo sapiens
aacgatggtctcagctcatgatccacccgcctcggcctcccaaagtgctgggattacaggcgtgagccaccgcgcccggccaggaaactttttaaagggcttttggactgctgtggccctctcaaagggtggtccagaggtgtgggttatcctctctcatggtgggcggggccgatagtgggctcagtcctggtagaggaaggcagaatagagcagaggctgcctctcctccccgctgcctctgagattccaccccagctgcctgcaggtaccagcacatccatccatagctacttcgcaggcagcccagccagtgctcgactcctggctcgaggtttgtgctaatccaaccaagaatattgatggtgtgatgagagacttgaaaagctgtaaacaat

SEQ ID NO: 158561 - DNA, 407 bp, Homo sapiens
cctgtgtgtccttctgtcttttcctattctttatctacttgtctttcttactttccttgtcgtctctttatttctattttgccattaatttatgttccatgttttcattgtaggctacctgaaatccttttgggaataaggtggggtatacaaaccaaacaatatgtaaatgactgcctgaatatatgcatgtgtgaatgattatcaatattttgacttgtgaacaatcaaaaagtgcataggtggaataaggaacgaataaagagtaatgttgaatcttgatacagtacagtgcatggtggggctttggaaatcagtgaaggagttataaatgtgtaaataaaataactgaacaggaaaaagtaaggcatataagatgctaattcatcagctaaagggggaataca

SEQ ID NO: 158562 - DNA, 219 bp, Homo sapiens
cccagactctacctgggataccctgctggccccaacccatcgcataatgtcgccacaacctagatcctcttccgtgaccacctgtcctaagctgcctcctcctcccataagattttttgatcccttagtctccttctctccatttagtctttccagtattaactccagagctccagtattaactcttagtatcctgattgtctgctggcatagagagag

SEQ ID NO: 158563 - DNA, 300 bp, Homo sapiens
catggccaccctaaaaatctcctcatcataagcaaagcccaccagatcaggtctttgtctatttagttcactagccatgtccctagagcctggcttgctgctgttgctcaaaaaacatctgctgtgggaaggcaaagggacttgttgcagccctgcccaacagttacagcctgtgtgcctcaagacagcacacgtcaggggaagccatctgaggcatctctgctgagggtgagcctccctccagacatcagatcaccaaccaagagatacctagcaagggagtggatggaataaagcaga

SEQ ID NO: 158564 - DNA, 250 bp, Homo sapiens
ctgtgtactccagttgcggtggacactgaggaagagaccacccaagtgtgggaacagggccaaggctgagctgatgaggtgttttaaggggagaagggactcggagtcccaggttccagacaaggggctggtacttgctagatctgtattggaagtttcatagctgaagtgaggagttgatactgggcaggctgaagatgtggagcccaaggtcaggagccagaagtaactagagcaaagaccccaaaag

SEQ ID NO: 158565 - DNA, 381 bp, Homo sapiens
ctcatgtcagtgtcctcggcagaaactgcctggttatcctcagaaatctcttcaacacatgccactctgaagatgtacctgccatctctcgatagtttaacctaacaggtgattttgttggatgttggagataagacagctctttctctgttatagcaccagatgaagtgggtggcctggctttaggggccacactaggaaaactacatgttgttaatagccagattggcaatcagacctattattattattattattttgagatggagtctcactctgtcgcaaggctggagtgcagtggcacaatcttggcttactgcaacctctgcttcctggttcaagtgattctcctgcctcagtttcctgagtagctggaattac

SEQ ID NO: 158566 - DNA, 311 bp, Homo sapiens
tgtcttaattctctcgatgaacatgtctaatcatccatcagagtcagagtgactgttttatcactgagtagattgtacagagtttcttataatttccatatacattgatgaaaaatgggttgtgcatattggtcttcctctgaagtgtctttatgtggtacagggaataaaaccacctggattgtatatcaagagtcaacacatataaatgcagatctcttaaagtaagatatttcatactcttcttagtttattttatttggtggtctgaaatttaaataatctgtaaagaattaagataatgcctttta

SEQ ID NO: 158567 - DNA, 673 bp, Homo sapiens
catccacatcctattctattctatcaattgtgcgtatgtactttcacatgtatataaagagataactgcatgttggagtcccagaatgttcacaatcgttttctctgggcactgagatttggggtgaattttttcttttaactttctttttacttttttgtactacttgggttccttttttaaaaaatattaacatgaatcatcttaatgcacacagaaaaacccatctattttaatttcaaaaaataagaagaatggttgcatctgtatgtgggtgacagaattatttatgggggtatgatgtaactgtcagagagggatgcttccccatacagtgttcattgctatttggagcaggggaatgaatgctttcagaatgaggaagataaataagaacatggtgggaggtgagaaaagatagagaagttaggaaatctgagatggtcatcattatgggatatagaagcttcccaatatgtacatctcggttcgttattagtatttggaacgctgggggtgtagctatttcctgatctttcccccgcctcctccgtgttctgtcttgaaaaactatgaagccacttagaagccggatgtactgttaaaaacagtaggttggcgccacctagtgcccacgttctgtcactccgccctcatgtctccgtggaagcct

SEQ ID NO: 158568 - DNA, 155 bp, Homo sapiens
gaatgtgatcagataccaaggataggagattttggctaaactgactcagcagaattctgctaaaactggactaagagtccaagagtcagaaagaggactcaggcagggtgcaatagctcatgcccataatcccaacactttgaaaactgaggtgg

SEQ ID NO: 158569 - DNA, 166 bp, Homo sapiens
cacggggggctagggagatgagatacgggggcataggcagatgctggtgagatgactcagcagaattctgctaaaactggactaagagtccaagagtcagaaagaggactcaggcagggtgcaatagctcatgcccataatcccaacactttgaaaactgaggtgg

SEQ ID NO: 158570 - DNA, 407 bp, Homo sapiens
gggttctctttgtctcacatttgtgtgaaaaggtacgagtgttccaaaagatgtaatatattccggggattcagtattgtatgtacaaatttaagtacacagcaatgattgaagaatcatctcactttctaggatgacttgctgtcagaaagaatatttgttgttctgttactttactctcataatagattaattactttatctttcagagttgtctttttttttggagacagagtctcactctgtcacccaggctggagtgcagcggcgcggtctcggctcacttcaacctccgcctcccaggttcaagcaattctcctgcctcagcctcccgagaggctgggattacaggctcctgctaccacacctggctaattttctgtatttttagtagacacagggtttca

SEQ ID NO: 158571 - DNA, 537 bp, Homo sapiens
ctgtcttacagacagaccttacagagaggtcatttggctagatagggttgaagctggaaagaaatatgcttcaaaggaggtttctcttgaaagagagggggcgtgattatgtgatagaatgatctagtagaaatacaattttcaatttttttggtataaaaaatgatcttttatccctcaccacatcccacctcaatctaagtcttaactttctcgtctgtacaatggttatacaaattaaaactaacattaatcaatattcaccgtgtctcagggtgtgttgagtgcttacacatattaacacatcccatccacagagcctatgagaggagttgtgagggttaagggagaagctcttggtgtgtggataatgttcataagtagaagctactattgctataagcatcgttcttgtcctgaccctgagcttcatagtgcagggttcgggattgtaccccacaacacaacacacagcctggtgagggctaagagttctaatttgttacagatttaccgacctatcctagatgatttcca

SEQ ID NO: 158572 - DNA, 217 bp, Homo sapiens
cctgggttaaactcggtgagcactttaagcacctagaggatcagctgtgtctcaccggctgagaggggcaaaggctctgactcaaaaggaaatttcctgatccctcagtgtgaatacagagcatgggactaatacggggatggtaaatggttaagagcaagaacagaaactcaaagggagggagggagcaatctgtatgaatcccgttttccaggtg

SEQ ID NO: 158573 - DNA, 273 bp, Homo sapiens
gtgctcagaatacagaaaaatgggcagtgatgccctaattttagatggagaaaattagaacttcagcaataatccaaacctcagataatgcttcattaatcaatactacatccaaatgaggaaatacaaacttttagaaagccaccttaagataaaacagttttttctactgcttcttcttccttctccttatgcagttttacactcttcagaactctgccatttcttcctggaatatgcaatgtcgcctttaattctttttttttttttttt

SEQ ID NO: 158574 - DNA, 243 bp, Homo sapiens
agtcccattcatattccattgcaacactttataatacccctagataattgctaaatagtcaagaaaacagaaatataggcttaatgaaaacatgagagaaaagttcaaagacatggaggagaatggatgaaagcgggtgagactggaggaaggaaaattggctagacctattaccatggtagtaattggaggcaagaggtgatgagagcctcaactcaaacaatgggatgggggcggagtgga

SEQ ID NO: 158575 - DNA, 146 bp, Homo sapiens
atctgaagatatctttatttcacctttacttgaatgatagttaaatgtggttagagtgtaaaggttgacagttattttccattagcacttgggagtggtgatttcttttcttgtgttttgtttgtttgtttggtttgtttggtttt

SEQ ID NO: 158576 - DNA, 614 bp, Homo sapiens
ggggtttcttaagatggaatcctgtccttcgtttcctattttctttaggattatgtaataaaagaccacgtggctctttatctattctacagatctttaccagcagcctgctatccgcttgttgccgtggggaatcagaaccactcctggtccgtactccaggaaatttacaggccattacaggtaataggcaagactccaagtggtccattaagacagaacttgtgaggaccccagcaggagggatcttgatggattggagaccacgtctcagtgtcatgatgaacaagcattggagaagggccctgaagggacagggtgtcttgtgctgcagtgcatgaggatctgaggtcagcatcccctgttgcgtgggggtgaggaagtggaaatgggacgatgctgagaaggggacgcgggcaagagctcaagagcacagctggttcaccaggaagtggaaaactaggagcgcatttgggcaaagaagccacctgagtggggcttccagatgtgcacatggtggtggggcctgtcatgtgcggacgcaacagaaagagttagcagaaatgcagtgacaagcggggctggtgtggcagcccttcagtgggggtaggggc

SEQ ID NO: 158577 - DNA, 406 bp, Homo sapiens
tatcttttgcagtttccagctaggatcagcacagaccgggtcagttcctgctacacctacttccaagctccagggctgcaggtagaagcagcagaccattagccccagaaacaggcactgtgctgcctcctctgaagattcctcctcatacccactgccactttggagcaggactgtgccaagttgaaaaccaaatgagggccaggcacaatggctcacacctgtaatcctagcactttgggaggccgaggtgggtggatcacctgaggtcaggagttcgaatccagcctggccaacatggtgaaacccgtctctactaaaaatataaaaaaaaaaaaatagctaggtgtggtggcaggcacctgtaatcccagctacttgggaaggtgaggcaggagaatcactt

SEQ ID NO: 158578 - DNA, 557 bp, Homo sapiens
aataataaaaagcattctctctttccttttaaatcattctgctatacaaattctgtgtaaccacagtctaatatatccaatgcctcaatcttctgctaaacgttcacattttaatatattgcttctcatatagagccacttatcaaatttagaaattttcttatgatgatgttaactcaaatatacctttttaaactaatattcttggccagctcctaatcacattgtacctaggatatgaaaattgcctcctcagccgggtgcggtggctcacgcctgtaatcccagcactttgggaggccgaggtgggcggatcatgaggtcaggagattgagaccatcctggctaacacggtgaaaccccatctctattaaaaatacaaaaacaaaattagctgggcgtggtggcgggcgcctgtagtcccagctacttgggaggctgaggcaggagaatggcgtgaacctggaggcggagcttgtagtgagccgagatcgcgccactgcactcctgcctgggtgacagagcaagactccatctcaaaaaaaaaaaaaaaaaaa

SEQ ID NO: 158579 - DNA, 400 bp, Homo sapiens
ctcattctcttttgcgttgcaagcatttggttaaaggtatgtacatagtcttcagtaccagagaaaatctgggagccaggtttatctaatcttctttactcctactctgtgcaactaaaggcttgtcaaggtctggtaattttactttctcaacatctcttaaatttgtcccatcttcctagccccaagacacttaattactgcaggactcttgtattgctttgctgggtgattttttttttttttctttttactttctgtcttttcttttttttgaggtggagtcttgctctgtctctcaggctggagtacagtggcatgatctcggctcactgcaacctctgcctcccgggttcaagtgattctcctgcctcagcctcccaagtagctgaggttatgg

SEQ ID NO: 158580 - DNA, 345 bp, Homo sapiens
ttatctataacagagtaggctcccctactcttctgtgctctggcttagtgagctgatttccttccatcacagatgcaaggctagatattaattacaaaaatactgtctaattgaggactgctaaatatatgttgctagactaactagaaactacagttcttgatggttaggtctacctccaggtagacctaacccaaaaatgcctttcctcctgttttccgactggggagccccattccctgagttccctgacacctcagcctttcactccagcctctcatacccacaagagccatctgtatgtacctctattacagcacctctgaaaccgtcttgtagttaagt

SEQ ID NO: 158581 - DNA, 698 bp, Homo sapiens
ctaatagtagtgtaaagtggtggactgctctacagagcagcacagtggttcctcaaaaagttgaacatagaattactatatgacccagtaattccactttgaggtatatagccccaataattaaatgcagggacccaaaaagatatttgcatagcaatgtttacagcagcagtactcacagtagccagaaggtggaagcaacatcatgcccactggtggatgaatggataaacaaatgtgatatatgcacgcaatggaatattattggaatattattcctttttaaaggaaggagattctgacacatttcacaatgtggatgaacaatgaaaccttgaatacattatgctaatggaaataagccaaacacaaaaagacaaatactgtatgattccacttatatgaggtacctaagataggcaaagtcatagaggcagaaagtagaatggtggttaatagggactggaagatgacaggagttaggaattactgttttacaggtacagagcttcacatgaaaaagttctagagaggaatggtgggaatcattacaaaacattatgaatatagttaaagcaactgaactgtacacttaaaatagttaatgtgatacattttatgttacatgtattttgcccactgaaaaaataaaaatatataaacatacagcaaatgatgaccaggcctttgaagaaagc

SEQ ID NO: 158582 - DNA, 366 bp, Homo sapiens
gcccctcagctctaagaattcttcttttagcctttttccaactctgcccctttgcccaagggtctggctctttcattaattcctgcagggctgtgttaagacttctatttttcttaaccaaactctatagttacagtaaggataaaagaccttgttttcatcccagtaaccccttctcattaattcaaaccaccacctccctttgccagaccagtaactggaagaatctaggaaacatagggtccatcagagcatttttagtacatcccctgctttcactttctgggagaggctgatcagtttccttgatctcccactccattttctccgagttctacagcaatgtctttagcctgaacacaaacg

SEQ ID NO: 158583 - DNA, 335 bp, Homo sapiens
aggccactgccactcaccatcagggcaactgagttgctgtttaacttcttcttttcatttttttttttgagacagggtcttgctctgttttccaagctggagtgcagtggtgcaaacatggctcactgcaaactcaacttcctcggctcaagcactcctctcttctcagcctcccaagtagctgggactacaggggcgtaccaccatgcctggctaatttaaaaaaatttttttttgtagaggtatagtcccactctgttgcctaggctgttcttgaactcctgggctcaaatgatcctcccccgctggccccccaaagtgctgggattacaggt

SEQ ID NO: 158584 - DNA, 130 bp, Homo sapiens
gtttgcatgttgtatacttaaaaataacaccataataaagtcttcctttgagtgccggcctgtggttattgactagtgggttaaataataactgcggtaggaaagacaaggcagggaagacaagaaatgg

SEQ ID NO: 158585 - DNA, 420 bp, Homo sapiens
gtgtaaatcaaactgttctcagctaccttatacctgaattactgagtagagcactaatggagaaaatgacatagccacgtggactggaggaagtacaaattccaaatcttcagcctcatggggctgcaggactgatgcaggatctgctcctaggcaactcattcctcaattacccattagaaaccattaagatgtacagttgctgtccttgctgtcctccccagcacttaggagcctcttagccacacttatccaggttttctttcttcctcttacactggaggttcaaggttaatcctttcacgtattctccaaattcctcttgctgctaacttctcagaaacttgcttcagcatctcctctctttcttatactgtctgtctctcacctttgtatggctttaaacttgctcatgactct

SEQ ID NO: 158586 - DNA, 313 bp, Homo sapiens
tggcccatgccctcaaggaattcagggtttagaagggaagacaaatgggtataaaaataattgcaataggataggacgagtgctgtgcaaccctgggggtgaggtcacctgagggaggaatggggcctgtgaggtgactgaagaaacaatacctgctccgtgtcttgaaggatttggtaggaattttctaggtggatagtggaaaggtgggaaagtcctttgcagggcagcaaaccctgtaagtgcaagggtttggaacctcaaacaacatggcttcttcagaaaatttcaaggttgaggatggtccgcagca

SEQ ID NO: 158587 - DNA, 392 bp, Homo sapiens
gccactgtgtgtggtggaaacgtctcttactctcagatattgaaagtcattatgcaaaacgcagggccagtcaccctgctgtcccctccttctcagcaacataaaaattgcttggattgtgataaccctccagtggagtttttaaaccttttgaattagctgtggggcccttttttccccagaataaaactttatatagtaagtcagggtattactagtttgtgtgtattcttcagtcaagtagatggcatctgtttattctgagaccagcattgtgcactggcatgggaggtatagccagaagggacagtgcccgggagggtcctgttcaccaggggcagcacccaggccagctgccacaagtccaaggtccacacagaaggagttactgg

SEQ ID NO: 158588 - DNA, 961 bp, Homo sapiens
acatacacacaaacacattcacacacagacacacacattcacacatgcacacacacactcacacacattcacacatacacacacagactcacacacattcacacacacattcacacacacagactcacacacattcacacatactcacacacacacacatacacacgctggaggaagtgctcctctcctgaagcttctgtctttccaacaagactgggaaacccttaaccccccaatacctcttgggcatctctgggtgcctggtatgtggcatgctctcagcaggaggctcttctaataaggtttaacatttacggagctttactgtgggtcaagctcagttcaaaacatcttcacaactctgtggggtgggtatactttattcatccattctactaatatttattgattacttccctctggctaggccctggtccaggcactggggatatggcagggtaaagatgatggacagtgctagaggtggggggaagagtccctgttttatctcagaagatcaggaaaggtgaaaatggagcagagactgagggaagtgaggaaaggagctatgtggagatctagggaaagagtggtccaggcagagggaacagccagctcaaaggggactatttgatggtttcttcctccatttgatggagtccaggtaagttatccagagtcacagactaagtggcagagctaggtttcaaacccaggttctgtaactcttgactcatacctcttgaaccatgcttctttaccatgttttgtgggacacagtagctgccttagcaagtggttccacgttcaccacctccccctctgattggagtttggcctcctgtgtcaaggacagcatggctgattgcctgccttggtatccagcttcacttgttgcctctgcttttctgctttgtgtattcatttctgtggtctgtattagagacagtgagattgtgtg

SEQ ID NO: 158589 - DNA, 476 bp, Homo sapiens
atagtagtttaagaacaatgaaattggatggctactgatggagtaaacctgtgctttggagaaagacaatgaaaggttgaggatgatgaatcaccaattaaaggctaaggaagaaagccagtgtgcctccttagcagcatataaaggaagtaggagctgcataaggcagaaaaagcggaagatgaagctcaggatttaattataagagcagaagaacgccaaaaaggttttcagcctagtgagtgtactataccaaggtcaggggcatagttgagaagtgggaccctgacactttagatggggcatctgggtcaatgcacttgagaaccttaaaaccccacgtcaccttgagtgctctgggtttgtagaagtgtcccactcctccctcaagaaactagcaccccacccccttgcttgaagatcaagaagtattatctgccttgcaaggcaacacacgctctcctcagatctacctg

SEQ ID NO: 158590 - DNA, 419 bp, Homo sapiens
gtgaaactgaagtggaggacagaaagaagaatggggatttcaccacagagagaaaaggaggaaaagaggaaggcccacccaggcagaagcgcaagtggaccaagcctaccgctgacccagcattaaacaaaaattatgggaggctattgttttggactgagatcctgcactaggccccaacagaccagatcaaaccaaaccaaaatggagtcagtcatgctaagagccatataatcaacccaaaactttaataaggaagcaggtatgtccccaaacagattagtttttcctgaaaacaggagcttctggtctacctgagtcagcgtgattaggaggtcctgaagtaacctgatgttaacccatcagcttcttttctattgttctgtttccttgtccccaccttacaaagcccactgttc

SEQ ID NO: 158591 - DNA, 223 bp, Homo sapiens
cgaggagtttaatgatggggagatttgggtaggagataggaaaaccgtaagggatagtgcagagccctgggcattagcaccttgaggtttaaaatgtcaagtggcagagccaaaactagggacagcctgacagggactgtggcctctgttggagggggcgggcagtgtgtagcctgcagagagggagctgggagaatcctcaacctagacctcactccttcct

SEQ ID NO: 158592 - DNA, 282 bp, Homo sapiens
gggacacagtcactgacaaaactgcagcagagaagcaggcagagagaagagatatggcgactggcagctctctcccctcccactcttagctctccttaagttcccccttggccaatccagttagaagccagagggcaaggaagcctggaggatccatctgtcagtcagcaccactgcccactcccaaaaggagggcagacaataggtgacagggggtgttatggtttgaatgtgtcccttccaaaatttaggtgttgccaaagtgatggtatttacaagtgg

SEQ ID NO: 158593 - DNA, 492 bp, Homo sapiens
ccaggcatggtggcaggtgcctggtactcgtcccaggcacgagtcccaggtactcatgagactgaggcagaagaattgcttgaacccgggaggcggaggtggcagtgaaccaagatcgtgccactgcactccagcccgggtgacagagagagactctgcctcgaaaaaagaaaaaaaaaaagtgcagctcactgcccgcacagtattcttggggcatatgggaaatgggttaaaggaaaggttcttaatctgaactcctgaaggttaaaaacagatggaatcaactgtgtagtagaattccatctcttctgtctctacaaggaaggatctagagcagacaatttcttcaaaagctttctcaacttttaattcttacttgaggtcacattataagttaatcactgatcattacaagcagattcaaagaaagcaaaaccgttgcatacaaaagtaaggtgcaggctgagcatggtggctcatgcctgtaatccc

SEQ ID NO: 158594 - DNA, 315 bp, Homo sapiens
gtttagagaaggctctgatcttttgctatgagatgggctgacctgggaagccagtaaatgctggaaagctggtggcaagctttggacatagcacaagcaggctgtccctgcttgccagggcttggggtgtgcatggcgtgggtgtcaggccccacggggaccaggagagacgggagcagaggagggagctgccggctcagcacgttgtggggcggggaatgatggtgccagcgacgtattgatgaccagacaacagtcctaatgtagagcagccctgggtttctcagatgccttgggagacagaccaggtggttg

SEQ ID NO: 158595 - DNA, 372 bp, Homo sapiens
ccaccagaaggggacttccacggggccctggccatttgccagccaaggcagcaggtcctccatttgtcttccctcctctcccccaggatcaactgtcttgtcccctcactgagcccgtcccttcccactcagggaagctctcccacctggaaaaaaggaacacaaagcccccggccccaccccgccccaattctgggctccctagggaagtatctggagtccctccacttcctcttctctacccttgaacccactccagcctcagtcccacctctgccactccaccggcactgttctttccactgccacctggggcccaccgtgaagcattctcctgatcacgtctccccaggatgcttccttctcctgcac

SEQ ID NO: 158596 - DNA, 339 bp, Homo sapiens
cctgcagctaccttcctccctccatacccactgtctccaccacccgtatgtatgcctcccctcactgtgcccaccaaggccatcacttagtgccttatcgttaaagccaatgaatatctctcaccttgtcttccttgacctctcagctgcatgtgacactgcagactctgctcttctccctggcacttgctcggtccttggcgttcctctgtcttctcttagtttcccccatctctctaagtgttccttcgttctcagtgtcaatgtctctcccttctctatccaccccttccctgttggtcttccatggggttctagtctgatctagtttctcacccc

SEQ ID NO: 158597 - DNA, 684 bp, Homo sapiens
ggagaaatttttgttttacaaaaaatcttacctgcaattgaaaaattactcacattttgaaaataattaagaaaaaaatgttcagactgtttatcctttatatgttttaatatagttagaaatttattttttcttcaaatcttatgcaccactatagtatgtgttctactgaatttagttcaaagtttcaaataattgttcattaaaattgaggtgacattgtataatccttcatttcataaggccaaaatgaatttaataattcttatctattattgggatatgtgttctttaagattttgaataaaaatgtattatttacacaaagcacatttcagataatataattcttatcccttagtgccatcagtaaggtttttaaaatgtttcaaatagaagaattccagaaacataggtatttctaaagggggaaaaagattttaatgtgtttgaatatgtatacttgagaataaatgctccttcctatatatgaaaactggtaatatctttattaaaatatgcttaatcacttaatctttaaattgattttaagccctttctaggaattttaaacacagacatgcttatagaagttagtgtgctctagataaatctattaagtaggcgatattaaaaaatccttattttggaattgtatattttaagggaggtttctgaaagatg

SEQ ID NO: 158598 - DNA, 293 bp, Homo sapiens
acctccacaccaccctgtcacagtataaccagagcatgggttaccctcctgacctccacaccaccctgtcacggtataaccagagcatgggttaccctcctcacctccacaccaccctgtcacggtataaccagaacatgggttaccctcctcacctccataccaccccgtcatggtataaccagaacatgggttaccctcctcacctccacaccaccccgtcatggtttaaccagagcatgggttaccctccacacctccacaccaccctgtcacagtataaccagagcatg

SEQ ID NO: 158599 - DNA, 225 bp, Homo sapiens
ggagtcacaccataaaacatgaactgctaggtaatcatgcaggaaaaaacatgagtcgacccctacatgaatgttgctggagttctaaaggcagtggattgcagatgagggagaggacctccaaacaggggaataggaaacctttcgggcctaggaaggagttttagagactgaggcagggcaggacataatggattgagaaacaggctatgccataaaaaaaaa

SEQ ID NO: 158600 - DNA, 333 bp, Homo sapiens
ccgtcactcagggaaaactgtatatggtgcactaatatggtgccactgtatagggtgccactgtatatggtcttctaagctatgcaaagtttgtaaaattaaagaacaaaacaaccgggcatggtggctcatgcctgtaatcccagcactttgggaggtcaaggcaggtggatcacttgaggtcaggagttcgacctgacctcctggccaacatggtgaaactccgattctactaaaaatacaaaaattagccaggtgtgatggcgcgtgcctgtcatcccagctactagggaggctgaggcaggagaatcgcttgaatctgggaggcagaga

SEQ ID NO: 158601 - DNA, 513 bp, Homo sapiens
gagctcaggccttgcacgggctcttccttcttcagggattctcttccctcaggtatacacggtgagtgtctcttatctccttcaggtttctctttctctctctctgtcttttttcggagaagggggtcgtgctctgggacccagtcgggcaggcacccctatgctggctggagcctggggtcgccccacttctctcaacactgatgggcatgagcattcctcaccccagggctctgagcacctcacagatggggggttgtgccaccctagcagtccctgccccctgggaggctggggaaccctctcctcggtgggcagatagggagacccaagcctagggaaggaaagtaactaactcagggtcacacagcaggggcaggaatagcaacctgggctgctggactcacaccccaatcattcggaaggtgggcgagcccagagtccctttggcttggggcatgtaggtcattttcaggtaacaaagcacttcccctaagcctctaaataaggaac

SEQ ID NO: 158602 - DNA, 279 bp, Homo sapiens
tcgcctctcagtccaggaaggatgtctgtcctctctctggtcctttaaatttctcctggctatgattggatcacaccagcccacaagctaacgagacaatttttagctcctcttcctctcctgtcttttcctttttgttattgtttacagccactatatatagtaatataaattaccagggaagatttcttgccttctttgcgtggctcagagacagctgcatggttcctacatcaatcaggtttttttctcatattccacttttctttttttgttttt

SEQ ID NO: 158603 - DNA, 149 bp, Homo sapiens
ttgatcttctgtatttttaaatttctattgcatttatttctgctctgatcttctttatttcttctactgattttgaatgtggtttgttcctcaacgctttatacttcatgtttaaacatgaagtagaaatggggttgtgcgttctcccc

SEQ ID NO: 158604 - DNA, 162 bp, Homo sapiens
tataagttcctatcttttcaattatcctcttatatagacattttagtccgacagattgtcgtttgaaactaaacttggagtgttgacttctttagtgattattcgtattaggtaatcttttctgaccttgaatttttcataaaataattattttatgtggct

SEQ ID NO: 158605 - DNA, 788 bp, Homo sapiens
gttgtgtactgggaaaacctggcggtattaaattacaaaacccattagtaatactgtaaacaaacgattagaaattaaaatagtttttgctaatagatttaaccagtagagacgatacagaggttttagtaaattagaaaccagtactgagttcttcctcctagtgagacaaagagggaaatatgaaagaatataaagacaaagaggatgaattaagagccttcaacacacatctgaaaagagttccaggggaagagaatggaaggaatagtaaagaatatttgaagagataataacttagatttttactaataaaaaatgtgagtccttaacataaatactgagtaccaaacaggaaaaataatagtaaattcaggccgggcatggtggctcacgcctgtaatcccaacattttgggaggctgaggcgggtggatcacttgaggtcaggagtttgagaccagcctggtcaacatgatgaaaccccatctctactaaaaatacaaaaaactagccgagcatggtggtgcacatctgtaatccctgctacttgggaggctgaggcaggagaattgcttgaacctaggaggcggaggttgcagtgagctgaaattgcagcactgcactccagcctgggccacagagtgagactccatctcaaaaaacaaaacaaaacaaaaagtagtaaattcataccttgacacatcttttgtaagatagaacatcaagaatcaaaagaaaatgtgaaaagctaccagagaaaagaaacaattacaatgacaggagata

SEQ ID NO: 158606 - DNA, 437 bp, Homo sapiens
actgcaactctctgccgcctagattcaagcgattctcctgcctcagcctcccaagcagctgggattacaggcacacgccaccatgtccagctaatttttgtatttttagtagaaacagggcttcaccttgttgggcacggtggtctcgaactcctgacctcaagtgatccaccctcctcaacccccaaaataccaaagtactgggattacaggtgtgagccaccgcacccaggctcttctgacttttgagcaaagacctgaaggaggtggaggaggaggccatgccgatatctgggtgaagagtgttccagatagaagcactgtgcaaaggccaaggtatgattagagttgatgggctccagaaactgggaggaaaccagcaagactgaagcagagggaacaggaagaattgtggtgggcaatgagggtgacgcctt

SEQ ID NO: 158607 - DNA, 337 bp, Homo sapiens
ttttcacaacgctgctgatcaaaacaggatgtagcaaagaaaccaatccaaaccagcaaggaccaggaatcataatacatttgcattagacattcctaccagcaccatgacggtttacaaatgcaatggcaatgacttggaagttaaccttacatggtttcaggaactccccaccccttttccaggaagttcatgaataacctgtttaattatatttagcattaagagtgggggcccaggcatggtggcttatgcctgcaatcccagcattttgggaggccaaggcaggaagatcactggaacccagaagctcaagaccagcctgggcaacatgaca

SEQ ID NO: 158608 - DNA, 701 bp, Homo sapiens
caaaatgttctgctgtgtccagtgagacattcatcttgcagtcttttcattttcctgtttccatcagggactggctattttctctgtacatgcatcatccttctccagcatcctcagaatttcctttgcttttctctcaggctgattcattagtcactgggttcttaatctttctctgccttggtgtattccctcattttctttaagcacatcctccaggggctttatttaaaaacacgtggccggagacggtggctcacacctgtaatcctagcactttgggaggccgaggtgtgtggattacctgaggtcaggagttcaagaccagcctgaccaacatgtagaaaccctatctctactaagaatacaaaaattactttgggaggctgagccaatctcagtggccatacttcaatcgctcatagactgctaagtgttcaaactgttgaaataaggcaaacaccaacctgcaaccaatccagctgttctgtacctcactgccaatttctgcacatcatttcacttgttatgtctgtaaatcttccaccgtgtggctgtgctggagtctctgtgaatctgctgtgattctgggggctgcccgatttgcgaatcgttcattgctcaattcaactcctttacatttaattcggctgcagttctcttttacaggaggagggactgtgcattttcatctcctaccc

SEQ ID NO: 158609 - DNA, 118 bp, Homo sapiens
ggggatgaagagaaacaccgggatcatgcaagactcataggctgtgttgaggagcttgaattttactctaactgcagtggtcctcagccagagggattgggatactggcaagaggatt

SEQ ID NO: 158610 - DNA, 480 bp, Homo sapiens
ttgtgactatctctctctttatctcagtcttccttcttattttccttcctttctctctccctctcccgctccccgccttgtctcagtatctctcctgcatgactgcctctttctatcttgtctctgcctgtctctgtctctccctcccataactgcatttcaacctttccatgattgagtcttctctctgccattctatgagcaagtggccaaacacagccagtccagcccagctttatgcctcctttcaaataaccagccaggaaggcaacccagtatccctgattctcaaagccaaagtcacaggagaaagaagctgattggctcagctcaaatcagcctgcacctctggtctaatcagctgtcgctaggggagcagagaggtacaaatatggcccctgaggttccacctaggggagaggaggatacaagagaagggagctggagggctggccaggagcacagatgcccaccacacct

SEQ ID NO: 158611 - DNA, 312 bp, Homo sapiens
tgtgatagctagaaatgggcagccttcgcagagcgagtaaagcctttaatccgtaactctttgctgggtacctgtagctctttcagagcaaagctaattaattgtcaacgctgggtgacatgctctgtggtttgggggcgtcttggttaattaaatttgaatttaagagtctcatttgctagaggaagtaatttcttttcccccctttcattctaatatttttatttaacaaattatttactgtagttgaaacctgaagaaatcattaaggttatttcaaaggaaaacaatttgcatgggacctctgcattg

SEQ ID NO: 158612 - DNA, 333 bp, Homo sapiens
tggaaggactgcatctgtgtgttgccaaagagtaacagagactggtataggacttgagttcaattcagtcatatccttaagtatgtgccatcgtgtctggattactttgtagtataagtaaatttccaagcatggggaggaaaggagaagctcctttattgagaattcaactgaatatagagaaaactaattttacacaactgtaatcactgtagtcatttggacaaattagcaaacccaagttttgctttaacttggattgccttaataaagatgtttgggggcttaatggcacagttgctcaactcccccacttcattccgtactccccag

SEQ ID NO: 158613 - DNA, 359 bp, Homo sapiens
gtagccactgagaggtgagagggagttagcttgaaactatagggtcgcgagaaggctgagggctaagggacgcctcagaggggacaatcagcaatgctgtgagaataaccttgagagtctatgacttcttagcttaaaaacttttctctggctaaatgagctcaggacatgaagactttgctgctgtcatttactgggctctgctagtggataggggcattaatgtaactcacagcaaagactctccgagtgtagtgtttcctcagactaactccagcatagaacaggcctcctttttgtgttggattatattccagcgagggactcaaaggtaggagaactggtgctatcttggtcat

SEQ ID NO: 158614 - DNA, 306 bp, Homo sapiens
aactcgggctccagtgccggtcaggtcccaagtccccaggagagcacaggccagggcacggcaataggaggcccgggccaggccaactgggcatgctcaccctgcaccaggctccgcactgggcatcccacggtgccagctccttggtgcctcccagctctgagctgctggtgccgttgtctgtatttggcagagggaggaagctggaggctttgagaggtagagccggcattggtgtccacagccagcttccgggtctgcagccagcccagtatcccccgcttccccatcccttgttcttttatc

SEQ ID NO: 158615 - DNA, 286 bp, Homo sapiens
ccccttccacacaattgaggaactatctttttactacctttgcagaagactggggatttgttctctggagagggttaaacagaaggtttctacgatagagggcacagcttacaaatgagagtggggatgctactgaagtaaagggtagttgagtaaatatttacatgctgttttagagatgttagggtgtggtggtgggcgcttgtaataccagctactcgggaggctgaagcaggagaactctcttgaacctgggaggcagaggttgcggtgagccgaggtcacg

SEQ ID NO: 158616 - DNA, 160 bp, Homo sapiens
tccagagaaaaggcaatgggtgaagggaagtgagagctgatatccaaaggaaaggctggggccaggtattatcagtagggccttgcaggtcatgctaaggagcttgatctcctgaacatgatgcggggatgatttcatcaagcaatcctatacaaattgg

SEQ ID NO: 158617 - DNA, 533 bp, Homo sapiens
tgctgggattacaggcgtgagccatctcccctggccaaagtttgcctttttttacagatgtttcgtaactattgagtccctactatgtgtaggacgccattctaggttctggggacacagcagtgaacaactgggacacaaatttctgccttttgggcagcggagacagacaaatattgtgttgggcaggggtcactgctatgaaatgtgcagcaggggatgaaaaggagagaagcgtttccagctaagggagtgagggacggcttcttggaaggggtgacatctaaggagagacctgaaagtggggagaggctaggcctgaggaagaagcagcacacaggcccgaggcaggaatgtgtctggcctgcgggaagagcagcatgggggtaggaggtctagggtctggaacagagtccccaagggacagtggagcgggaagaaatgagatctgaggacacacagatcacggaggccctggagagaacttggcattgattccgtaggagcctggagccttcaagaagaagaagaga

SEQ ID NO: 158618 - DNA, 552 bp, Homo sapiens
agatgcatgatgttgtgctacttgctattgcccagaacttactgtaacaataatataatatgctgggggtctgcgaagtgctgagtgctctcatactgcattttacatttttaacacaacttcatggagcaggtattattatcatttctgtcttacagagtaagaaatgggggctctgcaaacttaagtaactggcccagagtgacaaggtggcaaactgacctgtgtctgctgtctaagaccaagtgcttaaccaccatgtagattgacactttgatgtggtacagcagtaaagtttagtattagtgaggagagggcatctcttttactatagtttattgtgaatattctttcctcttaatatcagtatttctacagggtaattttaacacctgcctggaattgcattgtctcaaaggacccgtttcattcaatggtcccattgaatgaaagtcaagaaggcttgctataagatctaaactcttaggggggttacctttctattatcaaataacctttattgttattggaaaaagtcagcttaacagcatt

SEQ ID NO: 158619 - DNA, 712 bp, Homo sapiens
tcataatccccagggcagggttcaggaatgtgtgttttttaacaaatgctagaacttgaaccactgcagtagctctctgtagttgctagaaaaaaatcttggtatcaattgttgtaaataaaccattggaaacaagataactcctatagtgttttgaaggctatttatgaattggctgacttgtttattcgtcatcccctgctgaaaggtaggctctaagaggagggccattatctagcttgttcaccagttgttcctagaatagtgcctgacacgtagaagtgcacagtgaatattttttgaataaataaatgaataatgaaacgctttttcactgtgcttgggtaatacatgtccctttttccctcaataccagagaaagaattggtttcagctgtgccgttgtaaatttgaatgatctgataaaaatccttggttactccactgaaccgactgcaatttttttaatgtctaaaacatacttattctcatattttgttacattttaataccatttaagagtagtagaatttggaaggtgacatagagatccacttttatttcattttcatttcaagcccctgtgtctttaaggaaagggctaagctacaacttggtcattctccagatccaagaggaaatggattggagcagttgtgcctttgtagagcagatgttttggttggaaaggctatcagccatctgactcata

SEQ ID NO: 158620 - DNA, 352 bp, Homo sapiens
gatgattgcctgataaagatgattgtctggcgtagcttggagtaccaatacaggagacatgttcttcccccacttcctattccttccactgccatgctagacaatgcttatcaaaggtgacattctttcctacccagcttggacatgcctcataatcctgcccaagcagcattctaatagccacagctagtaaacaagggatctaactagtttgtcagtgtaggtagtagaatctttaaatttttttttaaaggccattgttagtatttttaagagatcaatttacatcatttatttcagatggaatattgtttatttctctgtcgcagtggctcccaatcttttagaatgt

SEQ ID NO: 158621 - DNA, 189 bp, Homo sapiens
ggtcacagcatctctggtccactctacatatttgctctgctatcttggcaaattctttacacattttttagaataagcatacattcttaaaagcgcttattctattgaggtagcaaattattatccttgccacagttagtaaagcattcatgggtaccctcactgatgggtgacctcatggtcactcat

SEQ ID NO: 158622 - DNA, 521 bp, Homo sapiens
cttaaatatgtaatcttaatcaaaatcattagatctaagtcattagatcaagactacacattttgatgtctaaagcaatgtgaaaagttatagaaactctcacctttctctaaaaagttacagaaactcccatctgaaccatgccctgggatcaactatagattcagaaaaggatttttggaaagtggtgagaaagaggaatccttgttagagagtgaaaattttcaaaggctttggactcaaaatttgaaatgattctttcatctgaaagaatgaccttggtagagaaagaaaaatggccatttaaaaatgagtctactagctattattgacagagccaatcatttatttagtatccaaacagaagaggtgttgaagataaagttttcttataattttttggttgttaaatatatggaatttaatatctaaggaaatgagatattggagatagataactgtggttattagagaaaaacaaaataaatgtatataattttttaaagtagaacaaagtctta

SEQ ID NO: 158623 - DNA, 383 bp, Homo sapiens
tgcctgagttgtagttacttttgccaggaagcccagagctggattatgtaaagctcctgggtttctgtgtatgcctgagtggctgctctgccaagactccacatagttctgtgtgtcggactgaaggccctagtggagtggtttcatgaagggttctcctgacccgggagttgcaaagattggtggggcaagtgtggtttccttgggtcacacattcactccctgcttccctgggcaggggagattcccttgactccgtgtggctccctggtgggccatcattttgccttgcttttctctgttctctgtgggtcaggttgtttccttgattagtcccaatgcaggtacctggatgtttcaattgaaagtgctgtatttactcg

SEQ ID NO: 158624 - DNA, 288 bp, Homo sapiens
ctttttaatgttacccctcatagtgagtgtatagtggtatctcattgtagttttcagtttccctaatggctgatgttgagcatcttttttcgtacttacttgccactggtgtaccttttttctgtgaagtctctgtatatatcttttgtgttttttttttttttttttttagtgagacagagtctcactctgttgccacgttcgagtgcagtggcgctatgtcggcacactgcaaccttcgcctgccgggttcaagcaattctcctgcctcaacctcccgagtagctg

SEQ ID NO: 158625 - DNA, 392 bp, Homo sapiens
cccagaggcagccactgtgtggaggaacattggcaaggacagagtcagaaccccacaaagcctggccacgtgtggggccactccaccgccacagcacctccaaccacgttctcccacagcactgtgaaaaatgatagctgaagattttcattgccgcaatctcttaaaaaactggaaacaacctaagtacccataaataagagaatgtttaaaaaaatgacggcagagttcacgtgctggaagagttggtggcatttttaaagaggcagggcaacacgtactacagtgagggattttacaggcctatttttgagggaaaatggcaagtgagctacagcaagcgcacgtgtgtagatcccagttacaggtccgtcaagatgtctagagaatac

SEQ ID NO: 158626 - DNA, 475 bp, Homo sapiens
gtattttgattccttcaagaggtttagtaggaatactctttcatccagcctcttttcttcagaggcttgtaacttctgctaagccaggccccagtggctggacccatacacatgattctagaaatgagctgtgtgggaactggattgctggttggcctggccatcctcattccccacttcctcccattgccaccacgcccctcgtctacccaataaagctggcattttctcttcagcttctctcaagaacagccagagcttggaaaattattgtgagttgccgtacatcgtgcagctactcactgagtcttccttcatcaaatatgaagcaagaatctctgtgaaacaggaatataatattaggacaatggagatagatatgcacagatgcgtcatccaagccgaaaatattctgttaaatacaaatgcgtgaaataaagagacactgtggtgcccaaataataatttaaaagtt

SEQ ID NO: 158627 - DNA, 511 bp, Homo sapiens
ctcccagaccactgtctcccctcaggggacaccatgcctgctgctccctgcctgccagcgccctgcacatactttgcacatggctgggggccagctgcgggtccctggggactcggatggcacagagggccccttcctgccaccatcacggctcagacctcacgttcctggagagtaggggtggggtgctgaggggcagagggaagtgccgcaaaccccctggtgggcgcggtgccagccccccaggccgattcccatccagttgaccgagcttgtgctggtcaccgcggtttccgcaggacagagtccccacagccgctgggcaccccggtcccattcgcggccactttcctgtctgaagaccgcatgttgccgggctgtgcttacggctcgcgggcgcactctactgacaagcggtgggcggcctcacagactctcccaggcccgcgtggggcaccacggttgggagtggagtggagactggcgagtttcgactcccccagccaccccg

SEQ ID NO: 158628 - DNA, 340 bp, Homo sapiens
tattcgcattctctattattcccaggtgttggcagcgcgtcctggcatctcaagtgctgagccacatggaggccacatccgtggctttatcccagcctcctggagcacatttgcctgacataaacactcagatatctacatcagctgagtggattatatgcactggccaactagatgaccagattctccttcccttcatgaatgaaagagaacaatatttttatataattcataaaataataaagtcttgactaactaaattgtacttattcatgggaaagttcaaaatatttactttaactattaatatatgaatcaaaaccaagttattttaactaga

SEQ ID NO: 158629 - DNA, 646 bp, Homo sapiens
cgtctcaaaaaatcagtttacacaaaataaaaatacaaatacaaaattaggcgggcatggtggcacatgcctgtgtaatcccagcgactcaggaggctgaggcaggagaactgcttgaacttgggaggcggaggttgctgtgagccaagatcacgccaatgcacaccagcctgggcaacaagagcaaaactccatctgaaaaaataaaaaacaatatcagtgtgtcaaagcattatgtctgtcacaatacttgtgaaaggaaaatcaaaattactaaccaaagagaaaagtcaagctgggaactgtgttagacaaacctgcctcccattttattcctaaacaatatagctacaaggactaaaccaaaaatctacatactccactcacaaactgtgggcctcaagatctccaccccaaaatagttctgttgaatttcaccctggcaatgtaaactgagagcttatcttcacaggtgtaggaaagaacccatccctctgcacacctgagtcaaatgtctatctgactacttcccctgacctattttttatgtaaaaattcagggtcactgagccagcctaaggcataagtgactattcctccaccctctctcacatataaattgtgtaaactgatgaaaggttgatca

SEQ ID NO: 158630 - DNA, 156 bp, Homo sapiens
tggctcccaccgtggctatgagctctttaaagacacaactattctgttgtcactctgaccctggtgcttcagcttaggcagggccttgcattcatgggggctcaagtaggcatgcactcactgaatgtccgcttcaggcttgacagtggggataca

SEQ ID NO: 158631 - DNA, 211 bp, Homo sapiens
agcactgagcaataccattattgcaatggttccatattgttgggtatttggatttctgttttaaatgtctttgtataataatatttgtgcacattccttgatgctttttgtagaatggatacttacaagtggagttccacggtcaaaaattgtaaacactttgaaagcttttaaaacataattctcagattgccctccttagctgtaacaa

SEQ ID NO: 158632 - DNA, 282 bp, Homo sapiens
agcgagaaccgagacaagaaagtaaagaagtagatggtattcagaaccataaaactagatggaaattagaaaaaggtggtattatttgtgtgttgtaaacaaaagatcaccaagatatttgttaatggaaaaatacagacaagatagccttacagtgtgtatatgctatcatttgtgcaaaagaatgtattatttatttttacttgccagtcactcttccaagccgtataaacatacttattcatttacaactcacaaatctacgaaggaagtactattatt

SEQ ID NO: 158633 - DNA, 157 bp, Homo sapiens
gcatcaaaactggcaatgctgatgaagctgttaccatccatcctgtcactggtagcatatctgtgctgaatcctgctttcctgggactctctcggaagctcaccatcagggcttctgatggcttgtatcaagacactgcgctggcctacagcacatg

SEQ ID NO: 158634 - DNA, 492 bp, Homo sapiens
ccaacacctctgtcatatctgagtctggctgtgatgcttgctatgtctcttcaaactgcttttggccttttagcattctttgcaagttttgttgttgttgttgttgttgttttgtttttgatagccagacacaatgaattgtgtacaaggcactgaaatcaataggcctttattgtgaggttttgtgtttatcttgctagaaatcaggttgtgtttactgtttgatgtagctttggtgtggtggctgaaatatcctatagtatcttcgtttttgtctctcctgttgctttgaggtttccttagagactctttcttaaataaggcttgaggcttgcagttctttcaggtgtaatttcctgttattacacagaagccagattgactgggtctcactcagtcttttaatgtgcctgtactcctgagctgtgccttcacaagtgcttctcagcctttcttttcccccttaggtgagacagaaatgctagggggtac

SEQ ID NO: 158635 - DNA, 532 bp, Homo sapiens
cgtgcgggtggagggtcttcccttgatgtcgatggctgtgactgatcaggatagtggttactgaaggttgggctggctgtgacaatttcttaaaataagacgacaattaaattgactacatcatttaaattcttttcatgaaagatttctctagcatgtgatgctatttgatagtattttatggacggagcgagaccaatctcaaaataataaatagataaaaattaaaaataaaataaaataataaagaaagatgatttttgcatcaccaaatctttacactgatttctctctagtttttcctttgcaatgaaatgtcactcagacttggactaagattaagtcataactgacagctgttgactctctcaagctcttctctgaccgtatcaagcctgagtatccttattttgcacattcttccttatgtaagatgcttctgagggatggtggcagtggctggcatgtactaatacaaaatacttcaaattatatttttgagctggaaattcaagagaaacaaataccaggc

SEQ ID NO: 158636 - DNA, 197 bp, Homo sapiens
agctccttcagtaggttaaaactgatgaatagtataatcccagtctgaatagattcttgagttcttgttttcagattttaggaacagacgtgcaatcccaaagatagagaacagagaccagtgccaaaaatggaactattttgcttgaacttgctaagttatgaacaaaaacagtttaaaggacttaacatgtatta

SEQ ID NO: 158637 - DNA, 998 bp, Homo sapiens
cagggggtcctccccatacatgctgcatttccatcacagaccccatgtcgcctctggacagtaaagcaatgtgtgcagggtcttaacttgtgcatccgcaagcgctgagtttgttgaatgaatgggggatggaggagcaaggaaggattttaggaaacattggaaagaaggcaaagcctgcatgaggaccccgcagccaggggctgcctgatttcactgagcatccagcaggctgctttataggatgtcatactataaagaagggcgtgccttacatacagtgttacatagataacgtagggtaggagagcagtctccctaaatcacactttcttcctgtgacttagtgtaaaagtacatatgctttccagtttgaaatagtgatcggaatgactgagaaaaacatgctaaagcatactgtagccatttaaaatggacaggtataaaacggaaatggtgattttgcctgatccagccttgtaacattacttgaaatagggccattgaaattgctacccagatctggattcctggtgaagaatctgtactttctgtgtgtcctggcattcagggactcaggctatatccctattctaaaacaaatgtgcctcttaaaatcccgggcttttatggattctgaattgatggtttttcatttgttcggggtcttgaattcattggaggaccttgagacctgtgaacacacaatttcacatgtgctttcacatgagactcccctctagtctccctgaaacccattcagggatccatggagatccacagacttcagattggaagactgtattctaaaaggattgatctcatgatagctgatgactatttaagaaatcaagttagactcagagattatgaaagtgttgggttagcatttgaattttttctttgttggaaaaggacactcattttaatcatatcctttaaaaaactcaatttttcactctaaatgaaaatttttatgagttagattttcttgaact

SEQ ID NO: 158638 - DNA, 625 bp, Homo sapiens
ccatgttgcccaggctggccttgaactcctgagctcaagtcatctgcctgcctctcaaagtgctaggactacaggcatgagccactgtgtccggcctcaataaataaatacatgaatgaataaataaataaataaagatgcttcacaaatttgtatatcatccttgcacagaggccatgctaatctctgtatctttccaattttagtatatgtgctgccatagcgagcacagcttcaatttttaatagcaagttggatcaggattgtgggagaaaattctagcttgggcatagagatttacagactaacagtatggcccaggagagaatatagaatgaaaagagcaagaggtgaagcttgaaaactttggttatattaacatttaagatgctagcagggaaaaatgtgcttatgaaggatgctgaaggagagagatgagagaataaagaggaaaactaggagacactagtattggagaaagctaagagatgagagttttaagaaagaatatgtgtttagtgatattgaaagtccagaaaagacagatgagataagaatagaaaaattctattgggtttggtagttagaggtcattagtgacttttgtgatgaacaatttcaataa

SEQ ID NO: 158639 - DNA, 671 bp, Homo sapiens
gaattttctactcttatctcatcggtcttttctggacttccaatatcactaaacacatattctttcttaagactctaatctctgtatctttccaattttagtatatgtgctgccatagcgagcacagcttcaatttttaatagcaagttggatcaggattgtgggagaaaattctagcttgggcatagagatttacagactaacagtatggcccaggagagaatatagaatgaaaagagcaagaggtgaagcttgaaaactttggttatattaacatttaagatgctagcagggaaaaatgtgcttatgaaggatgctgaaggaggggtgagattgcggtgtttgcaaacaccgcaatctcaaacaccgcaatctccacctcctgggttcaagcgattctcctgcctcaggctcccgagtagccgggattacaagcatgcaccaccacgtccagctaatttttgtatttttagtagagactgggtttcgccatgttgaccaggctggtcttgaactcctggcctcaagtgatccacccgcttcagcctcccaaagtgccaggattacagatgtgagccagtgggctcagcctgaactattgatttttgttgatagcttattaatggtttactagatttagtagattgcggtgtttgggtatcctctaggtc

SEQ ID NO: 158640 - DNA, 355 bp, Homo sapiens
ccttgccctccgcaatgcccagaacacccctctaggtgctgtgagctcccagtgtgtggtaacaacagtgctgggggaggcgtggcaccaaagacctgtacccccttcttctttggggccccaagtgccttctgtgaaaccaaatactccccctagtcgcccacccggacacctgactccctcctgaggcccactcagggtgaaagccgtttcctgtctgggtcttggtaaccccctgaaatcccggcctccctcccccgatcccttccaaatgcttattaagccgtttgcaaatccagggctgaaccgcggcgtgagtttaataaagcagaagacagatgccatccatcacggg

SEQ ID NO: 158641 - DNA, 423 bp, Homo sapiens
tgctggctctgagcgcagacccctctcctggttcccaggggacccgcggaggagaaaggcagagaggcaggtgtgtgggacccactggcccctggccacgtcttgctcaccgtcccagttggaagactgttaggatggaaaaacctcactgcggttctatgaaggggcatattcctgcacggcataactggtccgggagccacataaagtcaccaagtgtgggacgtcatcctaccgcgaatctgagggtcttctggggtaaccccagctctgcctcagtttccccatctggaaaacagggacgcacctctcggggagggtcgctgaggaggtttcctccaacgcttaggtctgaaagtcccccactgtcccagctgagaggatggcagcagagtcgtacccgtgacgggcagggcccagagg

SEQ ID NO: 158642 - DNA, 389 bp, Homo sapiens
ctgtggtgaactatggacacaccattgtatcccagcctgggtgacagagtgaaaccctgtctcaggaaaacaaaccaaaagaaaaacagcaactcatgctggttattttatggttaagagcaagaatccttttctgatgcatttcttggcacaagggaggagttcagttttaacaacttatattctttctcactgtagaggaatattgacataaattgcacataaattaagcatgatcaactaacaagtatttgttgatttattgggcatgaaaaagaccttagagaggttctattctagttctgtcttctccacagtctggaaagacagacttaacagaatttataatctcaggttttgcctggcatggtggctcacgcctgtaattc

SEQ ID NO: 158643 - DNA, 455 bp, Homo sapiens
aattcagtcctaaagtcatcagatgggacagaggaaaatgacatcacagtgttggaggagccatcaaagcccagaggaggatatggggtgaggagggcatcatcatagtggggtgtcagtgcccatgagggtgctagagtgcattagcgtgatcgtggctcactgcaacctccaacacctgggctcaaggtgagctaattttttttttttttttagatggagttttgctcttgttgcccaggctggagtgcagtggcaccatctcggctcaccacaaactctgcctcccgggttcaagcaattctcccgcctcagcctcctgagtagctgggattacaggcatgtgccaccatgtccatctaatttttttgtatttttagtagagacggggtttctccatgttggtcaggctggtctcgaactccagacctcaggtgatctgcctgctttggctt

SEQ ID NO: 158644 - DNA, 315 bp, Homo sapiens
aaaatggcatgagccaggccaccacacatggtcatgaagacacggtgacagtaaagtgcagaaatgcttagtgacagcaagggagatggaaccaggggaaacctacatggcgtaagatttcagttatgtttaaaacattcacaggaaaaaaggatcaaaagaaaatatgggctgggcgcagtggctcatgtctgtaatcccagcagtttgggaggctgaggtgggaggattggttgagcctgggagaccaaggttgcagtgatctgagattgcaccactgcactccagcctgggcaacagagctgtctcaaaaaa

SEQ ID NO: 158645 - DNA, 493 bp, Homo sapiens
cgtcagaaaagcgcagtattagggtgggagtgacccaatttcccaggtgctgtttgttaccccttcccttggctaggaaagggaattccctgaccccttgcgcttgtcgggtgaggcaacgcctctccctgcttcgggtcacgcttggtgcgctgcacccactgtccgacaatccccagtgagatgaacccagtatctcagtttgaaatgcagaaatcacccgttttctgagttgctcacgctgggagctgtagactggagctgttcctatttggccatcttggaacctggaccccaaatattttcttaattaaactgctacacaaccagttgataaaatcctactcaacaaagctgttacccaacggaatttgtataatcttgaggtttccaggaaaaaatttaaaagtaaatcttggaaactgtttgttccttacatatctggcaattcttttttgttttctagttttatcgagatataattgcttaccca

SEQ ID NO: 158646 - DNA, 426 bp, Homo sapiens
  misc_feature (60)..(60): n is a, c, g, or t
  misc_feature (67)..(67): n is a, c, g, or t
  misc_feature (103)..(103): n is a, c, g, or t
ttcttttgttctttttgagacggagtctcactgtcccccaggctggagtgcagtacaccntctcggntcactgcaacctccaacccgggctcaagcgattctngtgcctcagcctcctcacagcctcctcaatagctgggactacaggcacttgccaccacacctggctaatttttgcatttttggtagaggcggggtttcgccatgttgcccaggctggtctcgaactcctggcctcaagcaatccgcccgcctaggcctcccaaagtgctaggattataggcatgagccaccactcctggcccatactaacacatttggaaagagagattgaactgtggatgaaaatggcttgaactgtaacagtatcagatatccagtcaaacattagaaaaggaactattgcagaggagaggagaaagtgat

SEQ ID NO: 158647 - DNA, 461 bp, Homo sapiens
caatttcccatctgtgtcttcattctgaaggctcctatgtcaggtaaaactatgatcaaataaatttgtatgtcttttctcctattaatctgccttttgctagttaattttcagtgaatcttaagagggcaaaggggaacttttctgttggcccctacaatgttaaaaaatctggtggaaaacatggagccaggtgccatggctcacacttgtaatcccagcactttgggaggccaaggctggagaatcacttgagcccaggagttccgagaccagcttgggcaacatggtgagaccctgtctctacaaaaaagttaaaaattagctgggcaccgtggcctgcttctatagtcacagctacttgggaggctagggctggaggatcccttgaacccaagaattccaggtaacagtgagctatgatcatgcctgggtgacaaagtgagacccccatctcgaaa

SEQ ID NO: 158648 - DNA, 332 bp, Homo sapiens
tcagtaatgtgtgccaaatgtttgtgtattttagtagtgtttggtcatgttgcccaggctggtcttgaactcctgacctcaagtgatccacccacctcggcctcccaaagttctgggattacaagcatgagccaccacgcccgacccttgtgttataattcctaaatacaatctcccattgtttgggatttgctgttataagcagcactaggatttgtgttcttgtggaaaaatctttacacacttctgcagtaatacctctaggataaattcctggaagtgcagctgtcgggtctggagcatgctgtacccatgctgagcacatcatatag

SEQ ID NO: 158649 - DNA, 330 bp, Homo sapiens
agagaatataacatttaatgaaattaacaagtgaggaaatacttatttaaagggtatgctaatgccattacttcatattttaggttttcatggaaatttccaaagaaattcatcctgatagatttactagacagcttatcatactatgtaatcatagactcctgagaattatcttattttccaaaacattgtttgatcatatatccttaatttctagaatcacaagtggagggaggtgtaagggcagatgttcccttgaaaagcaaattgaaaaagaaaagagtaattgcaaaaggattccttggcatttgtcttgagaattttctttag

SEQ ID NO: 158650 - DNA, 401 bp, Homo sapiens
tttcaagcaacatcattttataattcccattcgacattattcaaggattataaaaacggccgggtacagtggctcatgcctgtaatcccagcactgcaggaggctgaggtgagcagatagcttgagcccacgaattcaagatcagcctgggaaacatggcaaaacccagtctgtattaaaaatacaaaatttatccaagcatgatggtgtgcacctgtaatcccagctactggggaggctgaggcaggagaatggcctgaacctgggaggcagaagttgcagtgagttgagatcgcaccactgcactccagccggggcaaaagaccgaggctctgtctcaaacaaacaaacaaaacactctcagttggaaaggtagtgaatagggctgagataagtgtctc

SEQ ID NO: 158651 - DNA, 293 bp, Homo sapiens
ttaccagactgagaattttaaacaaccatgattaatatgttgtgggctctaatggataaatggacattatgcaagaacagatgggcaatgtaagcaaaaagatggaaattctaagaaagaacaaaaaaaagttagaaatcaaaagcactgtgtaaaaatgaatgccttttatcagtgtattagtggactggacatgactgaggaaagaatctctgagcttgtggatatatcaattgaaacccccaaaactaaaaagcgaaaagaacaaattctgaaaaataaaagaacagcat

SEQ ID NO: 158652 - DNA, 392 bp, Homo sapiens
  misc_feature (22)..(22): n is a, c, g, or t
  misc_feature (67)..(67): n is a, c, g, or t
  misc_feature (77)..(77): n is a, c, g, or t
cagagagacggggacaaagacnagagagagaggagacagaaacccagagagagggaaagagacccantccacagcancgcccccagatgtcatccttctgattggctgttctgattgtagccagaatatctgggcatttttcaggcagttgagataaagaaactcgtattttcttcttcattactcttaaattcatagttcaaaatatttatgttagttttaaacataatagtttcctgaattaggtaatttataaatgtcacattgtttttgtttttttttttttttttttggagagggagtctcgctctgttggcccaggcgggacgggggacggcaggggcgcaatctcggctcactgcaagctccgcttcctgggttcacgccattct

SEQ ID NO: 158653 - DNA, 525 bp, Homo sapiens
gctgggctcaagtgatccttttacctcaaatttttgagctgggactacagaaatgcactactacccctggttaattttttgatttattagtagcgacagggtctcactatgttgtgtaagctggtcccaaactttttgccccatgtgattttcccaaagtgttgagattatagatatgagcctctgcactcagccagtattcataaatttaataagacttggtatgtgtcgtaacagaacacactaggagcaagtaagaatattgtgtgtattctcttgcttttgcctggtaagttttgtacatatctgttaagcctagttggtgatatgatatggttggcctaaggttagaggatgtccattttctctaaacctcatgctgcaatataatcctcctgtttgatgtgggacctggtgggtggtgtttgggtcgtgggggagcaaattcctcataaatggtttggcaccatccttttgataatcaaaaaggttacgctctattgattcaaatgagagctggttggt

SEQ ID NO: 158654 - DNA, 790 bp, Homo sapiens
tccaagattggctaagttacctatgttcctttgtatttctgcatatttatatacatcttgacatcacattgtttatttttattttgcagtaaaatctgatgtgattttcatcagagttgaaatacatttgtagatcaatataaggtggatggatatcttaatataaataacatatcaataagaacatgtatagatctacgttttctattttttcttaaaatttctcaataatattttttagcttctagataaaagaactacgcatattttgttgcctttattcctaagaattatatgcttgtgattattctattgtgaatagaatttattattatgttttagtgattcattattagtatgcaacaacacattttaccggttaagaactgcttatccaaaatgcttgtcgaattaatgcaaaaacagcaaactaaataccacgttttcacttataagtaggaggtaaacatttggtaccccaaaacacaaagatgggaaccataaacactggagattccaaaagggaagagagagggagctggccaactgttgaaaaactatctattgggtcttatgtccaccacatgggtgatgagatcattagaagtccaatattcagcatcacacagtatacccatgtgacaaacgttcagatgtacccctagaatctaaaataaaataaaacaatcagttgccaatatacaaattgaagttgaattcaactcatgctgcactcttttccctgttgcaatcattattactgattaaaatctgtccttaccactttaac

SEQ ID NO: 158655 - DNA, 692 bp, Homo sapiens
cctaactggtctttctacttccatctccatcccccctacccaaacctttctctattcagcagtcagaattgtcactttcaaacacaaattggatcatgtcactttcctgcttaaaatccttcaatggtttcccatcatctttggaatataattcaaactccttaccagggtttaaaggctctgcacaatctcaccatggccagcttctcggacctcacctcaacagactgaagtccagtggcacaatcatagttcactgtaacctcaaactcctaggctcaagtgatcctcctgcctcagcttcctgagtagctaggactataggcatgcaccatcatgcccagctgattttgttttttagtagagatggggtttcaccatatgggtgaggctggtctcgaactcctgatctcaggtgatctgcctgcctcagccacctaaaattctgggattacaggtgtgagccaccacgcctggctggaagtggtttatatcttgattctagttggtatcacatcggtttatacctatgtgaaaattcattaagcttgagctcatcaaataatttgagattcatgcaagttgtaccatacgtatgttatatctcaataaaaaggttttcaaaatgcctagcgagctggtgaaggatactgggttgagaatgtagtatgctgctcaaatagggctgtgat

SEQ ID NO: 158656 - DNA, 717 bp, Homo sapiens
agactgggaatgataactggggatagtgaataggatggcctaggtgtacaatgaggtcagcatttagcacatcaggtggccaggactaggacctaaccaagaagctggaaatagaaggaaactccttcattcattatttgaccttacatttttttattgaataatagtagtagactgatctatagacctaaaccagtggatcaacagacctagactagaccatgcttaacagaatttacagtttggagggaaaatagacatgaaagacttaagtaataagatgagagcagccagagacaatgagtaggtaataggagtgaggcccaccaaagaagtgatcatatatcagctacttgaaaccagtggtaaaagtaaactcagtaccaagctcacttcatccaaagcatggattccttatatgttctctgcttgggataatattaagatcaatctgtatgtaaagcttacacagctaggacaagcaaggattcctaggtcgggggagtgtgttcacatatgatggtgtctgtgcatgtaggttttttttcctaacaagtattaaccatgatcctatagcataagagtgagtgatgatgaggaggatgataatggtaatgatgataacgcagctgtttattgagtgcttattatatactaggtattggtttaaatattttacatttattagattacttactccccacagtaattttataa

SEQ ID NO: 158657 - DNA, 427 bp, Homo sapiens
gcagggatggagggcagggggtgggcattattgaaaatattggcctggccaggcgcggtggctcacgcctgtaatcccagcactttgggaggccgaggctggtggatcacctgaggttgggagttccaaaccagcctgaccaacgtggtgaagccctgtctctactaaaaatacaaaaaattagccaggcgtggtggtgcatgcctgtaatcccagctactcaggaggctgaggcaggagaattgcctgaacctgggaggtggaggttgcggtgagctgagattgagccattgcactccagcctgggcaacaagagtggaaccctgtctcaaaaaaaagaaaagaaaagaaaagaaaatagcgccaagtccattttcaaagtggttgtaccagtgtaccttcccaccaccatgtatgagtgttacag

SEQ ID NO: 158658 - DNA, 541 bp, Homo sapiens
caaatgtaatatccaagttgtgccatgtggcagatcaatgagcactgaaacattcagagttgagtttgcactgcttaaacaaaaataaaaataagaaagcaggcaagcaaagacataaataaacaacaaaatgtttgcgtggaaagcaatgttggtttagtaaggatagccaagacagattcactcagattaaatcaattggcaaataaatgcctttctttctgttttccccccgaactaaggacattttttatgagcagcacaaactagcatgcaaatatgcttctgatttttcactttcataatttaaagatagccaaacagatttctgtaggatgtatttttcgcccttaattgctccaatatggaagatgctctgttgggagatcaaaatggcagatgtcttttaatgccctgccattttcacttgtgtaaataatcatgtttcttttctgcctaaaattcattgctgcagtttgtctcacacagaacagagtttatctttgaacccgctctctcctcaatccaacaacaacaaaaa

SEQ ID NO: 158659 - DNA, 212 bp, Homo sapiens
caactttaaatactcaacacctgtgggtagactatcttgttagcatgaaatgtaaaattatattttgaagaattacaatttttgagctcttaggagaggaaatgctcaacataggtgtgtagactatctcattagcatgaaatgtaaaatgatattttgaagaattatgatttttgagctcttaggagagaaaaatattttgaacctggccc

SEQ ID NO: 158660 - DNA, 455 bp, Homo sapiens
agggctcctgctaagccggtccaggcagtgctgggtaatcattacccagtgggaaggcggccccttcccctctgggcttgcctttgtcagcgccccccaacccggcagagaaaggcccggtctcctaggaaacgcagtcaccgccaaagggcagaggcctcgctgcccagcctggaatcgctggtgactcactctccctccttcccaggaaccacgtcctaagtcccactggtgaatggtccctctccacatggagttgccactgcgcgcggtgaggggctgctgagctggctggaagaccgcacctcctcggcgctgggtggacccggctgccacccgctctgcctcccccgacctcttctaagctgctcccggtaaggattccgcgacccccggagaacaggacggaagcctcgattctctcaagtcttagccaagttccctcttaagaggcc

SEQ ID NO: 158661 - DNA, 153 bp, Homo sapiens
atgctggatggttggagtgggctcaaggcaagggtccttctaagtggaagagggaggcagaagagagagagccagagagatgggcaacgtgagaagaactctgcccaatgttgctagctttgaagatgaagaagccatgggccaaagagtgta

SEQ ID NO: 158662 - DNA, 377 bp, Homo sapiens
atagaatcgccgcctactgtgtacttagtgttattgtctaaagacaagaaaaatgtccaagacttgcgttacaggggctcttggcaggaatcaatagaccctaagggggctctaaatgggctttagaggacaagtgaaagcctaaaatgacattaaaattgtatatatgtgcatttttctgacaggattcatagctttcatctcaaagatccaaaaaacctaaatcatcactttccctgctgatcatatgacaactatgcatgtatatacatacaagcacaaatgcatagatgggtagggagaagattctgccagattttacaaaagctcagatagatactagtaataagcctaaacaccaatttttagaaagctaa

SEQ ID NO: 158663 - DNA, 428 bp, Homo sapiens
tcaggtaaactaggggagatactgaccgagttaagccaatcagactacctcttcaggaaatctgtagaaagaaaaaatcagtcacacagaagtgagcatcagagattcaaaatcatattttaggaccggtagacattttctgtcatgttcttactgataaaaaaaaaaactaataaaagccagaatggagtaggcacagaaaaacagaggtgagaaatcatgaaggaaaatagtttctgtgatgcccaactatgtcttgtgattggatccgagagtctccagtaccattagtatgagtcccaccccctctttttacttgaatttatctgattgagtttccattccctaaatacctagccaatcctggagagggccctgaaatgctactaaaggaagtaatgcctgagttgagttttctcaaagcaaga

SEQ ID NO: 158664 - DNA, 577 bp, Homo sapiens
tatggcaactaacatttattaagcccttccagcctgagatgctgatctaaatattaattcatacaatgctcataaaaactctacttattccattatttatgtgaggcaactgaggcatagagaggttcagtagcttgtccaaggtataagcaggtataatatatggtagcgctgggatcggaaaccaggctgcatgactccagagcccatggtcaaatttagatacatccagaattccaaaaataaagagaaaattctaaaaaatttcaaaacaagaagaacagaaagaacttaaaacaagacaaaaatcagactgccatacttattagcaaacttggatgacagacgatattgaggtaatgacttcatttaaagtcctgaagaaaaatgattttgcaactagaattctatacacccaaactactgaattatgatggaaaaatacttttcacaaagacacaaatttaactacatttgttcttcatgtgaaaaagttacacaatgaggcaatacaaaaaaaaaggaaacaagaaagataataactaacaggaaagaagcagtggtagctgaccatgac

SEQ ID NO: 158665 - DNA, 113 bp, Homo sapiens
gattttgagaatagcacccataaatatgcttccaatgcttgtcacttgatccctttttggcaattaacttgcctttaattgatttgtggattacccactggaagttgctatgg

SEQ ID NO: 158666 - DNA, 268 bp, Homo sapiens
acttcatctggggggcacacaacaacaaaggtaacaaagttcaattattctattgaaggccttgaagggtcatgctgagaagttttcaaatttgaccccattagtagcattttcagaatgtgtcatgttaaagagtaatttctgaaagaagttttgggtaaaaaggtttggggtgtgtgttatagctattttttctcttttgaaaaaataattcacagaacacattttatgaaatccttcaggaaagaaacctatttagctttgttta

SEQ ID NO: 158667 - DNA, 144 bp, Homo sapiens
ataaatgctgataggtgacaaacacatttctccttcctgctccagagccggggagtaagaaagagccactctgagaggcgccaacttagtctccaagggtggaggttgaagtccttccaagaaaggggggactcttcactttag

SEQ ID NO: 158668 - DNA, 304 bp, Homo sapiens
gaaccagattcccattgaccacctcctctctctagtttattttaatctgtttccagtcagactgaggatgaatttcacagataaaagatgacacattattggagtttagaaatggtggtattagttttgcaggctctcaccctgagagatttatattaattccagaattggccggaaaactttagtttagcatgggaagaagagtgagatgtgagtcacaaccacaaaatgctttatttcatgtgaaactggtgtaagtgagaactttaaatggtattgacaggagtgtgaattttcttttttg

SEQ ID NO: 158669 - DNA, 626 bp, Homo sapiens
ccccatcagcctagtccctaggactctgcactcttagcctctaggtctaagcctccatcctatcgctctgctgtctcaacatgacccttagctgtcctaaaccctcaaaggctgctgagggcaggtcagggacaccaggctgtgaacccagagtccccagggtatgggtcaaaggttgattcttctcaaggcccagctggacatccagctgaaggtgcccaaggctggcggagtttgtattcatgggctctcccccaggtcacccatttaaagatggaagtagctgcgttggcgcaggaggaggagtctggggacactcttaatagggcaattcatctcagctctctgctcctgattccagtccacagccagctccccacccttgaagcctagatgcaggaacagttttcaacagtggcctaagagtgggagcacactctggaaagcagggttgagcatggagggactcaatggggttctgtgcccggggtccctgctctccctgtgcctcagacctgtggctccctagtctttctgccctgtttacctgtcctccccatccctatggggtttgaatcccggatcagcactcagtggctgagtgacctcagcaggtgacttctctc

SEQ ID NO: 158670 - DNA, 488 bp, Homo sapiens
ggtgggaaaagctcagctaaggaggccacgcagacagggcaagagcaagacgactaagggagaaggctgtggggtgttcctgcaacctttgatgccttccaagtcttaacctggaagggaaaatgaagggcctggccactgggctataacgagctccaaactgggcccacatccaagtcggaagtcctttaatgtgtgcttgggctggaggtggggcaggtgaatgaggaggaagagtcagcatagcaggccctgccctgggttgcaggtaccttggggggatgaggcggtagagcacagcttctgaccacagtgcctccaccacagaaagcctgtgccacacaggtcctcccctggcccctggggaatatgcttcagaagcagtgacagcagcaggctcagcgtttccattcaagaggtctgctgaaaatgaccctgtttcaggaccaaagtgatgaggagggaggacctctcttgccttatctgcg

SEQ ID NO: 158671 - DNA, 273 bp, Homo sapiens
caattcttataaaaatcgcaatcatcaaaggcttaataacttttctgaggctacgtgcatttttaaaaattagtcattgaagccttgggcctatgaaattaataaatacttaatggagaaatttcaggctttagagagcagtgaaagatgcttatttttggtgtcaggaggttcagggttccagaaatcctggtagtcacctcattgtaagcaatattcaccctaataatttaattttttcttgagtaacatagcaaaaaaccttgtctctgg

SEQ ID NO: 158672 - DNA, 504 bp, Homo sapiens
tgatctacagttggttggattcgtggatgtgcagcccacggatatggtgggaagactgtatatggccaaagaaaattctacgaacagtaataatacacttcctttcttctgtctcctctttatcagccatttttttgtttgatttcaccatcctaggaggtagacagggcagaaaccaaagagtgtcaggagtcacatagcaagtcagtggcagagttgggcggatccagtgctattagtacagtcatacataactagatgcatacccataattagatttttttaaataactactttcccaatacatgcaaaggctcaggaaagcaagggctggttttccattctctagtaactcttaagacctttttaagtgggaaatttttgtaccattggtttggacatgggatacatttattaggatgaaaccattaaagtttctgagaactagaaattattcagaaaccaccaatctgaaggccactctgaaaaaagtcaaggaaggat

SEQ ID NO: 158673 - DNA, 177 bp, Homo sapiens
aaaaatccacagttttttaacaacataaatgaaaatacaccttagttctccccctcactgacatctgaatcaaacactgtgtcaaagcactaatgtcttcctaccatttcaaccaatagtccctgacctatactgcacatgacactggtaaccactccctctctgggatctgccttc

SEQ ID NO: 158674 - DNA, 400 bp, Homo sapiens
aactacttcagtaattactttgaggtatgaagagcataatattctagaagagttatatgagaactcaatctgtggatacttgttgcataagtaataacatttgtggctatgacgttctatagcaaaaatatatttcaacttgcaatggtaggctggagctagctggctgagcagatagttaaatatagaagacttctgtgagccagttattaaactactgatggctcaaaaggggctatggtaggtattttcacaccaaagaaattggcaaacatacaaaccagggtttttttccttctctgttactttttggccaggccagtttatcagcgtaccactgacttcagtcagtacataattattatgtataaaatgcagctatacagaacagactattcac

SEQ ID NO: 158675 - DNA, 281 bp, Homo sapiens
agctgtcagtagatctaccattctggggtctgaaggatggtggccctattctcacaggtccatgaggcagtgccccagtagggactctgtgtgtgggctccaactccacatttcctttatccagttcagcactgatgagtgtctaccttgattccacatctttgctattgtgctttaataaacatatgcattaatgtgtctttctggcagaacagttatattcttttttcttttttttttttttttgagacagagtctcgctctgtcgcccatgctggagt

SEQ ID NO: 158676 - DNA, 358 bp, Homo sapiens
cactctgtggttgcatttgctggtcttcttctcttccttaacttctttttgttgctgttagaacaactcagcaaaataaaatttgggtttattgttgcacaatattgtttcacacatacatcaaataggcctaaataaataagcagccatttcatagacaaaaaaggcaaataaatgaaacattttatctttggcctttttaaccatctcacacaaaccaactacttatggtacaactaactacatacactaaagaagctactggaatgctcagaacgagactttttgttgttgttgttgtttttgagatgtagtctcgctctgttgcccaggctggagtgcagtggcacaatcttgg

SEQ ID NO: 158677 - DNA, 221 bp, Homo sapiens
tgccttccctgtctctggatggacccctctttcccattgactcccgtttcactgctctgctactgcttttccttcctccatagccattccccatcattgcttggtggcctcaaggaaagtctggagaacaccagatagaaacaccccaacttctcacctgcaaacctggaaattcatcgtaaccggcatttcatttttctggttaaaatggaacttgtctc

SEQ ID NO: 158678 - DNA, 338 bp, Homo sapiens
gacagatcctaagctctggaaaaggggagaaggagtcaaagaagatctttgaccttgcaattggaaatggcagagttgctaccatgaagataaaaggactgcagatggcacaactgtgtgaagttcaaatcagacacattaacttgagatttcaagttggcatcccagtggaggtgttgagtgggcagctgacagatcattcttgagtactgggagaggttggatagagagggcagtttgggagccattcagggtaaagcattctgatgtcacaagatagccaggacaccagggaactgactatacaggtccaaagacagggtgaagccttgaggttc

SEQ ID NO: 158679 - DNA, 568 bp, Homo sapiens
gggaaacccacatcacatgagccggacaatgcatgtaagaaaaagagcactgcctccctttcatcctctcctcctctggccacagttcaacacagatgcacgtgcccaagatttcagagcagactgccttggaaggcactgatgctactgcttccacggagcaggagctcatcctattttcctgatgaccgtggtctttaacctagcacttctgatatccagatccattatgacctattttccagccagaaattaatttatggattttaattatcttttagatagactgaacacagtttctacacaatgtgcaccgggccttcaaacaaatttcaggaatacatgcactctggtcatgatatctctaagacactgatttttcactgacatatgaagaatttaatttgaccatgatgagtctctttctggcagtagatggagtcagcagtgggttcacctacacatatgatgtggcctgtgaagttgtgaaaaataaactctgaagcgtaccctacagttcgaaaggcaggcggtgccccatcccccaatgtggcctggatctcatata

SEQ ID NO: 158680 - DNA, 544 bp, Homo sapiens
gaggaagcacatgtggaacagggtgattgaatatttggtggtaggataaggagatggtagctgcagatcttggtgaaatacatggatgcttgagagagttgtggatggaaggacagtaccttaatgctttgggttcagcttgccttgcaacttgcaaatagatgataagacagaagtaagtgctgactgaaatagaggactgaaacactgctcaaaagagttacagtagatgctgtctgaatagttggcacagaaacctcattgatactgggcagcttgtgttcagtgataggtgtgtatggggagagggagatttcatattgcagaaggtttatgaacagggtctaggtggtgcaggttctgtttcctgaaaagtagaaaatactggtaaagaaatcaaaaagagaaaatcagagtaaccaaccaaacagagacttgggtttatggattaccattcttgaacgttgagaagactgaatctcataaaggtgacagttattctcaaagtagaagatacgggacagtgactagaaagaggcagaaa

SEQ ID NO: 158681 - DNA, 311 bp, Homo sapiens
caggaattcgagtcttatatcattcttgaaaaaatttaagctttgtctctttggatattgctttccactattctctcttttatctcattctcttatactatgttgaacttgtccattctagggtctgtacgtcttagcctttcttccaaattttccgttttttaagtcttcatattagatgctagtaatttcttcagctcttcttcaggtttattattctcgtcaactgtatctaatccactgtttacctatttattacgtttattttatttcagtgactattttcatttctaggacttccgtttgatttt

SEQ ID NO: 158682 - DNA, 541 bp, Homo sapiens
cttgagctggccccacaccacctgagtcgttggcagttattcttcattattttcatcatataggttgtcatcttattgcatttatttcagcattcctaaatatattattctaccccactccctccttctaccctccagtcaatatttattgagtacctattatcagccagattttctactagatgttgtatataataaaacaaataagaatttcccctgttcacaaaacgtttgtggtatagttttggaagaggacaagtaagaataataacaaacaaacagaaaggacattctcatctcataacaaatcattctgcacacatctagaggagaatttttttccttaaggcagtaatttcctcatttcactcatctgttcaataacttacaatggctccatctcaccaacataataatattcaggttgcccatgatggttctctggatcaatttaacagggccacagttctttctaactttcttctaaatgtgtcacctaattatggctgccagatttaggatcacaaattattttatgtga

SEQ ID NO: 158683 - DNA, 322 bp, Homo sapiens
cattcatgctgtcttgcacatgataagcacccagcaaattttaactttattccacctttcctcctcttctccttgttgtagtggctcattccttcctagagataaagtccaagcttcattgtttgacttagcaccctacctgatctagccctgccagtccaagtgacttgccctctaggtatgcagaaactgctcacggtttcccaaatattccagattgttttgagactttatgcatgagattcctgctgattggtgtaccattttgtttctccataaacacatacttatcggaagcatccttgaatcaagtgtcccatct

SEQ ID NO: 158684 - DNA, 427 bp, Homo sapiens
ctgctgacctatagttccattgtctaaacatgctctgacagcactaatacccttttatactcacactactgccacctccagttactgtcacatgcttcaatatctcttctaacaaattcagattccagacttaatttataattgatcttccccaaacctcaaattgaattgttttacttttgtgagcagccactgactagagatatggctatcagaagaagaagcagattacagctttggcagttataatgaaagtctctaagaacagctttctctgttctcattcacttctctactctcctcccagtctctggtacagctatcagggcttcattcacctttccttactgtaaatatatgctcttggggaaagatccaaaaacaaacacacacatgaacagacaaagggaaagcatctgttaacatt

SEQ ID NO: 158685 - DNA, 554 bp, Homo sapiens
taaacctgctttctttcccacagggtaaaataaagctgctgtcttcatatttccaatgagaagggacatgtgtctccttgcattgaattgtcttagatcatatcatgtagcacaaagtgacccaatataggaagacaggaaaacaaagtgacagttttgtttgctctaatgtaaacgccaacatcaaaacatggggcaaatcctagaggcccactgccagaacacacaaattaaatagcaagagctgatattctgtacttaaaaaaatgtattcaagggatattctgtaatcagcagtgaaaggttaatgaacaaataagcttagctcaggttagacaaactgagtgtaactaccactgtttttaaagccatgagaaagtgaatctggctgatacttgataatacatcacacactgtggtcttacctattgattacaggctgacaatgggtaacctttcatggcaacttcctcttttaccatgaattattgacagtattaatgccaataacacatcatcaaataggaaagaaatttacattcctggatgtacta

SEQ ID NO: 158686 - DNA, 205 bp, Homo sapiens
aagaacaatgcttcaaaatcaaattcccactgttgagagttactggctgataaaaatagcaggatggagggccaggcgcagtggctcatgcctgtaatcccagcagtttgggagactcaggtaggaggattgcttgaggccaggagtttgagaccagcctgggcaacatgatgaaaccctgtctctacaaaaaaaaaaaaaaaaa

SEQ ID NO: 158687 - DNA, 476 bp, Homo sapiens
tccaagaaggtttgcttctcttttctataatatcctcttacaatttttcccaccaccctgactgaactcccacatctctcctctaggggagataaggcagtggctcttgggccatcctatttacacaacaaggtcctttagagagcacaaaagcttcagattcatacggagagaggctacaaagatagccagagccagcctgattaaaagaatagatggacaactacccctttaaaaatatttctcctccttgtcatgagaacttgaaagtccctcaggagaaatttattcctttggttttgcctttgttctttcctgaaatgcaactctccccaggtggggaaagtttcagatacaataagttactcagattctagaatgaaccaaattattattttttcttgtctggctggtttccagttgagcacccttttgatccaggaaggaataattacagctatgacgctgacggatat

SEQ ID NO: 158688 - DNA, 602 bp, Homo sapiens
ttacgcttaattatgggtggagatgtagctagtcttggaatcatgattttggtagttagtcaccatttattgaatgtctgctgtacaaatcttaaattagacatttggagaagggtgaggaaagggagggatagaaaagaaatgaaagatgtcatctctgtccttgtgaaggttagagagaaaaacatattcccccatgatggatataaccaattatgttgaatagtttatggaaagaaatgtactgattaaataattttttaaaaagtgaattcttaaaacttttatgtcacctgtctgctctttcatgatgcagctgatggcgttagggaaagaatgttaactcaagtcacatgacattttgtaggaaatcccctcttttatattcagatgtggttttgaaatgtctaaggattccgagaaatgcttccatgggaggggctccataacaccttcatctctagaggaaatactggcataggatttccagaattttttgctgcaaaaacaaccaaagctagaaacgctcatccctgaaagtctgtgcctgtggctcatttaacaatggggtgcacgtagtcactctgaaacccattcgctca

SEQ ID NO: 158689 - DNA, 261 bp, Homo sapiens
tgctgttttctgaactgaactcttgacttgtagaggattccattcagaaaatctaaagacacattatccattaaaaaaaggctgtattatttgtgatagaaagcctatatcttctctatcattaaatggaaagttaattgtaaggcaattacagcaccttaattaccagacatctgcatctacaaattcatgcacataatttttctgagaatttgaatgcttatattcatttcaggggcagagttatacatatgcctttca

SEQ ID NO: 158690 - DNA, 285 bp, Homo sapiens
tgaaaacaatatcatcatgaccacttaacgtagaagagtgtgcttaaaaaattatacacaagtggcataaaattttcccctttcatcaacctttcctcaagactaagattgaacaaagtaatttagccttcattttttccctgtttattctctggtggagtaaaggggtgagtgccctgggtaggagaatccatgtagaaccagaattagccataagtgagattttgcaccctaaccaacaaaccacagcattctttttttttttttttttttttttttttgagg

SEQ ID NO: 158691 - DNA, 925 bp, Homo sapiens
gaggagcaatggtcacccgggatcgagctgagaatagggacggccccaagggccgccaggtctgagcccggcaccgtgcggcgcacgtgcgtgcgcgcagagagtccccaaagttctccactgagacaaagagaaactgcaccagacggagacgtagagagaaaagaggaggagagacacagagaggggaggagggaggacgagactgagagaggagaatgcgaagatccggggagatgctcaagccgcttgtggagaagcggcgccgggaccgcatcaaccgcagcctggaagagctgaggctgctgctgctggagcggacccgggaccagaacctccggaacccgaagctggagaaagcggagatattggagttcgccgtgggctacttgagggagcgaagccgggtggagcccccggccgccgcggctccagggttccccggtccccagtccaggacgccaaggcgctcgccagctgctacttgtccggtttccgcgagtgcctgcttcgcttggcggccatcgcgcacgacgccagcccgaccgcccgcgcccagctcttctccgcgctgcacggctatctgcgccccaaaccgccccggcccaagccggtagatccgaggcctccagcgccgcgcccatccctggaccccgccgcaccggcccttggccctgcgctgcaccagcgccccccagtgcaccagggccaccctagcccgcgctgcgcatggtccccatccctctgctccccgcgcgccggggattctggcgcgccggcgcccctcaccggactgctgccgccgccaccgccgcctcacagacaagacggggcgcccaaggccccgctgcccccgccgcccgctttctggagaccttggccctgagccttggggggtggtgggggcgggtactcaagagtgggg

SEQ ID NO: 158692 - DNA, 572 bp, Homo sapiens
cagagccaagggaggagggtgggaacgaaaagagaagaggataggcacttgctccactctggctgtgagccgggcggggctggcccaaggcggtcttgtacagaaggtcccggggcgttggttccagaggccccagactggtggaagattttaggagaaccgtggagaaggtgaaggcctggagggttttgagggaaaagaggcggcgcggtcgcgctaggtatctccctttctatactcagggccgccaggtctgagcccggcaccgtgcggcgcacgtgcgtgcgcgcagagagtccccaaagttctccactgagacaaagagaaactgcaccagacggagacgtagagagaaaagaggaggagagacacagagaggggaggagggaggacgagactgagagaggagaatgcgaagatccggggaggcgagctacagaaactgatctaggggcattgggagggggagcggagagggatcgaatggggccggccctaggcaatctggggtcttgtggccggggtggaagccgggctctcccagcggcgggatccgacgccggggcggccgc

SEQ ID NO: 158693 - DNA, 739 bp, Homo sapiens
gaggagcaatggtcacccgggatcgagctgagaatagggacggccccaagatgctcaagccgcttgtggagaagcggcgccgggaccgcatcaaccgcagcctggaagagctgaggctgctgctgctggagcggacccgggaccagaacctccggaacccgaagctggagaaagcggagatattggagttcgccgtgggctacttgagggagcgaagccgggtggagcccccggccgccgcggctccagggttccccggtccccagtccaggacgccaaggcgctcgccagctgctacttgtccggtttccgcgagtgcctgcttcgcttggcggccatcgcgcacgacgccagcccgaccgcccgcgcccagctcttctccgcgctgcacggctatctgcgccccaaaccgccccggcccaagccggtagatccgaggcctccagcgccgcgcccatccctggaccccgccgcaccggcccttggccctgcgctgcaccagcgccccccagtgcaccagggccaccctagcccgcgctgcgcatggtccccatccctctgctccccgcgcgccggggattctggcgcgccggcgcccctcaccggactgctgccgccgccaccgccgcctcacagacaagacggggcgcccaaggccccgctgcccccgccgcccgctttctggagaccttggccctgagccttggggggtggtgggggcgggtactcaagagtgggg

SEQ ID NO: 158694 - DNA, 295 bp, Homo sapiens
cccgccctgggcgtttcagcactctcctgccctcaatctcttgccacatcaccaccctggacatcgccctctcctgatgaagaacctatgatggctcctatactcgtagaagcctggaccttcagcctggcattgaggccttgcacagctggcctgatcctgctttcccaacacaccccactgctctgggctgcaccctggggtgcccagaccaccgcctgtgtccggaaggcctctgcccggactgctccctctgcagggatgccattcctccaccctcactccgtgagcccgt

SEQ ID NO: 158695 - DNA, 612 bp, Homo sapiens
tcaccacccagataatccaccatatccactccatatccacaacgcactctcttgactttcaaaaatcaaacccaccagcagaatttgatgatgatctacttttaacgacatttaaaagaacaaaccacgggccccgaaagtcattttcaagaggcatccatgtttgaatcactcacaataacctgggaatcaggctggggctgatttccagcagaaaagaaaggtctgttttgaagaatactagttcttatttgacccattaacaattcagtctctttgcacatgagtgagaatgcacaacacaacgtaccttgttggtgcacacacatgacaccaagtgtgcctgtcctccatagagcagggaccaccccaaagcaagggtcatgtctcctttctcatgcccaagagattagaaaatgcacaataggctgggcgaggtggctcacgcttgtaatcccagcactttgggagaccaaggtgggcggatcacctgaggtcaggagttcgagaccagcctgaccaacgtggtaaaaccccatttctactaaaaatacaaaattagctgggcatggtggtacatgcctgtaatcccagctactcaggagactgagg

SEQ ID NO: 158696 - DNA, 309 bp, Homo sapiens
ccaggtagacctaacccaggtagactaacccagctagacctaacccaggtgagggaagtgtttacaatagcaacaacaggtaccaagaccggaaggagaagataggatattgggttcaacctggaagagtgggacctcccgctacctgtctgtggtggaggcagccctctttccataagtgtgcagtcatttttgccctcactcacttcactctgtcacctagaatgaagtaacaataacaggccacaaatgtccatccttaagattatgatgtttctggagagtctctatttttcagagttaggttta

SEQ ID NO: 158697 - DNA, 203 bp, Homo sapiens
ttcttggtataatagtttttttccttttaacaatagtctcactgattggtggtgtatatatgtatttttttaagctacttgttatccattcaataatcaggaccacctaataaacttttgatgttttgtgattattagatgctaaattttgggggctatttcttatatcactattctgcctcattgatctatatgtttctctt

SEQ ID NO: 158698 - DNA, 499 bp, Homo sapiens
tacactctcagcactttgggatgccgaggcgggtggatcacaaggtcaggagatcgagaccatcctggctaacacggtgaaaccccgtctctactaaaaatacaaaaaaattagctgggcgtagtggcaggtgcctgtagtcccagctactcaggaggctgaggcaggagaatcgcttgaacccgggaggcagaggttgaagtgagccaagattgcgccactgcactccagcctgggcgacagagtgagactccgtctcaaaaataaaataaaataaagagggggtaaaaaaccataattgtctaagaattgctctgaggattacatcagtgtaaggtaatgaactttactgaaatgtatgcaaaaaatatcactttcattatcattatcatcatcatcatcatcttcacctgatactttaaaaacttcaaatgaaagagggtaagaaagaacccactggatcccctactctgtacctggcattgtgctacaggttgtg

SEQ ID NO: 158699 - DNA, 465 bp, Homo sapiens
agaagcagcatgcatcattccagctcacattcaattgtctagagctcagtcacatagtcacctgtgtggcacgggggtgtaagcatgtagccaaccgtgtatcaaaggggagaagatggttctggtgaacagacccagctggctgcccacacatccccactgaagcactactttgtacaagatcctcctacatggttccatgataggaaatccacttctgctcaacctctcccaaactctcctggtgatagaatgctggcagtgtgactccatctcttgacactgagattgttcaccttgcagctggttctctctggtacaccagccacaaagctcaaacccagtttctctttggtatccctttagccttcaggaaactcaggtcctcacctagccacaaaaagcgagagcaaagcagagaatgaagctttctctctcctccattcctttttatctccacctgca

SEQ ID NO: 158700 - DNA, 333 bp, Homo sapiens
acaatttacacaatttcacagaatccataaacatcgaaggaatctattggtattataactcatcatgcggattaccatgctgcccaggtgggcattgtctttgcctttcctatcatctccttttgacttcatgcttcatgtaaatcttccgggacaaaagtagaaagtagcatgtctctctgtttcggtttccctgcctctctctctttattctgtctttattaaatgcctcattctaattcccaaatcattattttttgacattttcattcctatcatttggttataattttatagcttttaatcctttcattgcacctgtgtaaactaaag

SEQ ID NO: 158701 - DNA, 329 bp, Homo sapiens
gtaccacacttggggttggggaagctgtgtactctggctgttattgtgacagttatttttggtctgggcactgacaaaaccagtacaggccagaggcatatcaatctgctctgcaaggcagagaccccagatttcataaccctgtgttttttggtaacataatgaagttattccttaccttataaattaggatgtcaaatttctcatgttgcattttattttaagaagacctggatgtcttcagagataaacaatttgtctatacccaaaataccatgaacttaaattatgtttgtcttcattcaaggatttttttttttttttcccaa

SEQ ID NO: 158702 - DNA, 776 bp, Homo sapiens
ttgagattacagagcgagagccgacatgcctgaactgaatcgccttttatacatctatcaaataacccgacttagaatttctaaggtcccttttatctgtctgctccagatactcccaaggctgaagcaggagggtggattgagccctgaaggtccagactgcagtgaacgaaccatgatcgtgtactgcactccggtctgggtgacagagtctcaaataaaggggggaagatgaaactaggagagggaaagagagagaagtggggagagggaaagagacaagacccgaagaaaggggacagggaccctgagacaggcaaagggagggagccctggagagtagaggcgggaggttctggagcccacgccatgagggctggaagacacccccacccactgctgcaccgagaccccaggaccgtcctcttctcttcccaggcccctccccacggtctccaacacacaaagcagggtgctgcagctggcctcccagggcctggggggccacagcgacctcaggagcctgctgtgcaccttaacttgctgtctgtccccaatccgcggcattcagtggcacccgcttttctggggaggggatccccaactttttcatattctcagcagtgtccaaaccccctcaaaagttccaaagctgctgactgggagccacgctatgtccagcccccgggaccccagccccattggaaacaggaaaaggagggaaccccaggctctgacggacgagtgaagcctcatggggctcaagggcctggaat

SEQ ID NO: 158703 - DNA, 673 bp, Homo sapiens
gatggacaggagatgagactgagaggtgagactggagtgagagagatgagaaagagaggatcagagagagagagaggcagtcacagagagacaagatccaaaggaaggggacagagactcagaggaagatgaaactaggagagggaaagagagagaagtggggagagggaaagagacaagacccgaagaaaggggacagggaccctgagacaggcaaagggagggagccctggagagtagaggcgggaggttctggagcccacgccatgagggctggaagacacccccacccactgctgcaccgagaccccaggaccgtcctcttctcttcccaggcccctccccacggtctccaacacacaaagcagggtgctgcagctggcctcccagggcctggggggccacagcgacctcaggagcctgctgtgcaccttaacttgctgtctgtccccaatccgcggcattcagtggcacccgcttttctggggaggggatccccaactttttcatattctcagcagtgtccaaaccccctcaaaagttccaaagctgctgactgggagccacgctatgtccagcccccgggaccccagccccattggaaacaggaaaaggagggaaccccaggctctgacggacgagtgaagcctcatggggctcaagggcctggaat

SEQ ID NO: 158704 - DNA, 270 bp, Homo sapiens
ctctcatgtgggtttccagtgaaattgtctttgtaaacatttaaatataggtgtagatcctttttaaaagtcaggagacctttggagagtaccaacagtgaagtatatcacgtgggcaggggtgagtggagaaagattttctttcataagacaagagattatccttaaaggagtctggcggagcactgaggacattgcttaggacagactcccagggtctttccgtggtttcccattaattatttttccctctcaatgctatcatatttt

SEQ ID NO: 158705 - DNA, 214 bp, Homo sapiens
acctttgcctttcagacatagtctttgatgatgtacttttagtacttcataggtgtttttgaacttttttctttatagttctttccccaccccctccaaccttatggattacatgtgcttactttttggtaattaaaactgttacgttggacgtgatgcctcacgcctgtaatcccagcaccgttgggaggccaaggtgggaggatctctagag

SEQ ID NO: 158706 - DNA, 186 bp, Homo sapiens
tacccttcgtgcttgacatacagtaaagactccataaataattgtttgataactactgaatgagtaaccagccatcttcactcattgatctgctgggagcaacagaagcaggcaagagtagcaccacatgacacaggaataagaggcacggtttccaagagcaggccggacgcagtgactcacgcc

SEQ ID NO: 158707 - DNA, 412 bp, Homo sapiens
atcagtggtttcccaacgattattccggtaaggtttagagagaacagggggtcttatgctccaccaatggccaggcatggtggcttatgcctgcaatcccagctctttgggaggccgaggcgggcagatcacctgaggtcaggagaccagcctggccaacatagcaaaaccctatctctactaaaaatacaaaaaattagccaggcgtgatggtgggggcctgtaatccgagctactcaggaggctgaggtgggagaatcacttgaacctgggagacagaggttgcagtgagccgaaatcgtgccactgcaatccagcctgggcaacagaataagactccatctcagaaaaaaacaaaacaaaacaaatgaaacaaaataaaaaccacccaatgagctgatatctaaggtct

SEQ ID NO: 158708 - DNA, 244 bp, Homo sapiens
ctccattttctgtaggtcacctcctgccacctcttctccagggtgatgctgtttgcaacacacagttccttgtcttggtttcctaagcatcttatttctgaaggtgagatattggctgtaacaattaaactattattacaagcttggggataacactaggtccttaagaaaagaataaaatcaaacctgagcttcagataaggatcacaggattaatgcctgccttgtaccggacaatagggat

SEQ ID NO: 158709 - DNA, 242 bp, Homo sapiens
catacaactgtggagatgaaacataaatacgtttataaaaagtacaagctttctcaggcaggggatttatcgtctatctcctttatgtaccccatgatgcttatttaacatggtgctaaatgtggtgagcgctctctgggtgttttgtgaattcatgtaagattaaaacataatattttggaagttatgcaaccctttagacgagtacacccatacaaattagtctataaaaagatttagga

SEQ ID NO: 158710 - DNA, 206 bp, Homo sapiens
ttctgatccatgatttacgaggttgctgagatcattccaggcctgcggggtgcggccggggggcggctcggtcctcctcttcccctcctgctctcgctgacactcagtgaagctctttcctctcttttcctactccgaatcccccaaccccacccctggctcaaattcctcattcttctgtagcaaccgtctccacctccgagcca

SEQ ID NO: 158711 - DNA, 452 bp, Homo sapiens
tactccacaaacacagtgtattacacaatcaggttttttcaataagggtttggttgggaaaaaaaattaacgtaaatgatccttcgaagctcaagcccatgttgttcagggtcagccgcacttactacttgtgtcataatctgaggcctgacagccatcgttcttgataaagggatggttaacaaactaactgttctgattagaaagcggaggaaaaagcttatttttaagccgacaaagagtggacactgctatggtgaatggaaaacagacgtaaataagcaccaaggctggggtgactgcctgtgctcagacccactaaggcctgttcctccgcctccctctgctcaaatggataactccttccccacggctaaaggaccttttttaaagattcacgcgagaagtgctatgaaaagctgaaaggtcacagataacgttttaaaaaataa

SEQ ID NO: 158712 - DNA, 594 bp, Homo sapiens
cagtgctatccataacaacgtaatgcaagccacttaggaaaatttaaaatgtagtagtagatgaaattaattaataatatatcctgatatatctacaatgtagtttcaataattgataataaaaattattaataagattttatctttcgtactaagtctttgaaatctggtatgtatattacagatagtacatttcaatttggactagctgcatttcaagtctttgatacccacatatggccagtcactgccctattggacaaaacaggtccaaagagtagacagaaaggttttggtatttccccccttttcaagcccatcagtggcttgttaagatatgattaagatctcaaatcccaaaagcaaaacatgttctgcttccccctaatctcaaattgctcttggccttatgcattttttgccacattgactttctttcattcctggaatgtttctaagatttttccaagggttttacgtgcagaccctttacctggtttgctgttaatatcctttagaatttggctgaaaatcactaaagataagtctctcctgatcttaacccctgcattaaatctgtataattttgatata

SEQ ID NO: 158713 - DNA, 230 bp, Homo sapiens
ctcttcttcaatctggaatttagatcaatctggcaaacactgactgtttccctcttgcttgtcagtcacctttcgttaaaagagggggcaggaaaaaccacttttcaacaaaagacttttagatttaaaacctttattttcctccacttttaactaaaattttaagatattctgctggtcaacataaaacccaaaaatagatgaactgcaaaattcaagaattatgtatt

SEQ ID NO: 158714 - DNA, 120 bp, Homo sapiens
ctgctaggtgctttacaattctcatcaaatgtttacaaaagtcccatgaagtaaatacgattattagcctccttttacatatgaggaaaactgaaaacacagagactccccgggatacag

SEQ ID NO: 158715 - DNA, 650 bp, Homo sapiens
  misc_feature (628)..(628): n is a, c, g, or t
  misc_feature (634)..(634): n is a, c, g, or t
tttacatacaaagtcccatgataagtcatttgggatcccccagaggaggaaggctgcttgcggttagactgggtgagtcaacgaaacaaacaaatgggcccgatgaggtcagctttttggaaaaggaacaaagaaaactgcacccaaatgagaggcagcttacaatggtgaagcagtggtcacagaaaatccatttccaaagcctctaatccagcagtttgggggatgattttgtcacccaggggacatttggcaatatctaaagacatttttggggccgggtgtggtggctcatgcctgtaatcccagcactttgggaggccgaggcgggcagatcacttgaggtcaggagttcgagaccagcctggccaacatgacaagaccctatctccactaaaaatgcaaaacttaactgggcatggtggcacacacctgtaatcccaactacttgggaggctgaagcaggagaatcacttgagactgggaggtggaggttgcagtgagccaagatcgcatcactgcactccagcctgggtgacagagcaagactctgtctcaaaaaaaaaaagaaaagaacatgtattccatattcaaatgcagaatccactgaagatgagtctcctgcggnaccaanccattccacatcaggg

SEQ ID NO: 158716 - DNA, 591 bp, Homo sapiens
aaaagatgtcaagaaagctctcactggagaaaaccagtctgattgtctccagctctgacacagctgccaggaaggatagtggctggctggtggacatccaggccaaagacccagagaaccacaggttgaatcccaaatcctcagaagtgtactctaaagacagtaaacaggccaccttcacctcaggggcatcaggatctcaaaatcgagggggaggtcaggcccagctaaactgtcatagtagggtctgagtgtagtcatctccacagaagcagaaagggacagacagatgccctgctctggccctcaagctgcagcagcaccatacagcaaccccaccagcacaagcagagcacaaccaaggctggagtgcagtggcgcaatcatggatcatggtagcctcgaactcccagactcaagtgatccttccacctcagcctccccagtaactgagactataagcgcgtgacaccatgcccagctaaaaccacaactggagctgagttaagcattgtcctcctctgcattctctcttggaataacccctcccatccatgaaaggaataaaacacttgtcatgagcactgaatt

SEQ ID NO: 158717 - DNA, 553 bp, Homo sapiens
aataatggaacatggatattaaactaagccacatgctatagaaggattacattttgactcttttcaactgtatcattttggtaaatattagaatcaagtttgttcaaataataatacattctcgagtttcatctatcactatgtctcaggtcttttcttgtcattcttgtgtctggccagtctttcacgatgaatgtcataaatattactcagttctacataccaggcactgaataaagaaaagttattagtatgaggagcttacattttagcagaatagagagcaaaaacggaaatagagaattgcagcatagagggtttccatgtatttacagtgctgttagtgcaattaatagagatatcaagcaatgttatttggagtacagggaggagcatttggtctggcatagtgaggaaggtcaggaataacatttaacacagttgtttgctgaatttgaatctgaaaggaagcagtcactgccttagagattataggtctagttgggttgatagacatataggaattaaatagtaacagaatgattttcatgtt

SEQ ID NO: 158718 - DNA, 653 bp, Homo sapiens
  misc_feature (634)..(634): n is a, c, g, or t
  misc_feature (653)..(653): n is a, c, g, or t
ttggaaagataaaggtttttcccctaagatcagaaacaagacaaggatgtccactcttgacactctgctcaacatagtaccaaaagtccttttcattccttttaggcaataaaaaggaataaaaggcatccaaattcaaaaaaaccctaggggatctaccataaaactgttagaagtaataaatgttatttatttgcaactcagtgtgctcccacctgtaattcccgcactttgggaatacaggtgtgagccaccatacccagcctaaagttaagttattattaacttaaaatagactgttataactatgagatgttttaaatatgtaagccttatggtaaccacagagaaaaactctctagtagatacactgaagacaaagagaaagacatcaaatcataccaccataaaaaaatcaaatcaaaaagagagagcgagagagaaagaagagaaggaggcttgcaaaggactacagaaagaatgctgggagagggtaataggcccagagtagaggagcttatggagagaatgaagtggtcattcgtgtcctgggcagccaacagttgaagcagatgaggggaaaaaagtctggtgggtttgacaattttcatgggctggggcaggtgaatcatangccaccaggcttggacacn

SEQ ID NO: 158719 - DNA, 210 bp, Homo sapiens
gggaaattcagagaagtagctcctcaacagtgtcacccgtcagtagaatacttccttccagaatcagtgtcaggaaatgtccaggaagccaggaactgagcctacacatcccgatgtcccaagtgcatgcgcatgtgtggctagccaatcccttgccttcctgcctctgggaagattattaggtcttccatttgttttcaagtaagaagc

SEQ ID NO: 158720 - DNA, 433 bp, Homo sapiens
agggtttcaccatgttggccaggctggtctcaaactcctgacctgcccgccttggcctcccaaagtgctgggattacaggcatgagccactgcacctggctgatttttttttttttatccctactctgtatcaagcgttggagacacaaccatatagtctagctgtgcaaacagacattaaacaaatgattcctcaaaaggcacaaagtgtttgaacgtctgcagagtgctgtgtgagggtgaaggcaggggagcttggtttggtctggggcatagccaggcttctctgagggagggatggtggaggtgaagcctgagaatgagcaagttgttaaaaagcttaaggggctgagggcagaggaccagctgcggagaaaagcacatgtaaagtcctgagggtcacagggaaaacttgagagttgtgtgtggctgg

SEQ ID NO: 158721 - DNA, 789 bp, Homo sapiens
caagactttgcaaacctccaccagactgaaccctgttctgtactggcatcttcacccaggcaggcagtaggcactggaagctggatctctggctcattagggcctggagggtactatggcagaaccctcatctcaaatatgggaatcccttgtctcagaaattaactttgtaaaactttgtatttagggcatctctaaattggcctatccatcattctttgccccccttgctcaggtaatttgaggataatatatgacctcattctcgtcattacccactgtcatacaagctgtaatgtcagtcctgcactgtgcctcatccaacaccgtccatcttccccctatctgtgcagccctccttctctcctggctgcttaagagaagagaagctgcctgcagatcccaagccatttctcatcaccttcctcccttctggcaggagcctgtgtttggcagaccaccacatcagggctgcagcccaggcctctgccagttgagcacccagggctacatagcagcactagggggaggcccagtgagactctaggtcccagcaaatgggcagtcgggtgcagttgcagaccttctggaggacttcagagccaagagtgcaactgcattcaaggcagtgccttagtatttgcaaagctcaatacatttaaatgataatacctggctcagtgacacatacacatcctcccaactactcagcaggctgaagtgggaggattgcttgagcccaagagtccaacctaggtaacacagcagtgaaaccctgtctcaaaaaaa

SEQ ID NO: 158722 - DNA, 110 bp, Homo sapiens
ttcttagtgtctgatgatcctgggctatcattcatatttataaatgaaggtctaagttgatgagtacacagggctctgtttcctccatctggtctctttcctagagagaa

SEQ ID NO: 158723 - DNA, 379 bp, Homo sapiens
atctataaataaagcacaaacaaatgctatctattctcagtatgcacaagaaaacagccccatacttctgacagatatcttttttcctaacacaattaactttggccatttctacctgactcactttactcatgctgtaatatttatattggctttgtctctttaacataaaccatatgttatcaagagtgagatagcatctagtataacacttaaaaccttggggatgaagctgaagataaggaaaagagtaatagctagagttcactttagtcaagtctctttattaagcactattgcatgtaaagtaactacatcctaatatcctctaaaagagctaagtagtaaattgtagttcctgcccacctagacgcctgta

SEQ ID NO: 158724 - DNA, 176 bp, Homo sapiens
gaggacctggaatccctctctgtgtctccttttattgctgagggtgggagactgggggaaagggacagggcggcacgtcgtgcggtggcggcagagccgggaggaaggcaggaggctgccttgcggctggcagaaggcctgagcggggacggaggcggccggggccctgcaggctg

SEQ ID NO: 158725 - DNA, 492 bp, Homo sapiens
catgtggcatccacgcagctgcagctgcctgggatcacggcacacgcgactctcatgtgtcgttgctgaggagcaattccctattacctctgtcttctcctcaacttctgactctgctgttgccttcttgcggcatctacatcatttcctccagcagaactcacttgccccaggcagcgactccaggcgcctgtctcaggctgcaggcacggggacccgtggctgccacacacagcttgagggcaggaggcccctgccccgaccgtctacagtggcacatccagctgcagcagtgagaagcctgtgaggccgcagctcacccctgtgctggtaccgccacacgcgctcacgtacacacgtgctcatgtacacacatgcatgttacaggcctgcgtgggtggactcaggtgtgtgggcgtccatcctgaatcgggacagaaaagtcatttgtagaccatgcatgacctcaaaatctttccaaattaaatcttc

SEQ ID NO: 158726 - DNA, 159 bp, Homo sapiens
gcccaagaaaccaatattactactcacatatgtgagtagtgatatacgacaaaatcaaaaaatttatgtgaacactttttagcttagaatgtgccatttttcttcaaaaggattgtctagcagcagcccagaataaacctgagtaacactaatttctgc

SEQ ID NO: 158727 - DNA, 405 bp, Homo sapiens
cggatcacttgagtccaggagttggagaccagcctgggcaacatggcaaaaccctgtctccacaaaaaatacaaaaagtagccgggtgtggtggcacacacctgtagtcccagctactctagagactgaagtgggaggatcacctgagccctggaggttgaggctacagtgagcgtgactgtgccactgcactctagcctgggcgacagagtgagatcctgttaccaaaaaaaaaaaagtaattagagattatttggatatggaagagatagctttttctatgctctatctgaattttaaggagtatctcctagaaacagaattagtttcacctaagaataaactacaaatatagagtaaatattaatataaataagacacattgaagtgggggctatagttagt

SEQ ID NO: 158728 - DNA, 260 bp, Homo sapiens
gttctggacagactgaatattcttataagaataagttaacattatttattgactactcattgtgctgaatgaacaccatttgccattactcttgagagaaaatcaatgacataaacttgtcaatacattttaatccttttgcagccctcattaaactatgatgggagattgtagcagttccccatttcttgatggatcagaattgtcttgtatatttacttaaaccaggtatttgtagacaaggcctccagaaacctatg

SEQ ID NO: 158729 - DNA, 153 bp, Homo sapiens
agttgcttagcaataccaggaaattaatttccgagtcctaacgttgaaattaatacccatttcttctctttctaactacagtggccttggagaatggtgtattgtattgtgccagtgttccctcaaatctgtgtggttttatttggttgttat

SEQ ID NO: 158730 - DNA, 111 bp, Homo sapiens
cgagagcagcctaagcaacatggtgagactccatctctacaaaaaatacaaacattagcagggagtggtggcacagccctgtagtccctgctactcaggagggtgaggtgg

SEQ ID NO: 158731 - DNA, 290 bp, Homo sapiens
actgacctcgggtgcagctggcctcccaggccaagcgcccggccctgcccaggcggcccagggcagcttctccaaatcctgggagaggacgggtcccggaaattagtcatgaccctgggccttccttccaagatcactcaaagataagactctgagtgtctatttggggcttcctgtgcaaatggaggtggacctcactcacaggagagaggagagattctctcagcaccagtggtccctgcctagtaacccacacgctacattccgtgggccccagcatcgacgacata

SEQ ID NO: 158732 - DNA, 182 bp, Homo sapiens
atttaatggtgtaggcttctgccaagggggtactagaggttactccagtgcacaataaaataaagggaatatcttttgagtcttcagtttttagccactttcaactcattgggttttctcagccttaaactaaggtcattagctttcacaagttctccctacaaacaaaacaaatgctgggt

SEQ ID NO: 158733 - DNA, 458 bp, Homo sapiens
gcgattctcctgcctcagcctcctgaatagctgggattacaggcacgcgccaccatgcccggctaatttttggattcttagtagagacggggtttcaccatgttggccaggctggtctcgaactcttgacctcgtgatccatccgcctcgggcctcccagagtgctgtgattacagtcgtgagccaccacacccggcctgtctttaagttttatactagttaggaggctagtctatcagaatgtccctaatttagctgaggaacctagacaagtcttccttgatttcagcttcatcccaaggcctctgaatattttctttaaaaagctgcaggcgaatgaggtaaaatggacagagacatgagatagaaatcaacagaagggcaaagagtacggctcccacagcactaataggcagtaggccttccaagaccgaaaaggcaaaaagcagtgtgaccac

SEQ ID NO: 158734 - DNA, 562 bp, Homo sapiens
cgggcgatctagaggatccctcgctatcatcggcacagcatcatcacaattaattgccataaacagcagcacagcaggatctaccactctgttcctcttcaccctgcatcacacacctagtttctattccacagcctcacatgtaacgtggtgggaccatgtaactgggttctatagctaacagaaatgtgaactcaagtgacatgagaccatttcaggctgggcttataaaaaacttcatgacagtccatgttctctcctcttccaccagctcatcacaagtgtgcatagtggcatggaaaccacatgctgcagatggcagagccacaaaatgcagagcctagagccctgaatcaccacttagaagagagtcacctgctaattagaaacacctctttgggaaatttggtgaagaaagtatagatttctcacagattaagtcacagaggttctggagtttctctgttatggcagctaacattacctttctccattcttaaacattgggtatgttcccactatctacagaatgaaacctgacctccctagcatggcattcaag

SEQ ID NO: 158735 - DNA, 305 bp, Homo sapiens
tacaaagaaaatgtgcactttgtggatacaatgacagcaaatcgttttccctttttgtccctcttcttcgtccctgttcatagacaaatgatggagagaaataagcatgattctgtgcagacaagacgaaaataagtttaacaacaaaaggaacatcttttagggaagctttcgagctgatgcagccccgtcggggtggggagcaacttcccccgaggcacagcctgctggggtctgcctggcccctgagtccacgaagtccctggatgacagaggcttgggtcgtggagcatctgccctgatgt

SEQ ID NO: 158736 - DNA, 334 bp, Homo sapiens
ctaaaatttttgattacattgaatattagccaactgctaaatctcaaaaaaaataaagaaaaaaaaacaagtaggactcagctatatgtttaaactgggaaaagatgtgttagcccagtggtttttaacaaggagtgattatgacaatgatccataatccttttaaaaatacagaggactgcatggaccttataaaatttaaatactgttattctgatgtgaaccgacagttaacaatcactgttctaggcagagataatggcaaatgctaaaatagagagtttgaaataaatgaatgaagaaggggaatatgaatatataaaaatattcagaa

SEQ ID NO: 158737 - DNA, 212 bp, Homo sapiens
cctaatatgggaaatcgggcagaaggattcactgtccgtgactggatattttggcagagtccttttctcaagcttggcttccctatcatcaagggaggcaggttctttgagcagattcagacctggggaatgggtcagaggtcaggaacctccattgtgccagctatggtggtagttcaggtctacacgtctaggggaccacgatgggctcc

SEQ ID NO: 158738 - DNA, 499 bp, Homo sapiens
aaagaaagcagctaataaccatctcactaccataaaagcagaaatatacaatgtcacgctatcctggataatgaggagtcatagaaatcccctacatacccttcactgcttttgtgtttttctgaagttaatgcaaacagagaagcaaaacaacattaccagcagtttcagaggatgtgggattcacttcttgatcatttctaaataattttccacctcctccatgcctctatgattgcaactgaaactaaattgcaacaataattagagacaatcaagtagtgtggcaacggagcaaatggacaggttcaggcaaagttcttttctttagaagcccactctgaagactttcatcttggagaggagagcaggaaaggtgtggaacaataacaggaaagcagactcgaccagactcgacacggctctcaagttgaagtcttccaccggtccagcacaatacacagagatgtttcatccctttcatctctcctgttccaaa

SEQ ID NO: 158739 - DNA, 3527 bp, Homo sapiens
gggggatttggggctgggtcggccggggtcggggaggggggtggtgaaaaggtgacagggagctgccctcgctcaagagccggtggttgggggtctgagaagaagtcaccaatatgaagttattcggcttcgggagccgcaggggccagacggcccagggctccatagaccacgtctacacgggttccggataccgaatccgggactccgaactgcagaagatccacagggcagctgtcaaaggcgacgccgcggaggtggagcgctgcttggcgcgcaggagcggagacctggacgccctggacaagcagcacagaactgctctacacttggcctgtgccagtggccatgtgcaagtggtcactctcctggttaacagaaaatgccagattgatgtctgtgacaaagaaaacagaacgcctttgatacaggctgtccattgccaggaagaggcttgtgccgttattctgctggaacatggcgccaatccaaactttaaggatatctacggcaacactgctctccattatgccgtgtatagtgagagcacctcactggcagaaaaactgctttcccatggtgcacatattgaagcactggacaaggacaataataccccacttttatttgctataatttgcaagaaagagaaaatggtggaatttttattgaaaaagaaagcaagttcacatgccgttgataggctgagacggtcagctctcatgcttgctgtatactatgactcaccaggtattgtcaatatccttcttaagcaaaatattgatgtcttcgctcaagacatgtgtggacgagatgcagaagattatgctatttctcatcatttgacaaaaattcaacaacaaattttggaacataaaaagaagatacttaaaaaggagaaatcagatgttggaagttctgatgaatctgcagtcagcattttccatgaactgcgtgtggattcattgcctgcatcggatgacaaagacttgaatgttgctactaagcagtgtgtccccgagaaagtgtcagagcctttacctggatcttcgcatgaaaaaggaaacagaatagtcaatggacaaggagaagggcctcctgcaaaacatccttccttgaagcctagcactgaagtggaagatcctgctgtgaaaggagcagtacaaagaaagaatgtacagacattgagagcagaacaagccttaccagtggcttcagaggaagagcaagaaaggcatgaaagaagtgaaaagaagcaaccacaggtcaaagaaggaaataatacaaacaaaagtgaaaaaatacaactttcagaaaatatatgtgatagtacatcttctgctgctgctggcagattaacccaacaaagaaagattgggaaaacgtatcctcagcaatttcccaagaagctgaaggaagagcatgatagatgcaccttaaaacaagaaaatgaagaaaaaacaaatgttaatatgctgtacaaaaaaaatagagaagaattagaaaggaaagagaaacaatataagaaagaagttgaagcaaaacaacttgaaccaactgttcagtcactagagatgaaatcaaagactgcaagaaatactccaaatcgggattttcataatcatgaagaaatgaaaggtctgatggatgaaaattgcattttgaaggcagatattgctatactcagacaggaaatatgtacaatgaaaaatgacaacttggaaaaagaaaataaatatcttaaggacattaaaattgttaaagaaacaaatgctgcccttgaaaagtatataaaactcaatgaggaaatgataacagaaacagcattccggtatcaacaagagcttaatgatctcaaggctgagaatacaaggctcaatgccgaactgttgaaggaaaaagaaagcaagaaaagactggaagctgacattgaatcttatcagtctagactggctgctgctataagcaaacacagtgaaagtgtgaaaacagaaagaaacctaaaacttgctttagagagaacacgagatgtttctgtacaagtagaaatgagttctgctatttccaaagtaaaagctgagaatgagtttcttactgaacaactttctgaaacacaaattaaattcaatgccttaaaagataagttctgtaagacaagagatagtctcagaaaaaagtcattggctttagaaactgtacaaaacgacctaagccaaacacagcagcaaacacaggaaatgaaagagatgtatcaaaatgcagaagctaaagtgaataattccactggaaagtggaactgtgtagaagagaggatatgtcacctccaacgtgaaaatgcgtggcttgtacagcaactagatgacgttcatcagaaagaggatcataaagagatagtaactaatatccaaagaggctttattgagagtgaaaagaaagacctcgtgctagaagagaaaagtaagaagctaatgaatgaatgtgatcatttaaaagaaagtctctttcagtatgagagagagaaaacaggaggagtagtaagtatcaaggaagataaatattttcaaacttctagaaagacaatttaaacatttggttctggatacatgttgaacttagttgaatataaaaatctagattaaaagtgtgtttaccatactgtataattccatttacatgaagcatccagaaaagataaatgtatagggacaaaaagtagattcatgtttgcaaggggctggggctggaagctggtagtgactgctaatgggcatgaggaatcttacagtgatggaaatgctctaaagttggattgtagagatggctgcacaactcagtaaatgtactaaaaatcttttaactttaagttaaaacagatacattctatagtatgtaaattatatttcaacaaagctgttttaataaaaaaaggaaaaatgtgtttactatatcggcttagaaacatgcctcatttctaggaaataaaagatagaggtgagagatgatttactttgagaaaagacattgtgtcacctatgaaattttattaggcacagagtcatattttaaggtagatagttctgtattgctgaaatagtaattttaatgtctttatgttgccacatgttaagaccataatgtagttataaatggaaatgtttacacctgaagtgagtattttcaaattaaaatttaattaagtgattttcttcgacacttaattctagattccccagatgaattgaagtgtattgctgtgtcttgtaataccttgctttaactagctttttatgtattttagttggtatagctttgttattattcatattaacaaatctgaaaatatgtcaaattacatgtttttatgaccatgtaatgttttaaaggcacctacttgttataaaatcataatttaggataaatgtggtaaaacttagcaaaactatatttggtttagttttcccattggtatttatagtttactttgaatatttatattaataattagctcataatttttaaaaaaaaaa

SEQ ID NO: 158740 - DNA, 987 bp, Homo sapiens
gggggatttggggctgggtcggccggggtcggggaggggggtggtgaaaaggtgacagggagctgccctcgctcaagagccggtggttgggggtctgagaagaagtcaccaatatgaagttattcggcttcgggagccgcaggggccagacggcccagggctccatagaccacgtctacacgggttccggataccgaatccgggactccgaactgcagaagatccacagggcagctgtcaaaggcgacgccgcggaggtggagcgctgcttggcgcgcaggagcggagacctggacgccctggacaagcagcacagaactgctctacacttggcctgtgccagtggccatgtgcaagtggtcactctcctggttaacagaaaatgccagattgatgtctgtgacaaagaaaacagaacgcctttgatacaggctgtccattgccaggaagaggcttgtgccgttattctgctggaacatggcgccaatccaaactttaaggatatctacggcaacactgctctccattatgccgtgtatagtgagagcacctcactggcagaaaaactgctttcccatggtgcacatattgaagcactggacaaggacaataataccccacttttatttgctataatttgcaagaaagagaaaatggtggaatttttattgaaaaagaaagcaagttcacatgccgttgataggctgagacggtcagctctcatgcttgctgtatactatgactcaccaggtattgtcaatatccttcttaagcaaaatattgatgtcttcgctcaagacatgtgtggacgagatgcagaagattatgctatttctcatcatttgacaaagtaagtgtttatgttaaaaggccagttaatgctaaattgaagtttaaaataattgcaactactccatcttatacattaggtgagagttcatagtttggttcagatagtttgaaatagcgaagagttagtctaccttt

SEQ ID NO: 158741 - DNA, 549 bp, Homo sapiens
ccatctgtgcttctggtcatctaccctcctattttttttagaagggagggtgctaggtccattttctggtaaactagtggggttcgccccctgaaggaagcaccatgccttctgtgcgaaaaaatagaggattttccacactctggggttagagggaaaagccctagagaggcaggagttagagctaaggcggccagagtacgtgcagcccagcgagggcccctttggacccagccgtggagattctgaaagtgtgctggggagggtgcgaaggttggaaggttcgggtcgctgagtacctggagctcaggcctaggaagagagggcactgtcaggacagggcagaaagctctgaaaggagtaagccacggcgggactccagaagaggcaggacggcagaactccaaacatcttctcttcctatggcgccagcagctctagagcaggggtccaggtggagccccgcccccggcaacctcacaggagtgtgctcttcctacctagccccaccggccccgactttccacggtcgggaaggccagcggccgc

SEQ ID NO: 158742 - DNA, 336 bp, Homo sapiens
aatctctcttgtcttggaaatcaagttgcccacgtgtgttttcccactgcaaaacttctaccctagtttcctcctccttttggggatgatgatgatctcagcattgcttactataaagggattctatgaagatcaggtaagtaagtcagtgtttatgaaaacacattgtaagccaggcacagctatgcaagcctttagtcccagctacttgggaggctgaggtgggaggatcacttgagcccaggcatcaggcatttgaggctgtagtgtgcaatgttagcaccatgactaggcactggactccagcctggggaatgtagtgagaccctgtctctt

SEQ ID NO: 158743 - DNA, 220 bp, Homo sapiens
ctagaaaatctgaacatactgtgtttatgaatctaaagtataagattcccacaatagtgtgcaccagatgggatttagccttttctctgcagcacatgaaaagcaagaaaaattgttgaacaggttttcctttcctttgactaatatcctgattccccaatcggcacaggcacatttctggtacttgcaaccaatacaaaccctcagtgacaagtcacct

SEQ ID NO: 158744 - DNA, 262 bp, Homo sapiens
catcttctcaggtcggtgctggggatatccacagcagctcagctgcaccttgtgccatggactttctctgtcttttctgtcttgctccccaatttctttcatggctatttcccctaataaatcctggcacatttaattctgtattgcagtctgctcctcaggggatgctaaccaacacaagtggcttcaggagtggtccatagacacagacaaaaacggggattggggctgagcttgcccactgcctggcaggccgagaatg

SEQ ID NO: 158745 - DNA, 469 bp, Homo sapiens
ttcgtaactactctccctgttctagttctgttcttttccaatctgttttcttctctgtaaccaacaaaaagtttcccaaaaagtcaatcttccctcgcagtgttgaacatcttctttatttgggcttttataatatattgcattttacctttcttacaattggcataattttattcacatgtctgcctctctgtcacactagacaaatatttgttgacctttactgtgtactgggtactgatcttttgctgctgattcagtggtgaaaaaaatatattgagtccctacctttgatggacctatagtctaggggggagaacacagtaaacacatgagtgcagaattttaggtactgataaatgctcttaatagtgtaaaatcaggtatgtgaaaaagagtggggggggggaattgtcagagaaagcttctcttaagtagtagtgtttaattgataccgaggaggcaccat

SEQ ID NO: 158746 - DNA, 427 bp, Homo sapiens
ctcaataattccactcctaggtatctaacagaaatgaaaacatttgcacacaaaagttgtacatgaaagagtacagctgcattcataatagcaaaaacaaaaacaaaaaaatccccaaatgtctaccaaataataaataaaatgtggtatatccatacaagggaatgttgttcaactataaaaaggaatgaagtatacgctatactaaggataagctgtgaagacatgctaagtgaaagatgccagacaaaaggcctaagtgataattcatttatacaaactgtgcataatagggacatctagagacagaaagtagattagtggttgcccagtgctggggaagtaggtgtgagggtgaccattaatagatatagggttttttgggggtgataaaatgttctaaatttaaattgtggtgatagttcca

SEQ ID NO: 158747 - DNA, 409 bp, Homo sapiens
gacatgtgttgaattccagcaacactaccttacactaccaacactaccttactagctgaactttacctaacttagaattctgagggtgttctcacctataaatgggaataataatacctatcgtatggggtattgttaggcttcagacagtataaatgaggtgcttggtatggtgccaggttcatcacaagcactcaatatttttctttctacaatatcacttctatggctgaagagtatcccatctcatggggatgtgccatgattcacttacccagtctcatactgttattgatatcttcaattttgtcaataatataaacaacagcaaatttttttcacacatttctgtttatttctttagggtgaaaccctataagtgagatgctggatcaaaggatatgagcat

SEQ ID NO: 158748 - DNA, 419 bp, Homo sapiens
gttgagttgtaagaatgctttatataatctgaatataagtcccttatcagatatatgatttgcaattattttctcccattctgtggactgtctttttcactctctgggttctttgaagcacaaaaattttaaattgtgatgaagtctaatttatcttttttcctttgtcactggtgcttttggtgtcttttataaaaaggcttcacctaatccaaggtcataaagatttacttgttagttttcttccaagagttttatagttttagctcttacatttaggtttgagttaacaacggggttcaaattcattcttttgaatttggatattcagttattcctgtaccatttactgaaaagactttttcccttattatcttgggacccttctgaaaaatcaattaaccataaatgtaatggcg

SEQ ID NO: 158749 - DNA, 344 bp, Homo sapiens
tctcacacacagtcacactcacagtcctcagtccccctcctccatctctgcagttggtgaaggctgtgtgtcagagcagtctccaagctcatccacagcagccaaccctccagtgagcagaggccaaaagcatgtgctaggtctgggagttgaggcacagtgaacctttgactgtgactccggttgcatcggaggggtcagccacgtggtttctctcagtgcccgagagcatctttgttttggctggcttgtaacgtcagtggaaatcggaaacctcgccctggcctgatgacggctgcagtttcccttcaccttctagccctgcctaactttcctgggctctg

SEQ ID NO: 158750 - DNA, 362 bp, Homo sapiens
accaggtgtcgtccaaatgccaaaagcaggcagacatcaggcggccgcccttcagcacacaggtcagggttgcgatgtgtccaggccggtgcaaacgccagcctgcggaggaagaatgcagcattcaacagagtcccagcggctggacagggagcctgaaggctgggtcacctgtcacctgtcaccctgtggacctggcatcatgtgttttccacggacaccccgaatccggagcccccgggaggactccgcagaccatatgctgaggtgtgctttgcgtttctatcgtcaggtgggctgcaggcttccaggctagacagctccttaccaccagaagtccgtgcctaccagctgcctcacgc

SEQ ID NO: 158751 - DNA, 519 bp, Homo sapiens
gagagaagagtggaggcactagatagaggattaagggtattgcatttatgttggatatagtccatgaaatctgtggaattgtaataccaaattctttgctttttaccaatgatcttagtggacaataacacagatttgcatctatcagcagataaagattatagcaggaaaaatagttcccataatttcattgctatttttttccttcagtcatgatatggcattctctttcactaaaccttcatccacacacatacacataatacaaagaattctgcactttgggagtcccagaattacttgagcccaagaatttgcgaccaggctgggtaacattgagacctcgtctctacaaaaaaataagtgaagccaagcatggtggtgcatgcctgtattactagctactggggaggctgaggcaggaggatcacttgagccaaggagtgcaaagctgcaatgagtcaggattgcgccactgcactccagcttgggtgacagagtaagaccctgtctccaaaa

SEQ ID NO: 158752 - DNA, 282 bp, Homo sapiens
ttttccaggatcaaatgagatcacgagagtgcaaatgaaaggctaagtgtgctattgttattaggagattcgcattggtcccctagcctggatgagatgtgagtcagaaatctctggaaatagagcagcaaagaagacagcctccaacctagcagggctcatattgcagtgggaaatagacaacgaacaatacgtgcataatgtaatttcaggtagtcataagtgcagtgaagggaaggaagaaaggaggacagtgggggaacagggaaggttgtttttggt

SEQ ID NO: 158753 - DNA, 1126 bp, Homo sapiens
  misc_feature (771)..(771): n is a, c, g, or t
  misc_feature (1126)..(1126): n is a, c, g, or t
gacttctacacactccctgtggggatccgcactgtggctgtcaccaagagccagttcctcatcaatgggaaacctttctatttccacggtgtcaacaagcatgaggatgcggacgtgtgttggggctcctgggtccttgtcggggctgcttctggtcaccctccactttcgccttccctgtgtcctgcagttgagggcagctcagggcaatgaggcaaatggctccaaatggagagggggctcatggggtggctctccagggtcctggctctcagaggaagtgcagcttcgacagggacaggggtcacttggctctgctatctcctagatccgagggaagggcttcgactggccgctgctggtgaaggacttcaacctgcttcgctggcttggtgccaacgctttccgtaccagccactacccctatgcagaggaagtgatgcagatgtgtgaccgctatgggattgtggtcatcgatgagtgtcccggcgtgggcctggcgctgccgtgatggaagaagtggtgcgtagggacaagaaccaccccgcggtcgtgatgtggtctgtggccaacgagcctgcgtcccacctagaatctgctggctactacttgaagctccgtatgtggatgtgatctgtttgaacagctactactcttggtatcacgactacgggcacctggagttgattcagctgcagctggccacccagtttgagaactggtataagaagtatcagaagcccattattcagagcgagtatggagcagaancgattgcagggtttcaccaggatccacctctgatgttcactgaagagtaccagaaaagtctgctagagcagtaccatctgggtctggatcaaaaacgcagaaaatacgtggttgagagctcatttggaattggcgattctgactgaccgtaccgccgagtgggggataacaggggtctcactcgggacgaacaaaagggaggtccttgcggcagacacggacatgctgacaggtccatgttgacgtcaaggtggaaccgtctgcgaggatccggtctctccatgatcaggagtcgggtggaccatggtgttaacggcacggattagcggacaaggcgcgtttatggtttttcctn

SEQ ID NO: 158754 - DNA, 598 bp, Homo sapiens
cgggggcgtcaccgtgaccctctgtcccttccctcctggcccgcaggcagttcttcaacaacgtttctctgcatcaccacatgcaggtgatggaagaagtggtgcgtagggacaagaaccaccccgcggtcgtgatgtggtctgtggccaacgagcctgcgtcccacctagaatctgctggctactacttgaagtgagtgctccctccctgccctcggctagagtgggaaggagaccctggcaggtggctggcctcggtgggcatgtgctgttcaagatcggcctcgtgtccagcccaatgggaaggccgtccatacccagatagttcaggggaccaaatatctacccacccaaattgtggttttcttttttgttctttttttttctttttgagatggagtctcactatatggcccaggctggagtgcagtggggtgatctccgctcattacaacctctgcctcctgggttcaagtgattctcctgcctcagtctcctgagtagctaggattacaggctctggccaccatgcctggctaatttttgtacttttagtagagagggggttttctgcatcactgggttctctgcatcgtct

SEQ ID NO: 158755 - DNA, 1037 bp, Homo sapiens
  misc_feature (682)..(682): n is a, c, g, or t
  misc_feature (1037)..(1037): n is a, c, g, or t
gacttctacacactccctgtggggatccgcactgtggctgtcaccaagagccagttcctcatcaatgggaaacctttctatttccacggtgtcaacaagcatgaggatgcggacatccgagggaagggcttcgactggccgctgctggtgaaggacttcaacctgcttcgctggcttggtgccaacgctttccgtaccagccactacccctatgcagaggaagtgatgcagatgtgtgaccgctatgggattgtggtcatcgatgagtgtcccggcgtgggcctggcgctgccgcagttcttcaacaacgtttctctgcatcaccacatgcaggtgatggaagaagtggtgcgtagggacaagaaccaccccgcggtcgtgatgtggtctgtggccaacgagcctgcgtcccacctagaatctgctggctactacttgaagatggtgatcgctcacaccaaatccttggacccctcccggcctgtgacctttgtgagcaactctaactatgcagcagacaagggggctccgtatgtggatgtgatctgtttgaacagctactactcttggtatcacgactacgggcacctggagttgattcagctgcagctggccacccagtttgagaactggtataagaagtatcagaagcccattattcagagcgagtatggagcagaancgattgcagggtttcaccaggatccacctctgatgttcactgaagagtaccagaaaagtctgctagagcagtaccatctgggtctggatcaaaaacgcagaaaatacgtggttgagagctcatttggaattggcgattctgactgaccgtaccgccgagtgggggataacaggggtctcactcgggacgaacaaaagggaggtccttgcggcagacacggacatgctgacaggtccatgttgacgtcaaggtggaaccgtctgcgaggatccggtctctccatgatcaggagtcgggtggaccatggtgttaacggcacggattagcggacaaggcgcgtttatggtttttcctn

SEQ ID NO: 158756 - DNA, 1295 bp, Homo sapiens
  misc_feature (940)..(940): n is a, c, g, or t
  misc_feature (1295)..(1295): n is a, c, g, or t
gacttctacacactccctgtggggatccgcactgtggctgtcaccaagagccagttcctcatcaatgggaaacctttctatttccacggtgtcaacaagcatgaggatgcggacgtgtgttggggctcctgggtccttgtcggggctgcttctggtcaccctccactttcgccttccctgtgtcctgcagttgagggcagctcagggcaatgaggcaaatggctccaaatggagagggggctcatggggtggctctccagggtcctggctctcagaggaagtgcagcttcgacagggacaggggtcacttggctctgctatctcctagatccgagggaagggcttcgactggccgctgctggtgaaggacttcaacctgcttcgctggcttggtgccaacgctttccgtaccagccactacccctatgcagaggaagtgatgcagatgtgtgaccgctatgggattgtggtcatcgatgagtgtcccggcgtgggcctggcgctgccgcagttcttcaacaacgtttctctgcatcaccacatgcaggtgatggaagaagtggtgcgtagggacaagaaccaccccgcggtcgtgatgtggtctgtggccaacgagcctgcgtcccacctagaatctgctggctactacttgaagatggtgatcgctcacacctagaatctgctggctactacttgaagatggtgatcgctcacaccaaatccttggacccctcccggcctgtgacctttgtgagcaactctaactatgcagcagacaagggggctccgtatgtggatgtgatctgtttgaacagctactactcttggtatcacgactacgggcacctggagttgattcagctgcagctggccacccagtttgagaactggtataagaagtatcagaagcccattattcagagcgagtatggagcagaancgattgcagggtttcaccaggatccacctctgatgttcactgaagagtaccagaaaagtctgctagagcagtaccatctgggtctggatcaaaaacgcagaaaatacgtggttgagagctcatttggaattggcgattctgactgaccgtaccgccgagtgggggataacaggggtctcactcgggacgaacaaaagggaggtccttgcggcagacacggacatgctgacaggtccatgttgacgtcaaggtggaaccgtctgcgaggatccggtctctccatgatcaggagtcgggtggaccatggtgttaacggcacggattagcggacaaggcgcgtttatggtttttcctn

SEQ ID NO: 158757 - DNA, 139 bp, Homo sapiens
tgctgggattacagacgtgagccaccgtgcccagccttggctgtttgtgtatcttttttggaaacattcagatttatgatttgcagatatttccttccattccatgggctgtcttttcattttcttaatgggtatcctt

SEQ ID NO: 158758 - DNA, 206 bp, Homo sapiens
gcttgcctgtaacagcagccttcggtgtcccacccttcctgtgaggaaactgtggtgcagcagggctttctacactcaattccctggcagatctccagggatccggagtacccactctcctgcattaggagtttaggctatgagtatcaactctgtgagcttctctgcccatgcagagaacttggggctgaggaggtttcccagtt

SEQ ID NO: 158759 - DNA, 464 bp, Homo sapiens
ctcctactcttgtaatcattaggaggtcaggctgctgccctgctgcatacgccatcagagctcacaaaatggctggaagtttatccgggcacttgacaaactgcatttacttcatcaggccactaggtgatgaacaactcacaaacccagactgccagggactgtggtgtacagggcagtttctgtttatacttggaaaggccattcgaagtcatctggtccaaactcattaggaggtcaggctgaccccctaaaaatctggcaatcaccaatctatatactgataatatttggcacctattctagataattacatatcaatggaatcatatcatacatagtctgtagtgactagctttctttcacttagcacgtatactaggattacccaaatagtagcatgtattacttcatctcgtataatttaattaaatagtggcgaaatacacacaacataatcttaa

SEQ ID NO: 158760 - DNA, 565 bp, Homo sapiens
ccgcctcctgagttcaaactattctcctgccttagcctcccaagcagttgggaccacagccacacaccaccatactgggctaattttttgtatttttagtagagatggggtttcaccatgttggccaggctggtctcccaactcctgatctcaagtgatccacctgccttagcctctcaaggtgctgggactacaggtgtgacccaccgcgcccggcctggaatcactttttggctcgtctggtctggttttcagagcaggagcctcagaacctcctagccaggagtgcacttacaaagttcctggtacaagccccacccacagcaaggccgcggagatgcaagctccattcccgccgcttctctggacagtggaaaactagagacaaatctagagagggttgcccagaccaaggtaaagcaaagaagggcctccaggcagagccgcgcagtgcagttgcggggaggcggccacgggcgagcccacgccctggaaggacagagcagagaaaccgggtggggaggtcctcccaggtcagtccatgcaggggcctgtcagtgctggg

SEQ ID NO: 158761 - DNA, 534 bp, Homo sapiens
gcctttcctatctgctccagaattaggggaatagcctactgaagtttagcattgggccaggagtaggaacaggggatgtggtccttttctgttcagtcttgagggttcacagtgcctgcttatggaggctcgatgtggctcttgcctggaaacctcaaacacatggggactaacccttggaaagggcttgccactgtgcagatggggctttatgattggaacagaaggcaaactccaacgcatctgatgggaccatggtgccccatcacttcagcatgtgttttgtcccacaagacaaagttcctttcttcttccctttaacttctctttttttttgagctccatgtgtcactgaggcagctcttgggttcctgttgtggtctctcaatgagtcacatgccatttggacatggcagcttccctaagtacatcgtggacaaggcatctcacttccctaagcctcagttttctcacttggtgatcccagtgatcctttttaggtctaaagtctgtggcaatgattttcaaacccat

SEQ ID NO: 158762 - DNA, 448 bp, Homo sapiens
tgtacgcaaaaagcatgtgctcaaatagcttaacgctaagtgtgtagggcagaaactccttatactagcccactctaagtataaccccaaactcaccaaagcaaatgggctgaacttggggaaaaatatgcaaattcatggatttcctggctagtgctactattttgagaaacagacacgtacacacctctaccttccaactccacaagaattactccatgggccaggcatggtggttcatgcctataatcccagcactttgggagacccaggcgagtggatggtttgaggcccagagttcaagaccagcctgggcaaaggagtgagacctcatctcttaaaacaaaaagaaaccacttctgtatttgtactgattttttcatctgcttaatccaccagtaattgagagaaatatgttaatctcccatgatcatggtgaatttcctgt

SEQ ID NO: 158763 - DNA, 176 bp, Homo sapiens
tctctgaagcctcacccacccacactggcactgccctctagcatcgagggaccttagatacagtgtgtactgtggtggtcaaaccagcttctcccaagaacagctcatataagagtacacctcaaactttaattagactttaccttccccagaggactacttccatcctaatagag

SEQ ID NO: 158764 - DNA, 616 bp, Homo sapiens
caggcgactctagaggaccccgcgacactcttggtgcttccatatcttgttattgtgaatagtgctgcaaagaacttgggagtgcagatagctcttccgaatactgatttcctttgcacattactcggaagataaatttttttgagacagagtctcactctgtcgcccaggctggggtgaaatagtgcaatctccttgcaaccttcactttctagattcaagtgatcctcctgcctcagcctccgaaagtgctgggattacaggaatgagccaccatgctcagcctcttctcttcttaattagttgtggcaggtaaggattctcttatgtgctaacaacaacaaaaatgttctgtctgctgcaaccccagctgtaatctcccctaaccagaaaggtgtacatttttcagttgtatgagcgaatctcttctctttgaaaaaaaaggagcacctgtctttactccattggattaatcatccaccctcccacttcaggcctcacctctatcagaaaggaagatgaaaatccctacacaagctaacataaacaataataatagtcaccatttcacagaacaataaattcagggttagggaagctctagcggttaattcag

SEQ ID NO: 158765 - DNA, 385 bp, Homo sapiens
  misc_feature (320)..(320): n is a, c, g, or t
  misc_feature (363)..(363): n is a, c, g, or t
ccatgactaaaaggggccaagttacagcttgggctgttgcttcagagggtggaagcctcaagccttggcaacttccatttggtgttgagcctgtgggtgcacagaagtcaagaattgaggtttgggaacctccacctagatttcagaagatgtatggaaatacctagatacccagggagaataattgacttggggaccatcagggatgtgttggggccctgccactgtggagggtggagctgccttctatggtagtagcttagactggtgggtggggaacacacgctctgctcacatctcagctccctgtttggtgtgtncaggtacaatcagtagtgggcaagtgcggggcattccccaggncctgggcaagaataatttactt

SEQ ID NO: 158766 - DNA, 235 bp, Homo sapiens
tcagttattttcctgttgaccccagaatttgttatattttttaaaacaatttcaaaatagtttctgtttgtgtctggttcaaatcgagatgtgcatgctttctagtctttattatttattggaaacctttggtacctaatgcagaggtttgattgtttcagtgtgtacccggtaaagatgtcagtgaccttttaccgtaacatcaaagtgtagtttaaccagttagtctattttt

SEQ ID NO: 158767 - DNA, 637 bp, Homo sapiens
ctgggattccagacggggaatgatgactcagagtaaggtgcataacaggttctccagttgctcatcttctgaattcgttcattcatttattcattcattccccagacattgagcatgcagatggaaaggcagaggttcaaattcagctctgccatgtactgtgtaatctcagcaggttatttaacctctctgagtctttgtttcttcagctgtaaaatgggtacaatctctatttttaagagttgtgaggatttgatgagaagttatggagataggattgccagatttagcaaataaagacaggacagcaattaaatttgaatgtcagataaatgaggaattttattttagtatgtcccaagtattgcatgtttatctgatattcaactttaactgtgcatcctatattttaactgcaactctacccagggataaggattaatttaaaaaatgcctttcttggaggagcacaggctaatcaaacactgaagggcaatttgactgatggcagaggcacagacagagtgctgtggaaacatagacatctccatttgagctcctaagaatccagacccatgcttgctgatttctagcaggcttgtcaaataccccggtgactgtgagattgacaatgcga

SEQ ID NO: 158768 - DNA, 337 bp, Homo sapiens
tactaaattcgcggccgcgtcgaccattcaataagctgtggaccaggcactgcatctgaaaccttcacagccagcgagactgatggaattacaggcgtctgaaacctccatgcatgctaattccaagtccaaaacccagaggctcccagctggaactctaagagaacagtaagctccatgaaccaatgacaaacttactagaagggaccaagcaactcacagggaattatttggttaattggggtccaagactgagaaatgtgccttccaatgatacggcgtggctttctgacagctctgcaaaacaacaagcagaggggtccactgggtcgtggcc

SEQ ID NO: 158769 - DNA, 385 bp, Homo sapiens
atttctttttctttcccatccaacccccatttcctagtcttcagtttcttaatttctctaccttttactcttatgctcttgttttgacctttgagtttctctgaaacttatcagaaaagttaggacaagatagtctgacccaattcttgagccattttcttaggtagtaaatatgtcagaaaaatgaaagctgtttggagttgataaggaaatggaagataatgtttttctttgagggggacataaagaatggtgatagggaaagaaccaatgactaagtaaaatgactgagaatcttgcacgaggcagatgtgtgagcttcgcgaagcaagttgactgaatgaaaaacaactttgggtagggaaaacgttgccgggggcattcg

SEQ ID NO: 158770 - DNA, 732 bp, Homo sapiens
cgctttatacttctaaacgctttatacttctcaacgctgtatacttctcaacgctttatacttctcaacgctttatacttctcaatgctttatacttctcaacgctttatacttcctcaacgctttatactcctcaacgctttatacttctcaacgctttatacttctcaacgctttatacctctcaacgctttatacttctcaacgctttatacttcctagcagtgaacaaatttccacagtcagtatgtagattcacttttctccaccctcagctctcccctcaacgctttatacttccgaggaagtcagagaagggggaacacaacgctttatacttccgaggaagtcagagaagggggaaggaatcacttttgaccattagctccacgggaaaatggggaaagggcattatcttgttcactccagcatctagcatagaatccagcaaataatcagtgcccagtaaaaatgtatggaatgaataaatggatgagtgaatgaggggatgattgaacaatgtctaaggcagaagtataaagcgttgaggtgtacaaactattaggaaaaatgtggcgccattaaacccagaaaatatgtccttctgtaacagacagctgtctcctctgtagtttaagtgtgctttctgcttagctcatgctccgtgagtcatggaatcaatacaggaagcacacagagccagccacactgcagattccgaggagggtctag

SEQ ID NO: 158771 - DNA, 556 bp, Homo sapiens
cagtttatgcctccaaacacagggaaaagtggaggctacacttcattcatcctgggcttcacactaagtcccaaattcggatacaagagcatcttctagaaaacccctcaacgctttatacttccgaggaagtcagagaagggggaacacaacgctttatacttccgaggaagtcagagaagggggaaggaatcacttttgaccattagctccacgggaaaatggggaaagggcattatcttgttcactccagcatctagcatagaatccagcaaataatcagtgcccagtaaaaatgtatggaatgaataaatggatgagtgaatgaggggatgattgaacaatgtctaaggcagaagtataaagcgttgaggtgtacaaactattaggaaaaatgtggcgccattaaacccagaaaatatgtccttctgtaacagacagctgtctcctctgtagtttaagtgtgctttctgcttagctcatgctccgtgagtcatggaatcaatacaggaagcacacagagccagccacactgcagattccgaggagggtctag

SEQ ID NO: 158772 - DNA, 661 bp, Homo sapiens
cgctttatacttctaaacgctttatacttctcaacgctgtatacttctcaacgctttatacttctcaacgctttatacttctcaatgctttatacttctcaacgctttatacttcctcaacgctttatactcctcaacgctttatacttctcaacgctttatacttctcaacgctttatacctctcaacgctttatacttctcaacgctttctcaacgctttatacttccgaggaagtcagagaagggggaacacaacgctttatacttccgaggaagtcagagaagggggaaggaatcacttttgaccattagctccacgggaaaatggggaaagggcattatcttgttcactccagcatctagcatagaatccagcaaataatcagtgcccagtaaaaatgtatggaatgaataaatggatgagtgaatgaggggatgattgaacaatgtctaaggcagaagtataaagcgttgaggtgtacaaactattaggaaaaatgtggcgccattaaacccagaaaatatgtccttctgtaacagacagctgtctcctctgtagtttaagtgtgctttctgcttagctcatgctccgtgagtcatggaatcaatacaggaagcacacagagccagccacactgcagattccgaggagggtctag

SEQ ID NO: 158773 - DNA, 291 bp, Homo sapiens
agctataaggtaaagtgagctactggagtggaagaagatatagcagataaaaacacattgtgttcctaaggtgtgaataaattttttttcttttccttcactaataagcatcattcagtgatttcattcagaaaagtatattgaacaaaggcagcatgttagctttggggaggggaagagaggatgcaaagatgactaacacacagtccttgcaaccaagctatctaaaatcctctggagaatatgaaagaacagaccaagctgggcaacagagtgggactctgtctctta

SEQ ID NO: 158774 - DNA, 442 bp, Homo sapiens
ctggcggagttaaagtcggggagttaccatcacacaggttgcatctcatgccatgagcctggatggactcacccagggagaagatatagatgcacaaggaccatggaccaagcctggggcccccaacatcaggagaccagggaggtgggacgaaaaccaaagcctggcagggtgggcgaggtgggtgcagggacctggcccattccctcttggggctttggtttccccatctgtaaccatttaccccattttgccctggaagccaagacaactgactaggctggaagcagacaggttggggaagcaagggtgcactccatttagttaggaagtgaggcctttgtctgggatgggagtttaaagtgttttttcccccagtttgtcatttggctttgtttatggtgttttattcttataaaaattagtgtttatgcctgacttg

SEQ ID NO: 158775 - DNA, 760 bp, Homo sapiens
taatgaaacctctgttatagaaccaatatagccaatcacagtttccatacatgcaaggtgaatatagcccagagcatgaggtaactgccgactgcttaagaacagcagggttacacagatggaaattcatggtgatgttgggggaattatgtttaaatcaaacataatataatagccaccacccagtagtagtgagcgatttttcttttgagttttgttttttccattctgagtgtcactatgatgcatagagttgtttttatttagtttttaaactaatgaactcattagtttaaaaatgattttttacattctgtcccagtctcaggttgaacattgtttgtcctagagtctggaatcagccacttatgcaaataaccctgattacttttggtcagaaatgatatttagagatcagaatatgatgccagtagtacaagggatgccgttgctttagttcagtggacagtagtagaaaaatattatttcactgaatctaagatgtggtcaattatagttatatgtgttactaggaaagaaaaaaacagtgccaattaattttaagaccccagctaatgcaagatgcatctttatttcagatatgttaggatacaaatagaatacaaaatgcgcatatgctatggcatatgtcatacaaaatgatgagttcgtatatattttaaactgaaacttaacactacagaatttttacttaagattaaatttttacatataattttctccttcagtgaatgtctgt

SEQ ID NO: 158776 - DNA, 343 bp, Homo sapiens
cagagtctcctgtgcctctaatattttctcacctagagtaagcttttcccaattccaaaccttacaacactcaagctgattattctgagaatcaagcaatgccaagggcccaatatttttctttcaccttctcaaggggatcattttatacttctgatgtgaacaggggattagtctcgagtctccctttagagagaacatagagtcctttttcttaacacattccaagccgtgactcacagaaataagcaggatgggccgggcacggtggctcatgcctgtaatcccagctaattttggtatttttgtagagatggggtttcaccacgttgcccaggctcat

SEQ ID NO: 158777 - DNA, 171 bp, Homo sapiens
gtgatcgatgcttggtatattagatgcttctgaccaagatcttaaatctagattgagtgaagcaaagacaatggaatggttagagttgatttgctgtcattgcagccctgtcctggcaagtctttcactaaaagacatgcattctgcttcttaacagagcctccttgagtt

SEQ ID NO: 158778 - DNA, 379 bp, Homo sapiens
tagctaaaaaccattgatttagccccaggtcttacctattagctccatcctggctatatgttagtagtgtctgggaaggcttaaaaattacaaagcctgggccgggcgctgtggctcatgcctgtaattccagcactttgggaggctgagccgggtggataacaaggtcaggagattgagaccatcctggctaacacagtgaaaccctgtctctactaaaaatacaaaaaattagctgggtgtggtggcaggcgcctgtagtcccagctactcaggaggctgaggcaggagaattgtttgaacctgggaggcagagcctgcagtgagctgagatcatgccgctgcactccagtctgggcaacagagtgagacttgtctc

SEQ ID NO: 158779 - DNA, 266 bp, Homo sapiens
cttcttacctctaccacatatcttcttcaatggttcctctccttcctcctccagtggatgctccttgagtatctgttctctatgttcacttttagtactattttcatggctcaatacgtacttccagactcccttcctcacctacattccaactctaagaatctaagcaccagctccatatctcaacacgtccgaaccaaagttatcctcacctcaataccagaccactattcacttcagttttgtttttttgagacaggtcttac

SEQ ID NO: 158780 - DNA, 360 bp, Homo sapiens
atagaatgcatgtaagggcacacttcttttgttttacagaagggatcaagttctgttcaggaagatttgaaacatagtgtaaagttgttgctgttttaaacttgtaaacctgattcttctcatgtgggaggtacgtaagtaggcctctcagatttcaggttggttctctgcctggtagatacaagggcaaaactattctggaaccatattgatgttaaaaaaattttttacggacttcctgccggcaaggatttttttaaaagattttttaaatgtgtctaagaaatgttttaatttgtcttctgattatacagtgatttacaattcatgcttcttttatatgtgggcaaaattaagaac

SEQ ID NO: 158781 - DNA, 172 bp, Homo sapiens
ggaattggaggctgcagtgagctatgattatgccactgcattccagcctcggcaacagcaagaccctgtctctaaaaacaaataagtaaatgcaatgcttcaaactacctcttcatttatttgacctctaccacactcccagatagtctagtaaaccttattcttagggaaa

SEQ ID NO: 158782 - DNA, 512 bp, Homo sapiens
taaaatgataggaaattctgacacatgctgcaacatagattaacttgaagatattacgtgaagtgaaagaagccagatataaaagggcaagtattatacaattctacttatatgtgatacctagagtagtcaaagtaatggagacagaaagtattaatggtggttgtctggggctggggaaggggggatggagaatgattatttaatggatatagagtttcagtttgggttcattaaaaagttctggagataggccaggcgcagtggcttatgcctgtaatcccagcactttgagaggctgaggcgggcaggtcatgaggtcaggagttcgagatcagcctgaccaacatgatgaaaccccgtctctactaaaaatacaaaaattagccaggtgtggtgacgcgcacctgtaatcccagctactgaggaggctgaggcaggagaatcccttgaaccagggaggcggaggttgcactgagccgagatcatgctactgcactccagcctgggtg

SEQ ID NO: 158783 - DNA, 535 bp, Homo sapiens
ctcccagtcttggcccactaacagctttacaaccaaaacctggagcttgccccgcctaactgtgacccacagctcactaaccttggtgcgcacaacagccacatcttgaatatctgcaccctgaaccactccctagatttcaagaccggcacgttcatctgcccacttaacgcctccatttagtaggctctgaaagatctgactcttagcatggcataaacaaacctgatatccctagtgaatattactcctattgccaatttgttcatcttagttgatgaaacttctttccctacagctgctaataccaaaaaccctggagtcttctctgaaccctctgtttcactccctcaccacctacattatgtaatttagttgtcccttttgaaaccacacatccggaatctaaccacatctcctaaatcacgatcctgggccagtaaccctcacttggactagtctaccctgattttccttcctcctccctcaaccccccagtttgtgccccactgggcacacatgatggaggggtgaa

SEQ ID NO: 158784 - DNA, 600 bp, Homo sapiens
  misc_feature (566)..(566): n is a, c, g, or t
  misc_feature (578)..(578): n is a, c, g, or t
cctagttttagaagtttcaatagcactgtgatggacacacagccagcacctgcctttacacacaatggcccaaaagggaggtggcaaagtaaccaggcatttgcaacacagtgcaatcactgcaggcccctctctacaagccccatacccaaagggaccctggattccctattagagtaaaagccacattgccagcatgagaggaaggaaatggctttctttagctctagaagagtgagacttgcacagtgccccgaagaaagatgataaaacacaatgcccttccagcacccagggtagaccctcctcaggtggtgtcaaccctttgactttcacatgttttcatcttaggctatggagcatgatttctgctattgaaacttctaaaacggggcatagttttagaagtttcaatagcatcttttacatcataagatattatttcttttgggtcgcctgatacataaatgtgggcataggggagacatccatcaatatggcaaaccaaaagttttatttccttaagcttctctttggcgaaaatagcatatcttaatactcttggngctgcgataggncaatccaatatccacatctata

SEQ ID NO: 158785 - DNA, 1268 bp, Homo sapiens
  misc_feature (1234)..(1234): n is a, c, g, or t
  misc_feature (1246)..(1246): n is a, c, g, or t
atctggttcttgttgctttggagaccacaggagaggcggtggtgatggcccatcgcttcagccctgtggcatccccacaggatccatgggcatcaagtaatttccctgtgctcctctgaagataaaccgctgcctgcaccagcctagcagcttccagaagctgtggatgagaagcaatctcccaccaaaagccagagctcacctgcaaagcttcaatcccaagcagaaggaagcctccgttttttccccccagatgagcctgaattcacctccagaaagtctcaatgcatcacaccaagggtcacacacctgctcatggttcttcttgaggcaaagcagctcctccttcagggactccagctgggcctccaggtcacacttggcgagggtgaggttgtctagcaccctgcgcaggccacagatgtcagcctccaccagctgttgcagcgagcgctctctctcgtacctgtaacagggaaagtgcaggagtgacagttagagggcaggaaggggcaccaggacatgactcccagctcgcagctgtaagtccactggcctgccctttgccatctaattgtgagttggcttatcctgtgtagtgtgctcaaagcccagaaagcaacaggatgttccccactcagtcaatactaagcacctgagatgaaccaaggggagcagctggtactgaggatactgtgatggacacacagccagcacctgcctttacacacaatggcccaaaagggaggtggcaaagtaaccaggcatttgcaacacagtgcaatcactgcaggcccctctctacaagccccatacccaaagggaccctggattccctattagagtaaaagccacattgccagcatgagaggaaggaaatggctttctttagctctagaagagtgagacttgcacagtgccccgaagaaagatgataaaacacaatgcccttccagcacccagggtagaccctcctcaggtggtgtcaaccctttgactttcacatgttttcatcttaggctatggagcatgatttctgctattgaaacttctaaaacggggcatagttttagaagtttcaatagcatcttttacatcataagatattatttcttttgggtcgcctgatacataaatgtgggcataggggagacatccatcaatatggcaaaccaaaagttttatttccttaagcttctctttggcgaaaatagcatatcttaatactcttggngctgcgataggncaatccaatatccacatctata

SEQ ID NO: 158786 - DNA, 1065 bp, Homo sapiens
atctggttcttgttgctttggagaccacaggagaggcggtggtgatggcccatcgcttcagccctgtggcatccccacaggatccatgggcatcaagtaatttccctgtgctcctctgaagataaaccgctgcctgcaccagcctagcagcttccagaagctgtggatgagaagcaatctcccaccaaaagccagagctcacctgcaaagcttcaatcccaagcagaaggaagcctccgttttttccccccagatgagcctgaattcacctccagaaagtctcaatgcatcacaccaagggtcacacacctgctcatggttcttcttgaggcaaagcagctcctccttcagggactccagctgggcctccaggtcacacttggcgagggtgaggttgtctagcaccctgcgcaggccacagatgtcagcctccaccagctgttgcagcgagcgctctctctcgtacctgtaacagggaaagtgcaggagtgacagttagagggcaggaaggggcaccaggacatgactcccagctcgcagctgtaagtccactggcctgccctttgccatctaattgtgagttggcttatcctgtgtagtgtgctcaaagcccagaaagcaacaggatgttccccactcagtcaatactaagcacctgagatgaaccaaggggagcagctggtactgaggatactgtgatggacacacagccagcacctgcctttacacacaatggcccaaaagggaggtggcaaagtaaccaggcatttgcaacacagtgcaatcactgcaggcccctctctacaagccccatacccaaagggaccctggattccctattagagtaaaagccacattgccagcatgagaggaaggaaatggctttctttagctctagaagagtgagacttgcacagtgccccgaagaaagatgataaaacacaatgcccttccagcacccataccatgcgctcatgcctgcagttcgattgcattcgttggctacagctgtttcccagaccactctcttatgatccatgtgtatattcagcgatgctacgtttg

SEQ ID NO: 158787 - DNA, 161 bp, Homo sapiens
agtgccccgaagaaagatgataaaacacaatgcccttccagcacccagggtagaccctcctcaggtggtgtcaaccctttgactttcacatgttttcatcttaggctatggagcatgatttctgctatgaattatcagcactcacaaattaatcaagctgc

SEQ ID NO: 158788 - DNA, 422 bp, Homo sapiens
aactcccactttccatcctccccagtaatttccctgtgctcctctgaagataaaccgctgcctgcaccagcctagcagcttccagaagctgtggatgagaagcaatctcccaccaaaagccagagctcacctgcaaagcttcaatcccaagcagaaggaagcctccgttttttccccccagatgagcctgaattcacctccagaaagtctcaatgcatcacaccaagggtcacacacctgctcatggttcttcttgaggcaaagcagctcctccttcagggactccagctgggcctccaggtcacacttggcgagggtgaggttgtctagcaccctgcgcaggccacagatgtcagcctccaccagctgttgcagcgagcgctctctctcgtacctgtaacagggaaagtgcaggagtgaca

SEQ ID NO: 158789 - DNA, 559 bp, Homo sapiens
actgtcggacctacttttcacaggggacactgtgggccagcaaactaaagtgatgtagcctaccagttgaatccaaaccagaccagcaaatgttccttgcatgctacagtgtatgctgtgttgttgctgtcattgggcctagatgtgggggcctggcaggaccccaggaatatttaggggcactgggcattcagcttaatacacccatctggactctgagggttgtaggaatgcctttagcagtcatctgctaaaattgtagttataaaatcattttctcctcctttaattgtttgttatccttggcttcattagtgggaaaggggttgcaaatttgatattggaggtttcagagccaggagtgaaattgaccattttgaaatttgtctgttttgttttgggtttggtgaggggcaggagggagcaagatttttattttgtttatttatgtatttatttttgtctgccgttgtcatttttaagtaacctacagccagacacttctgtagtgaaaggagaatttaagattctacaaagagtcttgggccataataaccat

SEQ ID NO: 158790 - DNA, 171 bp, Homo sapiens
tatgaacacgtgtttcctctctaatatgtgcatttgcctttctgtttacatagaacatatgttctatatgtactaggatatgtatagaacatatgttaggatatgtatagaacatatgttctgtatgttatgtactaggatagactaaaggtttagaaaacctaaaggaca

SEQ ID NO: 158791 - DNA, 231 bp, Homo sapiens
ttatgggctctggccttgattcaagttgaaatgttggcatttcctatcagtgcatgttagcatctgaggctgtatactggcctaataaatgaagtaaattcccgttctcctgcactgctaagtattccccattccaaggttctatacattgggtaatgttttacttggccctggaataatctctagggcatattataatgtttctatactgggaatattcaacatgactcc

SEQ ID NO: 158792 - DNA, 524 bp, Homo sapiens
aagcatctttaagcctattatccaatccacttctctccaatccttccataaaggtgtcatgagactttctcaaatagcttgccataatagaggaagattgactattatagctattacactttcaatctaataatatctcacacatattcgtcatggcgtttacctttgagaaactgatgcaacatgtattgtcttagaatgctgcggttcaggtcttatccacagagtctagcatagggtagcacataggggaggtgctccctgtagacacggtggtgaaaacacagtcctaatatcaactatagtcaggcctgcctcatcctcagcaccactgtgtagaaagaaaactgatatcagagaagatactgggcgagaagagagtcaaggctgcccagctgggaaacttggttatagctaacataacccttagcagaacaggcaattattgcctttttaaaatctgtgattctttcacattattctttttctcattatttcaacaatttcttctctttactataatc

SEQ ID NO: 158793 - DNA, 492 bp, Homo sapiens
ctaggtccctaaccccactccccaacctcggtccctgggatgatcccagagggcacaagaaagatcctggaaagaattcagtccctgggagttattcttagatgcagaggtatccatttctgcaaaacatgggtgcctcacccgacctggcctctgcacaggccaccagctgctctgagggattaactctcagccagttgtgttttaaatagaccctaggagaggagctgaagcattttacctcataccctaggaccttggtcaatggtaagacgtaggacaaccttgagagcagggagaagctgcattttgggctcataactccagggtgaggttagaggagggaaaagctcattccagtcctcatcaggagttagacaaagaagcaacgttctactttgttttttaaaaaaagagatatggagagaaaaaagtggcttgttcaagatcacattgttagttggtggggttaggtctgaggagaggggcaag

SEQ ID NO: 158794 - DNA, 496 bp, Homo sapiens
ctcatctgtacagtgggggcggtactatgcactgagagttgggggcacagtgagtgctcatagatgtatcactgtggttactgtggttgtttttgagactgtattgcactcacacagggtttatgctgaacttgttaggggcctccaggattcaggagacctggactcaagtagagacctggattcaagtggagacagggtttcaccatattggccaggctggtctcgagctcctgacctcaggtgatccacccgccacagcctcccaaagtgctgggattacaggcgtaagccactgcgtctggcctgatttactcaaatatctgagggctcactgtgtgccaggcacagatcacaggtgtgaacaagacaggcagggtctctgacctcagggaacttaaaaatctccacatgaagatctctgagctgccaaacagaagagcaaaagtattctatcaaatctttgttttttttccactgaggagacaaaggcact

SEQ ID NO: 158795 - DNA, 380 bp, Homo sapiens
tacaggattaaggcaaaaaacaggagttttcagttgtaatcctgggcccaggggaatgcatcagttatgatgttaaaatcaaatagtgtgaagattaatagatactgatattattttgtaaaccatcagcagcaatatgaaccccattatttaaaaaaatagtttcagataccaactttcagatctagaagagaacttaacaattatctactctaatccctcacacaggtaaaaaaccctgagattcagagaagttaaattatttgtccaggaacacagcaaacttgtggcagaattgagacaagcccccaggtgcattcccttgggctggactcccattctggaacccatttcactctaacttatggccttgttctttg

SEQ ID NO: 158796 - DNA, 506 bp, Homo sapiens
cagcagctcacatgacctggatactagctggacttggccacatatctgtctgccatataaccttttcgaatcctaatttgcacagctatacaatcatggaggaaacaaatacgcagatggcttgcgcatcaaaagtgaagatcggagccaaatccaagaaagctgctgctgaagggaaaggcagaagtggggaagacttttttcaaaaggccaagggaggcagaaagagcctcctccacaaggagtcacatgacctggattctagctggactttgccacatatctgtctgccatataacctttttgaatcctaattttcacagctatacaatcatggaggaaacaaatacgcagattgcttggccatcaaaactgaagatcggagccaaatccaagaaagctgctgctgaagggaaaggcagaagtggggaagactttttttcacaaggccaagggaggcagaaagagctcctccagaagagtcacatgacctggatctagctggg

SEQ ID NO: 158797 - DNA, 193 bp, Homo sapiens
agaggatccccggaatcaccagcggggcatggggcagaggtcaggcagagctccaagcatgttgaatgccaactgcctgatgggacccccatctgtccactgctgagaggggcacacagacccctgcgggccttgaggcacatctcccagaggtagctttgatcaagaagcagcctgttctgctgccgctggt

SEQ ID NO: 158798 - DNA, 449 bp, Homo sapiens
  misc_feature (22)..(22): n is a, c, g, or t
cgggcgttctagaggatcccgnaacggtggttcatacccccccgatacagcgacaggtatgaacaacaggcaggctaccaaaaaagcaggaaaaatccacaacacccccgatacagcgacggcactgtgttcataccctagctacctagctaagtgtatttttctcctgaaatcccttttaccactctggcctcttctataaggaccctgatctcattccagaggggtctgccctcatgacttaatcacttcccacaaggcttcactcttactactattatcttggggactaggtctcaacataggaattttgtggggacacagacattcagaccgtggcactgatgatggtttagtcatgcctagtatttttatttaactaggttggaggattatcttgtttgtgtatgaagggttgaagtatttatatgttatgtactggcaaacat

SEQ ID NO: 158799 - DNA, 523 bp, Homo sapiens
tggtgccttgacctctctgctcccagattccaaaaatgtaagaaataaatacatatttctatactacccagtttatagtattttgtgatagcagcctgaatggattaagacagcagggaatcttcaggaaccagtctcagataggaagtcatgccaagccaaccatactttaatattccctaggtttatctaaagatttggcaaatatttagtgaacacttactctgtgccagatactatgagccaaagccaccaaagacaaacaaaaaaacaacacacgtgttcctatcacttcaagatcacaatccaggacaggtgcagtggctcacgcctgtaatcccagaactttgggaggccaaggcaggtggatcacttgaggccaggagtttgagaccagcctggccaacatgttgaaacctcgtctctcctaaaaatacaaaagattagccaggtgtggtggcacgtgcctgtaataccagctactcagaggctgaggcaggtaaatgcttgatctgggaggcag

SEQ ID NO: 158800 - DNA, 238 bp, Homo sapiens
  misc_feature (189)..(189): n is a, c, g, or t
  misc_feature (191)..(191): n is a, c, g, or t
tggtgccttgacctctctgctcccagattccaaaaatgtaagaaataaatacatatttctatactacccagtttatagtattttgtgatagcagcctgaatggattaagacaatatctaaaatgagagggggtgggagggagaaaggagaaaataagcatgctgtttagaaatacagagacacgtgccngnagaaagcccgagagacagagctcctgcagcagattggacgctatact

SEQ ID NO: 158801 - DNA, 312 bp, Homo sapiens
ctggaaggaagccactcgtaagagagtacggctaaacactcgttcctcaatcttccaccgccttgtgtggaactcatttcttgcttgtccatcttcctttcccctcccaggggagttctgcatgggaaggaaagaggaagacacctggaggcaggtaacaggaaacttgtctgtagcttctttctaacttgggaagcgtacatacaggggataattttaggcgtcaacctaccatctttactacttgttattcccccagcactcagctaacccatgactgctgctgtggcctcaaatagaacaatgccgtac

SEQ ID NO: 158802 - DNA, 403 bp, Homo sapiens
ccgctccacaccatctccccagcatcctgccgcctccgtccctccacctgtcggcaatgctggctctgccccgtgctcttgaccctgtgcacgagcccagaatttctctgagggtgaggactggctaactccttgcctcgtgtttacttctagtaggcatctgacaagcttgccttcaagaaaaacaggcacactcatccacagccatagcatatcccaagctgctaaaaaatgattttgagataaaacctaccaaaggcaaaccattgaaagtttcttgaaggaaatatttaaacacctttagattacaaaccacctctctatatagtaagaaagagtcgaagaatgtgataaaaggtggtatctgcagagtaagaaggaaagtgagccgctcacaaaaatc

SEQ ID NO: 158803 - DNA, 615 bp, Homo sapiens
acagcacctctcgggggtagggggctaggagaagggtagcattaggagaaatacctaatgtagatgaccagttgatgggtgcaacaaaccaccatggcacgtgtatagctatgtaaaaacctgcatgttctgcacatgtaccccagaacttaaagtataatttttttttaaaaaagtacaattcataggctgggcgcagtggctcatgcctgtaatcccagcactttgggaggccaaggtgggcagatcactaggtcaggagatcgagaccatcctggctaacatagtgaaacccccgtctctactaaaaatacaaaaaattagccgggcgtggtggtgggcgcctgtagttccagctacccaggaatctgaggcaagagaatcacttggacctgggaggtggaggttgcagtaagcctagatcgtgccactgcactccagcctgagcgacagagtgagactccatctaaagaaaaaaaaatacaattcattacttagatattaacaatgagctgcaaaaaaagcactccccccaaaaaaagcccaattacatttagaatattcttttttagaagtcatgggagtgtgtaatacgcttttaaagttttctgttaa

SEQ ID NO: 158804 - DNA, 244 bp, Homo sapiens
gaatgagttcctccaaaagtttatgttgccatctgtccttggatatgcctattttacacaaatgataccaagcaagccctaggacactttcaataaattatacttggttgctgagttatgtaaagaaagcaaaatgctgtagtggagaagctccatacattttcttgatagacatgaaagcctcaccaaaattttccctaggacccgtggttttcatcaatctagagttatcattcatgttgat

SEQ ID NO: 158805 - DNA, 490 bp, Homo sapiens
ttaggatcttttgagcctaggagttcaagaacagcctgggcagcatagcgagaccccatctcaaaaaaacaattttttagttttgtttcctgtgggaaaatatcaggaagaaagagaaggcatgacaaatacaaatactgccttctttttttttccccctaaggaggagtttaagaaatagagaagttaactgtgagagagtagaactgtgagggagaaaacaagtggcctcacagaaaaagtttacagataattttttaacagccctttactctgaagtttgtttgatttatagaaatatagaaatatagaaatgtcacctattactgggtttgttcagaatggcactattctttgatgatagtgccatttgtataaatgtttccaaagtggttgtacatttatcttattaaattgaacagccaagtgtactagcatgacatttagttactgaatgtacttttacatggtttggggtcttttcccctgt

SEQ ID NO: 158806 - DNA, 298 bp, Homo sapiens
tagcaagtgttttggtgcctgttacagagtaaggtgctgagaaaactcataatctggttgaagatactaatgacacaccaagagtaattgaaagcaggaatatcaggttaaaacataaaaaccatgtcctacagttttctagttaataaactgtcccacactccatttaggatgtaatcagtatgcagtaactatttattaaaagactgaaatgtagtacttaacggagagttagaaagaaataatggaaacgttgtgggacttcttggaattttctgatctttgacactttggacag

SEQ ID NO: 158807 - DNA, 797 bp, Homo sapiens
  misc_feature (583)..(583): n is a, c, g, or t
  misc_feature (797)..(797): n is a, c, g, or t
tgatgtggacataatcttatctaattcttacaaccacatgtatagcagacagcatagatgccaccctgtgttagctataatgcttatttctccttgcatgctgggcactgactattttgttctctccttttttaaataaaaatgtttatttttcccattttaacaaaaaaaaaaaacaaacacaaaaaaaaaaaaggggggcgcgcgcgcctctcatcaggagagagatatcatctctctccgctgcgaagaagggggggcgcacccacagaagaaggtcttattatcggcgcgcgatatcacgcgcgcgtttttctttgttctacccagagggggcccccattatatgggggcggcgtattatataacccgcatagggcactcggggccggctcggttttaaacaacggcgtcgcggtgactctgggaaaaaaccgcgcgcgtacgcgcttggggagaatctctttttggggagaaagagagagccccccctatatatcttctctggggggacggtgggccgcccaatatctctttgtgcgacaccaacactctacccttcagccgagagacaatttttacnaggcgcgtccctcaaggcgcgaacaatctttcacacttttcgtaacacggtgtctactaagcgtgtggctcacacaccttaagcgtgtcgcatattatccctttcggcggcctgcgaagaaagtttttcggcctcaacgaggagattgttgcactcgtcaggaacaattttttttatacccgcgggactatctttgttagtataaaaagaggtn

SEQ ID NO: 158808 - DNA, 104 bp, Homo sapiens
atgatatttggttttgattctgagaaatgtatacattattatgcaaagagattcaagggacatggacattaatggtgatagatgttggctggaatcagtaattt

SEQ ID NO: 158809 - DNA, 746 bp, Homo sapiens
aggtttaattgactcatgatttcataggctctacaggaaacatgattggaggaggccccaggaaacttacaatgatggcagaaggcaaaaaggaaggaggcatgtcttacatggccggagcagggggaagagggcaaaggggagataccacacacttttcaacaaccaggtctcatgagaactcactatcacaagaacagcaaggaggaaatccacccccatgatccaatcgcctctcaccaagcccctcctccaacattggggattacaattcgacatgagatttgggtggggacacaaatctaaaccacatcaggaaggcaaaagtcttaaaagagaaattttatgtaagttttgtaataaacctcatgggccagagaagcttattacaagagttgggaaatactcattgataatattggctgttgctggagagatgtcttcacagaattatcatatctaacatttttgtggtttttgagagaaccattgcagcagttcttattatagacatatgtacatgaaggcccctctttcatggcctcccagcttcatttttttatggtttgatgtaagtgactccattttggtgctcacaacttccacatttctcccttttggttgaaatatttttctgaaagcatttcacacttaaaagatatagattggccgggcacgctggttcacacccgtaatcccagcacgttaggaggcggaggtgggtggatcacctgaggctgggagtt

SEQ ID NO: 158810 - DNA, 269 bp, Homo sapiens
gtgcaatcatttcactctttcatgaacttacatatttatgtgtttgaataaaacctatgaatactaactggctctttatttcagtaaatgagactgtggtgaggagtgaattgaaggaggaaagtgtggggcacgtaattgaaaaataagatagagcaatggattttggatgcatgtctgctagtgaatcattctgtgactctaagtacaacacttcgtgctctgattccccatctggaaaattatgataatataactatctgcaaagt

SEQ ID NO: 158811 - DNA, 295 bp, Homo sapiens
ttcatgggccccgcttctatccatgaatcccccgcatggtggcagtgggatctgtgttaagagtccttgtttctggctaggtgtggtcgctcatgcttgtaatcccagcactttgggaggccgaggtgggcagatcacttgaggtcaggagttcgagaccagcctggccaacatggtgaaaccctgtctctactaaaaatacaaaaattagccgggtgtgttggcacacactggtaattccagctactcaggaggctgaagcaggagaatcatttgaatccgggaggtggaggtt

SEQ ID NO: 158812 - DNA, 372 bp, Homo sapiens
gatccccgctgcccacgaagtggcccccagtgagtcagcaagggcagcagacgaggcactgggctcaactttgctgtccctggaagcatgcatgtatctttctagcccctgtgtttggtgcctttgctgttttccaaccccaccttcatacttcctttagggcagggtggactctccagccaccctaccccaatgcctctcccaacctcagcccggcccctcccttgagctgggactctcactccagaacccgcccttgagctggggaacctgtactactggcatcttttccaggaaggaaagggttagcaatagtctggggcaataatatgaggaactaccatttattgagcacttcgtgtacctgccact

SEQ ID NO: 158813 - DNA, 243 bp, Homo sapiens
gggatggacttactcataacctggggaggttggtttcaagatccaagaagatcaagacatccaatcaaatgctggtttttaatgttgataaaatcattctttcaatacatatttgttgagttcttacgtgtcaggtattagggtcacagggatagagaagacataatctttggcctcaagaagcttacagtctagtgaagactgtaaacagacaataaacagacaatttttactatttatttt

SEQ ID NO: 158814 - DNA, 1005 bp, Homo sapiens
attggcagacactgaccccttcgtttgtttctgaggcaagaagaggcatttctcatgggaaaagggttgaggacaggaaagagggctcctaggaaacacacccatccatctaagtccacaggaggccaagtcaaaggtgtagggtcactctatacccattgcttggccctactgtgcctggaatcccccaagaagccaccagaaacaaaaacttctgggaaaagagacagtgggaatttcctcagacagtaatgagttattctggatcaaatgcccactgggccaagaaggtgagtcacctagtcagtttggactgccatagtggaataccattgatgggatgacttgtaaacaactgaaaattacttctcacagttctcaaaagtccaagatcaggtcccagcatggccggattctggcagggaccctcttccaggttgaagactttaacatctcattttcttgcatggtggaaagagagtgagagagctctctggggtctctttcataagggcgctaatcccattcatgagggctccaccctcgtgacctcatcacttcccaaaggcctcatctcctaatatgatcaccttgggggttaggatttcaacatatgaatttggcaggacacaagcagtcagtccataactgtgacacacaggagaaaactgcaggccagccagggagagtggcaaggaagggaacaggtgcttcctctccacagggcagctgccattctgctgagcatctgcaggtgggaagatggccaagtgtttccagagcatcccattttccaagacaagttggaaaatatagattttctttttaacatgaaaggtcagctcctgatctttaaatcttgataggtcattaaacaacttaaaatgcatgtgtgccaagcaaaacacattccagactgtagcccccaagccttcagtctgtgacctctggaaagatctagcatcattttgctgcttgaaggaatgttactgggggcagaatctc

SEQ ID NO: 158815 - DNA, 245 bp, Homo sapiens
tctagaggatcccatgccatgtagtaaggacaagtaagtccgtggtttgtaattttggattatgtttggtatattcaaaatcctatgctttttttcctgatagcaattcatttctttgttttaaagaactgacacatacatttttgtcctacaaaataaagcataattttgatgacagatttgagtgtttatttaatagtgtcaaacaaatagtatatggctaaggctgtccatgagatatgctt

SEQ ID NO: 158816 - DNA, 367 bp, Homo sapiens
gggaccctcagctgagccttctcttagccctaggggcgtgggctcctccctggacattctgtctcagcctgagacttggtgattgcaccttatccctgctagttctgttttgagagttcttttgacctcttgttagctaatccctcgttactctaatccctgttaaaattaataatttacattcaactttccctgtcaaatttctctctcctgatcagacccatagtgatatacttataatagtgaaaaattagaaagtacctaaatgcccaaacacagagatgtttataaatttatagtatatccacatagtaaaacactgtatagccactgaaaatcatattgtttatctatattttgatgttga

SEQ ID NO: 158817 - DNA, 332 bp, Homo sapiens
caggtagacctaaccagaggagagactataactcaggagtagaaaagtgtgttgtaactaggattactgtatgttttggtttctctgagtaagtcttaattgatcccttttgtcccattgtcccggtgtggcctgatgtacttaagggaggcagtaaggccaggttttcagaacacttgagcctggagctaaacagatctgagttcagaaatcacctattcttacttttgcagcatataacacatggagaggtgtataagttgtagtccaggaaactgggggaaggggcagtacatttttttagtgtcagtataacacaatagttaggaaca

SEQ ID NO: 158818 - DNA, 661 bp, Homo sapiens
attaccactgtgtattgagcactgagcaagatttaaggggtactacaggaaatcatggtgtagaagaggaacagacacatatattatgtgccataatagaggcaggtgtaatttgtcatgggatcttgagtgataatattaagaactcagtaagcttttaattaccatgtgacaggcaccattctaagtagtttttaaaatattatctcattgaatcctcataacaaccctatgcaataggtactctgattatcttcattttacagataaagaaactgaggcacaaggagtttaattacttgccataagtgaaaatgttagtaaatggtgaaactgagattaaactcagggagtgtcactccaaagtctgtgttcttaactactaacctataatgactctatcagtttttaagtgttggattcatcgaggtggtattagagatattcatttgcattataataaaaggtgagtatgttgaaatgctttttaaaatagtcatatcattttccattcatttatgattatttattttaataattatcctgttcaagtgaacaattaatgcaaatgtgactccagcctcttacctttttatgcaagtatccatctcaaattctttttttcttggatgtgtatgcctttttttctaattgaaaaaaa

SEQ ID NO: 158819 - DNA, 159 bp, Homo sapiens
actctgaaactccaactcaggctgtgaagcccaggattctgcatcattaacaaacaccctaggaaactattttacctggcccttcacccctcccatttccaaccccagcccacccctaccaaattttccaatttagagcatcattttatacttttctct

SEQ ID NO: 158820 - DNA, 217 bp, Homo sapiens
cagggaagccacagtaaataatgaaaaagcaatatagcctctctaaacttctgcaccactaaaaaagcaaccagattggagttctttctaagcaacaagtaggtaacaaacgtaatacaatcagcatttccaaaagagcattttataataaattttcttttttaattcttaaatggtactatggtatcaagcatggaaagcactaatgttagagata

SEQ ID NO: 158821 - DNA, 333 bp, Homo sapiens
ctctttacaaaggaatcgtggtctttttaccttttagttgggtgaatgttcactttcagaactaacaaatccatttgtataagtatgttgtattgcatagatttgtgcagtacttctcaaaatgattgtgagactcctgtaagcttttggcgaatgacagactcacaacatctgatgttaaattaacatcataaagcagaatttgcatctggccaccaggcctttagtcatcaaactagcaaatggaactaatgtggaataataatgagagagctggcttttgagaacagaagactaaaggggaattttaggaaacatgcagttcacattaaa

SEQ ID NO: 158822 - DNA, 611 bp, Homo sapiens
acattgaaggtagactcttagcaaaccaagtgctgctagtaatgtagttgaagcagtaataatgagaaatgagaagaatgacatgatagaataagattgaaaataaatatcaattacatatagtttaaaaatacccaattatatttcccatttatatctattttgaatttgttccagtagacaaaccttgatttcatttgtggaataagaatcacaccaaagaatcttaccatttttctttgggagtgttctgcctttgataagctttaatatgtgtcctcctatacaactgcaacccctgttagaaactagtctaccaggtagtgtcatttaagacttttgcctacacatttaatatatgctgtgcttttcatttcacatgagaatgagtttttatgctctccatgaaactattgtccataagtagacatgttggctatgccagtatttttgatgtttagcagaatttcttagttatagagcagtaaggagaatatgaaaagtccttttaacaatgcaaatgagaaaatacaactagtctaccaggtagtgtcattttggatttttgcctacacatttaatatatattgtgcttttcatttacatgagta

SEQ ID NO: 158823 - DNA, 451 bp, Homo sapiens
ggggtgatattcataaaatcattgtgaatgccactgtcaaagagctttctccctatgttttcttgtacgtgcaagtactactattaatggttacattttaaaaaccctttggacaatttgaataaatccattattactggaaatttttaacattcttttctctgtaattcaggctcaaaatttggcagggccttttctctataattcaggctcaaaatttggcagtgtcttttctctataattcaggctcaaaatttggcagtgtcttttccctataattcaggctcaaaatttggcagtgccatttctctctccttgctccctcaaatacttcagtcaacttttcctagtgagttactcttgtcactcagtttctgctaccccagcccagatatcacgttgtcacttgccccctccctcccccattgctacaatgtcctgtattgtatcc

SEQ ID NO: 158824 - DNA, 397 bp, Homo sapiens
gaggatctgtgtaagcttcattttaaggctgcagtaaaaatataacatttcatctgtgtgttcagaggtgagcttcagggattgggaacatcctgtttggtagtaaggtcttgagggtaatacacttatcccacacctcttcatactgtaggtcagaccatttgagaaagctgctggtgtcagagaaatggagataaaaatttgtaaaaagaaaaaaaaattgtaaaaaggtgaggaataagtatttggaattattgcggaggggccaagttccacctaaagattttcttaaaacgaagtttcctgttgatttcattttcgataataatagatacttgttcaatgttgctcaatcatctgaagaacaatttattctttctatcaataagtctcaatg

SEQ ID NO: 158825 - DNA, 298 bp, Homo sapiens
cctaccctggctcacacctagagctccaccagcccttcacacacaaaacaacatccaatgttctcccacggccccactcctcctcaggcacccctcgtccttaccctgctctccagacacctccaccttctgcccagctgcccgggcgcaagacgggacagggtgcagggccagcagatatgctcctctttgagacttttgtttaggtcaggaaaggcctgaacacgttacccccaaggggcaccagccagcaagcggaggcaggggccccagagaggcagagaccggctggaggcgg

SEQ ID NO: 158826 - DNA, 618 bp, Homo sapiens
gacgacacaaatgaatggaaacacatcccatgctcatggatgggtagaatcaatattgtgaaaatgaccatactgccaaaagcaatctacaaatttaacacaattcccatcaaaataccgccatcattctttacagaattagaaaaaacaattctaaaactcatatggaaccaaaaaggagcccgcatagccaaagcaagactaagcaaaaagaataaatctataggcatcacattacctgatttcaaactatactataaggccatagtcaccaaaacagcatgatactggcataaaaataggcacagagaccaatggaacagaatagataacccataaataaactcaaatacttacagccaactgatcttcgacaaagcaaacaaaaacataaagtggggaaaggacacccttttcaacaaatggtgctgggataattggctagccacacgtaagagaactaaactggatcctcatctctcaccttacacagaaatcagctcaagatggattaaggatttaaatctaagttctgaaactataaaaattctagaaggtatcatcgaaaaaacccttatagacattggcttaggcaaggatttcacgaccaagaaccca

SEQ ID NO: 158827 - DNA, 123 bp, Homo sapiens
gccaaggcacactggttgagagagaaactctggagccaaagtacttgcatcctaattccagctcctctgttgattagctgtgtgaacttgggcaagttacataacttctctgttcttgactcc

SEQ ID NO: 158828 - DNA, 352 bp, Homo sapiens
gggagaggaagaatagaccctcctatctgctatatcttgaagttatacaaatgctttcagatgaatctgtttctgagtcatgtttctgtgcgaactataaggaagaaaagcaagatctaaaagagaggatatggggcacacctgcattgttaaatgataccataaaaccctattcaggaaagtggatagatactcaagaccaaaagacatgctttctgatgacaatctctacatgttcatgtattatagacatgttttatgaagctgtacaagaatttcccagaggatctgtcacctttacccaccaccctctgctctgctgacacgggcagtttctctcctgagccacctg

SEQ ID NO: 158829 - DNA, 395 bp, Homo sapiens
tttttgcagattgagtttgagatatatcttagttttaatagttttatttcttaacacataatgacttctgaaagatgcctttgcagcatcctgtaatcagctcacatcattcgtttctgtacttgtatattttccagttgttttccggttgaccccaaaattcgtgagatttttttcctacaacaatttcaaaagagttgctgtttgaaattagttgcatccagttcagatcgaggtctgcatgctttctagtctttgttatttattggaaggctgtggtacctactacttaagtttgattgtttcctttgctgcgaagaagctttttagtttaattaagtcccatttgtctattttttcttctgtagcctgtgcttttgggtactctgcatcat

SEQ ID NO: 158830 - DNA, 135 bp, Homo sapiens
tgtgagccatcatccctggccagagacagctcttgtaagatgtctggctctataaagaatgggtgaacaagaaagcataggatattagagacggcgtgaggcaaacaaaagaatttgtttgctgcttgacttagt

SEQ ID NO: 158831 - DNA, 209 bp, Homo sapiens
actgtgtgggcagcggggtgctctgctgaccaagccaatccagagaagaacaggcagctcgtgagcctctgccagccagcggcagcagcaggtagagacccagagccagagcccctgaagagttggcgattattcatcttcattggtgtgtcagcgcattttcagccgtatccaccacagtgatgagctgacttttcacacagtgtaaa

SEQ ID NO: 158832 - DNA, 527 bp, Homo sapiens
tttcaccgtgttacccaggatggtctcgatctcctgacctcgtcatctgctcacgttggcctcccagagtgctgggattacaggcatgagccaccatgcccggccgcatttttaatttctaaaagttctgcctggttcttttttgatatgtccagtcattcttcatgttctcatgttatatgctgatttttgtgactctatagctattctgtagactatatcagacattcccaatgtctgatatccttgaggagggggatgtctaaatttattgcttttttgtttttttttctgttgtctctcctcaatgtagctgtcacctcatgtgtttggtgatcattgattatgaacttctgtttgatctttgtggtgatcttgagagtctaatttgaggatgcttgctttctgaaagcatttctatcagctttgtctgggagccagaaagtttagctggcatcacttttgagttcctacattttgcttctggcccagggctcagtgtcctgatcctattactgctcttggca

SEQ ID NO: 158833 - DNA, 525 bp, Homo sapiens
gtcagatttatgtgttgcagattttttttctagtctgtggcttgtcttttcattttcttagtggtggtttttgaagaacagaaatgtatggaaccccatttataaacttttttcttttatggttcatgcttttttatgtgctagctaagaaatttttgcctaccacaaaattacgaagtttttaaaaaatggtttttcaaagaaattttgtgcttttagcccttacatttaactcagtgataaattttgagttaatttgtgtatatgaaatgagaaagtaaataaatgttcatcctctcactccatggatatcaattattcccacatcatttgttgaagaagactgttatttccctattgaagtatcctgatgactttgtctaaaatcatttgaccacatatgcatagcactgtttgtatggttatgtgaataaaagaaatgaatttatataatgcctttgaaggaaattcaagatcatgtaatacttctcaagtattataataaacatttattttcatacccta

SEQ ID NO: 158834 - DNA, 259 bp, Homo sapiens
aaactgaatggtaaataatggtacctcaaataaaaccttgtgacgtggctgccagattgcaaaggtctaaactttgaaagaatcaatcaggtctcaattgccactctcaaggagtgactatggctaagtagacaagtctgtctatttcaggaatgtggtattaaagagcccattgggctatgaaagtaaagtcgcactttgcaatcggtatatcagtcatacaagtgaaattttgatatccatttagttgatacctgag

SEQ ID NO: 158835 - DNA, 681 bp, Homo sapiens
gtcccatctgcacctgtagcagagtttgacgatgagatcctggtcttcaatctgatattataacgggatgagacattgggatcttgggggaggagatggctgtactttgcatgggggggatgtgaattgttacagccagagggcagaccgtggtaatcccaaacatggccaaaacagtatctcctatcacacattctcttccacagtgtgcctgctatatatttctcccatgagagttgaggtcgacaccagctccttgaacctgggtggacttgtaatttgcctgtaccactgcatctggcctagttcaactttataaataaatatgtcaaagataattcaatattaaagtttatatatttatcattttaaccaaataatgtagaaatagagtgatatgaaacataaatacctatataggttaagaaaaatattcaataaattggaacaattctttgttataaaattcttaagaaactcagaataaaatgcaacacctttttacgattataaacccctcagcaaacatacttcaagcagaaccttacgaacagtataattaaaatgaggaaccgctgagatcactgctctctcattatttctcccggcgttgagctggagtcctaaccaatgtggtaagacaaggaatgaagattaagaggtatatgggctggaaagaaa

SEQ ID NO: 158836 - DNA, 597 bp, Homo sapiens
cctccgcctccaaggttcaagtgattatcatgcctcagcctcccaagtagctgagattacgggcacctgccaccacgcctggataatgtttgtatttttagtagaggtggggtttcaccatgttgactaggctggtctcgaactcctgacctcaggtgatctgcccgccttggcctcccaaagtgctgggattacaggcatgagccactgcatctggcctagttcaactttataaataaatatgtcaaagataattcaatattaaagtttatatatttatcattttaaccaaataatgtagaaatagagtgatatgaaacataaatacctatataggttaagaaaaatattcaataaattggaacaattctttgttataaaattcttaagaaactcagaataaaatgcaacacctttttacgattataaacccctcagcaaacatacttcaagcagaaccttacgaacagtataattaaaatgaggaaccgctgagatcactgctctctcattatttctcccggcgttgagctggagtcctaaccaatgtggtaagacaaggaatgaagattaagaggtatatgggctggaaagaaa

SEQ ID NO: 158837 - DNA, 446 bp, Homo sapiens
tgtgccaccatgcccagctaatttttgtatttttagtagagacagggtttctctgtgttggtcaggctggtctcgaactcctgacctcaagtgagccactgctcctggccaacaagtttttatgtgtgttccacaggagattgaaaagtgaacatagtttttgtaagctcaaagtgttcgtatttgtctcacacaatattttgttaccattattaagcacataaagttttgctttctgaagactgtgcaataagtggtactatatactgtcatcaggagatgcataatgtcttacttcttgatgatattagtagccattttacatcgctagggattccaaaatggtgatacttaaacattttactctgcttatttggtgggaatctctaaagtaggggtctccatctcccaggccacgtactgttaatctgctgtggcctgtaagt

SEQ ID NO: 158838 - DNA, 228 bp, Homo sapiens
ctccctctctctggatctctctctctctctctctgggtctctgtctccttctctctgggtctctgtctccctctgtctctgggtctctgtctccctctgtctccgggtctctgtctccctctctctctgggtctctgtctctccctctgtctctgggtctctgtctctctctctctgggtctctctctccctctgtctcagggtctccatctctctctctctgggtct

SEQ ID NO: 158839 - DNA, 405 bp, Homo sapiens
tgtgaaatctctggccctgacttttagatttctcgatccctattcctccctcagggctgctatataaccccgttctcagcatcaggttgggaattctctgtttgccattatgggggagagaagaggtcttggtcagctgtttttctgccctttgtataaccccaggctaattctaatcagggtttattcgatgctcatggtccttctaggtaactagtttaggatgtcataaaaacaaggttggataattatgtcatgaccggtttcatatcactctgcttaacattgttctgcattaagtgactgaatatagaggcaatgacaaaataaatgaacaaaacatcctgcccaatcccagacctgcatttgagttttatgcaactaaacatcatttgagaaaaaaga

SEQ ID NO: 158840 - DNA, 567 bp, Homo sapiens
aaaaaaaaagtttacatagttgtatgactgtgtgaaggtgtctgagtgtgccgcggtagaagtttgtttctgatttattataatgtatgtgcggttaaattttaggaagaaatagatacgttttattttcttgtttttttatgattgaaggagcagaaggtgtcttttgcaggggtgatcaggctcagggcactcaacctgggctcttgaacggttctggttttctgggaccccctgagatttagctacagctgtgcgtgtctgtctgtggttttctctggggaatctctgtagtcttcgtcaggttcacgaaagggctagaccctgtcgtctagtttaaccccctctagggaggggcacagacagccattgcagatcatgcagctggttcctcgtgaccggggccgtcgtgcatgtaggaagagccggctcggctccagacactgctgggctcacatgtcacgtgaattgcctcactgagacagcagctctgtgagatcgtggctgtgagtcggagagatctgacaaggtttcctgttgaaagcaggatgtgaattgggcgtgtga

SEQ ID NO: 158841 - DNA, 194 bp, Homo sapiens
atgctgattttcgttttgtgttgtgttgtattgtttctttgcttttagttttcaaaatgtattctccttttgcattgttgctgagatcaagaaattgtactctgcactactatcttcacctccagaacctgccagtgaaagcttattgagttagagggtaccatagacatcttcctctcccaggcttgcagaga

SEQ ID NO: 158842 - DNA, 699 bp, Homo sapiens
ccccaatctcattttcattgtctgtaaaatgaggggttaggtcacgttgacaaaatttagctaattttaggctctgaactccttttaagaatctaatcattactaacgattctccagaaaacgaaattgaacatatgtttaaaattcccaggcaacacagagacttaagaacttcttggcttgaatattatcaaggattactccagttcgaagtgtttgattctatacaataccaaaataagtcccaaattatagtgatctaacaaaaccatatgtgaccattgcagtgtggcagagagttttgctgcaagtttgcccacgtatgtgaactgatgaagaccttcatcttgtagctgcaacatcaggaatattcagcctctttcttcattgcatagtgagagagagaaccaaaaaccacatagggagttttcactgcctctgactggaagtggcatgcattcctttgaattttatattattggccagatcttatcacctggcacttggcccctaactgcaaatgggatagaaaatagaaaagagtatatttggtaaacattatatattctctttcacataagctttctccttacacagatattttcatagctcaaccagaaacttttggttaaataagcatagacttgtctaaataatggaatactatgaagctgtcataggtttgtaaagattgctaag

SEQ ID NO: 158843 - DNA, 339 bp, Homo sapiens
tggatatagagactggaaaaatagacactggagactcagaaagatggaaggttggagagggtttaggaatgagaaaataactaattgggacaataaacaacattcagatgattgtcacaccaaaagcccatacttcatccctatgcaacatgcttctgtaagggagctgcatttgtactctctaaagtattaataaagagattaaaaaaaaaaaaggcctggcgcggtgactcaagcctataatcccatcactttgggaggctgaggcgggcaaatcacgtggtcaggagttcaagaccagcctggccaatacaggtgaaaccccgtctctactaaaaa

SEQ ID NO: 158844 - DNA, 246 bp, Homo sapiens
gcggccgcctactactactactgctcgaattcaagcttctaacgatgtacggggacatgcttctgtaagggagctgcatttgtactctctaaagtattaataaagagattaaaaaaaaaaaaggcctggcgcggtgactcaagcctataatcccatcactttgggaggctgaggcgggcaaatcacgtggtcaggagttcaagaccagcctggccaatacaggtgaaaccccgtctctactaaaaa

SEQ ID NO: 158845 - DNA, 466 bp, Homo sapiens
  misc_feature (438)..(438): n is a, c, g, or t
atattttgtcctttaacctacacttacttaccagctctcaatcttctcccgtagccataccctcaatcaatctaagctcttttcacatgacttttcactacatgaagatgtcaaacacatgcttggataagtcatttttttccaggctaaacatgtctcacatccctcccacattacttatatgatatggctttgaatgtctcaacaccctgagactgttccctccccacacaagcttcagcttgtctacatcccttttaaagcctcacaactgggttggcccagtggctcatgcttgtaatcccagcactttggaaggccaaggtgggaggatcatatgaggaggctaggagttcgaggtcagcctggccagcatagcgaaaacttgtctctactaaaaatacaaaaattagtcaggcatggtggtgcacgtctgtnataccagcttctcaggaggctgaggcac

SEQ ID NO: 158846 - DNA, 360 bp, Homo sapiens
ccatcataaacaagaaaaccctatatcccacccccaccccctggtaaataccatatgacattctttagaaacacatttttttttaatacagaaaagcttaaaggcaccagaagtgaaaagtaacacacatttccaccatccagaagcaactggtgttaatatctggaacataaaatggaatcacatcttagctgaaaattagattctaaagttgtgtacaaagtgaaaattgtgtatgtcaaaacaactgttgaaggccgggcacagtggctcacacctgtaatcctaacactttgggaggccgaggtgggaggactgcctgagcccagatgttcgagacccacctgggcaacatggcaa

SEQ ID NO: 158847 - DNA, 622 bp, Homo sapiens
gtccttagttagctttggggaaaattaatctgcggggtggtgctcgacacgcaggatgctccgtagtcgctcgtagctttgcctcaaggtcttgagtgtgagtgtatgtgcacaatttcataattacatcctgtgtctttatatatctttagtttgaaagctcttgctagtttttaagtaaatcattccaagaatgaattatctattccttttgtgtctttccttagtgaggctttccttatgatactttttcttagcacttatcacctaaccaccaagcatttttgttttttctctgcttattgtctggctccattaaagggcaggtggaagaaatactatgacatcgttatactgaagactatgcatagtttctcatgagaaaaatcaagtagactctcagaatctgttttctcaaaatctgtacatgctctgcagatgttcacttagctagtttctggtgtattcaaagcagtgaattatgtagcggaagtggtaaaacagacaataataggcagatatacttggaaacagtaagaaataactggccataaagaggatgtcatgaaaaactacagaaaaatacaatttttaaaaagtgagtatatagtgaaggagctac

SEQ ID NO: 158848 - DNA, 312 bp, Homo sapiens
actgcccatggcagtaacctgctcaatagcacagcatcctgtattcacttcttcctgtccccatctccttccccactcccctactagtaattcccaagatcacctcccaaagaaataaatgcatgcaaccccttgtcttgggtctgcttctgggggaacccaagctaagccctcccctgtgcatccttcctgcacccatccctgtgcctcccgtccacctgacccccatgcatcaggagaatgaaggtaggttttctccttgaggaaacataactaataacaagatcacaagcaacccaaagacacagacat

SEQ ID NO: 158849 - DNA, 655 bp, Homo sapiens
aggatctccttctcgactgaaatagcatttcccacccccaccaggcatcactctgtctgctgccatttatcatcaaagagcgatgtcactgggcatgtgtttaggtttggggcgggtggcttttatttttttaattttagagatgaggtctcactatgttgcccagcctagtctcaaattcctaagctcaagggatccaccggcctcggcctcccaagagtgctgggattacaggtgtgagccatgtttcccttggtctattatctttaagtttctagaggagaaatttttagacaagaggatgaatttttttttaaaagaagtattacaggttaccaaactgctttccagaaagggtgcactgaattctactctcaaacaacagggcatgaaaaatgttccctcaccaaaaccacaatagcattttaaaatatttttctttctggtaataataacagttgaaaagctgctattatgttttcattgcattagttgaaatttgtagggttaaatatattgtgctatatttatttagtcaactatatatttcttttttgttagcctggtgtttttttaaaaagtattaagttatctgttttctcctggttgtctttgtctctttttataatctcctgaactcttcatagttttatat

SEQ ID NO: 158850 - DNA, 239 bp, Homo sapiens
atgtggatcaatgtgtgttgaaggaagtgttacatatagggacaactttgaggtacatttggggacttaagaagtgaattctggaaataggtagcatttatgtagtagtttaaaaaatatctgatgctgggaaatcactccacctactccctgcaaaatgccccaaaccttttgtttctgatgtacatggtaggcattcagtaagtttagtaaatgtacttttctgaaggtgactgtaa

SEQ ID NO: 158851 - DNA, 623 bp, Homo sapiens
gagacgagcggcggcggcaggcggccagcccgggtctacctcgctccgtgcagggccgggagagggatccgccatattggagctggggccgaaggtgccttggagccgcggcgcgaggcgggtggaggtggcggccctggcctggatcgggaaggagtcggctctgccctggcccgcaaggctggggagctaatgagcctctctggctagtctcctccccgtccactccctccactttctgccgccgggacccggctgggagccggctgtggcagtggcagtggcagtggcagcgacaggatgttctccaagaagccgcacggggacgtgaagaagtccacccagaaggtgctagacaccaagaaggacgcactgactcgcctcaagcacctgcgcatcgtcatcgagaatgcagaatctattgatcttaaacagtttttcgaccaacatttttcacatatatactatgtgttctttgaaaattttgtgactattgaagctagtcttaaacagaaaggtcacaagtctcaaagagaggaattggatgctatactttttatttttgagaaaattttacaacttcttccagaaagaattcatcagcgatggcagtttcatagtat

SEQ ID NO: 158852 - DNA, 105 bp, Homo sapiens
cacggccagtgcaaaggctcagaggtgggaacagctgggagtgttcaaggaggagcagaaggtgaaacggagggagggctgggtaagcgatgcgttggagagaag

SEQ ID NO: 158853 - DNA, 374 bp, Homo sapiens
ttgccctattcataccccttgactagactgcaatgcctgtttacttatctgcttcttcctccagactcttagctccttgagagcaggaatcttgccatcttcactattgcagcccgtcaaacagcatagtacgcagcacacagaaggcacctagtcaacatttttgtaatgatctcataagggaaaggagagggttttgttttgttttactttttagtttttgatattaccatgaaagacatataatcaccttaggagggaaatggtaatagcccagactagagagagaaattgaagagatgggagttagaggggaggagagactgagtaagtgaattaggagtggttgctggacattgaggataacatgaata

SEQ ID NO: 158854 - DNA, 511 bp, Homo sapiens
gtcataaatgggtaaccacagttgatgcttgatagcaaaactggtaagcccagtaataaaatgccgtcttccagataaacaaatccaacaaaccgaaaggcctctagtgtataaatattaacctatgctctattctgaatttatctccattaacttcctgacttctgaaattcttgaggaatagtcaaaatatagactatttctttccttgtgataccttattactaaagtgattattccagaccttaaagttaaaagctgcttgcaaaactactttattagttagctctatttgagaaattactttaaaaaagtaacaacaaagaagtaacaagatttttaaccgccagagaaaaggtaaaaaactagagttgtcttgtcttagtatcctgacttataaggacttcctcttgcaattcatccaaaagcaataagcagtaaactaaaaaacacaaattccatccctgaggaaactgggagacatctgtagccccaaaccagaaaatgtaac

SEQ ID NO: 158855 - DNA, 278 bp, Homo sapiens
tcctccatgtagttgtaggactagcggccccaccacatgggatgagagccctgtggcggctgcctccagcccctgcctcccaggcagctcattctaggaatgctccttattctctgggaagtttccatccacagctcaaccaaacgtttttggaatgtgatgtttataattgtcacttgtgcaagttctatatgtttggtaacctgagtaaacctttgtttattgcaatactatcaagtattcacttctcacaattgaattggttagatacatatctt

SEQ ID NO: 158856 - DNA, 626 bp, Homo sapiens
ttagcacaggagatttgtttcttggaatattttggagaggatagtggttgatgaaacttcctgcttaggagcagatgggtgagaagatatcagtgaaagcttagattaagaagcaggcatttgaatgagccctaaagacagcagtgaacaatcatcctcctcagtattttactgcattgagctattctttataattttcacactgtaaaggagacatctgtgttcttggagatatatcttaaaataaaaaccaacaagagtacaaaacaaaccaacttttaaaagatcaacctgactgggaagaaaagtttcctataaaaatggaaatgcattagaaaaccattgtaacttgtattcagatagcgccttatgcatatgaagccatcatttatgagatctcagaactccaaagactttacgaacaatcatgacccttgtaaggtccagaggaagcagaagggaaagccaatgccatcttttgcaaagaaggaacacacggaggcagcaatatttagattagttgctcaagttcaaacaacctagttgatttaaaagttagaagcaaaatattccaggatctaaacttacatcctcctatcttagatgtctggggcaatctggtggcg

SEQ ID NO: 158857 - DNA, 520 bp, Homo sapiens
ggagcagcccgggcagagtcccagaggccctgggagggtcccggtgatgcaggggggtaaacaagccaccagcggagacagaaccagtgtgcggggcttggaggaacaggtgggtggattccagtgcgtttggaagatgaggttcccaggactcgctgatggcagctgtgagtgggagtccagccagcatcccttccagatccctcttgtggaccgagatccaggtctcagtgtagaccaaggaacagaggcagcccctactcgggctcccaggctccagccaggcctgctaggtgggcggcctctgcccgtgtgatggaaggaagccaggctcagagatggggtgacttgtcccacgtcctggagggtctcacagctccaccacggccaggagacttcagtccagggggcctccatccccagcgaccttcacctgacccccaggggaccccagccaacaagacccggcctgcagctccggaacgggggagggctgctctccaccgcccctgtgcggccg

SEQ ID NO: 158858 - DNA, 369 bp, Homo sapiens
gaataattttttagtctgtcttcacttttcataaccctaatatttttggagagtacagactagttatttttcagattatttctcaatttttgcttgctagtgtttcttcagtgttggattctggttatgcatttttagcagaaatacatctcaatacatcatattatgatgcatatgtcatcagtttgtccaataaatgttgttaactttgattaaagtagtgtctctcgggtttctacactgtcaacttactatttgtctctcatgaggggatatttaaatgctatgtatacatcttcttcctcattaaacttttgtatgctaggtttagcatccaattacgattcttaccagaatcaattattacta

SEQ ID NO: 158859 - DNA, 155 bp, Homo sapiens
atcgacccccccgccgcctgccgcccaaaacacctcataaatatagttgcacggatgaatgaagcacagaaagaagtttgtagtagatgtcaaagaataaggataaatgaatatttttttttctcctttttttttttttgtagttggtgtttgga

SEQ ID NO: 158860 - DNA, 178 bp, Homo sapiens
aaaggtcctcagcttgacacacaagtccctccaaggcatgcccatgcctttctctccagccccagatccctcatttccaagcatacacactggattttcccagctagattcctaatgaatgccattgccatgtttacaaggatcttgtcctttaagaactgggagcttatgaagaatt

SEQ ID NO: 158861 - DNA, 417 bp, Homo sapiens
gtgacctcgggtccaagccaagagaaagaagtacaattccactggggcagcacgcaggaagagtgactttagagtgcattagatctggtggtggggagatgagtagttttctcctgattgcttctattttctcagggaaagtagctgttagtggagagcaggttgtttgaggtttgaggagagaggcgaaagtctcaaatgcccatctaggatcatgaattgaggagggaaattgttgggctgtactaagggcccactggaggtttgtggtcacacatttaaagtcagacaatccacatggttttgtgtgttcttccagtgtggggtaggcaaggagttgacttggggttttgccagagaataaaaggagagagaggtctaaagatggaaagattaggcaaaggggcaatcattgtg

SEQ ID NO: 158862 - DNA, 413 bp, Homo sapiens
tggtgtgaaatgttcagaaatgaatgtttagaatgaaactgacttactatcagctccgaccctgggccctgcctgtcctgacaggtgtggacgccaccaccacactcacagctgtgaaacatctttcctacagccatataagtggcaactcttgagagtttagtgtgcttttaagaaagctaatgacactaagaggaggagaatggtgctgaacagtcaattttgttttcatcttacagagaacagtaagctattaagagcaatctgctcaacagcgagacgtcacgaacaagctgagccatctcccctggtgtcctgggctaaagaatctccttagaaataacagcatttgccagacgtttatgcagaagtggatgcattatttaacaaagtcccgtattgtttattctgga

SEQ ID NO: 158863 - DNA, 225 bp, Homo sapiens
actgcccactacctgcagaataaaggcctcaattccttgtcatagattaatggctcgaattcccactcacctctccagaggatctcctgcttctactgagccactgcaattcactgaagaagtatgctctttcagctgtggcactcttagccctgacacactctttacgcagccccttctttatctggctaactcctacttacccttagatctcatctgaggcct

SEQ ID NO: 158864 - DNA, 263 bp, Homo sapiens
gtcacgtgtctgccaagggaatctgtacccgggtgtgtatcgaaacagaatggccttctctaaagattaacttaagtggcttgccctcatcgagccccttcctatgtatggattaaaaataattttcgataccagtggaggaatgctgttgtccttggtctgctggtggccagcttcctaaacggcattttttatttgcttctctctggtaggccttcgctgttggtgaggaaacattgaactttgtccagggcatttgagct

SEQ ID NO: 158865 - DNA, 380 bp, Homo sapiens
tggattactttttaccttggcagaatcacaggaatgtcaaggtaaccaggccacctcagcatagctctgattctcacccggtcacctgacttgcccgccctcccccatgactcacccagtggctcagcatggggcctgctgcactgtggctgctggaatctgccaaggacctcctgggactgcccttggttttgtgtcttccttagagtagatcaaatgagaggaaccacgtgaagtagctcacacagggcctaacagagcaaacacaagacgtggaaagcagacttggtgaggcttgagtttagtttgagggttgcgggggtcccagctctgctgcttaacagccctgtggccatgggtatatcccccagcattcagag

SEQ ID NO: 158866 - DNA, 464 bp, Homo sapiens
gatagtactttccacaggggagtgaaacgacgacctgacttgtatctcaaaggaacattctgactgggatggacatagggtagtagaagcaggaaagctggttgagaggctattttataaacgatggtagtttttaccaaggtggtagcacaggaggtagtgaagggtagtcaggtcatgagtatattttgaaagtagagctaactggattcactgataaatcaagagatacatcaagaagactccaaggttttagtctgggcaactggacagttcaaattactgaactgtgaaacactagggactacagaaatcaaaacttgggttttggatttggtacctttgagatatttattactggatggctgaatactgcccacccttcccaaacaatgttcaggtatccaggacatgagacttcagtatcaagaacatattaatgtccctgtggaaaagtattggta

SEQ ID NO: 158867 - DNA, 428 bp, Homo sapiens
accccctctgcaggaagacagacgtgagggctgggagggtgcggatgcaccagcggctgcaggaccacaagccagaggggatcagctcttcaaagggcactgggccaggcttcccagcacccagggaccctgagctagccttgtgagtagagcaggggagtctggcaggtagaggatgggaggtaaagggaggcacagagtgggcggaggctgggaagtgtgaaagggcactgtgtacagaacctagggagtaagcagaagccagagatggatggaaagttgggctgggctgcattgtggaaagccttgaatgccatgccaaggaacttgggccagtgtattcaccttggcttgagttgtaaaagcaacagtgcagattcctgggccccaccctgggcctctggatctgaatctggagggagacgctg

SEQ ID NO: 158868 - DNA, 354 bp, Homo sapiens
aattttggagcagtgaagtagcaaagtcctttgagggaaatatttaagtcaagtctgtggtttgatgagttagatatgttggtcccatctgaccacatgagaaacagatcctccactgatcatgttttctgcgtagataagagggaatgctcatattcgccggtctgtcttagtatgtgctcagatcccaagctttatgggacttttggaaagggatggggctgtgattaggacctttgaacagaggtcatgttcctgccgggaaactggaggataaattttattattgaatggatctctcagaccacaagatgattctaagtcatctgacatccttatcctctaaatcagaaa

SEQ ID NO: 158869 - DNA, 573 bp, Homo sapiens
cctccgcctcccaggttcaagcaattctcctgcctcagcctcccaagtagctgggatcataggtgcccgccaccatgcctggctaattttggtatttttagtagacacagggtttcaccatgttggccaggctggtctcgaactcccaacctcaggtgatccgccagtctcagcctaccaaagtgctgggattacaggtgtgagccaccacaccctgcctgttgttattatttgtggttattttttagggtcagggttcactctgtttcccaggctggtctcgaactcctaagctcaagtgattctcctgcctcggcctcccaaaatgttgggattaaggtatgagccactgcacctggcctttctttctttctttcttttttttttaaacatcagatagtggagcaataatattggtcatcagtgtttcttttcttttttaaagcacttcgttacttcctggcactgcaagatgctaccgctcatcttgtttctttctttccccagacctagaatcagctatttctgaaaggagtcctggtttctttaattggagaatgatattagaaacca

SEQ ID NO: 158870 - DNA, 659 bp, Homo sapiens
tcgtacggagattcctttgtcttctacaaaactggtacttggtgcaaaaagatgtggactgctggcttagagagaagccaaatgagccctcctaacatacagaggccattgtattgtgttccagaattaggatggcctcaggagtccatcttgtcccgtttctttctaccttcatccctccttccctcccttctttccttccttacttccaagctgaggtctcgctatgttgcccagtctggtctccaactcctggcctcaagcaatcctccctcttcactcagcctcccgagtagctgggattacaggcatgtgccaccacgcccggctaatttttgtattttcagtagagacagggtttcaccatattggccaggctggtctcgaactcctgacctcgtgatccaccagccttggcctcccaaagtgctgggattacaggcctgagccacagtgcccggccgagtgcgtgtgtttttaaagtgtgcatcattattactgaacagcaacaccaagagagtctcacggttcctgtgtgttcccacttggactattttgcaacactcctcttgacgttgaaaagaaaatgctatgacacttggttactgctgaggcgaggccaaaccaccctctccagacctgggaaaccagtgagtatt

SEQ ID NO: 158871 - DNA, 327 bp, Homo sapiens
ggcatagtaggctgaataacgccaccccaccccgcccgaagatgtccacaccctaatgctcagaacctgcgaacacattccccgacatggtaaatgaggttttgcggaagtgattaaggatcttgagatggaagggtcattctggattagctagtggacccaaggtaatcacaagcatccttctaacaggagagcagaaaggtcacagtcaggctgggcacggtgactcacgcctgtaatcccagcactttgtaaggcgaaggcacaaggatcacttgaacctgggaggtggaggctgcagtgagccaagattgtgctattgcattc

SEQ ID NO: 158872 - DNA, 464 bp, Homo sapiens
gccactgcacgccgatgggtcaggattcttaatgaaatgtgctactacagtaagcccaaagctatgcatgtttattcttaaaacaactccctgtagattaatgataaaaattaatgatttaaggtctgtgatttgagagttattgcttgtaaatttgaatgactgggctagtaacagtgacagtctgatctaccagagagacagtaagggtatgtacatattttttcttggtcattttcagcagcagtactcacccattgttgggaaagagtatatggtcttgattttctcttctcagacctaaccttattctcaccatagaccagtgtgtaatggtagttttaaccaaaaacagtgattgttttactttatgtgcatgttagatacggcatctttttactggaagtttatcatttataaggacaactttttcatgtttccttcatgtaacacccatcggcgtg

SEQ ID NO: 158873 - DNA, 495 bp, Homo sapiens
  misc_feature (458)..(458): n is a, c, g, or t
gccactgcacgccgatgggtcaggattcttaatgaaatgtgctactacagtaagcccaaagctatgcatgtttattcttaaaacaactccctgtagattaatgataaaaattaatgatttaaggtctgtgatttgagagttattgcttgtaaatttgaatgactgggctagtaacagtgacagtctgatctaccagagagacagtaagggtatgtacatattttttcttggtcattttcagcagcagtactcacccattgttgggaaagagtatatggtcgtcgagggggttttcagagtcgagactgtattatgaccatcgatcagtggtgtaaaggtcgtgtcagatcgactacagtggattgtcccacgccaagtgcatgtaaaatgacagggatccatgaacatggaagtctataaattaatgaaaggacaacctgtcaagtgacccttgatgnaacacgcaacagcgtgggggattatcacaggtcgacc

SEQ ID NO: 158874 - DNA, 205 bp, Homo sapiens
tcattcccactagtatctaaatggtagctaaaactctttcttttaaacaagaaaatttagattaaaaactgaaatataccatagcttgatatggcacctggtcaaatataagattttggttggaatttttttttccactctgttggaaagtgtctaacattgtaacagacacttcctttgaactcttgcccagaactggattgct

SEQ ID NO: 158875 - DNA, 508 bp, Homo sapiens
ggtaaaggattacaccaaattgccaggaatacgtgtacaacatgaatacctctctgttttgctaacagagctctaaaaagctttagaactgaactattatatatagtaagggttttgatcttaaagaaatgtagagccggaaaggaattttgagatattttaagtcaagcagaagaaacgtaactctatggttcctccctgcctgaatgaattagttgaaaagaaaaacacagatggtaaatataattaatttacaccacctcctgttcactatcccccaaagcactaattgatatgttcattcattcaactggttttattttcttcagagagacacagggttctaccactgcagaagacataaaagtatactagaattctatcatgaagtaattaatgcaattcaagagaaagtagaacgtgacggaagatagagggtggaaggaaaaaagaaaaattaaaacagataaacattttaaatagtatacacaatttgcctgcctttcca

SEQ ID NO: 158876 - DNA, 986 bp, Homo sapiens
attattttcattcctgggaaaacctcccaccgctgtctccagttgtgtacgtgggtgtgtatgaaatccgccccaggccccttgtcaccccacagtatttctttacgatcctcattctactgttagaaatccagaggaatgtgaggaggaaagcaagtataaacttcatcataattataacaagttgttaaaaaggttgtgttcatttcagaaaatgtcttcatgaggtctggtggtctttttccctgacaatttgtatctggtgttttgtaaagcattaccattttatatgaagttaaagcagttactttgaaaaagttacatggggtaagtataaaattggaaaggatatttttgtagttttaagaagagtaagacttctccgcgtgaaaaagtgttttcttgtgaattagctgaagctaccctgtattttaatagttaggctcagaggtgacacatgctgtgctttttcttcttgaaggcaggttgggagaaggtaagacaagtagttgttatttttaaagagctgggaaagctgcgtatcatgcaattgaggaggggctgtaggaagttctggtagcagcccctcctacacttaaactttagccaggaagctgattttgcatttgttagaaaaaggtatttgtcacagtacgttcaatttgggaagagtgttttcttgctgtttttgtctaaaatttgaacatcaaaatatccaaatcaacaggtcagatggattgcttgacttgggtgggtacttttgtgtatgttggggatatagaattcccagatgtaatataggacaccacctaaagttttttttcttttctcttttttttttttttttttttgagacagagtcttgctctgttccgcaagctggagtgcagtggtacgagctctgatcactgcaacctctgcctcccgggttcaagtgattcttctccctcagcctcgccagtagctgggattacaggcatccacca

SEQ ID NO: 158877 - DNA, 1338 bp, Homo sapiens
attttttgtatttttagtagagatggggtttcaccatgttggtcaggctggtctcgaactcctgacctcaggtgatccacccgcctcggtctcccaaagtgctgggattacaggcgtgagctgttgagcccggcctaggtccccatttctttactggctgtcagctgaggattcttctcaactttagaggctgcctgcattcctgtttgtggttcccttccttcatcttcaatgccagaaaggtggcttccttctcacactttagtgtctgacccttcctcctgccttttctcacttctgctttcgagggtctgtgtgattatagcaagcttacccagataatccaggataatctatttgaaggtcatctaattagtattcttaattccatctgcagagtccctacatggtcgtacccagattgtgtttgattcagtaatgaggggatgggatcttggaatgatatctttagaatttggcccaccaaaggcagaattcaggttttcctgccattttacatcagggacttaacaattcctgggaatcagcagctggacctggggccatttacttatcaaacctagggcaccattcttaaccttgagccttacatttctgaggcttattacaatctggcctgctagatttttatatttgggtcacacacaggcagagtgtttctgacatttccagtcaactcccttacctcaaatatcatcaatttcaccactgaaaatgttccaacagctgtaatactaattaacaaagtcagtaatttaaccaatatgaaagcccatttctgacccaaagtatactagttaacataacctgctcttggatgggataaggatagctagcagactggcttgcagtagtgtctcttgagtgtggcttttgattaaaagctggttaactactcttggagcctgtcttccagattaagacaattcattgcttttaggcagttggcttacagccactggacatatcccagcttatgttgaagtgttttgaaataaaattcaaatgatatagtagactcttgccatcttaaccgagagcatcgagagttcagtcatgtctgtggttctcaccctcgtgcctggtatgcagtggatgtgtcacagatatttgttgagtaaataaaatgaattaatgcatttccatgctttcatatataacaattttagtacagtgtgagaacagcatgacagattgcactggaagaaagcagaaatgttactcaagttactttgtcgtactaggagcttattgtactcatgatgctataaacatgtagactacaaactggaacttgaaagtgttaacatttatttt

SEQ ID NO: 158878 - DNA, 230 bp, Homo sapiens
atttttcagtttatttttatttatatattaataaatacatgtatttctttattttatgagcctttcccccacaaaaatatattaagatcattgaaaagattagtccaaaaaagccaagtaaaacgagtttggaaagaggaaacaggctgttatgaagaagactgaatttcagcttaccagcaggcggggtaaagaaggaagtcatcttggtgaagagtttttccatagac

SEQ ID NO: 158879 - DNA, 490 bp, Homo sapiens
tggaagacccctccaatgagtgaattcaggagaaaaagcttatcaataattatgagtaaaaaacttctgagattccagtaattaaaacaaagtagattatgtaaaaatatgaaggacagaatttacatgatagtgggaatgcatgcaacagacaactttctcaaagtgtggttcgaagatcacctaagtcagaattctacagatttgaactcactaggtaggaagagggacccaggaatctgtattttcaataagtatctgaggtaattcttattaacactctaaaatttgagaatcactgatttggaaacaggttactaaaaggagaatagggtaagagaaaaggttacttttaaagtgatgacacttagggcagggtgtgatggctcacgcctgtaatcccagcactttggaaggctgaggcaggagaatcacttgaacctgggaagcggaggatgcagtgagccgagaccacgccactgcactccag

SEQ ID NO: 158880 - DNA, 515 bp, Homo sapiens
cgtctctagtaaaaatacaaaattagccgggcgtggtggcacatgcctgtaatcccagctactcgggagactgaagcagaagaatcgcttgaacctaggaggcggaggttgcggtgagaagagatagcaccattgcactcaagcctgggcaaaaagagtgaaactccatctcaaaacaaaaataaaaacaaaaacaaaaaacaaacaacccaaaaacaaaaagaaaaattagccgggagtggtggcaggtgcctgtaatcccagctactcaggagtctgaggcaggagaatcacttgaacttgggaggcgaaggttgcagtgagccaagatggggctactgcactccagcctgggcaatagaatgggacttagtctcaaaacaaacaaacaaacaaacaaacaaacaaaaacagaaaaaagtattgaacggtttgctctataggggaggaaaagtggagcaaataagtctcaaagaagatggtacagacatacagacatttggtatctttccctg

SEQ ID NO: 158881 - DNA, 576 bp, Homo sapiens
ggctcctgccaaaactagaattagaaggagtggggatcctgtaagtccagcccatgctctcccttggtgttgggctgtaaaaagatcacgaggagttcagttgggtgagcctccctccttccatcactaaaacacaatcatctcacattataaatatctcagaatcttcctaagagatcagtgtagttcttcttattgttcaggaaaattagtacatggggtcaaggagcaggtcatacacattggtctccacactatggggagatccctcctctgccttggcctctgtccaaccacatggaagtcatcctcttccttttcttcatcatcatcatcctatcactgtcaccattctcacatgtttgtggggattttacgcaaaacacagagttaatatttttacatgatatggatcccgaaggcagacaagattcctggcattcattcatcacaaaaatatctacaactaacagagagtacgtatgattatgtaacacatgcatcagccacggactgctcctgccaccgagactgaatcatgctcatctttgtatgacccacacaatgtctgggacg

SEQ ID NO: 158882 - DNA, 391 bp, Homo sapiens
ataaacagtacagaaataaatcctcatatatatggtccaacggttttttgagaagagtgccaagatcattcaaatgggtaaagataatcttttcaacaaattgtgctaggaaaactggatgtccacatgcaaaagaatgaaactggatccttacctaacatcatatgcaaaaattaactcaaaatggatccagagcctaaatgtaagacctaaactattaaactcttagaagacagcacaaagaaaaagctttgtgacactggatttggcaatgatttcttgggtatgacaccaaaggcatgaaggcaacaaaagaaaaaacagacaaatggcacttcatgaaaatttaaaattttctgctatcaaaaaaggcaatatataaaatgggaga

SEQ ID NO: 158883 - DNA, 479 bp, Homo sapiens
aatcacagctttaatactagttatgaactattaaaaggtctaaatttttttattgtggtaaaataataaaattcactattcgaaccatttttaagtacacagttctgcggcataagtacactcatattgttgtataaccactaccaccatccagctcccaaacttttccatcttccacaactctacccattaaacagcaattctccactccccctcccccagcgcctggtaaccagcattctactttctttctctatgaatttgagtactccagatacctcgtataagtagaatcatataatatttgtcctaaaaagtctaaaaatatttttaaaacagaaactagcacccaaataaattttaaggtacaacatttgaagcatatgattctgtatacgtttttaaatttttgacacaaaacacattcacatataaaatgtactaagtcttcccttagttaaataaattcgcatatttct

SEQ ID NO: 158884 - DNA, 822 bp, Homo sapiens
atacacattgaatagagcttctaggaaaaaacactggaatttagcacagaagtgacagggaacctctgaggcacagcaggaggaagtgaagcagccagcctggccaggattggctcagagccaggaggagcaccacactgcaaataaaaggcaagcaagagatccctaacagtccatgttcccactgcagactcctgcagtcctagccattggagtgccccttggcctttggaggccctgagagtagtataggaagctacttgtagtccacgcagtggcattgttctagagagggagtttgtactgtttctcacacccctccctgcaaacagctgcagcatagtgccattttgggagcccagccactgccagattacattctgccctggagcccagcagcctttgtatccccacatacctggagccctactggcatcctcccatgtccactcagagggcttcagtgctgtgatgctgactggacccagtggtgcagccaggttcccaaaactctagctaatgcagtcctctgcaccatatgaaacaggcagtgcagcacaccaggagtaggagagtggccctgggacaaagggagccaaagcatgcactccccagagcctgagaactgcctccctggtgttgtgccatatacagtaaccctgacccttccactggtagggttgctgacatacctgcatgtgccttcagaggccctggagattgacccaccagagctagcacccatgtgcaccaccaaggtacctgaatacaggcacatgccacctgctggtacccacacatgtcatccagggacccaaggac

SEQ ID NO: 158885 - DNA, 259 bp, Homo sapiens
caggcaggagctcctggagctgtagcctcctcacccaaggcttccagctccttcctgtgtggggtctcagacacgcgacccacccggacgtccgtgacagtgtagcttcttcatctccggcatgacccgaatttcctcggggccccccactccctggggaacaggaagaaaatacccatttcaccctcactgatatacacagcacacaggcacctacgtacacacttgcacacatccagtgtctcagcccgtggctgct

SEQ ID NO: 158886 - DNA, 485 bp, Homo sapiens
ggcgatctagaggatcccgggttcccttgtctcctgctctagtctgtactacaagagccactgccctgaaaacacctttgtttgagaattccttctgcctctttctgtttccaagatcccaaacctccccctttcttggtttactccctcactttggtgggacatattctccataagtttcctagaagtgacatgtgaaagtatttttagtagagatggggtttcaccatgttggccaagctggtctcgaactcctgacctcgtaatccgccagcctcagcctctcaaagtgctggaattacaggcatgagccaccacacctggccagcgtttcttctttttctctctaatttatcaaatttggaaacagttggaaaacatttaaaggaaataagtctctgtgtttttaataatagtttaaaagttaaaggaaaacaaatgaataatattctgtttattatagtcagacaaaatgtacatacgaa

SEQ ID NO: 158887 - DNA, 293 bp, Homo sapiens
tttacccattcatccactgacgggcatgtgggttgtttacaccatttggctattgtgaataatgttgctatgaacatgggtatgtaaaaagctctttgagaccctgtttccaaattattttgggtttacacccaaaagtgataatgctatgtttaattttttgagacccagtgagttttctaaaaagagggagaaggaatacgttccctccagaaaattactagataaatgtaaaaaatctgatcatttttaaaattactatattgtacccatttatgtaatagatcttactg

SEQ ID NO: 158888 - DNA, 827 bp, Homo sapiens
ccctgctgtccccatcacaggcctgcgtggtatgaccttcctccaccgccctactcttctgacacggaatctctgaaccaagccgacctgcccccctaccgctcccggtccgggagtgccaacagtgccagctcccaggcagccagcagcctcctgagcgtggaagacaccagccacagcccggggcagcctggcccccaggagggcactgctgagcccagggactctgagcccagccagggcactgaagaagtataagtcccagttattccaaagtccatatgggttaatctgctctgacttgttgccattctaacaatttgtgctcatgggaagctctttaagcacctgtaagggtgtctcaagttacagtttgggatattaactatctctgcattcccctcctcccccagacttcagagatgtttttctggcgtctcagttgacatgatctgttgtgcgtcttttctgtcaggtcactcttcccttgggacccgagatcacaccctcatttttcacattattctgtttctgttggagagacagcatataaaacagtattgaaataggctgggagagagcaatgtttctgtgctatattggatgctcagaagtgcaggagacgctggacccaattctctctgctgggtagttaccttatagcatttggggatttgggttagatgatctaaccaggaggacatcactggatggtcacccccccaaaaaaattccatttgagcatcaaaacctgctttgcacaatcctatttgatgcccccagttcagcagagtcagtggccaaagaaaactttggacgtgagtaac

SEQ ID NO: 158889 - DNA, 434 bp, Homo sapiens
gagacaaaactctcactctgtgttatccaggctggaccgcagtagcacaatcacaactcactgcagcctcactgggctcaagcaatcctctagcctcagcctcccaaagctgggattacaggtgtgagccaccgcacctggccacaattcctaagtttcaaatgtctccctgttctgagtagcataatgaactctctctctcccacctaggatatgaatcctccctctgtccattgtgacctcagtgtctatgctgcctgcccataagtcacttagtagccatctcagttaccgtatcagctgtcgtggtattctggtgcttgtgttcaggtcacccttatttggcttaacactggccccaaagtgcaataatagcaattctggcaatttggattgccgaagagaaagtggtaaagtgccttctttaagtgaaa

SEQ ID NO: 158890 - DNA, 599 bp, Homo sapiens
aaaaattcctgagttgaaaaggatttcagtcagagcactgattatcttgagaagcctggttaggttttttgttgttgttgttgttgtaatttaattaaaataggcccaattaatggaaataaagttagtcttttattataaataaggcttcagttgttggaataagttctatgaaatggagacggagagtaaatgttgttcagaggatgcttatctaggtctcatcatgtccaccattaacccccattcttccggtttgacattttgcggatcattggtgatccactgaggttgaaaagaggaaatacatgaaacagagctcagagagctgcatttgtcactgcattgactgctctcggaaaaatctgggtacgaaatgccatctaaaggtatttaccaaggtaaagctgggggtgagcttataaagggagactattcctgtcccaaattatcaggaagtttggaagctatttgctgaataaaagagaattattgtcttctaagaggcaatcttagtcactatttaagtattttaaaataatcttgagatgaatgaatttcggctgaatgcctttcttatttgctaagtggcttgtgtg

SEQ ID NO: 158891 - DNA, 311 bp, Homo sapiens
gtgctggaacattaatttggatgccaacatttcttttgcataaaaatgggatgtatgaatctcctactttgcttcggttggcttgagtcctttgtcttctgaacactttcaataaaaactctgaagagcttctcatcactgtagaatatagtacaactgcgtaaagttgccctccaggacctgcagattccaacctctgcctgactccaaagtcgtcatcttgcgtcattctcccttcacccacattgtgctccagacacattttccttcagtttctctaataaatacaacacgcttctcactgcttaaga

SEQ ID NO: 158892 - DNA, 502 bp, Homo sapiens
accttgaaggctggttcataaacttctgtgctattttccccaataaattacaagctaatcaaagacagtacacaggacagtatggtgtgtgctctgctgccaccccttggataggggagcaagcattctggccaaaccacggaatcaaggaaatttatgatacactgcttcagttatcatcacaaacacttgctaggcttctaaactgtaatttccaaaaaacctttttgataattccttctggagttatgtcaaactctacatacatgccaatggagagaaaagatacttgctttggaagagactggaaacactgggcaactaaacagaacttccatcacaatctagactgtaggtgccacctacctgacacaggggtccactcatgcacagggagaatacgaagagataaaagatggggaaaacacttgagtaccaattttactggcttatgcttggtaagccaattctcaaggggcctacaaccctaggggtttgtagg

SEQ ID NO: 158893 - DNA, 326 bp, Homo sapiens
aaagccctcagcttaatgacatgatgcaatttgttaaatgtagttaatcagagatgtaaaaagtacaattagtttttagtgatatgatttgaaaggactagggtaggttatataaaggatacgaggctgggagtggtggctcacactgtaatcctaccactttgggaggccacggcgggtggatcgcttgagctcaggagttcgagaccagcctgggcaacatagtgaaactctatctctacaaaaatacaaaaactggccgggtgtggtggcttacgcctgtactccctgctaccctggggggctgagacaggaggatcccttga

SEQ ID NO: 158894 - DNA, 141 bp, Homo sapiens
ctccagttctcagtgggaatgctttcaccttttctctgttcagtatattgttggatgtgggtttgtcatagatggcttttactaacttaaggtgtgtcccttctatgccgattttcctgagggttttaatcataaagcgat

SEQ ID NO: 158895 - DNA, 436 bp, Homo sapiens
gccgcacggggcacgtgtcttccctctgcctccggtggcgccgcacggggcacgtgtcttccctctgcttccggtggcgccgcacggggcacgtgtcttccctctgcttccggtggcgccgcatggggcacgtgtcttccctctgcttccggtggcgccgcatggggcacgtgtcttccctctgcttccagtggcaccgcatggggcacgtgtcttctccccaacccccgtttcttactgtcttggtttccccttggatcgtacctcagactttacttagtggcagtaggagtgtccttggtgtcctgtagtgtccacagaggctggtgtaggctttcattcatcaaacatctgctgactggcaggaacgggtctggctgctgggttatggtctcaactctaccccggatgggactgcctcagaaagtgaaggagc

SEQ ID NO: 158896 - DNA, 371 bp, Homo sapiens
tcagggaggctgcagggctgaagttggatataggttccctggagggcaggcaggacgcagactggcctggaggctgggcttgggcctgtgaggatgggggctgagcctctcagggccttagtgatgagggtggtgccctgcacagggtggcagggcagcacacagatccgcttcttgcctggggaggaaggatcgttgtgaagtggccaaagaattgaaaatgaaaagtcacaactgagccttgaaggggaagaagctgtacctgaggctggggccaggctaggcctgggtgtcctggccataccacttcccatctctgtgcctcagtttccctctcacaggatgggacacatatgtctacctcccaagtg

SEQ ID NO: 158897 - DNA, 180 bp, Homo sapiens
agccatgatcagaccccaccacccctcacctgcgctgcatctggtgggagaagtgtgtgcgaagaacaaagaagtgcaatgtggagccctccaaggactcccagtgctacgtggagaatctgaatcgactcccagagtggccaagcctccgggaagtgacattgaagctgacagtggaat

SEQ ID NO: 158898 - DNA, 379 bp, Homo sapiens
ggccggtaccgtactctaacattatgcatcatgaagttcctctcttaaatcagttccttgccttatgttcacacacgtcctttctgctatcaggaatattcttcctaatctttttcaccaacagggtagagagaggtgctaggaaggagatgttaagtgggaaggagaaaggaagaataaggagagctggaaagagagtcggaggaagggagggaaaaagagaatttgagatcctcaaggccttgctaaacacaagttcctgtccagccttcatgaaactaagaggctagtagaagaatataataaagtcatataagtggacatagagatattgaaggattttagagaagtcttgatctaatgttacattttaagatta

SEQ ID NO: 158899 - DNA, 311 bp, Homo sapiens
cacacacacaatatgtcctcagctacacaaaaatatatgttaaaacgctaatatcaagaagtggaattatggatattcttactacttttgtgtttttttccaaactttcttatgcaaccaccttttaccgcttgagcatcagaaaaaaaaaaaaagaaagaggtgcttagtaatccatcatgataaatagtagtataaagcatagcttgagaagataatcagaaaattagacttaaggtataattaattccacattttgactgtttatatggcaaatgatatcttagagccctcctcaatttgaatactgg

SEQ ID NO: 158900 - DNA, 201 bp, Homo sapiens
caaagaagagagaaagagagggctagaggcacagctgttacattacaggagcttcagaaggacgaactagcccaagttaggtgaaataagagaggacgtcctggaagagacagaatctaagtgaaactgtgaaggctacatggggatccttcataggagtgcgcaacacagtttctcccatgcaatccccactgagtttct

SEQ ID NO: 158901 - DNA, 164 bp, Homo sapiens
ttcgcgtgatcattaactcacttgttcagtagattatttttttgcctccaatatgcaggccctgagctaggggcacaaagtttctacaagaggctctaaaagtacaggccgggcacagtggctcacacctgtaatcccaggactttgggaggccgaggcaggca

SEQ ID NO: 158902 - DNA, 173 bp, Homo sapiens
  misc_feature (28)..(28): n is a, c, g, or t
tatatccattagtcaaacttcaaacaanggagaaagttactctatgtaaattatacctcaataaacctgactaaaaagaaaaaatgtagaaacaaaacaaaacaacaaaaaaacaacaagacgattcctgattcccttagctatttatggtgcaaagctgtagctgacccagg

SEQ ID NO: 158903 - DNA, 188 bp, Homo sapiens
aagccaagtctgaataataccacacatcatacattatcagtggtccctgtctcccttcttgtacaatccagaggaatatttttatcaactattttgtaaatgcaagttttttagtagctctagaaacatttttaagaaggagggaatcccacctcatcccatcttttaagtgtaaatgctttatttaa

SEQ ID NO: 158904 - DNA, 762 bp, Homo sapiens
gggaatggtccataaatggtagctgttcttggtcttcccatttcagagatgagaaatctcagaccctggaagtcatggtaccactgggcaagggcaccatggttaggccattagcctcctctcagaaactcttttatgggtccacttacccactttcctgccttgaaacaatagaagaactaagggttttatctttatcttggttttttatttcttaaattctgtttctttggttttcttttttcttttttttcttgagacagagtctcactctgtcgcccaggctggagtgcagtggtgtgatcctggctcactgcaacctctgcctcctggtttcaagtgattctcgtgcctcagcctcctgagtagctggaattacaggcatgcaacaccacacccagtcttattattattattattattatttttgagaaggagtttcattgtgtcacccaggctggagtgcagtggcgcgatcttggctcactgcaacctctccctcccgagttcaagcagttctcctgcctcagcctcccgagtacctgggattacaggcccctgtcaccacacctggctaatttttgtattttaattgagacggggtttcaccaggctgatctcaaactcctgacctcagtgatctgcctgccttggcctcccaaagtgctgagattataggtgtgagccactgcgcccggcccagctaatttttagtagaaatagggtttcaccatgttggccaggcgggtctggaactccctg

SEQ ID NO: 158905 - DNA, 188 bp, Homo sapiens
cagattttcagaaacctagctaaccattgctcacagtgaattcacctggatctaacgggctggtttctgtccccaacaggccctggctgatccaggaggcctgcctcacccactccacccacagagctccagcagggaaacagcgggggcctccataccgccaccactactccatgaggagtaaatgc

SEQ ID NO: 158906 - DNA, 653 bp, Homo sapiens
acagttgaggctgggagcagaaataatcaacatgcccattagatacaggacggaataatgcttctattggttgggtcccttcgagagagaaccattctctgctttcaataggacagaagagctccttggcactggatgcctccgggtctggttgagagaggaatggttaggagactgttctgaggatacgcagacatcatccaaagcttcctacattcagatgaggacagaggttgggccagagctttgtatgcttgttacctaaggatggttctgaccatgtaagcagatcacagaaggtaagccatgctgaagaacttacaatagttatacttccagtttgtccatttttatctccatgggtagcaaataggttcatgatgctgttatttcaattactttacatcctgctaatggctagttgtgtgatcctgtaacttaatttctctgtgcctcagttttatctgaaagaaaaatccagccaaaggctttagaacagtgcctggcatacagtaagtgctcaagaaatgttggtaattattattgctatgattcatttccacaagaatttgcaattttttttcttttctgctaattgactttgtccaactcccatcatctttgggtcatttttatggaaatagactggtaat

SEQ ID NO: 158907 - DNA, 609 bp, Homo sapiens
acagttgaggctgggagcagaaataatcaacatgcccattagatacaggacggaataatgcttctattggttgggtcccttcgagagagaaccattctctgctttcaataggacagaagagctccttggcactggatgcctccgggtctggttgagagaggaatggttaggagactgttctgaggatacgcagacatcatccaaagcttcctacattcagatgaggacagaggttgggccagagctttgtatgcttgttacctaaggatggttctgaccatgtaagcagatcacagaagctggaggcaaaggatgccaagatgggaaagccacataatggaaggatcctggatttcagagctgtcacttggaggaggggcacccagtgaaggtgtcttatctaacccacaccatatcttcatgaagtggccatatggatttgatccctatccttcagaggtgctcagcctaagggaacacggatagtagattaagcactgaccaggctcaagtttgtacattccaacttgttgtttgggccttgttggacataactgaagtctggatggcagggtgaaaattggataaacagccacactgactcagggg

SEQ ID NO: 158908 - DNA, 595 bp, Homo sapiens
agagttagcaatttgaagatagattgatagagattatctaatctgaaaaacagaaaaaagaatgaagaaaaatgaatggaacctcaaaaaaatggggcatgctaacataggtgtgataggataccgaagaagaagggggagaaaaagcagaaaaaatatttgaggaaataatggctgaaaagttcccagatttactgaagaacattagtctgctcttgcaggaagctcagtgaactccaaatgggatacacacgagatccacaaatagatgaatcatagtaaaatgctgaaaactaaagacaaggagaaagtcttgaaatcagcaagagaaaaagaacttgtcacttacatgagtttacctgtataacaaacctgtccctgaacctaaaataaaagttaaaaggaaaccaaaactcatcacttacagtgaacctcaataagattaacagctgacttcttagcagaaccaatagagactagtaggcaatggaatgacatacaaattgctgaaagaaagaaaataaaaactaccagtaaccaagaatcttatatctagcaaagttatcttttaaaaaaatgaaggcaaagtaaagat

SEQ ID NO: 158909 - DNA, 356 bp, Homo sapiens
ctagtgctcttccgagaggctattgaacacatcacacggatcgtgcgggtcattggacagcctcggggcaacatgctcctggtgggtatcgggggcagcggacgccagagtctggcccgcctggcttcatccatctgcgactacaccaccttccagatcgaggtcaccaaacattatcggaagcaggagttccgagatgatatcaagcgtctgtatcgccaggctggggtggagctcaagaccacgtccttcatttttgtggacacccaaatagctgatgagtccttcctagaggacatcaacaacatcctcagctcaggcgaggtgcccaatctctacaagcctgatgaatttga

SEQ ID NO: 158910 - DNA, 640 bp, Homo sapiens
caaactaccccatgaggcctgaggagccgcccgaaggtcgcggtgacctggtgcctttttaaataaattgctgaaatttggctggagaacttttagaagaaacagggaaatgaccggtggtgcggtaacctgcgtggctcctgatagcgtttggaagaacgcgggggagactgaagagcaactgggaactcggatctgaagccctgctggggtcgcgcggctttggaaaaacaaatcctggccctggactcggtttcccagcgcggtcaacgcatctggaggggactggaggaaacccccttgttggaagagattccaagagaagcacggttttctctttcccttgccctgactgttggagtaaaaaacctcttaaatccattgtatcagaggtccttacctctctgacagttacaatgatctttgtatctgaactttgcacgtctgccgaaaaatccgaacctgttgactgggatttttaagaatccgtttctcccttttgtgtattccatattggccggccccaaggatgctcgcagaagccagcccccaaccccagcccttccgtatctttcccctccatcgcggctttgcgatgaaagattagcccgcgaacagaggcattgattacaaacatgtc

SEQ ID NO: 158911 - DNA, 781 bp, Homo sapiens
tttttttctgtgatggttgaatttagaagagttgggttcaaaagtgaatcctcctctccctctatgtagctgggccattcagaacatagcacggtttgcttgctgttggggacctgtgtgctgtggctgtccttgggcaccacccctcaatcggagggtgttttgttttctttagggctggctggggcatgccttggcaggcacccgccacagaacacatttgttaagtgaaggggagagaaagtcctggctgcttggtatagggggccgagcttgagtgaggcctcctctgcagtctggaaggtctgattatggcagtgcatctgggggtcagcaggaccttagagactgatttgtatttatccaactcttaagaaaggaatttatcgttaaaaatgaaatggtatgaaataaatagcaaaacgtgggtgctagctagtgccgactgagtttgctggccagcatgctctcagaagtactgccctggccgggggtggtggctcacgcctgtaatcccaacactttgggaggccgaggcgggcggatcacaaggttaggagatcgagaccatcctggctgacacggtgaaacccccgtctctacttaaaaatacaaaaagttagccaggcatgggtgggcgggcgcctctagtcccagctactcgggaggctgaggcaggagaatggtgttgaacccaggaggcggagcttgcaagttgagccgagattgcggccaactgcacttccagctgggttgacagaagttgagactccgttctcaa

SEQ ID NO: 158912 - DNA, 269 bp, Homo sapiens
gtttgaagagattttattatagtatgtgtgtagcacttagtcacttcattattcaacatttcaaacgttctaaaagtccatttcttattaataaggcccaaaatagaagattttagaatatacttggtttattcagagtatattgttattcaaaagcatgagaaaaaaaaatcaggaaactttaatgtacaaaggctttgtaactaatcagaagggaaaaacactagctcgccttaacaaaattattaaagactaacatggaagtttgg

SEQ ID NO: 158913 - DNA, 293 bp, Homo sapiens
aacccaaatatctgacattaggcaaccggttgaataaactattggtatagtgatagaatagaataccgtgtagctgcagtcaagaaagttcactgtacctatgtagcgcgatctccagaatgtattgtaaagtgaataaaataagatgcagaatagtatttaagtgtgtcttttttttgttaaacagaggtaggtagaaatattgtttacacttgtatttttatacagtaacaataataggtagtcgagggaatggggtagacaggagtgggagtgacacttataagtgggag

SEQ ID NO: 158914 - DNA, 271 bp, Homo sapiens
ctcaagtgctgtttcttccacataattcaaatctgattatatctgaacaaatcaccaactggaagtgaagaattttctatggatcagtttgattccattgggaaaatactgccagcaaaaatagtttggcggtccccgtggcaaaacttagaaacctgttttcttgttttgaatccctctgggtaagagcccttaccatgttgctcataatcttatttaatgccatttttagctggtatgacctgaagtggaatagccagatggttttgtt

SEQ ID NO: 158915 - DNA, 492 bp, Homo sapiens
tcagagacccattttgacctcactgtgatctaacattgtaagacagaagtgaggaaagtatttaaaattctaacctaaagcttttactagactaatgaagcaagggtggtttaggtgtcacaggatgaactacatttattttcccacttaaaagtagatttagggacgggcaagggggtgcctgcctttggacccagctactcaggaggctaaggcaggaggatcacttgagttccaggccagagtaggcaaaataccaagaccccggtctgtttaaaaagaatttttttaattaatagatttttttgtcccctcctaaaatgcttctcctgtcatcttccttatgctaagccctcttcctccatataccttagcacatcccaagtctcttcctctcctcctcccacccttatcaaataggtcaacgttaagatacacacacacacacacacacacacacacacacacgtaaagccatcaaattaataagaa

SEQ ID NO: 158916 - DNA, 324 bp, Homo sapiens
ttgacctcccaggctcaggtgattctcccacctcagcctcccaagtagctgagactacaggtgtgcgctaccatgcctggctaattttttgtattttttgtagagacaaggttttgccatgttgcttaggctggtctccaactcctgggctcaaggaatctgggtaattctatgtttaatcgtatgaggactcttattttgcagcgcacagttagacttgaccatcttcccatattagcacgtgtacacttacttccggcttcttcttcttttttttttttttttttgagatggagtctggctctgtcacccaggctggagtgc

SEQ ID NO: 158917 - DNA, 391 bp, Homo sapiens
gaattgaggtctcttgctgcccagtttggagctctttccaggacatataatccaaacaaatttttgcaccttgaagtattaatattttcctgatggtaaaatctatactgtatattgaaggctctttagaaaattagaaaatgcctatgaatcatgctgtataaagagatggcaataatctgacatagcaattatctattcatgtaaaattactatttgcaaccagaacttctggataagggctccaatgttcccaagtcaggaacctcagcttccctttctaattattataggaggcaaacctgggggaaaatggttatgctaaaacatttaaaaagagaataagcacaataaattctaaaggttgaatgaaatatttaattttagcaat

SEQ ID NO: 158918 - DNA, 340 bp, Homo sapiens
ctaaggaagaatgcaacagatggaatgtgtttaaaaacagggaagcaaagtggcctccagtgagaccctatcacctctctacttatactgtccccaaattacctattccaacaggctttatcgcctacttttgttaagtttccatctcagcagtgagaatttaaataactgccatcatagccaacttaagctatgagtaatggaaacaaatctttttcaccaacttccatcagaaattcttttcaagggcccttataaacgcgatctttttttctaagccttaaatatttgatctcttgcttgagactatacaaaccagatcttcatttcacaagacctg

SEQ ID NO: 158919 - DNA, 268 bp, Homo sapiens
gtaagggagacttataggacagagatgtttatgatggctcagtcagatggatgaattatgattttgtcaactagcacaaattctaggtggaaaaaaggacgtggctgactttgttgtttctgagaaccttaaattaagaaaaaactatacctataggaatttagatttttccatgtcatatttaataaaaacaaaaaaacttcattggttttcatattagggagaatggagactatctagatgtaaaaagaaatcactaaaagagcct

SEQ ID NO: 158920 - DNA, 119 bp, Homo sapiens
aagcagatgataaattgctctgagacatcacttatttttaattttattttttgtcatagttatttgtacacacagagattcaactagatttataagatacatttttgaaaagacagttc

SEQ ID NO: 158921 - DNA, 308 bp, Homo sapiens
gaccagggcaaatcccatgtacagttttccacccttggttagaaggaggagaacaggaaaaaaattttattgaatccatccctagagctcctcacaagtcaagtcttgtgggagacttttagggctggaggtgagtgcagcaacattccagatgcagtgagttcctctgacagcctgagcacatctccacaggccacagaggcactacagtctatgcctccaaacacagggaaaagtggaggctacattcattcatcctgggcttcacactaagtcccaaatttggatacaagagcatcttctagaaa

SEQ ID NO: 158922 - DNA, 171 bp, Homo sapiens
cggcggtaccatcaactcacataagggtacttcttcctctgcctctggataaaccttggtggggtccaagggggaggggaagaagtaaccctttatgtgagtttgaatgggcagaagaagaaaaggatgaagttgtcttctaattgcactctatgaatgttgcttttttgt

SEQ ID NO: 158923 - DNA, 738 bp, Homo sapiens
tacatgatacgaatcgagtcggtacggggttctctaggagtcgacgggccgcttgacttgctgggatctcggccgtcgtataaaggacctgtgaccccagctgttagaaccaggacctgggagcagctgctttctggatccagtcctccagggataggccatctgctgccatgtgagagaaccctggaaaagaaactgaccacaagatatctttgtattccttttctgtgtgctccagcccctttagttctttcctgtcccctctcacctaggcaaacttgagaagcatgatgaatctgcactggaaaactcgcaatggattttccgttttcttcccctttccccactccaccctgtcagcacatccagcccattggaaaatagtttccaggggatgtaggcagacttatatgggcagcttcttcagtgggattggtactatttagcaggctttcattttattatgaataacatggctttgcattataggcctagaagtgtccttaaaatctcatctcatggaagaggaacccaagattccacattctttagccttgcattcagggcctaccctcttctggcaccagcctgattttctaaatgttcagttatctcctgctaaacctggaaacatttgctaacttctccgtacacataccacctcttcttgattctctgcctttgtttgtgcctttatgtcccccaccatgttcttcccactctcctttatccccgtca

SEQ ID NO: 158924 - DNA, 722 bp, Homo sapiens
tgagagctcatgcatgcatgcaggcacaatgggacccattgatttctggcattcagcttgtgcatagaggacctgtgaccccagctgttagaaccaggacctgggagcagctgctttctggatccagtcctccagggataggccatctgctgccatgtgagagaaccctggaaaagaaactgaccacaagatatctttgtattccttttctgtgtgctccagcccctttagttctttcctgtcccctctcacctaggcaaacttgagaagcatgatgaatctgcactggaaaactcgcaatggattttccgttttcttcccctttccccactccaccctgtcagcacatccagcccattggaaaatagtttccaggggatgtaggcagacttatatgggcagcttcttcagtgggattggtactatttagcaggctttcattttattatgaataacatggctttgcattataggcctagaagtgtccttaaaatctcatctcatggaagaggaacccaagattccacattctttagccttgcattcagggcctaccctcttctggcaccagcctgattttctaaatgttcagttatctcctgctaaacctggaaacatttgctaacttctccgtacacataccacctcttcttgattctctgcctttgtttgtgcctttatgtcccccaccatgttcttcccactctcctttatccccgtca

SEQ ID NO: 158925 - DNA, 502 bp, Homo sapiens
tgaataaaatcttcctcactgtgctttaactagtgtcactgattttttttttctttaacagcgggatacggctctagcagaggtagagaaccataatctctcgcttgaacacaactaatagactttcttctttagagcaaagctccttgaaagagctacttgaactttctccagtttctgtgctcccagctcctatttgttcttgaatatgctccagtcaggcgcctaccccacctctccactgcaacagctctcactggtaccaatggcctccatgttgctaaatccaagggtcattttcagtctctttcttagctgacctatcagcagcatctgccaaagttgattactctctcttccatgcaatactgtctccccttggcttcaacatacatcactttccttttaccaatctggctgcagcttctcagcccattggtaggatcttcaatttcctaagctctaaacattggagcacccagggctcagtcctcagacccct

SEQ ID NO: 158926 - DNA, 473 bp, Homo sapiens
gtagagatgaggtcttgctatattgcccaggctggctagaattcctggtctcagccaggcacagtggctcacgccaacttctgttttttatattttagccttctaaaatagcctcactatctatggtcacagcagatagaatagtccataataatctaatctactccagagcaattcaagagggaaatactaaaaagagattactgtttctgttttgttgttgttgttttcagacagactcttgctctgtcgcccaggctggagtacagtggcgtgatctcagctcactgcaacctctgcctcccggtttcaagcaattctcctgtttcagcctcccgagtagctgggattacaggcatgagaattgcttaaacctgggaggtggaagttgcagtgaaccaagactgcaccactgcacaccaatctgggcaacagaggaagattatctcaaaaaaaaaaaaaatagaaaagaa

SEQ ID NO: 158927 - DNA, 779 bp, Homo sapiens
cgcagaggccaaagtgggtggatcacttcagcccatgagttcaagaccagcctgggcaaacacagcaaaaccccacctctactaaaaatataaaaattaaccaggtacggtggcatgtgcctgtcgtcgcagttaattgggaggctgaggtaggaggattacctaagcccggggaggtcgaggctgcaatgagccaagatcacatcactgcactccagcctggacgacagagggagatcctgcctcaaaaataaaaaataataagtaaataaataaaaagaatatattcactattttgcttatcaaagtctcttaaaggaggtgacttacctacgctatggacccaattactcagccaataagaggacacggtccctgcccatagaaagctgatgtccagcctgacctcaatacaaaaccatccagttaaagtggtgggggtggctatgcagagacgggcgggtgccgggagagtcaagggcagccccttggctggccaggggctcagacagaccagctggggagatgcatcactcgcccaggaaaactgatgacagcttagatggcactgcaagagcagggaggatcacactcatgtccagaaagtgaaacataaaacagctaaacatgtaccacacagctttcatacaaaaattttatatacacaaattttgaaaaaatagagatggggttttgcttgttgtcccggctggtttcgaactcctgaactcaagtgatctgcctgcctcagcttcccaaagtgatgcaattacaggcat

SEQ ID NO: 158928 - DNA, 237 bp, Homo sapiens
tcaagtctaacttcaagtcaaggggtctttcacttcattatgctattcatttgcctggggaagggatgagggggagcgatcaccaaatagccttattctctgggatctggcagtgctggttctcagcctgcttgacctcagactcaccccacttttctgctctgctctctacagacaggagggtgacctttgcacactgagttccctgggctcccagatcagctggtttccgcttgg

SEQ ID NO: 158929 - DNA, 456 bp, Homo sapiens
gggaacgggttgtctctactctgcactgcatgtctggggtgccttgaaggctgaggttagaatgatcagagagtcccttactcaggggcctggcagtaagtgcagctgtcacctgagacctgggcaggggcaggggccaggaccaagacacctacactcccttttccacgtggcagtgtggcttcttttcagcaagggctgggttttgagagttagcatcctcgctcacagcagacctgaccagcgggaggaagctgtgtcatcttttgtatttgggtcctagggctgcgtacaaattaatacagactagatagcttaaaacaacaaaaatgtatacttttacagttttgagggctagaagcctgaaattcaggtgccagcagggctgtgggaggacactacctcgcctctctggcttctagtgtttgctgacacctttgacgttcctcagcttgt

SEQ ID NO: 158930 - DNA, 240 bp, Homo sapiens
cttcatcactttaacctgattgagccaatttgtgtgcaagaaggtaatgtgtcatgagtatcttggatcattgatttgggcctttattacattaaaatgatcatttcagccctattagattattccatttgtatctgcttatgaacaatgtcaaaatggtatttctaatgggttgtcactccatgttcaaacattttaagaaaattgtaggtagtgacttaaattgcattaatattaaag

SEQ ID NO: 158931 - DNA, 238 bp, Homo sapiens
ttttaagcataacaccaactgtattgattttaatattatggaacaaattctaatgtttcatgtatatataagccaaatttagatactttatattattatatcgtagatatatattccaaccaaaaagctcagcgcaaattaattttaaattgtaatggatctcaatccaacgtgaaagaaatataccttcttatttaccaaagtacctaaagatggtaaggtgagccaacaaatataa

SEQ ID NO: 158932 - DNA, 164 bp, Homo sapiens
tctgatggttaaggaataccataccataccaacatgtaggaggacacagagtgttaagataataattctaacttatttttccacagaattacatagttctatatagttacaaagaaatgtatgaacacatatatatcactctaacactactttttttttttttg

SEQ ID NO: 158933 - DNA, 270 bp, Homo sapiens
ctcaggctcggtacctgttccccctaaaaatccttgaccttctgaactttaaagcatttttatacacaattttaaaattttattttgaaaaattacaaaccttcagaaaagttgcaacagttcaatgaacaatcaaatttaccactgttaatttctttccttcctctcttccttcttccctccttctttcttttgctgaactatgtgcaaattagttgcagacatcataatacttcatccctaaacactttggcatatagttcagcctaa

SEQ ID NO: 158934 - DNA, 561 bp, Homo sapiens
aaggcagattaaaaacaagactcagctatatgctgtctataagaaacacactttgaatacaatgatatagataggttaagtgtaaaagaatgaaaaaaggtgtaccatgcaaacaccaatcaaaatgaagctggagtggctatattaaatcaaatagtcttgagagcaagaaaattttccaaggattaaagagggaattacataatgataaaagagtttattttccaaaaagacagaactatataaaatgtgtatgcacctaagaatatagctttaaaatacataaagcaaaaattgataaatctgaaagggaagagagacaaattaacacttacagttgcaaacatcagtacttgtccctgagtaactgatataacaagtagatagaaaatctgcaagggtacagaagaactattctaacaaccagctgcatttaattgacatttatagaacactctacccaacagcagcataatacacattcttttcaagtgcttacaattacagcaaaataggcaatagcataggtcataaaaccttttctaatttaagagaaatgat

SEQ ID NO: 158935 - DNA, 513 bp, Homo sapiens
ttacaacagtgatacctaccttcatggggttgctaggaagaaatgagcaaatacatatatatttaaagcttggttaaaacagtgccaggcacacagtaaatgccaagtggttcacaatagtcctgtgaggtagatgctgtcattcccattttacagaacaggaatctgcggcacagagaggttaagttcaaggttacacatgacctagcaagactgtggttggtgcacaaatacaaacatacccactctggaactgcagtgtcagaagggagaaagtgacagatggaactgttttttttttcccttccctattttgttcccaccctcatactcctactattctaaatggtttggcctcaaacactgcactaagaattattctgacagcacaatggtaatccctaggttctgtttcttggcccaggtggtggtcacctgtgtgttcactttgtaaaacttcagctagatcaagcttgtctaacctgtggcccatatgcagcccaggatgacttt

SEQ ID NO: 158936 - DNA, 138 bp, Homo sapiens
ggtcaacggtttttgggcccctactccactgttattaagactgagctgtcccaagcagatagaactctaaataaggcctcaggcgcaggtgagttccctgagcctccaatcagcattatagtggatgcttttctatct

SEQ ID NO: 158937 - DNA, 539 bp, Homo sapiens
ataatttcttaaaatagacaggcatgttataaggaagttgaagtttatgtgacagtataccagatgcacagaaagttctggaggaaatgaaggaaatattgagaggggaaaactactactttcttatctctgacaaattggattgatctgtagctggagtctggagagagtgctttccaggactcagtagtacctaaggcattactcaagggataggtaatgatggacaaaccagatacagatccttacttggtgctttccagggctaagtagcaccctagtaaggcattctaggctttattccaaggaatggcattggcagaaagaattgaaggaagtagtgggagaaagttaggacaactgagttgctccaggtttggtgtggaaagcaactgccagctgtgaactgtgccgtgggacatctttgacatccatctatgaacaagcacctgtagagagctttcaggtccagttatgttcaataatctatactaggtcaaagatgacattaatgcatgtttctgttgaaaaagtttaca

SEQ ID NO: 158938 - DNA, 274 bp, Homo sapiens
tgatgatgtgaaacccaattgcagcttcaaaagccagaactgtgtagcagccagactcagagaagcgggtcccctacccctgctgtcccctgtcctttccaccctgtccccatgagctaccctttctttcctgggtggccttgtgtgctttcatttgcccactttcttgcacggaaagaatgtcctacagggaactcctcttccctagcagtatgtcctggaaaccacgccacgtctgtccacaggctcctgctcattcctgtggacagccata

SEQ ID NO: 158939 - DNA, 214 bp, Homo sapiens
ccacttgtttgaggaccactctataagcagcaaaatcgccaagagttctttgtcttcttccccaaacttgttttccatcctgtgccccatcttccagataacagcattatttgtccataagcataatcacatacatatctctctgtagcatcactactgcacattgccctccacttcttccacactacagacaagtaccatgcgttggccaccc

SEQ ID NO: 158940 - DNA, 469 bp, Homo sapiens
atgagcagcacaaacacaaaaaaattaaaaattgagtaatgtctcaaatatgtactgtacagccaaactttgggctacttcacaaaggtggacagaaatgtttgcatggctgcctgttagaatccacaaaaagttttgatttgaatattcccacttgacacgaacactactgtattatgtgaagatatgggaaaagggagcagaaatggctatgaacatgctggccactcacagataaacagtctctccaaggtgcacaagagagacaatgccttcccattccccggtgctaccctgttccattctgccagggcccagctgggtccacattaggtagtttccagtggatcaatggaattgttgtttggctatctggtagatctagctaaaggaatctaaagaagacagttccaacatgaaaatagtagctattaacatatctattcataaatatttgttgagaatctac

SEQ ID NO: 158941 - DNA, 413 bp, Homo sapiens
attaaagtcccaactttatctttaatcttccactgaagattttcaactatccctctttgcctctccagcccactacactaatttagaacttaatagggttcctgctctacagtgatattccagaaatcacagtctaatcagtgaatagccggcttcagagttcttgggcatttccaggcacaaaaactttctattaagctgtagcccctgtatcagactctgtatcaggcagagtctgatagcattctgcccatctcattcagtactgtttataaataataagggagccccattctaaactctggattccagccatgggctcagttgtagattctgtgtcacaatttttgtcccttcaaccccataatggcctaactactggtcaacatgatctcctggacctaaaggctggt

SEQ ID NO: 158942 - DNA, 792 bp, Homo sapiens
tctgtgtccacacacagagagtacctgtgtggatgctccagcctggggcattccctagcctctgtgtccacatacagagagtacctatgtggacttaaatgatacctactgtctggcgtgggcttactgtctggcgtggacctactgtctggcgtggacctactgtctggcgtggacctactgtctggcgtgggcctactgtctggcgtgggcctactgtctggcgtgggcctactgtctggtgtgggcctactctctggcgtgggcctactctctggcgtgggcctactgtctggcgtgggcctactgtctggtgtgggcctactgtctggcgtgggcttgccagtcatagggtggcagggaagagcagggtgttgtgcagcgtgaccgcattttgatgcaaacagaagaatcagctgtgggttataacttcagtatttaccatattagactacactttgagaacactgttttaatgtatctccttgatctgactaaataaaaataacagggatatttttaaggagaagggatcggtgtaatcagtatgagtactgcaatgcttaaaaacatggcgtaggtgtcactcacacaggaagactgaccaaaaaaaagaagaaaacacacaaaacaacgctttcggcgccccgccccagaaagtttaaaacactcgcgtggggcgggccccaaggtaggacaggcacgcggccaggaaccgggcaccaggggggtccccaaaaaaccgggacgggtggaacaccggggccggggcacggcacaaggcacgcctcc

SEQ ID NO: 158943 - DNA, 381 bp, Homo sapiens
acaaactataaatacgttagaatagttgcctgtgatatacctgggaaatagaagtgggaatgaggacaaaataaaacaaatacatgaggcaagagagtccatgagtagaccccaatgatgattattggccatgaaaggaagcttgatggctggatggaaagaaggaaggaaggaaataagtaagggagagatggcggatggagctggatgtgtccttccagggctgtacaaaggagggggaccccaacccctagtccagacaaaggtccctaaggcaggtgtacagtattgtggggatgaattcatcagccacgagagactgacccatctaatgttaaattcacttccctgctctgactgctgactcatccagcagttagc

SEQ ID NO: 158944 - DNA, 130 bp, Homo sapiens
attgaatactgtggcttccttagccattattgaagtgcattagggaacagccctaaagctgtagcctgtgtattagtctgttctcatgcagctaataaagacatacctaagactgggtaaattttaaagg

SEQ ID NO: 158945 - DNA, 266 bp, Homo sapiens
gggcgatctagaggatcccaacgtcagcactccttgtatcccttcacccctgcctggaccaccccaacccagtccttctgattcttcaccgaactaagggtgtgtctaagtcaccagttctcatttatttgcttgtttatttttcatcctatcttgtttaaaaattgattttaattggcttagaaaaataccaggattcacagaatgcacaaatctgtatgcaagagaagcagcaggctgcgttaaagtaggagactcggtcaaca

SEQ ID NO: 158946 - DNA, 310 bp, Homo sapiens
ataggtcggtaccaaatggatcctttttcacttaacatttaaattaggatatgttgtagagggcagtaaagaatagatttatgcttatttttggatactacacataatggtttagtcaattgagtaagcaacttatgtacacaaacttgaaatatctaaacaattaaaaatgtctataagttataatgcagtttaaaatatctataaatgaaaacattttatatgctgaataaaccacgtgtgtgttcaagagttcagtatctcaatataataatcatttggaaatgtatgtcactgtacactaaacaat

SEQ ID NO: 158947 - DNA, 267 bp, Homo sapiens
agagccttgtgtggtgctggttattaccgttgcggctgtatatggtgtgcaaccctcccaggcatgtgaataagcacaggtgctagaagggcaggattggatggaggaaggttccatccctttggctgttgggcagaggtcaagccaggtgcatgctccattcacatcagcacctgtagctgcccggagagggcctcccagatgcaggatcctggaatggcaaacaggcagcaccagagtgtgaatggcggagctctcatagaggct

SEQ ID NO: 158948 - DNA, 293 bp, Homo sapiens
agccagatctgtggaaagcagccttgttaattctgaataacagtttttcaaggagccattattataattacagccatttcatacgttaaaaaaaggaagggtctggtggcagggacaggtcttgagcccacgactccactggattgtcccccatgatccccttttcaccttggagttccaaggttgtcacagtgtggtggtctggagtcatgcagtaccggagaaaggctcacgatggggctgaattcatcacagaagacttcttggagacaagtggtaggatcaacagctgt

SEQ ID NO: 158949 - DNA, 531 bp, Homo sapiens
gtccacacaggtccaacgcaggtaatgtgaatttgggtgcaaatctacctgaggactggcttctgataacaaattcttgttcccttgtccatggaaggtttatttcttgttcacccttttaccatatggggttgcagctttattcagtgacctcgtcattagccttcccaccttgggtgggccccaggctgcgtctctttccccacacctcatgtagctatcctggtggaggttcaagggctcccggtgaaggcagcttcagtgattgattgcttagcttccaggccttgtttttacttgaattttgctcttggtggattccttccttttgtgcctggtcagtgatgtttgtaaaaatcttaaaaatctcatctagcagcagagttgttaatttggagggttgttcagggtatctagtttgccacaatgcagttcacaacctggtttggaacataacattgtgaattaggtgttgagtctttgcattccttaatcatggcaatccttgtcattgttcctgtgatataattg

SEQ ID NO: 158950 - DNA, 550 bp, Homo sapiens
caggtgtgccaagatccttcagcccttggaagcgggtgcctgagtggggtcttagctgactagagtgcctgggcagacaagagcagctccatcttctctttagagtatgttacataagcattaaatcgagggtgtgccctgacgtaaggaaagtagaagctcaccagcctgctgcactcacatcagcgagagggaacatttgcccctccatgcctactgcccttcccgcccttcagcctcaggttacaggaataaataagttaattaatcccaagtggggagagcctttgaagagtattaaaaggagaggaaggaatggttggaacctgttcccatcaggaacagatgagtaggtcaagctttattcacttttaaggaggaagggattcctaaaggacaaaccaaacttgcttttcagggcgttacaataaaacgttcttaaatcctgaatatcacacatttctgggaggaatgtcctgccctttgggaaaaatagcaagaacttcgagctccctctagaggccagcagtgataaaagagcgtcgtagtg

SEQ ID NO: 158951 - DNA, 462 bp, Homo sapiens
gttgaggctgcagtgagctgagattgcaccattgcattctccagcctgagtgacagaataagaccctgtctctaaaagaaaaaaaaagtctaaggggtgttctgacatccaattaggcaaaagcccttcaaggctggctatgcttcttgtaactgtactttcatcccacctcacacctccccaccccactctacctccaaaaaagaaactgacctaagcccagagccgatcccactgttctcagcctctttaccaggggaaatgagatcttaagaacagaccaaaaagtctccaaacctaacagcagtagggaatgctcacagggagctcgatgtgagcgtgacctcctcatttctatttgaagaagctgaggcctaattcagtggagacttgcccaaggtcacccaacccacgtgtgacaggacatggccaggatccagaccctaggttctttaggctatg

SEQ ID NO: 158952 - DNA, 194 bp, Homo sapiens
ctggggacggatggggttcagcttgctggaggggccggccagcctccaacctcctcacagggagagcctccctctccactctctccccagggatggctcttgggggctcaagggagcctgggcctctgccagcctgcaagctgcctccaactctcagtcaggatttggatgcccccagtgcagtcctgaggccg

SEQ ID NO: 158953 - DNA, 421 bp, Homo sapiens
cggggtttggtcgtcctggcacttccgcaagcagcctttccagctgtagctccggaaggtgctctgacatgacagttcaaaaacacacttccccctggcctgggcttcaacactcacttgtcagaaagtgaggtcctgtatgccccagtcctcggccagagaagcaagaagcagatttcccagaggctgtggccccttgcattggtgaggacactggggtgctacctctgtttgaggggtgactgacaactgtgctttcttagggtggagttggtctgctgtcgtgactgtctgcttgagatactgacccctggcgatcagattctggaagtcctctcctgaggctgctgaagtcgtcccagaggcttgtccagccacagcagtggagaaagatccaatcaggcaggcaggggcaaacggg

SEQ ID NO: 158954 - DNA, 442 bp, Homo sapiens
ctattgctcagtctccttgctactatgtcctgccttggtttctgtaactctcccagctcccctcatcttcaactattccttcttagtctcctttgtaggctcaatttcctttctatgtcccctctctcatttcatcctctctcattttccagcctccttcagttcatttctggaagctctttcttctctcattctcctactctccaaggaaaattttatccgtactctcagcttctttgagctctctctaggtcccaaatctacatccaactgctttctaggatctctagatgttccccaggtgctccaagctcaaccatacaaatgaaaatacagtatgtcctgaaacctgctcttctttatgtatttcattatctacagtaccaccatcactcaaaccagaatctcaggaatttctcctctccttcaccgtgaaaggatc

SEQ ID NO: 158955 - DNA, 397 bp, Homo sapiens
gacggctcatcagcacagctctgacctgccagcctcccccacagctgcctccagcctccagagcggcttattcaggaacagaggcagatgcagtgtggagcgcagctgcgtgagggttgcgtgggtgtgtctccatgggagtgtgtacagtgtgcctatggtgtgtgtatgtgtggtgtgaatgtgtaggtttgtgtgtgcacatgtgagtgtgtgtgtatttgtgtgtgtatgctatgtgtatttatgtgtgcgtagttgtgaatgtggtgtggatgtgtgtttggtgtgtgtgtgtgtgaatatgtgggtttgtatgtctgctgtgagtgtgcagcattatgtggtgtggatgtgtgtttgtggtgtggatgtgtggtgtgaatgtgtgttcatg

SEQ ID NO: 158956 - DNA, 129 bp, Homo sapiens
gccattcccaaagcatcctggtttatggccagagaccagtgagctagagtaactctaataacacctgcacgtaatggctaaaattgctttaataagggatagagactttgacgtcgacgcggccgcgaa

SEQ ID NO: 158957 - DNA, 230 bp, Homo sapiens
ctttccccttcaagaagcttagattagtgtgattaaatcagtgtgatacagtggtgataagagatccagcactccactcgacatcattgtccgttgtcatgacaccaagttacagcatttgatcaatggttcctgtgccatgttgcagtacacttggctcatcttagtctttttgtcaagctgcctttcagcgacctggttctgcaaagtggttgtggcagccattggat

SEQ ID NO: 158958 - DNA, 493 bp, Homo sapiens
attccagatcccaagcctcctggattccttcagagggtctgcccatgccctgaattccctcctaactccccacctgtgccctcggtcccctgggtggtgcgggaacgcacatctggtgggtgtgagcaagcgtggcccgtgctggtcacgctgtttactctccctgaagatggacagtagggcttaatctggtccaggtcatgagacctggctggcagcctccaccattagacaactcccaagctcatcagacttttcaatgatgcggcttcattctcattaaaattaactttctggctgggtgcggtggctcacgcctgtaatcccagcattttgggaggccaaggcgggtggatcacctgaggtcagcagttcgagaccggcctggccaacatggcgaaaccccatctctactaaaaacacaaaaattagccgggtgtgatgggcgcctgtaatcccagctacgtgggaggctgaggcagaagaatcactt

SEQ ID NO: 158959 - DNA, 397 bp, Homo sapiens
cactcgctctactcagccaccaccctggattggcttccaaccaagttgtgtttgcttttccctctgcctgaaatgtccttccaaaggggaccgtgtggctcccttcctccctccttccctcccttccagcaagtcttaggtctcagctaaaactgcctttgctctaagtcaccttcattgcctttgacatggcacaccactgcctccagcactccctccttatccttcctccctgtttattttattttattactttttgtttatttattttgagacagagtctccctttgtcacccaggttggagtgcagtggcatgattttggctcactgcaacctgtacctcctgggttcaagtgattctctcctgcctcagcctcccaagtagctgggattaca

SEQ ID NO: 158960 - DNA, 585 bp, Homo sapiens
agcccaaagtgaaaaagaatgatccagccccaaatgtcaatagcactgaggtggagaaactctgctctacatgttctaataatactcgaaatttttccattacctcatttacataccacctttccctgaaataacttttaatcactcaaggtttttccaacacatgtgtgatgtggctgggggtctggttggatttcttgacttcacagatgaagctactgatcaaccacaggaagcagctaaatacagttgctcagactgaaaaaccaagttgctgcaggactacatgctcatccgcatatgctaagtacattttccacatttggtactttttatggggcaaataaaacccacgttgctttctcaagatcacacaaagatcaatcagtgttctccattgaaatgtcacccaactcagggaaaagcaaagaaaatgtgcctgtctgttgaggttgaggagtccatctctgggaaggggcagtgagatgatgagtattttcatgtctcctgaaagtttaaaaaacatgaatttttaaattttcaatataatagccagaaaaaaatctattagttttcacttgggct

SEQ ID NO: 158961 - DNA, 210 bp, Homo sapiens
tcaagcactgctgcaggcaatgaaaagctaaaataaaaataactgaaccaagcctgggcaatgtggtgaatccttaactctatgaaaacaatatatatataaaaatcagcagggcgtggtggcacatgttactcgggagtctgagatgggaagactgcttgagcccagggggtcaaggctgcagtgagctaagatcgtgccactgtattc

SEQ ID NO: 158962 - DNA, 875 bp, Homo sapiens
tgtaaaaagttgtactgagaaaggatgaagacctaaacaactacagaaagaagattacagtgtttgaatgacaggaaagcattgaactatggttagctgtctgttgcagtaaagggaagtgagttagctcaggaggtgaagacgtttaatgtgaaagtggctgcaggtagttccatgttgtgtcacaatgccattcactgtgctcctggatgtcacaattacactgaagtgtacagggcaaaaggctaattttaaaattagccaaataactgggagagagttgaaagtaccttatgtataatttctcttctgctaacttagtatgcaatctaaaattcttgatttcttgatttttttcatattttaagtaggaataatttctgacttgcctacatctcagatttattgtaaaatgatagatgcacaagtattttgggaacccaagtcaaaaatcactttaaaataattatttttattggaatatatataatcaagatttgatatttaccaatatcaatactcaaacaggcggggcgcagtggctcacacctgtaatcccagcactttgggaggctgagctgcaccgatggctcgatcccaaggagttcaagaccagcctgagcaaaatgacgaaaccacacctctacagaaaatacagaaagttatccagggataatggcacatgcctgtagtcccagctactaggggtgggtggggggtttgaagcgggaagattgcttagtcctgggaggttcaggctgcaataagccattatcacaccactgcactccagcctgggcgacagagcgagaccttgtctcaaaaacaaaacaaaacaacaatgacaacaacaaaacacctctaaagcagcaatt

SEQ ID NO: 158963 - DNA, 375 bp, Homo sapiens
gcacgcaggaaaaagtacccgtcttagcccctgatcacgtgctcctcgtccaggtaacctcatctccagaaaaatgaggctgaggaggtttgactaatgattatgcttatcccagaataattttctagatttctgtcaatgccttcccttcctcagataaatccagtacaatcatttcctacgccatcctgctttaagcacagcatgcaggagtggcgggagcttagagttaagatctggaaactcccaatcaatgacttgccctgtcatcttgagcagcggcttcccggacagataggattccccgacacaaaggcaatcatcaccatctcagctctgatggagcaagccacttaacctcgtgaagcctgtttc

SEQ ID NO: 158964 - DNA, 457 bp, Homo sapiens
ccatatgatggagtctgcacattcagatgatagacactatatttcctcctttctttattgggcttacaatgtcataaggatatggacttcttaggaaaaggtagtgatttgaggaattctaaactacaatttaaataaccatcctgctattttgagcctttggcataccatacactataattttgtcgctgtgtctgtgtaacacaagataactgatataagcattttatatatgttcatgggttagatgtgaatctttatccaaacatgctgtagcctgcctgattccttatgggccaggaaggcatttagaatactaagatatatttccaattgtgcttgctcagatcaaattgagaataattgtgggatccctgggtgaattttaaacaaatcagagggtaacacagccaatatttgagccacgtagctggctcttacaatgaaatgtctatag

SEQ ID NO: 158965 - DNA, 618 bp, Homo sapiens
gtaaagctctcagaagagtacctgtttattagcacacgatgctatataaatgcttgctgccattattataatgccagataatttggcaggaggccaacttgtacaaatccttacaaatttcaaaagacaatgtccagaaatacagttaggtactaaaatgagttattcagaaagccttatgagacagtttttacacaaccagtggcaaaactatcacaaaataaaaatgcttcaactataatctttagagaaacttgtggcacactctgagccatgaattatatgagcagaagagggccttgagaacttcatatgctgtgaccaaagaggcagatgtacgtggcaaactgattcttctggcaccactcagctacaaatctgccctgaagtatgtatagttatggagcttgcccacaaaactactgggatagtaaagggtgaggtaacgatgctttcaatattgattctttctctaatttcataaacactgtatttctccaaacatctgatgaaggaccaaaacagagggctatcgttcactacccatagtgaactggtctttctgccattggaactctctgatattggctcggaaatctctgagtttggaaagtctga

SEQ ID NO: 158966 - DNA, 381 bp, Homo sapiens
aaggactgcgccaggcatggcacccgagggaagagtggcacccccacctttggtgaggttctccatgcaggacggtgccctgagtggtgtaggaggccctgtgccgggtgagcctgccagcaggagtcatcggacaatgtggttgccaggtgtggccgctcagctccgaccaactccgaacctgtgtggtcagaatcacacaggacaaaccaggggcctgtttagccccttcaggctgcctctgatgggagagaggctggatgcatattctgagaaagtggttctgtgttattgaggttgttatgacctaggctacagttgaaagtcatctctaagcacttatagtagtatttgctaatcacagtattgctaacacaatag

SEQ ID NO: 158967 - DNA, 172 bp, Homo sapiens
gcagttcaaggctgcagtgagctatgtttgcaccaccacactccagcctgagtcacagaacaagacctcatctctaaaaaacaaacaaaaaccaaatccacatatcctaaaaaatgctccttttcagcattctcttctctatggacaaagggctggatgctttaagaaccaa

SEQ ID NO: 158968 - DNA, 331 bp, Homo sapiens
gcaaacatatctatgtttctgtgttttctgctcactctcttgatatgcttgtatgtactgctgttcaatgtatgtctctttaatatgtttcaacatatttagaatatattttgaaatacattttaaagcatgcttagtcacttcatttctatttctcttttatggaatgttgatatattttggcaatgtagataattttatctttttgacaaatctttcctcaactaaatcacctgtttatttaattactgtcactaacaattacaagcaaatacaaaaataaaaaaaaaaccttcttggcaattttaaaaataatgattgtcataaaaca

SEQ ID NO: 158969 - DNA, 136 bp, Homo sapiens
tccttgctataccctgaatccctcttcctcatccagccaatgatagctttctgtctctgtggattagtttgcgttttttagaatgttatgtaaatggaatcatgtagtaagttctcttctttgcctggcttttgct

SEQ ID NO: 158970 - DNA, 361 bp, Homo sapiens
tgcaggctctgagaaccactccccagacccccatgaaatgccggcagctccagccacaccccagctcactttggaggcctgctcgaggctcaccgcctccaggaaggcttccccctgagcccaccactgtcacccacccctggtgccctctccgcttggctccaccagtacctagtgatattgctcagggtgcacaccctcagccgttacaggcctttctcccctccctcagcacttaggttgtgttccccaggcaggggctttgtctctcccatcaggcgagagctccctcgggaatactccagaacacagcccctcgagttctagggctgtatcagaagtcagtactttctctccctgc

SEQ ID NO: 158971 - DNA, 367 bp, Homo sapiens
tttttttattttttgagatggagtcttggtctgtcaccaggctggagtgcagtggcgcgatcttggctcactacaatctctgcctcccaagttcaagcaattctcctgcctcagcctcccgagtagctgggactacaggcgcccaccaccatacctggctaatttttcgtattttagtagagacagggttcaccatgttggccaggatggtctcaatctcctgacctcatgatccgcctgcctcggcctcccaaagtgctgggattacaggcgtgagccaccacgcctggccaatgtctgggttattaaagagtaaaggaaacagagcaggaggggaggggctgcactaagacaaaaagggaaagga

SEQ ID NO: 158972 - DNA, 387 bp, Homo sapiens
cttcacaacacagttgaggcaagtacaacaggcattattctccacttcaaagataaagaaactggagctcaggaaggttaaatgtcttgtacaggtcaaagtccatggtgagttttaaccctattctgagtcagatttcatagctgatttcccaaaagtacaccactttaattttacccatcctcctttctatattttcatttcagttgaaaggagttattaatcatttacaatatgtaaagcactgtgtaggagatatcaggggcatttaggaaaaataaaaaccaaaaaatcctagatttctagtgggtttactgggaagacatactaataatacataaataagtccaacataagacaaacggtaaattatcagacatcctaaca

SEQ ID NO: 158973 - DNA, 401 bp, Homo sapiens
gaacaatcgagctcggacccctccataatgtgggcccaccagcataatccagggttaattcacagccttaattccacctgcaaccttaatgccccccacttttttttggagtcagagtcttgctcttgttgcccaagctggagtgcaatggtgcaatctccgctcacggcaacctctgcctcccaggttcaagcaattctcctacctcagcctcctgagtagctgggattacaggtatgtgccaccacacctggctaattttgtatttttagtggagatggggtttctctatgttggccaggctggtctcaaactcctgacttcaggtgatccgcccacctcggcctcccaaagtgctgcgattacaggcgtgagccaccgtgcctggccaacacatgatt

SEQ ID NO: 158974 - DNA, 203 bp, Homo sapiens
ctcaccatgtcccgttcccctctgcaccctgcatcctctaggcctttccaggggctgtgttcttggcctggggtggtcttttctctccttacctggctgacagttacttgtccctccgcaggggaccatgttcggacccccaggccagcccactgctgctccttggcactttcacggccctggcgtgtccccgtcatagctca

SEQ ID NO: 158975 - DNA, 502 bp, Homo sapiens
tctcacactactataaagacactacccgagattgggtaattcataaaggaaagaggtttaattgagtcacagttctgcatggctgaggaggcctcatggaacttacaatcatggtgaaatgggaagcagtcatcttcttcacaagacaacaggagagagaaggattgtgtgtaggaggagctgtgaaacacttaacaaaaccatcagatctcctgagaactcactcactatcgtaagaacagtatggcagaaaccgcccacatgatccaatcaccttccaccagatcctgccctcaacacatgggtattatgaagattacaattcaagatgagatttgggtggggatatagagccaaaatatatcattccacccctggcccctcccagatctcacatattttttacatttccaacccaacatcatgccttcctaacagtcccccagagtcttaaatcatttcagcagtaactcaacagcccacagttcaaagtctcatctga

SEQ ID NO: 158976 - DNA, 239 bp, Homo sapiens
ggcaaaggtgggagcaggtggttgtggggagagaggcagggagaccagagctggctggagcagaatgaatattgacgggagtagaggaagctgggaatattgaggggagtaggggaagtcagaggaagctggttcctctagggtgggctcttatggctagtaaggactttggctcttactttgtgtgaaaatgggagctattgcagtgtttggagttgtagaattctaaatgcatagtg

SEQ ID NO: 158977 - DNA, 469 bp, Homo sapiens
ccctaaaaatctaattgtaactcgaaagtaagatagagagacacaagtaggctttcacatagcttggctgtgaaaagcaaagattaaagcaagtgctgggattacaggcatgagccaccgcgcctggcctgaaaccccatttctttacaaaaaaagtgggggaggccagatgtgtacatgtttgtgctctaagcagccaggagctgctgtggctggtgcatggtctgagcacatgtgggctgctgccctgatgggtataaggcagaccctccactccaccagcccacccggcggggacatcagccagaaagatggtagccattgagttctagctatgtgggccttggtttcctcacctgcaaaatagccctgatgatctcaagggtcctttcccgctctacagctcttcattttgggcggctccctaactgatgtgctacaacgtgctgtgcacttttctagggaccat

SEQ ID NO: 158978 - DNA, 411 bp, Homo sapiens
ttttgtattttttagtagagacggggtttcaccgggttagccaggatggtctcgatctcctgacctcgtgatccgcccatctcggcctcccagagtgctgggattacaggcgtgagccaccgcgcccggccgaaagcattgccttcttaacccaatctgatccacggaaaactctaagggtagcctgaacactcgcagtgctttggggatggtttggagggcaggtggtagtgggagatgttacaaatgaggaagtgacacaaaactgaggcaggaggcactgaaacagactctgcctgtagtatgggggcccaggatggtccaaacgaatggctttaatgcctctgaggaggcaggaaggagagccctgcagaaccagccccaaacatgtgctcatctgtgctccctacc

SEQ ID NO: 158979 - DNA, 407 bp, Homo sapiens
cttcagttggccctgtatgatgttgtcatatatagaagagtctttgtctgcaattagagtttactcatgaaagattccattctgacctttggggtgtgcagacttcaattgtatcatatccatctaaaagaaagcctgtttgttttgtattgaggtagaaattacagattatgaagagaaaaactctaagagaaaactcttatttttatcaaatagacaatgaaggcatggtagttcagtagaaatttgctaaatcagtgtctgaatgatttcatgtacagattttagatttatggtatcagtattccagatctccaaacaagttcacacagaccccagtagatgcctgtgtgacacttgtcagtatcctcactcacatgtcagagtttaatcaaatctggtttttc

SEQ ID NO: 158980 - DNA, 198 bp, Homo sapiens
atgactgtgagaatggagtttgactaacatttattttttaatttatcttgtctacttgcttgatgagtgtctctttggcagtagctgcttctgtgggcagtaacctgatttagaaggatctccacactttgttcccactccatgcctcccacgcatctcatctgcatgcctctccccagacctctctgaatccaatct

SEQ ID NO: 158981 - DNA, 268 bp, Homo sapiens
tgttgaaagcggagagaaagcatggaaatggcacactggctctcaaatgcctggatgtgacaaacaatgcttctgctcctgtattggtgtaaaggaaaagtcacatgatcctaactgcaaggactttactgttcccatgtgtccaggaaggagacagagacaaaatgtgggtgagtactatacccttccccataaactgttacatagtgggtgctcaacaaaaagcaactatgatcatttggtattatactacccttctcatttctag

SEQ ID NO: 158982 - DNA, 490 bp, Homo sapiens
tttaccttaccctccctacccttatgtttctcactgcagttttgtccaatatacctgtactcctccccagctccatcccccatctttaccctcatctcctaccacactgacgcccagggcaccttatgtgtccagctaagtcatattcattattcctgaatgctcttctttttcaggcccatgttgttaccccagtaatgcccatctctactttttctacctaacatatttattattcatgacccaaatatcctttgttttaaaagaaaaaaaacctcctttactatgtaaaactattatttacactgcctcaaaacattttgttatagtacttactgtgtgtgtatatattagcaagtcttacttaccctccttgtttcactaacttccagcacagtgcctagcctatggtagatggctagtaatttattctaattagaacaaggtggatgtatttattatctatctttttgaagtttagatttagcat

SEQ ID NO: 158983 - DNA, 719 bp, Homo sapiens
tggcagccggctcgggtccccttccacaccatggaagcttgttctttcgctctttgcaataaatcttgctagtgttcactctgggtccacactgcctttatgagctgtaacacttaccgcgaaggtctgcagcttcactcaggaagccagtgagaccacgagccccagaagaacgaacaactccagacacaccgctttaagagctgtaacactcaccgggaaggtctgcagcttcactcctgagccagcgagaccacgaaccaaccagaaggaagaaactccgaatacatctgaacatcagaaggaacaaactccggacacgctgcctttaagaactgtaacactcaccgcgagggtccgtggcttcattcttgaagtcagtgagaccaagaacccaccaattccggacacaatactagtacatgaaatgataggcttttcatggactttgaatatgggtcattttagcttcctcaagtaacctgttctagcctttaatccttaatgtcagaaagttattcttttacctaacaaaattcatttgattttgaccaatttaactttcatagattataacaaattactatttgacagagcattagaactccagtaaccaagttctctgattttacagataaagaaacaaagcttcagagaggtaagtgtattctgaacacataaaagaaggcaaattcagacgtgtgatttgcaaaagtttt

SEQ ID NO: 158984 - DNA, 144 bp, Homo sapiens
gatctggttgtgtaaaagtgtggagcatctcccccatcaactttctctctttcttgctccattctcaccatgtgatgtgcctactccccctttgccttctgccatgattgtaagcttcctgaggcctctgaggaaaccaagcag

SEQ ID NO: 158985 - DNA, 399 bp, Homo sapiens
gtactgtgaaactaatatatctgagacaggtttcagtaaatttagaaagtttattttgccaatgttgagggcacacacccatcacacagcctcaggaggtcctgacaacatgtgcccaaggtggctggggcacagcttggttttagacattttagggagacatgagacatgagacatcaatcaatatatgtaagataaacattggttctgtctggaaaggtgggacaactcaagcagggagggggcttccaagtcacaggtaagtgagagacaaatgattgcattcttttgagtttctgattagtctttccaaaggagacaatcagatatgcatttatctcattgtgcataaggatgactttgcatagaatgaaaggcaggtttgccataagcagttct

SEQ ID NO: 158986 - DNA, 375 bp, Homo sapiens
aagctggggagaggtgcaaacagtgttgtggagtgctgcttcatttaaacaaaagtgaaaatcaatcatattttcatctggcccataatcaaacacaacagggaagatgataggagataggtggaatttgtggtattcactaaaataagcagcaaagaaattaatgacaaaatacactcaaagcatacagtccagactttctggctgaactccttggtacagataaaaaacagatctacaaagtggtaaagagaattattttacattatccacagagttatggacagacaggtcgcaagagactccaattttcagaaataatttacaacgaatagtagatatcttacctgacacccagcttccaaagcctatggt

SEQ ID NO: 158987 - DNA, 509 bp, Homo sapiens
ttgttcaggaaaagggtaaaaacagatggatgaagcgcatgtggcaaaacccagcagagtgttgagttttggtgacgatcatttggagattcgctgtgctattctactttattaaaatttaattgaaaaaataaagctccccagaggattgtgatgtgcagtcccctttggaaccactgtcctatataccagctacaaggacagggcatgcctggccctcctaccaagggccatgtacacaaatggaagccagcacgtgacatgccttcctgccacaggctggggttgtgggactgcaataggggacacaagcaatagcggggacatggacacacgtgaagatgccaggaggcagcagtgctgctggtggaggtattactaagtccccattatttttttttttagatgaagtcttgctccgtcacccaggctggagtgcagtggcgcaatctcggctcattgcaaactccgcctcccgggttcacgccattctcctgcctcagcctccc

SEQ ID NO: 158988 - DNA, 118 bp, Homo sapiens
ttaaagtccttcttttgtgagtatacttcccattaattttgcttttcatttacacacaactgtaggtcactaagccaaagtctcctctaagtaaagatggttaaggggatcccaattt

SEQ ID NO: 158989 - DNA, 989 bp, Homo sapiens
gaaatgaaaacatctatacaaatcctgtacacaaatgttcatagtaacattattcataatagccagaaagttagaaacaactcagattccaacagctaatgaatatatacattaaattaggttatgtccacagaatgaaatattattctgcaataaaaatgaagtactgatatatgtacgacatggatgaatcttgaaaacattacattaaatgagaaaagccagtcaccaaagaccatatgttatatgactacatttatatgaaatgtcagaataggaaaatctatagtgacaaaaagtacattagtggttgcctcaggctgagggtggggtggtggagtaggcaatgactacaaatgggtactgcgttttttgagggggtaagtaaaattatttttaaattagattgtggtgatgtttgcacattaaaggcctattaacctcataaacttgtcattagtctttgaagaaaaaatatgtaaaagaaaaatgtatgtatacataatgtaagaatttgtctctaaagcagcgcttaaaattctttggaaaagtttgacaaggtatatcacgtgaattcagattcatcttaaagaattatgcttagacaggaaaaaggaaacttattttggtctcaagtagaaaaatatattgctttgagttttatgtaggtttagacttttaaaatgttagaattgattcttactataagtgatttgtgaaattacacctttggtttgatcaccggtgattacagtgttattctcatacctttgtgtattgaactatttccagaaccaagcttatgtagatcctgaacagtaatatgagaatgtgattagtatttgtcacctttattttaaaactagcatctgaacacttcaaagctgtcaatgtggattggttagaccaataatctctgcttgatccttacaattaaattttgcaactaatagtattgttctttcaaacaggtgacatgttttccatga

SEQ ID NO: 158990 - DNA, 464 bp, Homo sapiens
tgaaacttcagactttttcacatgaaagtttttttttttctaaatgccttaaccttgggtatactcaagagtaggggatgcagatgaggacaaatggctaatgcagggcttaatacctaggtgacgggttgacaggtgcagcaaaccaccatggcacacgtttacctatgtaacaaaccacgttctgcagtgtatcccagaacttaaagtaaaataaaataaaataaaaaagataagatttggacatagaggcggaaacacgggaagagtgccgcgtggcaagggaggcaagatgggaatgatggtctacaagtcaaggaaggaccaatattgcctgcaaccacctaagctaggaagaggcaaagaaggacccttccctagagccttcacaccttgatatcagagttccagcatccagaactgtcagaaaataaatttttactggtttaagccaaaaaaaaaat

SEQ ID NO: 158991 - DNA, 156 bp, Homo sapiens
tcagggctgggagatggcagaaccttctcacaggggttgtgacagaggagttgggtagatgtgttctcagcatagatgtgttctcagtgggcaaaggtggaattcccttctcttttctgttttcgcttgacaacacaggcctgcagaaacagcata

SEQ ID NO: 158992 - DNA, 527 bp, Homo sapiens
cggcttctagcacggggcccagcacagaatgggagctgaggaaatgtttgcagcaagagataaaactgcttcacagtgtgtgttatgagttgaactgtttcccccaaaaagatatgttgaagtcttatgacctgaattgtgtttctccaaaatccatatgttgaagccctaacccctgtacctcaggatgtgactgcatttggagaaagggcctttaaagaagtagtgtaattaagttaaaatgaggtcatgtgggtgggctgtaatcccatctgcctggagtccttacgagaagggaagatatggacatagccatgcccggaggaaaggccaggtgaagacacggggaggagacgttcctctgcaagccaaggagagaagcctcggaagaaaccagccctgcggaccccttggtcgtggacttccagcttccagaactggcagaaatgcatttctattgtttaagcccctgggtctgcagtactttgttatagcagtcccgcaaacgaatacaaagtcctaacccc

SEQ ID NO: 158993 - DNA, 907 bp, Homo sapiens
agtgagagattgcagttaaaagctgtttattactaaagtgaaggccagttatcaggaggatctgaacagggaaggaaaatgggctgaaatcacaagtttgagttgacagctgaatgtttctagggagtcaaatatccctaggattcaaattgagttaactgggagtggcaagttgattgatagtagtgaggacagagagacagtcaaagaaaggttttagctctgctgaatatttagtcccaaaggaacatccaggtggtgatgtccagtagttgggaatgtagaactaaagtgaagaagaagggaaaccaaagaaaaagttgatagtttttgagactactggagtggctgtaatttaccagggagagagcaaaaaagggtgagagaactagtggcaaactttggtaacagttgcatataaggtgcaggtggtataggtggagaaaaagaagctagaggagaggtgatcagaaccaattgtgtaaattgttgtggaaactaagaaaaagaaaaattttaaagaaaaggaagaaaaagtttaaggataattgatagagcaaagtcaggaaggagacaggaggattggatccaaagtaagtatacagatagagggatattttctcctctgaagtaagataatactaaaaatgatggtagggagaaaaggtagcttcatattgatctttttggcaaataaggtgatagcatgcacagagtaaaagagagtagggagagtagactttagggaaacaggaaagatttacagctgatgtttgagagacttagttgtttacagactgatcaaaagaatgctaagcagccctgaacaccttgccaaagatggatggctaacttgatgctagatccaagcggcaagctcaagagcaggaaagggcaatatggggct

SEQ ID NO: 158994 - DNA, 853 bp, Homo sapiens
agtgagagattgcagttaaaagctgtttattactaaagtgaaggccagttatcaggaggatctgaacagggaaggaaaatgggctgaaatcacaagtttgagttgacagctgaatgtttctagggagtcaaatatccctaggattcaaattgagttaactgggagtggcaagttgattgatagtagtgaggacagagagacagtcaaagaaaggttttagctctgctgaatatttagtcccaaaggaacatccaggtggtgatgtccagtagttgggaatgtagaactaaagtgaagaagaagggaaaccaaagaaaaagttgatagtttttgagactactggagtggctgtaatttaccagggagagagcaaaaaagggtgagagaactagtggcaaactttggtaacagttgcatataaggtgcaggtggtataggtggagaaaaagaagctagaggagaggtgatcagaaccaattgtgtaaattgttgtggaaactaagaaaaagaaaaattttaaagaaaaggaagaaaaagtttaaggataattgatagagcaaagtcaggaaggagacaggaggattggatccaaagtaagtatacagatagagggatattttctcctctgaagtaagataatactaaaaatgatggtagggagaaaaggtagcttcatattgatctttttggcaaataaggtgatagcatgcacagagtaaaagagagtagggagagtagactttagggaaacaggaaagatttacagctgatgtttgagagacttagttgtttacagactgatctgctagatccaagcggcaagctcaagagcaggaaagggcaatatggggct

SEQ ID NO: 158995 - DNA, 164 bp, Homo sapiens
aaatcataattccagcgagatcacctcacacagagcacttttcaatactcttcaaagatattcacatctacaaacactacctcggctgagttctggagaagaggaaaagcaggtttcagcagcacaattttatacacagagagggacgctgggcactgcagctg

SEQ ID NO: 158996 - DNA, 130 bp, Homo sapiens
aaaagctatggattttgtcttagtataagatacacaaatgtataaacctttatagtatgtacaaagctcagtccctaaatgtttgtaagaaataaaaaaaattcttcctggttttctaaataatcttaat

SEQ ID NO: 158997 - DNA, 412 bp, Homo sapiens
gtccttccttcttcaactgagatgcccctgatggagcaggtggcaaggggtcttagaagggtctgacagccgtccacagccacaaggctgaagaacccaggtggtctgccttgtcttctgggggtctgcagacagggtcccttccactgcagctcctgggcagacctggcccaaggctttgagctcccttataggccctgggaccttaggcagtgatgggcttctctgagcctcagtttccttatctgtaagatggatacagaggacccctcccaggggttagacagaccagtgtgatcagtcaggatctggtttgaggaagctgagccaggctgctgaggaccgaagccatttctgctctgacttggtttccctcctgtggcctctctagtcctatcctgcttctggtggg

SEQ ID NO: 158998 - DNA, 256 bp, Homo sapiens
gtcacctcccaccagtctccacttccaaccttgggaattacatttcagtatgaaatttgggcaggggaacacatctgaatcatattactggacaattgttgtggtcttttggtggtgtcatatttccctgcttttttcatgtttcctgtgtcattctattgatatgtacacatctggtgttccaatttttaaaatttgcttttgtagaaaaatatgttttcctgaacttccaacactatgttgaataggagtggtg

SEQ ID NO: 158999 - DNA, 431 bp, Homo sapiens
cgttactttcttgtttacaaacctaaatgattacttcatttaaagaaaatctaaactttgtggtttggcattcaaggctttctgtgatctgattccaatcaagtactctaagcttatctccttctgcaccatatgcatgcactttgtctgcagggaagccttcctgctactttccacgctgttctctcagtctcctgtgtttttgctcatattctcctctctgcctggaaggcccttctcaccaatccttatatcttacaaccaggtcacaaggggggtgtagacttacccattgggcagatgagaaaactaagccccagagaaattaagtaacctgcctgcagtctttcaggacctaagtggcagagtaaggtttcaaactcaggtccatgtgattctctgtatcccttacccagggaagactcctcaga

SEQ ID NO: 159000 - DNA, 489 bp, Homo sapiens
ggttgaccacagtggactattacattgaacttggcaacacgttccaaaaatcactgtgactcttggcaacaaaatagatgaaattgaaaactagttttgaggtgttagagatgagaagcaattttaggaatattcaattgtgaagaagatggaatggtagggaaaagtggagttaagagaaattttattaccattatgatttgattttaaaatgggagaaaaagcatgtagatatgctgatgagaaagatccggtagagaaggaaaaattaataatgtaggagagggagaaaaattgctagacaaagtcattgagtgggtaagagaaagacctggcttacatccagagcaatttatctacagcaatacaggatgaaagagaatacatgagcatagaggcagttagtatggaggagatggtggtgggagcttgcctaagttctcttgtggctttcatttcccagtgacacaggaagcaaagtgaacaact

SEQ ID NO: 159001 - DNA, 318 bp, Homo sapiens
caaaatcatttttggagaaaggcgtagacctgtctcctgggtgcgtccttaactttggcaaataaatctcctaaaatgattagagacttgtctcgtcgttttcttcgattgacaatatatacacacatacatacgcatacacacacacatatatacgcgcacgcacatgcacacatatacatgtccacacaaatgcacacacacgtacatatgcacacatacacatgtacacatccacacgcgcccacacacacacacacacagacgtgtctcacaccacagcagccgcctcgggggagtcacagcccacgcatcccc

SEQ ID NO: 159002 - DNA, 263 bp, Homo sapiens
gttgagcgggcgtgcccctcacctcagcccctccagagtagatggcgcgacaccccacggttctttgctgacctctccagcccgcgggcgcggcgcctcttccccgcccacttccttcatgctgggcagtgaagttgatgtagaagaaaaaggagtgtgttttattctgggctcaactgcgcccctttttaaggtcacgtgagatgagtggttgcggacttccttaaatcgctcagagaatatagccaaaattgggctgttgg

SEQ ID NO: 159003 - DNA, 1169 bp, Homo sapiens
cgggcgagtggcactcgggtgtggggagcgggagggcaagagatgagtgccgggcaagatgggcaggggcccgtgccctctgcacacatatataaatataaagaacacctagataaagtctatatatctctatatctatatgaagtcatagtttgctttatttttgtacctgtgcttagagatgttttgagcagtgctaccttcccaggcagtctgggatactagctcatgccttgacgccacctccttccctgctcttcctttggtattctctctgttcagagttgcttgggtctttctgatggaaatgtgtatatatgaaaagtttgtaaaataacaaaacaaataacccacctgcaggaaggacaagtgagctgaaggttgtgtggagctgcaggatctgatagccctaaagaaccaggaccaatgtgtctcttgccacttgggagggatgttgacttgaacttctttgcagaggggcttaacagggcaaggctgaggagatgaaaactgtgactccatccccacgtggctgtggaaaggtaaccagttcctcagagaaaacctggcttcacagcattagaaagggggtggttgagactacctagggacctacggtgacacctgtcttggtttgtagcactgtagctcagacagctcagaccgctcatagagggcatggcaatgggagagtttgtgaggctggctgcctgggcttggtcttggagaacacatggcctgtttagtgttgctgcagattcttagagccagtgtgaatgtggtatgtagtataaatatgtcatctatgtttttttcagttatttttaattggaaataaagtgccattgcaaataggatgctccaatcctgggacactgagtggaggatgaggagggagagatgaactgtgggccggcctgggagagggggtcttagtggaaccttccttctggcctccagccggggacttacaaaactgaacaatgtattggcagaactggacccacaatgggagattctggggagcaggagttcacttgtatctgagcaggaagcagtgtgccctgaagaatacctctctgagcaaattccagacctcacacatatgcaagggctctgccttgcagcctcagcaagcgtctcctggtgctagctccttcctgacttgc

SEQ ID NO: 159004 - DNA, 446 bp, Homo sapiens
tttgtattttcatatagattttacaaagtgttttgtcagtttgcacaaaaaggaaactgctgtgctctgctggggctccacatctttgtgcaatgatttggaaggtgcctccagattgaaccactggtgattgtgggactcaccttatggtgtacccttatgtcacaggttatagttctctgatacctgttgtcaaacatctcactttgatgcttcatatattttgtaaagttttatagttgtttcaagctggatagttaatacagtgccagttattcagtcatagttggaaacagaaattatacatagaattttacacccagaattctatacaaaatgtaggagaatattatataggaaatatgacttgttcttatgtttttcttcaacagttcagaaatgtagattggaactatgataatataatactatgtaaacagaaagtg

SEQ ID NO: 159005 - DNA, 469 bp, Homo sapiens
cctctctcacgctgttctggtgacagagctctcaggagatctggtttcaaagtgtgtggcacctcccccttgtctcttcctcctgctcctgccatgtaagacatgatgcttccctttctgtcatgattgtcaggatcctgatgcctccccagccatgcttcctgtacaactcgcagaaccatgagcaattaaaactcttttctttataaattacctagtctcaggtgtttatagtctgagatggactaacacagcatccaaacaggaaaataattcaatccatctgtcttcactgatgatacaattctatgcctagaaaatcccccaaagtaattctagaatagataaataactttagtaaagtgtaaggatgcaaaatcaatgtacaaaaatcaccagcatttctatatcccaaccacatccatgctgagaataaaatcaagaacacagtcctatcccatgtacaata

SEQ ID NO: 159006 - DNA, 708 bp, Homo sapiens
ataacacaaatagtcctatatataacaaagaagttgaatttataggtaaaaacctctatcaaaaacataaagaaataatgccaattctgcaaaaactcagaaaataggagcgaacacttcaactcattctatgagatcagcattaccctgataccagccaaagaaattacacgcacacactgtaaaaaatcttgtgaatagcacagttataaagacactgacacttaaaatggatatttaaatatcatcttgtggccagacttagtggctcacgcctgtaatcccagcactttgggaggctgacgcaggcaaatcacttgaggccaggagttcaagaccagcctggccaacatggtgaaaccctgtctctactaaaaacacaaaaattagccaggtgtggtggcacacacctgtaattcctgctacttgagaggctgaggcatgagaatcgcttgaacctgggaggcagaggttgcagtgagctgagattgcgccactgcaccccagcctgggcaacagagcaagactctgtctcaaaaataaacaaataaataaataaagataattacatctaaagatgacaagtaaaacaaagctgtcattcaaacaaaattagtaaaatatcttatctctgattgggaattctaaaggaacattttgccaccaaaattctgataatccccatcagccccaaatacttcaattgct

SEQ ID NO: 159007 - DNA, 293 bp, Homo sapiens
acacacacacacacacacacacacccctactccttcccatttgtgtcataaatacagtgtcatcagctatatcctcatatccaggagcaaggtggaactagttctttgggcttccatagcagaatgaaaactcaggcaactcacattcttggtcatagaaggtgagttcttccctgatctcagaatccaaatggtagtagaatataaaatcaatgagtttgtgctggtccttagggtagatttcaggaaaaattagaaaggaaatgaagaaaataaattgttgggtttttttc

SEQ ID NO: 159008 - DNA, 611 bp, Homo sapiens
  misc_feature (611)..(611): n is a, c, g, or t
gagagcagtggcccatctctcccatcctcactctgtgcagcctgaaagcaggcaggtaggctacctgtcctacctgtgacatctggaagtgtttctgcttagagcatcggtcacaactgaccttacaaatgagcctgtctcatgaataaacaaacatctccttcttactcccccaggcccttcccttgggggaacaaaggtgtctacctctgggaccacgcccccctgcagtcttgctcacttgtgcaggaggccagagactgagcttttatttatttatttatttatttattttagacatgaagtctccctatgtcgcccaggttggtcccagattcctagcctcaggcactcctcccaagtacgtggaattataggcataagccacggcacctggcctcctaaacttatgagtgttccaacttgtaatagactttgaaacatatacaacttgttggtgcgtcccaggccaatcctcacatttggctttgattagcctttatcaaattattctgcctcaacagacttaattttggtcaacaatttaactgaggtactttatagataacagtgtccattataccacaggaaatacttcagtgtttaaatan

SEQ ID NO: 159009 - DNA, 258 bp, Homo sapiens
aagagttcttttgtagatttaaaaaaaaaaaggaagaaggaagaaaatgactttcccttctttgccctcagtggtgtggattcctttatacatgtattcaatatctctgaagtagtcgttgtaaaatgactgggggtggtgggaggtcaggaaaagactagtaaaaaagaggtttatgggcatttgagggagatgagaaggacttccagatgcacaaaagccaagcttcgaggaaagggagagaagccctgcaccagg

SEQ ID NO: 159010 - DNA, 395 bp, Homo sapiens
agcttttccactccacatgccaataaattcctttgtgtttgtttgtttaggccagtttaaactgggcttctgccatttcctaccaaaaatatcccaacgcagcctatttgtgccaaatagctgagaatctgccacactaaaataagaacatggttgatgttggcaggtttgtgaaagcggccgaatgtcattaccttgaattcactgttttgtttgttttgttcagtgtgttactgcactgtgatttaatttcaaagagacagaaagagagggaaaaataggcttgttttctgatacacatgtaggctttttcttatggtgattaagtttctagacattgtcaaccatgctttcaagtgttgaaggttaacctagctaggttttgagttctctag

SEQ ID NO: 159011 - DNA, 471 bp, Homo sapiens
ccgggagcccttaaccctccgggagcccttaaccctccgggagcccttaaccctccgggagcccttaaccctccgggagcccttaaccctccgggagaccttaaccctccgggagcccttaaacctccgggagcccttaaccctccgggagcccttaaccctcccttaacccttccgggagcccttaaccctcgccgggagcccttaaccctccgggagcccttaaccctccgggagcccttaaccctgaaatcccacaagctccaaagggcccttctccagaaaagccctatggggagtaaagccaaagaataggcagaagacgtcagctctgtcctaagctcactggtgacactcatcaagcgtccagagcctagaacagcgcctgacacagagtcgatactgtaaaaatagttgctgaggggccaggtgtggtggcacatgcctgcagtcccagctacttgggaggct

SEQ ID NO: 159012 - DNA, 452 bp, Homo sapiens
ttggagatttgtgccctccatgcaggtggggaattagaagtggaattttttaagtcttgcattggaactagcaccaataattaaatggatgtataaataaaaggaacatttgttagaaggtctttaaaaaatatacctggaaaccctcgaggtggtgttggggctcagtaaacaataccccaaaatgaaggcctcagaagcaaaagtttttctgaccttcccctgccctcctgtttctcagtcccattcttccccaatgctagccatagaaactaggatccctcttcctcaaagctagtcataagacctaaaaatattactccaatttccctctgcctttctgtgtaaaaactgaccacgcagaaactgcctgactaccttgtttgattataggtcataagacccccatttcagaaaaagttttgccccctacccagaaaaaaaggaatgtg

SEQ ID NO: 159013 - DNA, 448 bp, Homo sapiens
gcacaatcagctcactataacttcaaaccacgggctcaagggatcctcctgccctcgcctcccaaacagctgtgactacaaatgtgtgccaccatgccttgctaattttgtaattttttgtagagatggagtctcactttgttgcccgggctggtctcaaacttctgggttcaagcaatcttcccacctcagcctctcaaagtattgtgattacaggtgtgagccaccacacctgccttaaagtctcatttcattcacaaaatatgaatatgaattgagacctgaaaattttgctacgcatcacacagcatcaaagcggatgggcttagtgaactgaaaactgtgtttattctattgccactttgtagcatcacttcagctggtaaacagaaatattggctattcagcaacgcgtagaagcataatatttctttttcttttttctttt

SEQ ID NO: 159014 - DNA, 429 bp, Homo sapiens
gtcctggagtggctcaccggcgaatgggctcgacctggggaaggggatgctgaaggctcttgttggagcttagccattcagttcctggggccagctgttggaatccggcaccctgtatgtgtagccctcagtattgctggctggtttctagccctttcttagagttgccctgttggggagggcacctgggggtgttcagtgggtgaagcgtctccaggagaacctctccttcccacaggatttctgttcctgtgtccgttcttctcccacagcttcctcacgaagcatcttcctggtggtagagctcttgactgtccagccttggccatggcttgggccttccatggccgggggtagcagggatctcagcactagccacttcctcaggggtatttggactccagtgcactcttcatgctccttccatct

SEQ ID NO: 159015 - DNA, 248 bp, Homo sapiens
tttatgtggtcaggaaggctctggtcaacagaaggctgttagttaagtttggggaaagttaaaagttctacacaaattttcaactgcacaggaggctggcgcccccaacccctgtattgttcaagggtttgctgtaatttgtattaaaacaccaagcccccttacacctgggtgagtctctctccctgaacagatgtgacaacattaccctccgaagactcccagagagaaagagaacacttcaaatt

SEQ ID NO: 159016 - DNA, 510 bp, Homo sapiens
agaatcagaattcggttatattttaaaggcaattatagtagaactattacttttttgttttctgttataatcttacctagacttatttaacatacttaacacataatattttaaggctaagtatttctacaaaggatttatcattcaatcattcttatttagtcaataaaatcttttggagattaatttttagtaagcctaaatacccaaatagccaggaatgtgattgaggatcacatttttaaaacccatccctcaaaaagaaaattgtaatatcttgagagacaggtatggtttgaagatcacccctcttcaaagtgagttcaatatctgacctaatggaatcactccccattccccaggactaggtgacactcactgatctgggaaaaataaacacgtgcaactaacaagagaaattttgagaattatgagtaagctttgaaaatttgggtactgaaaatagagagggagggagagagggaggtgatagggagggagggaaagaat

SEQ ID NO: 159017 - DNA, 379 bp, Homo sapiens
tctcgccaagctcctgattcacaagaccggaattaatgtacgtgcattgctgccccctgctggatgtatggaacccatttttgtctagggcccagggaaatgccatttgcaaatttcaattacttatcaattccttttcctccatcccccacctgaaatatcactcccctcaaaggactctgttaggagaccattccatctgagctaatgggcaaaacattccttataatgcaattagtgggcttcctcatacagtaaccccattgaccctctgtcggtgcggcttgctggaggcaacggaaaataggaaacacagcatcttgctcctccaaggaccactttttgaaaatacccccttgaattaacattaattcaggca

SEQ ID NO: 159018 - DNA, 301 bp, Homo sapiens
  misc_feature (14)..(14): n is a, c, g, or t
ggccggacgagatntccttcaattcaagtgctctagggcttatgtgacagccaccaaatggtagacgtgttgcaggggtccagtgaggagatagggacttctgtccgatttttgcgttgggataaaatagcatctcactacgatatgaaaaaactctccgaattagggtagggtttcccaatagcgtttatggtgccttcttgtttgctctcttagtctgtgttcctatgccgtctacatggatgggtcaaagactatgttttcttaacctcttgggtcaatccagttgttttccgtatac

SEQ ID NO: 159019 - DNA, 476 bp, Homo sapiens
tgctgggattagaggggtgatccacagtgcctggccagactccattattttaatgaatgagcagtttgcagccaccacagtgtacctagtcactcccctagtaataatgaacacttaggttgcttccagttgtgtgccactgaaaaaaaggatcgagaatgaatcgtcgcctcctttggggcagcattctgtgatatcccctgctccctccatgccatgttggtgttaaactgtgcttggagattcatcagctagaggctgtgaggttctgaacaacttttcaccatgttaagatgcttggccttggctgtgagcagcagcctggaatgggggcttcacaggagagggagacttgcttgactgcacctggtggcagtttgaacagtaggtgcggtggccccacctgctcagctgtcccacccttctgagctgggcaatcttttaggctctgggttcattgactttaaggcaaatgg

SEQ ID NO: 159020 - DNA, 367 bp, Homo sapiens
agagatggtgtggagcacaggtgactcctaaccggttgcagggaacataatcaggtaaaactgttttacagtagctactgaaactaagtatactcatccctgtggcccagaaatcccactcctagggatatatccaagagaaatgtgtgcacatgtacacaaaatctgtacaagaatattcataaccgccaaaaactaggaacaacccaaatgttcataaaacagcagaacagataaattgtagtacactaagtcctcacttaatgttgtcactgggttcttgggaaactgtgacttgaagccaaacaatgtataacaaaactaggccaggcacagtggctcacgcctgtaatcccaacactttggg

SEQ ID NO: 159021 - DNA, 472 bp, Homo sapiens
actctaagataaaagccaactcctctaagactacctgtagtcttggccaggcagagggcttgccaacaataaaatctcactagcttcataggaaaattatttgaatattttgctagcatttatagtcctaataagttattttttttaaatatttaagcaatgcttttttggtagttttgatatataaagtattccaatttgtttttgatataatgagtactaatctttactatcaaagtttttatcaaagctattagtatcaaaaaaaggtctcatgaccaaataagaaaaaagaattccccttatagaacactaggaacatgctcttaattatatgctgaatgactttacaaactagatgaatataatataaacacacatgcatgaattctgctgtctttgagtaccttctactcagacttcttcccttccttccttcccttctagacagaaactacttacagaaagcaat

SEQ ID NO: 159022 - DNA, 641 bp, Homo sapiens
aaactccatctcaaaaataataaaataataataataataataataataataatgtgtgggcagatgtcatctacaccatagtttcagaatgcaataaattcacatttaaaaaccttgaagtacaccgtatcaaaactttacttcatctttcattcttatgtgattcagttgataggctggaagaacaatgaaagtgagttccatcatgctgcctggtgtccgtgtccttaatgataaagactttgagtgtatttgcaaactctctgttaatgacagcatttttttttattctgagctttattaaggtataattgacatacaaaaattgtacatatttaaggtgtataatgtaatgttttgatatacatatacattctgaaatgattaccaaaatcaagataattaacacatccatcacctcatagttatccatttagcaaatcctttactaggtggcaaaattgattttaaaatcacatttttatccccttgaagttttttcatctgtaaattttcaagggcagtcttttaatagaatacaaacagctcattccttatgtggctccaagctggcatttcagcattgggtttaaactttagagcaacatatgaaaatctcctgaataaacttgtcaatgatt

SEQ ID NO: 159023 - DNA, 401 bp, Homo sapiens
attggacagcttgaaccctcaacctgtctcaaatgcgcacttgcctctgttgggaattgcacagacaaggggaacgcgtccaaaccacaccaccctctatgaccagataaggagttttaactaatgcacaggccctcagattggtccttaacaattggtctttaaatgatgcagctcagggctgtaccatgaagagcgtatctgaaggagcaaccaaattaacaggaggttgaatgcctcttgcctcccttccagaagcaaacacatgactccagagcaggtggggagatgccactccattcttacttgctgagctaggttgcctgtttttgttcacacacctcagtaagtgagcacttacctttcaggccctcttagaattccagaaacttgaggctaaa

SEQ ID NO: 159024 - DNA, 446 bp, Homo sapiens
gaactggaaattaccaaacgatttccaattttaagagatttggatcaggtggcttagaattagattaaagacaatcaattccctgaaacaatcaatgccatacataatcttccgaaggagctttttctattgctgagaggttgctcatctggtcttgtttcttatccctatagaaaccttgatgtcaattagtattccacgggaaatgaagctagatgagaaagtgaacccttgctaaataaattagaagagatgataattaaagcagagattccaaaccatatcagagaagcagctctatcttcattttaccattacttccctaaaagcaatatatggcagtttacaaattacacatggaaatgaaatatatttaattttggatttttttgtgcttttgagaatcagaattttataatatctcttgactgaaggggaattaatct

SEQ ID NO: 159025 - DNA, 481 bp, Homo sapiens
catctgctaaaaaaatctggcagacttttacccataatatacaaagaactctcacacctcaataagaaacaacacaaaatttggcacaatatttgaatagaaatttcaccaaagaagatattttgaatcatccataaccatactataatgattaaaattacaaaaactgatacaacttaaactctcatgcattgttggtggaaatggaaaatggcgcatctactctggaaaagagttttgaacttgcttataaagataaatccacacttaatcatacataaccatgcaacccagcaattccactcctaggtgtttccctaagagaaatgataacatatgtccacaaaaagccttgtccatgaatgtttatagtggcattgttcatggtcaccaaaaactcaaaacatctcaaatgttcattaacttgcaaatggataaacaaattgtgttctctatatacaatgaaatattatttagcaac

SEQ ID NO: 159026 - DNA, 133 bp, Homo sapiens
gggcttctcttggttgtatgaactcacctcatggaactgtcgtaagactcaaaagagatagtgtaaacaaaagcatcttgaaaactgtattagcctgtagatatgtggttcatgtacatccaggcactttaac

SEQ ID NO: 159027 - DNA, 543 bp, Homo sapiens
gaatgaaggtggtcaccaatgttgaagggcaggttgctccagaaatgcctgctgaaaaaaaaaaggtgtacatatacactcatttttatcaccttgtctagtcttactaaaaacgaaactaagttatagatctacagcattcttcatatttggttaacttgatgactgagccaaatgaggccgaaatgaccaatgtacaaaatacatggcaaaccctattttcacttgtagctttgcctctatcttccacagtgaaacgttattgtaaacaaaaatgagggagggcttcacctaagcacatcaagacataaagcaattaagatttccaactcactggtctcctctcaaaccctgatttaaaggtttccatgcaaaattggaactgcaaatattttgtcctatccagtcttaattttacacattgttcaggataagcatatcctagaatcaatatcccacagtctgaagaaagcactaggcctttgaataggtcctggtatttggggacaccctaaggaactggtgatgcttgaaaaacctctc

SEQ ID NO: 159028 - DNA, 434 bp, Homo sapiens
ttacaacagctcagttacaacagctccagttacaacagctccagttacaacagttccaattacaacagctcagttacaacagctccagttacaacagctccagttacaacagctccagttacagcagctgcttgaggccaggagtttgagaatagccttggcaacatagtgagactctctacaaaaaaatttttaaagaattagctgggcatggcagtgcatgcccatggtccctgttacttgggaggctgaggtgggaggatcacttgaatgcagaaggttgaggctgcagtgagccctgatcatgccattgcactccagtctgggtgacagaatgagacatgatctaaaacaacaacaacaacaaaaacattggctgacacttacttgcccatagggatgctctgattggttacagctccagctccaggtta

SEQ ID NO: 159029 - DNA, 509 bp, Homo sapiens
  misc_feature (75)..(75): n is a, c, g, or t
aaatagccaaaacaaccgtaagtacaaaagaaagcggaagcatcacactacctgatttcaaactatattacaagngctacagtaaccaaaacagcatggtactggtacaaaaatagacacatagaccaatggaagaggttagaaaacccagatataaagccacacccctacaaccatctgatcttcaatgaagtcgacaataacaagcaatggggaatggattctctattcaataaatgctataactggctagccatatgcagaagattgaaaatggacccctacctttcaccatatacaaaaatcaactaatattggtaaggtagaatagggcttttgtgaagaatcctgaatacatacagtagatatggtgcttaattctataggtcgtggtgggtcagtggggattttagagcaggtgagctgcattttaagattgattaggcagcgttttataggatgatggattggggaggggagaaactggaggtaagaagaccagttaggat

SEQ ID NO: 159030 - DNA, 290 bp, Homo sapiens
ggagtttgagaccagcttagcaatatggtgagagcttgtctctatgaaaaaaatttaaaaaattagccaggcttggtggtgtatacctgtattcccaggtacttgggaggctaaggtgagaggattgcttgagcctgggaggcaggaggcagaggttgctgtgagccaagatcgtgccagtgcactccaccctgggtgacagagcaagactccatcaggaaagaaagaaagagagagagagagaaggaaggaagggagagagagagaaagggagaaagtggaagagaaga

SEQ ID NO: 159031 - DNA, 442 bp, Homo sapiens
actaccatgtaaatgtattgagtaaataaaacataaatatacctaatgaaaacttgtgtttttctgacaaagctcatatttatttaacctaacttactgaccagtcaacctatgtaccatttaattatcaggatgtatcaattaaaccagtttgctatatttactaatacatacatatgatccacctcagagtccagagggctattccaccaaggaatccccacccacctcaatcacttcagtgaaattccctagacatcttgctctctaaatttaaatttgaaataccttataaaagctggatatcagtaagttggtattctatgaaggatagattttaaaagtataatgttaccatcatgtacttcgaagaacttataacgagaaaggacaatgcgcataaatgcatgtccctaagacagtgaatcatctccgatggact

SEQ ID NO: 159032 - DNA, 546 bp, Homo sapiens
cacttggaaccaagtacagacattgtattgctcctcaccctttaacattcagttcatggccttcctctaaaaaactatggctgttcaacaccagaccttcagagaaaaagcaattccaatcgcatcttcctgaaccctgcttcgcaaagtcactttttggctcatacatcttttgtgactgctattgctggcagaataaagttcaaacatttcagcctgttatgaatgaacaagctgggctgtttaatatcagacacttcagagcaaaagataagaaagagagtgagttctagaaatactgtctctctgccagggccaaacctaggaagagtccccaaggaaggttccagaggacaaacaggagatgaaaaatctggctttgatgaatatgaaggaggacggtaataaatgaagaaatgaatgaaaaagaatgaatgaatgcttgtgctcctagtgaattatttatcatcagacaagcttgaatagccctacatgctgatttcatttctttcaggtgttttatctttttaaagaaattgtgtatgt

SEQ ID NO: 159033 - DNA, 591 bp, Homo sapiens
agataaaagttctggcatgctgggattgataccttgtgttattggttcattagtttttttggattataaacaagataatctaacacctttctgtgtttggggaagtctttatcttaggagtctttgtgagagggagagcgatctccaccattaagaaagctaattgttcactttccccaccgcttttgcagttaggatgcaatcctgtggcctccatgactggcagtgcttgcctacctcagaggccagtgatctgcagaggcaggcggtatgtagaatctgtattctctagtcaaggagggatggggatgggatagcagcttatcttttccataggcagcagtgactgagattccagttgcaacacttagtgcctggtgttggtatcagtataagttgcagtgactgagtctcatttggtcttcactggaccatatctgtggtttgaattttggatgttcttaactatgtagctttccagcctggtccccatggggttttctgtgagttgcactgtttacttgcttagcattctgaacctgacgttttagagagatcactccatgtccagtgcctcaggatggtgtgcct

SEQ ID NO: 159034 - DNA, 559 bp, Homo sapiens
agataaaagttctggcatgctgggattgataccttgtgttattggttcattagtttttttggattataaacaagataatctaacacctttctgtgtttggggaagtctttatcttaggagtctttgtgagagggagagcgatctccaccattaagaaagctaattgttcactttccccaccgcttttgcagttaggatgcaatcctgtggcctccatgactggcagtgcttgcctacctcagaggccagtgatctgcagaggcaggcggtatgtagaatctgtattctctagtcaaggagggatggggatgggatagcagcttatcttttccataggcagcagtgactgagattccagttgcaacacttagtgcctggtgttggtatcagtataagttgcagtgactgagtctcatttggtcttcactggaccatatctgtggtttgaattttggatgttcttaactatgtagctttccagcctggtccccatggggttttctgtgagttgcctaatacactttaataacttcctttcagcttaaacaaagccagagcc

SEQ ID NO: 159035 - DNA, 526 bp, Homo sapiens
ctatgttgcccaggatggtcttgaactcctggcctcaagtgatccttcataccttgggctcccaaagtgctaggattacaggcgtgagccactgcgctggcccaaaccctagtatttctgcttctgatacaccagagtccttctctaaaccactaagactattggttttcacattttccctgttgcttttcgcaaatggaagctcctatcagagtcttcctcactccaaagaagtgcccccgtgatgagtcagcctggcatcatcaaccacaccccaacaccaaacccttgagccatcgatgaggcagtggggctcaccaaactcctgaaacagcaaatccccacagtcttcctgggtccttggccaacctgccttggtgagtgggaaggacacaggtgattctctccactttacagatctgactactcaaccaaagcacagaggggaagcacaaaggccaggagtctaggagaggtcccgtggtcccagatgggggaggaaaaggcagtctgatttggattcttc

SEQ ID NO: 159036 - DNA, 535 bp, Homo sapiens
tgttcaactttttttttatttggccatcaaaaatagtgtcattaatattttcaaaattataaataataatttgaaattatcattatttggatatataattctaggtggagaattattttctgccagcattccttctaagaaattatccagctctgtgtttgttggaaattttgtttcaccttgttgctgtttcttagtaagcaatctaaatgagtattagatttaaaaattatatcttcatatctaatgctggatagtttcatcataatgtatctaagattcatttaacaaatgtctgctaagtatatgcttggtgagagacacaattttagaatacaaaggtacagtagttttgaaaactgtgctgcctgaggtgaggacggacatcttccgccaattctggaaaaacttcagctggtggccggacacggtggctcatgcctgtaatctcagcactttgggaggcctaggcgggaggatcacaaggtcaggagatcgagaccatcctggctaacacggtgaaaccccatctcta

SEQ ID NO: 159037 - DNA, 423 bp, Homo sapiens
aagtgtgttcattgagcattttgctgttttacatgacctcgccataaaggagtgtctctacgagaaaggaaaaacctgtttcataacgcagtgcagagctttgttttctctcgtcagggtgacagccctttggttcctgccagtgggtatgcgacaggaaggtggggaaactggatcatgaaaattccacggctggcaattgctcattctttagccttctagccagaggatagtgtctggttcccagggtggctcagtacagtatttaattcagagagcccaaacctatgccattagcattttattctttaaaaaaaaaaaaagaggatgacccttggtaatttataagcagcttcagcatagtctggcacgagggggtgattgaggaagcgttttgttttttgaaacttggattcagtgaac

SEQ ID NO: 159038 - DNA, 426 bp, Homo sapiens
cacgtgtctgtaacaccagctactcgggaggctgaggcaggagaatcgcatgaacctgggaggcggagggtgcagtgagctgagatcgcgccactgcactccagcctgggtgacagagcaagaccctgtctcaaaaaaattagataaccacgtaaaccacataaagcactttgacagtgcctggcacatagcaaatgttcagtagcagtaagtgactgtaactattggtagccatgttaaagagggtggctttgtcctcatctttaagcctccacactcagtaaagaaattgatacatagtaggtgctcagtcaatctttgtttaattgaatgaatcatgatacgtgtcataggagcagtaccaacacagcattctgatggccagcatttatgaagttaatttctggttgtggaaattaaaaaaaa

SEQ ID NO: 159039 - DNA, 406 bp, Homo sapiens
agctttgttccactctgtgcagtaatggtccctttattttgctttggagtactcttcccaccccctactccaagtgtaggcacataatttagacctgattcatcagagcactgtgctcccttgaccacagtgaccaggtcagagatgacaagaacacgtaacagcaatttcctgtgcttctggagccaccaggaggaaggcatgacctttcccatgggactttcacctgctggccaacatcttgctacatctagctactaccatttaaaacccaaaaatgaagccaacatgagggggagccaagagatggagggagaccaaagcttggtgacatttgagcccctggattaaaccaggcctgaagctagaattaccttagtcttctaagttacatgagccaatggat

SEQ ID NO: 159040 - DNA, 457 bp, Homo sapiens
cctcagcctcctgagtagctggctggctaatttttaaattttttatagagacagagtctcactgtgttgcccaggctagtcttgaactcctggcctcaaacgatcctcccacctcaacctcccaaagtgctgggattaaggcatgagccaccacgcctggccacatttttagtattcttgatacatattgccaatctgctttctggaaaggttataaaggtatttcttgttatatcagttaggattaggtttgattataagataacagtgccctataagataggaatgtattttttctctcatgtaaaatcatctaggagtaggcagtcaaaagttggtatagtgagtctgcaaagtcagggatccaggctccttctgtcttactgttttgccatccttatcttaccacatcatggcccgaggcatttgccattatggcttccctccagtcaataga

SEQ ID NO: 159041 - DNA, 4078 bp, Homo sapiens
  misc_feature (2774)..(2774): n is a, c, g, or t
  misc_feature (3622)..(3622): n is a, c, g, or t
  misc_feature (3773)..(3773): n is a, c, g, or t
taaagggctaaagctattggcattggcagctgtctccaggcgtcgtccgcggagcctgaccctgcgccaggacggaggaggctgtgcccatgtaactgtcctgaagtactgcggtggccccctcccccgcggctgggagggcaggcaggacgaggttggctttcctcgcacggtctctgggcgtgggcccccgccgcagctccgcggagcctcggtgtctcctgcaacagggggcggggggaacagcggcgagcagccctgggctgcggcttcctccccacgcccgagtctcctgcgcaccgccgccgaggacgcgcgcccgagcctagtccccacgccgcggcgcgcccgggctccctgctgatcccagaacaatcaaccatgacgaccgaatctggatcagactcggaatccaagccggaccaggaggccgagccccaggaggcggcgggggcgcaggggcgcgcgggggcgcccgtgccggagccgcccaaggaggagcagcagcaggccctggagcagttcgccgccgctgcagcgcacagcaccccggtgcggagggaggtcactgacaaggaacaggagtttgctgccagggctgcaaaacagctcgaatatcagcaattagaagacgataaactttctcagaaatcatctagcagtaaactctctcggtctccattaaagattgtcaaaaagcctaaaagcatgcagtgcaaagtgatacttctcgatggatcagaatatacctgtgatgtagagaaacgctccagaggacaagtgctgtttgataaagtgtgtgaacacttgaacttgctagagaaagactactttgggcttacgtatcgagatgctgaaaaccagaagaattggttggaccctgctaaggaaataaaaaaacaggttcgaagtggtgcttggcacttttcatttaatgtgaaattttatccaccagaccctgcccaactatctgaagatatcaccaggtactacctctgcttgcagttgcgagatgacatcgtgtccggaaggctgccctgctcctttgttaccctggccttgctgggctcctacactgtccagtcagagctcggagactatgacccagatgaatgtgggagcgattacattagtgagttccgctttgcaccaaaccacactaaagaactggaagacaaagtgatcgagctgcacaagagccacagaggaatgacgccagcagaagcagagatgcatttcttggaaaatgccaaaaaattatcaatgtatggggtagatttacatcatgctaaggactcagaaggggtagaaattatgttaggagtttgtgcaagtggtctgttgatatatcgcgaccggctgcgaataaacagatttgcctggcccaaggttctaaagatttcatacaaacggaacaacttttacattaagatccggccgggagagtttgaacaatttgaaagcaccattgggtttaagctgccaaaccatcgagctgccaagcgtttatggaaagtatgtgttgagcatcatacatttttcagactactgttaccagaagcacctcccaagaaattcctaaccttgggttccaagtttcgttatagtggcaggacacaagcgcaaacgagaagagccagtgcgttgatagatcgcccagcaccttactttgaacgctcatccagcaaacgttataccatgtctcgcagcttggatggagcatcagtgaatgaaaaccatgaaatatacatgaaggattctatgtctgctgcagaggttggtactggccagtacgccacaacaaaaggcatctctcagaccaacttgatcaccactgtgactccggagaagaaggctgaggaggagcgggacgaggaagaggacaaacggaggaagggggaagaagtcacgcccatctcggccatccggcacgagggaaagactgacagtgagcgcacggacaccgcagccgacggggagaccaccgccactgaggagctagaaaaaactcaagatgacctgatgaaacatcaaaccaacattagcgagctgaaaagaaccttcttagaaacctcaacagacactgccgtaacgaatgaatgggagaagaggctttccacctcccccgtgcgactggccgccaggcaggaggatgcccccatgatcgaaccacttgtccctgaagagaaaatggaaaccaagacggagtccagtggaatagagacggaacccaccgtgcaccacctgccgcttagcactgagaaggtggtgcaggagaccgtgttggtggaggagcggcgtgtggtgcacgcgagtggggatgcttcttactcggcgggagacagcggggatgctgcagcacagcccgcattcacaggcattaaagggaaagagggctctgccttgacggagggggctaaagaggaaggaggggaggaggtcgctaaagctgtcctggaacaggaagagacagccgctgcttcccgtgagcgacaagaggagcagagtgcagccatccacatttcagaaactttggaacaaaaacctcattttgagtcctcaacggtgaagacggaaaccatcagttttggcagtgtttcaccgggaggagtaaagctagaaatttccacgaagaagtgccagtagttcacaccgaaaccaaaaccatcacatatgaatcatcacaggtcgatccaggcacagatctggagccaggcgtgctgatgagtgcacagacgatcacatctgaaaccaccagtaccaccaccactacncacatcaccaaaactgtgaaagggggcatttcagagacaagaattgagaagcgaatagtcatcacgggggatgcagacattgaccatgaccaggcgctggctcaggcaattaaagaggccaaagagcagcaccctgacatgtcagtgaccaaagtagtggtccataaagagacagagatcacaccagaagatggagaggattgaccagaggaataacttagcttgcacatgaatgcagtcatgcaaaccgttaggaaaaccagagcctatatggagttccctcttctaacccaactgacttgtatctgtccgtggaaaatttcagtccagaagaattgaccttgaccattaataaagacactggcagagagatcttcccataataaagcaatctgattcagcatcactaaaccgataatgcatgaagcaacgataaaattacaaaagagcagcatttttaattttcacaaaatgtctcagttttcagctatacctgcacgttcataaccaacaatataaaccgtggtctcatgtaacacataaacaattcatgcctttcatagtttattattattaaagtctaaacaaaattgcaatttcttaggtaaccttatatttacaataaatgaagattaccctcaaatgctagaagctgtctaggtccgtccggtgtgtcagattttcctcagattagatgtgccaataaccaagtttattcagtaaacaacttgtacttgtttcatctggttttattactctcacccataaacagtaatgactctctgaccctctggaaatatgtaatgcttccaatcttgctttgtgtatctcatttaatttgttccggntaaggtagtactgattttagcatattaatgcgatttcttccttgttgtttgctttggtctgtgttcaatccagagagcttaaattgtcattattttgggaagaaaacctgtatttttgttagtttacaatattatgaaatttcacttcagnagaaactgctgggcttcctgtggctttgttttcttagttactttttccgtgccgtgtattttttaattgatttttcttcttttacttgaaaagaaagtgttttattttcaaatctggtccatatttacattctagttcagagccaagccttaaactgtacagaatttccactgtaattaaaactatttagtgttagttataaatagccttcaaaaagagagattctccattacacgatcacctgcatcacagcccatggtgaatgtatgtttctgcatagcgaaataaaaatggcaaatgcactg

SEQ ID NO: 159042 - DNA, 3368 bp, Homo sapiens
  misc_feature (2774)..(2774): n is a, c, g, or t
taaagggctaaagctattggcattggcagctgtctccaggcgtcgtccgcggagcctgaccctgcgccaggacggaggaggctgtgcccatgtaactgtcctgaagtactgcggtggccccctcccccgcggctgggagggcaggcaggacgaggttggctttcctcgcacggtctctgggcgtgggcccccgccgcagctccgcggagcctcggtgtctcctgcaacagggggcggggggaacagcggcgagcagccctgggctgcggcttcctccccacgcccgagtctcctgcgcaccgccgccgaggacgcgcgcccgagcctagtccccacgccgcggcgcgcccgggctccctgctgatcccagaacaatcaaccatgacgaccgaatctggatcagactcggaatccaagccggaccaggaggccgagccccaggaggcggcgggggcgcaggggcgcgcgggggcgcccgtgccggagccgcccaaggaggagcagcagcaggccctggagcagttcgccgccgctgcagcgcacagcaccccggtgcggagggaggtcactgacaaggaacaggagtttgctgccagggctgcaaaacagctcgaatatcagcaattagaagacgataaactttctcagaaatcatctagcagtaaactctctcggtctccattaaagattgtcaaaaagcctaaaagcatgcagtgcaaagtgatacttctcgatggatcagaatatacctgtgatgtagagaaacgctccagaggacaagtgctgtttgataaagtgtgtgaacacttgaacttgctagagaaagactactttgggcttacgtatcgagatgctgaaaaccagaagaattggttggaccctgctaaggaaataaaaaaacaggttcgaagtggtgcttggcacttttcatttaatgtgaaattttatccaccagaccctgcccaactatctgaagatatcaccaggtactacctctgcttgcagttgcgagatgacatcgtgtccggaaggctgccctgctcctttgttaccctggccttgctgggctcctacactgtccagtcagagctcggagactatgacccagatgaatgtgggagcgattacattagtgagttccgctttgcaccaaaccacactaaagaactggaagacaaagtgatcgagctgcacaagagccacagaggaatgacgccagcagaagcagagatgcatttcttggaaaatgccaaaaaattatcaatgtatggggtagatttacatcatgctaaggactcagaaggggtagaaattatgttaggagtttgtgcaagtggtctgttgatatatcgcgaccggctgcgaataaacagatttgcctggcccaaggttctaaagatttcatacaaacggaacaacttttacattaagatccggccgggagagtttgaacaatttgaaagcaccattgggtttaagctgccaaaccatcgagctgccaagcgtttatggaaagtatgtgttgagcatcatacatttttcagactactgttaccagaagcacctcccaagaaattcctaaccttgggttccaagtttcgttatagtggcaggacacaagcgcaaacgagaagagccagtgcgttgatagatcgcccagcaccttactttgaacgctcatccagcaaacgttataccatgtctcgcagcttggatggagcatcagtgaatgaaaaccatgaaatatacatgaaggattctatgtctgctgcagaggttggtactggccagtacgccacaacaaaaggcatctctcagaccaacttgatcaccactgtgactccggagaagaaggctgaggaggagcgggacgaggaagaggacaaacggaggaagggggaagaagtcacgcccatctcggccatccggcacgagggaaagactgacagtgagcgcacggacaccgcagccgacggggagaccaccgccactgaggagctagaaaaaactcaagatgacctgatgaaacatcaaaccaacattagcgagctgaaaagaaccttcttagaaacctcaacagacactgccgtaacgaatgaatgggagaagaggctttccacctcccccgtgcgactggccgccaggcaggaggatgcccccatgatcgaaccacttgtccctgaagagaaaatggaaaccaagacggagtccagtggaatagagacggaacccaccgtgcaccacctgccgcttagcactgagaaggtggtgcaggagaccgtgttggtggaggagcggcgtgtggtgcacgcgagtggggatgcttcttactcggcgggagacagcggggatgctgcagcacagcccgcattcacaggcattaaagggaaagagggctctgccttgacggagggggctaaagaggaaggaggggaggaggtcgctaaagctgtcctggaacaggaagagacagccgctgcttcccgtgagcgacaagaggagcagagtgcagccatccacatttcagaaactttggaacaaaaacctcattttgagtcctcaacggtgaagacggaaaccatcagttttggcagtgtttcaccgggaggagtaaagctagaaatttccacgaagaagtgccagtagttcacaccgaaaccaaaaccatcacatatgaatcatcacaggtcgatccaggcacagatctggagccaggcgtgctgatgagtgcacagacgatcacatctgaaaccaccagtaccaccaccactacncacatcaccaaaactgtgaaagggggcatttcagagacaagaattgagaagcgaatagtcatcacgggggatgcagacattgaccatgaccaggcgctggctcaggcaattaaagaggccaaagagcagcaccctgacatgtcagtgaccaaagtagtggtccataaagagacagagatcacaccagaagatggagaggattgaccagaggaataacttagcttgcacatgaatgcagtcatgcaaaccgttaggaaaaccagagcctatatggagttccctcttctaacccaactgacttgtatctgtccgtggaaaatttcagtccagaagaattgaccttgaccattaataaagacactggcagagagatcttcccataataaagcaatctgattcagcatcactaaaccgataatgcatgaagcaacgataaaattacaaaagagcagcatttttaattttcacaaaatgtctcagttttcagctatacctgcacgttcataaccaacaatataaaccgtggtctcatgtaacacataaacaattcatgcctttcatagtttattattattaaagtctaaacaaaattgc

SEQ ID NO: 159043 - DNA, 3994 bp, Homo sapiens
  misc_feature (2690)..(2690): n is a, c, g, or t
  misc_feature (3538)..(3538): n is a, c, g, or t
  misc_feature (3689)..(3689): n is a, c, g, or t
agaccatctgaagcatcttgctggctttaaaactttgcctgatcaatcaatgagactcctttctcaagttgaactgcattgcgagtaatatcagcataaaaaatgaagaaccacagaatggctgcagatgttccttgtcttttccatgactgacatttttcataacaatcaaccatgacgaccgaatctggatcagactcggaatccaagccggaccaggaggccgagccccaggaggcggcgggggcgcaggggcgcgcgggggcgcccgtgccggagccgcccaaggaggagcagcagcaggccctggagcagttcgccgccgctgcagcgcacagcaccccggtgcggagggaggtcactgacaaggaacaggagtttgctgccagggctgcaaaacagctcgaatatcagcaattagaagacgataaactttctcagaaatcatctagcagtaaactctctcggtctccattaaagattgtcaaaaagcctaaaagcatgcagtgcaaagtgatacttctcgatggatcagaatatacctgtgatgtagagaaacgctccagaggacaagtgctgtttgataaagtgtgtgaacacttgaacttgctagagaaagactactttgggcttacgtatcgagatgctgaaaaccagaagaattggttggaccctgctaaggaaataaaaaaacaggttcgaagtggtgcttggcacttttcatttaatgtgaaattttatccaccagaccctgcccaactatctgaagatatcaccaggtactacctctgcttgcagttgcgagatgacatcgtgtccggaaggctgccctgctcctttgttaccctggccttgctgggctcctacactgtccagtcagagctcggagactatgacccagatgaatgtgggagcgattacattagtgagttccgctttgcaccaaaccacactaaagaactggaagacaaagtgatcgagctgcacaagagccacagaggaatgacgccagcagaagcagagatgcatttcttggaaaatgccaaaaaattatcaatgtatggggtagatttacatcatgctaaggactcagaaggggtagaaattatgttaggagtttgtgcaagtggtctgttgatatatcgcgaccggctgcgaataaacagatttgcctggcccaaggttctaaagatttcatacaaacggaacaacttttacattaagatccggccgggagagtttgaacaatttgaaagcaccattgggtttaagctgccaaaccatcgagctgccaagcgtttatggaaagtatgtgttgagcatcatacatttttcagactactgttaccagaagcacctcccaagaaattcctaaccttgggttccaagtttcgttatagtggcaggacacaagcgcaaacgagaagagccagtgcgttgatagatcgcccagcaccttactttgaacgctcatccagcaaacgttataccatgtctcgcagcttggatggagcatcagtgaatgaaaaccatgaaatatacatgaaggattctatgtctgctgcagaggttggtactggccagtacgccacaacaaaaggcatctctcagaccaacttgatcaccactgtgactccggagaagaaggctgaggaggagcgggacgaggaagaggacaaacggaggaagggggaagaagtcacgcccatctcggccatccggcacgagggaaagactgacagtgagcgcacggacaccgcagccgacggggagaccaccgccactgaggagctagaaaaaactcaagatgacctgatgaaacatcaaaccaacattagcgagctgaaaagaaccttcttagaaacctcaacagacactgccgtaacgaatgaatgggagaagaggctttccacctcccccgtgcgactggccgccaggcaggaggatgcccccatgatcgaaccacttgtccctgaagagactaagcagtcttctggggaaaagctcatggatggctctgaaatcttcagtttattagagtctgcgcgaaaaccaacagaattcataggaggggttacttctacttctcaaagctgggttcagaaaatggaaaccaagacggagtccagtggaatagagacggaacccaccgtgcaccacctgccgcttagcactgagaaggtggtgcaggagaccgtgttggtggaggagcggcgtgtggtgcacgcgagtggggatgcttcttactcggcgggagacagcggggatgctgcagcacagcccgcattcacaggcattaaagggaaagagggctctgccttgacggagggggctaaagaggaaggaggggaggaggtcgctaaagctgtcctggaacaggaagagacagccgctgcttcccgtgagcgacaagaggagcagagtgcagccatccacatttcagaaactttggaacaaaaacctcattttgagtcctcaacggtgaagacggaaaccatcagttttggcagtgtttcaccgggaggagtaaagctagaaatttccacgaagaagtgccagtagttcacaccgaaaccaaaaccatcacatatgaatcatcacaggtcgatccaggcacagatctggagccaggcgtgctgatgagtgcacagacgatcacatctgaaaccaccagtaccaccaccactacncacatcaccaaaactgtgaaagggggcatttcagagacaagaattgagaagcgaatagtcatcacgggggatgcagacattgaccatgaccaggcgctggctcaggcaattaaagaggccaaagagcagcaccctgacatgtcagtgaccaaagtagtggtccataaagagacagagatcacaccagaagatggagaggattgaccagaggaataacttagcttgcacatgaatgcagtcatgcaaaccgttaggaaaaccagagcctatatggagttccctcttctaacccaactgacttgtatctgtccgtggaaaatttcagtccagaagaattgaccttgaccattaataaagacactggcagagagatcttcccataataaagcaatctgattcagcatcactaaaccgataatgcatgaagcaacgataaaattacaaaagagcagcatttttaattttcacaaaatgtctcagttttcagctatacctgcacgttcataaccaacaatataaaccgtggtctcatgtaacacataaacaattcatgcctttcatagtttattattattaaagtctaaacaaaattgcaatttcttaggtaaccttatatttacaataaatgaagattaccctcaaatgctagaagctgtctaggtccgtccggtgtgtcagattttcctcagattagatgtgccaataaccaagtttattcagtaaacaacttgtacttgtttcatctggttttattactctcacccataaacagtaatgactctctgaccctctggaaatatgtaatgcttccaatcttgctttgtgtatctcatttaatttgttccggntaaggtagtactgattttagcatattaatgcgatttcttccttgttgtttgctttggtctgtgttcaatccagagagcttaaattgtcattattttgggaagaaaacctgtatttttgttagtttacaatattatgaaatttcacttcagnagaaactgctgggcttcctgtggctttgttttcttagttactttttccgtgccgtgtattttttaattgatttttcttcttttacttgaaaagaaagtgttttattttcaaatctggtccatatttacattctagttcagagccaagccttaaactgtacagaatttccactgtaattaaaactatttagtgttagttataaatagccttcaaaaagagagattctccattacacgatcacctgcatcacagcccatggtgaatgtatgtttctgcatagcgaaataaaaatggcaaatgcactg

SEQ ID NO: 159044 - DNA, 1260 bp, Homo sapiens
agaccatctgaagcatcttgctggctttaaaactttgcctgatcaatcaatgagactcctttctcaagttgaactgcattgcgagtaatatcagcataaaaaatgaagaaccacagaatggctgcagatgttccttgtcttttccatgactgacatttttcataacaatcaaccatgacgaccgaatctggatcagactcggaatccaagccggaccaggaggccgagccccaggaggcggcgggggcgcaggggcgcgcgggggcgcccgtgccggagccgcccaaggaggagcagcagcaggccctggagcagttcgccgccgctgcagcgcacagcaccccggtgcggagggaggtcactgacaaggaacaggagtttgctgccagggctgcaaaacagctcgaatatcagcaattagaagacgataaactttctcagaaatcatctagcagtaaactctctcggtctccattaaagattgtcaaaaagcctaaaagcatgcagtgcaaagtgatacttctcgatggatcagaatatacctgtgatgtagagaaacgctccagaggacaagtgctgtttgataaagtgtgtgaacacttgaacttgctagagaaagactactttgggcttacgtatcgagatgctgaaaaccagaagaattggttggaccctgctaaggaaataaaaaaacaggttcgaagtggtgcttggcacttttcatttaatgtgaaattttatccaccagaccctgcccaactatctgaagatatcaccaggtactacctctgcttgcagttgcgagatgacatcgtgtccggaaggctgccctgctcctttgttaccctggccttgctgggctcctacactgtccagtcagagctcggagactatgacccagatgaatgtgggagcgattacattagtgagttccgctttgcaccaaaccacactaaagaactggaagacaaagtgatcgagctgcacaagagccacagaggaatgacgccagcagaagcagagatgcatttcttggaaaatgccaaaaaattatcaatgtatggggtagatttacatcatgctaagccaaactccatcatttgaagaagcaaatttactgaaacaaattggaactaatctccggttatgagcgagatgcctcgcttctgttgacggtgtgaaagaccctgagctttacaatccatttaaaaattctgatctggaatcctgtatgaagaataaatacccatattacacaaa

SEQ ID NO: 159045 - DNA, 1116 bp, Homo sapiens
agaccatctgaagcatcttgctggctttaaaactttgcctgatcaatcaatgagactcctttctcaagttgaactgcattgcgagtaatatcagcataaaaaatgaagaaccacagaatggctgcagatgttccttgtcttttccatgactgacatttttcataacaatcaaccatgacgaccgaatctggatcagactcggaatccaagccggaccaggaggccgagccccaggaggcggcgggggcgcaggggcgcgcgggggcgcccgtgccggagccgcccaaggaggagcagcagcaggccctggagcagttcgccgccgctgcagcgcacagcaccccggtgcggagggaggtcactgacaaggaacaggagtttgctgccagggctgcaaaacagctcgaatatcagcaattagaagacgataaactttctcagaaatcatctagcagtaaactctctcggtctccattaaagattgtcaaaaagcctaaaagcatgcagtgcaaagtgatacttctcgatggatcagaatatacctgtgatgtagagaaacgctccagaggacaagtgctgtttgataaagtgtgtgaacacttgaacttgctagagaaagactactttgggcttacgtatcgagatgctgaaaaccagaagaattggttggaccctgctaaggaaataaaaaaacaggttcgaagtggtgcttggcacttttcatttaatgtgaaattttatccaccagaccctgcccaactatctgaagatatcaccaggtactacctctgcttgcagttgcgagatgacatcgtgtccggaaggctgccctgctcctttgttaccctggccttgctgggctcctacactgtccagtcagagctcggagactatgacccagatgaatgtgggagcgattacattagtgagttccgctttgcaccattcgaaattgtttgaggggtttgggtttatttttgttggttttttctctcttttttttgcttacatgggcatccttcagcttttaataatctgaaaaactctatttacccattgtcaatgtgtataaattaatctgagtcaattttatacaataaaaggtgaacttttaaa

SEQ ID NO: 159046 - DNA, 2443 bp, Homo sapiens
  misc_feature (1139)..(1139): n is a, c, g, or t
  misc_feature (1987)..(1987): n is a, c, g, or t
  misc_feature (2138)..(2138): n is a, c, g, or t
agtggggatgacttctcagcttctgatttgttattcgctcctagatatagatcccttttcctgtgtgtatatttattttaattctctcaggatacatgtgaattgtactctttatagtttgccttctaaaattcttttggtatccatgtttgtgtgaactagatttttttttctgtttcctttccatgggaaaatcacattttcaccagagtgtttgtggtagtgccatgagccttgatcaaaattttgttttattttgactactaataagattgacattacttttaaagcaaacaaaagagctgaaaggaacacaaatgtaaaacattgactgttggatactttatgttctgaatataggagctagaaaaaactcaagatgacctgatgaaacatcaaaccaacattagcgagctgaaaagaaccttcttagaaacctcaacagacactgccgtaacgaatgaatgggagaagaggctttccacctcccccgtgcgactggccgccaggcaggaggatgcccccatgatcgaaccacttgtccctgaagagaaaatggaaaccaagacggagtccagtggaatagagacggaacccaccgtgcaccacctgccgcttagcactgagaaggtggtgcaggagaccgtgttggtggaggagcggcgtgtggtgcacgcgagtggggatgcttcttactcggcgggagacagcggggatgctgcagcacagcccgcattcacaggcattaaagggaaagagggctctgccttgacggagggggctaaagaggaaggaggggaggaggtcgctaaagctgtcctggaacaggaagagacagccgctgcttcccgtgagcgacaagaggagcagagtgcagccatccacatttcagaaactttggaacaaaaacctcattttgagtcctcaacggtgaagacggaaaccatcagttttggcagtgtttcaccgggaggagtaaagctagaaatttccacgaagaagtgccagtagttcacaccgaaaccaaaaccatcacatatgaatcatcacaggtcgatccaggcacagatctggagccaggcgtgctgatgagtgcacagacgatcacatctgaaaccaccagtaccaccaccactacncacatcaccaaaactgtgaaagggggcatttcagagacaagaattgagaagcgaatagtcatcacgggggatgcagacattgaccatgaccaggcgctggctcaggcaattaaagaggccaaagagcagcaccctgacatgtcagtgaccaaagtagtggtccataaagagacagagatcacaccagaagatggagaggattgaccagaggaataacttagcttgcacatgaatgcagtcatgcaaaccgttaggaaaaccagagcctatatggagttccctcttctaacccaactgacttgtatctgtccgtggaaaatttcagtccagaagaattgaccttgaccattaataaagacactggcagagagatcttcccataataaagcaatctgattcagcatcactaaaccgataatgcatgaagcaacgataaaattacaaaagagcagcatttttaattttcacaaaatgtctcagttttcagctatacctgcacgttcataaccaacaatataaaccgtggtctcatgtaacacataaacaattcatgcctttcatagtttattattattaaagtctaaacaaaattgcaatttcttaggtaaccttatatttacaataaatgaagattaccctcaaatgctagaagctgtctaggtccgtccggtgtgtcagattttcctcagattagatgtgccaataaccaagtttattcagtaaacaacttgtacttgtttcatctggttttattactctcacccataaacagtaatgactctctgaccctctggaaatatgtaatgcttccaatcttgctttgtgtatctcatttaatttgttccggntaaggtagtactgattttagcatattaatgcgatttcttccttgttgtttgctttggtctgtgttcaatccagagagcttaaattgtcattattttgggaagaaaacctgtatttttgttagtttacaatattatgaaatttcacttcagnagaaactgctgggcttcctgtggctttgttttcttagttactttttccgtgccgtgtattttttaattgatttttcttcttttacttgaaaagaaagtgttttattttcaaatctggtccatatttacattctagttcagagccaagccttaaactgtacagaatttccactgtaattaaaactatttagtgttagttataaatagccttcaaaaagagagattctccattacacgatcacctgcatcacagcccatggtgaatgtatgtttctgcatagcgaaataaaaatggcaaatgcactg

SEQ ID NO: 159047 - DNA, 4744 bp, Homo sapiens
  misc_feature (3440)..(3440): n is a, c, g, or t
  misc_feature (4288)..(4288): n is a, c, g, or t
  misc_feature (4439)..(4439): n is a, c, g, or t
taaagggctaaagctattggcattggcagctgtctccaggcgtcgtccgcggagcctgaccctgcgccaggacggaggaggctgtgcccatgtaactgtcctgaagtactgcggtggccccctcccccgcggctgggagggcaggcaggacgaggttggctttcctcgcacggtctctgggcgtgggcccccgccgcagctccgcggagcctcggtgtctcctgcaacagggggcggggggaacagcggcgagcagccctgggctgcggcttcctccccacgcccgagtctcctgcgcaccgccgccgaggacgcgcgcccgagcctagtccccacgccgcggcgcgcccgggctccctgctgatcccagaacaatcaaccatgacgaccgaatctggatcagactcggaatccaagccggaccaggaggccgagccccaggaggcggcgggggcgcaggggcgcgcgggggcgcccgtgccggagccgcccaaggaggagcagcagcaggccctggagcagttcgccgccgctgcagcgcacagcaccccggtgcggagggaggtcactgacaaggaacaggagtttgctgccagggctgcaaaacagctcgaatatcagcaattagaagacgataaactttctcagaaatcatctagcagtaaactctctcggtctccattaaagattgtcaaaaagcctaaaagcatgcagtgcaaagtgatacttctcgatggatcagaatatacctgtgatgtagagaaacgctccagaggacaagtgctgtttgataaagtgtgtgaacacttgaacttgctagagaaagactactttgggcttacgtatcgagatgctgaaaaccagaagaattggttggaccctgctaaggaaataaaaaaacaggttcgaagtggtgcttggcacttttcatttaatgtgaaattttatccaccagaccctgcccaactatctgaagatatcaccaggtactacctctgcttgcagttgcgagatgacatcgtgtccggaaggctgccctgctcctttgttaccctggccttgctgggctcctacactgtccagtcagagctcggagactatgacccagatgaatgtgggagcgattacattagtgagttccgctttgcaccaaaccacactaaagaactggaagacaaagtgatcgagctgcacaagagccacagaggaatgacgccagcagaagcagagatgcatttcttggaaaatgccaaaaaattatcaatgtatggggtagatttacatcatgctaaggactcagaaggggtagaaattatgttaggagtttgtgcaagtggtctgttgatatatcgcgaccggctgcgaataaacagatttgcctggcccaaggttctaaagatttcatacaaacggaacaacttttacattaagatccggccgggagagtttgaacaatttgaaagcaccattgggtttaagctgccaaaccatcgagctgccaagcgtttatggaaagtatgtgttgagcatcatacatttttcagactactgttaccagaagcacctcccaagaaattcctaaccttgggttccaagtttcgttatagtggcaggacacaagcgcaaacgagaagagccagtgcgttgatagatcgcccagcaccttactttgaacgctcatccagcaaacgttataccatgtctcgcagcttggatggagaggttggtactggccagtacgccacaacaaaaggcatctctcagaccaacttgatcaccactgtgactccggagaagaaggctgaggaggagcgggacgaggaagaggacaaacggaggaagggggaagaagtcacgcccatctcggccatccggcacgagggaaagtcacctgggcttggcactgactcatgtcccttgtcacccccatccacccattgtgcccccacatctcccacagagctccgtaggaggtgtaaggagaatgactgcaaactgccaggttatgagccgtccagagctgagcacctgcctggagagcccgccttggactctgatggcccagggaggccttacctaggggatcaagatgtggcttttagctacagacagcaaactggcaaggggaccaccctgttctccttctccttgcagctccctgagtcattcccctccctcctagatgatgatggatacctctctttccccaacctttctgaaaccaacctcctgccccagagcttgcagcattacctcccgatccgctcaccgtcccttgtgccctgtttcctcttcatctttttctttctgctgtctgcctccttctcagtgccatacgctctcactctctccttccctctggctctgtgcctctgctacctggagcccaaggcggcctccttgagcgcctccctagacaatgacccgagtgacagttcagaggaagagactgacagtgagcgcacggacaccgcagccgacggggagaccaccgccactgagtcggaccaggaggaagatgcagagctcaaggcacaggagctagaaaaaactcaagatgacctgatgaaacatcaaaccaacattagcgagctgaaaagaaccttcttagaaacctcaacagacactgccgtaacgaatgaatgggagaagaggctttccacctcccccgtgcgactggccgccaggcaggaggatgcccccatgatcgaaccacttgtccctgaagagactaagcagtcttctggggaaaagctcatggatggctctgaaatcttcagtttattagagtctgcgcgaaaaccaacagaattcataggaggggttacttctacttctcaaagctgggttcagaaaatggaaaccaagacggagtccagtggaatagagacggaacccaccgtgcaccacctgccgcttagcactgagaaggtggtgcaggagaccgtgttggtggaggagcggcgtgtggtgcacgcgagtggggatgcttcttactcggcgggagacagcggggatgctgcagcacagcccgcattcacaggcattaaagggaaagagggctctgccttgacggagggggctaaagaggaaggaggggaggaggtcgctaaagctgtcctggaacaggaagagacagccgctgcttcccgtgagcgacaagaggagcagagtgcagccatccacatttcagaaactttggaacaaaaacctcattttgagtcctcaacggtgaagacggaaaccatcagttttggcagtgtttcaccgggaggagtaaagctagaaatttccacgaagaagtgccagtagttcacaccgaaaccaaaaccatcacatatgaatcatcacaggtcgatccaggcacagatctggagccaggcgtgctgatgagtgcacagacgatcacatctgaaaccaccagtaccaccaccactacncacatcaccaaaactgtgaaagggggcatttcagagacaagaattgagaagcgaatagtcatcacgggggatgcagacattgaccatgaccaggcgctggctcaggcaattaaagaggccaaagagcagcaccctgacatgtcagtgaccaaagtagtggtccataaagagacagagatcacaccagaagatggagaggattgaccagaggaataacttagcttgcacatgaatgcagtcatgcaaaccgttaggaaaaccagagcctatatggagttccctcttctaacccaactgacttgtatctgtccgtggaaaatttcagtccagaagaattgaccttgaccattaataaagacactggcagagagatcttcccataataaagcaatctgattcagcatcactaaaccgataatgcatgaagcaacgataaaattacaaaagagcagcatttttaattttcacaaaatgtctcagttttcagctatacctgcacgttcataaccaacaatataaaccgtggtctcatgtaacacataaacaattcatgcctttcatagtttattattattaaagtctaaacaaaattgcaatttcttaggtaaccttatatttacaataaatgaagattaccctcaaatgctagaagctgtctaggtccgtccggtgtgtcagattttcctcagattagatgtgccaataaccaagtttattcagtaaacaacttgtacttgtttcatctggttttattactctcacccataaacagtaatgactctctgaccctctggaaatatgtaatgcttccaatcttgctttgtgtatctcatttaatttgttccggntaaggtagtactgattttagcatattaatgcgatttcttccttgttgtttgctttggtctgtgttcaatccagagagcttaaattgtcattattttgggaagaaaacctgtatttttgttagtttacaatattatgaaatttcacttcagnagaaactgctgggcttcctgtggctttgttttcttagttactttttccgtgccgtgtattttttaattgatttttcttcttttacttgaaaagaaagtgttttattttcaaatctggtccatatttacattctagttcagagccaagccttaaactgtacagaatttccactgtaattaaaactatttagtgttagttataaatagccttcaaaaagagagattctccattacacgatcacctgcatcacagcccatggtgaatgtatgtttctgcatagcgaaataaaaatggcaaatgcactg

SEQ ID NO: 159048 - DNA, 2143 bp, Homo sapiens
  misc_feature (1687)..(1687): n is a, c, g, or t
  misc_feature (1838)..(1838): n is a, c, g, or t
agcggaagcgcgctgcaggtggcaacttggaggtgccgccaccgcagctgcgggaggagcccgggtctggcggccccttccagcctccaggagctctttcccgccgccgagcccgagactggacctcggagaattcgaaggaaagagcccctgcggagggacctgtgagcagccctacctctctctgcccttgcgctactttttttctccaaggaaggttgtgcctgcgggctgcgaacaagctccgggaggggccccaaaggaaggcttcggtgactcagactcggaatccaagccggaccaggaggccgagccccaggaggcggcgggggcgcaggggcgcgcgggggcgcccgtgccggagccgcccaaggaggagcagcagcaggccctggagcagttcgccgccgctgcagcgcacagcaccccggtgcggagggaggtcactgacaaggaacaggagtttgctgccagggctgcaaaacagctcgaatatcagcaattagaagacgataaactttctcagaaatcatctagcagtaaactctctcggtctccattaaagattgtcaaaaagcctaaaagcatgcagtgcaaagtgatacttctcgatggatcagaatatacctgtgatgtagagaaacgctccagaggacaagtgctgtttgataaagtgtgtgaacacttgaacttgctagagaaagactactttgggcttacgtatcgagatgctgaaaaccagaagaattggttggaccctgctaaggaaataaaaaaacaggttcgaagtggtgcttggcacttttcatttaatgtgaaattttatccaccagaccctgcccaactatctgaagatatcaccaggtactacctctgcttgcagttgcgagatgacatcgtgtccggaaggctgccctgctcctttgttaccctggccttgctgggctcctaaagaggccaaagagcagcaccctgacatgtcagtgaccaaagtagtggtccataaagagacagagatcacaccagaagatggagaggattgaccagaggaataacttagcttgcacatgaatgcagtcatgcaaaccgttaggaaaaccagagcctatatggagttccctcttctaacccaactgacttgtatctgtccgtggaaaatttcagtccagaagaattgaccttgaccattaataaagacactggcagagagatcttcccataataaagcaatctgattcagcatcactaaaccgataatgcatgaagcaacgataaaattacaaaagagcagcatttttaattttcacaaaatgtctcagttttcagctatacctgcacgttcataaccaacaatataaaccgtggtctcatgtaacacataaacaattcatgcctttcatagtttattattattaaagtctaaacaaaattgcaatttcttaggtaaccttatatttacaataaatgaagattaccctcaaatgctagaagctgtctaggtccgtccggtgtgtcagattttcctcagattagatgtgccaataaccaagtttattcagtaaacaacttgtacttgtttcatctggttttattactctcacccataaacagtaatgactctctgaccctctggaaatatgtaatgcttccaatcttgctttgtgtatctcatttaatttgttccggntaaggtagtactgattttagcatattaatgcgatttcttccttgttgtttgctttggtctgtgttcaatccagagagcttaaattgtcattattttgggaagaaaacctgtatttttgttagtttacaatattatgaaatttcacttcagnagaaactgctgggcttcctgtggctttgttttcttagttactttttccgtgccgtgtattttttaattgatttttcttcttttacttgaaaagaaagtgttttattttcaaatctggtccatatttacattctagttcagagccaagccttaaactgtacagaatttccactgtaattaaaactatttagtgttagttataaatagccttcaaaaagagagattctccattacacgatcacctgcatcacagcccatggtgaatgtatgtttctgcatagcgaaataaaaatggcaaatgcactg

SEQ ID NO: 159049 - DNA, 2215 bp, Homo sapiens
  misc_feature (911)..(911): n is a, c, g, or t
  misc_feature (1759)..(1759): n is a, c, g, or t
  misc_feature (1910)..(1910): n is a, c, g, or t
ccgtctctgctttaccaaacaagagcacctggttttctattttatttcccattcttttcgtttccaaactctgagattccttcgttcttcctcctccctgtctcctctgcctacgattttgtctaacaagctgtgaatgtttatgtgcctgagtttgtgtctctcttttgtgcttgactctgcctctctttgttcactcagactaagcagtcttctggggaaaagctcatggatggctctgaaatcttcagtttattagagtctgcgcgaaaaccaacagaattcataggaggggttacttctacttctcaaagctgggttcagaaaatggaaaccaagacggagtccagtggaatagagacggaacccaccgtgcaccacctgccgcttagcactgagaaggtggtgcaggagaccgtgttggtggaggagcggcgtgtggtgcacgcgagtggggatgcttcttactcggcgggagacagcggggatgctgcagcacagcccgcattcacaggcattaaagggaaagagggctctgccttgacggagggggctaaagaggaaggaggggaggaggtcgctaaagctgtcctggaacaggaagagacagccgctgcttcccgtgagcgacaagaggagcagagtgcagccatccacatttcagaaactttggaacaaaaacctcattttgagtcctcaacggtgaagacggaaaccatcagttttggcagtgtttcaccgggaggagtaaagctagaaatttccacgaagaagtgccagtagttcacaccgaaaccaaaaccatcacatatgaatcatcacaggtcgatccaggcacagatctggagccaggcgtgctgatgagtgcacagacgatcacatctgaaaccaccagtaccaccaccactacncacatcaccaaaactgtgaaagggggcatttcagagacaagaattgagaagcgaatagtcatcacgggggatgcagacattgaccatgaccaggcgctggctcaggcaattaaagaggccaaagagcagcaccctgacatgtcagtgaccaaagtagtggtccataaagagacagagatcacaccagaagatggagaggattgaccagaggaataacttagcttgcacatgaatgcagtcatgcaaaccgttaggaaaaccagagcctatatggagttccctcttctaacccaactgacttgtatctgtccgtggaaaatttcagtccagaagaattgaccttgaccattaataaagacactggcagagagatcttcccataataaagcaatctgattcagcatcactaaaccgataatgcatgaagcaacgataaaattacaaaagagcagcatttttaattttcacaaaatgtctcagttttcagctatacctgcacgttcataaccaacaatataaaccgtggtctcatgtaacacataaacaattcatgcctttcatagtttattattattaaagtctaaacaaaattgcaatttcttaggtaaccttatatttacaataaatgaagattaccctcaaatgctagaagctgtctaggtccgtccggtgtgtcagattttcctcagattagatgtgccaataaccaagtttattcagtaaacaacttgtacttgtttcatctggttttattactctcacccataaacagtaatgactctctgaccctctggaaatatgtaatgcttccaatcttgctttgtgtatctcatttaatttgttccggntaaggtagtactgattttagcatattaatgcgatttcttccttgttgtttgctttggtctgtgttcaatccagagagcttaaattgtcattattttgggaagaaaacctgtatttttgttagtttacaatattatgaaatttcacttcagnagaaactgctgggcttcctgtggctttgttttcttagttactttttccgtgccgtgtattttttaattgatttttcttcttttacttgaaaagaaagtgttttattttcaaatctggtccatatttacattctagttcagagccaagccttaaactgtacagaatttccactgtaattaaaactatttagtgttagttataaatagccttcaaaaagagagattctccattacacgatcacctgcatcacagcccatggtgaatgtatgtttctgcatagcgaaataaaaatggcaaatgcactg

SEQ ID NO: 159050 - DNA, 2493 bp, Homo sapiens
  misc_feature (1189)..(1189): n is a, c, g, or t
  misc_feature (2037)..(2037): n is a, c, g, or t
  misc_feature (2188)..(2188): n is a, c, g, or t
actgtgtaattccttcccctaaggagaggtcattgcttcctcctctgaacttcagcagtacctcacttgacccttaccaatttcagcctcctatcacaagtacctgtactgacatacaagcatcgtcaccctactggaagacaagcgccttaggagaaggtccaggtatgccggcatactctggcccttctgttgctttgcttgaacttgtgttcttgtgagaaggtagtgtgacacagagaaatcacagagaaagaaaatgacctgtctgacctgtgccagagcgtgtttaaccagatggtttactttctgtccctgccttcctcctggaacctgatcacttctgtggtcaacagactgacagtgagcgcacggacaccgcagccgacggggagaccaccgccactgaggagctagaaaaaactcaagatgacctgatgaaacatcaaaccaacattagcgagctgaaaagaaccttcttagaaacctcaacagacactgccgtaacgaatgaatgggagaagaggctttccacctcccccgtgcgactggccgccaggcaggaggatgcccccatgatcgaaccacttgtccctgaagagaaaatggaaaccaagacggagtccagtggaatagagacggaacccaccgtgcaccacctgccgcttagcactgagaaggtggtgcaggagaccgtgttggtggaggagcggcgtgtggtgcacgcgagtggggatgcttcttactcggcgggagacagcggggatgctgcagcacagcccgcattcacaggcattaaagggaaagagggctctgccttgacggagggggctaaagaggaaggaggggaggaggtcgctaaagctgtcctggaacaggaagagacagccgctgcttcccgtgagcgacaagaggagcagagtgcagccatccacatttcagaaactttggaacaaaaacctcattttgagtcctcaacggtgaagacggaaaccatcagttttggcagtgtttcaccgggaggagtaaagctagaaatttccacgaagaagtgccagtagttcacaccgaaaccaaaaccatcacatatgaatcatcacaggtcgatccaggcacagatctggagccaggcgtgctgatgagtgcacagacgatcacatctgaaaccaccagtaccaccaccactacncacatcaccaaaactgtgaaagggggcatttcagagacaagaattgagaagcgaatagtcatcacgggggatgcagacattgaccatgaccaggcgctggctcaggcaattaaagaggccaaagagcagcaccctgacatgtcagtgaccaaagtagtggtccataaagagacagagatcacaccagaagatggagaggattgaccagaggaataacttagcttgcacatgaatgcagtcatgcaaaccgttaggaaaaccagagcctatatggagttccctcttctaacccaactgacttgtatctgtccgtggaaaatttcagtccagaagaattgaccttgaccattaataaagacactggcagagagatcttcccataataaagcaatctgattcagcatcactaaaccgataatgcatgaagcaacgataaaattacaaaagagcagcatttttaattttcacaaaatgtctcagttttcagctatacctgcacgttcataaccaacaatataaaccgtggtctcatgtaacacataaacaattcatgcctttcatagtttattattattaaagtctaaacaaaattgcaatttcttaggtaaccttatatttacaataaatgaagattaccctcaaatgctagaagctgtctaggtccgtccggtgtgtcagattttcctcagattagatgtgccaataaccaagtttattcagtaaacaacttgtacttgtttcatctggttttattactctcacccataaacagtaatgactctctgaccctctggaaatatgtaatgcttccaatcttgctttgtgtatctcatttaatttgttccggntaaggtagtactgattttagcatattaatgcgatttcttccttgttgtttgctttggtctgtgttcaatccagagagcttaaattgtcattattttgggaagaaaacctgtatttttgttagtttacaatattatgaaatttcacttcagnagaaactgctgggcttcctgtggctttgttttcttagttactttttccgtgccgtgtattttttaattgatttttcttcttttacttgaaaagaaagtgttttattttcaaatctggtccatatttacattctagttcagagccaagccttaaactgtacagaatttccactgtaattaaaactatttagtgttagttataaatagccttcaaaaagagagattctccattacacgatcacctgcatcacagcccatggtgaatgtatgtttctgcatagcgaaataaaaatggcaaatgcactg

SEQ ID NO: 159051 - DNA, 562 bp, Homo sapiens
ccactaccatgctcagttaacttgtttattttttgtagagaagaggtctctatgttgcccaggatgatctcaaactcctgggcttaagctatcctcccacattggccttccaaagtggtgggattacaggtgtggactgccacacctggccaaagttttttattttagtaaattgcaaatatcttttgcattaacatttttgtcttcttgtcctccacacttgaggagttcttctattttgtaattaaaatgtcttgtatatctgtactttcttgcctgtttccattgccactaatgtaattcaaaccaacatcacttccgacaagacaattaaggtagctttctaactagtttctccatcttcagctttcccaaattccaaattcgttttgccagtacaccacatcaattgttttttcttcttcttcttcttttttttttttttttttttttttggaaacgggtttttgcttggacccccgggccgaataccgggggcttgatcagggttccctggagccttgacttcgggggcgcaggtgatcctctcgctttagcttct

SEQ ID NO: 159052 - DNA, 492 bp, Homo sapiens
ctgacatttcccatggcagttaacatttttccactttatcaaatacacatttatttgtcaaatatttgctgggtaccactctgtgctaggtattggggatacagtcatttgcatcacaaagtccctgctcagtgtaataagcactcattgagcacctacctatgtgtgaggaactgtgctagggggtatcagaaacacacaaaataggccgggcactgtggctcatgcctgtaatcccagcactttgggaggccaaggtgggcagatcacctggggtcaggagtttgagaccagcctgaccaacatgatgaaaccccatcactactaaaaatacaaaaaaattagccaggtgtagtggcacatgcctgtagtcccagctacttgggaggctgaggcaggagaatggtgtgaaccctggaggcggagttgcagtgagccgagaatgcgccactgcactccagcctggggaacagagactctgtctaaaaaaaa

SEQ ID NO: 159053 - DNA, 291 bp, Homo sapiens
caggagtaggggatcccaaacattttctgtttaacctgtcacttccagagttagtcgtcttttcactgaatctcagggctattcactcaatctaaatttattactgagcctacagggagcccattgccagtgtgacccatgccccctctcaggtaaaaggtcttttgggcttctcatatcaagggaataaataaaatttgcagatgtatccctgaacaggtgaggaagccaaaatccagggagtttaaactgtacctcaggcaaggtagcaaagccaagggacagcagtct

SEQ ID NO: 159054 - DNA, 581 bp, Homo sapiens
  misc_feature (513)..(513): n is a, c, g, or t
  misc_feature (540)..(540): n is a, c, g, or t
  misc_feature (545)..(545): n is a, c, g, or t
  misc_feature (548)..(548): n is a, c, g, or t
gtgaggacctgagatttggaggggccaggggtggaatgataatgatttggctgtgtccctattcaaatctcaactgaattatatgtcccagaattctcacgtgttgtgggagggacttacggggaggtaactgaatcataagggccggtctttcccatgctattcttgtgatagtaagtctcgggagatctgatgggtttatcaggggtttccgcctttgcttcttcctcattctttcttgctgccacattgtaagcagtgccttttgcctctgccatgattatgagacctcccagccatgtggaactgtaagtcaaattaaacatcctgttcttccaaataaaaaaaaaacaaaaacatgttgctcctaatcctgagcagagttttactttcctgaaggtaaaatctcctggctccggccgggcgcggtggctcaggcctgtaatcccaacactttgaaaggctgaggcgggtggattgcctgaagtcaggagtttgagaccagccgggcanacagtgacactcatctctatgaaaatntttanaantgacaggatcccggagacggtacgagtcgatcg

SEQ ID NO: 159055 - DNA, 236 bp, Homo sapiens
ggctaatttttgtatttttagtagagacggggtttccccagtcacatggtaattctatgcttaacttttcgaggaagttctgaactgtttcctgaagtggctataccattttacatttccagcagcaatgtaggagggatccaatttctctatatcctcaccaatatttattattagctgactttttgattacatgtgtcctagtggagtgaagtaatagctcattgtggttttga

SEQ ID NO: 159056 - DNA, 189 bp, Homo sapiens
tagagcttggtcaagatgtcctaatggtctaaaatgtcaaaagaaaactagatgaggaaaaagtaatagaaaataactctattataagcttccttatagttcagattcatctctttcttgtaagaaccacccaccagttcctactcagagactcaaggatactcctgttcctcagttggttcaagataa

SEQ ID NO: 159057 - DNA, 401 bp, Homo sapiens
cgggtagatcacctgaggtcaggagttcaagaccagcctggccaacatggcgaaaccccgtctctactaaaaatacaataattagttgggcatgatggcgggtgcccgtaatcccagctactcgggaagccgaggctggagaactgcttgaacccgggaggccgaggttgcggtgagccgagattgcgcacttacccttgccttttccttgaggatgttttgccatttagcatgaggaagtcaggcgggactgacttccactgggccaagttcacagaggttcagccaggcagctgggacttgacgaaacaggagaggagggcactgacctcccaaatctacgtgcaccctcccttagaggcatctgccaactcaagctgctcactatctgcaagaccccc

SEQ ID NO: 159058 - DNA, 281 bp, Homo sapiens
acctggaaaaatatagagacagaagatgtaaatgaaagactatttcccaggtatatggaaacagcaggaaaatgtaatgcatcttggagaaatcataagggtctgagtgaaaactctttagttaagtgaagcaaaaggagcaccagtgaaaagtggtggcactagtgattccagcagataggcaaggagatctgaaaatataatttctcctacttaaaccgttttttaaaattctttctgtttcactgtaaaacttaaatccaagtaccggtgatcgtaag

SEQ ID NO: 159059 - DNA, 321 bp, Homo sapiens
ccacctgggcctctcaaagtgctgggattacaggcatgagccaccatgcccagcctctccatcagactttggatctggaagatagtaagaaaaaaagcaaagtaacttagttctgtcctttcctagaggacgtaagcagtcttggcctcttcatgatggtccactttgttaccgaattattgggtacaaaagtgaggtctgcaacaggctttggatgtttcaaggtgtgtctggctgtggtttgctttctgagtgccagctttaatgtcctcttattttctggcaagggttgatggatgtggcactgaatattttctgaat

SEQ ID NO: 159060 - DNA, 530 bp, Homo sapiens
gggcagctgtcagggaaatgatgtcagcggaaatgatgggggcaggatggagaggaggtggactccaaccctgggggagggagaggagcggcggcctctgggggaaggcaggagggtgtggcagtctggggatctgccctacaaacaggggctgtgcggggtctgatggagaggaactcgagccggggcaggggcagagggcagagttcctgctgagggtggtggagctgtgtgcagagacatgcccgtggcgccagcggggggcacagggcagccaggagtggggagaaggttgaatgtcaggctccagagttccaggcagaggcgggaaccatgagggcagtttcctcaccaccaggaaggggctctacagctcccatcaagaagcccgctgtagcctgaggtcagctgctggccaggacctcaaccacagcctcactcagacacctcttgcaaggagccatcccggcttccactatagggagagcaacagaggctccatccacctgcaggctggtcagccgcggagc

SEQ ID NO: 159061 - DNA, 256 bp, Homo sapiens
acgggcagtctctggtataatgtgcacatgaatacgaagggggtaagaagaacgccctgggcatctctctttgtgggagagcgagacagctagctcctcatcctctcctggagagggtaaacccgcccctgaagtggtcaccccagtacccagccttctcagtctcctcccccactccttttgcattaccgccgtcctttactgtgccggagccttaggatctacaatatggctcatttcagaaaagcttattttg

SEQ ID NO: 159062 - DNA, 146 bp, Homo sapiens
gtattagacttcagagtgagaaagaacttcactatcaaatctcttttcctattcataaattaattttgggatggggcacagaaacaaagaccagtggacataaatctgagtctcagtctaactggcgttttctgaactacaccatt

SEQ ID NO: 159063 - DNA, 420 bp, Homo sapiens
tctaccaaaattacaaaaattagctgggcgtggttgcctgcctgtattcccagctactctggagcctgaggagggaggatcacttgagcgtgggaggcagaggttgcagtgagcctcgatcgcaccactgagctacagcctgggtgacagagccaggccctatctcaaaaagaaaaaaactatctctttcaatggatctcatagtgctaaggatctgtgcaagctttagagatttctggaaatgataacaacatagctggggaaaaataagagagaaactggaggaagaggtaagcagacatggctaattaaggaaagttgagggcatgatgggtgaacctatgaaatttaggacaagaccccagtaagacaatgagttcccaggacttgcccattgactttcagccctatgagatgtga

SEQ ID NO: 159064 - DNA, 394 bp, Homo sapiens
ccagcccaccagatcttaaacaacataatttccactgcattctataggacaaagcaagtgacttggtcagcccaaattcaaagggatggagaaataggggcatacacacagggatggaatttacagcaaaggggaaatttcagcaaaggggcatacacacagggattgaagaaatttgtgaccattgatattaaacaatctttgccttggcgtctgctttgggacacagggacagctctaaattaagacattagctgaatcagcaatgaagaaaagaagaaaaaggctaccttctagaggtgtgttgatattaaataagaaaatacatttgaaagatacttaactgaggcctggcacgatggctcatggctgtaatccaatctttgggaggcta

SEQ ID NO: 159065 - DNA, 144 bp, Homo sapiens
accacactcattacttcctaaggttcctgggcatgagtcttctgagtgcctgggccagagctgcagctgttgactcaagacaaggtaaaaagagcaagagcacctcacaggagaggacacccacacaaccaagaaacatacata

SEQ ID NO: 159066 - DNA, 493 bp, Homo sapiens
ccatgcccagaactgcgagctcctgagaccagttgcagaaaccagcatgttttactggctcccaggcggttctgatggaggatgtcccaggaggggactctgagatgggctatttgtaatctacggcaactgcctcacaacagagtgtgttcgtggagaagaggaaactgggcaccgagggctcagaagcagatggcagataatcaggaatatgtgaaaaattatggcacctccatatataataaaatattacagacatttctaagggaaaaggtaggcttctgagaaatgacacagagattgcctatgacattaagtgtacaaaaccagggaacgttaacagtacacacagaacaagcaatcacatcttgtgacatacatgttacaaacatacacatgtataacatatatccctgtgtgcatatgtgcacaactgatggctggcagatggatccctaatccattgtcatctgttagccctgagcaggtggga

SEQ ID NO: 159067 - DNA, 551 bp, Homo sapiens
agaaaaattccgaaaaaacaataacaataatgatgttcaaccacatacaaacatttattatacagctctgataattaaaacagcatggcagtagaactagaatagacagacgtgtccacggaaaataagaaaacatctgaaaacaaaataaatactcaaattcatttattcaaacatttattgagtgcctgctatgtacgggcactgtggatggttacttgatggcaaaaccaaaaagtcaacgtcagaccaaaggatgaagtattcaataactggctatctgtgtggggaaaaagatatttttctcacattttacactcaaatacatctcaaatacttaattatatacaactcctagcactactagaataaaacaggtgaatatttacatataatttcatgatgggaaatatgtgagttcgaaacaatcattgtgaaatatgttaatttaaatgttaacagggtgtaaactactgactagctaaataatggatggtcatgtagtcattaaattgttgatgaagaaatatctttttttttttttttttttt

SEQ ID NO: 159068 - DNA, 494 bp, Homo sapiens
agagaaagctgaggcaggaaggagcttctgttccccaggaaccagagagagcccagaggaaaagaatcagggggaggaggaaaggagaggtgaggtcagatatggaagcaaagccaggccacgtcttggtagagtttgggttgtcttttatgtggaggattcagtccacctgactctggagctcatattgttctcatcaccctgtgctaccctcagttacaagtctgaatgatcccacaaacatacacagggcactcaccaaatgaggtcctgagcaggtccttgttagagccactttccaaggctcctgacctgtgatcccagatcctcaataatcaaagaaattagtcttcagatgcttgactcaggaatggggataccatttatctaaggtcaggccccagagctcaaggacccaggtcacagtgttcagtaaatattcactcccctctccttcctgtggtggtaggatgttggccagaccaggtgatttg

SEQ ID NO: 159069 - DNA, 433 bp, Homo sapiens
aaaaaaagaatgaaaacatctgtcacatcatgtcactctctgcttcagatcctccactggcttcccatttcatgagtaaaatccagtgtatttaaggagcttgtaaggctgtataatgtttgcctattcacctagctttaccattctgtttttccccctccctttgtctctgccaccctcacttgttcctcagatatgacatctgcatcacagccttttactttctattctctggctggaatgctgttttttcttaaacctttgtctttctgattgattgattgattgagatagggtctcactctgttgcccaggctggagtacaatgacacagtctcggctcactgcttgagcctgggaggcgtgggttgcagtgagctgagatctgctactgcattgcaacctgggtgatagagcgagactctgtctcagg

SEQ ID NO: 159070 - DNA, 1275 bp, Homo sapiens
  misc_feature (1)..(4): n is a, c, g, or t
  misc_feature (1188)..(1188): n is a, c, g, or t
nnnngggaaggctgcctaagccagagagcttcacagggagccttgatgtctgagtaagaattaaccaggtgaagcagaaggggaaataggctctaggaacagagagctttgagcacaaaggcaggcagagtgtgaggagaggaggccttacttccttgtgactgcagcatgaagtttgttcatatatcacgtagcaattactagccttgtctggctgacatatacctgagggagtgtggaaagtgccgaatgcctgaagataaatcaactcttcctctgggagggcacggataaacaacttcatcgatgtgcttcaggttaccatttgaaaaggcagtagagatatgtataaaggcttccagctttggcatctgactagccgtaagagcttctgggtggcagtgatgttaagttgcacagcatgtctacagaagattaagcagaaggaaatacagtgagataagtcagcatcatgccttgctataactgcacctactcccataactggcatacctatcagattttggtggctgcaccaaaacaccaggaagaaaaggatggggcacggctgcacagttatgtgatacttggaatgtcttatgtattgatgatgtgtttgtgtacataaaccctattcactgatgcactgtatggcatatttagaggtcacttggctctaatcaactggaaaaagaatcacaatcctctgaatttacaaaggtgcttctataagcagccattaaaagaacaaaaacatgtaaattaagcatctaactgaagaaattggaaaatataaataaactggagagaagcaacagtggatttttaaatgagcaatataagttgttataaagttccaggccagacatgaaaattgatgtcaaaatctgaaattgcaactactggaatacaaagctatatagacagtatgtgataacaatgaaatacttcattctaggaatacatggtttatcgaataccaggaaacttattaatttaatttaactcaaaaagagaaaaactatataataatctgtatgtattttgaaaagtttaagacgatgtttagttttcatttccaatttcattaaatgaattcactagaataggaataaaatgattaaacaatatgtatttaatttgctagccaatgtcattcttaatggtgaaaagctaggaatactgctngtaaagccagggctagaaataatgcctgcagtcacaactactacttaacattgttctgaggtcctagccttgtaagtaattagaaag

SEQ ID NO: 159071 - DNA, 415 bp, Homo sapiens
ggagcaactcatcgagcagggacagctggctgtatttctttcattcattcaacaaacatgcattttgtgactgatcagcgtgttgcacagagtcttaaaagtaatggcccctgccctccagccccctgtggtgagaagactgatccattagtgaacaatcacgacaccatgtcacctggactgcacaagagagaggcgcaaaggctgtgggaggccatgggagaagcccacctcagtctcatgaaatcagagaagcctccctgcaggaggatttctctaagccaagtactaaagtacaaataaagaggcagccacatacagcagagaggggggctgagcagccaatagtaatgaccccctttcattgagttcctactgtacgccaagcactaggctaagcagtatttacagtcgt

SEQ ID NO: 159072 - DNA, 539 bp, Homo sapiens
atttcacctactaaaaacacatggcctataaacccactcattcttaatggaaaacccattagttaatttgaacaataaagtagcattagagtaccttgttaatgaaatggaaattagggatcaattgctacctcagacaaaatgtggtaagaattaaaatggtatttccagtctaacatcacagcaactcagtaactagcaaagatttttacttgaaatcacccccacaatgaacaggagatctgattcccatggatgacaatgtacagtttctatttttatccttgtaaatggaagggcagatcattttgccaatccccaaagattccatgtttcattcataaaactgaatgaaaagagactaataaattctttaacagttaatacttattaatgtgtttaaaaactagctgagttttacaattagtgttttacaaaatggaagttcaaaatttaagagaaaataagtgatgagaagaaatagtagttgtcaatgctgtagaaagcagtaccttaaaaaatgaaacaaagataccaac

SEQ ID NO: 159073 - DNA, 454 bp, Homo sapiens
tcccacaatacttgcagtcatatcagttacaaccgctgggtgtgtattggttcaaaaggacctacctacaaggttatatcaatccattgtccaatttgagagattttttctgaatccagttaaaataatttttggctacacctggggacacttcccaggacaacaatgacttgtagtctagtgcccaagaaagccaaaaaggcccggcaaccttggttgccaccagatccccaacagacagattctaagggagaagagaagttcatcaactaacactcacagtgtgtctgcatttttccttcataattatgtgagtttcacttaatggggctgtcactgtagctcattttaattgctataaatcaatgaggtaaatcttttgcatatatatcaaatattaccatcctgatgttagagattttctttccaaggcaaatagaactttcaccaaaaa

SEQ ID NO: 159074 - DNA, 332 bp, Homo sapiens
gtcattttgacattaactttgtagttttccatgacgtccgcgccctcaaatgacaagctattgcaggttcattctgtgccccaggcctgaatcacccatttctctaaggaatcttatcctttaatgggaaatggaattttaaggcaataatctcagatttcaaaactttcaaagatttcataagatttttatgaaatgtttagagttagaaggggctttggagatagtcttgtgcacccagaaagcagtggtggccggttaggcacagagctggttggtcacagagctaagagttaacatggccagctgacttccggcgccaggttccttct

SEQ ID NO: 159075 - DNA, 348 bp, Homo sapiens
aaattagccaggcgtggtggcgcatgcctgtaatcccagctactcaagaggctgaggtaggagaatcgcttgaacccaggaggtggaggttgcggtgagccaagatcgcgccattgcactccagcctaggcaacaagagcgaaactctgtcaaaaaaaaaaggtacactccatgatgactcttgcattggagctggccagtgtgctctgctgtaccttggcatgctgttttcttaggtagagactgaacttaccactgcaacaggaaggcagctctccctcatatttgccctcactactgcaacagctgccgtcgacgcggccgcgaatttagtagtagtagtcgacc

SEQ ID NO: 159076 - DNA, 632 bp, Homo sapiens
aatgacctataaaaaccctcacagggtgtttgttatcctctctgactttactccctacaactgtccccgtcccctaccgcctctgttccatccactccagtttccctgctgttctttcacatgtcaggcatgttcctgacatgcctggacatacacatctgttgttttttctgcttaaaatatactttctccatgagtcacatggattattactttgctctgaaaggtaatgataaaaggtgacctctaaacaaagctatcacctttgtgaagtcttcttcaactaccctataaaaaaatgaactccactcatgccccgtactacacagccccttttcctgctttatttcacccccatagcacttattcctatctgatatacttctcgtatgccttctcttcccccatcccttttggcatgtaagctcctagaaggctaagattttgtctgttttgccatatccacagtgggtagtgtcttgtagacaataggtatttgatcaatatttaccaaacatatacatgagactgcctacaccacattaacatcaaacactgcttagaccttagcaccataggccttctgtcaaactgactcccactaacctcctgtacagtattatccttgactc

SEQ ID NO: 159077 - DNA, 681 bp, Homo sapiens
catgtctataatcccagcactttgggaggctgagaccaggcaggcagatcatttgagttcaggaatttgagattagcctggctaaaatggtgaaactccacctctactaaaactacaaaaattagccaggtgtggtggtgtgtgcctgtaatcccagctactagagaatcacttgaacctgagaggcggaggttgcagtgagctgagattgcaccactgctctccagcctgggtgacagagcaaaactctgtctaaaacaaacaaacaaaaaaatcaagttgtaaattcagtctctttgaccttaagctaacttaaaaaaaggctggccatggtggctcacacctgtaattgtagcactttgggaggccaaggtgggtggatcacttgaggtcagaagtttgagaccagcctggccaacaaggtgaaaccccgtctctactaagaatacaaaaattagccggaaatcacttgaacccaggaggtggtggttgcagtgagctgagattgtgccactgcactccagcaacagagcgagactgtctcaaaaaaaagaaaaattaatggtggatgcagtggctcacacctgtaattccagcactttgataggatgaggtgggcagatcacttgagctcaggagtttgagaccagtctggacaacatagtgagacctcgtctctac

SEQ ID NO: 159078 - DNA, 523 bp, Homo sapiens
attcatggaagaagggggactgaaactaggctataagaaggacaaagggaacaacagcatgcacaaaagcaaagtagtgagtatggcaaaaactaccgtatttgagaggccggcaagaatcccaactaagagtgagaaataaagctgaataggtagaatggaaccttcttaaaagccagactgaagcatacaaattcaatccagttggcaaagagaatccattatgggttctccagcaggggaactgacaagatgaaaccagtactttaaataaattacactgtcagtagttacagaagataaaatgaataagaaaggttgctcagggcaaccaaataaaaacttaataatccagacctacaaccattcattcattgagaagacagactgctaggtaacaacactggcctagaattcacacaaactgggcctaaattcctgctctgtcccctactacctgagcctcaattttctcactgttaaattcaggcatcagcactcagactgtcacagtacttgtcaa

SEQ ID NO: 159079 - DNA, 485 bp, Homo sapiens
tacatctgcctatcctctatgtataaacatttagtgaacattttttaaagtaatcacgaggagtgtggcaatattgaccaagcagccaagagactcaaaggaattagcatttgctgagcatcccctattttacatttgtcatgcactgttaggcacttttaacatgtttgaccacttagtcttccccaccatcctattaaacattaatcttaatttacagatgaggaagctgaggttcaggaggtttaagtagtgagttcataaaagaactaaaattcaaaattcaggactacctaacataaagcgcatgctctctccacataatctcaaaaaagcttataaaaaagacaaacggtataaaatgtactacactggggaggggcattatttcaggaagtaagagaaatcatcacccccagtaattaagtaagagaacaccttaacaatatcttactctcacaaaaaagcaaaatctagatgggttc

SEQ ID NO: 159080 - DNA, 210 bp, Homo sapiens
tatatatgtatatgtatttagcatgtatgcacgtgtatatgtatacacatatatacatatgtatgtataatacatattcacacatgtatgcatgtatatacacatgtatacattagtatatgtatatacacatgtatgtgtattatacatgtatatatgtacatacatatcagtctactgatttgaatattaatgtcatcaagaaataac

SEQ ID NO: 159081 - DNA, 259 bp, Homo sapiens
aaaaacctttgtgcttgacgggtgtagcaaagtgaaatgtctgaaatgttctttacaatgaactaaacttgctacctttcagaccacactacatccacttatgatttccagaaaatacatacctcctttgcacgcacttcaattacacaaagacaaattaatttgatacttccaaccttctcttacacacacactacaattctgaaaggaaactgtcaaattaagactgagacaaacatattctgctctatcatcttaa

SEQ ID NO: 159082 - DNA, 415 bp, Homo sapiens
ttcttaattacttcatattctgtcatcgctatcctggtcacctatctctggatatgaagtggttgctcagcatcctccaaatgcagcacctggaattcactcaaggtggatatgcccagttcagtgtggaaataggcatgcttgttagctgaagggcatataaagtaaggacccatgggacctagtggctgaacattggaagccaagaatcaaagatggctctcgggcatgagcctgggagctctgaggtttacagatttgtacctgggaggactgaggaagagagaagagaaggaagcttggggagtgggaagccaagaatcccacagtggaagacctcaagactggagccgttctcccagcttccaaggagcagctcattccccgctctataagctgtcacagggcgtgggag

SEQ ID NO: 159083 - DNA, 667 bp, Homo sapiens
tatagctgttcccgaggagtgattcgacggtgtcctgggcttctgggctggggcaccaggtgaggagaccatcctgaggctatggtaaatcaagctgggttttctctctcccatgggcattccacactgtctctttctccgttataggtgggaggctcatgcaagcccatttttaaacatttgtgcaatgaacttagtcaggatgaaagaaaaaaagaatattattgttcttatccctgtagcataagcagaatggggcttccgctggctttgttcatgctggagggtccctccttcctgcaagccatcccatccccatagaggtagcaaaacaggaagacaatgggctgggaggagaggttgaatagggtaagtggtcctgtcctgaattgtgaccctgcatgagtgaatgagcttcaagtttaagctggatggagtcctcatagcaccccatctaccaccctggtggggtggaggatggttctgctgtgtgggtctccttaagcacttcgttaagcaccccaatacaaattatccgtctactcagagttcccttggaccttccctcatcaacatgcctgacaagtagtgcaaacactaatagcgcagtatcactattactagtctagtcaaagccaaagaaagtcaatttgatttgggaaaggta

SEQ ID NO: 159084 - DNA, 548 bp, Homo sapiens
tcttagcaacctcttcacctgagtcatttaacttctctgacccttcatgtccttgtctgttaaatgaggtcagtaattgctgctcactcactaagagtcagaaggaatcatggatgcaaaaaccacactgcaaaccgtaaaacaccaagcagctgtggaaaacagtatggcggttcctgaaaaaataaaacacagaatgaccatctgatccagcaattccacttctggctatacacccaaaagaactggaggcacgggctcagacattgtacacccatgttcacagcagtacaattcacaacagccaagaggtggaagcaacctgtgtccattaacacacgaatgaataaacaaaaattagccaggtgtggtggcacacacctgtgatcccagctactggggaggctgaggcaggggaatcacttgaacctgggaggtggaggctgcagtgagcggagatcgtgccactgcactccagcctgggtgacagaatgagactccgtctcaaaaaaacacgtttccttctcctcagtgtcagtgtcacattc

SEQ ID NO: 159085 - DNA, 562 bp, Homo sapiens
ttacaacagctccagttacaacagctacagtgaaaagaatctcaggagaagactcaggaataaaaacagagaaagagattacaggctaaaattactagaaatcctcagaaaacaaagaaggaaaaagaaaccaggaaaaccatcagcccaattaattaaatcaaggagtgaccgggagatccagtttactaaaagaatggaaatttcttgaatttgaagagttgaggacgaacaatcaggaatagtctagagcaattgcccagtgtccaaagaacaggagcataaagaagagctggcaagagtgtctccagatggtgacaagtttgcagacttttactagactactttgaggccaacaagccaaccctggccctctacttatggagaaggcctacacaggattctgggatacagatggaaggatgacatcttttcaggttctctctttacagatgtgattgtccttccaattcctgagttctaactccaggcttgtgttttgaagggctcctctgagccacatggaagatcctcgggtaccccaatggagccctggaactat

SEQ ID NO: 159086 - DNA, 439 bp, Homo sapiens
ggatattgcgcaagactggggcgttggaaaccctgtaggtctggggaatgaaaaaggaagtgggactttgggaagtggttgctccttagtcttggcgggggttgggaatgggaaataagctggggaaaatttttatcttgggtaaggtacacctcgaagaataatcacttaattctgaaatctgattatgagaaggatacacagttaatgcctgtaaaatgaatgggcagcaaacattggctagtttttattttttgtttaaaaagtacagtagtttttatggtggaggtgatatgacttagtagtgaatactttttcacgttttaaagagactggtctagtaaagctttagcgttaaatttttaacagcttataaaataggcccttgaccatacacagtattatactagcatcgttgagctttgtgattcccgcctcc

SEQ ID NO: 159087 - DNA, 427 bp, Homo sapiens
tcctgacctcaagtgatccacccactttggcctcccaaagtgctgggattacaggcatgaactaccacgccctgtccctcctaagctttttgtagacacattgctgttgcctgagcctgaagagccttttctcctccctcctcctcacctggccaatcccatttgtgcattcagaactggacttcctcctccgggaagcctcccttgaccttccctgctcccacttgcaagttcactggcgaaatcccagaaccctttatccctttgctctctgagctcttaccacatgatttcgttcccttgtgaacatgattttgttcccttgtgggtttaaacaccatctgcagtcccatttcctgataccctgcctggcatgcagacagagtgaatgaatcctcccttccttttaaataaacactaatacttt

SEQ ID NO: 159088 - DNA, 443 bp, Homo sapiens
cgactctagaggtccaccgcagcacactgcaacagccaaaaactggaaacaacctagatattcttttatggataaatggttaaataaactatggtacatccataccatagaataccactcagcaacaaaaagaacaaactattgataacacacagcagcctggatcaatctacagagttatactgaatgaaaggccaatccccaaaggtatgattccatttatataaaattcttcaaatgacaaaagtatagcaatggaaaacagatgagtggtgattggggttaaggagggttaagatgggagggaattggttatggctgtaaaagggcaacatacaggattcccgtggtgatggaaatgctcagcatattaactgtaccaatctgaaacccctgatcgtgatattacagtatagtgttgcagtgtgctaccactaaaggta

SEQ ID NO: 159089 - DNA, 286 bp, Homo sapiens
ttccgtctctcccccagttatccacctcatttttaatacatccttgctgtttacttttccttttaatatttataaacaagcagagttggttttattaaccctattttaaagacaagaaaacagaaacaggacgactggcatacaatttgagaaatcaggatgtaaatccaactgcttcccttctttctttaatagtcttctggcattccatggcaaagaacttgaaacagcacaactgcaagccaatatgaacactacaggcattcagattcttttctaagagaca

SEQ ID NO: 159090 - DNA, 276 bp, Homo sapiens
ctagaacaattttttttttcaattttctatttagaaccctgactttagctagttccatgtccttttcttttgccaatattctgcatactctacgggacatgatcttctgtgattctacattgtgggttatagttcctttctccacttatttatattctcatctaagtaagcagtgctcacatttgcttactcctgagtgtgctatcttttctttctctagatttgtttaatgactgtaaggttattctacgcttgtaatctgcttttggaagtact

SEQ ID NO: 159091 - DNA, 652 bp, Homo sapiens
atcatggtgttctgcatggaatctgattttgcttggcattggtctggtctgtgctgtggcatgccggatagcagaggcctgggagggagttcagaggcctgggttctagtcctggctgtgttactaatgcatggcatgactgtgggcaagccagctttttggggcctcacttttctcatctgtaaaaggagaggctgtgactaagtaaacttccaggtcattctcagctctaaatatctgcaagttcgagttttagctgtatttttcttttttcccccaaaagattatgacacctgtaagacaggttagttttagattttttctttagcatctgggttatgaaaaacaaaatccattttgacgtttttgcattccatcaaatttctacctgatttatgctgttttacgtgtgtctgaaaagaggattacttacacacagccaatcgcctttctccattttaccaaaggcatcttggggtctgtggagtcactgagagaaggcatggatgtgcttgacagtgggaaaatgtggttaaattactctcttggctcatcccaccttttccttctctcctttctcagtaactgtttatggggcatctccccggggaggctcagaactgagcaacccttcgaggacctctgtgccttg

SEQ ID NO: 159092 - DNA, 150 bp, Homo sapiens
cattctctcatgagtagcaaagggagaggccccagagatggggtgcttggtgcctttgtgagtgtagtttgtcattaactgtaggaaggcatggagcaggggccactcctcttagttctacgagcagcatagaccagtgatggcttggcc

SEQ ID NO: 159093 - DNA, 308 bp, Homo sapiens
tgcagatgaatgacatgtatccaacctaaatgggaatgataggctcattgcccctccacactatcctcccttgcagaagaaaccaatcaacctcctgtcactaccactgggattcagctaggtgtgatttccttaccaggcttctatccactgcctaggcacacagcctctattaaagatagttagcaaggaatgaataaacaattctttagcctaaggaattctaggtctgagaccagcaacttttctagctttgttacactaagtagctagtcaggtataagcagagcaggtgaggctctccccac

SEQ ID NO: 159094 - DNA, 558 bp, Homo sapiens
ctctctccctctcccccaaccccctttctctcttagacctttaagtattttagttttcagtaatgttatttttcttaacaggttaaaagggtaaagagggaaacacagataaataagggtggaggctgaaaacaactgtttagtgactgccctctgttttgtgtttccattactcaagaaatttaatcgaaatacgagaatgaacagtaatgcatattttttgtttatttatttggttttgctttttaaaaagtgcagtgtgatatacttaactggtagatcatttttggcttttgttgcaactgtgggctggagggtatatcaggatgtcatctgagacccagccgtctgatgaaaagaaatggaatcgagcaggctagtatactgggtacagggttctttttgcttgatggggaagataaaggtccactcaccctgcattgcctgaattacattcttcttcactttgtctctgccatggataaggtctcattataacctcttgctgaacttgtacttgtcctaagactggtagtagttaaatcctgaactaccttt

SEQ ID NO: 159095 - DNA, 101 bp, Homo sapiens
tgtgaaagatacagctggatattgtagtctgaaaatcacgtacagatcaatgtttctcaggcgtaatttttggtttatctctctctgaatcccccaggcta

SEQ ID NO: 159096 - DNA, 218 bp, Homo sapiens
ttggtgtcaggggctctgggtaacgggtcaaagccgccagcattccagccccgagcccgcaacggtaaaaactgcgagatagggtacttgaagcccgccccctgcttcccaggtcctctcaccattgcctcttcagaccacccgggggtggcattcatcccttcaccctgctccagggacccctgtgtggtgggaactggtggacacttccttccggg

SEQ ID NO: 159097 - DNA, 500 bp, Homo sapiens
cactgctagctacatactcagaagaaaggaaatcagtatgtcaaagagatatctgcactcccatgtttattgcagtactattcacaatagacaagatttgtaagcaaactaaatgtccatcaaaagatgaataaagaaaatatagtacatatatacaatggaatactattcagccataaaaaagaatgagatcctgtcatttgcaaaaacatggacggaactagaggtcattatgttaaatgaaataagccaggcacagaaagataaattgcatatgttctcatctatttgtgggtgctaaaaaaaaatgaactcatgaagatagagagtagcagaatggttaccagagactgggaagggtagtggagagtggctagggggcgatggttaactggtgaaaaatataattagaataaatcagaaatatttttaaattgttgagtttattgctaggcaaagggtaaaatacagtaaaaaaaaaaaaaggttagctgttaggt

SEQ ID NO: 159098 - DNA, 431 bp, Homo sapiens
tcacagatgagggttgggtagctggatccaggtcacacagctcctgagtgacagagcagggatgccgggagcgggggcggcggggggttgggagatgaactatctggcacttaagcattggcactagagattgaggctgtgtttgctatgaagtggaatttcagtcaccttgctccaaaaaaatcaatcaaacatgctgtttgttctacacaatgctatcatgtagaacaaacagcagcttgattgatggaagcttctgtttctcagctggttattttgccatcttgagtgaagaccctgctcccgagcccggctgtgatgatgacttggcagctgctctgctccggctctctcagtcctgaacaggaaggctgtttcacggcctcggcgagcacgtcggaaagggaggggacagacacaggcagcggccg

SEQ ID NO: 159099 - DNA, 287 bp, Homo sapiens
tccatttctttgggggtgtttaagcaattagaagaaccataaagaaatgcaaggaagtcattgtgacaaaaaacaggatggtgtttcttcttagaggggagggaggaattatgctccctgaaggtttgaaaggctcctgcagggtcccatttcctgctcttggtgatggcttcatgggattcacttttcagtagtccttagctatatgttttaaaaccttttagatatacatcttacaatacaaaagaacaaaaaatccaagtttgcttccctccatccctgtcaat

SEQ ID NO: 159100 - DNA, 427 bp, Homo sapiens
actgtttactgaggatggctttcgtgttactggcgttttaaacaaaagaagtcagtaaatgtctcaggataggatcataggcaccatctgttgaagtggtagttttgtcaggagttaactgccagctccacctgtacgtggacgtcactgctggtacatattagccagaatttactgtgatataaactcattctcttacttaaaccattgtctgcctctcaagccaacctgtcttggtaactttgtacatagtaccacttgcaaatgacctaaccacaggaagcttttcagatgcagaaattatggcagcaatcatacagcagttttcttaatgaaatggtaccaaagccatacttggcatgatgttgaaatccacagctgatttgcttttcatgggtgccaaatgctctatactatggtaagaaat

SEQ ID NO: 159101 - DNA, 596 bp, Homo sapiens
aaagtgtgtggttacacaggatcttccgttttccaaagcccagaagcttgtcagcctgtcccacaggcctccctgactctgtcccttgaagacttggctccacccccaccactgatgctgtcccttggacttagtcttccatccatctgtctgtctctcccttgtgtgtctggaatttccacttcagtaccttcaccttcttttatgcctcttagccaatgctgccaaccttgactcccaaggccctggagggcaagaccctagcattggtagattttctttagggcatctggcaccaaggacacctttcagtcaaggtggacaagtggaggaaagccaggagctgggatggttagtcgaacaagtgttgagggactgagatgtactttccctcctcccagaaacttagccacgtagatggtatttgtatacccaacaactgaagtgaattatgatggggacacagtggctgtgagactcttggacagttgggagtttctctttggttggctgagtctctgccctggtgtcgatgtatcttggaagaggtgggttttgtgggattaaagagtggaggtctgtgggtgacaggacat

SEQ ID NO: 159102 - DNA, 385 bp, Homo sapiens
cttacagctaacattatacttcatggcgagaaactagatgtttcctttctaagataaggaacaaagcaaagatgtcccctctaccactcctgttcgacattgtacaagtccttactaatgcaataagaaaataaaaggtatacaaattgggaaggaagaaatataactgtcttttttcacaaaaaacatgattgtctatgtagaaaatataaaaaaaaaaaatcaacaaatacccacccccaaaaccaaacaactcttgaaaccaatgaagaaggttgcaggatataacataatagataaaagtcaaatgccttcctatataccagcaatgagcagttggaatttgaaattaaaaacacaccggccgggcgcggtggctcacgcc

SEQ ID NO: 159103 - DNA, 215 bp, Homo sapiens
cctggcttgctcaggtctggaggagcttttttgttttgttttgttttttaactaaataaaaaagctcctccagactgttgtaagcctttaatttctagagttctgacaaagttgattttgatggttttgccagcattctcactgcttaaggagcagattttggaactcctttgcagtctcagaagtgcttcttcccattagacctgagcaaacaa

SEQ ID NO: 159104 - DNA, 452 bp, Homo sapiens
ctttttcctttaataaactgccttcccatcccaccaacagattaccccagaaaaaaaggaaacattcttaattcctgagtaaatatatggttccagtaaattcattaatttctcaggactggagctccttttttaaaaaaatatttgccctggcaccaaaaaaaaaagtgataatattagcttcccttttgtgcagtcatgtgttaaaatgcaaaaacaagtgtccccttcaccagaccctaactaattaaaagaactgtgatcattctaaaagtaacaaaagggctcacacttttacatagacttttaatttcatctcaaagaaccttatggggacaggagccatgcaccaattcttaataaacaattttgaaaagtatacttgcagcataggaagctaattataacacagagaaaccaaaaacatctgtttcgattttaaactaaagtct

SEQ ID NO: 159105 - DNA, 426 bp, Homo sapiens
ctgataggttgccccattgagtatgatgactagagtgggaatgagtgtggtttcgaagagaatatagaatatgattatgttttgtggcagtgaatgttataatcaaaaaaatttgtaacctataatatctgtaaaagacttcactgtttgtgttcttaaaacaacaacaggccaggcgcgcgtggctcatgcctgtaatcccagcactttgggaggccaaggcgggcagatcacctgaggtcagcagttcgagaccagcctggccaacatggtgaaacaccgtctctatgttactgcattaatggatatgttattatattcatgacaattaatttcatttaaaaaaatcaaattgttgtgatagaaaccattgaaattggtttcctttggaatttcttttgagaagtgtgtcagaacatagacatc

SEQ ID NO: 159106 - DNA, 303 bp, Homo sapiens
tcatttggtttatgaaacagcactcaagtgactgaagcagaaacctgaccacgtgtaaagactgaatggctcaatctgcttcccaggcccagagggtgttttctgtggcctggcccaggcctatggtgaagccggtgctagggggtcgcctatgtgggagccagctctgcctcctgccccgaagctccagagacttctcctacaactgactctctggacacgccctcttgcttgcactagtatctcttacctgccacctgccctcctccacacaccccgatttcagggaagctcagctgctga

SEQ ID NO: 159107 - DNA, 437 bp, Homo sapiens
taaggtatatgtttaacgttctaggaccacagtaaaacatgaacgaaaaggaccgatgttgaaagaccagggagtggagaaacaacaaaaaaagcaaaagagaggaagctaggagctgcttctgaatccctgaacagctccccgcaagttacttttcatattttgtagctgatcaaaacagtctactttcccctttccttataactgatacaatccattacaaacctttggaattcattttttcccaaatctagttggattcaggttctccagcgacaccttaactttggatcgtggaggaaggtgcatttcggaggatcagtccagtactagaaaaactatatacgaggccaggcgcagtggtggctcacgcctgtaatcccagcactttgggaggccgaggcaaatgggtcacttgaggtcaggaattgagacca

SEQ ID NO: 159108 - DNA, 197 bp, Homo sapiens
gtgagcactctggttgcaaagtcattgaagtgtgatggctaaaagctcagactcttaagttagattgtctgggtttgagtttgggttttaccattgtgtgactttaggaacattactcttagcttcatttttctgcctcggcctcccaaagtgctgggattacaggcatgagccactgcttccaaccaagagtgtcg

SEQ ID NO: 159109 - DNA, 659 bp, Homo sapiens
tagtgatctaagatggggtgtgggggtatagtactcagacttatgccctaaaataacatgtatataaaacccctgacgtatcgtgtgggtgtgtacgtgtgagtgtgtgttggtatacgtcgggcaattaaagcttgtcttctggaacttagtgaattcttttctctttttcctccagaagacaaagtcaggatggcatcattgtctactcttctgctcttggctatttgcgtaacagacagagtaattctttcaaaatctgaatgtgattgtgatactcttctgctcaaaactgcccagtagcttcccatcacacttagaaaaattcggggtcctcactgtggccaacataatgttccatgacctggtcatggcttccacttcagcccccatcagcaacgcctcactccctcattctactttcgggcacctctccaggccaactgttatgaaaatgcattgttgttttaaaaaacactgtgagagatggccgggcgcagtggcttacttgaggtcaggagtttgagaccagcctggccaacatggtgagaccccagtctctttgaaaaatacaaaacatgagccagatgtggtggcatatacctgtagtcccagctactcagaaggctgaggcagaagaacgcttaaaccaggagatg

SEQ ID NO: 159110 - DNA, 467 bp, Homo sapiens
aggtaaccaggaggccaagcaagggcaaaggattttgaaggaggtggagtcagcaactgtggcaaatgtagctggcaggtccagaaggaagatggagagctggcctctggtctggtaacaaggagctccctgaggaacatgaagagcacaccctcggtacaaagatgagggccaggccaggcacggtggctcacgtctgtaatcccaccactttcggaggaaaaggtgggtggatcgcttgaggtcagaagtttgagaccagcgtggccaacatggggaaaccccatctctaataaaaatacaaaaattagccaggtgtggtgcgcgtcctatagtcccagctacttgggaggctgaggcaggagaatggtttggacccgggaagcggaggttgcagtgagccaagatcacgccattgcccttcagtctgggcaacagactctgtctcaaaaataaaaaaaaagaaa

SEQ ID NO: 159111 - DNA, 232 bp, Homo sapiens
caaccggtactgttgccattcctgactacattgcacagtgagtctgctgacgtctaagactgaaggggcttcccagatacgtgagggaagtctttcagtaatatatatgtgtatatatatatagttgtaagtggcacaagtatcccctctaatttctattactatgttacaatttaaatgtggttaatcctgtaacaatagccttaaattttgttcacagcttataattgtg

SEQ ID NO: 159112 - DNA, 311 bp, Homo sapiens
tattttgtttagtagagatggggtttcgccatgttggccaggctggtctacgaactcctgacctcaggtaatccacctaccttggcctcccaaagtgctggaattacaggcatgagccaccgcgcccagccagaaataggttcttaagcacctgtttcacatggccacattttaataaatttacttactatgaatattggagactccccactatatcacaagttaaaatttaagttttactatttagatgtagttttttcctcttaatttactctacattgaaggtttttatttcttagtatctgaacact

SEQ ID NO: 159113 - DNA, 419 bp, Homo sapiens
actgtcttcccaagtggctgcaccattttgtgttcccaccagcaatgaatgggcgttcctgtggcttcacgtcctcaccagcatttggtggtgttcgtgttttggattttggccagctgataggtgtgtagtggtatattgttttaatttgctatttcctactgacatatgatgctgagccccttttcatggcttatttaccatctgcgtatcttctttggtgaggtatctgctcagaatgtttgcctatttttaaattggttgtcccttttctttttgttgagttgtaagagttgtttgtaaattttggctcgtaatcctttcatggatatctcatttctagttattttctccaggtttggggcttgttcttcttattctcttgacagtgccttcacagagcagtttttaatcttaat

SEQ ID NO: 159114 - DNA, 605 bp, Homo sapiens
cctccccagctctgtgagctttgacaaaggaagcttgggcaaagtaccttgcctctctgcacctgtttcctcctccataaaatcaacataatacttgtaccaacctcacagcgctgttgtgaagattaaatgaggtaacacaggaaaaagcacttagaacaatgccagcccacacaggtgctaggctgcataagtcattattaactacatgtccacccaaaatgtccttctatttttgggtcctgcatcactgatgagtttcggtgacggagattagaatacaaaaaaaaacagttcttcatctgccccgggcagtaattaccatggtggcatttactcttgcttcttccttcataatacctcattttctcattcgtctttttaggaataaaacagaagctactgacaacacgtactagtgactacttccattcctctaaataataattttcccatgcaattgtttaatcatattgatatggaactcgcctagcttttagttagccggtaatttgttaacagtgtgctcttgcatgactgcatatttgttcttaacgataagctttaaagtgcttctggctgcagtggcttacgcctgtaatccc

SEQ ID NO: 159115 - DNA, 305 bp, Homo sapiens
tgtgcttgaaatactcccagcccagaaaaaaatccaaattaagtcctgcctgtggcctgcaaggctgtaccatgagctgcttctctgacctcagtacacagctctacccagaccatggatgcctaggtgtgccatgacctgactgtcaggactaagccaacttcaatgtgacttgattctgttgacctaaaaggaagaagctggggcaaaattaacataaatagggagtgttttggggccaagcttgaggattgcaacccgggagcatagtttcaagttaccctgaatatacactccaattagcg

SEQ ID NO: 159116 - DNA, 424 bp, Homo sapiens
atgttttcccagggatcagggtcacacaaaggacaatggaaccacagaggactcattaagcaggagaaatgtggctgctaccatggacaccatgggtgggagggctgcgttcctcttgcttccaatcttctaccagtgcctcccatcagctgaagccagttgtgggtaactggaaatcatagcctgcagggacagcctccttggaaaaggaagagaaactagtggatctgacggtgagaaccgagcaccaacatatgccatgctccaatcacatgcttgggatcacgtgccccactccaatgacgtgcttggaatctatccataaactccttggtgctgtgggaggtgattcatctgaggctggaaggatgcactcatcttgctcattgcagtgggttgaatgatggcccccaaaatatatgtc

SEQ ID NO: 159117 - DNA, 340 bp, Homo sapiens
gcggcccctactactactactacaaattcgcggccgcgtcgacgtttaagggttggggtgcagggagctcattctcacagcaaggaagcttagctgggagcgtggtcatttgtgtattcattcagcaagtacttccatgccttgcagtatttgtgttcttaggatatatcagtaaataatagcctatgctgtaatgctgaggttatagttaatagataagcataacaggtaaactctatggcaatgttagaatgtggtaaacactggaaaaaggaaaaagtaggacgagcaatgtaaggggattgggagtattagaggatgggagtggtttacaagttta

SEQ ID NO: 159118 - DNA, 235 bp, Homo sapiens
ccctgaaaagatgtccctgtcctcatccctggaacctgtgaatgcggctttatatggcaaaaaggtaagggtgtttgcaggtgtgattaaatcaacagttgcactggagaggtcagcgaggattatcagagggaccctgagtgcaacggtgaggattatccggggggcctgagagtaacagtgaggattatccaggtgccctgagtgtaacggtgaggattatccaggggggccc

SEQ ID NO: 159119 - DNA, 381 bp, Homo sapiens
cccgtgttagagcggactgttgccgtgagctgtgctgtaggtcacagacacagcttggatcccacgctgctgtggctctggcataggccggcggctatagttctgattcaacccctagcctgggaacctccatataccacaggaagcggccctagaaaaggcaaaaagacaaaaaataatcaatgaagtgtaaataaaaaatatagttagaccagataagattggtacaatttgagaaacctggtatacatgtttctcaaatttccttgcccacagacgtttattaagaggacctactaatttcctaggactctgcagaatggcctcaaaaatgttgccttagacagcaagcatcctcccttgctagaccactatggtgtg

SEQ ID NO: 159120 - DNA, 186 bp, Homo sapiens
atgttgcccaggctggtctcctgggctcaagtgatgcactgcacctgacttagctttccaaagtgctgggattccaggtgtgagccaccacacccagcctattttgttctttttctaatctgtcaagttcttttttcttcttcttttgattttttgtaatttccacttttctgtccaaaattttaa

SEQ ID NO: 159121 - DNA, 431 bp, Homo sapiens
taaaaatgtacccatgaattgtgacagatgaacacatcccaggtccccaataacaacgtcttgaaatgactgtgtggtctcacccgcatcttgtttacacgaacactacttaagaggcctctgagaatactgctgtaacagaatctatgggagtcatgaatcgctgttcagaaataagtgctgcacacaattctgatgcctgcaggtctgcaccagggcaccaggatgccggctggggaggggcctgctgcaggctgccccacagctctggcagaagggacaggagaagaaccctcaaggacccgggtgagccgttctctgctgccatcctgggatgggaatatggaggcggcagccagtcagcattgagcctcacaacctgaggaaaggcaggcccgggggagggctgggcctgcaaagtgtcctgccca

SEQ ID NO: 159122 - DNA, 186 bp, Homo sapiens
catagaggaggaaccattgcctgattttccaggtgaaggcagtgtgtgggtaagatatttgggacatgtgaagtttgatatgcctccaggatagctctacttgcatgacgacccggccttttaaacttaactgggcagaacagaacctgttcttctcctaggccccctatttcaataagtgatacc

SEQ ID NO: 159123 - DNA, 106 bp, Homo sapiens
tagtattaacaggctgaatatggtgtttttttcccctcacaggatctaggtgtggtgatgaacaggaataagtctaattaaattgtgtatgctataacagtctgct

SEQ ID NO: 159124 - DNA, 550 bp, Homo sapiens
aagtgtttcccaaggaatccggatacattcattcatgtatttatgttttcatatatcatatgtcatgttttataaattaaggacagatttaaagctacagttttcatcttctttttaaaatttattttagattttattcatgttctatgaataagccaaaagtatcattagaaagctcttcaggctgggtacggtggcttatgcttgtaatcccagcactttcggaggccaaggcaggcggatcacctgaagtcaggagtgatctgcccggccaacacggtaaaaccctgtctctactaaaatacaaaaattagctgggtgtggtggcacgcgcctatagtcccagatactccggagattggggccgaagaatcgcttggacgcaggaggcagagtttgcagtgagctgagattgcgccattgcactccagcctaggtaacaagagcgaaactcttgtctggaaaaaaaaatccaaataaaacaggtgaaacatttaaaataaccaaattagatcattataaaagaaacctacacagaccaagggaaaca

SEQ ID NO: 159125 - DNA, 190 bp, Homo sapiens
aataacgtcactcgtgctcacactgattcaaggcactcatacacatttacacaaatgctcacaatcgcacacttacacttgtgctgccacccatacttcctcacactcatcaagcctcactgacttacacttcatctcattggcacacccagtaatcccctcacactcacactcatgcctccctcgtgct

SEQ ID NO: 159126 - DNA, 241 bp, Homo sapiens
tatttcttccctctttccccttcttccttctttccccttcttccttctttcctttctcttccaataattttactagaatgtcttggtattggatatttggactccattttccaaggtgtttagataatctttcaatatgtcgtttcaagtatatgcttatttcaggaaacctttcctgaattatacatcttgtttgtttggatctattccttttgattttctttttttttttttttttttt

SEQ ID NO: 159127 - DNA, 2927 bp, Homo sapiens
  misc_feature (153)..(153): n is a, c, g, or t
  misc_feature (247)..(247): n is a, c, g, or t
  misc_feature (2118)..(2118): n is a, c, g, or t
  misc_feature (2121)..(2121): n is a, c, g, or t
  misc_feature (2162)..(2162): n is a, c, g, or t
  misc_feature (2304)..(2304): n is a, c, g, or t
  misc_feature (2625)..(2625): n is a, c, g, or t
taaggaaaactcctttttgcgggtaccattattacctactagtttacatatgaggacattgctgcttggagaaattaaatcatttacccaagttcacaggtcaataacaacagaccctaacccatgagccagtgctcttaataccagtgatcntaaccactgtgtagtctttgctatgttccattaattgtccagggatattattataggtacagtttgtcttttgggagaggtaccagaatttctntcttaagtattgcttaaaccttaccagtcaacagcctttctttgcagaatgaggaaagcatttagtgcccatactgttttcgcagacttaatggagcaggattttgtacatttctttgtggaagctgttcagagaggtgtgtgtaaggggaaaggaagcagtgggaatccttcaccctggtcaggggataaagatctcctgatagactaggaggtgtctgtcagtcactaagattgaaatcttagaaggagtctatttctgtgctggggttccgtccccaaggctggcaacattcacattcctcggcagggaagcgttgtttagaggcatcaacccgtgaagggttccatgaggcctggcactatctgatgtgtggtgtgtatgaatgaagcctctttcctcaaagctgaaatcagtttgagaaaactggaagaatgagtcatttgaggttcttctctctgaacgtgtctacacttgtctctggctgattctatacttgcatagttgtaagtatactgtatagattctatacttgcaaatgttgaaatttcactatgatcttgagtagggtgaaagagaaagacatgatatccaaacccctctccccctgccccattctggtgagtattcaagtttaataaaaatatatgaaaaaggccagattcttttagaagggctttgcttctatctgttgcaacctgtgtctgaacaggtagggcacgctggacgtggatgagcttcctttaaagaaccatgctgctagcgtgaacctcatccacacgctcccttagtgggtcctctcagtttctgtctggtaactggacataggcctcgatggtttcatctgtccagaagggaaaagtacaatggaatgggagcaggttggtatgcagacctgtggaactaggccactgacctacttccttccagctggagtgatgccctttcagatctgactccagccatgtggcacctggttgccaatcactgcccagattggcaggttcctccctgactcaggccattcatctaagtggatgtgactgtttgtaagctcgttggggtgcctcataaactagcttgagaatgtgtaaggcagaggggcctggaaacatagtggctaaatttaaacagtcattcttgctgtatgtgtagacataggtgtagacagaggtattcaggccacaactacatgctaacttgtatggtattctaaataaggtatttggatgatcactggcatttatttactgaggtttcctatgcagagcccagattcctgacttcttgtaacaaaccaaaagatgtagtaacaccagcccctctcccatgctggggtcaagtgcccatttagatggggcttgtcaaagctgtctgttagggatgcattcccacccactccctagtgtttgagtccctgcctgcttcatccattgaatccattgaagcaactgcctggcccctatgggcatttgagtttgcaaccctgatggaaagcgtgtcctgaaatagatgtactggtatacacaagtatgtagacataatctgtattgacacttactcctgctgaggaatgtgcagccagatttctggaaagtgccagtttttaaaatcccttcaatgatttaaacctgctggaagctgtgcatcccatctaaacaatgggatccatagagaaacatactcattggagaattacgaggcatataattttgtctttaaattcttatgagtgaattgtaagaacatgacttcataggaacctctgagacattacagtgttttaataacactttgctgctacatgcagtggttcatttttacttttattaattttttttttcagtgtgtggcagcaggtgccctgggcnccnagccctatctctagcttcatcctcctctgcctctgggaagncgcctggctccctccctccttagggcagaggctccagggggcatgtcttgtctgcgaagagtttacgaggtttcacccactccttcattcttgaacatgctttttctctgcttattaccctccctgtttcctcctgggctgncaacaacatattatattacctccatctgcaaccagagctgctaccaccactgtgcccgagcctgaattttcatagttatattaaaaaaaatcaagggtgcccacaagtgacagcagcttttatggaagccagtcttagcaagatggcagagcacccatttctccatgaggcccaggcttctcagagaagggcaagaactgtcttctgctttggccatcgtgatgacacattgaatgcctgaattcattcactcactcactcactcactcactcactcactcactcactcacctatgagttgttttcaatagatacttgtangtgttaaaagacacacataggccgggcacggtggctcacacctgtaattcccagcactttgggaggccaaggtgggcggatcacctgacggcaggagtttgagaccagactggccaatatggtgaaaccccatctctactaaaaatacaaaattagctggggttgggtcacgtgcctgtaatccgcagctacttgggaggccgaggcaggagaatcacttgaacccaggaggcgggggttgcagtgagctgagattgcgccactgcactccagcctgggcaacaagagtgaaactccatctc

SEQ ID NO: 159128 - DNA, 1170 bp, Homo sapiens
agagatgggatcttgcttggttgcccaggctggtcttgaacttctgggctcaagcgatctgcccttcttggccttccaaagaagggattacaggtgcgagccaccatgaccagccaatgacatgtttttaatgtaaaaattctacactaccacacccagtccagccgtatgttcatcttttacgaaaatggctcagtgagcttcactgtggccattctgcccttccaggtggaacctgatttatttaccatcattccaggatgggaaatctgaactctatcagtcagctctgcagccaggaagcgtctgccgagccacctaacaggcttaacagaccacacctgaccagccgaggagcccccaccaggagaggagccggttgaaatgtatggtctcccttagaaaaagccttgaaaacatcttttcatgtctgagaaatctcaccaacaaatttctccttttcatcaccaacagggattttgtagtccacttccttgttccggaagaagtggaatggctggaaagtatcaaaaatgaagtcccccaggtactcatccatgtagatggtcaggatgcggcgatcaaagctgtcgatggcccgtcctccatacatgacctgaaattagagggcctgagagccagccaggagctcagaacctactgtgtgcaccctgggggcccggggccagaggctcacccagggtcaagagactccagcagcctggctgctgcaaggcttgaacctgttgacttgcataacctttcgggccactgttcacacaattgatctgtggctttgctggcttcccaagggatagggcccaaagcagtaagaagccctcaggaagtgttgggagctcctgtgcagcaggcaaagtcccccaaacacatcaaacaaacagctgaagaagccagcagctgcttctgtctttggaattgatgtcactgcctgagccgtgtgcagaccaccggggatgcttcctgtgagctctgtatacagcaacagctgaggcaaggggctagaggatgccttgcctggatccccagccatggatccagctcagggaacctccatgtgaacagagctcacttaggacaaagaacaaccaggtgagagcagagagaattgtcacagaaacccaaggggtatgctctgatagggatcctcta

SEQ ID NO: 159129 - DNA, 510 bp, Homo sapiens
cgggtggatctccctccttcccgcgaatcccttatggagcatggaaggataaaatataaagagtagataacaaataggcagatgccaagaagataagattaatcgtgagtcgtaagcaaaccagttcaatgcatacgtcagggtgttgataattcttaaggcaggtgatgagttcaccacagataactcttggggcactctgcttcatgtttccttgggtttagaagacacttctaaaattgagtgaccatgcctcatgaccttatatttgatgagccttccttttaggatcagttttatgccctgacagcaagcatgtgtttagtctcgctgtcatttactgttttggtctcacgtggaagcccacctgcgataaaatgggatccaagaaggactgctgtctgctttttgacttgagatccttctaggctgcagatagatgtgttgatggaatttgttgccacattagcatggcctgatagtgttaggtgaaacatacgacaacgaaaa

SEQ ID NO: 159130 - DNA, 354 bp, Homo sapiens
cgggtggatctccctccttcccgcgaatcccttatggagcatggaaggataaaatataaagagtagataacaaataggcagatgccaagaagataagattaatcgtgagtcgtaagcaaaccagttcaatgcatacgtcagggtgttgataattcttaaggcaggtgatgagttcaccacagataactcttggggcactctgcttcatgtttccttgggtttagaagacacttctaaaattgagtgaccatgcctcatgaccttatatttgatgagccttccttttaggatcagttttatgccctgacagcaagcatgtgtttagtctcgctacccgctagggcccgcagagga

SEQ ID NO: 159131 - DNA, 202 bp, Homo sapiens
acaaaactcatctatctttcatggtaatagtaaatatatatatacatagaggacttggatagaaaatttatggtacattcatatgatagaatatatgacagtcattaagaaagattttgatatataagaaatgatgtagaaagaagtccaatataaataaatagaaaaatatttcaagaataatacatattatcccaattgt

SEQ ID NO: 159132 - DNA, 382 bp, Homo sapiens
tgtctaataaaatctctcctcataattagtatctgactccttttctaccactggctggcatctagaggcaggtagaggcacaaaatggcatttgttttttagttgtcccatttcatgactttatggatcatcccctctttgagccttcatgacctaagttctgagacttaggaaactgtatacttcctaagattctcttctgcagaagttataatagatttcagatggaagatgtttgggatctcaacaggacaaagaggacacatcattttaaggcaataataacaagccattcttcatccttaattgacaacttaatttagattttagacgagtcccttttagtgatgtcctattttaatttcaaccccaaatgctgata

SEQ ID NO: 159133 - DNA, 197 bp, Homo sapiens
gaggtactggtggtaagaggtataaactggaatttataattgaatctactttctttgtatctgaaagaaaaatattttggttaattatgggcatataatttagctaaaaaattaccttaaatgttaagtggtccttaaggcatttataacagaactttttcagaccctagaagtctaaactgggaaattatttaaaa

SEQ ID NO: 159134 - DNA, 241 bp, Homo sapiens
agaagattcaaagcataaagatgtaaaatttccccaaatgtatttataaatatacagaaatattcaaagtcccatagatgttttctatggaagagcacaagcagatggtttatagggaaaagtgtatgttcagaataatacaatttttcaacaggagaaaactgaataaggattacgctctaacagatattcagtaacctaccctgattaaagaagtgtggtatggatacagaaaatgaca

SEQ ID NO: 159135 - DNA, 394 bp, Homo sapiens
gctgtaacatgactttaaaaggacacacagtcctctttctgtattatttcaaagttttggatattttttcttaacagcagacagaggcagtcggggtgaaactgtgggattctagccagagagctcaacacagagatggtgaagacagagttggtacagcagggcttttactgtccaagaccactgccccggccgtgcttccagcccaacctcatctactgggccaacccctccctccatctagaattccactctggttattaagaccacctgggcactggagtcccagggggctgggatgcccaaggcctcacctggtgctccccgtagtgtccagtcttcccgaggacatgcaggctggtgtgtacatgtatgtgtgtagtgaggattcttg

SEQ ID NO: 159136 - DNA, 306 bp, Homo sapiens
gtacggtcacgtatggtgcaagtatgggcatgtgtgatgcaagggaggctgctgggcagctgcctgtgcaggcaccggggacaggaaggtggatagggcataatttgtgggggaaaaggcatgtaaacatgtattacaacataagagagtacgtgtagcgggaatgtaaatttgtacaaccttctagaaaagtcatttggcaatacagatcaggaacttcccagatgttcccaaatatcttcggaaacaattatcccatttctgggaatctaacttaagagagtaaccagaacaagggagaacaag

SEQ ID NO: 159137 - DNA, 478 bp, Homo sapiens
gggctgctttaaatgactgtgaatttctaacaagtttcctgatacggccttctttttccaaaattttgtcgctatcattttatcatgtaggttttcttatcaatatgtcaagttttctacaatacaacactagaagacactgacttggggaaaattagtaaattctacaacagtgactgtctccatccagaaaatacattgtttcatctcgtttattcagatctcactttatgtccttcattaagattccagtagctcaccaatatttgttatatttatttctaggtagtctttttagagaaacatttagtagtatatatcagaatttaaactgcacatagcctttgcctcggtaattccatttttaagaatctgatatacagtaatatatgtgtacagatataaaaaggctactattccaagaacaaaatcctggaaacaaatgtctatcaagaaagcaaagataatctaaacagca

SEQ ID NO: 159138 - DNA, 596 bp, Homo sapiens
tgtagggacagggtcttactatgttgcccaggctggtctcgaactcctgggttcaagtaattctcctgtctcagcctctcaaagcactggggattagaggcatgagctaccgcgcctggctgaaaaatttctttaaatgtctctcaaatagattataactagttttgtttatacaatcctatataataatgtatgtaaactatgtaacgtatctaataatgcatttttaaaatttttataaagtaatcatatgcagaaattaaaatactccagtgtgtctctgcttgggaaaatcgagcccatttatagagagccagtttactgcctgtttctgttacttatcacatttgccctttagatgatccttctgagttcttcttactctttaatgttctcccaattaattttcaacttattttctgagtatatagacaaagatatttctatcctctctttttgattgtgtaaacattgtttttacttcttgtcaatagtagagaaacctctgaaataattagcatattctttctatagattttgccagtatgcattgattatttcaggcttatttgcatttcctgtatggggacaggatg

SEQ ID NO: 159139 - DNA, 932 bp, Homo sapiens
gcgagctaccggcgcagaagtggtggcacacgggcgccctctaccgcatcggcgaccttcaggccttccagggccacggcgcgggcaacctggcgggtctgaaggggcgtctcgattacctgagctctctgaaggtgaagggccttgtgctgggtccaattcacaagaaccagaaggatgatgtcgctcagactgacttgctgcagatcgaccccaattttggctccaaggaagattttgacagtctcttgcaatcggctaaaaaaaagagcatccgtgtcattctggaccttactcccaactaccggggtgagaactcgtggttctccactcaggttgacactgtggccaccaaggtgaaggatgctctggagttttggctgcaagctggcgtggatgggttccaggttcgggacatagagaatctgaaggatgcatcctcattcttggctgagtggcaaaatatcaccaagggcttcagtgaagacaggctcttgattgcggggactaactcctccgaccttcagcagatcctgagcctactcgaatccaacaaagacttgctgttgactagctcatacctgtctgattctggttctactggggagcatacaaaatccttagtcacacagtatttgaatgccactggcaatcgctggtgcagctggagttgtctcaggcaaggctcctgacttcttcttgccggtcacttctgcgactctacagtgatgtctttcacctgcgggaccctgtttcaggtaccgggatgagatggcttgatgagtgccttctggaagcctagggggcccgcgctgggaagagcgtccgatcccggttgtgcactcgtggacggccggagaccggccccttctttcggcgagagcggaggggcatggggcccccggcggctatccggagagttgtagctgggc

SEQ ID NO: 159140 - DNA, 1050 bp, Homo sapiens
  misc_feature (961)..(961): n is a, c, g, or t
  misc_feature (980)..(980): n is a, c, g, or t
  misc_feature (986)..(987): n is a, c, g, or t
  misc_feature (1003)..(1003): n is a, c, g, or t
  misc_feature (1008)..(1008): n is a, c, g, or t
  misc_feature (1013)..(1013): n is a, c, g, or t
  misc_feature (1020)..(1021): n is a, c, g, or t
  misc_feature (1025)..(1025): n is a, c, g, or t
cccacccttaggcgctgggagaagggagggtggggaggtcagggcctctcagaggggcctcacttgttaacccagcccccatttcaggtctgaaggggcgtctcgattacctgagctctctgaaggtgaagggccttgtgctgggtccaattcacaagaaccagaaggatgatgtcgctcagactgacttgctgcagatcgaccccaattttggctccaaggaagattttgacagtctcttgcaatcggctaaaaaaaagagcatccgtgtcattctggaccttactcccaactaccggggtgagaactcgtggttctccactcaggttgacactgtggccaccaaggtgaaggatgctctggagttttggctgcaagctggcgtggatgggttccaggttcgggacatagagaatctgaaggatgcatcctcattcttggctgagtggcaaaatatcaccaagggcttcagtgaagacaggctcttgattgcggggactaactcctccgaccttcagcagatcctgagcctactcgaatccaacaaagacttgctgttgactagctcatacctgtctgattctggttctactggggagcatacaaaatccttagtcacacagtatttgaatgccactggcaatcgctggtgcagctggagttgtctcaggcaaggctcctgacttccttcttgccggctcaacttctccgactctaccagctgatgctcttcaccctgccagggacccctgttttcagctacggggatgagattggcctggatgcagctgcccttcctggacagctatggaggctccagtcatgctgtgggatgagtccagcttccctgacatccagggctgtaagtgccaacatgactgtgaagggccagagtgaagacctggtcctcctttcttgtccggcggtgagtgaccagcggagtaggagcgctcctactggntggggcttcccgcgtctcngtgggnntggatcttttctattncggcntgggnacgatgnngttnctgggggctcactgggggtggggcc

SEQ ID NO: 159141 - DNA, 869 bp, Homo sapiens
cccacccttaggcgctgggagaagggagggtggggaggtcagggcctctcagaggggcctcacttgttaacccagcccccatttcaggtctgaaggggcgtctcgattacctgagctctctgaaggtgaagggccttgtgctgggtccaattcacaagaaccagaaggatgatgtcgctcagactgacttgctgcagatcgaccccaattttggctccaaggaagattttgacagtctcttgcaatcggctaaaaaaaagagcatccgtgtcattctggaccttactcccaactaccggggtgagaactcgtggttctccactcaggttgacactgtggccaccaaggtgaaggatgctctggagttttggctgcaagctggcgtggatgggttccaggttcgggacatagagaatctgaaggatgcatcctcattcttggctgagtggcaaaatatcaccaagggcttcagtgaagacaggctcttgattgcggggactaactcctccgaccttcagcagatcctgagcctactcgaatccaacaaagacttgctgttgactagctcatacctgtctgattctggttctactggggagcatacaaaatccttagtcacacagtatttgaatgccactggcaatcgctggtgcagctggagttgtctcaggcaaggctcctgacttccttcttgccggctcaacttctccgactctaccagctgatgctcttcaccctgccagggacccctgttttcagctacggggatgagattggcctggatgcagctgcccttcctggacaggctggagtgcagtggcatgatcttggttcattgcagctccgctcccaggcgaagtgatcatcca

SEQ ID NO: 159142 - DNA, 1167 bp, Homo sapiens
  misc_feature (1078)..(1078): n is a, c, g, or t
  misc_feature (1097)..(1097): n is a, c, g, or t
  misc_feature (1103)..(1104): n is a, c, g, or t
  misc_feature (1120)..(1120): n is a, c, g, or t
  misc_feature (1125)..(1125): n is a, c, g, or t
  misc_feature (1130)..(1130): n is a, c, g, or t
  misc_feature (1137)..(1138): n is a, c, g, or t
  misc_feature (1142)..(1142): n is a, c, g, or t
gcgagctaccggcgcagaagtggtggcacacgggcgccctctaccgcatcggcgaccttcaggccttccagggccacggcgcgggcaacctggcgggtctgaaggggcgtctcgattacctgagctctctgaaggtgaagggccttgtgctgggtccaattcacaagaaccagaaggatgatgtcgctcagactgacttgctgcagatcgaccccaattttggctccaaggaagattttgacagtctcttgcaatcggctaaaaaaaagagcatccgtgtcattctggaccttactcccaactaccggggtgagaactcgtggttctccactcaggttgacactgtggccaccaaggtgaaggatgctctggagttttggctgcaagctggcgtggatgggttccaggttcgggacatagagaatctgaaggatgcatcctcattcttggctgagtggcaaaatatcaccaagggcttcagtgaagacaggctcttgattgcggggactaactcctccgaccttcagcagatcctgagcctactcgaatccaacaaagacttgctgttgactagctcatacctgtctgattctggttctactggggagcatacaaaatccttagtcacacagtatttgaatgccactggcaatcgctggtgcagctggagtgtgagtaccatgctggtgggaaagggggcagatgggagaagaaagggttgtggggagacagaggcagaggtgggttatggggctcactggagtgtctctccctgtagttgtctcaggcaaggctcctgacttccttcttgccggctcaacttctccgactctaccagctgatgctcttcaccctgccagggacccctgttttcagctacggggatgagattggcctggatgcagctgcccttcctggacagctatggaggctccagtcatgctgtgggatgagtccagcttccctgacatccagggctgtaagtgccaacatgactgtgaagggccagagtgaagacctggtcctcctttcttgtccggcggtgagtgaccagcggagtaggagcgctcctactggntggggcttcccgcgtctcngtgggnntggatcttttctattncggcntgggnacgatgnngttnctgggggctcactgggggtggggcc

SEQ ID NO: 159143 - DNA, 141 bp, Homo sapiens
aggccccagagaactactgacagtttctgaggcaagctgatctatttcaggaagtgctacaccaggaagataaacagggtggtattctgtagatagatgacggtagagccagggagaccagatgaggagcacctgccataa

SEQ ID NO: 159144 - DNA, 753 bp, Homo sapiens
aggtccaacagataggtatggttgccaaaaaccagacaaaggaggtcactgtgcccacctgaagtgggacattggaaagttgccaagtagatgctgtggaaggcagcacaagatcaagggtagctgaacacctcagcacataaagaatctttccaggaaccatgagaagaaggaagagcttgaacagaagtggtgaggtccatgcagtcggaagggctttggtgtggaaggagctggggctcatgcaataattcagcagtctctgggacaggatatgtgctcaaggtatatgaatgggcatgttgagttatgaccatccttcccatcgtggctatgcttatatgacttcgggggcaaagctaggtccaaaatatggatgtgccagagaataggctttggataatttatagaacgtcttctcagctggcgctttgcagtgatgcgctgggctgcctctttgggagggaaagggcttatggattagacagccctctgagggctcacagagaggggcttctatggtgggaagtgcccttcacactgagaatcgtgattccaaatgaagggtgtctaagtaatgatgatgactccatgttggatggttaagcatctgccactgtgggtcacctcgcccatgtatcagggaggatcaaagaggaccctcgatcatggccacacagctagcaagaggaaggcaggactggcccagggattctgattccacatcaacagagtttttaacatccccagagt

SEQ ID NO: 159145 - DNA, 331 bp, Homo sapiens
ggttacatggctagtcaatcctggagcagccctcaaacccaggcaggctggcccgtgaccacgtggtcatagtgctggattacagatgggcagatggaggctctaacaggtccttcccaggaggtggcaggaccaggactggagccctcatctttaccactgtgtccagtaaacatcacaggcacggccatggaaggcagcgggggtgtgctgggcacttctccaggtgtgaatctagcctggctacactgaggacagggcgtgtaagccaggagttgaaggatgagtgggaacctgcaaccgtggggtggaagagcctcctgggaggagg

SEQ ID NO: 159146 - DNA, 461 bp, Homo sapiens
gtattccgtggtgcacataacatatactacattttctttatccactcgttggttgatgggcattgaggtcggttccacatttttgcagttgcgaactgtgctgctataaacgtgtgtgcttgtgtctttttcatagaatgacttctttccctttgggtaggaaccccgtagtgggattgctggatcaagtggtagatctacttttagttctttaaggaatctccacactgttttccatagtggttgtactagtttacattctcaccagcagcgttggaagtgttcccttttcaccacaaccatgccaacatctatttttttttatttttaaaattgtggccattcttacaagagtaaggtggcatctcattgtggttttaattttcatttcccttgggcaagttttaaacagtcacacatctcagtgtcctcatctgtcaaatggggtgatatggtttggc

SEQ ID NO: 159147 - DNA, 286 bp, Homo sapiens
tgggatggaaacactaaaatatgatcgataacagttatacagcttagagtctttatttactacctcctaattaatttcatttggataaggatccaaatttctgtttcaatttacttttcttccagcatttgcttatattagtacttggcaaaaggtagtttgtagaaaataaatgtgttttactgaaatagtaatgcttatcttggcaaacccttttctcaggaggaaggcaaagctaacagcaattgcatttacccgtggacactgatctaaatggacatatttc

SEQ ID NO: 159148 - DNA, 263 bp, Homo sapiens
tgctgggattacaggagtaagccaccacgcccggcccagatttgtacttttgaaagctctcactggccacagggtgaagaatgggttggaagaggagatcggaggctgtggtaaaagttcaggagagagtatttcttagagcagcctcctgagcacattcattgactccctctggacggcagcttttattgagcacctactctgttccaggccgtgtgctctgtgttagctgggagattatcaaattctcttcctgagctggg

SEQ ID NO: 159149 - DNA, 571 bp, Homo sapiens
tcagcagctccctgtttgcagaacataaagacttaactcctgcctggtttttaggggtcccaataatgggattctgcccaacccatccagttctgggtacaagtactgcctgccttacaatctccattcaggtaaggccagggctcctaagagcaggtttggggtccccagcaaagaggagtggctacaaatccatgcgtgactttgtgttggtgaaaaacctgggccccgttgccaggcccctttctggaccccacctgaatcatgtgtactgggcttcctcctgggcactgcctccaatgcagggttgtctattcctgctcatgtcatgcgacgaaaaggaaatgttggacatacatttccctagcagaatccctctttccctgtcctcgattttcattgatcccatgttatttctgaacattcatgagtcacgcatcagatacatttaatatcagatcctaatttaaaaagtaaatgctactcttccaaaagtacacatgatgtggtcactatactgggtcataaagatgtatgggttttcagttagttagacttagaccgttttgga

SEQ ID NO: 159150 - DNA, 637 bp, Homo sapiens
tcaaaaatttaaaaagcatataattaaataagtcttaaaatgggaaccaaaagggaaattctaaactgggcagtgaataacattgtgtaacaagttgtggaaagaaaccaaagcagtactcaaagaaaaaatgatagcatgttagcctgaagtagatttattagagagcatgaaaaactggaacctcttagctttagacaaggactctcagaatagaagaaacttggattaacagcagctcatatagaagagaaacatggagattttagctgacaagcccaatatgcactccaagtgggatatggctgctacacagtatgattccaggttgcatcaacagaagtataagctctagatccaaggaggtaatagtctccttcctctttgaccaaacaaacagtctttgcgtgggactccaaccagttgactcatgtgccaaggcaggccaaacttataatttcctgagtcagggagaatacctgaaataactacagttgtgtagtctgaataagagaagtatccgagtttggagggagatggtcactacctccaagaggcagaaacagactcagaaagtggaagctcctagaaagctaatttgggctgggcacggtggctcacacctgtaataccagca

SEQ ID NO: 159151 - DNA, 454 bp, Homo sapiens
ctctacgaggatcccctccataatgtgtgccatcgaatatctcatgcaatttatagaatactctatggattttatttaccttatctttgagtttgttgattttttttttccttctgcctgctcaagcatgccattgaaccccctcttatgaacaagtaatttcagcttgtattagtttggcagagctaccgtaacaaaatactacaggctgggtggcttaaacaatggaaatgtattttctcacagttctggaagtgggcagtctgtgatcaagatgttagcaggtttgggttcttctgtggccttcttcctcagcttgcagacagcctccttctcactgggcccatacagagtcttttcttcgtggttgtgcatccctagtgtctctgtgtgtgtccaaatctcaccttatagggacacccatcatactgtgttagggcacatctaaatggac

SEQ ID NO: 159152 - DNA, 355 bp, Homo sapiens
ggattacaggcatgagccactgcacccagccgaacatctgtttttcttaaaatgtgactcatgagaggtctaagggaaagatggggtcttaggggagggagagtttggaaaccactgacccctgcagctctgctctctgctttggcttttcctgttggtgtcaatggtgttgtcaccaatgacagagctggggctctcaagccagatagccctgggcttgcagcctgactcctccactgcccctcagtgtgacctggacttttttagctcacctctctaagccagcctctatttcctcatctgtaaaaggggaataataatgggacttgtaagtagttaggaggatttaatgaga

SEQ ID NO: 159153 - DNA, 358 bp, Homo sapiens
ggtgtcaggtctagcacgctcactgaagattggattcacctgctgggtgatcggatgaaggtagttctcctgctcaactctttgagcttagctgctcccacataggtacacgtagagcggatccctcctagtatgtctcggatggtatgttccacatcccctttaaaaggaacttccactgtctttccctctgaggctcttaaagtaggaaaaactttattatcttctccttctggattccttaagcccggcctggcatgtcagggcaagtgatatatgggaaaactctttacatgcaattttgctatgaaccaaaaactgctttaaaaataaagtcgatggccacgcgcggtggctc

SEQ ID NO: 159154 - DNA, 173 bp, Homo sapiens
aggacaagcaaatgcccaagaaaagatatctaaccaatacaggcagtaagcatctaggtcccagcaagggaatacaaagacaggaccccatttctagctggaatggtctcctcatagaatctcagctctttttaaaaacaacaacatagaactggtttttgttgagccaccca

SEQ ID NO: 159155 - DNA, 297 bp, Homo sapiens
aagaaatgtagcaaagccttcagtcatccccgctccatgtgaagacatcaaagaacacatattggagagaaatcctataactgtaaaaaatgtggcaaagccttcagtcaacacagttcccttagaagacatgaaagaactcatactggagagaaacccaatgaatgtcaaaaatgggataaaggcttcagtcggttcagttacctccaaacacatgagagaactcatactggagagaaaccttatgaatataaaaaatgtggctgggcgcagtggctcacacctgtaatcccagca

SEQ ID NO: 159156 - DNA, 632 bp, Homo sapiens
tgggagagcacagaacccaattgcccactcccagtgagcacttttcatcttatgattcagcccctctgcccataagcaccacagaatccaagctttaccagataccatggcacatggacctttcctctttaggtgaatttcaaaattgccactgtcaacttgggacaaaatagcaaattgtcacagccagacatattaacttggggaatggaggaaatcattttaacacaatagaaaagtagactgaataagtaagaataaatacagatgggagaggtctgcagaatgcccggagtctggagcatttcttgtacctacagaagtgatatgtgaagacatcagacccatgttgttgaagcaaaactggatgggaatagttactccctacatttgcccacagacccctcaggcaacaggttttcttttggggacatttattctccttcttcattttttgaagggtgcccttgttagtcatttaagtcagttgtgatctggtaaaaggaacacataggaccaatgaagagaccctttatcctccaggacagtgtgaagggaaagactcaccttagttgatccaccggggagaggaggagcaggacataaagcctttgtgctggtttaagccaagt

SEQ ID NO: 159157 - DNA, 387 bp, Homo sapiens
  misc_feature (21)..(21): n is a, c, g, or t
catcagtttacacaatatcantagtaagtcagctcagctaatcttccatcttaattcatcaaagagtttcatcgttctttaagaagaaatgctaaagaacagacttttacattgtcattggtttcattaaacaaaaaaaaggcgtggccagttgcagtctcatgcctgtaatcatcacatttcatcttcacaaatctcctttaggggttgagtccttatgatatattctgattagatttttactttgtttagttttatgaatgttttctaatttatttttattaattttattaaccacaattatcttttttgtttgtttgtttttttaagggatcatctctttttggagagggaattttttttttctttttatggtgtaaactgatt

SEQ ID NO: 159158 - DNA, 719 bp, Homo sapiens
  misc_feature (21)..(21): n is a, c, g, or t
catcagtttacacaatatcantagtaagtcagctcagctaatcttccatcttaattcatcaaagagtttcatcgttctttaagaagaaatgctaaagaacagacttttacattgtcattggtttcattaaacaaaaaaaaggcgtggccagttgcagtctcatgcctgtaatcccagcactctggaaggctgaggctggtggactgcttgagtccaggaattagagaccagcctgggcaacatggtgaaaccccatttctacaaaaaataagaaaattagccaggcatgatggcacgagcctatagtcccagctacttgggaggctgaactgggattacagacgtgcaccacgctcaactaatttttgcattttttgtagagatgcggttttgttatgttgctcaggctggtcctggactcctaggtgcaagcaatccatctgcctcggcctcccaaagtgctggcattaattacaggaataagccaccatgcctggacaaaatcatcacatttcatcttcacaaatctcctttaggggttgagtccttatgatatattctgattagatttttactttgtttagttttatgaatgttttctaatttatttttattaattttattaaccacaattatcttttttgtttgtttgtttttttaagggatcatctctttttggagagggaattttttttttctttttatggtgtaaactgatt

SEQ ID NO: 159159 - DNA, 255 bp, Homo sapiens
ggcctacaaatagcactacatttcttagcctactccacggcttttgatagaagattcagagaaaagcaggagctagtggatgcaggtcctcctatatctggctgagctgaaggagagctagcacctgtgtgctgagccactctcctccgccaggtactgtcctgaggagatagacaaacgtggcactgatcctgtcatagggaacacccatcttttcagcttttcaggtcataaagctatgttccatattcagaa

SEQ ID NO: 159160 - DNA, 398 bp, Homo sapiens
cctgcttattaacccagtgtggttatgactcagaagatgttatctgttaaaagtctatagaaaaaaaaaaaagcctccgtatggataacttaattttctccagcccttcaaagaacagtcttactcctaaaataagttctgggttaagataatagcaaaagagctgattgattctaacaacgagcaggtctggcctgactaaatagaacttacattaatttaaaaattccaagttgaacttgatttttttagaaagactgttcttgcaacatataaattaacctcattaatttatagttacattgtgtccagtacccaagggttagattcatggtttccatatgcgttcagagaaaactattttaatgtatatatttaggttttttacacacctgaga

SEQ ID NO: 159161 - DNA, 564 bp, Homo sapiens
gaaataagaggcaggaagttgatgctttttgtctacattctgtcctcttatccagagatgaagttctatatcctccccaaagccttccctgttgatttctccctacaagtattcctatagtccttgcagttgcagtttgtactacacaaattaagaaataattatatcctaatgtgtcatatgatatcataatgtgtcatatgatgaccttcatataagaatgcccttgtttctccagctatacattatagatttcctgaagacaggcaccatgctgtattttttctttccccgtgccacatggtgggaagtacataacaagtgtccaacaaatgctacatgttatctttttaatatcctctcttcccttcctcaataccagtggccaaatatgaacatgaaggatcaggaacccccaggatctgtccacctgattggtctgggaaccaaagacataggattgccattgtcacttaagagggaccatgtagctcaggagggttctgtgtcttcagatgctcgaaatcctttgagacagctttagataaaccttccagttgtcaa

SEQ ID NO: 159162 - DNA, 338 bp, Homo sapiens
cccagctacttgggaggctgaggcagcagaattgcttgaagctgggaggcgaaggttccagtgagccaagatcgcatcactgcactccagcctgggcgacagagcaagactctctctcaaaataaataaataaataaaaataaacaatcaaaatttgtctaacatattttactccgattgcacataggatggcagtcataaggcctaaggttattttgatgaagatgagacccaagaaaagatagtaattttcttgtgtttctgaaaaccacttcagcatgagcctgtctaaaaggtttagatgacaaatttagaaagctgagagtagccggctgtgg

SEQ ID NO: 159163 - DNA, 296 bp, Homo sapiens
cctaaaggcagttgccaatctgtacaagttgggctttggttttggtggaccattggggtgaagaggacagaaatcaagtcctagagttcatctaaagtgacagtcaaaaagaataacctcagttttagatgggaccccagtgactctatcgttaggttaagggtgaaacaactgaactgtctacacactcccatatccatgtgattgcagggaaggttgaatggagcaggaggaggaaaaggaaattaagaaaaataaacctttcaagttgtgaccacagttttagccttcacagt

SEQ ID NO: 159164 - DNA, 256 bp, Homo sapiens
gagtaactatttctatagggcataaaaatctcaggattcatttgggtttgaaactgacatggccagacaaccttcaacatttttcatctgggacttcccctcgatcattctaagcactgacctatctttacacactgactgtatctttacacactgatcgtacctttacatactgattgtatcttttggcttctcttctaggattgctgagtatgtgcaagagacatttattgaagagcagctttgcttttacttc

SEQ ID NO: 159165 - DNA, 185 bp, Homo sapiens
agttacttttacctgtgtgtcttcctcgatgaactgtgtgggcccttgtggggagaaggcagtgtctcatccatctttatagccttactgtccctaagactatccctgggaagccaaggaaacagtttcatctcgcctatttgccaggcattctggcaggcactctacatacatcaacttattcc

SEQ ID NO: 159166 - DNA, 388 bp, Homo sapiens
gagagtggggggctctgctttcacagccacgggcagagccctccttggcctgccgcttcttactgctattgctttggaagagcaggagcaaaattcctgccttgggctggctttcttttctgctcagaggtatgtggggatattatccagcaggccagacgtctagcccctttaatgacaataatgataatttacatttatacaaggcctttcattgggggattttaattgtatcacaaacaataattaattcccctttgcaagtctggcagtcagctaagcaggagcccctttactctgcaggtgaagggtgctttcctgggcctgcaacatgctgggggtctcccacctacctgacacctacccaccctcaaggcctggcctaagc

SEQ ID NO: 159167 - DNA, 570 bp, Homo sapiens
gaatatgcaggctggggcccctgtgtgcagcctctgtgaccagcccagttccttacttccacacagctccctcctaggaagcatcttgccctcagaccacctgagcacccacttcccactgcgctgaaagctgagatggtggtgttccgagcacagctggacctgagtgagctcccccgtgccccatgaggattatgcatctgctgtgcaggaaatcccagagaacacaggggtgagcaaggcaggcctgtccaccacctgcagtgctctgtgccaggcagcagggagtgcagcaactggcctctcatgctttggggcaggaaggagaaagcctcaagccacacctatagaccaggagcctcactgcatggaggggtcactgcacaggtttcaggaactctgctcagatagtggcatcttagaaactctgggaatggctatataccaccacaacttgttttcctcagcatttatccagagaaaggtatttttctataactgaggatagtagttttatccctgtctcgtaattgttttcccactatttcagtttcacttagatttcgtaat

SEQ ID NO: 159168 - DNA, 281 bp, Homo sapiens
tagacgttttactgatctagctagtccccaattgtttgccatgctgtaccacagggatgcagtaaggcctctccctgtccacatccttgtgcacttctggagggtctcctcaaggatatattctcatatccctgtaaccctctatctaccacatggccctgctggctcgcttcaaaagccctcttctaaagctactcatatttacttgctataatatttgcactctgtcttatgaaactgtatgttttgtaaggttcatgttcaccactgtattctcagat

SEQ ID NO: 159169 - DNA, 695 bp, Homo sapiens
tctagctcggtaccccacaccacctagagtctacatattatcccttcatccctgattcagatcttagtgaccaaaaacaggaagaaagcagttactcgaatttcacccaattttaaagggtgaaattaagtacatccctggctcatctactctcaagggtatcatgcctactggaaaatggaccaaaaacctggatgaactaagttagtcttttttttccccatcaggcaacttagttgtctgtcagatacaactggatagttacccaaaactagcaccccttaagagaacactcttcttataacatctggcttatttttggctaaagggcagcactgggcttcatgggaaaacctaataacaagaggcttaaacctatttgaccacagataaaatacaccttttgtaaactgtttaccagattcataaaactgctgtgcaatcataaggcaaaggaaaggtttataagggcttcatttagaatatacaaatttaataaaaagaatcaaaggaaatatgggactgagacaccccaaaggggtaaatgttaatttagtaagctatttagaaccacagactgctgacacagcattaaaataccatgtgacatgaacatctcctaaggtccctcagcctgtcaatgtgatctaccacagggactgacctcaatactaaaaaggcagatggctgaataa

SEQ ID NO: 159170 - DNA, 263 bp, Homo sapiens
gcctgtaatttgaattactcaagggaaatgtgctatacaaaccaaagctatcaccatgccacagtgactgcttgctctacaggaggaggacttcacccatatgaatggggtgacacatatgtgtgcttgagtcccttccctctggctaatctgagacaactcaacctctccctctttccccaatttcttctcgtttgctatgttgattggattgttttctcaagactcttggttgtaaaaatgaaaacgaaaataggcagtta

SEQ ID NO: 159171 - DNA, 279 bp, Homo sapiens
atatattaagactaccaaaaaaaactgctgataatcaaaaagagaacatataattccatttatgcaaaagtacatatggctgtttacatatggacagagagatatggaaggatgctcccaaaatactaatagtattatctctaatagtaggacttttaggtaatttttacataatttgttaacccttttttatagtttgaattttttatgaccatgaattatttacataaccagaaaaagaaaacattaaaatattttcactttgggaaaaaaaaaaag

SEQ ID NO: 159172 - DNA, 364 bp, Homo sapiens
tggggggagaatggggtccggccagccagcggacgcggtccaggccagccgccggcacccacagcgaggcacaggtaagatgccaaggctgagttgtcatggaaacagaacacaatggggaaatgagcgtggggggagctaattattcaaggacagaaaaacggtatcgacgtccaaaacaaaaccaggaagaacaaatgaaataacaaagcaaaagcaatttaaaaaaagaaagagagaatctaaaaaacaaacaaacgaaaaaactccctccaaaacaaaacacaacacccaaaagcaagaagaaaaaaaaaaaaatcatggaatgggtgtggggctgaaaatcggggtctgaaaggaggag

SEQ ID NO: 159173 - DNA, 205 bp, Homo sapiens
cagaggtacctgtgcaggcgagtccaatgcccagctctttaataaacacgccttgcggtgctggaagagactcaaagtccatccaagacagattctgtcttcccactaaactggaagctccttaaggaccgggatgtggcagttttgctctcagctatgtgcccagtgctcagcacagggcccggcctgcctgggcactcagaag

SEQ ID NO: 159174 - DNA, 196 bp, Homo sapiens
cagagcaggtgtctctccggagcagttgagtagaacagctggcgtcacctcttcatgttgacgaggggagatgagtggcccaggcagttcctagagcgggggagatggagtgggccgtatcccacccagcaggagcgcttgcttctgaagctcccgtgcgtctgtgacagaggcttgaacccccggcttgttctct

SEQ ID NO: 159175 - DNA, 514 bp, Homo sapiens
cataataacataatatcagcctaatcaggaactgcatttttaaagcatcccctaacacacacacaaacacacacacacacacaaccaaaagccccttaaatcactgtacacatatagccacaaaaaatcatcctgcatccttttgcatcatccaatgtatttacttagaaatcttcccaccagggactccagggcctctctgaaatgcaatactctcttattcatttgaaaaatctaacctcaaaataatttatgaaattcattccacctttgcagcataaaggagaaaattctttatgagaaagcgctccagcaaagaacataccagtggtcagctgaaatacgaacacccaaaattagtggtatagagtctttgaaagtcaagacattccgttaaagccactatgaatatattctaaacaagcattttaatgtgaggtctcaaccacctaatcacctatgtccgtgtgcggtgacacacattaacatgatttttagagggaaaagtgaaaaa

SEQ ID NO: 159176 - DNA, 310 bp, Homo sapiens
gcatattgctcccatcaggaagaaaatgtgccacattatgataatggactaaatggctcactatataaaaagtgctgataaataaacaagaaagacattactttaaatagaaaaatgagcaaatgactttaagagatgggtcagacaaataaggatagaaaaatatgtgtgctcttataaataacgagagcaatatagtttaaaagcacaataagattactttccaaactggtaactttttctccctaaatactgggaagtataagataagaacagggcaagagtgctgctgatggagtgcagactgtag

SEQ ID NO: 159177 - DNA, 499 bp, Homo sapiens
gaaagttaaaattgtgaggtctatataagaaatgacactgcagataatccatcaagtcaatatatttcaccagagaaaaaggaaataagacgttacaggatggaaatgtaatttaatagctgaatgaatacttatctgcctatttcatccttaagaagaaaaagaaaagtgaaggcaacccaggtggttacattataatgaagttgaaattctgccacccatgaaaactgcaattgggattccacttttggatttggccagccagaaacagatgtgtgttccaacaagaatcacaggctgcatctcctggacaagagctctttagagtgcagcaggagtttcaactggtttcaactccaaagaaaggactagactaaactgagtataattgttccaagtgtttagaattcccaagttggactggggctaaatgtgtggttctcattttatggccttgaaaaagaagacagtgtgattcttccttgttctgttaaaaaaa

SEQ ID NO: 159178 - DNA, 529 bp, Homo sapiens
gcttgcatcatgtagtgacatcagtatgtacaaggacgatttgtaggatttttcaaaacgcctgttctaggataacttgttatgcatctgcaatatgccagctgcttttgaataagaggtttcagtaatactaagtttctgtgtccagatcttgggcccagttgaaacagtacagctgattggtcacatttaaaacatatttatggagaaagataaaaggccaatgtgtccgacttgcaaaagacaattagagtagaaagaagactggaacagtaaaagccagggcatttttaaatcttggttttctgaactttaacgtgccagaggaaaaaaattttttttcaattttaagggggaaggagatggccttaaaataaaggattgttcagagcctaaactgtgcttaatggaatagagctaggtatatcatctaaatcttgaatttgactaatataaattcagctttcttttaaagaaaaaactcgtaagcagaagtttgtgtattctacagaacctcttcactagctcg

SEQ ID NO: 159179 - DNA, 203 bp, Homo sapiens
ctagtgtcatcctcacatcagctcttctgtcccatcatcaacccccaatgcctctgaaatattacctctattctgaactttttctaagtaataaaacctaagttgatagtattccttggtcacccacctgtctgttctccagcgtaacatacacatacccattcctgttcctctgtatatgacattcccccagttctcctttt

SEQ ID NO: 159180 - DNA, 246 bp, Homo sapiens
tgtggcgtctcgaggatcccgcataggtgtgctcatctttacaaaacccttgtgaggtaggtactcttactattcccacctcacaggtgaggaacacaggtaaagacatggttgagtaaattactcaaattcacccagctaataaatggcagatacagaatgtgaagccaagctgactgcagagctcatgcttagaaaccactatcctggtctgcttcttgcactgagggccaccattactgtcac

SEQ ID NO: 159181 - DNA, 202 bp, Homo sapiens
ggatgactgggaccctctccagggtccgtcccatgccttcaatcctcccatgtaggcctcagtctttccatcgataaaaccagaaagtggagacaaacctaaaggctttttcagcttggatgcacaaggacccaagaatgtgtcctcatagccatgtgctaagaagccacctagcatctgtgtgagcagaagtcactggtga

SEQ ID NO: 159182 - DNA, 352 bp, Homo sapiens
cagcatttgcatataaaaatttaaaaacttaaaaagaaaattcaatacaatctcacaatgtggccagaaacgattccatgatttctcaaagcagttaaatacttttccaagacggagaatgcaaccaggctgctgggtacctctccagcttcttagcgtgctaagctgaacagacagcagaaaactctcagaacactaggaaggctcagttccaaaatgcagaggatgaatctcccaagatgaaagccattgcgtgacaatgatttaagtgctgaagggaaagatctgacagctcttctgcttcaggtgacaatgcccttcaggatgctccctgtccagtgccaggctcttg

SEQ ID NO: 159183 - DNA, 446 bp, Homo sapiens
gagaacaccttttaagaaaaaggaagtacattcgcccttggtctgtggtgaaatgtaatcccgttggggtgcaggagggcatccgtataagagaataagaaacagggcgcctgccaggctgtgtgccgtgtggcaggtgagatcctggctctgagctcatctcgaagggccttgggcctgtatgtattttgagcattgtgcagtaaggggtggggcatgggaggccaggactctggaagccgaaggaggagcattacttagctaatctgggatggagatgaagcgcatgctgctattctgaagtagggaagcgtgcctggaatcggtcctctgcggggcctgatgagagggatgctctcgtttactgaacgcccgtggtgtggccagctctctgctgggcacgccgtggggtgctgcctgcaagattgctcgtgcttcagcagccc

SEQ ID NO: 159184 - DNA, 576 bp, Homo sapiens
tgcttgagcccagaaattcagaaccaacctgggcaacatagagaaactccatctctactaaagaagttttttttaattacctgggcatggtggcgcatgcctgtagtcccacctactcaggaggctgaggcgggaggattgcttgagtccgggagatggaggctgcagtgagctgtgatcgtgccactacagcccagcctgggcagcagagcaaaaacctgtctggttggggggaaagctgcttctaaatagaaataggcattttagaatcaccttccccttcccgcaaaaaaacaacaacaaaaaagccagaatgctgtctgtgtatgaacaaatcttcaatcctgggttgagattatgattcaaaacagtttgaacattttgaattttcttaaggtgcttttttacagatccatgacaattactaaaaccttccccaaataaaaaggacgtgaaaaggtaaactctgtaatggacagtttaaaattggaaatgttgttagtaaatggattttgtcaggtatatgatgttatctcatgtgtcttaaaaagaggggtgactctgatgtggggtcat

SEQ ID NO: 159185 - DNA, 396 bp, Homo sapiens
caccatatgcccatcagtccggattgactagccgaaacctgacagcatgaaacgactgctgcttctaaatagaaataggcattttagaatcaccttccccttcccgcaaaaaaacaacaacaaaaaagccagaatgctgtctgtgtatgaacaaatcttcaatcctgggttgagattatgattcaaaacagtttgaacattttgaattttcttaaggtgcttttttacagatccatgacaattactaaaaccttccccaaataaaaaggacgtgaaaaggtaaactctgtaatggacagtttaaaattggaaatgttgttagtaaatggattttgtcaggtatatgatgttatctcatgtgtcttaaaaagaggggtgactctgatgtggggtcat

SEQ ID NO: 159186 - DNA, 626 bp, Homo sapiens
gggggaattgggaggaattaggtagtaactgctaatggtaaggggtttatttctggtgtgatgaaaatgttctaaaatggtggtgatggttctacagttctgaatgtagcaaaatccactgaactgtacactttaaatgggtgaattgtatggtgtgcgaattatatctcactaaagctgttatatgttagagaaagggggaaggaatgaataaggaaaccaaagttgtcctgcatttccacagaaaggtaatcctgtctttgaaaatcttagcttttttctgcttctattttagttaagctttaggattcaagactcctcactggtaagtccccagttgtcttttctccatctctaatctttgtctttactaacaagggtgatctacctaagggagacagcattcactagttacaactcaatctctgaacaaaaaacaatatgcacactatgattacaatcatataaaaatacgtatgagaatgaatcaggcctggaaagaaatgaggaaaagtaaaaatagctacataagaataatgaggttggggtgacattctttttaaaacttagtgtattatcagcaaataaacttagaagaaaaaaataaccaaactgtctccctaaaa

SEQ ID NO: 159187 - DNA, 354 bp, Homo sapiens
tactcatatatccaacgctctcacactatttagaaactcacaaaacagaatttcaaacttgtgaactaaggaatgttgcctgaaaaatctagtaaacaccaaaatcttcagaacatcacattcctttatatatttaaccactccaaaagagtaagtagttttccaaagttatgactacagaaaaagcatagtcatctttagtgatcctagattccacagggcagcatcaatccaaatttacaagcacagggacaaaggatttcgccctacaggatgtggtttccctattatctaaactaggccatcaagtatcatcctgcaaggtaccatgccactcaatgtgagcagcgttgt

SEQ ID NO: 159188 - DNA, 432 bp, Homo sapiens
gggtgggagtacggaatatcaatgagggatatctcccctcagatgtagcagagaattgggaaacaacaaaacttacaatcaagctctgcaacctactagctgtgtggtctgaaggcagaagacaatctctcttagccaaatgtccttgtctgtaaagccagagagtatgttcagctcttagagcagttctgaggattaaatgaagtagtaggataatgtgtctgacacacaagcacccaatccctaaaccattctaccactaaagcacaacagttaagagtgtaatttttggagttatatgccttgttctgaaaactgttttcatcatttatcagctaagaattaaatgagataaagttacagaaatgttggcacataaatgctcaatgatgtaataatactaccaaaagcaaaaaataggcactaacaaaa

SEQ ID NO: 159189 - DNA, 615 bp, Homo sapiens
aaggaggaactttgctctcttctctcacagctgtgtgtgcataggaggtagttcggatgatgtgggtcccaccatgtattccttctctgttccatgtagagtaaaataaatgggagttctgtttaatgcatcacctcggttcatattgcatttgccaagaaagtgcaattttattgaacattaggattgaattcttaactgagtaatcaatttcagtagtaagttaaaatgccttctattaatggacaactgcaaccgttaatcagagttacagtagattaacagttgtcagcatttatgctaatagcacttataaaccgtgggctcatgatttgcactttataattccatatttctcaaaacagttggtaatactttttgcttgaaggtattgattcttttgtccctttgcttgctacttggagatgtagagaaagctaaatgacattttcacggtgatgacacaatatcaccttctgcttttgcacacttggctttgtgtcaaaatagatggaaagggttcatttgttctggtgctctactgtttaatttgatctggtgtgtgactaaagcaagacaaatagtatttttaatgaaaccatttaataacctctg

SEQ ID NO: 159190 - DNA, 170 bp, Homo sapiens
ggtctaacctctctaatgctcatgttagtatgatacaactccatgaagaggtaatcttcattattttcagtaaatttaatcattttccttccttaataccactgtatgaaactggcatctgggatatagtcactggccaggcaaagtggctcacgcctgtgatcccagca

SEQ ID NO: 159191 - DNA, 330 bp, Homo sapiens
catgaacagaccaataattagtaacaggatttaattagtaataaaacttttccaatcaaaaaacgttcagtacctgatggcttctccactgaattctaccaaacatttaaagaagaactaatatcgattctattcaaactatccctaaacattgtaaaggagcaaatacttccaaactcattctatgagtcccccactacaaggacacaataaaaaagggccaatatttctagtaaatatagatgtaaaaaaaaatcctcagcaaaatactaggactcaggtggtgtgactcaggtggtgtgactcaggtgatgtgactcaggtggtgtg

SEQ ID NO: 159192 - DNA, 586 bp, Homo sapiens
tatggtgcgagaacccggcggactgctgtgtccagagaatatgataccttccaccgcatctctcctctcctcttctatccttcctctcatgactgtcccgcttgcacctcattcatctgctgtggatctgacgcgggttttgctatcaaacacgtgttcaatcccaaccacgctactttctggcaaccatcaatggtgctggattggtgtgaagattcaattaagttagtgccaataccacattacctggttaaagcacaagcactaagtataagcactaaaccattcctctttgtacatctcttcatcaggaatattctctattccaatctctgacagagattgtaacgtacccacttcctactgaaaattcttattcattcttcaatagtgaagcactagatagtccctcttttcacatatatctttaggcactgatcaccccattttgtgtgcttcttatataagtgtgtacattcttcacatttaactttttttaaaaaatcacgtttattgagatataacttgcctacaaaaggcaacattttgaatgtaaattgtgattgattttgacaaatgtgtacat

SEQ ID NO: 159193 - DNA, 503 bp, Homo sapiens
tctctactcctattaaagggaaagcagtacccgaataataaactctacatcaaacttaaccatccctgaaacagtctgcactgcctaggtgaatctgttactaatttgtgtttcaaacaagatatgtacatgtttttcaaaatacaacccattcacagcattaaaacaacagatgatgttataggctgaattacatcccctcccccaacttcgtatgttgaagttctaacccccagaacctcaaaatgtgaccgtatttagtgacggggtctttaaaaaggtgattaaggctgggcgcagtggcttatgtctgtaatcccagcactttggaaggccaaggctggtggatcttctaaggtcaggggttcaagaccagcctggctaacatggcgaaagcttgtctctactaaaaatacaaaaattagctgggcacagtggcgagtgcctgtaatcccagctactcgggaggctgagggaggagacacgcttgaacccgggaggcg

SEQ ID NO: 159194 - DNA, 478 bp, Homo sapiens
ggtcgccattcaggtggctcccggagtccgctacctccgccacacccgccatgttgcccgagagcgcgcgagggaatgagacagatcggcgagggccccgaccccccgaagaacttgaacaccaagttgcagatgtacttccagagcccgaagaggtcgggaggcggcgagtgtgaggtccgccaggatcccaggagcccatcccgcttcctggtgttcttctacccggaggacgttcggcagaaggttctggagagaaaaaatcatgagttggtatggcaaggaaaaggaacattcaagttaactgtccagttacctgcaaccccagatgaaatcgatcatgtctttgaagaggaacttctaacaaaagaatccaagaccaaagaagatgttaaagaaccagatgtgtcagaagaattggatacaaaactccctcttgatggtggattagacaaaatggaagatatcccagaggaat

SEQ ID NO: 159195 - DNA, 363 bp, Homo sapiens
tatctctaacattagtattgttgtatttacctctatatcagtttttactgtatctgttttatagctatttatgttattttactatgatcctattgccaactagtttaattatttcttctgttttactcatgggaaatctgaaggcctagacttgaaagcagaagactcatttctatttgaatcttggttctgccctttaggggctgcatgaacttgggcaagtcacatagctacactgagcctcagctttcttatgtataaaatgaggacaataataatcgacctgcccatctcacaagttgctgtaagacaaaaataagatgcttgaaaagaacttcataactgctataatgttagatttta

SEQ ID NO: 159196 - DNA, 367 bp, Homo sapiens
gaattcatggcaggctaacaagttagcttcaaagtagagtaagatctcaaaccgttcagagttcttcagctgttctcaggttacataccctgaacatactcatctcttctgtctgaaatactctccttctacttctaggtcaatgatttcatgtttctttcagaaattcacttctgtgttgtattcccagaggtatgtgccctcccaacccaaaaacatcctttttattcctagaattatcaaattgtatatttgtgtttatgtgtttatctcccccatttgaaagcacagatatttgttttgttcacagctgtatattcagagcctagcccagtgcctgacacatatttgactgactagataaatg

SEQ ID NO: 159197 - DNA, 297 bp, Homo sapiens
atacaaaaatcaattccaggttgataaaagacctcaatgtaaaaggcagatctagagagctttccagctcgacacaggagaatcgtgtgctgcttgggggcagcaaaggggtttatgaacgagaaataaaaagcacaaactaggctgggcatggtggctgatgcctgtaatgggaaaccaaggcgggaggatcgcctcagctcaggagttcaagactagcctggacaacatggtgaaaccccatctctacaaaaaatacatgtgttggcacatgctagtagtcccaggcactcaggc

SEQ ID NO: 159198 - DNA, 208 bp, Homo sapiens
gattgcgagctcggtaccccacaccacctgagtcaagggtttgttacgtctcccagttcctcacagataacttcttggcagctgcttccttagtgtggcaaaagaacacagtgcctgtatttttcaaaaaggtaacaaacacttttccttttttattttttttcctcgagacagagtctcactctgtcacccaggctggagtgcagtg

SEQ ID NO: 159199 - DNA, 512 bp, Homo sapiens
gtgcagctgggttaatgggatagggtctcttttcacaggtatttccagttggctggagccgagggccttggagaactgactgccgtggtttgttttccttctttccggttcgaatgggattaatggcctctataaatgtaaaggaatgctttatttagaggcacccatttgtttctgaggcttcttgcttccgttgaatgcagggtttacttcccgggcctcatggtgaaaagtttgctctaagacaggcttgactcatcccctaaggctgatgctttgaaggcactgcggggtaccctgccctctctttataggattccctccccaactccagccagacattttcagagctggttgtctcttgtagagctgggacctacttctgcaacttgttctctttagttattctcaactgtccctcagagtgatcctgagatccaactcaagtcagatcatatctctctgcttaaaaccttcgaatggtttcccagagtcctgccaggctccacgaa

SEQ ID NO: 159200 - DNA, 412 bp, Homo sapiens
caaatgcggaccacacaggagccagagccctccggggaaatgccgcagcacatgagggccaggggccagggagggggctggggctctagagcgaatccatggctctagaaagagagcaagaagagctacctgttctctcagtcctttgcgttggccatttccacaaggaaggaaacacacagaacgtcttaatcatatttaatcacattgcgtgagggttaacagaaaagaggaccaaaaaataaatgaatgaaacccatcttaaacaatggatgttactgaatattagcaagctggcatctagcgacagtgatgtttgttactagtttcacgttggttccaccttcaaagtacctgaagataatttgaatcagtaattgtgaatcctatattgttaggccttatctaagga

SEQ ID NO: 159201 - DNA, 422 bp, Homo sapiens
gcctcaggctttcatctgtaccatggccacagtgcttcctttcttacggattgttttgggggcagccaagataaccctgtgaagtgtccagctcactgcaggcctccctcttcggtgatttggggtatggtgtgagaatctggaggaaaaaacactgggtggcagaggccccagagagcatcctctgcccatctcagccaggccaggaggaaaggcaaaggacactaataatttttaagttacctgcccccctcaacctctacatctttaattacaccccctccaaccataagccacacagtaagggaaacttctcctgctttattttttttaatttttattttttgagatgtagtttagctcttgttgcccaggctggagtgcaatggcacaatctcggctcactgcaacctccatctccc

SEQ ID NO: 159202 - DNA, 435 bp, Homo sapiens
tattcagaggatccccttatgtctgacccaccgtctccagacatgccgatcgctgggggacagacatctgcagatcagaataggcctggggacagcatgtgtggtggacctttggctggagggaatttggagcactttggagaactcagcaaggagttgtgtgtcttgggcacagagctggaggggagggacagacgcaccatccaaccttgcagcctttgttagatgttactgtctttattctgagaaaagtgtggaagagggggtggtacaacatttgaccatggaacctcataatcacattgccttttgggatcatactctgcccagtgaagaatagactcacggggtcgcagtggccataaggagatcatttagggcagggtccttggacttttgactcggagggtgccgtggaggtggagagaagttgcg

SEQ ID NO: 159203 - DNA, 436 bp, Homo sapiens
aagcaggttatagcaacattcctaggactaaatctctctctcaaaaaaaaaaaatcaaactacacaattagagcttctgctaaactacttctgaagaattgaaatatccactcattctcctatctaacctcatctcacctcattcacaacttgtgcatctagcacagtatctggtacataatacatattcaaaatctgttgaatgtactaatgaacatattggtttcatatttatttccttctttcttactaaacctttgtagcatcttctcataagtaaaactcaacaggatcctgtggacagggaagaacattgacagagtatgaacatgtggttatcacctttgtagaagatataatcatgcttttcaaagcagctctactattagaaaaattgccttggccaggtacagtggctcatgcctgtaatcccagc

SEQ ID NO: 159204 - DNA, 289 bp, Homo sapiens
ccccaaaggaaggctttgaatacaattattcctacattggttctggctctgtaactggagtttctatggagattggcgggagaaatcagagtcctagtcatattctaacatcaaggagcaagtctaggaatgggactgcgcagctcaccgtcttgctttttcattttgcttcttctaacatttttcatgatcccctaatccgtgtgacttttaaaaatatggtttggaagtgccacttttgaagcatgtgaatagaagagcatctcatcccctcactctccccggtaca

SEQ ID NO: 159205 - DNA, 506 bp, Homo sapiens
aaatcacttggaatagaataaagttcagaaaggtcaaggatagaagtcagaagatctgacaaacagtggtaaaactgtaattatcctaagccagaaaaaggtgaattgttttaaaattatagttattttttttaaattgtgacttatcctgggtaaacagcagcatggctctggtcttgagacaacaagccacatgcaaatagctataagcaagattatcagaaaacctgagtatttcattgttttgtcattaatctcaccatggatctcattctactttccctttagggttagcttccacaggcattagaaaatacagaacctgttgagggccaaaaaagtgatataaaaagattaataataataatacctttggaaaaaatcaaaagaagtgaggtttcccagtctaaaatgagaagaataaaggttaatgtagtaaacatgttcatgtattgaatattttacttagagaaaagtttgcagtcaccatccccctgtgaaaagta

SEQ ID NO: 159206 - DNA, 552 bp, Homo sapiens
ttactcaagtccaagtctttgtcttttcctctgctctttccatacctcctaggcaaggccaccagtcttatgaattcagccatcacccatctcatacacttcacagatttctatttccaagatggactcttctctgggaaccagcccaatatatattagcccatgtactcaatatcacttggatatatcaaagtcacttgaaactctataccaaaatcaaacttctggccttctgccagccttctctaacttagaaatggtaccatgattgatccagtggctcaagtcagagaccaatgagttctctttaatggcaccttctccctatcttttctccatccccttttatttcatgacaaattcctgttgattttgtttttatatatcactcaaatgtatgcagttatatctgaatgcattcattgaatatgctgccttttgaattcctgccttttgaattactcctccagtaattattcttacatccacacagtggataagaaaccagagctcactttgtgagtgctcagacgaaaggcacatgagggtggc

SEQ ID NO: 159207 - DNA, 356 bp, Homo sapiens
gctaggattacagacatgagccactgtacctagtcataaatagccattctaactggtgcaagatgatatttcattgtggtttggatttgcatcttcctgatgattagtaatgttgagctttttttcagcattttttcatatatctgttggccatttgtatgtcctcttttgagaaatgtctattcacatctttgcccactttttaatgggatttttttcctgttgtttccagttctttgtatattctggatactaatccctcagaagaatagtttgcaaatatattctcctattcagtaggttgttatttcactctgttgtttcctttgctgtgcagaagcttttttattttattt

SEQ ID NO: 159208 - DNA, 338 bp, Homo sapiens
gttgctgccctattggagtaagctgctcttagtggctgagtctcccaaaggcaactgtcaaaggcagaaagcacaattctgaaagtttcagggatgaggcgggccaggatgaagcagctaggtaatcgagggttagtgatgacagcagtaaactgtgacaatggttgagcacctagctactgcataggttcaagtcccagctttgccatttactaaccataagattgggtgactttgtagtttctctttgtttcctcatctgtaaaagggaggtaataattgtacctgctctatagaattaatgtaagaattaaatgagttcatacgtggaacaatgt

SEQ ID NO: 159209 - DNA, 318 bp, Homo sapiens
aaactgtcaccacttcctttcaccaggcagcttgagagtaatctttcagaagccaaatattggtaattcatctaactgaggctataaatcctgcatttttagtaaaaagaaatggtatttttatacgcgacttatataataataataggctgaactgtctggtgatgcggtggaccagactcttctcctaacatagctcacgtttcagtgatccatgtttcagttatgtggcagtggacccatgagatatctttcagagggactttctgatactactcataggaagtttgggttagagatagtgtttccctgtgtttc

SEQ ID NO: 159210 - DNA, 625 bp, Homo sapiens
ctgaggtggaaggatggcttgagcccaggaggtgaaagttgcagtgaactgagatcgcaccactgcaatccagcctgggtgacagagtgacaccctgtctcaaacaaagaaacaaagatttaatgtggccatgatagctgtctttgaatactatgaggcgagcatatgaagggaggtagccaacttgctctgcgtgttgacaaaaaaacaaaggagagcggctctgaacctattttggttctaggagctgcttgattcacagatcattctttgcttcattaaattctgtaatgcttttcttagaagtaagtaaacacaagtagaaattgcatggaaagaaaactgtggctcaatacaacataattctggcattcgaatctaaagtcatgagagtcacataatgcatttccccactgcccagtatctggaagggattcctgtactgagtgtgggctagaagatctcttcctttcaacccactaattctatgacactaaggaaaaggggaagataggagctagcgcagagaaaagagcagacagggactaggcctgaaacagaccagcacggaagtggtcatggaacccagaaatggaacaaggagctacgtcgcaggccacaaaag

SEQ ID NO: 159211 - DNA, 329 bp, Homo sapiens
ggtggagcaacagcaaacttggcactctctgggcagagacatccacctttgctggcccttggacattggtgctcctggttctcaggccttctgactcagactgggatttgcaccactgctttcctgggccaccaccttgcagatggccgactgcaggtcttcacgacctccatgatcatgggagccaatctcgcatgataaatccttttctcgctgggcactgtggctcacgccttgtaattccagcacttttgggaggctgaggggggaggatctcttgagcgagggagtttgaggccagcctggggcaacatagcaagaccaccatc

SEQ ID NO: 159212 - DNA, 118 bp, Homo sapiens
acctatgggaaagaagataagaccaaacatttgtaaactcttcataacttcctgagctacatgagaaaatcacattgttctttgggaattgtttgttctattttatacactgtactcc

SEQ ID NO: 159213 - DNA, 175 bp, Homo sapiens
atgtgacccttcttaattaactgcctccctctgatcctgttgcctgtgaagagggggttgagccaggataggaggtttggcttgctttagtttgagatgtgttgtttggcctggagaacttggagctctgtcttcatatactgaagtgatggctggttccacgtcccctccccct

SEQ ID NO: 159214 - DNA, 101 bp, Homo sapiens
gcctggaaaatagcacggtggctgggcatgtaactcaggacactgccagagggtggaatgaatgaggctggcacatagtggcatccagtcagtgtcaccag

SEQ ID NO: 159215 - DNA, 2309 bp, Homo sapiens
cttgagaatgtttctgcatgatttctctgggcttgctgtcttacctgagagcaggaagtcaaaaggagagtgatggagccacctgctgccctctactttgcagatattaaagaggagcctgaaactgttccttggacatcttatgaatgtcagaaaataccttttggagggttagaagatcaggggacatggttgttcacatttgctgccacggaacaccgccagtcttcacttggaaacagaatcacgccttgtgaagagatcatccctaagcaggagagaagctactaaaggattgtgtcctcctccaccttccctgtgctcggtctccacctgtctcccattctgtgacgatggttcaatggaagagactctgccagctgcattacttgtgggctctgggctgctatatgctgctggccactgtggctctgaaactttctttcaggttgaagtgtgactctgaccacttgggtctggagtccagggaatctcaaagccagtactgtaggaatatcttgtataatttcctgaaacttccagcaaagaggtctatcaactgttcaggggtcacccgaggggaccaagaggcagtgcttcaggctattctgaataacctggaggtcaagaagaagcgagagcctttcacagacacccactacctctccctcaccagagactgtgagcacttcaaggctgaaaggaagttcatacagttcccactgagcaaagaagaggtggagttccctattgcatactctatggtgattcatgagaagattgaaaactttgaaaggctactgcgagctgtgtatgcccctcagaacatatactgtgtccatgtggatgagaagtccccagaaactttcaaagaggcggtcaaagcaattatttcttgcttcccaaatgtcttcatagccagtaagctggttcgggtggtttatgcctcctggtccagggtgcaagctgacctcaactgcatggaagacttgctccagagctcagtgccgtggaaatacttcctgaatacatgtgggacggactttcctataaagagcaatgcagagatggtccaggctctcaagatgttgaatgggaggaatagcatggagtcagaggtacctcctaagcacaaagaaacccgctggaaatatcactttgaggtagtgagagacacattacacctaaccaacaagaagaaggatcctcccccttataatttaactatgtttacagggaatgcgtacattgtggcttcccgagatttcgtccaacatgttttgaagaaccctaaatcccaacaactgattgaatgggtaaaagacacttatagcccagatgaacacctctgggccacccttcagcgtgcacggtggatgcctggctctgttcccaaccaccccaagtacgacatctcagacatgacttctattgccaggctggtcaagtggcagggtcatgagggagacatcgataagggtgctccttatgctccctgctctggaatccaccagcgggctatctgcgtttatggggctggggacttgaattggatgcttcaaaaccatcacctgttggccaacaagtttgacccaaaggtagatgataatgctcttcagtgcttagaagaatacctacgttataaggccatctatgggactgaactttgagacacactatgagagcgttgctacctgtggggcaagagcatgtacaaacatgctcagaacttgctgggacagtgtgggtgggagaccagggctttgcaattcgtggcatcctttaggataagagggctgctattagattgtgggtaagtagatcttttgccttgcaaattgctgcctgggtgaatgctgcttgttctctcacccctaaccctagtagttcctccactaactttctcactaagtgagaatgagaactgctgtgatagggagagtgaaggagggatatgtggtagagcacttgatttcagttgaatgcctgctggtagcttttccattctgtggagctgccgttcctaataattccaggtttggtagcgtggaggagaactttgatggaaagagaaccttcccttctgtactgttaacttaaaaataaatagctcctgattcaaaaaaaaaaaaagggggggtctagagttcctgggggcaagttagcgtccagttttgtacaagggccaaagggaggatatagagatgggggttaaagtggagggaaagtagtgatttggaggaccttttggggggctttggcaccaaaggtagtagaataataggttggaaggctggggatggcgagat

SEQ ID NO: 159216 - DNA, 759 bp, Homo sapiens
gagcctcttctctctaagtcacgggaactgcccttgctacttgtgacctgccctttactcagcagtttttgttctgggaagccctgggattctgctaatacctatcactgtaggtgctgaagggaaacagatgaagaacatgacctcaaggagcttcctgtcaatgagaagaccaagctgacgcctggcaaaggtaaatgccaccataacaaattaagtaaaagtgtgcattagctaatttgtaaattcagcttaagatgaatcctgcttcttgggcccttctctgacgctggtgttgggactgtaggattcctcgagcctccgtcaaggttaacatcaaatcccactggcttctctcagcaccaccttgatgaccctagcttagtttctctgtttcccatgactggaactcttagacctttccacaaacatacaaggatttataattcaaagctcaagcgatgaagttgaagcttttggcccataggaagcctgaactagtgattaggagaaaaagattgaggagtctgagtgggaagagttagctatttgaaagacagcattatagtagtagtcattgtaggaaaactcaggactgggttggacttacttatattatgttgctttatattttggttactgagggaggtgaaggtcatcctttcagttcttgggatgtctaaatagcttcatgactcctgggctgttggataaatttgctttcagcatcatctggctgtaccttttgtccttagcagg

SEQ ID NO: 159217 - DNA, 2267 bp, Homo sapiens
gagcctcttctctctaagtcacgggaactgcccttgctacttgtgacctgccctttactcagcagtttttgttctgggaagccctgggattctgctaatacctatcactgtaggtgctgaagggaaacagatgaagaacatgacctcaaggagcttcctgtcaatgagaagaccaagctgacgcctggcaaagatattaaagaggagcctgaaactgttccttggacatcttatgaatgtcagaaaataccttttggagggttagaagatcaggggacatggttgttcacatttgctgccacggaacaccgccagtcttcacttggaaacagaatcacgccttgtgaagagatcatccctaagcaggagagaagctactaaaggattgtgtcctcctccaccttccctgtgctcggtctccacctgtctcccattctgtgacgatggttcaatggaagagactctgccagctgcattacttgtgggctctgggctgctatatgctgctggccactgtggctctgaaactttctttcaggttgaagtgtgactctgaccacttgggtctggagtccagggaatctcaaagccagtactgtaggaatatcttgtataatttcctgaaacttccagcaaagaggtctatcaactgttcaggggtcacccgaggggaccaagaggcagtgcttcaggctattctgaataacctggaggtcaagaagaagcgagagcctttcacagacacccactacctctccctcaccagagactgtgagcacttcaaggctgaaaggaagttcatacagttcccactgagcaaagaagaggtggagttccctattgcatactctatggtgattcatgagaagattgaaaactttgaaaggctactgcgagctgtgtatgcccctcagaacatatactgtgtccatgtggatgagaagtccccagaaactttcaaagaggcggtcaaagcaattatttcttgcttcccaaatgtcttcatagccagtaagctggttcgggtggtttatgcctcctggtccagggtgcaagctgacctcaactgcatggaagacttgctccagagctcagtgccgtggaaatacttcctgaatacatgtgggacggactttcctataaagagcaatgcagagatggtccaggctctcaagatgttgaatgggaggaatagcatggagtcagaggtacctcctaagcacaaagaaacccgctggaaatatcactttgaggtagtgagagacacattacacctaaccaacaagaagaaggatcctcccccttataatttaactatgtttacagggaatgcgtacattgtggcttcccgagatttcgtccaacatgttttgaagaaccctaaatcccaacaactgattgaatgggtaaaagacacttatagcccagatgaacacctctgggccacccttcagcgtgcacggtggatgcctggctctgttcccaaccaccccaagtacgacatctcagacatgacttctattgccaggctggtcaagtggcagggtcatgagggagacatcgataagggtgctccttatgctccctgctctggaatccaccagcgggctatctgcgtttatggggctggggacttgaattggatgcttcaaaaccatcacctgttggccaacaagtttgacccaaaggtagatgataatgctcttcagtgcttagaagaatacctacgttataaggccatctatgggactgaactttgagacacactatgagagcgttgctacctgtggggcaagagcatgtacaaacatgctcagaacttgctgggacagtgtgggtgggagaccagggctttgcaattcgtggcatcctttaggataagagggctgctattagattgtgggtaagtagatcttttgccttgcaaattgctgcctgggtgaatgctgcttgttctctcacccctaaccctagtagttcctccactaactttctcactaagtgagaatgagaactgctgtgatagggagagtgaaggagggatatgtggtagagcacttgatttcagttgaatgcctgctggtagcttttccattctgtggagctgccgttcctaataattccaggtttggtagcgtggaggagaactttgatggaaagagaaccttcccttctgtactgttaacttaaaaataaatagctcctgattcaaagtattacctctactttttgcctagtatgccagaaataatataaatctaaacaga

SEQ ID NO: 159218 - DNA, 2455 bp, Homo sapiens
tgcctctcaagggctggggctgcaaaacatctcagagtttgactctttgcttcgacactaccgtctgcaagttcttgtgctagccgctgtgggaaagacacagctgagtcagacatgatccctgccctcaaggagcttgtgacaccacagtgaagacaagtctattttggtgctgaagggaaacagatgaagaacatgacctcaaggagcttcctgtcaatgagaagaccaagctgacgcctggcaaagatattaaagaggagcctgaaactgttccttggacatcttatgaatgtcagaaaataccttttggagggttagaagatcaggggacatggttgttcacatttgctgccacggaacaccgccagtcttcacttggaaacagaatcacgccttgtgaagagatcatccctaagcaggagagaagctactaaaggattgtgtcctcctccaccttccctgtgctcggtctccacctgtctcccattctgtgacgatggttcaatggaagagactctgccagctgcattacttgtgggctctgggctgctatatgctgctggccactgtggctctgaaactttctttcaggttgaagtgtgactctgaccacttgggtctggagtccagggaatctcaaagccagtactgtaggaatatcttgtataatttcctgaaacttccagcaaagaggtctatcaactgttcaggggtcacccgaggggaccaagaggcagtgcttcaggctattctgaataacctggaggtcaagaagaagcgagagcctttcacagacacccactacctctccctcaccagagactgtgagcacttcaaggctgaaaggaagttcatacagttcccactgagcaaagaagaggtggagttccctattgcatactctatggtgattcatgagaagattgaaaactttgaaaggctactgcgagctgtgtatgcccctcagaacatatactgtgtccatgtggatgagaagtccccagaaactttcaaagaggcggtcaaagcaattatttcttgcttcccaaatgtcttcatagccagtaagctggttcgggtggtttatgcctcctggtccagggtgcaagctgacctcaactgcatggaagacttgctccagagctcagtgccgtggaaatacttcctgaatacatgtgggacggactttcctataaagagcaatgcagagatggtccaggctctcaagatgttgaatgggaggaatagcatggagtcagaggtacctcctaagcacaaagaaacccgctggaaatatcactttgaggtagtgagagacacattacacctaaccaacaagaagaaggatcctcccccttataatttaactatgtttacagggaatgcgtacattgtggcttcccgagatttcgtccaacatgttttgaagaaccctaaatcccaacaactgattgaatgggtaaaagacacttatagcccagatgaacacctctgggccacccttcagcgtgcacggtggatgcctggctctgttcccaaccaccccaagtacgacatctcagacatgacttctattgccaggctggtcaagtggcagggtcatgagggagacatcgataagggtgctccttatgctccctgctctggaatccaccagcgggctatctgcgtttatggggctggggacttgaattggatgcttcaaaaccatcacctgttggccaacaagtttgacccaaaggtagatgataatgctcttcagtgcttagaagaatacctacgttataaggccatctatgggactgaactttgagacacactatgagagcgttgctacctgtggggcaagagcatgtacaaacatgctcagaacttgctgggacagtgtgggtgggagaccagggctttgcaattcgtggcatcctttaggataagagggctgctattagattgtgggtaagtagatcttttgccttgcaaattgctgcctgggtgaatgctgcttgttctctcacccctaaccctagtagttcctccactaactttctcactaagtgagaatgagaactgctgtgatagggagagtgaaggagggatatgtggtagagcacttgatttcagttgaatgcctgctggtagcttttccattctgtggagctgccgttcctaataattccaggtttggtagcgtggaggagaactttgatggaaagagaaccttcccttctgtactgttaacttaaaaataaatagctcctgattcaaaaaaaaaaaaagggggggtctagagttcctgggggcaagttagcgtccagttttgtacaagggccaaagggaggatatagagatgggggttaaagtggagggaaagtagtgatttggaggaccttttggggggctttggcaccaaaggtagtagaataataggttggaaggctggggatggcgagat

SEQ ID NO: 159219 - DNA, 2222 bp, Homo sapiens
gagcctcttctctctaagtcacgggaactgcccttgctacttgtgacctgccctttactcagcagtttttgttctgggaagccctgggattctgctaatacctatcactgtaggtgctgaagggaaacagatgaagaacatgacctcaaggagcttcctgtcaatgagaagaccaagctgacgcctggcaaagatattaaagaggagcctgaaactgttccttggacatcttatgaatgtcagaaaataccttttggagggttagaagatcaggggacatggttgttcacatttgctgccacggaacaccgccagtcttcacttggaaacagaatcacgccttgtgaagagatcatccctaagcaggagagaagctactaaaggattgtgtcctcctccaccttccctgtgctcggtctccacctgtctcccattctgtgacgatggttcaatggaagagactctgccagctgcattacttgtgggctctgggctgctatatgctgctggccactgtggctctgaataacctggaggtcaagaagaagcgagagcctttcacagacacccactacctctccctcaccagagactgtgagcacttcaaggctgaaaggaagttcatacagttcccactgagcaaagaagaggtggagttccctattgcatactctatggtgattcatgagaagattgaaaactttgaaaggctactgcgagctgtgtatgcccctcagaacatatactgtgtccatgtggatgagaagtccccagaaactttcaaagaggcggtcaaagcaattatttcttgcttcccaaatgtcttcatagccagtaagctggttcgggtggtttatgcctcctggtccagggtgcaagctgacctcaactgcatggaagacttgctccagagctcagtgccgtggaaatacttcctgaatacatgtgggacggactttcctataaagagcaatgcagagatggtccaggctctcaagatgttgaatgggaggaatagcatggagtcagaggtacctcctaagcacaaagaaacccgctggaaatatcactttgaggtagtgagagacacattacacctaaccaacaagaagaaggatcctcccccttataatttaactatgtttacagggaatgcgtacattgtggcttcccgagatttcgtccaacatgttttgaagaaccctaaatcccaacaactgattgaatgggtaaaagacacttatagcccagatgaacacctctgggccacccttcagcgtgcacggtggatgcctggctctgttcccaaccaccccaagtacgacatctcagacatgacttctattgccaggctggtcaagtggcagggtcatgagggagacatcgataagggtgctccttatgctccctgctctggaatccaccagcgggctatctgcgtttatggggctggggacttgaattggatgcttcaaaaccatcacctgttggccaacaagtttgacccaaaggtagatgataatgctcttcagtgcttagaagaatacctacgttataaggccatctatgggactgaactttgagacacactatgagagcgttgctacctgtggggcaagagcatgtacaaacatgctcagaacttgctgggacagtgtgggtgggagaccagggctttgcaattcgtggcatcctttaggataagagggctgctattagattgtgggtaagtagatcttttgccttgcaaattgctgcctgggtgaatgctgcttgttctctcacccctaaccctagtagttcctccactaactttctcactaagtgagaatgagaactgctgtgatagggagagtgaaggagggatatgtggtagagcacttgatttcagttgaatgcctgctggtagcttttccattctgtggagctgccgttcctaataattccaggtttggtagcgtggaggagaactttgatggaaagagaaccttcccttctgtactgttaacttaaaaataaatagctcctgattcaaaaaaaaaaaaagggggggtctagagttcctgggggcaagttagcgtccagttttgtacaagggccaaagggaggatatagagatgggggttaaagtggagggaaagtagtgatttggaggaccttttggggggctttggcaccaaaggtagtagaataataggttggaaggctggggatggcgagat

SEQ ID NO: 159220 - DNA, 1546 bp, Homo sapiens
tgctgctgctgctgaatcttctccatttgttgagcgacttctgttaaagggctatgaagttatttacctcacagaacctgtggatgagaagtccccagaaactttcaaagaggcggtcaaagcaattatttcttgcttcccaaatgtcttcatagccagtaagctggttcgggtggtttatgcctcctggtccagggtgcaagctgacctcaactgcatggaagacttgctccagagctcagtgccgtggaaatacttcctgaatacatgtgggacggactttcctataaagagcaatgcagagatggtccaggctctcaagatgttgaatgggaggaatagcatggagtcagaggtacctcctaagcacaaagaaacccgctggaaatatcactttgaggtagtgagagacacattacacctaaccaacaagaagaaggatcctcccccttataatttaactatgtttacagggaatgcgtacattgtggcttcccgagatttcgtccaacatgttttgaagaaccctaaatcccaacaactgattgaatgggtaaaagacacttatagcccagatgaacacctctgggccacccttcagcgtgcacggtggatgcctggctctgttcccaaccaccccaagtacgacatctcagacatgacttctattgccaggctggtcaagtggcagggtcatgagggagacatcgataagggtgctccttatgctccctgctctggaatccaccagcgggctatctgcgtttatggggctggggacttgaattggatgcttcaaaaccatcacctgttggccaacaagtttgacccaaaggtagatgataatgctcttcagtgcttagaagaatacctacgttataaggccatctatgggactgaactttgagacacactatgagagcgttgctacctgtggggcaagagcatgtacaaacatgctcagaacttgctgggacagtgtgggtgggagaccagggctttgcaattcgtggcatcctttaggataagagggctgctattagattgtgggtaagtagatcttttgccttgcaaattgctgcctgggtgaatgctgcttgttctctcacccctaaccctagtagttcctccactaactttctcactaagtgagaatgagaactgctgtgatagggagagtgaaggagggatatgtggtagagcacttgatttcagttgaatgcctgctggtagcttttccattctgtggagctgccgttcctaataattccaggtttggtagcgtggaggagaactttgatggaaagagaaccttcccttctgtactgttaacttaaaaataaatagctcctgattcaaaaaaaaaaaaagggggggtctagagttcctgggggcaagttagcgtccagttttgtacaagggccaaagggaggatatagagatgggggttaaagtggagggaaagtagtgatttggaggaccttttggggggctttggcaccaaaggtagtagaataataggttggaaggctggggatggcgagat

SEQ ID NO: 159221 - DNA, 2399 bp, Homo sapiens
gagcctcttctctctaagtcacgggaactgcccttgctacttgtgacctgccctttactcagcagtttttgttctgggaagccctgggattctgctaatacctatcactgtaggtgctgaagggaaacagatgaagaacatgacctcaaggagcttcctgtcaatgagaagaccaagctgacgcctggcaaagatattaaagaggagcctgaaactgttccttggacatcttatgaatgtcagaaaataccttttggagggttagaagatcaggggacatggttgttcacatttgctgccacggaacaccgccagtcttcacttggaaacagaatcacgccttgtgaagagatcatccctaagcaggagagaagctactaaaggattgtgtcctcctccaccttccctgtgctcggtctccacctgtctcccattctgtgacgatggttcaatggaagagactctgccagctgcattacttgtgggctctgggctgctatatgctgctggccactgtggctctgaaactttctttcaggttgaagtgtgactctgaccacttgggtctggagtccagggaatctcaaagccagtactgtaggaatatcttgtataatttcctgaaacttccagcaaagaggtctatcaactgttcaggggtcacccgaggggaccaagaggcagtgcttcaggctattctgaataacctggaggtcaagaagaagcgagagcctttcacagacacccactacctctccctcaccagagactgtgagcacttcaaggctgaaaggaagttcatacagttcccactgagcaaagaagaggtggagttccctattgcatactctatggtgattcatgagaagattgaaaactttgaaaggctactgcgagctgtgtatgcccctcagaacatatactgtgtccatgtggatgagaagtccccagaaactttcaaagaggcggtcaaagcaattatttcttgcttcccaaatgtcttcatagccagtaagctggttcgggtggtttatgcctcctggtccagggtgcaagctgacctcaactgcatggaagacttgctccagagctcagtgccgtggaaatacttcctgaatacatgtgggacggactttcctataaagagcaatgcagagatggtccaggctctcaagatgttgaatgggaggaatagcatggagtcagaggtacctcctaagcacaaagaaacccgctggaaatatcactttgaggtagtgagagacacattacacctaaccaacaagaagaaggatcctcccccttataatttaactatgtttacagggaatgcgtacattgtggcttcccgagatttcgtccaacatgttttgaagaaccctaaatcccaacaactgattgaatgggtaaaagacacttatagcccagatgaacacctctgggccacccttcagcgtgcacggtggatgcctggctctgttcccaaccaccccaagtacgacatctcagacatgacttctattgccaggctggtcaagtggcagggtcatgagggagacatcgataagggtgctccttatgctccctgctctggaatccaccagcgggctatctgcgtttatggggctggggacttgaattggatgcttcaaaaccatcacctgttggccaacaagtttgacccaaaggtagatgataatgctcttcagtgcttagaagaatacctacgttataaggccatctatgggactgaactttgagacacactatgagagcgttgctacctgtggggcaagagcatgtacaaacatgctcagaacttgctgggacagtgtgggtgggagaccagggctttgcaattcgtggcatcctttaggataagagggctgctattagattgtgggtaagtagatcttttgccttgcaaattgctgcctgggtgaatgctgcttgttctctcacccctaaccctagtagttcctccactaactttctcactaagtgagaatgagaactgctgtgatagggagagtgaaggagggatatgtggtagagcacttgatttcagttgaatgcctgctggtagcttttccattctgtggagctgccgttcctaataattccaggtttggtagcgtggaggagaactttgatggaaagagaaccttcccttctgtactgttaacttaaaaataaatagctcctgattcaaaaaaaaaaaaagggggggtctagagttcctgggggcaagttagcgtccagttttgtacaagggccaaagggaggatatagagatgggggttaaagtggagggaaagtagtgatttggaggaccttttggggggctttggcaccaaaggtagtagaataataggttggaaggctggggatggcgagat

SEQ ID NO: 159222 - DNA, 2466 bp, Homo sapiens
ctgtgtggctttacttgtggagcagacaacaggcattttatataagagtttgactctttgcttcgacactaccgtctgcaagttcttgtgctagccgctgtgggaaagacacagctgagtcagacatgatccctgccctcaaggagcttgtgacaccacagtgaagacaagtctattttggtgctgaagggaaacagatgaagaacatgacctcaaggagcttcctgtcaatgagaagaccaagctgacgcctggcaaagatattaaagaggagcctgaaactgttccttggacatcttatgaatgtcagaaaataccttttggagggttagaagatcaggggacatggttgttcacatttgctgccacggaacaccgccagtcttcacttggaaacagaatcacgccttgtgaagagatcatccctaagcaggagagaagctactaaaggattgtgtcctcctccaccttccctgtgctcggtctccacctgtctcccattctgtgacgatggttcaatggaagagactctgccagctgcattacttgtgggctctgggctgctatatgctgctggccactgtggctctgaaactttctttcaggttgaagtgtgactctgaccacttgggtctggagtccagggaatctcaaagccagtactgtaggaatatcttgtataatttcctgaaacttccagcaaagaggtctatcaactgttcaggggtcacccgaggggaccaagaggcagtgcttcaggctattctgaataacctggaggtcaagaagaagcgagagcctttcacagacacccactacctctccctcaccagagactgtgagcacttcaaggctgaaaggaagttcatacagttcccactgagcaaagaagaggtggagttccctattgcatactctatggtgattcatgagaagattgaaaactttgaaaggctactgcgagctgtgtatgcccctcagaacatatactgtgtccatgtggatgagaagtccccagaaactttcaaagaggcggtcaaagcaattatttcttgcttcccaaatgtcttcatagccagtaagctggttcgggtggtttatgcctcctggtccagggtgcaagctgacctcaactgcatggaagacttgctccagagctcagtgccgtggaaatacttcctgaatacatgtgggacggactttcctataaagagcaatgcagagatggtccaggctctcaagatgttgaatgggaggaatagcatggagtcagaggtacctcctaagcacaaagaaacccgctggaaatatcactttgaggtagtgagagacacattacacctaaccaacaagaagaaggatcctcccccttataatttaactatgtttacagggaatgcgtacattgtggcttcccgagatttcgtccaacatgttttgaagaaccctaaatcccaacaactgattgaatgggtaaaagacacttatagcccagatgaacacctctgggccacccttcagcgtgcacggtggatgcctggctctgttcccaaccaccccaagtacgacatctcagacatgacttctattgccaggctggtcaagtggcagggtcatgagggagacatcgataagggtgctccttatgctccctgctctggaatccaccagcgggctatctgcgtttatggggctggggacttgaattggatgcttcaaaaccatcacctgttggccaacaagtttgacccaaaggtagatgataatgctcttcagtgcttagaagaatacctacgttataaggccatctatgggactgaactttgagacacactatgagagcgttgctacctgtggggcaagagcatgtacaaacatgctcagaacttgctgggacagtgtgggtgggagaccagggctttgcaattcgtggcatcctttaggataagagggctgctattagattgtgggtaagtagatcttttgccttgcaaattgctgcctgggtgaatgctgcttgttctctcacccctaaccctagtagttcctccactaactttctcactaagtgagaatgagaactgctgtgatagggagagtgaaggagggatatgtggtagagcacttgatttcagttgaatgcctgctggtagcttttccattctgtggagctgccgttcctaataattccaggtttggtagcgtggaggagaactttgatggaaagagaaccttcccttctgtactgttaacttaaaaataaatagctcctgattcaaaaaaaaaaaaagggggggtctagagttcctgggggcaagttagcgtccagttttgtacaagggccaaagggaggatatagagatgggggttaaagtggagggaaagtagtgatttggaggaccttttggggggctttggcaccaaaggtagtagaataataggttggaaggctggggatggcgagat

SEQ ID NO: 159223 - DNA, 2062 bp, Homo sapiens
tacggctcggtaccgaagcatcctaaccaggagagaagctctaaaggattgtgtcctcctccaccttccctgtgctcggtctccacctgtctcccattctgtgacgatggttcaatggaagagactctgccagctgcattacttgtgggctctgggctgctatatgctgctggccactgtggctctgaaactttctttcaggttgaagtgtgactctgaccacttgggtctggagtccagggaatctcaaagccagtactgtaggaatatcttgtataatttcctgaaacttccagcaaagaggtctatcaactgttcaggggtcacccgaggggaccaagaggcagtgcttcaggctattctgaataacctggaggtcaagaagaagcgagagcctttcacagacacccactacctctccctcaccagagactgtgagcacttcaaggctgaaaggaagttcatacagttcccactgagcaaagaagaggtggagttccctattgcatactctatggtgattcatgagaagattgaaaactttgaaaggctactgcgagctgtgtatgcccctcagaacatatactgtgtccatgtggatgagaagtccccagaaactttcaaagaggcggtcaaagcaattatttcttgcttcccaaatgtcttcatagccagtaagctggttcgggtggtttatgcctcctggtccagggtgcaagctgacctcaactgcatggaagacttgctccagagctcagtgccgtggaaatacttcctgaatacatgtgggacggactttcctataaagagcaatgcagagatggtccaggctctcaagatgttgaatgggaggaatagcatggagtcagaggtacctcctaagcacaaagaaacccgctggaaatatcactttgaggtagtgagagacacattacacctaaccaacaagaagaaggatcctcccccttataatttaactatgtttacagggaatgcgtacattgtggcttcccgagatttcgtccaacatgttttgaagaaccctaaatcccaacaactgattgaatgggtaaaagacacttatagcccagatgaacacctctgggccacccttcagcgtgcacggtggatgcctggctctgttcccaaccaccccaagtacgacatctcagacatgacttctattgccaggctggtcaagtggcagggtcatgagggagacatcgataagggtgctccttatgctccctgctctggaatccaccagcgggctatctgcgtttatggggctggggacttgaattggatgcttcaaaaccatcacctgttggccaacaagtttgacccaaaggtagatgataatgctcttcagtgcttagaagaatacctacgttataaggccatctatgggactgaactttgagacacactatgagagcgttgctacctgtggggcaagagcatgtacaaacatgctcagaacttgctgggacagtgtgggtgggagaccagggctttgcaattcgtggcatcctttaggataagagggctgctattagattgtgggtaagtagatcttttgccttgcaaattgctgcctgggtgaatgctgcttgttctctcacccctaaccctagtagttcctccactaactttctcactaagtgagaatgagaactgctgtgatagggagagtgaaggagggatatgtggtagagcacttgatttcagttgaatgcctgctggtagcttttccattctgtggagctgccgttcctaataattccaggtttggtagcgtggaggagaactttgatggaaagagaaccttcccttctgtactgttaacttaaaaataaatagctcctgattcaaaaaaaaaaaaagggggggtctagagttcctgggggcaagttagcgtccagttttgtacaagggccaaagggaggatatagagatgggggttaaagtggagggaaagtagtgatttggaggaccttttggggggctttggcaccaaaggtagtagaataataggttggaaggctggggatggcgagat

SEQ ID NO: 159224 - DNA, 1787 bp, Homo sapiens
ccggtgtttcctttgtctcttctgaaaacaggctttttggttatttgaatcaaaaaatctgccacatgagattcatcttgttctaatattggtttctgaagatgacttctttgtactgtttacaacaacttggttttggggatttttcataatacagttctttggcaacaaatatttcctttttttttgagatggagtctcactctgtcgcccaggctggagtgcagtggcgcgatcttggctcactgcggcctccgcctcctgggttcaagtaattctcctgcctcagcctccctggcagctggggctacaggcatacaccaccacgctcggctaattcttttgtatttttagtagacaaagggaaacaccggtgtttcccaaatgtcttcatagccagtaagctggttcgggtggtttatgcctcctggtccagggtgcaagctgacctcaactgcatggaagacttgctccagagctcagtgccgtggaaatacttcctgaatacatgtgggacggactttcctataaagagcaatgcagagatggtccaggctctcaagatgttgaatgggaggaatagcatggagtcagaggtacctcctaagcacaaagaaacccgctggaaatatcactttgaggtagtgagagacacattacacctaaccaacaagaagaaggatcctcccccttataatttaactatgtttacagggaatgcgtacattgtggcttcccgagatttcgtccaacatgttttgaagaaccctaaatcccaacaactgattgaatgggtaaaagacacttatagcccagatgaacacctctgggccacccttcagcgtgcacggtggatgcctggctctgttcccaaccaccccaagtacgacatctcagacatgacttctattgccaggctggtcaagtggcagggtcatgagggagacatcgataagggtgctccttatgctccctgctctggaatccaccagcgggctatctgcgtttatggggctggggacttgaattggatgcttcaaaaccatcacctgttggccaacaagtttgacccaaaggtagatgataatgctcttcagtgcttagaagaatacctacgttataaggccatctatgggactgaactttgagacacactatgagagcgttgctacctgtggggcaagagcatgtacaaacatgctcagaacttgctgggacagtgtgggtgggagaccagggctttgcaattcgtggcatcctttaggataagagggctgctattagattgtgggtaagtagatcttttgccttgcaaattgctgcctgggtgaatgctgcttgttctctcacccctaaccctagtagttcctccactaactttctcactaagtgagaatgagaactgctgtgatagggagagtgaaggagggatatgtggtagagcacttgatttcagttgaatgcctgctggtagcttttccattctgtggagctgccgttcctaataattccaggtttggtagcgtggaggagaactttgatggaaagagaaccttcccttctgtactgttaacttaaaaataaatagctcctgattcaaaaaaaaaaaaagggggggtctagagttcctgggggcaagttagcgtccagttttgtacaagggccaaagggaggatatagagatgggggttaaagtggagggaaagtagtgatttggaggaccttttggggggctttggcaccaaaggtagtagaataataggttggaaggctggggatggcgagat

SEQ ID NO: 159225 - DNA, 364 bp, Homo sapiens
acggactctgctggggcacactccctcgacactggttccaaggtgaagacaggactggctggatcagtatttctcaacttcctgggaacgggggataagggaggaggggacagagctgtctctcctgcccatctgcaggaaatagtgtctctcaggtctccacgtcaacagaccagagccaggggcagtgccttcactggcagatgggcccagtggctaagcccaggctccagaaggggtggtgaccccaccctcagagtggaggccaaagcaggtgaacttcctctaagcacacaacgatgacgagctaaagctggtttgcgccctaatcaatgcagtgtccctccgagctcctggcctaatg

SEQ ID NO: 159226 - DNA, 262 bp, Homo sapiens
tacatggccggccctcactcccagcagctgggcccctgcctgctgtctgctgccattagagcccacagctgggctgcgactgctcagaccagccagctggagggaggggctcagcagctctgggtttggccctgagagagtagttggattttaggctggccattgctgtatcaggacccaatcaattggcctagacgggatctctcagccttacaagccctctccaggtggtaggtacagagtggagagaggctgagttttg

SEQ ID NO: 159227 - DNA, 207 bp, Homo sapiens
gctcgtgaatctaagtgctccccttctttgctctcctgttccccaggccctcagagagccagcctcctggatgccccccagacacagtgggtgccatggagccagtgcctctccctcactctgctgtcctggagcctggctccctgtggtaagccaggcttgcagaggtggctcctgacatcaatccgcgggcatgtggctgctgcg

SEQ ID NO: 159228 - DNA, 474 bp, Homo sapiens
ctcgaaacatcatcggatttcattctcagaccaaccctaaaggtgctggtgttaactccccattttaaagataagaaccagccgctcaaccaggataagggacttgccctactgcggataagcagcagcttcggcctgactccagatcccaacgttgtggaagccggaacgccccgagaacaggcggagagcggagggagcaccgcagggcgccggccagggtgggggcacccccaggcctccaggaggtcgcgcgtcccgggcgagagcggacgagccgtcagcaccagggacagctccccaggccgctcccggcatcccccgacgactgcgcgcgcgggccggtgacgcgcgctccccgccaggctcgggcgcgcgccctccccgccagcgcgcgccctgcgctcgggaccaggctggagccgcgcgtgcagctcgcagggagccagccggggcgtccggagtcgcggccgc

SEQ ID NO: 159229 - DNA, 343 bp, Homo sapiens
agaggctgatgtgtggtcgacgggcttagcgacttgatggcgtaacccccgttcttcccccacaggactcaggagagtgcagcttgctctgtgagtgggtgacaacctcttggcgactcaggctcagctgaggatggtgccagtgtgccggagacagccgtcatactgccggatagagtggctcacttgcatgtatttggaacaaaaaaaggagatgcctggcagccccgctctctgcagtaagtattcatctgcattcttttacattcctttatttcttcgaacatcagaaatgggtagatgtttattgagcccagccacctgctatgccttctccattctt

SEQ ID NO: 159230 - DNA, 168 bp, Homo sapiens
attgcaacttgaatccctaggaatcggtgaggagaaccaaaatggtaataagagggtaaatataaaaactccataaatgtatacttgctcttcattccttttctcagtttctctaacataaaattatttaaagtaacaattagaacaagtattgttgggcttttaaca

SEQ ID NO: 159231 - DNA, 540 bp, Homo sapiens
gccccctgtgggtagggcttataaacaggaaagtcacattacgtagctgtggggatcagctttatgttccaatcaccccagagggaagggaccaggcatgagagaagagccacatcacatagaagctacgtcaagcgatatatcacaattctcactgaggacaaaccctggaagaggagagtcatatcatctaggtgatgggcccaaatatatagcacagtgactcctgtgtgcagggaacaggcagaataattacatcactggtgtgcttggcccaggcagaagaggagtgtcacatcacataggtaaaatagggcatttacctgggctttgtccataggagagattgcagtgggtcaagaaatatgtcacaatgctccctgtggtcagggttcaggcagaggactcacatcatcttggtgctgggcccagcagtgtgtctcaatgccttctaaggacatagccaaagcagagaagtaacatcaccttagtgttaggcccagcagtatgccacaatctcctttgtgggcagaacctagg

SEQ ID NO: 159232 - DNA, 152 bp, Homo sapiens
ctgtactccagcctgggcgacagagcaagactctgtctaaaaaaattaaaattaaaaagaagaaaaggagaaataaagtgatattataatttgttcattgggatgaatgtgtatattaaaacattttttaaaaacttcatgatacttttagg

SEQ ID NO: 159233 - DNA, 631 bp, Homo sapiens
atacatgatgtaatatttatcattttaaacatttgtaagtgtacaatcaaatacattcacagtgttgtgtaatcatcaccattatctatatccaaaactttttcatcatccctgacagaaattttgttcccattaaatagcagttcttcattcccttctctgtactagtcccttgtcgccaggattctacattgtttctgtgaatttgactcttctaggtacctcatgtcagtggaatcacaccatatttgtcctttcgtgtctggcttatttcagttaccctaatgttgtcaaggtccatccatgttgtaacatacaggcctatccctttttcttgtgctttgctttattgcactttgcagatgttgcattttttacaaattggggtttgtggcaaccctatgtggagcaagcctatcagcatcattttcccaacagcgtgtggtcacttcatgtctctgtgtcaaagcttggtaattctcacaatatttcaaatgttttcgttattattatatctgttatggtgatttgtaatcagagatctttgatgttactattgtaattgttttggggtaccactaaacacacccatataagactgcaaaaggaatcaataaatgttgtgtgtgtc

SEQ ID NO: 159234 - DNA, 475 bp, Homo sapiens
gaacctgagcaggaaggcatgacaataaggaccgtgtgtgcagcccctgaggcttggtagggcctaggagtgttctgggtgggctgatggaggaacaatgatccctgggaaggaagcttctgatactcagcacatggtacagggcctggctctgcattctttctgtcattgctgaatgaatgagaagatgaatgcatcacagtctcaaggtttaaccccacaggttaatgattcgttacaaaggaaacgagatacccatataacggtgaggtctggcggacaccactttaaccatcatggctatgcttagcatcaccaatgacaggacaaactcttatcaggtgaacctgaagtgatgcactgggaagggcacagcatcgcctacatggttacatcacctacatacatgtcctgccccagaggtccaatctgaatctaatcatgagaaagcaatcagaaaaataaaaagtgaagg

SEQ ID NO: 159235 - DNA, 1964 bp, Homo sapiens
  misc_feature (1955)..(1959): n is a, c, g, or t
  misc_feature (1961)..(1964): n is a, c, g, or t
agagtaacaggcaggaagaaagctttctgtactacaccagagggttggggctgtggatttagctactctcacctgaggctactgagcaagttgtcatgcaccatgagacaaagcccaagctgtcccaccaggcagtaagtatggagaggttcaggcacatggcatagctgctatttcgcacaattttcactacaccagtggtgacaaaatagaagaggttcatccatacacagaacctggtgaagagctggaggcagaaagaagtgtctatgtggagacgcaactgaaacaaaggtggcacagcaactgttccaatcccgtgtctttcctcatggcttcccaggagtttgaggttgaagctattgttgacaaaagacaggataaaaatgggaatacacagtatttggttcggtggaaaggttatgacaaacaggatgacacttgggaaccagagcagcacctcatgaactgtgaaaaatgtgtacatgattttaatagacgacagactgaaaaacagaaaaaactgacatggactacaaccagtagaattttttcaaacaatgccagaagaagaacttccagatctacaaaagcaaactattctaagaactctcctaaaacgccagtgactgataaacaccacaggtccaaaaaccgcaagttatttgctgccagcaagaacgttaggagaaaggcagcttcaattctctccgacacaaagaatatggagataataaattcaactattgagacccttgcacctgacagcccctttgaccacaaaactgtgagtggctttcagaaacttgagaaactggaccctattgcagcagatcagcaggacacggtggtcttcaaggtgacagaagggaaactcctccgggaccctttgtcacgtcctggtgcagaacagactggaatacagaacaagactcagatacacccactaatgtcgcagatgtctggctcagttactgcttctatggccacaggttcagctacccgaaagggtatagtggtattaatagacccattagcagccaatgggacaacagacatgcatacctcagttccaagagtgaaaggtgggcaaagaaatattactgatgacagcagagaccagccttttatcaagaagatgcacttcaccataaggctaacagaaagtgccagcacatacagagacattgtagtgaagaaagaggatggattcacccagatagtgctatcaactagatcgacagaaaaaaatgcactgaatacagaagtaattaaagaaatagttaatgctctgaatagcgctgctgcagatgacagcaagctcgtgctgttcagtgcagctggaagtgtcttttgctgcggtcttgattttgggtactttgtgaagcacttaaggaataacagaaacacagcaagccttgaaatggtggacaccatcaagaactttgtgaatacttttattcaatttaaaaagcctattgttgtatcagtcaatggccctgcgattggactaggtgcatccatcctgcctctttgtgatctcgtgtgggctaatgaaaaggcttggttccaaaccccttatacgacctttggacagagtccagatggctgttcttctattacattccccaaaatgatgggtaaagcatctgccaatgaaatgttaattgctgggcgaaagctgacagcaagggaggcatgcgccaaaggcctggtctctcaggtatttttgactggaactttcacccaagaggttatgattcaaattaaggagcttgcctcatacaatccaattgtactggaagaatgtaaggccctcgttcgctgtaatattaagttggagttggaacaggccaatgagagagagtgtgaggtgctgaggaagatctggagctcagcccaagggatagaatccatgttaaagtatgttgaaaataaaattgatgagttttaannnnnannnn

SEQ ID NO: 159236 - DNA, 2378 bp, Homo sapiens
agagtaacaggcaggaagaaagctttctgtactacaccagagggttggggctgtggatttagctactctcacctgaggctactgagcaagttgtcatgcaccatgagacaaagcccaagctgtcccaccaggcagtaagtatggagaggttcaggcacatggcatagctgctatttcgcacaattttcactacaccagtggtgacaaaatagaagaggttcatccatacacagaacctggtgaagagctggaggcagaaagaagtgtctatgtggagacgcaactgaaacaaaggtggcacagcaactgttccaatcccgtgtctttcctcatggcttcccaggagtttgaggttgaagctattgttgacaaaagacaggataaaaatgggaatacacagtatttggttcggtggaaaggttatgacaaacaggatgacacttgggaaccagagcagcacctcatgaactgtgaaaaatgtgtacatgattttaatagacgacagactgaaaaacagaaaaaactgacatggactacaaccagtagaattttttcaaacaatgccagaagaagaacttccagatctacaaaagcaaactattctaagaactctcctaaaacgccagtgactgataaacaccacaggtccaaaaaccgcaagttatttgctgccagcaagaacgttaggagaaaggcagcttcaattctctccgacacaaagaatatggagataataaattcaactattgagacccttgcacctgacagcccctttgaccacaaaactgtgagtggctttcagaaacttgagaaactggaccctattgcagcagatcagcaggacacggtggtcttcaaggtgacagaagggaaactcctccgggaccctttgtcacgtcctggtgcagaacagactggaatacagaacaagactcagatacacccactaatgtcgcagatgtctggctcagttactgcttctatggccacaggttcagctacccgaaagggtatagtggtattaatagacccattagcagccaatgggacaacagacatgcatacctcagttccaagagtgaaaggtgggcaaagaaatattactgatgacagcagagaccagccttttatcaagaagatgcacttcaccataaggctaacagaaagtgccagcacatacagagacattgtagtgaagaaagaggatggattcacccagatagtgctatcaactagatcgacagaaaaaaatgcactgaatacagaagtaattaaagaaatagttaatgctctgaatagcgctgctgcagatgacagcaagctcgtgctgttcagtgcagctggaagtgtcttttgctgcggtcttgattttgggtactttgtgaagcacttaaggaataacagaaacacagcaagccttgaaatggtggacaccatcaagaactttgtgaatacttttattcaatttaaaaagcctattgttgtatcagtcaatggccctgcgattggactaggtgcatccatcctgcctctttgtgatctcgtgtgggctaatgaaaaggcttggttccaaaccccttatacgacctttggacagagtccagatggctgttcttctattacattccccaaaatgatgggtaaagcatctgccaatgaaatgttaattgctgggcgaaagctgacagcaagggaggcatgcgccaaaggcctggtctctcaggtatttttgactggaactttcacccaagaggttatgattcaaattaaggagcttgcctcatacaatccaattgtactggaagaatgtaaggccctcgttcgctgtaatattaagttggagttggaacaggccaatgagagagagtgtgaggtgctgaggaagatctggagctcagcccaagggatagaatccatgttaaaaatacctctgttgggatataaagcagccttccctcccagaaagacacagaatgatcagagatggtgcccttgactttatagtggcacaaacgcttcagagacacacaattataagagacttatcttttagcataaatacttatggctcaaaatccactgacgatcattctcctaaactgaacacatgactagaattggtggtgagatatcgcttgattttcttttcctttataaatgtctagttcttacccagttaacaaaagaaaactttatcgctctaaagtaaaacttgtaacaccacattagtgaattatggaatgattttggtggaaatatccaggttctaatgtgtggaatgtgcagatttaggttactttagtgtatgttctagttaataagttaaaattctggacacattattaaaggcagaaacttctttcaaagcaaaaaaaaaa

SEQ ID NO: 159237 - DNA, 379 bp, Homo sapiens
acaacagctccagttacaacagctccagttacaaccgctccagttacaacagctctttttgttttattcctctttcccctgaagctcatccttcaaaccaggctctttaatttaggacatgacggggtccacatattaggataagcacaacatattagctctgcaggagctgccagaaaggacagtagctattttgtgctttaggttttgaggagaagagaatttgacaaatggcccgtgtccttgggggataacaaagcagcaagtctagggtagccagagaggagaatgataaagacaaggggaacactgatattcagctttccaaaatctctcttcccatggagggaaaagaaacattgttcaagttgcaaatcct

SEQ ID NO: 159238 - DNA, 260 bp, Homo sapiens
caacaagtagttttttagtatgtctcaaatattgcattattcattgtttatctgacgttcatatttaactgggtgtcctgtacttttatttgctaaatctgacaaccctgtttggcaaatctgggtcacagggtatcaggccaactggaaaagacagttaaggaatgaaagataagtttagatgaaagggaagaggccaatggaggacgagttggactttattctgtagaaaatggggaacaactgaaggtgtcagtttt

SEQ ID NO: 159239 - DNA, 493 bp, Homo sapiens
ctcattttatagaaatgttcaaggttaaaaactgtgtcctatcatcaccccactacacaccaccctccacaatcccatctctacaaatgtgtcttctatttccaacagagaacgctggtttaggggagagaaaattcaggctgggggatcccaactcgaaaaggttgtctcaaattaatggtaaacaccacccacagagcagcctgacggaagaatcccatcttatcagttgtgaagcagcagattcagaaacttggtgtcaaagaagaatagactggaaggaatgtcaccttctctagctcaggagaaagtccctacatttttaggtggtagtaaaatgtcacaagtgcttgcaaagtggatgctgctagatttttctcttcaaactcccagtccattctggaggaacaaaggtgggtcaaagatctgacgattcatttgtttgtgaaggaggataaacaaggatgtgggggaaaggcatcttgcctggttg

SEQ ID NO: 159240 - DNA, 1385 bp, Homo sapiens
taactggttagagcttcccgtcctgctgtacatttcataatatttaatgagcacacttgtgcaacataagatgtaacatatgctgataccttcaacaaggaagaaataatgcttttgccgagctcagtaggacttttttgttgcctgtttattggatcattcatgtctttatgagtgtgcttgtcttaatatctttccagttattctgtaaaccaaatttagaaattatgtcaaagggacagtcagatggccagggcaatgaaatggcatgacacagccagttattgaaaataccttcaaattcttaagtttcaaagcttaagatgaacctatatatgtaaaaatctaataagaaattcagacagtaatacattagtttcatcatccaaaacaccaagaaagccataatttaggggtaattttgtttgccttttttttttaaattcgccacattttgaaagaactaaaggcattagtgtcataaaagaaaagtaatagatcagatgagctacttgaaaccacctatatttggaagattgaaataaaactttctaaattttaattagtatatttccaattcatgcattactaattaggaacaattacaaagagttgacaagaaaacagcctaattcttcactatgagtagagagatagtgggttaatttttgaaaagaaagatgaagtaccatatgtaatttaatattacttcccacaatccaagatctgcagctctatggttgagctccacttgtgtttcctccctggctccatccccacctccctgaacaataaggtagctgaacctcatccctacccctagcccatctccaattcttctccactggaaatttggcatgctctattagccctggatcgggggggaaaaagtgtaggatctcagtcaaaattttggcacgagggaacaaaaaaaataggggagtataggaaaacaactcattctaaaccaggaagtctagtatcaaacatttcaatatggaggaaaaaaaactagcactttggggggaaagctttttgggggaaaagcgatgatgaggcacaaaagaaaaagaaggaagacagaaaagggaatatgagccaggcgcagcagctcacgcctgtaatcccagcactttgaaagaccaaggcaggaagactgcttgagcccaagagtttgagaccagcctgcacaacatagtgagaccttgactctacaaaatattttttaaaaattagctggatgtggtagctcaagcctgtagtcccagctacttgggaggctgaggtaggaggatggcttgagcccaagaggtcgatgctgcagtgagccatgattgtgccactgcacctcagcctgagcaacagagtgagaccctatctcaaaa

SEQ ID NO: 159241 - DNA, 320 bp, Homo sapiens
ggtgcccagccattcatttacacaacacgatgcatcattattcaacacctgctgtggcagcttgggaatcaaggctgagagtgaggcatcagcacacacctgggggcagggccgggggtggagggagcctggatcatcgcaccctgacggtgtggccgaggcaagccccttcacctctgtgggactcatctatgaaatgagatcgatgctgtgctgctgtgcatcttgctgagacgtggtgagggtacagcaggaggaaggcgagctggtctgccctgcatctggctcacatcgggtccacagtgtttgtctcctgatga

SEQ ID NO: 159242 - DNA, 374 bp, Homo sapiens
aaaatatagaaaggaagtttgtttagtagagttgtatatgcctttcagtagtatttggaggttgttatatagctactgttatgttaaattgtttttaaagattgctttggtgagtaggagaaatctgtgcttctggccaatgaattgttgatccctcaatgaccactttttaatgtcaaatgataatattatataactagaaaatacaggctgatttgttggaagactgagacccctgtcaaggccacctgcaaagttctccactggcatggacggcgctctctaaacgcctacgtggcacgccagataatacatagctgattttcccattcattacattggagtagtgtggattttctgtcaaaccagatttt

SEQ ID NO: 159243 - DNA, 273 bp, Homo sapiens
tgatgcacatttgtccatttgtttcacaagttttctttgagtggtttccagccttaaaattgacatcactgaagttattgtgggtcaagccaccacaggctagtcatataaagacttatttatttatttatttatttttgagacggagtcttgctctatcacccaggctggagtgcagtggtgcgatctcagctcactgcaacctccacctcctgggttttaatcaattctctctgcctcagcctcccgagtagctgggattacaggcgctct

SEQ ID NO: 159244 - DNA, 594 bp, Homo sapiens
aatcggctcggcccgtgttctctttaaacacttgaaacatttttaagcaattgcaatgtgtcaggcacatcacgtatgcattttcttatttttcccggaacattatgaagtggagtctattcttgattgcatttcatagacaaggaaactcagacttcaagggtaactaggtaggacagccaagatgactagccttctgtccctccacctccgctagaaatcaaattacccgggaaggcaatgccaggtagtggtgggattaagtagcttttgctctgcttagagcagacaggatgccaggaatgaggactccttgaggtggaactcaagtggaagatgagtaaactatatcttagagctatattacagagcttcttggtattctgtttttattttccttttattatcccctatctttaaggcatcttaactatgtttctgtggaccaagagaagagcgggtgaattactcacacatgggccaaagtgatcaaaggagtgcatctctctattccaccccaagctagtttggtgttggcagcagttggcaggcttcctaaggtagagtggtttttttttttttttttttttttta

SEQ ID NO: 159245 - DNA, 308 bp, Homo sapiens
gatgggtaggggtggggggcagtggtgacagtgtatttatcaattgtttgtaaattgaatatttatacattgagagctaactgtattttgtttgaaaagtttcacctgcagttggaggatctgaaagatgtgattatggttgacctttcttccatgtctatgtttaatttccatctatgtttatgcatgtggatgcagggtaattctgaataatgctaatgatgaagggtcatcattacacagaagatcattctatgctcctaattaaaattatggctggaaattgcttccttatgtgtagctccaat

SEQ ID NO: 159246 - DNA, 604 bp, Homo sapiens
tcccaaagtgttggattacaggtgtgagccacctcacctggtctggtttgttctttccttttgttgctttgctctttggtgtcatatctaagaatccattgtttaacccaagaccacaaagatttatcctgtcttttcttgtaagagttttatagttttagctcttacatttaggtctttgaaatattttaagttaatttttgtatatggtgtgagggaagggtcctgcttcattcttttgcatgtggctatccagtcgtcccagcaccacattttgaaaagactgttctttccccattgaatggtcttggcacccttgttaaattaattggctgcagacacatgaatacatttgtagactcatctgttccattgatctaagtctgtccttagatcagcaccatactatattgattacagtagctttatagcagaaattgggaagtatgactgctctaacttcgctcctcttttttaatattgttttggctctcctgggtcccttgcgtttccatatgaatttttagcatcagctcgacaatgttggcaaagaaattaaccggaattttgatagagattgcattgagtctgtattaactgcttg

SEQ ID NO: 159247 - DNA, 399 bp, Homo sapiens
ctaggcagttacacaacacaatttatcttctcacagctctagatgctagaagtcagactgcagtgttggcagggttggtccttcagggccatgagggaaggatctattctaggcctctgtctttgacttgtagatggccattttctccctctgtcttcacatcatcttccctgtgtgtgtctgcatccgaatttcctcctcttctaaggacacctgtcatattaaattagggcccaccctgatgagctctttttaacttaattacctctttaaaggccctatctccaaatatagtcaaattctgaggcactggggggccaatccagatttttttggtcatccattttttttcttttctgttgtcttatctattatattttcctcttgtgtaaactgatt

SEQ ID NO: 159248 - DNA, 99 bp, Homo sapiens
agtgagtccgtaggatgaaggaagaagtggaggaaccagaaaggaaagagctcccttccaaaggccaataaatatcagctctggccaaggcagtctgct

SEQ ID NO: 159249 - DNA, 534 bp, Homo sapiens
  misc_feature (508)..(508): n is a, c, g, or t
gcccggcctgaacactgtgctccctgcaatgacctctttatgctcccggggggaggagcagggctcctgggttctagtttctggtgctgccaacccaccacgtgtccacctctgcctaatttgtggcctaaggccgtctgccctgctgtcaccatcagctggtatttttggacgtctctttctttcctgacatgagggtgggagtgtttggaaatagatccaggccaggagaatttaatcagcaatgtccctgtgtcccctgagcaactccctctcagtccccttgtctctgtgcctaagtcagagaggcagagctgtgtgtgtgagctgtgcacctttctagttgttatcaatggctccttctgtggtttttgcacctatcacttcccccacctcaagatgagaacaagactcagttctgtcccaggtcacaggggaggagaggaaacatgcatgtattatagcatgaaggattgaggttaaacaaggaagaacttcccacaggggnagatgccagctctggcttttgatggg

SEQ ID NO: 159250 - DNA, 430 bp, Homo sapiens
taacaccttgtttcatggaacccaaaactgaactacccctcaagatgggagtctgaacacatagatttatgctttaaatgtttttagggcatggtttaaactatgagtcaccagttaaaaccctttttgaatatgttttctgtttttaaaaaaagttgcctatttaagataactacttattcacaactcaaacagaggtaggcttcacttgaagcaatgacttatttaacatttttcatttgaattactagccacatcagaacactgatttgatatttctaaaggtattgagaggcaaaccatctttaattctgctttatgatgtggatattttgggaattgttaggaaaataatcaaccatttgcatatccaagacataattattacaaattctggatttttccccatcagtaacaaaagtccagtata

SEQ ID NO: 159251 - DNA, 246 bp, Homo sapiens
agtcatcagagggtgagaaagtgctcagaggatggcagttggggaactgtgtgaccgaggtcctgggccgacgccagcagagctcagcaagaatggcccagccagactctgggcctcactatatgacagcctagacttacgtgtaccccggacggcgtgcatgcctaaaaaacctaacctgagtctaatcgaggctttagctctgccagcctacaggaggcacaggggagtgacccgatttctcca

SEQ ID NO: 159252 - DNA, 560 bp, Homo sapiens
ctgcgatatgtgaggagtttgagattgcagtgagctatgatcaaacttcacttcagcctggtgtgacagagcaagggtttaaaaaaaaaaaaaaaaaaaaaaaaaatgtgttggcgcgggggcccccgcttgtaatcccagcattttggaaggccgaagggggctgatcacctgaaggtcaggatttcggagaacaagcacgggccaacatggcgaaaacctcgtctctaactaaaattacaaaaaaatattaggccaagcgtggtggcgcacgcctgtatttccaactgcttgggaggccaaggcgaggagatcttgtttgaccccattaaggtggaggctgcagtgacccaggtatggtggctcatgcctgtaatcctagcactctgggaggccagggctggaagatcaactgaggctgggattttgaaaccagccggggcaacacagtaagactatctctacaaaaaattgaaaatttatccagatgccgggcacggtggttcacacctgtaatcccagccctctgggaggccgaggcgggtggatcacctgaggtc

SEQ ID NO: 159253 - DNA, 160 bp, Homo sapiens
tccacttccctagcgccgccactgagaacatttcaaagaatatcttttaagctctgaagtcaagtttcaaaggcagactcaggcaaggtagcattgttagaataaatgggtggtcagtcatttggatgtaggagtctatgtgtgagggtctaaacacaaa

SEQ ID NO: 159254 - DNA, 223 bp, Homo sapiens
cctcttgaaatgtcttatggtaatcgcgacagtacaaatattccagcctgaagactgctgttctatcaagaattagattactctatttctagagttgacagctattggaagaactccttaactagccataaacctgggaatcctgcactgttcttctacttagggtcagtgcagtcaatgtgaatccagagattgtttgctttctctcaccaaaaaaaaaaaa

SEQ ID NO: 159255 - DNA, 244 bp, Homo sapiens
gaaaaagaaaaaaagtactctatgggttttgttggaatggtttgattcaccctgaaatttgtaatgggagaaccagaggaacaaaagtttgtaaagaaaaatttctctcattctctttctcgtaagtctctcctacctcctttcctttggacaataataataaaaatgctaggatcatttgattaaataagagtcactcagtcaacacaaagcctgctgtcttcctccagtatatttgcatttg

SEQ ID NO: 159256 - DNA, 425 bp, Homo sapiens
gcccatctttccctcatttcagcaacactttcagtgagccccagctcatggaaagagagacgaggagagaaaaaggcttattcctgaagctaatagctttccttctctctctaatactatatgtttgcagtgacaatgatccctcagcttctgaatcatctcctcattctgtgatgtacccctgggttctgagtttcatttctttggcagtcagtcacatgctgaatatagagcacctctaatttgttcagtgtctcatggatcactgagaaagaatagggccttatgacaaactccactggtcagagcgcccggatctaggtgtgtgatcacagcctttaacacttgaccaggaactcatatttcatggagtgagaattgtgagaccttgcactagggttttgtgattctgagaaagatgctgg

SEQ ID NO: 159257 - DNA, 267 bp, Homo sapiens
acacagggtaggcccaactgtacttccaaaaggttctgttttgttttccatttcagcactgaattttattattattcgattctaaaatggatgcacactcatatatatcgtagaagtgcatgagataaagtccctgtcctcaacagctgccatgaagttcttctagactttactgcacacatgccaacacatatatgcacactggtacacagacatatatatatgtaaatattttacaataaatagaatattatactgatgactttg

SEQ ID NO: 159258 - DNA, 119 bp, Homo sapiens
caaataacagatggcctttagtcactttcccgggaatgacatgacgaaaacaaacttcaaaatctagtacaatttgtaggtcgcattcattatgttgtattagtccctagttttatgtt

SEQ ID NO: 159259 - DNA, 274 bp, Homo sapiens
ctgtacaaacagcccatttcacttacagaggctggtagagcacatgactaatgtaacttactcaaggtcacagagcagattcttgtaatgattaggactaaaattatgtaattagctgatctgtgccactttctttatctccccatttaacgttttgaccataggttcccaaaacctcaaaaaattattttctgtgatgtttatttcaatagaactaagttctattaagaggcagattaggtagctgtatatgtagaaagctcttgaaaaataa

SEQ ID NO: 159260 - DNA, 204 bp, Homo sapiens
tggcaaggtcgggggaggggccaaggtgaccaactagaagtagctgctgttggctgctcctatcaagaatgaaaacagcgagtgaatgttgcactttcaggctgaggtaaccaggttctctcattgggactgactaggcagttggcacaacccacggagagcgaggaaaagcagggtagtgcaacagccccacctgggagccgc

SEQ ID NO: 159261 - DNA, 149 bp, Homo sapiens
cttcaataattttctttcacaatttctaccaaacacacatagcagcagatgaggtgtgaattatcagtatcttaaataactgaagctaatgaacaaaaagagtttagctcttaaacaattaggtataaatcagctctggcttctttttg

SEQ ID NO: 159262 - DNA, 595 bp, Homo sapiens
caccactccaccccaccctgtgcctctcctggtcatgtcacacatgatagtgtggcttcctagttatgagcccagcctcaggagccagactgtcgaggttcaaagctcactgtggcttgtgggaccttgggtgtccccctccaagcctcagattcctcttgtgtaaaatgggatcacaagagcaagtacccactactcctggggctcttggggagattaagtgagaaaatttatgctaaatccttaaaactcacataagccttggctgctatcgttgttgaataaatgaaccacttgcaggctgagaccggggctgtgtgtcacatggcacctctaggcctcagtttcctcagctgcttctttgggaaagcacatctgctctctaggttgggcctcctccctcgtccttcaaagacctattcttggggcctgggccctgtgaaacctctggctctcggacgcagcctggaacccctgagacgaggtcaagctccgcggcccgcctcctgtcgcccggccccaggcgggactgccttggcaggactcgggccgcgagctggaggcgcggctcccggctcggggctccagcggccgc

SEQ ID NO: 159263 - DNA, 213 bp, Homo sapiens
gaggacaatattctgctcataaacttgctgtaaaggtaaatgagacagcatatgtaaatatatgcttagtacagtgctccacatatagtaagtgttgaatgcatagttatataagtataaatgtggataaacatgtatcgagcacttggaaggcagtgtattaggggatttacactataggcagatacacagatatatgtaaaggggggagtg

SEQ ID NO: 159264 - DNA, 242 bp, Homo sapiens
aacccatggggtcagcagagggagatgcagcacaggggctactgacaaactctctggtgtggctctacctggaaacagggatggacacaatgacctcccttgactatgcgtggcctgaggtcctaattggagacttccttactccctcatccacctcttattgcgaacctggccattcttccatcatggtatgtgggtgtttctttcctcctgaggggtcctcagcttcttgcagcctctgc

SEQ ID NO: 159265 - DNA, 418 bp, Homo sapiens
ctctgggtaggcccgtaaaccagggctccaccttctgactggctgcaggtggtcagattgctcttggctacccaggagccagtgggttcttggttctggagaagctggttgaccacaagggaattgtaggttactggggccggcaccatgggtgccctttggaaggttctgctctgacctatccctggaggccccagccagaagagttgtcacttcccttccggccacccactgtgcaagagacaaatcacatgctagtttcgtgccatcttccagtaagatgtgggaggcactggcctgagtgatcccttttcaagcaaagccgcatctcgccgtgctcacaggactactgtcataggaacatggatggtttgttcttccatttttgtggagctcggggatggggggatgtgtctgt

SEQ ID NO: 159266 - DNA, 345 bp, Homo sapiens
caagaactcattgttcaacgtaatagtatctactggtatcattgggttaaaaaattgtaaatatattttaatacccgtgtatgtctcctcaacctataaactcctcacttaccccagaagtaacagttttcctgaatttggtatgttttatttctatatacattttcctgccttttctacaagcaaatgtgctcataaacaacatttggtattgatttgcacattttcaaagttagtataaatggtacatgctgtgcatagtattaggcagtctgcttttactactcattgttatgttggctgtggatacatgtagctttagtgaaggatctgctacatagtttt

SEQ ID NO: 159267 - DNA, 321 bp, Homo sapiens
gtccaggttctccagagggacagaactcataggatgtatgtatatatgacagatagtttgttagggagaaatggctcacaggttcacaagaccaagtcccatgacagaccatctgcaagctggggaagagagaagccagtagtggctcatctaagtccaaaaagcctcaaaagtaggggagctaacagtgcagccttcagtctgtgactgaaggcctgagagcccctggcaaaccactggtataagtccaacaatccaaaggctgaagaatctggagtctgatggaatggaaggaaacatccagcacaggaaaaatatgaa

SEQ ID NO: 159268 - DNA, 364 bp, Homo sapiens
tctagatattcaaattgctggatcaaactttgtctattaactacagacatgaatgttggtatttatgtagctgttaaaatgttgcatagttttactccttggtaacattaaaacctatagagacttcacgtcctgagagtgtcagagatgttggctagatgaggctattactctgcctattctagaacattctcaggcacggaagcttactcccgcattagcaagatacccagttttgtcagatatttgtgctttagaaccctggcccacttttcttcccactttaagtagctattacctgatacacaaacaacttgctccccggaagggaaatccactggcatggttcatccacggcatgaag

SEQ ID NO: 159269 - DNA, 356 bp, Homo sapiens
actattttaccaggtaaattatttttattttaaagggcataaatctgtaggacaaagtggagagaatggagcaacaatttcgaaagctggaaagcagatgcctgatctgcagtaactaacttagcaggcgcacagaaaccgatctttttgctggcagtgaggaaagctgagaaacaagttgatttacaccatcgaacccattaaaggctcaaaaatttgttgtatcatgtacttctgagtacaggagagaaggtggggcaacatgcaagagatgcagttgaaacactgtcaaagtctatcagatccctagatagctcctcttgttcatatagcattcccctcacctaggcgcctta

SEQ ID NO: 159270 - DNA, 364 bp, Homo sapiens
tcccctgctgtcctctgaaatgcttatctaggcatcgatcttggtttcctcttcaactgattaactaactggtctactctgcccagtctctatttgagaaatcatttgacatcattttctttaacttgatgaaatctcctattttgacaagatttacagttcctctttataagttcctctttactttgtgtgtgctttatattgtctttggttgacaagagacagccaaagaggtcagtcagcagagatacaagtagggataagatggatagggagaaacaacagtgttcaatagggagggatgtttcagggaaactaatttcataagtggtcatttcagtagtgaatatatttgaatggttaa

SEQ ID NO: 159271 - DNA, 411 bp, Homo sapiens
acatgtacattccaacttaagcacacacacagttttcaactcacttgcctataaacacacacacatttcaatcagttactagaatgtgacattccactacttgtctgtctttggctgtctacactgctaggccaggccgaggacttctctctgaactccaacaatctttgaacacccttcctgtctacactttcagctctctcaaaatgttcagttacccttcctgtctgtgctcatgacttcagtctcattcccaccaaaccatcctcttttctgcagccacagggatttttctaaaactcaacccaatagggtctcttttctgcttaaataaaacttcattgaccacttctctacttcccattactgatcctagcatgatacacaaggccttccatgatctcacctgtc

SEQ ID NO: 159272 - DNA, 458 bp, Homo sapiens
tgaggagcagcaattaaagtcccagttactgagcggcacatagtaggccctcacttgagagaccgtctcagctacagacatcagtgactctcgtcccctgtgcacagagagacatgaacacacagatgttcataccaagagctggtggcagacccaagactagaaccaaggtctccagactcccgggccagggcccttccatgatgtagccccccggtctcttcaaggacaacagttggggagagtgagaaaagcaggtttgggagactgtgtccttgactggcagcagccctcaagccaccccacagtgggcgctcactggcatgaatcatccttctcttcctttcttcaacttggttccaaagaagaaataatactgggggctgggggctaaaaagcgcacatgtcctttcctcaggtgtcaattcactcccagcagcactgactgagtgctgacc

SEQ ID NO: 159273 - DNA, 296 bp, Homo sapiens
aaaaccactgaatcagaaccaaaaggaacccagttcaaatcccttcccattctgagaatctctaattctggggattgtcctaaaacccacagctattataaagcattggcagtgtgatctagtggttgagttctttctaactctgatgtcagacaagtctggttgtgaaacccagagttgcccctatgtgacctttcatctcaaagtctgttaggtcatctgtaaaatgggggtaataatagtcccttcctcataaggctttacaaggattgaaaatgatgatgtttattacaaca

SEQ ID NO: 159274 - DNA, 363 bp, Homo sapiens
acaatgcagagtcctggaagtgaggctgaccgctgaccgctgtcaggagggacatggaccgctgccggggaatcatgggatttcccaccggcccagtcatctcccacgtcgggaaaagggaagagctgcttccccatggcgtgtgcgcgtgggaagggtctcgggcagagaagaggcactttttctgtcctccaggctgtttccgccaaatgaagacctgggctggaagagccaggaacaaagaggagagtcgagtgctgagcacccagcgggagaggatgcagcccggtcatctcacacctgctgaccacacaacatcgtctgcgagttccccccacctacttcgcctgcagctgccatttg

SEQ ID NO: 159275 - DNA, 108 bp, Homo sapiens
agaaaaaatcttcagtcaattacttcagagccatctcctctccccactgctctgctcccctgccccaaaattgagtataaaactagtaactgggacattccagaaaag

SEQ ID NO: 159276 - DNA, 218 bp, Homo sapiens
taggtactcatagttactatacagttgacatttcaaaacaatttgtagtccaaggaaaagtacaaaaaacaacatactgcacctgactcatataaaattttcctgccctggaccttcccagttgtacttattttacactagtggttcccagatcaggatctcaactaatgaggttcttagacctgttctcagtattttaaaaatctattgtgtatgtt

SEQ ID NO: 159277 - DNA, 214 bp, Homo sapiens
  misc_feature (5)..(5): n is a, c, g, or t
attantcttaatctctctatcttaatctctctatcctatatctctctatccttaatctctttatccatcattctgctgtattttcttataactaaaaatggcatttctgctcatgagatcattccaaatgtcatgtttgttttttattataaaactgagttcttctacctaatgttttaatctggcatttcaggaagactcaaaaaccaacatt

SEQ ID NO: 159278 - DNA, 330 bp, Homo sapiens
ctacagcctcaatttctccatatacccagggcaggctgtgttccttcttctctgatctctggagtctgagtttagaatctggccttgacccctggatccctcatttccatccctatacccccctccatcacccactttattcttccaggacctagagcctcctccgtgaactgtgggtcccctgctcatcctgtaggactgtcctggcaggcagtgtgtggggagacccaagcctgctttgaactggagcttcctatccctcacaggcaccgggctctgccccagcccagcccacttggctctcctggcaaggagtgggctccacctaga

SEQ ID NO: 159279 - DNA, 425 bp, Homo sapiens
tatgtgaaggaacccatccctagggtggctcaggaatttgagcgaacaagttcagtgacctgggcgtggtcatgactgatgtgatgattctaagaaagaatgagaacgtcatggacaaggagagaaggacttttacaaaagaataagagggctgggcacagtggctcacgcctgtaatccaggcacttggggaggccgaggcaggcatatcacttgaggccaggagtttaagaccagcctagcaacatggcgaaaccccgtctctactaaaaacacaaaaagttaaccaggtttggtggtgtattcctgttgttccagctacttgagaggctaaggcaggagaatcgcttgaacccgggaggcagaggttgcagtgagtcaagatcataccactgcaccccagcccgggcaatatagcaagactc

SEQ ID NO: 159280 - DNA, 839 bp, Homo sapiens
aagcattcccttttctccccagactggccaacgtctggtattttttgacttaatagtagccattctgactggtgtgagatggtatctcataggttttgacttgcatctctctgataattagtgatggtgaacattttctcatgtttattggccgcttgtacgtcttgtgttgataagtgtctgttcgtgtcctttgcccactttttatgtggttgtttgcttatttcttgttgatttgtttgttagctcaagtcttagtccctcgggtctcaccatcatcttcctccagcccagctctcttctctacttcctcctctggaactcctcactagaaccccgaaaaaagcaaacagaaacatttcctgaatgcttgctgcaaatcaaacacaattctagacatgggcgatgcagagacacaggccagctggccaccacatgtcattcattctaagtagcacttttgctgtttttttaaaaaagtcaacgtctccgaaatcagggtatgtcttaccactcatagcccattggcaggttcttttcttttttagaggtacttgaaacaatgattcattttacaaccatggcatcttaggtttgttgaaatataatagtttctcccttcaaggaacttacagtctgccttcagggtgaggcaagagcacagtaagagccaagtgagagcatgccatgtgagccagggaaggagcacttccttctaacctggagcatcagaggggtctccctgataggggaggatctgaactagagcttgaaggatgagtggatttttctgtatttttcccttgctctgtcgctcaggctggagtgcagtggcacaa

SEQ ID NO: 159281 - DNA, 397 bp, Homo sapiens
accagggtatttccactcatctggcctcggtggttatttaatacagggggtgagcagaggtcccaagcgagtccattcagagcccttcctgtgtcttctgttggaacaactcagaatctaagaggattgctagacataaatgcactgtgagcctagagctccatgaaaatcagcctgaaatcccattaaaaccagtagaaagacaagcagagagaagggctggagagtaacaggggacaaagggggggtgagaaacaaagtccttatcctgtcatttaggtatctggatccagcctttcctgcttcccagttatataggctaatacaatcccctttctggatctttcttttattttttgttttattttatttttttggtttgagacagagtctcgct

SEQ ID NO: 159282 - DNA, 376 bp, Homo sapiens
ccatcactctgtgtgaaggccctgcacgctcggaccggttcaattatgaacaggagggcggttaggtctgtgcgtgcgtgtgtgtgtgtgtgtgtgtgtgtgtgtgtgtgtgtgttcagagtaagaattctggggagaaggaacttactcatcataaaattttaattgttctcttaggtgcatccttccatctgtccttgagaggtgggaggtcctgagtcctagaaaccctagaaaattctttggaagttgcaaggggtggattaaggaaaatagcccgtctttttaattgcgatttcctggccagcagcttaattgttgtggtgcttttctagaaactcccttatcctggctgtggaaattacatgctgaatct

SEQ ID NO: 159283 - DNA, 168 bp, Homo sapiens
tgatgagcttaaaaaatggtcatgttgggagaattaaacaagctgagaggatggagggcaagtgatgacaagcactattatgtaattgtgaatgtggttgattgatgtagacttagtgatgggaggacatctagaaaatgggggaggagagcacagctttagacaggg

SEQ ID NO: 159284 - DNA, 244 bp, Homo sapiens
tgagagaacaggaaacctgccgagaaaaagatcgataagcagacaattacaccaagccaacttcagtgcaatcgttaaagcttacacatgggtgcacgcttgggagccgtgagctaccatgttaaaaggccaacttcctaaggaaaaatgatggaaagagatcccgagatcctatgaaatggaagagggaggacaacccagctatcccaacatcccagctgaggccagccacacacgtgactgt

SEQ ID NO: 159285 - DNA, 213 bp, Homo sapiens
catccacctcatctcccacccccacaggtaaactttctaattgtgtgtgtgtgtgtaagcttccagtttctccctgtgtaagcacaagcaaatgtaaatatgtatattttatttctgttttcttacacaaaacgcggcactccgtatatattgttctgcaccttgcattcttgcttactagcatgccctgcagatttttttttttttttttta

SEQ ID NO: 159286 - DNA, 132 bp, Homo sapiens
tccaccactgtgacatgttcctgccctaccctaactaatccatccaccttgtgatatgttccttccctaccctaattaatccatccaccttgtgatatgttcctgcccttccccaactaatccatccacctt

SEQ ID NO: 159287 - DNA, 201 bp, Homo sapiens
ccagcacaggcttcgggggtctgtgttttctcactgacaagggagccccaaacaaaaggctctggcagtgttagggacccaggggtttgggggaggaagaaggaaaaggctaggtgtggaaaaatacctagtactgagtcagagtggaaagaagtgtcttcaacgtttgctcccacttcctctgctgtgaatatttgtaaa

SEQ ID NO: 159288 - DNA, 337 bp, Homo sapiens
cagactggcctggccaacatggcgaaaccccatctctactaaaaatacaaaaattagccgggcatggtggcacatgcctataatactagttactggggaggctgaggcaggagaatcacttgaacccgggaggcagaggtggcagtgagccaagattgtgccactgcactctagcctgggcagcagggcaatactttatctcaaaaaaaaaaaagaaaaagaaaatgaaagtcttctaacatcttgcctcattggtcattgagtcaataaatatttgctgagcacctatgtgctagatgctgttccaggtctagataaaacagtaaacattatagac

SEQ ID NO: 159289 - DNA, 447 bp, Homo sapiens
gtgcagtggctcacgcctgtaatcccagcactttgggaggccgaggcaggtggatcacttgagatcaggagttagagaccagcctggccaacatggtgaaaccccatctctactaaaaattcgaaagattagctgggcgtggtggcaggtgcctgtaatcccagctactcaggaggctgaggcaggagaatcgcttgaacatgggtggtggaggttgcagtgagccgagatcgcgccactacactctagcctgggcgacagagtaagactccgtctccaaaaaaaaaaaataataataattcaatgtcgtttctttgtgggtactgtcttgagaagctgcttgttttcttaactctttagatgtttgtaaattacattgctgttctttagtttttctggctttcctaaggagacctgttgcaagtttctgctgtatcaccttcctca

SEQ ID NO: 159290 - DNA, 135 bp, Homo sapiens
atcatttaatcagcactctgcttgaggtgaattgtcttaatttcccttcatctaggaatgtgttcatttcaccttcattcctgaaagacattttcaatcactggatatagaattgttaattgatgggattttttt

SEQ ID NO: 159291 - DNA, 329 bp, Homo sapiens
  misc_feature (214)..(214): n is a, c, g, or t
  misc_feature (223)..(223): n is a, c, g, or t
  misc_feature (272)..(272): n is a, c, g, or t
aaaaaaaaatccttaatttaattacatctgcaatgactcatttccaaataaggtcatagtcacagattctggccattaggatatgaatagatcatttgcaaactacccaactgacaggggactaagatccagaatatataaggacctcaaacaacttaacagttaaacaaataatcctattgagaaatggacaaaggacatgactagatatttntcaaaagangacattacaaatggccagcagtgcttcaatattattaatcactaggggnaatgcaatttcaaaaacttacaatggggttatcatctcacttccagttaggatggct

SEQ ID NO: 159292 - DNA, 548 bp, Homo sapiens
attcttcaaaagaaatggtctgtatgcttcaaaaatatcaactcatggaagacaagactgaggaagtgttccagatttaaggggactaacgagataactaaatgtaatgtgtgatcctggattagatcctggacctgagggctttttccccctttgattgtaaaggacagcagtagacaataggtgaaagttgaagaaggtttgttgattagataatagcattgtatcctgattttgatcattgtactctggctatataagagaatgttctttattttacaaaatagtcactggatggagttgaggggaagggacattatctctgagattttatatagatagatgatgaaaggatggatggatggatggagcagtagacagatttgatggaggagtggatggatggagatagttagatagatagatagatgaaactgggaatgatcaagcaaatgtggaaaagtgaatctggatgaacagtaaagggtttgtttacaagaattctttgtactatgtttgcgacttttctgtacatctggaattgttta

SEQ ID NO: 159293 - DNA, 199 bp, Homo sapiens
ctagctgttccctctgcctggaactctgttccgggaaatcatcttggttcaccctccttcatgtctttcagctctcaccattctagctaacgttgacccccactccagtctctaatatatcattgctttatacccttcatagccctatttgcatctgaaatcatcttagttgttttaggtctgcctttcactctagaat

SEQ ID NO: 159294 - DNA, 255 bp, Homo sapiens
ggagtaccagcatccttgaagagctatatgatccctcacctctgtaggtcagaaattatgtgggaatggctgacactgaagcaggaaatctcaattcagtgaggataactggataccaagatggttgaggccaagtgacgctaatttcacctaaacatcggcatggttagtacaatagacagcacagtcaacacagtaatcatgatagtctgacttcggagaactatggtgctggctagttgatcacagtgttcc

SEQ ID NO: 159295 - DNA, 533 bp, Homo sapiens
agcctatatctggatctcagtatcgcatctatatcactgaactagcgagcttctagagaatacgaataaccacgatgtctcaggaggtacaaggcgagcagcaacaaggactaatgatcacttcttcaagaatttatcccaagaaatgcattgtatcttaagttggggaacacttttacctactctaaaatctttagaggtattcagataaatccatgatctgagttttatgttaatagttttacagtgtcatagtgtggtcctgaagtgtagcaatttcaacctctgagccactgcgcccagtgatgtgaaggaatttctttaacaaaactaaatagggcttatttttatatttatagattgtttatgacagtgctttctagggactgagaattataccgtatacagactcaccccaatttaaaatttcttccttcaaacgttaaacctaatccacctcaatccctgacacagtaactgaaagcttcaaatttttgagattaattcacttgttaatagtgaatttgaaatta

SEQ ID NO: 159296 - DNA, 222 bp, Homo sapiens
attattcatttttcaaagtatattttaagcatatagagaaagggatcaaagggagctagaatatttaagaggtcttccagagtaggtgggtatttaagttataaaggacacacagaaacccattaaggaaataaattacagaagattgttaattaagggtcacagttctatgagggtatgaaggtgggggtatgaagaggtggggtatgagacaacagtgca

SEQ ID NO: 159297 - DNA, 381 bp, Homo sapiens
gactctctcaggcttgcctgccccctgggcatcagcttcactctctctcgggcttttgtgaagtatcacattgctgtaggcagttctgcaggcaaaatttgcaatctcacaaacagagaaaatagataattccataccacttccatccaaaatagaataaaatcatctcagtttggcacatccctgaatcaaacactgtggccaggagaatggagcactgttaccaacatactgtattgtgcaggtgtagtctgtcatccaaaagaaaaggaggccaggcaaagacaacagtcaccatactcaagctcttcaaaaagcagtgcaactgtggctgatacttgacagagcaggagcatcaccatcttggacaagcaccgccat

SEQ ID NO: 159298 - DNA, 279 bp, Homo sapiens
tggttgttctttgtcttcaacttcctgcgccaggctttctcaggttcttggctgcccctctccttgccttcctaacttctaagtactctggctctcttttcttctacacctgccctttcttcctaggtaatcacaggcattcccactcttgtaaatatcacctcttcagcaatgctttcctgatttttatgtctagcctagacctctcctctaaccttcacacttgcagtagctcccacttctctaggtggcatctccacttagatgtctcaccctgtg

SEQ ID NO: 159299 - DNA, 442 bp, Homo sapiens
atgttgggattagcaatctgtgacttttaaagcatcttttccagagatgggtgagggtataatggattttaattgagatctcctttaaatacatttctaataaagaatttcacaagttcacaccacgtaccaaacacaaagtattagatattgtgaaaccatagagatagacaccatgttctatttcttaaacatgctacattgtccagcacaatgtagtattaggcatccaacatacgtacaataaatattgttaaattggctggccacaggagcaagaaaaattgtattgttggagtaggaccccgagacgatgtgatggacatgagtaactccagctgcgcctctacattgatgttgggaaactgagaagagaatgaggtcaacattgcagtgatgaaaatgttgcctgacccttaggcagggtcttgaatcaaaaaaa

SEQ ID NO: 159300 - DNA, 440 bp, Homo sapiens
  misc_feature (407)..(408): n is a, c, g, or t
  misc_feature (433)..(433): n is a, c, g, or t
  misc_feature (436)..(436): n is a, c, g, or t
ccctcgtcgacctccagcccagaaagcacctgcaaaggccagcttgaccctatacaaatcatcaccgccaaacacccacggtctccactgcctgggagccacatccattctcagtcactggacacaaaacaccgctcgtcatgtttctgacatttgtacacatcctccacataaatgaaggttagctgtttagtctcctcactcaaccacactccagcagggatcttggagggaaaagaagcttttgaagctgagaatgatcctaaagcacatcggctttactcctaagagagtccttcatgtcctctctcagaagccaaggccatggtgactccacatatccgtacctgcaatttccaacacacccttaaactgaccctcaatgccagattcacacttctgtcganncggccgcgaatttagtagtagtagncgnccgc

SEQ ID NO: 159301 - DNA, 247 bp, Homo sapiens
  misc_feature (214)..(215): n is a, c, g, or t
  misc_feature (240)..(240): n is a, c, g, or t
  misc_feature (243)..(243): n is a, c, g, or t
ccctcgtcgacctccagcccagaaagcacctgcaaaggccagcttgaccctatacaaatcatcaccgccaaacacccacggtctccactgcctgggagccacatccattctcagtcactggacacaaaacaccgctcgtcatgtttctgacatttgtacacatcctccacataaatgaaggttagctgtttagtctcctcactcaaccgtcganncggccgcgaatttagtagtagtagncgnccgc

SEQ ID NO: 159302 - DNA, 236 bp, Homo sapiens
gggaggcagaggttgcagtgagcagagattgcaccattgcactccaacctgggcgacaagagtgaaattccgtctcaaaaaaaaagtaaaatttgatgatttggggcagatgtgtccatccatagaaccatcgccacagtcaagataatgaatatatgtatcacccccaaagtttcctctctccccatgtaatccgtccctccctctctccctgtgtaatccctccctccctctct

SEQ ID NO: 159303 - DNA, 513 bp, Homo sapiens
ggtggaggagctgggattaataaacactgataggctgatacacattcaaagattctttttttccttaaataaattcctcatgtctacacactttgtgtgtgtggtgtgtggtggagagggaggtcaggctctcttctacaaactgagcttagaaaaaaacagttcatagggtgagcgcggtggcacacgcccataattgcagcacttcgggaggccaagttgggtggaatgcttgagcccaggagtttgagaccagcccgcagcaacatagcaaaagctcatctctacaaaaaatacaaaaaaatttagccaggcatggtggcttacgcctgtaggcccagctacttgggagactgagatgggagaatcacctcagtctcccaagtagctgggcgtggtggcgtgtgccggtagtcccagctgctcgggaggctgagacagaggaatcacttgaacccaggaggcagaggtggcagtgtgccaagattgtgccactgcctggggacagagcgt

SEQ ID NO: 159304 - DNA, 141 bp, Homo sapiens
accacccaaaacacacaggaaggtttagccataggtggccagagctctctaacatcatccccaggaagtctgtgttggtcttaagtcctagagtcattattcaaagttttacttaggtggctcatgcctgtaatcccagca

SEQ ID NO: 159305 - DNA, 165 bp, Homo sapiens
caaactttaaaattagacacaaaacataaaatattgtttaaataaataaaagggaacgagtatataagaatcgagctagatcagatagattagacacaggaaaccagagggaaaaaactgagtaaattatctagactgcagcacatagaaatatagaaatagaaa

SEQ ID NO: 159306 - DNA, 303 bp, Homo sapiens
gtgcagggtagactcataacctagcacagaaaaacacattactgaggaaaggaaaagaacgtgaatggggaattttgagacttagctcttcacagaaaagcatgcttggcaattacaaacttcttatattaaaaaaaatcaggcaaaccaaaagtcattaaagcattaaagattaagacccactcacaaggaattcacatactctgcttctttacaagggcagtcttgcacctacactgacttggtgcacctccttacacagaacaaatccaccttcatgacttgagtataaaaaaatgcttt

SEQ ID NO: 159307 - DNA, 353 bp, Homo sapiens
tgagtagctgggtctacaggctcatgccaccatgccccactatttttaaatttttttgtagagacaagggtctcgcctcattgcccaggctggtcttgaactcctggtaccaagcaaccctccctcctcagcctcccaaagtgctgggattacaggcatgagccactgtgcctgggctaatttgattttttaaagctttttattttgaaataatcagaggttcacaggaaattgcagaaatagtagaggtcctgtgtacccttcacccagcttttcatttaacttcttccagtggttggttccatcttacataactatagtaaacgttaaaggtaggaagttgacactggtag

SEQ ID NO: 159308 - DNA, 186 bp, Homo sapiens
cgacctcggtaagggaagacgtggaattccgagtgtggagacccagacagcctccgaaacccccacgcaaccctgggcgttcagcagctgccaatgcccgcctgacaagtttctggggcatctctgcacacggagaggtgtgtctcctgcagctccaaaaacagattttgccatctcatccccata

SEQ ID NO: 159309 - DNA, 397 bp, Homo sapiens
attgggtgacataactgaacaggtcgctgcaaacactgagaattattgagttgtttaggtgagtctctcttgtttaaactgttgaaaggttcattgatttgtgggtgagggaaaactgttgtagcgtagttttagtgtttgcatttcattttaacattaccttgcaagggatttttcatgctgtactaaggagattacaaggccaccctaaggcattttagggttatataaggaactggctttgctgttttatgtactggcccttttattttctggctaagccagaatcttggtaaccctctcacctatcacctttgggtattaccttttcagctctccctttgccctcatgagtccaaccagtgccctggtctgagcctccatcctcccaactgcc

SEQ ID NO: 159310 - DNA, 865 bp, Homo sapiens
caagatggcacattgagtttatgtttcgactcactccctttgctccaaacacatagcaatgacgggtaaaatataaacgagaaaacaaaagagacaaggctgggcttccagaaacaagataaatatcttcatggaccagaaatgccaagtagtgagcaaaactgcagcctgggcctgctggactctctatccaaggcaggtggtggtgtccaggaatttggctacaagtaacagagactaaatgtgcaccatgtgggacaaggggccagagtcttgaaatagctgtcatgtcctgagaaatgtggacctgtaactcttaaaaatacacgactcttactggtctgttatatctggtaacttttttgcccgttactaatatgtaatactgatcacctctgcattctatgacagtaggtaaccttgggaaggttctttgttgcagcaagaagagctttgggattttcttacacatgaagtagaagtaatagttttgaattctttagttaaccaaaaggtttctgatatttgtgtcatttaagttaactaaatatagctggagttttaggaatccaatctgataaagtctgattaggtatattacatcagtctatacttgttattactgacctatttctcgtcctccttttctcgtccttttttctgccattcgctggcatttataccggggtcctagattcctccctgacctcccttgaatctctggtcttgagaagcgacaagtggttgactttgggtggtaacctttttagtcttccttggacaggatattcagaattcctactaatccgaagattcacggctgcataattttaataacccactaaaaatctcgggttcccttcgt

SEQ ID NO: 159311 - DNA, 269 bp, Homo sapiens
ttgcaaaatttttaacaagtgaaaagcaatgacgggtaaaatataaacgagaaaacaaaagagacaaggctgggcttccagaaacaagataaatatcttcatggaccagaaatgccaagtagtgagcaaaactgcagcctgggcctgctggactctctatccaaggcaggtggtggtgtccaggaatttggctacaagtaacagagactaaatgtgcaccatgtgggacaaggggccagagccagattcacttcttgaagccaaggact

SEQ ID NO: 159312 - DNA, 429 bp, Homo sapiens
tggcacccacaccacctgagtccaccacctgagtcctttctctgtatctcccatcatcatttaaaatataacatcttacaaaccttagctcatttaaatgaagaaacctagaactaacctcagtaaatacctgagcagtactggtacataaaatgcttgtgatagtgctgccactagggcaaaatacaataaagctaacattataataaagagagtcacacaaatttgttggtttcccagtgcaaatagaagttatgtttatattatagtgtagcctattaagtgtgcaacagcataatgtctaaaaaatgtgcttattttaattttaaaataccttattggtaaaaatgcaaattatcatctgaacttgcagcaagtcataaccttttgctgcttgagggtcttgacttgatgatgatggctgctgac

SEQ ID NO: 159313 - DNA, 397 bp, Homo sapiens
ctgcgctctgaggatcccctaaagcatcactcccctcctgtcctcacccacctagcagaggttctgttactcatatactcctaataccagctgataacagctaatatgtatctctaaggcaccgtgattattcccattttatagatgaggatgcagaggtcttcctacagctaaagtggtggctggtacccctgaccccagggtatgtttaattcctgagctagactccctaagacgggacctggaaaattttctagccctgaggaatgtcagagcatcatgtgaatcattaggacagacagactgtgaggaagaacatgagctgggcgggaaagtttgtctgagctcaggctctgcagattcctgagatgccagagcacattcttacctgcagaaa

SEQ ID NO: 159314 - DNA, 371 bp, Homo sapiens
atatggtggagtgttgcttaagatctgaaagtctagaagctggaggttccagtaattatattcattatcaatcttaagaatttatttcgatcagtcctcatcctctttgtaaaactctttccctcctccccttttgcgccatgctgcacactcctggcttccttccccagtcccactgtgcttcccatgtcccctgatccccactggcctccacgcacctaaacactgcagtgttctccaggaatccatctctccttagtctcccagctctcccactatggacccatcccatgactccatcttttgctgggtgtggatacacacccccagtcccttggcacaaagattttggccaaccctgggtccagctc

SEQ ID NO: 159315 - DNA, 484 bp, Homo sapiens
agggaaggggagatctcaagaaggggctcagaaaaaaaaaggctgaggaaggagggagaaacttgagtaggatgtattttattgtataactatggaatcctcttaataacctctgaagacacttcttgagtcatttccatgtgtgagaagttaactgtaaaatcacagatgacatactgtttgcaactaagaggtcttcagggttcagggacttattatagccaggggatcacaggttccaaagagttcttccaaagtgtaaatggagtccaggagctgctgtcaatatgtcttaatgtaaaatagtatttgtgcatttaatcataataaagacagcataggctaactagtgggttaaactataatttttttgatgtgcaatggaattaaatcagttatatcagttactgcttggtaaccagagacacggattgaatggcaattgaatcctgaataatcaaaatggggaaacaaatgattactt

SEQ ID NO: 159316 - DNA, 404 bp, Homo sapiens
caaaaggagagtacagtgcatcagaatggggcagggacatgagggaagtaggcaggggagaagaaagctgactgcatcaggcaggtcaaccagcagggggttctgtacctcctgtcactactggtgagctgggggactggggtacagattctactgctggtgctcaattcccagggttcactgcccagcgctcagtatagttgatcctaccccttactccagacactgagccacacccaaatctgaccctgggccctgggagagaagagtaaacccgccagtggatgctgactgtgggtgggaggcagctgggagagaccaggtgagggaggatggaagagcctgggaaaggctgggcctccagagcttctgacagcccccaactgtgagggacatataagggg

SEQ ID NO: 159317 - DNA, 186 bp, Homo sapiens
ctgagcatataaagtgagtaagatcatcttggtttatgacttaatgagagtttaaaatcaggtaggcttgatagactcttaagccacaacaataaagtgagattagtgcaatgagaggagaaggatgtggtaccacaggcaaatacggcgagaacagccacactagtatagccagcagttactctc

SEQ ID NO: 159318 - DNA, 414 bp, Homo sapiens
atacctgggcttttatgtgcaagagaaagaaacttctagcttgtttcagtcactgttttgttaggttttctactgcttgaagccaaaacgactttaactaataaaaactgaactgagtagaaaagaagtaaaaccaggaaggggctggtaaagagaagaccagagaccagagggctgacccttaccctgtcagtccagaagcaggtttagagggagtggggtagaagggaggaaggctgtaatcaaaaggggaatttcagcattctagatttcagaagtagaacagttcccaagaagaagtggttaaattctttgggatttttggttgtttgtttttgagtaagggtcttgctctgttacccaggctggagtgcagtggcatggagagaagtgaatgggttcttggtatgaaca

SEQ ID NO: 159319 - DNA, 202 bp, Homo sapiens
gtacctaaaaagtagatcagaaaccaagagaaatatttggtctgcagaggcatttttttttaacttttatttaaggtttggggttcatatgcaggtttgttacatgagtaaattgcatgtcaccgaggtttggtatacaaatgatcccatcacccaggtagtgagcagagtacccaacagctagtttttcaaccttcccacc

SEQ ID NO: 159320 - DNA, 521 bp, Homo sapiens
acagtcacacaagcaggatatatgaatagcaatctctgatcaagacattcctgtgcagataaaacctgcccaaggggatgaccatggtttgcattagcaatgctagactcccagggaaagaagtgatttcaggaagtgcatcagctaaaagcgtgtgaagttcaaagccaagagtaagaaaacaattagaaacagacgtcttctgctttaccacagcttgaccagagaaaagtggagatggtttatataagctacagggatcctcaaaagaaagaaatctagcttatgagaaaatgttcagggaaaattcaattttcctaggaaaaagagactgtagtatctgaatgagccctgtgggtaggcaccttggaagaatcatagcactcttaacagtttgtgcaattacactggggtttgtccctcccgcaaatgtctacttgagggaatgggcatgaggcagtagtttgtagacttaagcttgtggtactgttgtgatatccaggcattaactctaaataagg

SEQ ID NO: 159321 - DNA, 710 bp, Homo sapiens
aacctttaaaatttactatactacatgagaggacaattttgtacaactctttccaggggaaatttagcataattttatcaagttttaaaaagtccaattcaaatctgcaattacacatatgtcaaacaacaattttactggaaaaaatgacattaaatggcctatttacatgttaaggaacatggaattttccttttttcctaatactctcctctgtctcttcatagatgattactactttgctttttgcctaaaaacagtagcgattcttattcacgtccagtgattggtattaaagagagtatctggaataatactgttaattctcctatgtatctgacattttattctccttatttctaattttatttgtgttttttcagttatattgtcataagtttattttttcaaggaattatttcttgaatttaacaattcactaaatatcctcttgctaattcattaactgacacttttcatcctgcttttttttaaaaaaagaattcttttaatacttaattttacttattataattctgttgtatttaataatagcattaaaggctctgaatttgtctctatagcattggcctcaagacatgatatttttatatgtcattctcaaatattctttaattttaaaatatttcatattctaagtttgatttccatcttgacctagtagttataggatacttaacaaaattttt

SEQ ID NO: 159322 - DNA, 179 bp, Homo sapiens
tttgtaagagttaagtaagcgtggcgcaaataggcatctactccaactgcccccgtggaaattcttgagtgcccaattcagtggtgcttggaattaggggagcgaataggttcttacaaatcacctagatcaatccctcccctagatgtctctatatcatactttaaggcctgtataac

SEQ ID NO: 159323 - DNA, 415 bp, Homo sapiens
ttatgttaatactgatggggaagatgctatattttggcaagtcagctttttaggatatgtgaatcttacgtgacttcttccaggtggcaaattccagttatggctccgatgataatataagcgaagaaacattgtgaatgagtggcaggtggactttggctaaagaattccactctgcagtgtttaatgcagaagtctgagaggatggtctagggctctggagaaggatagagctaggtttgagtgttgcagtattttgccagtcttgttcaagtttcagtcgctgtaagaacacgagaagaagaatagtttttgttcagaaggtgtcgtcatataagtaaaggagaaatttgttgatgaagtaaattttgaaagcaaatatgttgcccttccaggtactcagtgcagcatgatc

SEQ ID NO: 159324 - DNA, 411 bp, Homo sapiens
tgttttcccactgctgcaaggacaatgaaagggaaagtaaacttgtgcacctcatttcatatctagttgtaattttccacacaacaataaacagaaacatatacttcaaggttatcaggcctttttttctgtgtgtgtgtgtgtgtgtgtgtgtgtgtgtgtgtgtgtgtgtggtgtggtgtggttgtgtgctttcattaagaaagttaatgcaaaaatcccaatcttcaaatcatcaagtgacaatcattttaatgcaccttatcttctaaccacaaatattataatatggaatacttagttttatctgaacatcccatttaattggaaatacgtaagttgatctaataaaattacaaattaaaaaagctgtgtgattttaaatttccagacatgaaaatcaacagcagg

SEQ ID NO: 159325 - DNA, 355 bp, Homo sapiens
gaacacttagaggccattgtagggttatcaatttgtctaatttcagtattgtcatatctcagggaatagagagagagagatggggcagtggtaggtggagcaatcagaatacatgtaatatatatagacaaagtttgctgttttatatgggcatagtttgtgatgccccaaagcaattaaaataggaacatcaaagatcattcatcacagatcaccataacagatataataataatgaaaatctttaaaatattgcaagaattccccaaatgcaacacagagacatgaagtgagcatatgctgttagaaaaatggttgccacaagctttcaatttgtaacaaacacaatatctgt

SEQ ID NO: 159326 - DNA, 255 bp, Homo sapiens
tcctgggttcaagcaattctcctgtgtcagtctcccaagtagctggaattacaggtgcatgctaccatgcccggctaatttttgtatttttagtagagacggggtttcaccatgttgggccagtctggtctcgaactcctgaccttgtgaactgcctgcctctgtctcccaaagtgctgggattatagcccggcctatttttattttttgagaaggaatcttactttgttgcccaggctggagtgcagtggcatg

SEQ ID NO: 159327 - DNA, 362 bp, Homo sapiens
ctcctaacctcaagtgatccacctgcctcggcctcccaaagtgctgagattataggcgtgagccaccacgccaggctcatgtatttaattttataaaaagttaaaagaaatctgggctggatatcttttctttacctctccagatccatcctctactcttttctacctggctctttgccccagataaagaactcttaggccctctggattgaagggccagagaaggaggtcagaatatttatcccttcacctctcagggtagcatgtattatatacctggattctgcgttctggtaatctctgtctcctatcttctttggcacttctagaagcaatacttgttctgcctttttttttttttt

SEQ ID NO: 159328 - DNA, 796 bp, Homo sapiens
gaaagttttggactttccaggtgaggaagaagtccttgggctgtctgagcagggcaggcagggaaggaaaatccgattgtcctcagaccttcaccagagccaaggaaaggaactgtgaatcgagggtttggtcgccagccaaattgatcttctgagaataaaggctgcagacagatggtaatgaacgtgccagggctccagaggattgttcattcctggagaacagaccttggctggcagacactgggcgctggcgggcacagtgcgtgtccctgtgagcatctctgcacttcagagcagggccctgcgtattcatccttagagtcaaacaggctgggactcagagacagacctgtggcggcctttttctacgagcgtaatttggtacaggccatggtgtttctgttggcattggccaaatatgattttgagtaaaatcattggtcgaggctttgatcgaggccattactgtccaatagaaatagaacacaagtcagatccgtaatttgaaattttcccatagtctcattagaaaaggaaataggtgaagttatttttaataacatacttaatccactgtatccccatattaattcaccacgtcattcctatggcagtatagttgaggtgggtatttgctagtctgttttgtcctactcagtctttgaaatctggtgtctcatgtagtgcgcctcaggtgggagcagctgtgctccggccccggctgccacatcggacagtgcagcctgggcgagctccagagcagcgcacgtgagggcttgcaaggcctgtggga

SEQ ID NO: 159329 - DNA, 916 bp, Homo sapiens
catagtctaagcacttatggacccgctcagacatccaatgtaatctgggatctgaagacgtaaagtacgatttcttttaaatattgatattcatttaaaaatagcgtttgtgtactacactttgtgcaaggtaccgagctcgagatcaataactcagtggccgtatctgcttccctgtgtaggaaggaaaatccgattgtcctcagaccttcaccagagccaaggaaaggaactgtgaatcgagggtttggtcgccagccaaattgatcttctgagaataaaggctgcagacagatggtaatgaacgtgccagggctccagaggattgttcattcctggagaacagaccttggctggcagacactgggcgctggcgggcacagtgcgtgtccctgtgagcatctctgcacttcagagcagggccctgcgtattcatccttagagtcaaacaggctgggactcagagacagacctgtggcggcctttttctacgagcgtaatttggtacaggccatggtgtttctgttggcattggccaaatatgattttgagtaaaatcattggtcgaggctttgatcgaggccattactgtccaatagaaatagaacacaagtcagatccgtaatttgaaattttcccatagtctcattagaaaaggaaataggtgaagttatttttaataacatacttaatccactgtatccccatattaattcaccacgtcattcctatggcagtatagttgaggtgggtatttgctagtctgttttgtcctactcagtctttgaaatctggtgtctcatgtagtgcgcctcaggtgggagcagctgtgctccggccccggctgccacatcggacagtgcagcctgggcgagctccagagcagcgcacgtgagggcttgcaaggcctgtggga

SEQ ID NO: 159330 - DNA, 505 bp, Homo sapiens
tcacattttggagactgagctgagcaagtgctggtcacgttctagaggactgagctgagcaagtgctggtcacattttggaggactgagctgagtaagtgctggtcacattttggagacagagctgagtaagtgctggtcacattttggagacagagctgagcaagtgctggtcacattttggagacagagctgagcaagtgctgatcacgttttggagacagagctgagcaagtgctggtcacgttttggagacagagctgagcaagtgctggtcacgttttggagactgagctgagcaagtgctggtcacattttggagactgagctgagcaagtgctggtcacgtttcggaggactgagctgagcaagtgctggtcacattttggagacagagctgagcaagtgctggtcacattttggaggactgagctgagcaagcggccagactttatcctccagtgaggtcgggagtatgtccaggtttggggacagagactggccag

SEQ ID NO: 159331 - DNA, 204 bp, Homo sapiens
ccttgagccttacctgttctccccacagctgcctgccagtgtcccgaacccagttctccccacagctgcccacccagtgctccagaacccagttgccttggctgccttcctcctgcctggacggcttgggatagggtgccctgtgcctgtcctcaaggccgcacgagtccaccccggaaaggtgccacctcacatggtctcaag

SEQ ID NO: 159332 - DNA, 850 bp, Homo sapiens
aaaaagttcagaagccactgctttaagctatctactgagtgaagaaaggcacaaacaaaacttatcatctgaactgataaccaggaaagagtaagttctatcacgtgctcttgagaaaggcagcagtagaaacctagggcagggcccagcaacagggattgataacattcgcagtgagcagcactgcaaaatagggagaatgaagaacagaattcaaaccacagagcttgcagagtctcagagaccactagttttagttttgtagacagttgccccgattatgcaagtattaataacacacctagagtcatttggtagcagaactaggatggaggtcttgtgacctagtacaggactgtactacaggtactgctgtttgcatggtgctttagttgtattagtttctctttatttgtattttggtataactttttagcagcaagaagtatgggaggggagatgcatgtcagaagttgttcattcttgttcaacttaatttagaacccaacagaaagatatttttccaggtgagcaataaggcctgtcagtgggatttgttcatttattcaacaaatatggttctagacaatagcaatgataatcagatgaatatttctgtcttcatggagcttatgtgttacttaggggaaggagccaataagcatgttaacagtgaattttatgacatttgaacaaagacttgaaggagatgctgaaacaagctaggtaggtatcttggggaagagcattgcaggcatacagagcacccggtgcagagagcggaaggagtctggcacatctgatgaacagccaggaggccagtgaagggagcgggcaggaccactagata

SEQ ID NO: 159333 - DNA, 387 bp, Homo sapiens
ttccatgcaacagtaagttgtctgacagtaaccgaatgtaacttacagaaagtaattaaaagttatattcagaataacagcaatcaggccttggatgttctttattaaactcttttcaggcagtaaactttaccaaaaaaatctgtcattttctaaagtccttgtgctaaaactgttgactatggaaaacaaacaacaaaaaggaatgtttttagtctgctgctattattaacatttattatctgtatcttttggctcaggaaatgacttcacctatttgttccataagctgatctttaacagggtcagctagctaactaggctgtgtaaacagatgtgctgggagaaaattataatatttagtatttgtcctaaatatcaaaaata

SEQ ID NO: 159334 - DNA, 362 bp, Homo sapiens
acaattaaagttagtgatccctcagagacaggaaacaaggtgagctctgaggcgggaggattgcttgaggccaggggttcgagaccagccaggacaacatagcaagacctaaaaataaaaaaataaaaaattattttaaaaaaaggtgagctctagggatggcccatttaactgcctggagttaggcagtgcagggagggaaacccaggtggtggagtccagtggactttctaagagttaaaaagatggaggtgaggctgggcatggtggctcacgcctgtaatctcagcactttgggagaccgaggtgggtggatcacctgaggtcaggagttcaagaccagcccaacaacatggcaaaaa

SEQ ID NO: 159335 - DNA, 432 bp, Homo sapiens
gaagtttgaaactaggctgggcaacatggtgaaaccctgttgctacaaaaaagtacaaaaattagtcgcgcatggtggcgcatgcctgtagtcccagctactgaggaaactgaggcaggagaatctcttgaacctgggaggcagaggtcaagatcgggccactgcacttgcactccagcctgggtgacaagagtgaaactccacctcaaaaaaataaaataaatttgatcatgcagatctagtcaaaaaagcagcgaacggcagatgctagggcccagggaaatgatgacatcagtggatcacatcacaggggctgtgaattgtctgcccacacatgtagctccccaattaataggatttaagtcccttagcaaagatttactggccacatgctctgtagtggaaccatgcttagcttgggctgttcagctg

SEQ ID NO: 159336 - DNA, 232 bp, Homo sapiens
gtgccttattaagacataggaaacatcgagagcagcagtgtggtaagatcagcatttggacttttttttagctttgcaatctctttgaaatatccaagaagacataccactggtgctcagaaattaggtctgaactgggttcatgagcgtgttaacatataggtcataattaattcaaagattgtggatgggattgcttagggaaggagtataaagcaagggtcctcggcta

SEQ ID NO: 159337 - DNA, 261 bp, Homo sapiens
gcacccaatcttcctagataatgtttcctttcttggaaattattaattctgtccagcatttttaacagttgtctctaccttatttcaagtcccagtatttcattcagaattgttattgcagggaagaccctggaaacttatgaggagattactgaagaaataagctattacaatttttgccttgctcttggtttggaggtagcaaattcatgtacaaaggctgcttctgggaaatgtagctaccaagtttctttaattcag

SEQ ID NO: 159338 - DNA, 496 bp, Homo sapiens
cctagctttgttttcatacacagcccaaaatgttcttttctgaaattatcaaatcaaattcatttctaccaactgaaataaaaacccctccatcaaaccctccctattaacctcctgcctcaccacctcctccacaagcaccatacatcatcatcattatcattattttggcattcttctccagacaccctttctacttcatctgtaccaaaataactgcaaatgtcccactttcagttgtttgtttgttttgttttgttttgtttttgagatggagtctccctctgttgccaagcctggagtgcagcggagtgatcttggttcgctgcaacctctacctcctaggttcaagcaattctcctgcctcagcctcccgagtagctgggataataggcacccacaaccatgcctggctaatttttctatttttagtagagacagggtttcaccatgttggccaggctggtctcgaactccttacctcagatgatccacc

SEQ ID NO: 159339 - DNA, 237 bp, Homo sapiens
ccatcagacgtgacctggccaagccagacaggctctctgaaacccagggtatgcggatggggaaactgaggcctagggagaggctggtttggagtggaggtcacctgggacgttaccagcactggacttgacttaagcgggtgcagccaggcccgcaccgagacgacagcatctctttcatcttccaaggcccatcttcctggcaaggcccaggttggcaacgctcagcttttcagc

SEQ ID NO: 159340 - DNA, 448 bp, Homo sapiens
aacaccaccggttccccaataacctatggaaataaaaaaaagaaaaaaaaatttaaaataattttttacatctctgcttttatcatttgaaggagtattaaagtttaatttcacagttgaaggtcatgttttcaacatgtatgttttgataccatgtattatagcacagattgattttgtgtcaaaacaccctgtaatgtaatttatcactagtgtttttatgtttatacaaacttagattgtgtttatacaaaggctgttctattttattttcacttggttgcagtaataatagttaacatttcttgagcttatgttatggttgaagcattgtgctgagagtttcacatttattatatccttgaaagttttaaaaaacctaagaagataggtatttttatccccattgtacataggaagagactaaatcaaggaagataagtggtgg

SEQ ID NO: 159341 - DNA, 553 bp, Homo sapiens
accactgatgttctgtgaaatcagaatttccagctacatttcatatagattctgaatattcaggtattctgagacagattattaaggatatctttgtcctgtgctgatttttccaaataaatctttttcatcttgaaaaaaactgtttgaaggcaaatctcttttgcttataaaaaataatttctagtattaaacatatctgccattatttatttggtttcaatatctagaccttacccaattattatcatacagttagtgttaaacattctttaaaataaaacaatactgttgggttggatgttaagtgaagatttgttgtgtgatttgtggtgaattaggcatttcttgagattgtaggtttctagaagtattaaaagatggcttgactctgcattgttgtaaatatttccccaaagtttggacatttctccagtaaaacttgtctgatgggttaggaccatttgtcttcaaggaatgggggtggttttttttttattgtttgttttttttttttttttcaagataatgctgagacatccaaggagtacag

SEQ ID NO: 159342 - DNA, 578 bp, Homo sapiens
gagaacaccaaatgctgaagagaatgtggagaaaccagatcactcttacgttgcatgtgggaatgtaaaataacacagccactctggaaaaatggcagtttctttaaacactaaacatgcagctaccatacatcctagctgttgcacccctggacatttatcccagataaatgaagagttaggttgactcaaaaacctatacacagatgttcatagtagttttattcagaatggccaaaaactggaaacaggctagagacattgggttgaaggacactttagtggctgcatggttacagtgtggtccatctataccatggaatactactcaacaataagaagggggaaactacagatactatacagcaatctggataaatctggagagaactatgcttagtgaatcaagccattctcaaaaggttgatcctgtattatcccatctgtgtaactttcttgaaatgataaaaatttttgtaacaatgtactaataatgtagttttgtatgaagtcactactggggggaaactacataaatgttacacgggattcttctgtattatttcttacacctgcat

SEQ ID NO: 159343 - DNA, 344 bp, Homo sapiens
gcggccgcctactactactaaattcgcggccgcgtcgacgtggagactccaaggacgaatggtatttagagagtaaaccccgatagagagggtttgtgtctggcacagagaagagcctgtgcaaaagccagcggggcgagaggacaccatgtgttcatccacctgaggggcgaccagcaggctggagctcagcgggttgagaggaggatgcagagcccgggaaaggcaccctaggcagagggcacagcagggcaaaggcctggagtcaggcctgagcctgtgtggtttgaggaacggatagaggcctgtccggcaggaagggaacagcacaggggagagacctt

SEQ ID NO: 159344 - DNA, 241 bp, Homo sapiens
  misc_feature (162)..(162): n is a, c, g, or t
  misc_feature (226)..(226): n is a, c, g, or t
  misc_feature (233)..(233): n is a, c, g, or t
acagagtcagacaacttgggcttaagaaccagcttgacttcctgatttcctctctgtgtacagaagttgcttaatccctagacctcagtttcctcagctttatactaagatagggtgggcataatggcttatatatattttatacacacacgcacacacacnattacatcactgttggtcaaagacgcactcctcctttaatcaatttaaatgaggctagcgagtntctgttngatgtttg

SEQ ID NO: 159345 - DNA, 380 bp, Homo sapiens
tatttgcatcgctgactccatttgatattcaatgtcatgcagtacaacattccatttttcttgaatttattcacgtgctttgctatctctaactctaaaaatgcttagaatagagtacatggcgtatatgaactccctgaagaaactgtgaacaccatgaaattacattagcgtgggcacagtggcttgcacctataatcccatcacttttgaaggccagtatggaggcagtacagagattattgagattaaaagaaagaaacaggtggaacggatctatgtaatggaaagctaaacagaatagttcgtggtacacagtagaaaagcattacatgtctattaagatatggtcatcttccatttattaaagttacatgttt

SEQ ID NO: 159346 - DNA, 230 bp, Homo sapiens
gacctcttgacctcatgctctgcctgcctcggcctcccaaagtgctgggattacaggtgtgagccaccacgcccagccaggtttgttttttttagtttttttgttttttttttcaacttaagcataccctgagattctttaagttttttcagattgttttatgactgaagatttttttaaaagctcatcatgtcattcaaaaacccatatgctgcagttttggcttccat

SEQ ID NO: 159347 - DNA, 520 bp, Homo sapiens
tcccaaagtgctaggattacaggtgtgagccaccgcgcccagcccagctgaagtattaaagggtatatctgcaatttacattgaaaggcataaagcaagaagatgaattaatggctggatgcataggttgatatgtactaaagcaagtataagaaaatgttaatggtaggtggtcctctacatcttcaccaatatttggtgtggtcagtcttttactttcaactggtctggtgggtgtgcagttgtatctcactgtgctttcaatctgcattttcctgaaaacagatattgttgaggatgattatacttattgtacctattacactgctggcattcttaatttgtgaaatgttgttcaaatcttttgcccattttgaagttggggtacttgtcattttattattgagttgtagaagttctttgtatatctcagataccagtcctttttcagatatatgttttgcgaatattaactcccagtatgtgacttgtctaggtggtgggtatgtggatgttcatg

SEQ ID NO: 159348 - DNA, 398 bp, Homo sapiens
cggcacgaggcttcctttgttctcctcttcctttgcttcttttaaaaagttctaagttgctagccaatcaagacaaatacgaatgtgaagtcccattccagcttgggcgacacagcaagactgtcttaaataaataaataaataaaagccagtttggcctcactgctttacggttgcacttctgtgtctgcttagactgatgaatctatttaaaaatgttcagtttagggcaaacatgtcttggtgtagggaagcacggcccacagctgggctagacttgggcagagccaccccacacactgcctatggagccaggccctgtgctttactgcatttaattcctgtgggccttatcgtgaccctatggtggagaaggtacaggggaggcacagatgaaa

SEQ ID NO: 159349 - DNA, 570 bp, Homo sapiens
acttagaggatcccccaaggtccttaagcaacgcggcagctgtgacacagctgcgccccaaagccggtgctctgctgtggtgctgctggtcacacaggagacgtgaggacccagttggtgacacacacagcctccacggactgagcagcagaagtaactctagggccagctaggatgccatcagccaggcccggtgaggagcgacaaccgcaccagggcccagagaatagggcacatgggtgtgctccccagaggggccgccaccacagctgccaggcacttctgtatcctggactgtggagaaggcctagtggggtaggtttcctagtcccatgctgcaaagctgcccaatgactaggcactcacacactcagcattcccctcacaggtcaccaggccaccgtcactttcctctctaaccctgccctctccagccctcgttactcccagtccactcctgaaacacaactctgctctagcctttgttacttggagatagaatagctgaggcagacggaaacacaggaggggcaggttcagaattcaggacaaaagtcccagtgagagaca

SEQ ID NO: 159350 - DNA, 585 bp, Homo sapiens
gttgactggtattactgtaaaaaggatttgttatctctgagcctaagagatgttgaaacatatttctttttttgtgaatgcattgatagatccttagtagccctattagcaataaaagacaaagaatatactttttatctggatttatgtggtgcctgtccacacttgattggtttctgtttgttttctgtttatttgcttgatttggcaatgcactcacacactctttccgttgtgggatggggggatctcatcaggatttgaaacagctccaaactgactctctcccacatagccctcctctcttccatggaaaacacatgtacctattttcatccagacaaactttgaaaatgaaattcaatttcaacacaacactaacttttctttgctctggaaaacccattgtttatcctctggatataccaacagaaatcagataccatcccactctgctaggctcactgttggcaacacataagaagctcttcaaggtgcctgtggaagtccctatcactatagttaatttaagctgatggtaaggcaacctcatacatttctctagaacttctcttacaaacttcg

SEQ ID NO: 159351 - DNA, 325 bp, Homo sapiens
gctggctgttttggaagtattcacgtgttcgtaatcagtccaatgtgtgtaaaatatctatcaatttaagggcaaaagaataagcagtagccttagctgagaattacccagctgctcaattacttcattttcaaaatgtccgttaaagggggtaacagcagagagaatgtctgcaattaccatctaagttttgatatgagaaataggcttgctgatgactgggtttcaagtagagagttaagtagtccttaaatctcatattctcacctattctaaatctgaatagaaataatgcaaatgctaaaaatataggcttttgatggaa

SEQ ID NO: 159352 - DNA, 561 bp, Homo sapiens
actcacatggttgtgctactgaaataagacacaagtagagagcgaaaggccacatgaaaccatgggaaaacattacagctctctctaacactgaagacttatttcaagcctccttttaaaaaaaatcacttggtaacagctttattatctgaagacaaaaacagagcttaaaattcacttaagcactcgatcttgtgctcttgtgctctatcaatattttatcctttcatggccacaaattttagaagcaataaaccaaaggacaactttcacatatgctgaaagtgtctacttaaccttaacaagttgtttctcatataacaatatagaaataatttgagaactgtcacagtgtgtctaaaaaacactttagtttcatatttaagtacaaaatattctacaataatttttaaaaacaacaataactagttagcaaactgaaaaggactttaagtatccttgaatttcagctagagatattttctaaaatgctataatgatcacatctaaaatataatgttctttggtccattgctctaaatgataaaaaaaaaatctcac

SEQ ID NO: 159353 - DNA, 656 bp, Homo sapiens
gatgttctgaatgccagtgtccacctagtggagccttttctttcgtcacggagaaaaccagggcccagcttgttaagcaagttgcccacggtctgattagagcttggcctcgctgcctcacatcaccctccttgaactgctaagagccccatgctcctggtctctgctgggatagttctggctcaaaacccagccctgacgaccttcttccagagactcttcctcctgtcccccaggtggatgcagaggcccccatctgggctttatcacagcacttggcatggtatcaccctttgctcacattcattcatgcacattaaatatttagtgcccaactataatgttcctgggactgtactaggagccaggaatacaaaggtgacaagaaagagtcctgatgtgtgcaggtttcattacagtgtgtctgtttgtctttaggacactgcaatctccttgctggtggaaccctggcctcggccatctgtgtagcaatgcggcaggtgtgcaggcatgcggcaggtgtgcagcaatggctgcctaaaatgtatacctctatggctacgatccattaccccacagttgtactggactccgacccatcctaagagcaaaatactgaacccagtattgcatgagacatggtattccctaacccc

SEQ ID NO: 159354 - DNA, 154 bp, Homo sapiens
acttttggatgtagcttatttattctgaaagtctaataactttgtttattagttctaatagttttttgtaaagtcttaggcttttctatacttcagatgttgtatagaaataaaagattattatacagggataatttacattccttttttccaa

SEQ ID NO: 159355 - DNA, 113 bp, Homo sapiens
gtcctagaaaagaaatggttttcttgcatcttccagcttccttgttcatgtctttttctatcttcaatggctgatcaagcccttctcgtgacgtcttctctctggttctgacg

SEQ ID NO: 159356 - DNA, 409 bp, Homo sapiens
ttatcatccacactggcacctttttgagagaggttggggagcaggtaattatgctgggacaataggcgtatgtcaagatatctggtcaccctatctatgatctgtcacacttagtactttctaaaattctcgggcctttgcaccttctttttatcaacacttagttctatgttactgaatatttcttaattaagtgcaggaaagaaaataaccattttttctccttttaaagaagcacacacacctttcttttattggtattacattccttttcccagttggtgcccctgttggttttccaaattgtcttcccatccttatcctacctcccaatagagtacctcatcctatagtgttattataactacagaaaatatattttcattccttccacttcatgctttcagct

SEQ ID NO: 159357 - DNA, 285 bp, Homo sapiens
gttgaatcaaatatctaaataaagtgaatctggaacatcctagtgtccacatcaaaagcactcaatgaagttggatgggggagtggtagtggtggtacagcaacagggtagcctagttaggttgcacaagcccatctaaacacgtgtgattatctgattagaaccaggaaactggttactagaaaaagtaatttagtgaactgtagaaagaaaatattacatattgaagcacctcacaatgacttaacaccaattttatttgaggaatttctttagtgttaaaat

SEQ ID NO: 159358 - DNA, 301 bp, Homo sapiens
acaaatgtaagcctttaccctaaggagtgtatttttgtctctttatgtttgctgtctgactgatgctttcccaagaaagggagaaaggaaaaggggagggtaattaagtgctttgattccaaaggctttctcttctagctgctgctaggctaggtgtagagtaagagcaatcagtgacgataaagacatcagtcaaggagttaagtcagaagacgtttcaagatgacagtaaatcaaagaactgcagataacagacagctgactgtttaggggcttcaccagtgcacaaccgacagaagag

SEQ ID NO: 159359 - DNA, 355 bp, Homo sapiens
gtgtatcaatatctatctatctatctgtcaccatattaatatctaagagattaaaggagcaaacattaacattgtcctactaggtataatggattttagcctgagtatcctaggctgcatctgctggaaagcagagcctgatgcacagattataatgttgacacttcgaggggtataaatccaagcagtgattgaggaaaataggtgatgtgaggcaagaaaagatgtacagcgattgtgttgctgtgctggccaccacttccgtacaagttcagagacattcagttgcaaagacatttaagcatattccctctgcttatgggaacttttctaaaaggtttgtaagaggaaacgg

SEQ ID NO: 159360 - DNA, 400 bp, Homo sapiens
atcagtcggcccggttacccaggctgtggtggaatggggtgatctcataccgcaactctgcctcccaggttctggcgattctcccgcctcagcctcccaagtagctgggattacaggtgcaggccaccacgcccagctaattttttgtattatgtagtagagacagggcttcacctgtgttggtcaggctgacctcaggtgatccgcccgcctcggcctcccaaagtgctgggattacaggcatgagccattgcgcatggcctatcttctcatagtttctatgggttaggagtccaggcacaatttaactggttcattaccttaggtcttacaggctggagtaaaggtctcatctgagggcttgactaggggagattccacttctagccttcctaagggc

SEQ ID NO: 159361 - DNA, 752 bp, Homo sapiens
gagttccgtacagggatatgtacatgggtattcattgccatattatttgtagtggcaggaagttggtgacagcctgtgtgttccacatatcagtctgaatgtagataagtaaaatttgtgagtgctcatactagcttttctagtgctaccatatcaaactgccacacactgggagcttgaaacaacagaaatttattctcttacacttctgtttaaaatcaaagtagcagcagcaccatgattctttgagaatctgggtagaatctttccttgcctatttgtagattatggtagtagctgttaatccttggtattccttggtttgcagctgcatcacttcagtctctgcctcttgtcacatagcattctccctctgtgtttgtcttcacattggcactttcctctttttatgaggacactagtcctattgaattaggccccaccctaaagacctcccttaacttgcattttcaaagaccctatttccaaatatggccacgttcacaggtatcagggattaggacataataccattttaagaggcacaattcagcccacacacagagactatgtagcaatcagaagcaactctttagatttatgggtagtacagagcagaaaacttaagaagcagaatgagatggtaagtagcaataacactaatttaaaaatccatgtgtattagggttctctggagaagcagaactcaataggctatattcatagggagagagagagacactcaggagagc

SEQ ID NO: 159362 - DNA, 192 bp, Homo sapiens
caaattatattttattgtaatcatttgttgactatataaaggatttttttacttcactataagcaatagattgcttttctctacagattaatgcaatttttcatctcagatttcaaaattgagtttttctacttttgtggatttttatactttttaagctaagtaaaggaacaaataagtagtaacactcca

SEQ ID NO: 159363 - DNA, 368 bp, Homo sapiens
aaatttgagttttcttcttagtctgcttcttactgctgttttgccaacatcttctgtgctttcttacgtaagctctctctagtagaaataccattttcttacctgacatttactctttccttcaaggcttagctgaagtctctcacctccatcacacagtattctcagactggagtaatttatattgtaaatatgacattattatctgcacagctcactttgcaattaatcatcctgccttcagtgataccaaggaggccttttctgacctccttcagggagagtcaagttcccattctctgtgttccaatagcaccttacctgtcccacagtgcttacctgttgtagcacctagtacactgcattgt

SEQ ID NO: 159364 - DNA, 259 bp, Homo sapiens
agcacagttctgacacatagcaagggctgataaatattagcaattattctaattactgctgggattctgacactgttggagcattgcccacaggagattgcagtcttgttgaggaaacaagataaaacacataatatattttaagaaggaaaccattcagaatcaaatgttcaaatataaagatatgagcagctctaagttattaaattttcctagtatagtacttcctgtatcataaaaagattttgaatattcatgc

SEQ ID NO: 159365 - DNA, 284 bp, Homo sapiens
ccaaaacactccctccgctcccacttcacttagagtcaaggccaaagtctccactcaccatggcccaccgcagttggattctcagctcctccctgctcccaattcccatctttttcctcctccctccctcctctgcagccaccctagccacaccagggtcctagaatctgttccctggagatgtccacgtggcttgctccctcttctcctccaggtctctgctcagatgccacctcctctgtgttgaaagattcctttagtccacttaatttttcatctcagtg

SEQ ID NO: 159366 - DNA, 322 bp, Homo sapiens
cgatcgagctcggcccgacgtatctctgggggggagggtaggtaggagtggagacccttaagtagtatcagcactgttgtctgatgggagtgtgaatctgaacacatgaagctccagtctcagtagaacagtaagaaatcctaagtaaggccagccgaatgttttgttttttaagatggaagatatcccagcactttggcaggctgaagcaggtggatcattccagcttgggcaacaagagcgaaactctgtctcaaaaaaaaaaaaaaagaaaagaaaaaaaaagagagaaagaaaccctaggtaaaagtctgagccccac

SEQ ID NO: 159367 - DNA, 222 bp, Homo sapiens
tagggcaggtggaaggggtgatcatagcaggcagggcaaatagaatcctaagcgtggaaaactgccccatgaagactcagagactttagcagctcgatttgtttagggagttcaagcagtgtgatatttgggactgataagttgggggaggggtagaggatgagggtgaaaagttgtggtggaaaggaagagcatattatatttgctgtcttaggtgttatt

SEQ ID NO: 159368 - DNA, 851 bp, Homo sapiens
taagaactcaatagttgatatctactagcgtagtttaatgataagtatagcaataataaatatttatttaatgctaaacatgtttcaaatgttgtgttatgaaccatgatttttttgaaaaaggagtaactcctgacattgaagagcttatatttcctggtaaacagcgcagatatttaagtgataattacaatataatgtgataactacattcctagtaatactatgatattttgtgagcacggataatgtgttgctttaaaaagataatcagcttcataaactagattctaaattaacaagcacagtgctaacactcccctgactgaacagttatacaaaaggctaagggtcttagaatttattgtctttcttgctgaaagatgattctaataacaataaggttttccccctcctataattttgtgtttccaaaaacaaatggtgaggaaacaatagagtatgtttaccctttctggactcagggacagggtctctaatttggtctctgatttggacagctgctatttgccttagaccttttaggttgtgtttctaaagactgaggctaaattgaacatgacagagaggattcaggtgaacagattagctcatctgtcttccatcaggaaactgtgcccacagaggagacatttctcttcaagactgtgtacgtaaatcagtagcagtagtaagcttttatagggggaaaaaagggggccttacagggaggctcgaggagggattaagcagaaagggaaaggtaaaggccaagcgaaaaaaagccaaatggaaaggggcgcaaaaaagggtgacgaaaacaaagggggggacccaccggcgaggctaga

SEQ ID NO: 159369 - DNA, 251 bp, Homo sapiens
agcaaaaagggaggcattaaaaatatgcaaacagagaataggggattacaacaaagggttaacaggaaagagttgaaagctagtgtaagagtcacaaccactgactgatgaaaaactttgctttcattccatgcatttgacttgtaaccatgcaggtaatggtttcatgttgccatgaagtattaatatatttagtagctttgttctctccaatattattagtttattctaaaaagaggagtacatttttc

SEQ ID NO: 159370 - DNA, 413 bp, Homo sapiens
ttccaagccaaagaggttttcagtcccacccactgaaatcatccagtcctttattcacctgtgtcaacccggctcggaggtgtggcctgcgagatccttcatgcaatcaagaagtcaggcctccacctggtcctgggggtcatctgaggcccgcagttttggaagaggaatgttttctgccagcagttcccacagacgggctggctccccactgtggggacatgcaccatgccctctgtgggcctctgtttttcatccctgaattcatcccccacagaatggttcagttgtcatatctagctatctaataagcttgagggcactgtgtcccctaggggatgcccacatgcctgaccatgcaggctgatgcagtgacaagcacaaagtatcgtgattatagttcctgctctcct

SEQ ID NO: 159371 - DNA, 445 bp, Homo sapiens
gtgacagaggcttataaaggtagaaatatatttatatttacttgaaaagtctgtgtaaactatcttgagattaaatggaggctgcaaaatcactgtgtcccagggctcctttgtcttgctctgctcttcttctatgcagtttctgtattgtgggcgaggatggttaccattgtgtctgctaataagaagaaaaagagaagggcattctctttacctttaagaggagtttgtgtatatcactttcactcagatccctctggctctaactttgtcacgtcacaaccagttgcaaaggaggctgggaagtgagtgactctgacctaggcagccatatgttgcacttaatttttattactgcataagaaggagagaacagattctggggagatagccagctatctgtcacattaaggtttgagtcagatttattttcattaaaaaaaaa

SEQ ID NO: 159372 - DNA, 317 bp, Homo sapiens
caaagcaggataaactcaaagagatccacactgacacacattataatcaaattgtagaaagctaaagacagaaaagcagcaagagataagtgattcatcctgtacaagggatcttcagtaagactaacagttgcttatcagaaatcacggagtatagaaggcagtggtggtgtgctgggcatggtggcatgtacctgtagtcccagctgactgaggctgagacaggagaattgcttgagcctgggaggtggaagttgcagtgagctgagatggcgccattgcactcccgcctgggcgacagagcaagactccatctc

SEQ ID NO: 159373 - DNA, 443 bp, Homo sapiens
accaggtccccactgtgtcaaggcggctgttaatactcaagtcccctcctccactcctgaacatgagagttaaacaaagtcagctacagtctcttggtccataacaacctagggaaagcaaactacagaaccacgttagaaatgcttcacgtcttttacctcaaaatacctttgtttagtaaccccactccccgacacaggccccatagctctgttttctgggttctgacaactagtgccctaagccagaggccaggccctaaagagacaacctaggcaggcttgagatgtttctcccacgacctttccaaatgattccagcagaaagccagacccgtctctactaaaaatataaaattggccgggcatggtggcacatgtctgtaatcccagctactcaggaggctgaggcatgagaatcacttgaaccctggaggcggagg

SEQ ID NO: 159374 - DNA, 311 bp, Homo sapiens
gattcccaggtgtgggatacctgcgtcctccaccttcctaggtaatgcctgtctgtctgtattgcatactctatctgccatggaccagagcctctgcttctcctcacctcattagtacttaccttgtttgatttagaagtctttgcctatctgaagggcttaaatggtatttcattatggttttaatttgcattttctggattacaaatgaggatgaacctgttttcatgcttatgggccatatgcatttcctctattatgaagtacctgttcaagtttcttgcccattttcagagggtagtttatctttt

SEQ ID NO: 159375 - DNA, 4142 bp, Homo sapiens
ccggccccggccccggccccggccccgccccggcccggccgggcagctggtaggtgccgtgcgcaaccctccggaagctgccgcccctttccccttttatgggaatactttttttaaaaaaaaagagttcgctggcgccaccccgtaggactggccgccctaaaaccgtgataaaggagctgctcgccacttctcacttccgcttccttccagtaaggagtcggggtcttccccagttttctcagccaggcggcggcggcgactggcaatgtttggcctcaaaagaaacgcggtaatcggactcaacctctactgtgggggggccggcttgggggccggcagcggcggcgccacccgcccgggagggcgacttttggctacggagaaggaggcctcggcccggcgagagatagggggaggggaggccggcgcggtgattggcggaagcgccggcgcaagccccccgtccaccctcacgccagactcccggagggtcgcgcggccgccgcccattggcgccgaggtccccgacgtcaccgcgacccccgcgaggctgcttttcttcgcgcccacccgccgcgcggcgccgcttgaggagatggaagccccggccgctgacgccatcatgtcgcccgaagaggagctggacgggtacgagccggagcctctcgggaagcggccggctgtcctgccgctgctggagttggtcggggaatctggtaataacaccagtacggacgggtcactaccctcgacgccgccgccagcagaggaggaggaggacgagttgtaccggcagtcgctggagattatctctcggtaccttcgggagcaggccaccggcgccaaggacacaaagccaatgggcaggtctggggccaccagcaggaaggcgctggagaccttacgacgggttggggatggcgtgcagcgcaaccacgagacggccttccaaggcatgcttcggaaactggacatcaaaaacgaagacgatgtgaaatcgttgtctcgagtgatgatccatgttttcagcgacggcgtaacaaactggggcaggattgtgactctcatttcttttggtgcctttgtggctaaacacttgaagaccataaaccaagaaagctgcatcgaaccattagcagaaagtatcacagacgttctcgtaaggacaaaacgggactggctagttaaacaaagaggctgggatgggtttgtggagttcttccatgtagaggacctagaaggtggcatcaggaatgtgctgctggcttttgcaggtgttgctggagtaggagctggtttggcatatctaataagatagccttactgtaagtgcaatagttgacttttaaccaaccaccaccaccaccaaaaccagtttatgcagttggactccaagctgtaacttcctagagttgcaccctagcaacctagccagaaaagcaagtggcaagaggattatggctaacaagaataaatacatgggaagagtgctccccattgattgaagagtcactgtctgaaagaagcaaagttcagtttcagcaacaaacaaactttgtttgggaagctatggaggaggacttttagatttagtgaagatggtagggtggaaagacttaatttccttgttgagaacaggaaagtggccagtagccaggcaagtcatagaattgattacccgccgaattcattaatttactgtagtgttaagagaagcactaagaatgccagtgacctgtgtaaaagttacaagtaatagaactatgactgtaagcctcagtactgtacaagggaagcttttcctctctctaattagctttcccagtatacttcttagaaagtccaagtgttcaggacttttatacctgttatactttggcttggtttccatgattcttactttattagcctagtttatcaccaataatacttgacggaaggctcagtaattagttatgaatatggatatcctcaattcttaagacagcttgtaaatgtatttgtaaaaattgtatatatttttacagaaagtctatttctttgaaacgaaggaagtatcgaatttacattagtttttttcatacccttttgaactttgcaacttccgtaattaggaacctgtttcttacagcttttctatgctaaactttgttctgttcagttctagagtgtatacagaacgaattgatgtgtaactgtatgcagactggttgtagtggaacaaatctgataactatgcaggtttaaattttcttatctgattttggtaagtattccttagataggtttttctttgaaaacctgggattgagaggttgatgaatggaaattctttcacttcattatatgcaagttttcaataattaggtctaagtggagttttaaggttactgatgacttacaaataatgggctctgattgggcaatactcatttgagttccttccatttgacctaatttaactggtgaaatttaaagtgaattcatgggctcatctttaaagcttttactaaaagattttcagctgaatggaactcattagctgtgtgcatataaaaagatcacatcaggtggatggagagacatttgatcccttgtttgcttaataaattataaaatgatggcttggaaaagcaggctagtctaaccatggtgctattattaggcttgcttgttacacacacaggtctaagcctagtatgtcaataaagcaaatacttactgttttgtttctattaatgattcccaaaccttgttgcaagtttttgcattggcatctttggatttcagtcttgatgtttgttctatcagacttaaccttttatttcctgtccttccttgaaattgctgattgttctgctccctctacagatatttatatcaattcctacagctttcccctgccatccctgaactctttctagcccttttagattttggcactgtgaaacccctgctggaaacctgagtgaccctccctccccaccaagagtccacagacctttcatctttcacgaacttgatcctgttagcaggtggtaataccatgggtgctgtgacactaacagtcattgagaggtgggaggaagtcccttttccttggactggtatcttttcaactattgttttatcctgtctttgggggcaatgtgtcaaaagtcccctcaggaattttcagaggaaagaacattttatgaggctttctctaaagtttcctttgtataggagtatgctcacttaaatttacagaaagaggtgagctgtgttaaacctcagagtttaaaagctactgataaactgaagaaagtgtctatattggaactagggtcatttgaaagcttcagtctcggaacatgacctttagtctgtggactccatttaaaaataggtatgaataagatgactaagaatgtaatggggaagaactgccctgcctgcccatctcagagccataaggtcatctttgctagagctatttttacctatgtatttatcgttcttgatcataagccgcttatttatatcatgtatctctaaggacctaaaagcactttatgtagtttttaattaatcttaagatctggttacggtaactaaaaaagcctgtctgccaaatccagtggaaacaagtgcatagatgtgaattggtttttaggggccccacttcccaattcattaggtatgactgtggaaatacagacaaggatcttagttgatattttgggcttggggcagtgagggcttaggacaccccaagtggtttgggaaaggaggaggggagtggtgggtttatagggggaggaggaggcaggtggtctaagtgctgactggctacgtagttcgggcaaatcctccaaaagggaaagggaggatttgcttagaaggatggcgctcccagtgactactttttgacttctgtttgtcttacgcttctctcagggaaaaacatgcagtcctctagtgtttcatgtacattctgtggggggtgaacaccttggttctggttaaacagctgtacttttgatagctgtgccaggaagggttaggaccaactacaaattaatgttggttgtcaaatgtagtgtgtttccctaactttctgtttttcctgagaaaaaaaaataaatctttttcaaata

SEQ ID NO: 159376 - DNA, 2632 bp, Homo sapiens
ccggccccggccccggccccggccccgccccggcccggccgggcagctggtaggtgccgtgcgcaaccctccggaagctgccgcccctttccccttttatgggaatactttttttaaaaaaaaagagttcgctggcgccaccccgtaggactggccgccctaaaaccgtgataaaggagctgctcgccacttctcacttccgcttccttccagtaaggagtcggggtcttccccagttttctcagccaggcggcggcggcgactggcaatgtttggcctcaaaagaaacgcggtaatcggactcaacctctactgtgggggggccggcttgggggccggcagcggcggcgccacccgcccgggagggcgacttttggctacggagaaggaggcctcggcccggcgagagatagggggaggggaggccggcgcggtgattggcggaagcgccggcgcaagccccccgtccaccctcacgccagactcccggagggtcgcgcggccgccgcccattggcgccgaggtccccgacgtcaccgcgacccccgcgaggctgcttttcttcgcgcccacccgccgcgcggcgccgcttgaggagatggaagccccggccgctgacgccatcatgtcgcccgaagaggagctggacgggtacgagccggagcctctcgggaagcggccggctgtcctgccgctgctggagttggtcggggaatctggtaataacaccagtacggacgggtcactaccctcgacgccgccgccagcagaggaggaggaggacgagttgtaccggcagtcgctggagattatctctcggtaccttcgggagcaggccaccggcgccaaggacacaaagccaatgggcaggtctggggccaccagcaggaaggcgctggagaccttacgacgggttggggatggcgtgcagcgcaaccacgagacggccttccaaggcatgcttcggaaactggacatcaaaaacgaagacgatgtgaaatcgttgtctcgagtgatgatccatgttttcagcgacggcgtaacaaactggggcaggattgtgactctcatttcttttggtgcctttgtggctaaacacttgaagaccataaaccaagaaagctgcatcgaaccattagcagaaagtatcacagacgttctcgtaaggacaaaacgggactggctagttaaacaaagaggctgggatgggtttgtggagttcttccatgtagaggacctagaaggtggcatcaggaatgtgctgctggcttttgcaggtgttgctggagtaggagctggtttggcatatctaataagatagccttactgtaagtgcaatagttgacttttaaccaaccaccaccaccaccaaaaccagtttatgcagttggactccaagctgtaacttcctagagttgcaccctagcaacctagccagaaaagcaagtggcaagaggattatggctaacaagaataaatacatgggaagagtgctccccattgattgaagagtcactgtctgaaagaagcaaagttcagtttcagcaacaaacaaactttgtttgggaagctatggaggaggacttttagatttagtgaagatggtagggtggaaagacttaatttccttgttgagaacaggaaagtggccagtagccaggcaagtcatagaattgattacccgccgaattcattaatttactgtagtgttaagagaagcactaagaatgccagtgacctgtgtaaaagttacaagtaatagaactatgactgtaagcctcagtactgtacaagggaagcttttcctctctctaattagctttcccagtatacttcttagaaagtccaagtgttcaggacttttatacctgttatactttggcttggtttccatgattcttactttattagcctagtttatcaccaataatacttgacggaaggctcagtaattagttatgaatatggatatcctcaattcttaagacagcttgtaaatgtatttgtaaaaattgtatatatttttacagaaagtctatttctttgaaacgaaggaagtatcgaatttacattagtttttttcatacccttttgaactttgcaacttccgtaattaggaacctgtttcttacagcttttctatgctaaactttgttctgttcagttctagagtgtatacagaacgaattgatgtgtaactgtatgcagactggttgtagtggaacaaatctgataactatgcaggtttaaattttcttatctgattttggtaagtattccttagataggtttttctttgaaaacctgggattgagaggttgatgaatggaaattctttcacttcattatatgcaagttttcaataattaggtctaagtggagttttaaggttactgatgacttacaaataatgggctctgattgggcaatactcatttgagttccttccatttgacctaatttaactggtgaaatttaaagtgaattcatgggctcatctttaaagcttttactaaaagattttcagctgaatggaactcattagctgtgtgcatataaaaagatcacatcaggtggatggagagacatttgatcccttgtttgcttaataaattataaaatgatggcttgg

SEQ ID NO: 159377 - DNA, 800 bp, Homo sapiens
cgacccacgcgtccgccacgcgtacgcggacgcgtgggtcgacccacgcgtcggaataagatgactaagaatgtaatggggaagaactgccctgcctgcccatctcagagccataaggtcatctttgctagagctatttttacctatgtatttatcgttcttgatcataagccgcttatttatatcatgtatctctaaggacctaaaagcactttatgtagtttttaattaatcttaagatctggttacggtaactaaaaaagcctgtctgccaaatccagtggaaacaagtgcatagatgtgaattggtttttaggggccccacttcccaattcattaggtatgactgtggaaatacagacaaggatcttagttgatattttgggcttggggcagtgagggcttaggacaccccaagtggtttgggaaaggaggaggggagtggtgggtttatagggggaggaggaggcaggtggtctaagtgctgactggctacgtagttcgggcaaatcctccaaaagggaaagggaggatttgcttagaaggatggcgctcccagtgactactttttgacttctgtttgtcttacgcttctctcagggaaaaacatgcagtcctctagtgtttcatgtacattctgtggggggtgaacaccttggttctggttaaacagctgtacttttgatagctgtgccaggaagggttaggaccaactacaaattaatgttggttgtcaaatgtagtgtgtttccctaactttctgtttttcctgagaaaaaaaaataaatctttttcaaata

SEQ ID NO: 159378 - DNA, 373 bp, Homo sapiens
  misc_feature (6)..(6): n is a, c, g, or t
acattnaactaaaacccctacgcatttatatagaggaggaggcaggtggtctaagtgctgactggctacgtagttcgggcaaatcctccaaaagggaaagggaggatttgcttagaaggatggcgctcccagtgactactttttgacttctgtttgtcttacgcttctctcagggaaaaacatgcagtcctctagtgtttcatgtacattctgtggggggtgaacaccttggttctggttaaacagctgtacttttgatagctgtgccaggaagggttaggaccaactacaaattaatgttggttgtcaaatgtagtgtgtttccctaactttctgtttttcctgagaaaaaaaaataaatctttttcaaata

SEQ ID NO: 159379 - DNA, 269 bp, Homo sapiens
gcacgaggtgctctagtgtttttccctgagagaagcgtaagacaaacagaagtcaaaaagtagtcactgggaaaaacatgcagtcctctagtgtttcatgtacattctgtggggggtgaacaccttggttctggttaaacagctgtacttttgatagctgtgccaggaagggttaggaccaactacaaattaatgttggttgtcaaatgtagtgtgtttccctaactttctgtttttcctgagaaaaaaaaataaatctttttcaaata

SEQ ID NO: 159380 - DNA, 673 bp, Homo sapiens
gtgggatgccctggctgcatgaatacggcacgagcttaaagatataataagatgactaagaatgtaatggggaagaactgccctgcctgcccatctcagagccataaggtcatctttgctagagctatttttacctatgtatttatcgttcttgatcataagccgcttatttatatcatgtatctctaaggacctaaaagcactttatgtagtttttaattaatcttaagatctggttacggtaactaaaaaagcctgtctgccaaatccagtggaaacaagtgcatagatgtgaattggtttttaggggccccacttcccaattcattaggtatgactgtggaaatacagacaaggatcttagttgatattttgggcttggggcagtgagggcttaggacaccccaagtggtttgggaaaggaggaggggagtggtgggtttatagggggagtgaaaatatggagtcgttacaattgggaagtcaagcattcgtatgtccacggagatgggaccaattgcttctaaatgaggagggggaaatggatcttatgtgtgggatctcgggccgtctttaatagacctagcgaggggaggaacgactttggtgaaaggaaggagtctaaatctaataggaggttcccggtggaatgaacttttctcgaataatgtcc

SEQ ID NO: 159381 - DNA, 448 bp, Homo sapiens
  misc_feature (421)..(425): n is a, c, g, or t
  misc_feature (443)..(447): n is a, c, g, or t
ccggccccggccccggccccggccccgccccggcccggccgggcagctggtaggtgccgtgcgcaaccctccggaagctgccgcccctttccccttttatgggaatactttttttaaaaaaaaagagttcgctggcgccaccccgtaggactggccgccctaaaaccgtgataaaggagctgctcgccacttctcacttccgcttccttccagtaaggagtcggggtcttccccagttttctcagccaggcggcggcggcgactggcaatgtttggcctcaaaagaaacgcggtaatcggactcaacctctactgtgggggggccggcttgggggccggcagcggcggcgccacccgcccgggagggcgacttttggctacggagaaggaggcctcggcccggcgagagatagggggaggnnnnnaatccttccaacctcgannnnnc

SEQ ID NO: 159382 - DNA, 4088 bp, Homo sapiens
ccggccccggccccggccccggccccgccccggcccggccgggcagctggtaggtgccgtgcgcaaccctccggaagctgccgcccctttccccttttatgggaatactttttttaaaaaaaaagagttcgctggcgccaccccgtaggactggccgccctaaaaccgtgataaaggagctgctcgccacttctcacttccgcttccttccagtaaggagtcggggtcttccccagttttctcagccaggcggcggcggcgactggcaatgtttggcctcaaaagaaacgcggtaatcggactcaacctctactgtgggggggccggcttgggggccggcagcggcggcgccacccgcccgggagggcgacttttggctacggagaaggaggcctcggcccggcgagagatagggggaggggaggccggcgcggtgattggcggaagcgccggcgcaagccccccgtccaccctcacgccagactcccggagggtcgcgcggccgccgcccattggcgccgaggtccccgacgtcaccgcgacccccgcgaggctgcttttcttcgcgcccacccgccgcgcggcgccgcttgaggagatggaagccccggccgctgacgccatcatgtcgcccgaagaggagctggacgggtacgagccggagcctctcgggaagcggccggctgtcctgccgctgctggagttggtcggggaatctggtaataacaccagtacggacgggtcactaccctcgacgccgccgccagcagaggaggaggaggacgagttgtaccggcagtcgctggagattatctctcggtaccttcgggagcaggccaccggcgccaaggacacaaagccaatgggcaggtctggggccaccagcaggaaggcgctggagaccttacgacgggttggggatggcgtgcagcgcaaccacgagacggccttccaaggcatgcttcggaaactggacatcaaaaacgaagacgatgtgaaatcgttgtctcgagtgatgatccatgttttcagcgacggcgtaacaaactggggcaggattgtgactctcatttcttttggtgcctttgtggctaaacacttgaagaccataaaccaagaaagctgcatcgaaccattagcagaaagtatcacagacgttctcgtaaggacaaaacgggactggctagttaaacaaagaggctgggatgggtttgtggagttcttccatgtagaggacctagaaggtggcatcaggaatgtgctgctggcttttgcaggtgttgctggagtaggagctggtttggcatatctaataagatagccttactgtaagtgcaatagttgacttttaaccaaccaccaccaccaccaaaaccagtttatgcagttggactccaagctgtaacttcctagagttgcaccctagcaacctagccagaaaagcaagtggcaagaggattatggctaacaagaataaatacatgggaagagtgctccccattgattgaagagtcactgtctgaaagaagcaaagttcagtttcagcaacaaacaaactttgtttgggaagctatggaggaggacttttagatttagtgaagatggtagggtggaaagacttaatttccttgttgagaacaggaaagtggccagtagccaggcaagtcatagaattgattacccgccgaattcattaatttactgtagtgttaagagaagcactaagaatgccagtgacctgtgtaaaagttacaagtaatagaactatgactgtaagcctcagtactgtacaagggaagcttttcctctctctaattagctttcccagtatacttcttagaaagtccaagtgttcaggacttttatacctgttatactttggcttggtttccatgattcttactttattagcctagtttatcaccaataatacttgacggaaggctcagtaattagttatgaatatggatatcctcaattcttaagacagcttgtaaatgtatttgtagaatttacattagtttttttcatacccttttgaactttgcaacttccgtaattaggaacctgtttcttacagcttttctatgctaaactttgttctgttcagttctagagtgtatacagaacgaattgatgtgtaactgtatgcagactggttgtagtggaacaaatctgataactatgcaggtttaaattttcttatctgattttggtaagtattccttagataggtttttctttgaaaacctgggattgagaggttgatgaatggaaattctttcacttcattatatgcaagttttcaataattaggtctaagtggagttttaaggttactgatgacttacaaataatgggctctgattgggcaatactcatttgagttccttccatttgacctaatttaactggtgaaatttaaagtgaattcatgggctcatctttaaagcttttactaaaagattttcagctgaatggaactcattagctgtgtgcatataaaaagatcacatcaggtggatggagagacatttgatcccttgtttgcttaataaattataaaatgatggcttggaaaagcaggctagtctaaccatggtgctattattaggcttgcttgttacacacacaggtctaagcctagtatgtcaataaagcaaatacttactgttttgtttctattaatgattcccaaaccttgttgcaagtttttgcattggcatctttggatttcagtcttgatgtttgttctatcagacttaaccttttatttcctgtccttccttgaaattgctgattgttctgctccctctacagatatttatatcaattcctacagctttcccctgccatccctgaactctttctagcccttttagattttggcactgtgaaacccctgctggaaacctgagtgaccctccctccccaccaagagtccacagacctttcatctttcacgaacttgatcctgttagcaggtggtaataccatgggtgctgtgacactaacagtcattgagaggtgggaggaagtcccttttccttggactggtatcttttcaactattgttttatcctgtctttgggggcaatgtgtcaaaagtcccctcaggaattttcagaggaaagaacattttatgaggctttctctaaagtttcctttgtataggagtatgctcacttaaatttacagaaagaggtgagctgtgttaaacctcagagtttaaaagctactgataaactgaagaaagtgtctatattggaactagggtcatttgaaagcttcagtctcggaacatgacctttagtctgtggactccatttaaaaataggtatgaataagatgactaagaatgtaatggggaagaactgccctgcctgcccatctcagagccataaggtcatctttgctagagctatttttacctatgtatttatcgttcttgatcataagccgcttatttatatcatgtatctctaaggacctaaaagcactttatgtagtttttaattaatcttaagatctggttacggtaactaaaaaagcctgtctgccaaatccagtggaaacaagtgcatagatgtgaattggtttttaggggccccacttcccaattcattaggtatgactgtggaaatacagacaaggatcttagttgatattttgggcttggggcagtgagggcttaggacaccccaagtggtttgggaaaggaggaggggagtggtgggtttatagggggaggaggaggcaggtggtctaagtgctgactggctacgtagttcgggcaaatcctccaaaagggaaagggaggatttgcttagaaggatggcgctcccagtgactactttttgacttctgtttgtcttacgcttctctcagggaaaaacatgcagtcctctagtgtttcatgtacattctgtggggggtgaacaccttggttctggttaaacagctgtacttttgatagctgtgccaggaagggttaggaccaactacaaattaatgttggttgtcaaatgtagtgtgtttccctaactttctgtttttcctgagaaaaaaaaataaatctttttcaaata

SEQ ID NO: 159383 - DNA, 3894 bp, Homo sapiens
ccggccccggccccggccccggccccgccccggcccggccgggcagctggtaggtgccgtgcgcaaccctccggaagctgccgcccctttccccttttatgggaatactttttttaaaaaaaaagagttcgctggcgccaccccgtaggactggccgccctaaaaccgtgataaaggagctgctcgccacttctcacttccgcttccttccagtaaggagtcggggtcttccccagttttctcagccaggcggcggcggcgactggcaatgtttggcctcaaaagaaacgcggtaatcggactcaacctctactgtgggggggccggcttgggggccggcagcggcggcgccacccgcccgggagggcgacttttggctacggagaaggaggcctcggcccggcgagagatagggggaggggaggccggcgcggtgattggcggaagcgccggcgcaagccccccgtccaccctcacgccagactcccggagggtcgcgcggccgccgcccattggcgccgaggtccccgacgtcaccgcgacccccgcgaggctgcttttcttcgcgcccacccgccgcgcggcgccgcttgaggagatggaagccccggccgctgacgccatcatgtcgcccgaagaggagctggacgggtacgagccggagcctctcgggaagcggccggctgtcctgccgctgctggagttggtcggggaatctggtaataacaccagtacggacgggtcactaccctcgacgccgccgccagcagaggaggaggaggacgagttgtaccggcagtcgctggagattatctctcggtaccttcgggagcaggccaccggcgccaaggacacaaagccaatgggcaggtctggggccaccagcaggaaggcgctggagaccttacgacgggttggggatggcgtgcagcgcaaccacgagacggccttccaaggatgggtttgtggagttcttccatgtagaggacctagaaggtggcatcaggaatgtgctgctggcttttgcaggtgttgctggagtaggagctggtttggcatatctaataagatagccttactgtaagtgcaatagttgacttttaaccaaccaccaccaccaccaaaaccagtttatgcagttggactccaagctgtaacttcctagagttgcaccctagcaacctagccagaaaagcaagtggcaagaggattatggctaacaagaataaatacatgggaagagtgctccccattgattgaagagtcactgtctgaaagaagcaaagttcagtttcagcaacaaacaaactttgtttgggaagctatggaggaggacttttagatttagtgaagatggtagggtggaaagacttaatttccttgttgagaacaggaaagtggccagtagccaggcaagtcatagaattgattacccgccgaattcattaatttactgtagtgttaagagaagcactaagaatgccagtgacctgtgtaaaagttacaagtaatagaactatgactgtaagcctcagtactgtacaagggaagcttttcctctctctaattagctttcccagtatacttcttagaaagtccaagtgttcaggacttttatacctgttatactttggcttggtttccatgattcttactttattagcctagtttatcaccaataatacttgacggaaggctcagtaattagttatgaatatggatatcctcaattcttaagacagcttgtaaatgtatttgtaaaaattgtatatatttttacagaaagtctatttctttgaaacgaaggaagtatcgaatttacattagtttttttcatacccttttgaactttgcaacttccgtaattaggaacctgtttcttacagcttttctatgctaaactttgttctgttcagttctagagtgtatacagaacgaattgatgtgtaactgtatgcagactggttgtagtggaacaaatctgataactatgcaggtttaaattttcttatctgattttggtaagtattccttagataggtttttctttgaaaacctgggattgagaggttgatgaatggaaattctttcacttcattatatgcaagttttcaataattaggtctaagtggagttttaaggttactgatgacttacaaataatgggctctgattgggcaatactcatttgagttccttccatttgacctaatttaactggtgaaatttaaagtgaattcatgggctcatctttaaagcttttactaaaagattttcagctgaatggaactcattagctgtgtgcatataaaaagatcacatcaggtggatggagagacatttgatcccttgtttgcttaataaattataaaatgatggcttggaaaagcaggctagtctaaccatggtgctattattaggcttgcttgttacacacacaggtctaagcctagtatgtcaataaagcaaatacttactgttttgtttctattaatgattcccaaaccttgttgcaagtttttgcattggcatctttggatttcagtcttgatgtttgttctatcagacttaaccttttatttcctgtccttccttgaaattgctgattgttctgctccctctacagatatttatatcaattcctacagctttcccctgccatccctgaactctttctagcccttttagattttggcactgtgaaacccctgctggaaacctgagtgaccctccctccccaccaagagtccacagacctttcatctttcacgaacttgatcctgttagcaggtggtaataccatgggtgctgtgacactaacagtcattgagaggtgggaggaagtcccttttccttggactggtatcttttcaactattgttttatcctgtctttgggggcaatgtgtcaaaagtcccctcaggaattttcagaggaaagaacattttatgaggctttctctaaagtttcctttgtataggagtatgctcacttaaatttacagaaagaggtgagctgtgttaaacctcagagtttaaaagctactgataaactgaagaaagtgtctatattggaactagggtcatttgaaagcttcagtctcggaacatgacctttagtctgtggactccatttaaaaataggtatgaataagatgactaagaatgtaatggggaagaactgccctgcctgcccatctcagagccataaggtcatctttgctagagctatttttacctatgtatttatcgttcttgatcataagccgcttatttatatcatgtatctctaaggacctaaaagcactttatgtagtttttaattaatcttaagatctggttacggtaactaaaaaagcctgtctgccaaatccagtggaaacaagtgcatagatgtgaattggtttttaggggccccacttcccaattcattaggtatgactgtggaaatacagacaaggatcttagttgatattttgggcttggggcagtgagggcttaggacaccccaagtggtttgggaaaggaggaggggagtggtgggtttatagggggaggaggaggcaggtggtctaagtgctgactggctacgtagttcgggcaaatcctccaaaagggaaagggaggatttgcttagaaggatggcgctcccagtgactactttttgacttctgtttgtcttacgcttctctcagggaaaaacatgcagtcctctagtgtttcatgtacattctgtggggggtgaacaccttggttctggttaaacagctgtacttttgatagctgtgccaggaagggttaggaccaactacaaattaatgttggttgtcaaatgtagtgtgtttccctaactttctgtttttcctgagaaaaaaaaataaatctttttcaaata

SEQ ID NO: 159384 - DNA, 4088 bp, Homo sapiens
ccggccccggccccggccccggccccgccccggcccggccgggcagctggtaggtgccgtgcgcaaccctccggaagctgccgcccctttccccttttatgggaatactttttttaaaaaaaaagagttcgctggcgccaccccgtaggactggccgccctaaaaccgtgataaaggagctgctcgccacttctcacttccgcttccttccagtaaggagtcggggtcttccccagttttctcagccaggcggcggcggcgactggcaatgtttggcctcaaaagaaacgcggtaatcggactcaacctctactgtgggggggccggcttgggggccggcagcggcggcgccacccgcccgggagggcgacttttggctacggagaaggaggcctcggcccggcgagagatagggggaggggaggccggcgcggtgattggcggaagcgccggcgcaagccccccgtccaccctcacgccagactcccggagggtcgcgcggccgccgcccattggcgccgaggtccccgacgtcaccgcgacccccgcgaggctgcttttcttcgcgcccacccgccgcgcggcgccgcttgaggagatggaagccccggccgctgacgccatcatgtcgcccgaagaggagctggacgggtacgagccggagcctctcgggaagcggccggctgtcctgccgctgctggagttggtcggggaatctggtaataacaccagtacggacgggtcactaccctcgacgccgccgccagcagaggaggaggaggacgagttgtaccggcagtcgctggagattatctctcggtaccttcgggagcaggccaccggcgccaaggacacaaagccaatgggcaggtctggggccaccagcaggaaggcgctggagaccttacgacgggttggggatggcgtgcagcgcaaccacgagacggccttccaaggcatgcttcggaaactggacatcaaaaacgaagacgatgtgaaatcgttgtctcgagtgatgatccatgttttcagcgacggcgtaacaaactggggcaggattgtgactctcatttcttttggtgcctttgtggctaaacacttgaagaccataaaccaagaaagctgcatcgaaccattagcagaaagtatcacagacgttctcgtaaggacaaaacgggactggctagttaaacaaagaggctgggatgggtttgtggagttcttccatgtagaggacctagaaggtggcatcaggaatgtgctgctggcttttgcaggtgttgctggagtaggagctggtttggcatatctaataagatagccttactgtaagtgcaatagttgacttttaaccaaccaccaccaccaccaaaaccagtttatgcagttggactccaagctgtaacttcctagagttgcaccctagcaacctagccagaaaagcaagtggcaagaggattatggctaacaagaataaatacatgggaagagtgctccccattgattgaagagtcactgtctgaaagaagcaaagttcagtttcagcaacaaacaaactttgtttgggaagctatggaggaggacttttagatttagtgaagatggtagggtggaaagacttaatttccttgttgagaacaggaaagtggccagtagccaggcaagtcatagaattgattacccgccgaattcattaatttactgtagtgttaagagaagcactaagaatgccagtgacctgtgtaaaagttacaagtaatagaactatgactgtaagcctcagtactgtacaagggaagcttttcctctctctaattagctttcccagtatacttcttagaaagtccaagtgttcaggacttttatacctgttatactttggcttggtttccatgattcttactttattagcctagtttatcaccaataatacttgacggaaggctcagtaattagttatgaatatggatatcctcaattcttaagacagcttgtaaatgtatttgtaaaaattgtatatatttttacagaaagtctatttctttgaaacgaaggaagtatcgaatttacattagtttttttcatacccttttgaactttgcaacttccgtaattaggaacctgtttcttacagcttttctatgctaaactttgttctgttcagttctagagtgtatacagaacgaattgatgtgtaactgtatgcagactggttgtagtggaacaaatctgataactatgcaggtttaaattttcttatctgattttggtaagtattccttagataggtttttctttgaaaacctgggattgagaggttgatgaatggaaattctttcacttcattatatgcaagttttcaataattaggtctaagtggagttttaaggttactgatgacttacaaataatgggctctgattgggcaatactcatttgagttccttccatttgacctaatttaactggtgaaatttaaagtgaattcatgggctcatctttaaagcttttactaaaagattttcagctgaatggaactcattagctgtgtgcatataaaaagatcacatcaggtggatggagagacatttgatcccttgtttgcttaataaattataaaatgatggcttggcaggtctaagcctagtatgtcaataaagcaaatacttactgttttgtttctattaatgattcccaaaccttgttgcaagtttttgcattggcatctttggatttcagtcttgatgtttgttctatcagacttaaccttttatttcctgtccttccttgaaattgctgattgttctgctccctctacagatatttatatcaattcctacagctttcccctgccatccctgaactctttctagcccttttagattttggcactgtgaaacccctgctggaaacctgagtgaccctccctccccaccaagagtccacagacctttcatctttcacgaacttgatcctgttagcaggtggtaataccatgggtgctgtgacactaacagtcattgagaggtgggaggaagtcccttttccttggactggtatcttttcaactattgttttatcctgtctttgggggcaatgtgtcaaaagtcccctcaggaattttcagaggaaagaacattttatgaggctttctctaaagtttcctttgtataggagtatgctcacttaaatttacagaaagaggtgagctgtgttaaacctcagagtttaaaagctactgataaactgaagaaagtgtctatattggaactagggtcatttgaaagcttcagtctcggaacatgacctttagtctgtggactccatttaaaaataggtatgaataagatgactaagaatgtaatggggaagaactgccctgcctgcccatctcagagccataaggtcatctttgctagagctatttttacctatgtatttatcgttcttgatcataagccgcttatttatatcatgtatctctaaggacctaaaagcactttatgtagtttttaattaatcttaagatctggttacggtaactaaaaaagcctgtctgccaaatccagtggaaacaagtgcatagatgtgaattggtttttaggggccccacttcccaattcattaggtatgactgtggaaatacagacaaggatcttagttgatattttgggcttggggcagtgagggcttaggacaccccaagtggtttgggaaaggaggaggggagtggtgggtttatagggggaggaggaggcaggtggtctaagtgctgactggctacgtagttcgggcaaatcctccaaaagggaaagggaggatttgcttagaaggatggcgctcccagtgactactttttgacttctgtttgtcttacgcttctctcagggaaaaacatgcagtcctctagtgtttcatgtacattctgtggggggtgaacaccttggttctggttaaacagctgtacttttgatagctgtgccaggaagggttaggaccaactacaaattaatgttggttgtcaaatgtagtgtgtttccctaactttctgtttttcctgagaaaaaaaaataaatctttttcaaata

SEQ ID NO: 159385 - DNA, 4088 bp, Homo sapiens
ccggccccggccccggccccggccccgccccggcccggccgggcagctggtaggtgccgtgcgcaaccctccggaagctgccgcccctttccccttttatgggaatactttttttaaaaaaaaagagttcgctggcgccaccccgtaggactggccgccctaaaaccgtgataaaggagctgctcgccacttctcacttccgcttccttccagtaaggagtcggggtcttccccagttttctcagccaggcggcggcggcgactggcaatgtttggcctcaaaagaaacgcggtaatcggactcaacctctactgtgggggggccggcttgggggccggcagcggcggcgccacccgcccgggagggcgacttttggctacggagaaggaggcctcggcccggcgagagatagggggaggggaggccggcgcggtgattggcggaagcgccggcgcaagccccccgtccaccctcacgccagactcccggagggtcgcgcggccgccgcccattggcgccgaggtccccgacgtcaccgcgacccccgcgaggctgcttttcttcgcgcccacccgccgcgcggcgccgcttgaggagatggaagccccggccgctgacgccatcatgtcgcccgaagaggagctggacgggtacgagccggagcctctcgggaagcggccggctgtcctgccgctgctggagttggtcggggaatctggtaataacaccagtacggacgggtcactaccctcgacgccgccgccagcagaggaggaggaggacgagttgtaccggcagtcgctggagattatctctcggtaccttcgggagcaggccaccggcgccaaggacacaaagccaatgggcaggtctggggccaccagcaggaaggcgctggagaccttacgacgggttggggatggcgtgcagcgcaaccacgagacggccttccaaggcatgcttcggaaactggacatcaaaaacgaagacgatgtgaaatcgttgtctcgagtgatgatccatgttttcagcgacggcgtaacaaactggggcaggattgtgactctcatttcttttggtgcctttgtggctaaacacttgaagaccataaaccaagaaagctgcatcgaaccattagcagaaagtatcacagacgttctcgtaaggacaaaacgggactggctagttaaacaaagaggctgggatgggtttgtggagttcttccatgtagaggacctagaaggtggcatcaggaatgtgctgctggcttttgcaggtgttgctggagtaggagctggtttggcatatctaataagatagccttactgtaagtgcaatagttgacttttaaccaaccaccaccaccaccaaaaccagtttatgcagttggactccaagctgtaacttcctagagttgcaccctagcaacctagccagaaaagcaagtggcaagaggattatggctaacaagaataaatacatgggaagagtgctccccattgattgaagagtcactgtctgaaagaagcaaagttcagtttcagcaacaaacaaactttgtttgggaagctatggaggaggacttttagatttagtgaagatggtagggtggaaagacttaatttccttgttgagaacaggaaagtggccagtagccaggcaagtcatagaattgattacccgccgaattcattaatttactgtagtgttaagagaagcactaagaatgccagtgacctgtgtaaaagttacaagtaatagaactatgactgtaagcctcagtactgtacaagggaagcttttcctctctctaattagctttcccagtatacttcttagaaagtccaagtgttcaggacttttatacctgttatactttggcttggtttccatgattcttactttattagcctagtttatcaccaataatacttgacggaaggctcagtaattagttatgaatatggatatcctcaattcttaagacagcttgtaaatgtatttgtaaaaattgtatatatttttacagaaagtctatttctttgaaacgaaggaagtatcgaatttacattagtttttttcatacccttttgaactttgcaacttccgtaattaggaacctgtttcttacagcttttctatgctaaactttgttctgttcagttctagagtgtatacagaacgaattgatgtgtaactgtatgcagactggttgtagtggaacaaatctgataactatgcaggtttaaattttcttatctgattttggtaagtattccttagataggtttttctttgaaaacctgggattgagaggttgatgaatggaaattctttcacttcattatatgcaagttttcaataattaggtctaagtggagttttaaggttactgatgacttacaaataatgggctctgattgggcaatactcatttgagttccttccatttgacctaatttaactggtgaaatttaaagtgaattcatgggctcatctttaaagcttttactaaaagattttcagctgaatggaactcattagctgtgtgcatataaaaagatcacatcaggtggatggagagacatttgatcccttgtttgcttaataaattataaaatgatggcttggaaaagcaggctagtctaaccatggtgctattattaggcttgcttgttacacacacaggtctaagcctagtatgtcaataaagcaaatacttactgttttgtttctattaatgattcccaaaccttgttgcaagtttttgcattggcatctttggatttcagtcttgatgtttgttctatcagacttaaccttttatttcctgtccttccttgaaattgctgattgttctgctccctctacagatatttatatcaattcctacagctttcccctgccatccctgaactctttctagcccttttagattttggcactgtgaaacccctgctggaaacctgagtgaccctccctccccaccaagagtccacagacctttcatctttcacgaacttgatcctgttagcaggtggtaataccatgggtgctgtgacactaacagtcattgagaggtgggaggaagtcccttttccttggactggtatcttttcaactattgttttatcctgtctttgggggcaatgtgtcaaaagtcccctcaggaattttcagaggaaagaacattttatgaggctttctctaaagtttcctttgtataggagtatgctcacttaaatttacagaaagaggtgagctgtgttaaacctcagagtttaaaagctactgataaactgaagaaagtgtctatattggaactagggtcatttgaaagcttcagtctcggaacatgacctttagtctgtggactccatttaaaaataggtatgaataagatgactaagaatgtaatggggaagaactgccctgcctgcccatctcagagccataaggtcatctttgctagagctatttttacctatgtatttatcgttcttgatcataagccgcttatttatatcatgtatctctaaggacctaaaagcactttatgtagtttttaattaatcttaagatctggttacggtaactaattaggggccccacttcccaattcattaggtatgactgtggaaatacagacaaggatcttagttgatattttgggcttggggcagtgagggcttaggacaccccaagtggtttgggaaaggaggaggggagtggtgggtttatagggggaggaggaggcaggtggtctaagtgctgactggctacgtagttcgggcaaatcctccaaaagggaaagggaggatttgcttagaaggatggcgctcccagtgactactttttgacttctgtttgtcttacgcttctctcagggaaaaacatgcagtcctctagtgtttcatgtacattctgtggggggtgaacaccttggttctggttaaacagctgtacttttgatagctgtgccaggaagggttaggaccaactacaaattaatgttggttgtcaaatgtagtgtgtttccctaactttctgtttttcctgagaaaaaaaaataaatctttttcaaata

SEQ ID NO: 159386 - DNA, 3668 bp, Homo sapiens
tcccatgccaataacctccagaatgaaggattttttttagagaggtggggatatctaaaggtttttatgacgcacggctgtttgcaggctctaactaaaggaccattgtttatttgatgttgatttaagtagtggatccttagagatagtggtatggcggtcttgaattgtatcaaaaatcttggttttctctaggcaattttttgttccaattcagttgaatactcttcagtggattcagaccatgaaaaaataagtcaccaggggaggatagctgaaataattcctaaggcggtgcctgttttaatggagaagatatggggtggagcctgcgttttaaacaaacccagatctgatgcaggatgtacttaactacgttgagaaaaactgatctgcgcaattgaggcgttactgaaatattaggtggtggagatttgagaataagggttttcgtcttttacctcatgggaactctggaagtccttttgttaggataaatcctaataagaccaagatagtactgtaaaatgaagtttaattatcatgggtccccgcttaagaaactgaagaacttattttctttttttgccccggggtgaataataattggtttactattgctttagggggaaaccttagatattttaatttaccttctctctggatagtagtgttgttaagagagcagaaacccatacttgaaaatgtgcttttcttttttgttttctaggatgggtttgtggagttcttccatgtagaggacctagaaggtggcatcaggaatgtgctgctggcttttgcaggtgttgctggagtaggagctggtttggcatatctaataagatagccttactgtaagtgcaatagttgacttttaaccaaccaccaccaccaccaaaaccagtttatgcagttggactccaagctgtaacttcctagagttgcaccctagcaacctagccagaaaagcaagtggcaagaggattatggctaacaagaataaatacatgggaagagtgctccccattgattgaagagtcactgtctgaaagaagcaaagttcagtttcagcaacaaacaaactttgtttgggaagctatggaggaggacttttagatttagtgaagatggtagggtggaaagacttaatttccttgttgagaacaggaaagtggccagtagccaggcaagtcatagaattgattacccgccgaattcattaatttactgtagtgttaagagaagcactaagaatgccagtgacctgtgtaaaagttacaagtaatagaactatgactgtaagcctcagtactgtacaagggaagcttttcctctctctaattagctttcccagtatacttcttagaaagtccaagtgttcaggacttttatacctgttatactttggcttggtttccatgattcttactttattagcctagtttatcaccaataatacttgacggaaggctcagtaattagttatgaatatggatatcctcaattcttaagacagcttgtaaatgtatttgtaaaaattgtatatatttttacagaaagtctatttctttgaaacgaaggaagtatcgaatttacattagtttttttcatacccttttgaactttgcaacttccgtaattaggaacctgtttcttacagcttttctatgctaaactttgttctgttcagttctagagtgtatacagaacgaattgatgtgtaactgtatgcagactggttgtagtggaacaaatctgataactatgcaggtttaaattttcttatctgattttggtaagtattccttagataggtttttctttgaaaacctgggattgagaggttgatgaatggaaattctttcacttcattatatgcaagttttcaataattaggtctaagtggagttttaaggttactgatgacttacaaataatgggctctgattgggcaatactcatttgagttccttccatttgacctaatttaactggtgaaatttaaagtgaattcatgggctcatctttaaagcttttactaaaagattttcagctgaatggaactcattagctgtgtgcatataaaaagatcacatcaggtggatggagagacatttgatcccttgtttgcttaataaattataaaatgatggcttggaaaagcaggctagtctaaccatggtgctattattaggcttgcttgttacacacacaggtctaagcctagtatgtcaataaagcaaatacttactgttttgtttctattaatgattcccaaaccttgttgcaagtttttgcattggcatctttggatttcagtcttgatgtttgttctatcagacttaaccttttatttcctgtccttccttgaaattgctgattgttctgctccctctacagatatttatatcaattcctacagctttcccctgccatccctgaactctttctagcccttttagattttggcactgtgaaacccctgctggaaacctgagtgaccctccctccccaccaagagtccacagacctttcatctttcacgaacttgatcctgttagcaggtggtaataccatgggtgctgtgacactaacagtcattgagaggtgggaggaagtcccttttccttggactggtatcttttcaactattgttttatcctgtctttgggggcaatgtgtcaaaagtcccctcaggaattttcagaggaaagaacattttatgaggctttctctaaagtttcctttgtataggagtatgctcacttaaatttacagaaagaggtgagctgtgttaaacctcagagtttaaaagctactgataaactgaagaaagtgtctatattggaactagggtcatttgaaagcttcagtctcggaacatgacctttagtctgtggactccatttaaaaataggtatgaataagatgactaagaatgtaatggggaagaactgccctgcctgcccatctcagagccataaggtcatctttgctagagctatttttacctatgtatttatcgttcttgatcataagccgcttatttatatcatgtatctctaaggacctaaaagcactttatgtagtttttaattaatcttaagatctggttacggtaactaaaaaagcctgtctgccaaatccagtggaaacaagtgcatagatgtgaattggtttttaggggccccacttcccaattcattaggtatgactgtggaaatacagacaaggatcttagttgatattttgggcttggggcagtgagggcttaggacaccccaagtggtttgggaaaggaggaggggagtggtgggtttatagggggaggaggaggcaggtggtctaagtgctgactggctacgtagttcgggcaaatcctccaaaagggaaagggaggatttgcttagaaggatggcgctcccagtgactactttttgacttctgtttgtcttacgcttctctcagggaaaaacatgcagtcctctagtgtttcatgtacattctgtggggggtgaacaccttggttctggttaaacagctgtacttttgatagctgtgccaggaagggttaggaccaactacaaattaatgttggttgtcaaatgtagtgtgtttccctaactttctgtttttcctgagaaaaaaaaataaatctttttcaaata

SEQ ID NO: 159387 - DNA, 3614 bp, Homo sapiens
tcccatgccaataacctccagaatgaaggattttttttagagaggtggggatatctaaaggtttttatgacgcacggctgtttgcaggctctaactaaaggaccattgtttatttgatgttgatttaagtagtggatccttagagatagtggtatggcggtcttgaattgtatcaaaaatcttggttttctctaggcaattttttgttccaattcagttgaatactcttcagtggattcagaccatgaaaaaataagtcaccaggggaggatagctgaaataattcctaaggcggtgcctgttttaatggagaagatatggggtggagcctgcgttttaaacaaacccagatctgatgcaggatgtacttaactacgttgagaaaaactgatctgcgcaattgaggcgttactgaaatattaggtggtggagatttgagaataagggttttcgtcttttacctcatgggaactctggaagtccttttgttaggataaatcctaataagaccaagatagtactgtaaaatgaagtttaattatcatgggtccccgcttaagaaactgaagaacttattttctttttttgccccggggtgaataataattggtttactattgctttagggggaaaccttagatattttaatttaccttctctctggatagtagtgttgttaagagagcagaaacccatacatgtagaggacctagaaggtggcatcaggaatgtgctgctggcttttgcaggtgttgctggagtaggagctggtttggcatatctaataagatagccttactgtaagtgcaatagttgacttttaaccaaccaccaccaccaccaaaaccagtttatgcagttggactccaagctgtaacttcctagagttgcaccctagcaacctagccagaaaagcaagtggcaagaggattatggctaacaagaataaatacatgggaagagtgctccccattgattgaagagtcactgtctgaaagaagcaaagttcagtttcagcaacaaacaaactttgtttgggaagctatggaggaggacttttagatttagtgaagatggtagggtggaaagacttaatttccttgttgagaacaggaaagtggccagtagccaggcaagtcatagaattgattacccgccgaattcattaatttactgtagtgttaagagaagcactaagaatgccagtgacctgtgtaaaagttacaagtaatagaactatgactgtaagcctcagtactgtacaagggaagcttttcctctctctaattagctttcccagtatacttcttagaaagtccaagtgttcaggacttttatacctgttatactttggcttggtttccatgattcttactttattagcctagtttatcaccaataatacttgacggaaggctcagtaattagttatgaatatggatatcctcaattcttaagacagcttgtaaatgtatttgtaaaaattgtatatatttttacagaaagtctatttctttgaaacgaaggaagtatcgaatttacattagtttttttcatacccttttgaactttgcaacttccgtaattaggaacctgtttcttacagcttttctatgctaaactttgttctgttcagttctagagtgtatacagaacgaattgatgtgtaactgtatgcagactggttgtagtggaacaaatctgataactatgcaggtttaaattttcttatctgattttggtaagtattccttagataggtttttctttgaaaacctgggattgagaggttgatgaatggaaattctttcacttcattatatgcaagttttcaataattaggtctaagtggagttttaaggttactgatgacttacaaataatgggctctgattgggcaatactcatttgagttccttccatttgacctaatttaactggtgaaatttaaagtgaattcatgggctcatctttaaagcttttactaaaagattttcagctgaatggaactcattagctgtgtgcatataaaaagatcacatcaggtggatggagagacatttgatcccttgtttgcttaataaattataaaatgatggcttggaaaagcaggctagtctaaccatggtgctattattaggcttgcttgttacacacacaggtctaagcctagtatgtcaataaagcaaatacttactgttttgtttctattaatgattcccaaaccttgttgcaagtttttgcattggcatctttggatttcagtcttgatgtttgttctatcagacttaaccttttatttcctgtccttccttgaaattgctgattgttctgctccctctacagatatttatatcaattcctacagctttcccctgccatccctgaactctttctagcccttttagattttggcactgtgaaacccctgctggaaacctgagtgaccctccctccccaccaagagtccacagacctttcatctttcacgaacttgatcctgttagcaggtggtaataccatgggtgctgtgacactaacagtcattgagaggtgggaggaagtcccttttccttggactggtatcttttcaactattgttttatcctgtctttgggggcaatgtgtcaaaagtcccctcaggaattttcagaggaaagaacattttatgaggctttctctaaagtttcctttgtataggagtatgctcacttaaatttacagaaagaggtgagctgtgttaaacctcagagtttaaaagctactgataaactgaagaaagtgtctatattggaactagggtcatttgaaagcttcagtctcggaacatgacctttagtctgtggactccatttaaaaataggtatgaataagatgactaagaatgtaatggggaagaactgccctgcctgcccatctcagagccataaggtcatctttgctagagctatttttacctatgtatttatcgttcttgatcataagccgcttatttatatcatgtatctctaaggacctaaaagcactttatgtagtttttaattaatcttaagatctggttacggtaactaaaaaagcctgtctgccaaatccagtggaaacaagtgcatagatgtgaattggtttttaggggccccacttcccaattcattaggtatgactgtggaaatacagacaaggatcttagttgatattttgggcttggggcagtgagggcttaggacaccccaagtggtttgggaaaggaggaggggagtggtgggtttatagggggaggaggaggcaggtggtctaagtgctgactggctacgtagttcgggcaaatcctccaaaagggaaagggaggatttgcttagaaggatggcgctcccagtgactactttttgacttctgtttgtcttacgcttctctcagggaaaaacatgcagtcctctagtgtttcatgtacattctgtggggggtgaacaccttggttctggttaaacagctgtacttttgatagctgtgccaggaagggttaggaccaactacaaattaatgttggttgtcaaatgtagtgtgtttccctaactttctgtttttcctgagaaaaaaaaataaatctttttcaaata

SEQ ID NO: 159388 - DNA, 4324 bp, Homo sapiens
ccggccccggccccggccccggccccgccccggcccggccgggcagctggtaggtgccgtgcgcaaccctccggaagctgccgcccctttccccttttatgggaatactttttttaaaaaaaaagagttcgctggcgccaccccgtaggactggccgccctaaaaccgtgataaaggagctgctcgccacttctcacttccgcttccttccagtaaggagtcggggtcttccccagttttctcagccaggcggcggcggcgactggcaatgtttggcctcaaaagaaacgcggtaatcggactcaacctctactgtgggggggccggcttgggggccggcagcggcggcgccacccgcccgggagggcgacttttggctacggagaaggaggcctcggcccggcgagagatagggggaggggaggccggcgcggtgattggcggaagcgccggcgcaagccccccgtccaccctcacgccagactcccggagggtcgcgcggccgccgcccattggcgccgaggtccccgacgtcaccgcgacccccgcgaggctgcttttcttcgcgcccacccgccgcgcggcgccgcttgaggagatggaagccccggccgctgacgccatcatgtcgcccgaagaggagctggacgggtacgagccggagcctctcgggaagcggccggctgtcctgccgctgctggagttggtcggggaatctggtaataacaccagtacggacgggtcactaccctcgacgccgccgccagcagaggaggaggaggacgagttgtaccggcagtcgctggagattatctctcggtaccttcgggagcaggccaccggcgccaaggacacaaagccaatgggcaggtctggggccaccagcaggaaggcgctggagaccttacgacgggttggggatggcgtgcagcgcaaccacgagacggccttccaaggcatgcttcggaaactggacatcaaaaacgaagacgatgtgaaatcgttgtctcgagtgatgatccatgttttcagcgacggcgtaacaaactggggcaggattgtgactctcatttcttttggtgcctttgtggctaaacacttgaagaccataaaccaagaaagctgcatcgaaccattagcagaaagtatcacagacgttctcgtaaggacaaaacgggactggctagttaaacaaagaggctgggatgggtttgtggagttcttccatgtagaggacctagaaggtggcatcaggaatgtgctgctggcttttgcaggtgttgctggagtaggagctggtttggcatatctaataagatagccttactgtaagtgcaatagttgacttttaaccaaccaccaccaccaccaaaaccagtttatgcagttggactccaagctgtaacttcctagagttgcaccctagcaacctagccagaaaagcaagtggcaagaggattatggctaacaagaataaatacatgggaagagtgctccccattgattgaagagtcactgtctgaaagaagcaaagttcagtttcagcaacaaacaaactttgtttgggaagctatggaggaggacttttagatttagtgaagatggtagggtggaaagacttaatttccttgttgagaacaggaaagtggccagtagccaggcaagtcatagaattgattacccgccgaattcattaatttactgtagtgttaagagaagcactaagaatgccagtgacctgtgtaaaagttacaagtaatagaactatgactgtaagcctcagtactgtacaagggaagcttttcctctctctaattagctttcccagtatacttcttagaaagtccaagtgttcaggacttttatacctgttatactttggcttggtttccatgattcttactttattagcctagtttatcaccaataatacttgacggaaggctcagtaattagttatgaatatggatatcctcaattcttaagacagcttgtaaatgtatttgtaaaaattgtatatatttttacagaaagtctatttctttgaaacgaaggaagtatcgaatttacattagtttttttcatacccttttgaactttgcaacttccgtaattaggaacctgtttcttacagcttttctatgctaaactttgttctgttcagttctagagtgtatacagaacgaattgatgtgtaactgtatgcagactggttgtagtggaacaaatctgataactatgcaggtttaaattttcttatctgattttggtaagtattccttagataggtttttctttgaaaacctgggattgagaggttgatgaatggaaattctttcacttcattatatgcaagttttcaataattaggtctaagtggagttttaaggttactgatgacttacaaataatgggctctgattgggcaatactcatttgagttccttccatttgacctaatttaactggtgaaatttaaagtgaattcatgggctcatctttaaagcttttactaaaagattttcagctgaatggaactcattagctgtgtgcatataaaaagatcacatcaggtggatggagagacatttgatcccttgtttgcttaataaattataaaatgatggcttggaaaagcaggctagtctaaccatggtgctattattaggcttgcttgttacacacacaggtctaagcctagtatgtcaataaagcaaatacttactgttttgtttctattaatgattcccaaaccttgttgcaagtttttgcattggcatctttggatttcagtcttgatgtttgttctatcagacttaaccttttatttcctgtccttccttgaaattgctgattgttctgctccctctacagatatttatatcaattcctacagctttcccctgccatccctgaactctttctagcccttttagattttggcactgtgaaacccctgctggaaacctgagtgaccctccctccccaccaagagtccacagacctttcatctttcacgaacttgatcctgttagcaggtggtaataccatgggtgctgtgacactaacagtcattgagaggtgggaggaagtcccttttccttggactggtatcttttcaactattgttttatcctgtctttgggggcaatgtgtcaaaagtcccctcaggaattttcagaggaaagaacattttatgaggctttctctaaagtttcctttgtataggagtatgctcacttaaatttacagaaagaggtgagctgtgttaaacctcagagtttaaaagctactgataaactgaagaaagtgtctatattggaactagggtcatttgaaagcttcagtctcggaacatgacctttagtctgtggactccatttaaaaataggtatgaataagatgactaagaatgtaatggggaagaactgccctgcctgcccatctcagagccataaggtcatctttgctagagctatttttacctatgtatttatcgttcttgatcataagccgcttatttatatcatgtatctctaaggacctaaaagcactttatgtagtttttaattaatcttaagatctggttacggtaactaaaaaagcctgtctgccaaatccagtggaaacaagtgcatagatgtgaattggtttttaggggccccacttcccaattcattaggtatgactgtggaaatacagacaaggatcttagttgatattttgggcttggggcagtgagggcttaggacaccccaagtggtttgggaaaggaggaggggagtggtgggtttatagggggaggaggaggcaggtggtctaagtgctgactggctacgtagttcgggcaaatcctccaaaagggaaagggaggatttgcttagaaggatggcgctcccagtgactactttttgacttctgtttgtcttacgcttctctcagggaaaaacatgcagtcctctagtgtttcatgtacattctgtggggggtgaacaccttggttctggttaaacagctgtacttttgatagctgtgccaggaagggttaggaccaactacaaattaatgttggttgtcaaatgtagtgtgtttccctaactttctgtttttcctgagaaaaaaaaataaatctttttcaaataaaaaaaaaaagggggggcaaaatttccgaggcaagttaggtcccgttctggcaagggcaaggggggataaaagaggggggtaaagcggggaaggcgggttggggccctcgggggatgcacaccagaagggaatagtggacccttgggtgtttgtataataacacatatatatagaaggacta

SEQ ID NO: 159389 - DNA, 5301 bp, Homo sapiens
ccggccccggccccggccccggccccgccccggcccggccgggcagctggtaggtgccgtgcgcaaccctccggaagctgccgcccctttccccttttatgggaatactttttttaaaaaaaaagagttcgctggcgccaccccgtaggactggccgccctaaaaccgtgataaaggagctgctcgccacttctcacttccgcttccttccagtaaggagtcggggtcttccccagttttctcagccaggcggcggcggcgactggcaatgtttggcctcaaaagaaacgcggtaatcggactcaacctctactgtgggggggccggcttgggggccggcagcggcggcgccacccgcccgggagggcgacttttggctacggagaaggaggcctcggcccggcgagagatagggggaggggaggccggcgcggtgattggcggaagcgccggcgcaagccccccgtccaccctcacgccagactcccggagggtcgcgcggccgccgcccattggcgccgaggtccccgacgtcaccgcgacccccgcgaggctgcttttcttcgcgcccacccgccgcgcggcgccgcttgaggagatggaagccccggccgctgacgccatcatgtcgcccgaagaggagctggacgggtacgagccggagcctctcgggaagcggccggctgtcctgccgctgctggagttggtcggggaatctggtaataacaccagtacggacgggtcactaccctcgacgccgccgccagcagaggaggaggaggacgagttgtaccggcagtcgctggagattatctctcggtaccttcgggagcaggccaccggcgccaaggacacaaagccaatgggcaggtctggggccaccagcaggaaggcgctggagaccttacgacgggttggggatggcgtgcagcgcaaccacgagacggccttccaaggcatgcttcggaaactggacatcaaaaacgaagacgatgtgaaatcgttgtctcgagtgatgatccatgttttcagcgacggcgtaacaaactggggcaggattgtgactctcatttcttttggtgcctttgtggctaaacacttgaagaccataaaccaagaaagctgcatcgaaccattagcagaaagtatcacagacgttctcgtaaggacaaaacgggactggctagttaaacaaagaggctgggatgggtttgtggagttcttccatgtagaggacctagaaggtggcatcaggaatgtgctgctggcttttgcaggtgttgctggagtaggagctggtttggcatatctaataagatagccttactgtaagtgcaatagttgacttttaaccaaccaccaccaccaccaaaaccagtttatgcagttggactccaagctgtaacttcctagagttgcaccctagcaacctagccagaaaagcaagtggcaagaggattatggctaacaagaataaatacatgggaagagtgctccccattgattgaagagtcactgtctgaaagaagcaaagttcagtttcagcaacaaacaaactttgtttgggaagctatggaggaggacttttagatttagtgaagatggtagggtggaaagacttaatttccttgttgagaacaggaaagtggccagtagccaggcaagtcatagaattgattacccgccgaattcattaatttactgtagtgttaagagaagcactaagaatgccagtgacctgtgtaaaagttacaagtaatagaactatgactgtaagcctcagtactgtacaagggaagcttttcctctctctaattagctttcccagtatacttcttagaaagtccaagtgttcaggacttttatacctgttatactttggcttggtttccatgattcttactttattagcctagtttatcaccaataatacttgacggaaggctcagtaattagttatgaatatggatatcctcaattcttaagacagcttgtaaatgtatttgtaaaaattgtatatatttttacagaaagtctatttctttgaaacgaaggaagtatcgaatttacattagtttttttcatacccttttgaactttgcaacttccgtaattaggaacctgtttcttacagcttttctatgctaaactttgttctgttcagttctagagtgtatacagaacgaattgatgtgtaactgtatgcagactggttgtagtggaacaaatctgataactatgcaggtttaaattttcttatctgattttggtaagtattccttagataggtttttctttgaaaacctgggattgagaggttgatgaatggaaattctttcacttcattatatgcaagttttcaataattaggtctaagtggagttttaaggttactgatgacttacaaataatgggctctgattgggcaatactcatttgagttccttccatttgacctaatttaactggtgaaatttaaagtgaattcatgggctcatctttaaagcttttactaaaagattttcagctgaatggaactcattagctgtgtgcatataaaaagatcacatcaggtggatggagagacatttgatcccttgtttgcttaataaattataaaatgatggcttggaaaagcaggctagtctaaccatggtgctattattaggcttgcttgttacacacacaggtctaagcctagtatgtcaataaagcaaatacttactgttttgtttctattaatgattcccaaaccttgttgcaagtttttgcattggcatctttggatttcagtcttgatgtttgttctatcagacttaaccttttatttcctgtccttccttgaaattgctgattgttctgctccctctacagatatttatatcaattcctacagctttcccctgccatccctgaactctttctagcccttttagattttggcactgtgaaacccctgctggaaacctgagtgaccctccctccccaccaagagtccacagacctttcatctttcacgaacttgatcctgttagcaggtggtaataccatgggtgctgtgacactaacagtcattgagaggtgggaggaagtcccttttccttggactggtatcttttcaactattgttttatcctgtctttgggggcaatgtgtcaaaagtcccctcaggaattttcagaggaaagaacattttatgaggctttctctaaagtttcctttgtataggagtatgctcacttaaatttacagaaagaggtgagctgtgttaaacctcagagtttaaaagctactgataaactgaagaaagtgtctatattggaactagggtcatttgaaagcttcagtctcggaacatgacctttagtctgtggactccatttaaaaataggtatgaataagatgactaagaatgtaatggggaagaactgccctgcctgcccatctcagagccataaggtcatctttgctagagctatttttacctatgtatttatcgttcttgatcataagccgcttatttatatcatgtatctctaaggacctaaaagcactttatgtagtttttaattaatcttaagatctggttacggtaactaaaaaagcctgtctgccaaatccagtggaaacaagtgcatagatgtgaattggtttttaggggccccacttcccaattcattaggtatgactgtggaaatacagacaaggatcttagttgatattttgggcttggggcagtgagggcttaggacaccccaagtggtttgggaaaggaggaggggagtggtgggtttatagggggaggaggaggcaggtggtctaagtgctgactggctacgtagttcgggcaaatcctccaaaagggaaagggaggatttgcttagaaggatggcgctcccagtgactactttttgacttctgtttgtcttacgcttctctcagggaaaaacatgcagtcctctagtgtttcatgtacattctgtggggggtgaacaccttggttctggttaaacagctgtacttttgatagctgtgccaggaagggttaggaccaactacaaattaatgttggttgtcaaatgtagtgtgtttccctaactttctgtttttcctgagaaaaaaaaataaatctttttcaaataccgaaaaaaacacaaacaaaaaacaacaacaaaaacacaacactgtggggggcgaggcgcgcgcggcgcgcccgggggaaccaggctttcttagggacacatatcgaggagaggggcgacgcgggggcccaaaaaaaaggagaagagcggagacactgtggcgccaaaacgagagagtgatagaacacaaaggaggaatacagagggagaaaagagacaagagggcggcgggaaatatccacaccacaaaaaaaaaaaaaaaacagcccccgcgagggggagaaacaccaagagacagcatattagagaaagcaaagaaaccaacagagaggagagaaagatcagaggaggggcaatatcgaagggggagcagtacaaatctaaaacagagagacaccaaaaaggagaagaccgcgccaaaatacaaaaaaaaatataaagcgccccacccgagcggggagggggggaaaaaaaacaaaaaagaacaaaaaaaaagacaagagaaaaagcacagacacgacaagaacaacacgaagaaacaaaaaaaagaaacagaaacgaaaaaaagcaaaacaagaacaaagaagaacaatcaagaaggggacaaaaagacaagcagaaaacggaggaagacaaaagataggcaagaagaaggagaagaagagaagaaccaagcaaaagaaggggagaagcgcgaagaaaagagaaacgaaaaggagaggagaagagaaagagggaaagaagaacaaaaaagaatgaaaagagcggaagcaaaagcaaaagcgacagggagcagcaggaacggagacgcagaagaggaaaaggcagcggagagagaaagacgcgggaaagagaggaaaagaaaagagacggggggggggcagcagaggagacgaaacgaagaagacgagaaacggacacgaacaggagagaaacgaagagaagaaacgccaagaaagaggaaagaagaacgagcgagagggcagaaaaaacacaacaagacagaagaaaggtaagagaacaaaaacaaaaaagaacaaaacgaccaaggaaaagaggaaacaagagaagaagggatgaagagacaagacaagaagacgagacaggaaggaaacaacaaacagaagaagacaagagagacggacaggccaaagagaga

SEQ ID NO: 159390 - DNA, 4555 bp, Homo sapiens
ccggccccggccccggccccggccccgccccggcccggccgggcagctggtaggtgccgtgcgcaaccctccggaagctgccgcccctttccccttttatgggaatactttttttaaaaaaaaagagttcgctggcgccaccccgtaggactggccgccctaaaaccgtgataaaggagctgctcgccacttctcacttccgcttccttccagtaaggagtcggggtcttccccagttttctcagccaggcggcggcggcgactggcaatgtttggcctcaaaagaaacgcggtaatcggactcaacctctactgtgggggggccggcttgggggccggcagcggcggcgccacccgcccgggagggcgacttttggctacggagaaggaggcctcggcccggcgagagatagggggaggggaggccggcgcggtgattggcggaagcgccggcgcaagccccccgtccaccctcacgccagactcccggagggtcgcgcggccgccgcccattggcgccgaggtccccgacgtcaccgcgacccccgcgaggctgcttttcttcgcgcccacccgccgcgcggcgccgcttgaggagatggaagccccggccgctgacgccatcatgtcgcccgaagaggagctggacgggtacgagccggagcctctcgggaagcggccggctgtcctgccgctgctggagttggtcggggaatctggtaataacaccagtacggacgggtcactaccctcgacgccgccgccagcagaggaggaggaggacgagttgtaccggcagtcgctggagattatctctcggtaccttcgggagcaggccaccggcgccaaggacacaaagccaatgggcaggtctggggccaccagcaggaaggcgctggagaccttacgacgggttggggatggcgtgcagcgcaaccacgagacggccttccaaggcatgcttcggaaactggacatcaaaaacgaagacgatgtgaaatcgttgtctcgagtgatgatccatgttttcagcgacggcgtaacaaactggggcaggattgtgactctcatttcttttggtgcctttgtggctaaacacttgaagaccataaaccaagaaagctgcatcgaaccattagcagaaagtatcacagacgttctcgtaaggacaaaacgggactggctagttaaacaaagaggctgggatgggtttgtggagttcttccatgtagaggacctagaaggtggcatcaggaatgtgctgctggcttttgcaggtgttgctggagtaggagctggtttggcatatctaataagatagccttactgtaagtgcaatagttgacttttaaccaaccaccaccaccaccaaaaccagtttatgcagttggactccaagctgtaacttcctagagttgcaccctagcaacctagccagaaaagcaagtggcaagaggattatggctaacaagaataaatacatgggaagagtgctccccattgattgaagagtcactgtctgaaagaagcaaagttcagtttcagcaacaaacaaactttgtttgggaagctatggaggaggacttttagatttagtgaagatggtagggtggaaagacttaatttccttgttgagaacaggaaagtggccagtagccaggcaagtcatagaattgattacccgccgaattcattaatttactgtagtgttaagagaagcactaagaatgccagtgacctgtgtaaaagttacaagtaatagaactatgactgtaagcctcagtactgtacaagggaagcttttcctctctctaattagctttcccagtatacttcttagaaagtccaagtgttcaggacttttatacctgttatactttggcttggtttccatgattcttactttattagcctagtttatcaccaataatacttgacggaaggctcagtaattagttatgaatatggatatcctcaattcttaagacagcttgtaaatgtatttgtaaaaattgtatatatttttacagaaagtctatttctttgaaacgaaggaagtatcgaatttacattagtttttttcatacccttttgaactttgcaacttccgtaattaggaacctgtttcttacagcttttctatgctaaactttgttctgttcagttctagagtgtatacagaacgaattgatgtgtaactgtatgcagactggttgtagtggaacaaatctgataactatgcaggtttaaattttcttatctgattttggtaagtattccttagataggtttttctttgaaaacctgggattgagaggttgatgaatggaaattctttcacttcattatatgcaagttttcaataattaggtctaagtggagttttaaggttactgatgacttacaaataatgggctctgattgggcaatactcatttgagttccttccatttgacctaatttaactggtgaaatttaaagtgaattcatgggctcatctttaaagcttttactaaaagattttcagctgaatggaactcattagctgtgtgcatataaaaagatcacatcaggtggatggagagacatttgatcccttgtttgcttaataaattataaaatgatggcttggaaaagcaggctagtctaaccatggtgctattattaggcttgcttgttacacacacaggtctaagcctagtatgtcaataaagcaaatacttactgttttgtttctattaatgattcccaaaccttgttgcaagtttttgcattggcatctttggatttcagtcttgatgtttgttctatcagacttaaccttttatttcctgtccttccttgaaattgctgattgttctgctccctctacagatatttatatcaattcctacagctttcccctgccatccctgaactctttctagcccttttagattttggcactgtgaaacccctgctggaaacctgagtgaccctccctccccaccaagagtccacagacctttcatctttcacgaacttgatcctgttagcaggtggtaataccatgggtgctgtgacactaacagtcattgagaggtgggaggaagtcccttttccttggactggtatcttttcaactattgttttatcctgtctttgggggcaatgtgtcaaaagtcccctcaggaattttcagaggaaagaacattttatgaggctttctctaaagtttcctttgtataggagtatgctcacttaaatttacagaaagaggtgagctgtgttaaacctcagagtttaaaagctactgataaactgaagaaagtgtctatattggaactagggtcatttgaaagcttcagtctcggaacatgacctttagtctgtggactccatttaaaaataggtatgaataagatgactaagaatgtaatggggaagaactgccctgcctgcccatctcagagccataaggtcatctttgctagagctatttttacctatgtatttatcgttcttgatcataagccgcttatttatatcatgtatctctaaggacctaaaagcactttatgtagtttttaattaatcttaagatctggttacggtaactaaaaaagcctgtctgccaaatccagtggaaacaagtgcatagatgtgaattggtttttaggggccccacttcccaattcattaggtatgactgtggaaatacagacaaggatcttagttgatattttgggcttggggcagtgagggcttaggacaccccaagtggtttgggaaaggaggaggggagtggtgggtttatagggggaggaggaggcaggtggtctaagtgctgactggctacgtagttcgggcaaatcctccaaaagggaaagggaggatttgcttagaaggatggcgctcccagtgactactttttgacttctgtttgtcttacgcttctctcagggaaaaacatgcagtcctctagtgtttcatgtacattctgtggggggtgaacaccttggttctggttaaacagctgtacttttgatagctgtgccaggaagggttaggaccaactacaaattaatgttggttgtcaaatgtagtgtgtttccctaactttctgtttttcctgagaaaaaaaaataaatctttttcaaataaaaaaaaaaaaaaaaaaaaaaaaaaaaaaaaaaaaaaaaaaaaaaaaaaaaaaaaaaaaaaaaaaaaaaaaaaaaaaaaaaaaaaaaaaaaaaaaaaaccttgtggcccgcttggcccaagcgatttttaacttgggcaaggtttatcattgcgcccgaatttggggctaattggccaatttgcccttatggggggcggtttaccattcaatggcccgcgttttaaaaccgtcggacttggaaaaccctggggttcccaaattaatcggcttggaagaaaatccccttttcgcaagttggggaatttccaaaaggccccgacccgatcgccttttcaaaacagtggccaaccctaaagggcaaatggaaattggaggcgttaatttttggtaaaattccggtaaatttttggt

SEQ ID NO: 159391 - DNA, 4177 bp, Homo sapiens
ccggccccggccccggccccggccccgccccggcccggccgggcagctggtaggtgccgtgcgcaaccctccggaagctgccgcccctttccccttttatgggaatactttttttaaaaaaaaagagttcgctggcgccaccccgtaggactggccgccctaaaaccgtgataaaggagctgctcgccacttctcacttccgcttccttccagtaaggagtcggggtcttccccagttttctcagccaggcggcggcggcgactggcaatgtttggcctcaaaagaaacgcggtaatcggactcaacctctactgtgggggggccggcttgggggccggcagcggcggcgccacccgcccgggagggcgacttttggctacggagaaggaggcctcggcccggcgagagatagggggaggggaggccggcgcggtgattggcggaagcgccggcgcaagccccccgtccaccctcacgccagactcccggagggtcgcgcggccgccgcccattggcgccgaggtccccgacgtcaccgcgacccccgcgaggctgcttttcttcgcgcccacccgccgcgcggcgccgcttgaggagatggaagccccggccgctgacgccatcatgtcgcccgaagaggagctggacgggtacgagccggagcctctcgggaagcggccggctgtcctgccgctgctggagttggtcggggaatctggtaataacaccagtacggacgggtcactaccctcgacgccgccgccagcagaggaggaggaggacgagttgtaccggcagtcgctggagattatctctcggtaccttcgggagcaggccaccggcgccaaggacacaaagccaatgggcaggtctggggccaccagcaggaaggcgctggagaccttacgacgggttggggatggcgtgcagcgcaaccacgagacggccttccaaggcatgcttcggaaactggacatcaaaaacgaagacgatgtgaaatcgttgtctcgagtgatgatccatgttttcagcgacggcgtaacaaactggggcaggattgtgactctcatttcttttggtgcctttgtggctaaacacttgaagaccataaaccaagaaagctgcatcgaaccattagcagaaagtatcacagacgttctcgtaaggacaaaacgggactggctagttaaacaaagaggctgggatgggtttgtggagttcttccatgtagaggacctagaaggtggcatcaggaatgtgctgctggcttttgcaggtgttgctggagtaggagctggtttggcatatctaataagatagccttactgtaagtgcaatagttgacttttaaccaaccaccaccaccaccaaaaccagtttatgcagttggactccaagctgtaacttcctagagttgcaccctagcaacctagccagaaaagcaagtggcaagaggattatggctaacaagaataaatacatgggaagagtgctccccattgattgaagagtcactgtctgaaagaagcaaagttcagtttcagcaacaaacaaactttgtttgggaagctatggaggaggacttttagatttagtgaagatggtagggtggaaagacttaatttccttgttgagaacaggaaagtggccagtagccaggcaagtcatagaattgattacccgccgaattcattaatttactgtagtgttaagagaagcactaagaatgccagtgacctgtgtaaaagttacaagtaatagaactatgactgtaagcctcagtactgtacaagggaagcttttcctctctctaattagctttcccagtatacttcttagaaagtccaagtgttcaggacttttatacctgttatactttggcttggtttccatgattcttactttattagcctagtttatcaccaataatacttgacggaaggctcagtaattagttatgaatatggatatcctcaattcttaagacagcttgtaaatgtatttgtaaaaattgtatatatttttacagaaagtctatttctttgaaacgaaggaagtatcgaatttacattagtttttttcatacccttttgaactttgcaacttccgtaattaggaacctgtttcttacagcttttctatgctaaactttgttctgttcagttctagagtgtatacagaacgaattgatgtgtaactgtatgcagactggttgtagtggaacaaatctgataactatgcaggtttaaattttcttatctgattttggtaagtattccttagataggtttttctttgaaaacctgggattgagaggttgatgaatggaaattctttcacttcattatatgcaagttttcaataattaggtctaagtggagttttaaggttactgatgacttacaaataatgggctctgattgggcaatactcatttgagttccttccatttgacctaatttaactggtgaaatttaaagtgaattcatgggctcatctttaaagcttttactaaaagattttcagctgaatggaactcattagctgtgtgcatataaaaagatcacatcaggtggatggagagacatttgatcccttgtttgcttaataaattataaaatgatggcttggaaaagcaggctagtctaaccatggtgctattattaggcttgcttgttacacacacaggtctaagcctagtatgtcaataaagcaaatacttactgttttgtttctattaatgattcccaaaccttgttgcaagtttttgcattggcatctttggatttcagtcttgatgtttgttctatcagacttaaccttttatttcctgtccttccttgaaattgctgattgttctgctccctctacagatatttatatcaattcctacagctttcccctgccatccctgaactctttctagcccttttagattttggcactgtgaaacccctgctggaaacctgagtgaccctccctccccaccaagagtccacagacctttcatctttcacgaacttgatcctgttagcaggtggtaataccatgggtgctgtgacactaacagtcattgagaggtgggaggaagtcccttttccttggactggtatcttttcaactattgttttatcctgtctttgggggcaatgtgtcaaaagtcccctcaggaattttcagaggaaagaacattttatgaggctttctctaaagtttcctttgtataggagtatgctcacttaaatttacagaaagaggtgagctgtgttaaacctcagagtttaaaagctactgataaactgaagaaagtgtctatattggaactagggtcatttgaaagcttcagtctcggaacatgacctttagtctgtggactccatttaaaaataggtatgaataagatgactaagaatgtaatggggaagaactgccctgcctgcccatctcagagccataaggtcatctttgctagagctatttttacctatgtatttatcgttcttgatcataagccgcttatttatatcatgtatctctaaggacctaaaagcactttatgtagtttttaattaatcttaagatctggttacggtaactaaaaaagcctgtctgccaaatccagtggaaacaagtgcatagatgtgaattggtttttaggggccccacttcccaattcattaggtatgactgtggaaatacagacaaggatcttagttgatattttgggcttggggcagtgagggcttaggacaccccaagtggtttgggaaaggaggaggggagtggtgggtttatagggggaggaggaggcaggtggtctaagtgctgactggctacgtagttcgggcaaatcctccaaaagggaaagggaggatttgcttagaaggatggcgctcccagtgactactttttgacttctgtttgtcttacgcttctctcagggaaaaacatgcagtcctctagtgtttcatgtacattctgtggggggtgaacaccttggttctggttaaacagctgtacttttgatagctgtgccaggaagggttaggaccaactacaaattaatgttggttgtcaaatgtagtgtgtttccctaactttctgtttttcctgagaaaaaaaaataaatctttttcaaatagcctctttttccttccctctcttaggcaaaccttt

SEQ ID NO: 159392 - DNA, 2232 bp, Homo sapiens
gaagtcagaaggacatatctagaatagtgttattcgaagccacacagatcacccttcgtgtcttcaattctgaggagctgcttgtaaatgtatttgtaaaaattgtatatatttttacagaaagtctatttctttgaaacgaaggaagtatcgaatttacattagtttttttcatacccttttgaactttgcaacttccgtaattaggaacctgtttcttacagcttttctatgctaaactttgttctgttcagttctagagtgtatacagaacgaattgatgtgtaactgtatgcagactggttgtagtggaacaaatctgataactatgcaggtttaaattttcttatctgattttggtaagtattccttagataggtttttctttgaaaacctgggattgagaggttgatgaatggaaattctttcacttcattatatgcaagttttcaataattaggtctaagtggagttttaaggttactgatgacttacaaataatgggctctgattgggcaatactcatttgagttccttccatttgacctaatttaactggtgaaatttaaagtgaattcatgggctcatctttaaagcttttactaaaagattttcagctgaatggaactcattagctgtgtgcatataaaaagatcacatcaggtggatggagagacatttgatcccttgtttgcttaataaattataaaatgatggcttggaaaagcaggctagtctaaccatggtgctattattaggcttgcttgttacacacacaggtctaagcctagtatgtcaataaagcaaatacttactgttttgtttctattaatgattcccaaaccttgttgcaagtttttgcattggcatctttggatttcagtcttgatgtttgttctatcagacttaaccttttatttcctgtccttccttgaaattgctgattgttctgctccctctacagatatttatatcaattcctacagctttcccctgccatccctgaactctttctagcccttttagattttggcactgtgaaacccctgctggaaacctgagtgaccctccctccccaccaagagtccacagacctttcatctttcacgaacttgatcctgttagcaggtggtaataccatgggtgctgtgacactaacagtcattgagaggtgggaggaagtcccttttccttggactggtatcttttcaactattgttttatcctgtctttgggggcaatgtgtcaaaagtcccctcaggaattttcagaggaaagaacattttatgaggctttctctaaagtttcctttgtataggagtatgctcacttaaatttacagaaagaggtgagctgtgttaaacctcagagtttaaaagctactgataaactgaagaaagtgtctatattggaactagggtcatttgaaagcttcagtctcggaacatgacctttagtctgtggactccatttaaaaataggtatgaataagatgactaagaatgtaatggggaagaactgccctgcctgcccatctcagagccataaggtcatctttgctagagctatttttacctatgtatttatcgttcttgatcataagccgcttatttatatcatgtatctctaaggacctaaaagcactttatgtagtttttaattaatcttaagatctggttacggtaactaaaaaagcctgtctgccaaatccagtggaaacaagtgcatagatgtgaattggtttttaggggccccacttcccaattcattaggtatgactgtggaaatacagacaaggatcttagttgatattttgggcttggggcagtgagggcttaggacaccccaagtggtttgggaaaggaggaggggagtggtgggtttatagggggaggaggaggcaggtggtctaagtgctgactggctacgtagttcgggcaaatcctccaaaagggaaagggaggatttgcttagaaggatggcgctcccagtgactactttttgacttctgtttgtcttacgcttctctcagggaaaaacatgcagtcctctagtgtttcatgtacattctgtggggggtgaacaccttggttctggttaaacagctgtacttttgatagctgtgccaggaagggttaggaccaactacaaattaatgttggttgtcaaatgtagtgtgtttccctaactttctgtttttcctgagaaaaaaaaataaatctttttcaaata

SEQ ID NO: 159393 - DNA, 4099 bp, Homo sapiens
ccggccccggccccggccccggccccgccccggcccggccgggcagctggtaggtgccgtgcgcaaccctccggaagctgccgcccctttccccttttatgggaatactttttttaaaaaaaaagagttcgctggcgccaccccgtaggactggccgccctaaaaccgtgataaaggagctgctcgccacttctcacttccgcttccttccagtaaggagtcggggtcttccccagttttctcagccaggcggcggcggcgactggcaatgtttggcctcaaaagaaacgcggtaatcggactcaacctctactgtgggggggccggcttgggggccggcagcggcggcgccacccgcccgggagggcgacttttggctacggagaaggaggcctcggcccggcgagagatagggggaggggaggccggcgcggtgattggcggaagcgccggcgcaagccccccgtccaccctcacgccagactcccggagggtcgcgcggccgccgcccattggcgccgaggtccccgacgtcaccgcgacccccgcgaggctgcttttcttcgcgcccacccgccgcgcggcgccgcttgaggagatggaagccccggccgctgacgccatcatgtcgcccgaagaggagctggacgggtacgagccggagcctctcgggaagcggccggctgtcctgccgctgctggagttggtcggggaatctggtaataacaccagtacggacgggtcactaccctcgacgccgccgccagcagaggaggaggaggacgagttgtaccggcagtcgctggagattatctctcggtaccttcgggagcaggccaccggcgccaaggacacaaagccaatgggcaggtctggggccaccagcaggaaggcgctggagaccttacgacgggttggggatggcgtgcagcgcaaccacgagacggccttccaaggcatgcttcggaaactggacatcaaaaacgaagacgatgtgaaatcgttgtctcgagtgatgatccatgttttcagcgacggcgtaacaaactggggcaggattgtgactctcatttcttttggtgcctttgtggctaaacacttgaagaccataaaccaagaaagctgcatcgaaccattagcagaaagtatcacagacgttctcgtaaggacaaaacgggactggctagttaaacaaagaggctgggatgggtttgtggagttcttccatgtagaggacctagaaggtggcatcaggaatgtgctgctggcttttgcaggtgttgctggagtaggagctggtttggcatatctaataagatagccttactgtaagtgcaatagttgacttttaaccaaccaccaccaccaccaaaaccagtttatgcagttggactccaagctgtaacttcctagagttgcaccctagcaacctagccagaaaagcaagtggcaagaggattatggctaacaagaataaatacatgggaagagtgctccccattgattgaagagtcactgtctgaaagaagcaaagttcagtttcagcaacaaacaaactttgtttgggaagctatggaggaggacttttagatttagtgaagatggtagggtggaaagacttaatttccttgttgagaacaggaaagtggccagtagccaggcaagtcatagaattgattacccgccgaattcattaatttactgtagtgttaagagaagcactaagaatgccagtgacctgtgtaaaagttacaagtaatagaactatgactgtaagcctcagtactgtacaagggaagcttttcctctctctaattagctttcccagtatacttcttagaaagtccaagtgttcaggacttttatacctgttatactttggcttggtttccatgattcttactttattagcctagtttatcaccaataatacttgacggaaggctcagtaattagttatgaatatggatatcctcaattcttaagacagcttgtaaatgtatttgtaaaaattgtatatatttttacagaaagtctatttctttgaaacgaaggaagtatcgaatttacattagtttttttcatacccttttgaactttgcaacttccgtaattaggaacctgtttcttacagcttttctatgctaaactttgttctgttcagttctagagtgtatacagaacgaattgatgtgtaactgtatgcagactggttgtagtggaacaaatctgataactatgcaggtttaaattttcttatctgattttggtaagtattccttagataggtttttctttgaaaacctgggattgagaggttgatgaatggaaattctttcacttcattatatgcaagttttcaataattaggtctaagtggagttttaaggttactgatgacttacaaataatgggctctgattgggcaatactcatttgagttccttccatttgacctaatttaactggtgaaatttaaagtgaattcatgggctcatctttaaagcttttactaaaagattttcagctgaatggaactcattagctgtgtgcatataaaaagatcacatcaggtggatggagagacatttgatcccttgtttgcttaataaattataaaatgatggcttggaaaagcaggctagtctaaccatggtgctattattaggcttgcttgttacacacacaggtctaagcctagtatgtcaataaagcaaatacttactgttttgtttctattaatgattcccaaaccttgttgcaagtttttgcattggcatctttggatttcagtcttgatgtttgttctatcagacttaaccttttatttcctgtccttccttgaaattgctgattgttctgctccctctacagatatttatatcaattcctacagctttcccctgccatccctgaactctttctagcccttttagattttggcactgtgaaacccctgctggaaacctgagtgaccctccctccccaccaagagtccacagacctttcatctttcacgaacttgatcctgttagcaggtggtaataccatgggtgctgtgacactaacagtcattgagaggtgggaggaagtcccttttccttggactggtatcttttcaactattgttttatcctgtctttgggggcaatgtgtcaaaagtcccctcaggaattttcagaggaaagaacattttatgaggctttctctaaagtttcctttgtataggagtatgctcacttaaatttacagaaagaggtgagctgtgttaaacctcagagtttaaaagctactgataaactgaagaaagtgtctatattggaactagggtcatttgaaagcttcagtctcggaacatgacctttagtctgtggactccatttaaaaataggtatgaataagatgactaagaatgtaatggggaagaactgccctgcctgcccatctcagagccataaggtcatctttgctagagctatttttacctatgtatttatcgttcttgatcataagccgcttatttatatcatgtatctctaaggacctaaaagcactttatgtagtttttaattaatcttaagatctggttacggtaactaaaaaagcctgtctgccaaatccagtggaaacaagtgcatagatgtgaattggtttttaggggccccacttcccaattcattaggtatgactgtggaaatacagacaaggatcttagttgatattttgggcttggggcagtgagggcttaggacaccccaagtggtttgggaaaggaggaggggagtggtgggtttatagggggaggcaaatcctccaaaagggaaagggaggatttgcttagaaggatggcgctcccagtgactactttttgacttctgtttgtcttacgcttctctcagggaaaaacatgcagtcctctagtgtttcatgtacattctgtggggggtgaacaccttggttctggttaaacagctgtacttttgatagctgtgccaggaagggttaggaccaactacaaattaatgttggttgtcaaatgtagtgtgtttccctaactttctgtttttcctgagaaaaaaaaataaatctttttcaaata

SEQ ID NO: 159394 - DNA, 4092 bp, Homo sapiens
ccggccccggccccggccccggccccgccccggcccggccgggcagctggtaggtgccgtgcgcaaccctccggaagctgccgcccctttccccttttatgggaatactttttttaaaaaaaaagagttcgctggcgccaccccgtaggactggccgccctaaaaccgtgataaaggagctgctcgccacttctcacttccgcttccttccagtaaggagtcggggtcttccccagttttctcagccaggcggcggcggcgactggcaatgtttggcctcaaaagaaacgcggtaatcggactcaacctctactgtgggggggccggcttgggggccggcagcggcggcgccacccgcccgggagggcgacttttggctacggagaaggaggcctcggcccggcgagagatagggggaggggaggccggcgcggtgattggcggaagcgccggcgcaagccccccgtccaccctcacgccagactcccggagggtcgcgcggccgccgcccattggcgccgaggtccccgacgtcaccgcgacccccgcgaggctgcttttcttcgcgcccacccgccgcgcggcgccgcttgaggagatggaagccccggccgctgacgccatcatgtcgcccgaagaggagctggacgggtacgagccggagcctctcgggaagcggccggctgtcctgccgctgctggagttggtcggggaatctggtaataacaccagtacggacgggtcactaccctcgacgccgccgccagcagaggaggaggaggacgagttgtaccggcagtcgctggagattatctctcggtaccttcgggagcaggccaccggcgccaaggacacaaagccaatgggcaggtctggggccaccagcaggaaggcgctggagaccttacgacgggttggggatggcgtgcagcgcaaccacgagacggccttccaaggcatgcttcggaaactggacatcaaaaacgaagacgatgtgaaatcgttgtctcgagtgatgatccatgttttcagcgacggcgtaacaaactggggcaggattgtgactctcatttcttttggtgcctttgtggctaaacacttgaagaccataaaccaagaaagctgcatcgaaccattagcagaaagtatcacagacgttctcgtaaggacaaaacgggactggctagttaaacaaagaggctgggatgggtttgtggagttcttccatgtagaggacctagaaggtggcatcaggaatgtgctgctggcttttgcaggtgttgctggagtaggagctggtttggcatatctaataagatagccttactgtaagtgcaatagttgacttttaaccaaccaccaccaccaccaaaaccagtttatgcagttggactccaagctgtaacttcctagagttgcaccctagcaacctagccagaaaagcaagtggcaagaggattatggctaacaagaataaatacatgggaagagtgctccccattgattgaagagtcactgtctgaaagaagcaaagttcagtttcagcaacaaacaaactttgtttgggaagctatggaggaggacttttagatttagtgaagatggtagggtggaaagacttaatttccttgttgagaacaggaaagtggccagtagccaggcaagtcatagaattgattacccgccgaattcattaatttactgtagtgttaagagaagcactaagaatgccagtgacctgtgtaaaagttacaagtaatagaactatgactgtaagcctcagtactgtacaagggaagcttttcctctctctaattagctttcccagtatacttcttagaaagtccaagtgttcaggacttttatacctgttatactttggcttggtttccatgattcttactttattagcctagtttatcaccaataatacttgacggaaggctcagtaattagttatgaatatggatatcctcaattcttaagacagcttgtaaatgtatttgtaaaaattgtatatatttttacagaaagtctatttctttgaaacgaaggaagtatcgaatttacattagtttttttcatacccttttgaactttgcaacttccgtaattaggaacctgtttcttacagcttttctatgctaaactttgttctgttcagttctagagtgtatacagaacgaattgatgtgtaactgtatgcagactggttgtagtggaacaaatctgataactatgcaggtttaaattttcttatctgattttggtaagtattccttagataggtttttctttgaaaacctgggattgagaggttgatgaatggaaattctttcacttcattatatgcaagttttcaataattaggtctaagtggagttttaaggttactgatgacttacaaataatgggctctgattgggcaatactcatttgagttccttccatttgacctaatttaactggtgaaatttaaagtgaattcatgggctcatctttaaagcttttactaaaagattttcagctgaatggaactcattagctgtgtgcatataaaaagatcacatcaggtggatggagagacatttgatcccttgtttgcttaataaattataaaatgatggcttggaaaagcaggctagtctaaccatggtgctattattaggcttgcttgttacacacacaggtctaagcctagtatgtcaataaagcaaatacttactgttttgtttctattaatgattcccaaaccttgttgcaagtttttgcattggcatctttggatttcagtcttgatgtttgttctatcagacttaaccttttatttcctgtccttccttgaaattgctgattgttctgctccctctacagatatttatatcaattcctacagctttcccctgccatccctgaactctttctagcccttttagattttggcactgtgaaacccctgctggaaacctgagtgaccctccctccccaccaagagtccacagacctttcatctttcacgaacttgatcctgttagcaggtggtaataccatgggtgctgtgacactaacagtcattgagaggtgggaggaagtcccttttccttggactggtatcttttcaactattgttttatcctgtctttgggggcaatgtgtcaaaagtcccctcaggaattttcagaggaaagaacattttatgaggctttctctaaagtttcctttgtataggagtatgctcacttaaatttacagaaagaggtgagctgtgttaaacctcagagtttaaaagctactgataaactgaagaaagtgtctatattggaactagggtcatttgaaagcttcagtctcggaacatgacctttagtctgtggactccatttaaaaataggtatgaataagatgactaagaatgtaatggggaagaactgccctgcctgcccatctcagagccataaggtcatctttgctagagctatttttacctatgtatttatcgttcttgatcataagccgcttatttatatcatgtatctctaaggacctaaaagcactttatgtagtttttaattaatcttaagatctggttacggtaactaaaaaagcctgtctgccaaatccagtggaaacaagtgcatagatgtgaattggtttttaggggccccacttcccaattcattaggtatgcctttcttttggataaaagccgttttaactgaagtgggataatatctcattgtagttttgatttgcacttatttgatgatcagtgatgttgagcaccttttcctatgcctgtttgccatacttatgtcttctttggagaaatgtgtatacaagtattttgcccatttttaaattagattgttagatttttttcctgtagagtcgtttgagcaccttatatattctggttattaatcccttgtcacatggggagtttgcaaatattttctcccattctgtaggttgtcatttcattttgttgattgttcccttcactgtgcagaagcttttaaacttgatatgatcccatctgtccatttttgctctggtggactgtgcctgtggtttagtcggggatcctctatc

SEQ ID NO: 159395 - DNA, 4184 bp, Homo sapiens
ccggccccggccccggccccggccccgccccggcccggccgggcagctggtaggtgccgtgcgcaaccctccggaagctgccgcccctttccccttttatgggaatactttttttaaaaaaaaagagttcgctggcgccaccccgtaggactggccgccctaaaaccgtgataaaggagctgctcgccacttctcacttccgcttccttccagtaaggagtcggggtcttccccagttttctcagccaggcggcggcggcgactggcaatgtttggcctcaaaagaaacgcggtaatcggactcaacctctactgtgggggggccggcttgggggccggcagcggcggcgccacccgcccgggagggcgacttttggctacggagaaggaggcctcggcccggcgagagatagggggaggggaggccggcgcggtgattggcggaagcgccggcgcaagccccccgtccaccctcacgccagactcccggagggtcgcgcggccgccgcccattggcgccgaggtccccgacgtcaccgcgacccccgcgaggctgcttttcttcgcgcccacccgccgcgcggcgccgcttgaggagatggaagccccggccgctgacgccatcatgtcgcccgaagaggagctggacgggtacgagccggagcctctcgggaagcggccggctgtcctgccgctgctggagttggtcggggaatctggtaataacaccagtacggacgggtcactaccctcgacgccgccgccagcagaggaggaggaggacgagttgtaccggcagtcgctggagattatctctcggtaccttcgggagcaggccaccggcgccaaggacacaaagccaatgggcaggtctggggccaccagcaggaaggcgctggagaccttacgacgggttggggatggcgtgcagcgcaaccacgagacggccttccaaggcatgcttcggaaactggacatcaaaaacgaagacgatgtgaaatcgttgtctcgagtgatgatccatgttttcagcgacggcgtaacaaactggggcaggattgtgactctcatttcttttggtgcctttgtggctaaacacttgaagaccataaaccaagaaagctgcatcgaaccattagcagaaagtatcacagacgttctcgtaaggacaaaacgggactggctagttaaacaaagaggctgggatgggtttgtggagttcttccatgtagaggacctagaaggtggcatcaggaatgtgctgctggcttttgcaggtgttgctggagtaggagctggtttggcatatctaataagatagccttactgtaagtgcaatagttgacttttaaccaaccaccaccaccaccaaaaccagtttatgcagttggactccaagctgtaacttcctagagttgcaccctagcaacctagccagaaaagcaagtggcaagaggattatggctaacaagaataaatacatgggaagagtgctccccattgattgaagagtcactgtctgaaagaagcaaagttcagtttcagcaacaaacaaactttgtttgggaagctatggaggaggacttttagatttagtgaagatggtagggtggaaagacttaatttccttgttgagaacaggaaagtggccagtagccaggcaagtcatagaattgattacccgccgaattcattaatttactgtagtgttaagagaagcactaagaatgccagtgacctgtgtaaaagttacaagtaatagaactatgactgtaagcctcagtactgtacaagggaagcttttcctctctctaattagctttcccagtatacttcttagaaagtccaagtgttcaggacttttatacctgttatactttggcttggtttccatgattcttactttattagcctagtttatcaccaataatacttgacggaaggctcagtaattagttatgaatatggatatcctcaattcttaagacagcttgtaaatgtatttgtaaaaattgtatatatttttacagaaagtctatttctttgaaacgaaggaagtatcgaatttacattagtttttttcatacccttttgaactttgcaacttccgtaattaggaacctgtttcttacagcttttctatgctaaactttgttctgttcagttctagagtgtatacagaacgaattgatgtgtaactgtatgcagactggttgtagtggaacaaatctgataactatgcaggtttaaattttcttatctgattttggtaagtattccttagataggtttttctttgaaaacctgggattgagaggttgatgaatggaaattctttcacttcattatatgcaagttttcaataattaggtctaagtggagttttaaggttactgatgacttacaaataatgggctctgattgggcaatactcatttgagttccttccatttgacctaatttaactggtgaaatttaaagtgaattcatgggctcatctttaaagcttttactaaaagattttcagctgaatggaactcattagctgtgtgcatataaaaagatcacatcaggtggatggagagacatttgatcccttgtttgcttaataaattataaaatgatggcttggaaaagcaggctagtctaaccatggtgctattattaggcttgcttgttacacacacaggtctaagcctagtatgtcaataaagcaaatacttactgttttgtttctattaatgattcccaaaccttgttgcaagtttttgcattggcatctttggatttcagtcttgatgtttgttctatcagacttaaccttttatttcctgtccttccttgaaattgctgattgttctgctccctctacagatatttatatcaattcctacagctttcccctgccatccctgaactctttctagcccttttagattttggcactgtgaaacccctgctggaaacctgagtgaccctccctccccaccaagagtccacagacctttcatctttcacgaacttgatcctgttagcaggtggtaataccatgggtgctgtgacactaacagtcattgagaggtgggaggaagtcccttttccttggactggtatcttttcaactattgttttatcctgtctttgggggcaatgtgtcaaaagtcccctcaggaattttcagaggaaagaacattttatgaggctttctctaaagtttcctttgtataggagtatgctcacttaaatttacagaaagaggtgagctgtgttaaacctcagagtttaaaagctactgataaactgaagaaagtgtctatattggaactagggtcatttgaaagcttcagtctcggaacatgacctttagtctgtggactccatttaaaaataggtatgaataagatgactaagaatgtaatggggaagaactgccctgcctgcccatctcagagccataaggtcatctttgctagagctatttttacctatgtatttatcgttcttgatcataagccgcttatttatatcatgtatctctaaggacctaaaagcactttatgtagtttttaattaatcttaagatctggttacggtaactaattaggggccccacttcccaattcattaggtatgactgtggaaatacagacaaggatcttagttgatattttgggcttggggcagtgagggcttaggacaccccaagtggtttgggaaaggaggaggggagtggtgggtttatagggggaggttggtttatgtttggtttggtttttgttttttttggtggggttttgttttgttttttggtgtttttgtgttttgttgtttttgtgtgtgtttggtttttttttgatagtttgtgtggttggtgtttgtttatttttgtgtttataataatgttatatttgtataaggattttgtattgtgataaatttatgataatataatgtttttagataatttatatttaataggaatgtttgttattgtagtttttatttagtgtttttaaattttttttatatttgtagttttgtatggataaaggttatattatgatgatatgtatagtttaatggttggatttttatattaattttgatgattttatttatgtagtattttaaatttatttttatatatttttgtattattttttatgatattgtatatatattcc

SEQ ID NO: 159396 - DNA, 3376 bp, Homo sapiens
ccggccccggccccggccccggccccgccccggcccggccgggcagctggtaggtgccgtgcgcaaccctccggaagctgccgcccctttccccttttatgggaatactttttttaaaaaaaaagagttcgctggcgccaccccgtaggactggccgccctaaaaccgtgataaaggagctgctcgccacttctcacttccgcttccttccagtaaggagtcggggtcttccccagttttctcagccaggcggcggcggcgactggcaatgtttggcctcaaaagaaacgcggtaatcggactcaacctctactgtgggggggccggcttgggggccggcagcggcggcgccacccgcccgggagggcgacttttggctacggagaaggaggcctcggcccggcgagagatagggggaggggaggccggcgcggtgattggcggaagcgccggcgcaagccccccgtccaccctcacgccagactcccggagggtcgcgcggccgccgcccattggcgccgaggtccccgacgtcaccgcgacccccgcgaggctgcttttcttcgcgcccacccgccgcgcggcgccgcttgaggagatggaagccccggccgctgacgccatcatgtcgcccgaagaggagctggacgggtacgagccggagcctctcgggaagcggccggctgtcctgccgctgctggagttggtcggggaatctggtaataacaccagtacggacgggtcactaccctcgacgccgccgccagcagaggaggaggaggacgagttgtaccggcagtcgctggagattatctctcggtaccttcgggagcaggccaccggcgccaaggacacaaagccaatgggcaggtctggggccaccagcaggaaggcgctggagaccttacgacgggttggggatggcgtgcagcgcaaccacgagacggccttccaaggcatgcttcggaaactggacatcaaaaacgaagacgatgtgaaatcgttgtctcgagtgatgatccatgttttcagcgacggcgtaacaaactggggcaggattgtgactctcatttcttttggtgcctttgtggctaaacacttgaagaccataaaccaagaaagctgcatcgaaccattagcagaaagtatcacagacgttctcgtaaggacaaaacgggactggctagttaaacaaagaggctgggatgggtttgtggagttcttccatgtagaggacctagaaggtggcatcaggaatgtgctgctggcttttgcaggtgttgctggagtaggagctggtttggcatatctaataagatagccttactgtaagtgcaatagttgacttttaaccaaccaccaccaccaccaaaaccagtttatgcagttggactccaagctgtaacttcctagagttgcaccctagcaacctagccagaaaagcaagtggcaagaggattatggctaacaagaataaatacatgggaagagtgctccccattgattgaagagtcactgtctgaaagaagcaaagttcagtttcagcaacaaacaaactttgtttgggaagctatggaggaggacttttagatttagtgaagatggtagggtggaaagacttaatttccttgttgagaacaggaaagtggccagtagccaggcaagtcatagaattgattacccgccgaattcattaatttactgtagtgttaagagaagcactaagaatgccagtgacctgtgtaaaagttacaagtaatagaactatgactgtaagcctcagtactgtacaagggaagcttttcctctctctaattagctttcccagtatacttcttagaaagtccaagtgttcaggacttttatacctgttatactttggcttggtttccatgattcttactttattagcctagtttatcaccaataatacttgacggaaggctcagtaattagttatgaatatggatatcctcaattcttaagacagcttgtaaatgtatttgtaaaaattgtatatatttttacagaaagtctatttctttgaaacgaaggaagtatcgaatttacattagtttttttcatacccttttgaactttgcaacttccgtaattaggaacctgtttcttacagcttttctatgctaaactttgttctgttcagttctagagtgtatacagaacgaattgatgtgtaactgtatgcagactggttgtagtggaacaaatctgataactatgcaggtttaaattttcttatctgattttggtaagtattccttagataggtttttctttgaaaacctgggattgagaggttgatgaatggaaattctttcacttcattatatgcaagttttcaataattaggtctaagtggagttttaaggttactgatgacttacaaataatgggctctgattgggcaatactcatttgagttccttccatttgacctaatttaactggtgaaatttaaagtgaattcatgggctcatctttaaagcttttactaaaagattttcagctgaatggaactcattagctgtgtgcatataaaaagatcacatcaggtggatggagagacatttgatcccttgtttgcttaataaattataaaatgatggcttggaaaagcaggctagtctaaccatggtgctattattaggcttgcttgttacacacacaggtctaagcctagtatgtcaataaagcaaatacttactgttttgtttctattaatgattcccaaaccttgttgcaagtttttgcattggcatctttggatttcagtcttgatgtttgttctatcagacttaaccttttatttcctgtccttccttgaaattgctgattgttctgctccctctacagatatttatatcaattcctacagctttcccctgccatccctgaactctttctagcccttttagattttggcactgtgaaacccctgctggaaacctgagtgaccctccctccccaccaagagtccacagacctttcatctttcacgaacttgatcctgttagcaggaggaggcaggtggtctaagtgctgactggctacgtagttcgggcaaatcctccaaaagggaaagggaggatttgcttagaaggatggcgctcccagtgactactttttgacttctgtttgtcttacgcttctctcagggaaaaacatgcagtcctctagtgtttcatgtacattctgtggggggtgaacaccttggttctggttaaacagctgtacttttgatagctgtgccaggaagggttaggaccaactacaaattaatgttggttgtcaaatgtagtgtgtttccctaactttctgtttttcctgagaaaaaaaaataaatctttttcaaata

SEQ ID NO: 159397 - DNA, 1298 bp, Homo sapiens
gcgcggtaccccacaccacctgagtcacagatatttatatcaattcctacagctttcccctgccatccctgaactctttctagcccttttagattttggcactgtgaaacccctgctggaaacctgagtgaccctccctccccaccaagagtccacagacctttcatctttcacgaacttgatcctgttagcaggtggtaataccatgggtgctgtgacactaacagtcattgagaggtgggaggaagtcccttttccttggactggtatcttttcaactattgttttatcctgtctttgggggcaatgtgtcaaaagtcccctcaggaattttcagaggaaagaacattttatgaggctttctctaaagtttcctttgtataggagtatgctcacttaaatttacagaaagaggtgagctgtgttaaacctcagagtttaaaagctactgataaactgaagaaagtgtctatattggaactagggtcatttgaaagcttcagtctcggaacatgacctttagtctgtggactccatttaaaaataggtatgaataagatgactaagaatgtaatggggaagaactgccctgcctgcccatctcagagccataaggtcatctttgctagagctatttttacctatgtatttatcgttcttgatcataagccgcttatttatatcatgtatctctaaggacctaaaagcactttatgtagtttttaattaatcttaagatctggttacggtaactaaaaaagcctgtctgccaaatccagtggaaacaagtgcatagatgtgaattggtttttaggggccccacttcccaattcattaggtatgactgtggaaatacagacaaggatcttagttgatattttgggcttggggcagtgagggcttaggacaccccaagtggtttgggaaaggaggaggggagtggtgggtttatagggggaggaggaggcaggtggtctaagtgctgactggctacgtagttcgggcaaatcctccaaaagggaaagggaggatttgcttagaaggatggcgctcccagtgactactttttgacttctgtttgtcttacgcttctctcagggaaaaacatgcagtcctctagtgtttcatgtacattctgtggggggtgaacaccttggttctggttaaacagctgtacttttgatagctgtgccaggaagggttaggaccaactacaaattaatgttggttgtcaaatgtagtgtgtttccctaactttctgtttttcctgagaaaaaaaaataaatctttttcaaata

SEQ ID NO: 159398 - DNA, 1100 bp, Homo sapiens
ggctacccagaggtccctttctctgatcgccattgagaggtgggaggaagtcccttttccttggactggtatcttttcaactattgttttatcctgtctttgggggcaatgtgtcaaaagtcccctcaggaattttcagaggaaagaacattttatgaggctttctctaaagtttcctttgtataggagtatgctcacttaaatttacagaaagaggtgagctgtgttaaacctcagagtttaaaagctactgataaactgaagaaagtgtctatattggaactagggtcatttgaaagcttcagtctcggaacatgacctttagtctgtggactccatttaaaaataggtatgaataagatgactaagaatgtaatggggaagaactgccctgcctgcccatctcagagccataaggtcatctttgctagagctatttttacctatgtatttatcgttcttgatcataagccgcttatttatatcatgtatctctaaggacctaaaagcactttatgtagtttttaattaatcttaagatctggttacggtaactaaaaaagcctgtctgccaaatccagtggaaacaagtgcatagatgtgaattggtttttaggggccccacttcccaattcattaggtatgactgtggaaatacagacaaggatcttagttgatattttgggcttggggcagtgagggcttaggacaccccaagtggtttgggaaaggaggaggggagtggtgggtttatagggggaggaggaggcaggtggtctaagtgctgactggctacgtagttcgggcaaatcctccaaaagggaaagggaggatttgcttagaaggatggcgctcccagtgactactttttgacttctgtttgtcttacgcttctctcagggaaaaacatgcagtcctctagtgtttcatgtacattctgtggggggtgaacaccttggttctggttaaacagctgtacttttgatagctgtgccaggaagggttaggaccaactacaaattaatgttggttgtcaaatgtagtgtgtttccctaactttctgtttttcctgagaaaaaaaaataaatctttttcaaata

SEQ ID NO: 159399 - DNA, 1013 bp, Homo sapiens
ctgctgcggtcgactctgaggacccctgccagagaccctcaggaattttcagaggaaagaacattttatgaggctttctctaaagtttcctttgtataggagtatgctcacttaaatttacagaaagaggtgagctgtgttaaacctcagagtttaaaagctactgataaactgaagaaagtgtctatattggaactagggtcatttgaaagcttcagtctcggaacatgacctttagtctgtggactccatttaaaaataggtatgaataagatgactaagaatgtaatggggaagaactgccctgcctgcccatctcagagccataaggtcatctttgctagagctatttttacctatgtatttatcgttcttgatcataagccgcttatttatatcatgtatctctaaggacctaaaagcactttatgtagtttttaattaatcttaagatctggttacggtaactaaaaaagcctgtctgccaaatccagtggaaacaagtgcatagatgtgaattggtttttaggggccccacttcccaattcattaggtatgactgtggaaatacagacaaggatcttagttgatattttgggcttggggcagtgagggcttaggacaccccaagtggtttgggaaaggaggaggggagtggtgggtttatagggggaggaggaggcaggtggtctaagtgctgactggctacgtagttcgggcaaatcctccaaaagggaaagggaggatttgcttagaaggatggcgctcccagtgactactttttgacttctgtttgtcttacgcttctctcagggaaaaacatgcagtcctctagtgtttcatgtacattctgtggggggtgaacaccttggttctggttaaacagctgtacttttgatagctgtgccaggaagggttaggaccaactacaaattaatgttggttgtcaaatgtagtgtgtttccctaactttctgtttttcctgagaaaaaaaaataaatctttttcaaata

SEQ ID NO: 159400 - DNA, 2753 bp, Homo sapiens
ccggccccggccccggccccggccccgccccggcccggccgggcagctggtaggtgccgtgcgcaaccctccggaagctgccgcccctttccccttttatgggaatactttttttaaaaaaaaagagttcgctggcgccaccccgtaggactggccgccctaaaaccgtgataaaggagctgctcgccacttctcacttccgcttccttccagtaaggagtcggggtcttccccagttttctcagccaggcggcggcggcgactggcaatgtttggcctcaaaagaaacgcggtaatcggactcaacctctactgtgggggggccggcttgggggccggcagcggcggcgccacccgcccgggagggcgacttttggctacggagaaggaggcctcggcccggcgagagatagggggaggggaggccggcgcggtgattggcggaagcgccggcgcaagccccccgtccaccctcacgccagactcccggagggtcgcgcggccgccgcccattggcgccgaggtccccgacgtcaccgcgacccccgcgaggctgcttttcttcgcgcccacccgccgcgcggcgccgcttgaggagatggaagccccggccgctgacgccatcatgtcgcccgaagaggagctggacgggtacgagccggagcctctcgggaagcggccggctgtcctgccgctgctggagttggtcggggaatctggtaataacaccagtacggacgggtcactaccctcgacgccgccgccagcagaggaggaggaggacgagttgtaccggcagtcgctggagattatctctcggtaccttcgggagcaggccaccggcgccaaggacacaaagccaatgggcaggtctggggccaccagcaggaaggcgctggagaccttacgacgggttggggatggcgtgcagcgcaaccacgagacggccttccaaggcatgcttcggaaactggacatcaaaaacgaagacgatgtgaaatcgttgtctcgagtgatgatccatgttttcagcgacggcgtaacaaactggggcaggattgtgactctcatttcttttggtgcctttgtggctaaacacttgaagaccataaaccaagaaagctgcatcgaaccattagcagaaagtatcacagacgttctcgtaaggacaaaacgggactggctagttaaacaaagaggctgggatgggtttgtggagttcttccatgtagaggacctagaaggtggcatcaggaatgtgctgctggcttttgcaggtgttgctggagtaggagctggtttggcatatctaataagatagccttactgtaagtgcaatagttgacttttaaccaaccaccaccaccaccaaaaccagtttatgcagttggactccaagctgtaacttcctagagttgcaccctagcaacctagccagaaaagcaagtggcaagaggattatggctaacaagaataaatacatgggaagagtgctccccattgattgaagagtcactgtctgaaagaagcaaagttcagtttcagcaacaaacaaactttgtttgggaagctatggaggaggacttttagatttagtgaagatggtagggtggaaagacttaatttccttgttgagaacaggaaagtggccagtagccaggcaagtcatagaattgattacccgccgaattcattaatttactgtagtgttaagagaagcactaagaatgccagtgacctgtgtaaaagttacaagtaatagaactatgactgtaagcctcagtactgtacaagggaagcttttcctctctctaattagctttcccagtatacttcttagaaagtccaagtgttcaggacttttatacctgttatactttggcttggtttccatgattcttactttattagcctagtttatcaccaataatacttgacggaaggctcagtaattagttatgaatatggatatcctcaattcttaagacagcttgtaaatgtatttgtaaaaattgtatatatttttacagaaagtctatttctttgaaacgaaggaagtatcgaatttacattagtttttttcatacccttttgaactttgcaacttccgtaattaggaacctgtttcttacagcttttctatgctaaactttgttctgttcagttctagagtgtatacagaacgaattgatgtgtaactgtatgcagactggttgtagtggaacaaatctgataactatgcaggtttaaattttcttatctgattttggtaagtattccttagataggtttttctttgaaaacctgggattgagaggttgatgaatggaaattctttcacttcattatatgcaagttttcaataattaggtctaagtggagttttaaggttactgatgacttacaaataatgggctctgattgggcaatactcatttgagttccttccatttgacctaatttaactggtgaaatttaaagtgaattcatgggctcatctttaaagcttttactaaaagattttcagctgaatggaactcattagctgtgtgcatataaaaagatcacatcaggtggatggagagacatttgatcccttgtttgcttaataaattataaaatgatggcttggaaaagcaggctagtctaaccatggtgctattattaggcttgcttgttacacacacaggtctaagcctagtatgtcaataaagcaaatacttactgttttgtttctattaatgattcccaaa

SEQ ID NO: 159401 - DNA, 1014 bp, Homo sapiens
aggatttctgcagaaatcccccctttttgccaaaaaaccttaagaattttcaaaggaaagagggggcttttaagctttctctaaagtttcctttgtataggagtatgctcacttaaatttacagaaagaggtgagctgtgttaaacctcagagtttaaaagctactgataaactgaagaaagtgtctatattggaactagggtcatttgaaagcttcagtctcggaacatgacctttagtctgtggactccatttaaaaataggtatgaataagatgactaagaatgtaatggggaagaactgccctgcctgcccatctcagagccataaggtcatctttgctagagctatttttacctatgtatttatcgttcttgatcataagccgcttatttatatcatgtatctctaaggacctaaaagcactttatgtagtttttaattaatcttaagatctggttacggtaactaaaaaagcctgtctgccaaatccagtggaaacaagtgcatagatgtgaattggtttttaggggccccacttcccaattcattaggtatgactgtggaaatacagacaaggatcttagttgatattttgggcttggggcagtgagggcttaggacaccccaagtggtttgggaaaggaggaggggagtggtgggtttatagggggaggaggaggcaggtggtctaagtgctgactggctacgtagttcgggcaaatcctccaaaagggaaagggaggatttgcttagaaggatggcgctcccagtgactactttttgacttctgtttgtcttacgcttctctcagggaaaaacatgcagtcctctagtgtttcatgtacattctgtggggggtgaacaccttggttctggttaaacagctgtacttttgatagctgtgccaggaagggttaggaccaactacaaattaatgttggttgtcaaatgtagtgtgtttccctaactttctgtttttcctgagaaaaaaaaataaatctttttcaaata

SEQ ID NO: 159402 - DNA, 938 bp, Homo sapiens
ccgaggatccggagatgtcacgaggcgtatgctcacttaaatttacagaaagaggtgagctgtgttaaacctcagagtttaaaagctactgataaactgaagaaagtgtctatattggaactagggtcatttgaaagcttcagtctcggaacatgacctttagtctgtggactccatttaaaaataggtatgaataagatgactaagaatgtaatggggaagaactgccctgcctgcccatctcagagccataaggtcatctttgctagagctatttttacctatgtatttatcgttcttgatcataagccgcttatttatatcatgtatctctaaggacctaaaagcactttatgtagtttttaattaatcttaagatctggttacggtaactaaaaaagcctgtctgccaaatccagtggaaacaagtgcatagatgtgaattggtttttaggggccccacttcccaattcattaggtatgactgtggaaatacagacaaggatcttagttgatattttgggcttggggcagtgagggcttaggacaccccaagtggtttgggaaaggaggaggggagtggtgggtttatagggggaggaggaggcaggtggtctaagtgctgactggctacgtagttcgggcaaatcctccaaaagggaaagggaggatttgcttagaaggatggcgctcccagtgactactttttgacttctgtttgtcttacgcttctctcagggaaaaacatgcagtcctctagtgtttcatgtacattctgtggggggtgaacaccttggttctggttaaacagctgtacttttgatagctgtgccaggaagggttaggaccaactacaaattaatgttggttgtcaaatgtagtgtgtttccctaactttctgtttttcctgagaaaaaaaaataaatctttttcaaata

SEQ ID NO: 159403 - DNA, 2877 bp, Homo sapiens
ccggccccggccccggccccggccccgccccggcccggccgggcagctggtaggtgccgtgcgcaaccctccggaagctgccgcccctttccccttttatgggaatactttttttaaaaaaaaagagttcgctggcgccaccccgtaggactggccgccctaaaaccgtgataaaggagctgctcgccacttctcacttccgcttccttccagtaaggagtcggggtcttccccagttttctcagccaggcggcggcggcgactggcaatgtttggcctcaaaagaaacgcggtaatcggactcaacctctactgtgggggggccggcttgggggccggcagcggcggcgccacccgcccgggagggcgacttttggctacggagaaggaggcctcggcccggcgagagatagggggaggggaggccggcgcggtgattggcggaagcgccggcgcaagccccccgtccaccctcacgccagactcccggagggtcgcgcggccgccgcccattggcgccgaggtccccgacgtcaccgcgacccccgcgaggctgcttttcttcgcgcccacccgccgcgcggcgccgcttgaggagatggaagccccggccgctgacgccatcatgtcgcccgaagaggagctggacgggtacgagccggagcctctcgggaagcggccggctgtcctgccgctgctggagttggtcggggaatctggtaataacaccagtacggacgggtcactaccctcgacgccgccgccagcagaggaggaggaggacgagttgtaccggcagtcgctggagattatctctcggtaccttcgggagcaggccaccggcgccaaggacacaaagccaatgggcaggtctggggccaccagcaggaaggcgctggagaccttacgacgggttggggatggcgtgcagcgcaaccacgagacggccttccaaggcatgcttcggaaactggacatcaaaaacgaagacgatgtgaaatcgttgtctcgagtgatgatccatgttttcagcgacggcgtaacaaactggggcaggattgtgactctcatttcttttggtgcctttgtggctaaacacttgaagaccataaaccaagaaagctgcatcgaaccattagcagaaagtatcacagacgttctcgtaaggacaaaacgggactggctagttaaacaaagaggctgggatgggtttgtggagttcttccatgtagaggacctagaaggtggcatcaggaatgtgctgctggcttttgcaggtgttgctggagtaggagctggtttggcatatctaataagatagccttactgtaagtgcaatagttgacttttaaccaaccaccaccaccaccaaaaccagtttatgcagttggactccaagctgtaacttcctagagttgcaccctagcaacctagccagaaaagcaagtggcaagaggattatggctaacaagaataaatacatgggaagagtgctccccattgattgaagagtcactgtctgaaagaagcaaagttcagtttcagcaacaaacaaactttgtttgggaagctatggaggaggacttttagatttagtgaagatggtagggtggaaagacttaatttccttgttgagaacaggaaagtggccagtagccaggcaagtcatagaattgattacccgccgaattcattaatttactgtagtgttaagagaagcactaagaatgccagtgacctgtgtaaaagttacaagtaatagaactatgactgtaagcctcagtactgtacaagggaagcttttcctctctctaattagctttcccagtatacttcttagaaagtccaagtgttcaggacttttatacctgttatactttggcttggtttccatgattcttactttattagcctagtttatcaccaataatacttgacggaaggctcagtaattagttatgaatatggatatcctcaattcttaagacagcttgtaaatgtatttgtaaaaattgtatatatttttacagaaagtctatttctttgaaacgaaggaagtatcgaatttacattagtttttttcatacccttttgaactttgcaacttccgtaattaggaacctgtttcttacagcttttctatgctaaactttgttctgttcagttctagagtgtatacagaacgaattgatgtgtaactgtatgcagactggttgtagtggaacaaatctgataactatgcaggtttaaattttcttatctgattttggtaagtattccttagataggtttttctttgaaaacctgggattgagaggttgatgaatggaaattctttcacttcattatatgcaagttttcaataattaggtctaagtggagttttaaggttactgatgacttacaaataatgggctctgattgggcaatactcatttgagttccttccatttgacctaatttaactggtgaaatttaaagtgaattcatgggctcatctttaaagcttttactaaaagattttcagctgaatggaactcattagctgtgtgcatataaaaagatcacatcaggtggatggagagacatttgatcccttgtttgcttaataaattataaaatgatggcttggaaaagcaggctagtctaaccatggtgctattattaggcttgcttgttacacacacaggtctaagcctagtatgtcaataaagcaaatacttactgttttgtttctattaatgattcccaaaccttgttgcaagtttttgcattggcatctttggatttcagtcttgatgtttgttctatcagacttaaccttttatttcctgtcctcactacatgccatggggatccatctagagtctacaccag

SEQ ID NO: 159404 - DNA, 378 bp, Homo sapiens
gcggccgcttactactactaaattcgcggccgcgtcgaccgaggaggcaggtggtctaagtgctgactggctacgtagttcgggcaaatcctccaaaagggaaagggaggatttgcttagaaggatggcgctcccagtgactactttttgacttctgtttgtcttacgcttctctcagggaaaaacatgcagtcctctagtgtttcatgtacattctgtggggggtgaacaccttggttctggttaaacagctgtacttttgatagctgtgccaggaagggttaggaccaactacaaattaatgttggttgtcaaatgtagtgtgtttccctaactttctgtttttcctgagaaaaaaaaataaatctttttcaaata

SEQ ID NO: 159405 - DNA, 642 bp, Homo sapiens
ccggccccggccccggccccggccccgccccggcccggccgggcagctggtaggtgccgtgcgcaaccctccggaagctgccgcccctttccccttttatgggaatactttttttaaaaaaaaagagttcgctggcgccaccccgtaggactggccgccctaaaaccgtgataaaggagctgctcgccacttctcacttccgcttccttccagtaaggagtcggggtcttccccagttttctcagccaggcggcggcggcgactggcaatgtttggcctcaaaagaaacgcggtaatcggactcaacctctactgtgggggggccggcttgggggccggcagcggcggcgccacccgcccgggagggcgacttttggctacggagaaggaggcctcggcccggcgagagatagggggaggggaggccggcgcggtgattggcggaagcgccggcgcaagccccccgtccaccctcacgccagactcccggagggtcgcgcggccgccgcccattggcgccgaggtccccgacgtcaccgcgacccccgcgaggctgcttttcttcgcgcccacccgccgcgcggcgccgcttgaggagatggaagccccggccgcttcccgagaggctccggctcgtacccg

SEQ ID NO: 159406 - DNA, 1428 bp, Homo sapiens
gcacgaggtgctctagtgtttttccctgagagaagcgtaagacaaacagaagtcaaaaagtagtcactgggaaaaacatgcagtcctctagtgtttcatgtacattctgtggggggtgaacaccttggttctggttaaacagctgtacttttgatagctgtgccaggaagggttaggaccaactacaaattaatgttggttgtcaaatgtagtgtgtttccctaactttctgtttttcctgagaaaaaaaaataaatctttttcaaataccgaaaaaaacacaaacaaaaaacaacaacaaaaacacaacactgtggggggcgaggcgcgcgcggcgcgcccgggggaaccaggctttcttagggacacatatcgaggagaggggcgacgcgggggcccaaaaaaaaggagaagagcggagacactgtggcgccaaaacgagagagtgatagaacacaaaggaggaatacagagggagaaaagagacaagagggcggcgggaaatatccacaccacaaaaaaaaaaaaaaaacagcccccgcgagggggagaaacaccaagagacagcatattagagaaagcaaagaaaccaacagagaggagagaaagatcagaggaggggcaatatcgaagggggagcagtacaaatctaaaacagagagacaccaaaaaggagaagaccgcgccaaaatacaaaaaaaaatataaagcgccccacccgagcggggagggggggaaaaaaaacaaaaaagaacaaaaaaaaagacaagagaaaaagcacagacacgacaagaacaacacgaagaaacaaaaaaaagaaacagaaacgaaaaaaagcaaaacaagaacaaagaagaacaatcaagaaggggacaaaaagacaagcagaaaacggaggaagacaaaagataggcaagaagaaggagaagaagagaagaaccaagcaaaagaaggggagaagcgcgaagaaaagagaaacgaaaaggagaggagaagagaaagagggaaagaagaacaaaaaagaatgaaaagagcggaagcaaaagcaaaagcgacagggagcagcaggaacggagacgcagaagaggaaaaggcagcggagagagaaagacgcgggaaagagaggaaaagaaaagagacggggggggggcagcagaggagacgaaacgaagaagacgagaaacggacacgaacaggagagaaacgaagagaagaaacgccaagaaagaggaaagaagaacgagcgagagggcagaaaaaacacaacaagacagaagaaaggtaagagaacaaaaacaaaaaagaacaaaacgaccaaggaaaagaggaaacaagagaagaagggatgaagagacaagacaagaagacgagacaggaaggaaacaacaaacagaagaagacaagagagacggacaggccaaagagaga

SEQ ID NO: 159407 - DNA, 4089 bp, Homo sapiens
ccggccccggccccggccccggccccgccccggcccggccgggcagctggtaggtgccgtgcgcaaccctccggaagctgccgcccctttccccttttatgggaatactttttttaaaaaaaaagagttcgctggcgccaccccgtaggactggccgccctaaaaccgtgataaaggagctgctcgccacttctcacttccgcttccttccagtaaggagtcggggtcttccccagttttctcagccaggcggcggcggcgactggcaatgtttggcctcaaaagaaacgcggtaatcggactcaacctctactgtgggggggccggcttgggggccggcagcggcggcgccacccgcccgggagggcgacttttggctacggagaaggaggcctcggcccggcgagagatagggggaggggaggccggcgcggtgattggcggaagcgccggcgcaagccccccgtccaccctcacgccagactcccggagggtcgcgcggccgccgcccattggcgccgaggtccccgacgtcaccgcgacccccgcgaggctgcttttcttcgcgcccacccgccgcgcggcgccgcttgaggagatggaagccccggccgctgacgccatcatgtcgcccgaagaggagctggacgggtacgagccggagcctctcgggaagcggccggctgtcctgccgctgctggagttggtcggggaatctggtaataacaccagtacggacgggtcactaccctcgacgccgccgccagcagaggaggaggaggacgagttgtaccggcagtcgctggagattatctctcggtaccttcgggagcaggccaccggcgccaaggacacaaagccaatgggcaggtctggggccaccagcaggaaggcgctggagaccttacgacgggttggggatggcgtgcagcgcaaccacgagacggccttccaaggcatgcttcggaaactggacatcaaaaacgaagacgatgtgaaatcgttgtctcgagtgatgatccatgttttcagcgacggcgtaacaaactggggcaggattgtgactctcatttcttttggtgcctttgtggctaaacacttgaagaccataaaccaagaaagctgcatcgaaccattagcagaaagtatcacagacgttctcgtaaggacaaaacgggactggctagttaaacaaagaggctgggatgggtttgtggagttcttccatgtagaggacctagaaggtggcatcaggaatgtgctgctggcttttgcaggtgttgctggagtaggagctggtttggcatatctaataagatagccttactgtaagtgcaatagttgacttttaaccaaccaccaccaccaccaaaaccagtttatgcagttggactccaagctgtaacttcctagagttgcaccctagcaacctagccagtgctccccattgattgaagagtcactgtctgaaagaagcaaagttcagtttcagcaacaaacaaactttgtttgggaagctatggaggaggacttttagatttagtgaagatggtagggtggaaagacttaatttccttgttgagaacaggaaagtggccagtagccaggcaagtcatagaattgattacccgccgaattcattaatttactgtagtgttaagagaagcactaagaatgccagtgacctgtgtaaaagttacaagtaatagaactatgactgtaagcctcagtactgtacaagggaagcttttcctctctctaattagctttcccagtatacttcttagaaagtccaagtgttcaggacttttatacctgttatactttggcttggtttccatgattcttactttattagcctagtttatcaccaataatacttgacggaaggctcagtaattagttatgaatatggatatcctcaattcttaagacagcttgtaaatgtatttgtaaaaattgtatatatttttacagaaagtctatttctttgaaacgaaggaagtatcgaatttacattagtttttttcatacccttttgaactttgcaacttccgtaattaggaacctgtttcttacagcttttctatgctaaactttgttctgttcagttctagagtgtatacagaacgaattgatgtgtaactgtatgcagactggttgtagtggaacaaatctgataactatgcaggtttaaattttcttatctgattttggtaagtattccttagataggtttttctttgaaaacctgggattgagaggttgatgaatggaaattctttcacttcattatatgcaagttttcaataattaggtctaagtggagttttaaggttactgatgacttacaaataatgggctctgattgggcaatactcatttgagttccttccatttgacctaatttaactggtgaaatttaaagtgaattcatgggctcatctttaaagcttttactaaaagattttcagctgaatggaactcattagctgtgtgcatataaaaagatcacatcaggtggatggagagacatttgatcccttgtttgcttaataaattataaaatgatggcttggaaaagcaggctagtctaaccatggtgctattattaggcttgcttgttacacacacaggtctaagcctagtatgtcaataaagcaaatacttactgttttgtttctattaatgattcccaaaccttgttgcaagtttttgcattggcatctttggatttcagtcttgatgtttgttctatcagacttaaccttttatttcctgtccttccttgaaattgctgattgttctgctccctctacagatatttatatcaattcctacagctttcccctgccatccctgaactctttctagcccttttagattttggcactgtgaaacccctgctggaaacctgagtgaccctccctccccaccaagagtccacagacctttcatctttcacgaacttgatcctgttagcaggtggtaataccatgggtgctgtgacactaacagtcattgagaggtgggaggaagtcccttttccttggactggtatcttttcaactattgttttatcctgtctttgggggcaatgtgtcaaaagtcccctcaggaattttcagaggaaagaacattttatgaggctttctctaaagtttcctttgtataggagtatgctcacttaaatttacagaaagaggtgagctgtgttaaacctcagagtttaaaagctactgataaactgaagaaagtgtctatattggaactagggtcatttgaaagcttcagtctcggaacatgacctttagtctgtggactccatttaaaaataggtatgaataagatgactaagaatgtaatggggaagaactgccctgcctgcccatctcagagccataaggtcatctttgctagagctatttttacctatgtatttatcgttcttgatcataagccgcttatttatatcatgtatctctaaggacctaaaagcactttatgtagtttttaattaatcttaagatctggttacggtaactaaaaaagcctgtctgccaaatccagtggaaacaagtgcatagatgtgaattggtttttaggggccccacttcccaattcattaggtatgactgtggaaatacagacaaggatcttagttgatattttgggcttggggcagtgagggcttaggacaccccaagtggtttgggaaaggaggaggggagtggtgggtttatagggggaggaggaggcaggtggtctaagtgctgactggctacgtagttcgggcaaatcctccaaaagggaaagggaggatttgcttagaaggatggcgctcccagtgactactttttgacttctgtttgtcttacgcttctctcagggaaaaacatgcagtcctctagtgtttcatgtacattctgtggggggtgaacaccttggttctggttaaacagctgtacttttgatagctgtgccaggaagggttaggaccaactacaaattaatgttggttgtcaaatgtagtgtgtttccctaactttctgtttttcctgagaaaaaaaaataaatctttttcaaata

SEQ ID NO: 159408 - DNA, 4493 bp, Homo sapiens
ccggccccggccccggccccggccccgccccggcccggccgggcagctggtaggtgccgtgcgcaaccctccggaagctgccgcccctttccccttttatgggaatactttttttaaaaaaaaagagttcgctggcgccaccccgtaggactggccgccctaaaaccgtgataaaggagctgctcgccacttctcacttccgcttccttccagtaaggagtcggggtcttccccagttttctcagccaggcggcggcggcgactggcaatgtttggcctcaaaagaaacgcggtaatcggactcaacctctactgtgggggggccggcttgggggccggcagcggcggcgccacccgcccgggagggcgacttttggctacggagaaggaggcctcggcccggcgagagatagggggaggggaggccggcgcggtgattggcggaagcgccggcgcaagccccccgtccaccctcacgccagactcccggagggtcgcgcggccgccgcccattggcgccgaggtccccgacgtcaccgcgacccccgcgaggctgcttttcttcgcgcccacccgccgcgcggcgccgcttgaggagatggaagccccggccgctgacgccatcatgtcgcccgaagaggagctggacgggtacgagccggagcctctcgggaagcggccggctgtcctgccgctgctggagttggtcggggaatctggtaataacaccagtacggacgggtcactaccctcgacgccgccgccagcagaggaggaggaggacgagttgtaccggcagtcgctggagattatctctcggtaccttcgggagcaggccaccggcgccaaggacacaaagccaatgggcaggtctggggccaccagcaggaaggcgctggagaccttacgacgggttggggatggcgtgcagcgcaaccacgagacggccttccaaggtaagggggttcattaatcgccaaggcctcactcccttttttccatctctccccggactcacccgccaagggtgggttggaaaccgaaacgagtcagtgttgaaacgtgtctcatcctattcctgaagccagaatattctggccatgagtcattgtttccgcccatcttgattcttttggaaatggcagctcttgttcaaagaccggaaagggtgggatgtcaatttcaagtggggtcaacctgagttctgtaaatcccagtagcgattttcccgccgcgggtgggcaggcgaatcttgcgccggtttagacaaaggaggccgtgaggacctgcatgcttttctttctcaggcatgcttcggaaactggacatcaaaaacgaagacgatgtgaaatcgttgtctcgagtgatgatccatgttttcagcgacggcgtaacaaactggggcaggattgtgactctcatttcttttggtgcctttgtggctaaacacttgaagaccataaaccaagaaagctgcatcgaaccattagcagaaagtatcacagacgttctcgtaaggacaaaacgggactggctagttaaacaaagaggctgggatgggtttgtggagttcttccatgtagaggacctagaaggtggcatcaggaatgtgctgctggcttttgcaggtgttgctggagtaggagctggtttggcatatctaataagatagccttactgtaagtgcaatagttgacttttaaccaaccaccaccaccaccaaaaccagtttatgcagttggactccaagctgtaacttcctagagttgcaccctagcaacctagccagaaaagcaagtggcaagaggattatggctaacaagaataaatacatgggaagagtgctccccattgattgaagagtcactgtctgaaagaagcaaagttcagtttcagcaacaaacaaactttgtttgggaagctatggaggaggacttttagatttagtgaagatggtagggtggaaagacttaatttccttgttgagaacaggaaagtggccagtagccaggcaagtcatagaattgattacccgccgaattcattaatttactgtagtgttaagagaagcactaagaatgccagtgacctgtgtaaaagttacaagtaatagaactatgactgtaagcctcagtactgtacaagggaagcttttcctctctctaattagctttcccagtatacttcttagaaagtccaagtgttcaggacttttatacctgttatactttggcttggtttccatgattcttactttattagcctagtttatcaccaataatacttgacggaaggctcagtaattagttatgaatatggatatcctcaattcttaagacagcttgtaaatgtatttgtaaaaattgtatatatttttacagaaagtctatttctttgaaacgaaggaagtatcgaatttacattagtttttttcatacccttttgaactttgcaacttccgtaattaggaacctgtttcttacagcttttctatgctaaactttgttctgttcagttctagagtgtatacagaacgaattgatgtgtaactgtatgcagactggttgtagtggaacaaatctgataactatgcaggtttaaattttcttatctgattttggtaagtattccttagataggtttttctttgaaaacctgggattgagaggttgatgaatggaaattctttcacttcattatatgcaagttttcaataattaggtctaagtggagttttaaggttactgatgacttacaaataatgggctctgattgggcaatactcatttgagttccttccatttgacctaatttaactggtgaaatttaaagtgaattcatgggctcatctttaaagcttttactaaaagattttcagctgaatggaactcattagctgtgtgcatataaaaagatcacatcaggtggatggagagacatttgatcccttgtttgcttaataaattataaaatgatggcttggaaaagcaggctagtctaaccatggtgctattattaggcttgcttgttacacacacaggtctaagcctagtatgtcaataaagcaaatacttactgttttgtttctattaatgattcccaaaccttgttgcaagtttttgcattggcatctttggatttcagtcttgatgtttgttctatcagacttaaccttttatttcctgtccttccttgaaattgctgattgttctgctccctctacagatatttatatcaattcctacagctttcccctgccatccctgaactctttctagcccttttagattttggcactgtgaaacccctgctggaaacctgagtgaccctccctccccaccaagagtccacagacctttcatctttcacgaacttgatcctgttagcaggtggtaataccatgggtgctgtgacactaacagtcattgagaggtgggaggaagtcccttttccttggactggtatcttttcaactattgttttatcctgtctttgggggcaatgtgtcaaaagtcccctcaggaattttcagaggaaagaacattttatgaggctttctctaaagtttcctttgtataggagtatgctcacttaaatttacagaaagaggtgagctgtgttaaacctcagagtttaaaagctactgataaactgaagaaagtgtctatattggaactagggtcatttgaaagcttcagtctcggaacatgacctttagtctgtggactccatttaaaaataggtatgaataagatgactaagaatgtaatggggaagaactgccctgcctgcccatctcagagccataaggtcatctttgctagagctatttttacctatgtatttatcgttcttgatcataagccgcttatttatatcatgtatctctaaggacctaaaagcactttatgtagtttttaattaatcttaagatctggttacggtaactaaaaaagcctgtctgccaaatccagtggaaacaagtgcatagatgtgaattggtttttaggggccccacttcccaattcattaggtatgactgtggaaatacagacaaggatcttagttgatattttgggcttggggcagtgagggcttaggacaccccaagtggtttgggaaaggaggaggggagtggtgggtttatagggggaggaggaggcaggtggtctaagtgctgactggctacgtagttcgggcaaatcctccaaaagggaaagggaggatttgcttagaaggatggcgctcccagtgactactttttgacttctgtttgtcttacgcttctctcagggaaaaacatgcagtcctctagtgtttcatgtacattctgtggggggtgaacaccttggttctggttaaacagctgtacttttgatagctgtgccaggaagggttaggaccaactacaaattaatgttggttgtcaaatgtagtgtgtttccctaactttctgtttttcctgagaaaaaaaaataaatctttttcaaata

SEQ ID NO: 159409 - DNA, 3220 bp, Homo sapiens
tgagagtgactctacaggacctaacgtcattcttgcatgcttcggaaactggacatcaaaaacgaagacgatgtgaaatcgttgtctcgagtgatgatccatgttttcagcgacggcgtaacaaactggggcaggattgtgactctcatttcttttggtgcctttgtggctaaacacttgaagaccataaaccaagaaagctgcatcgaaccattagcagaaagtatcacagacgttctcgtaaggacaaaacgggactggctagttaaacaaagaggctgggatgggtttgtggagttcttccatgtagaggacctagaaggtggcatcaggaatgtgctgctggcttttgcaggtgttgctggagtaggagctggtttggcatatctaataagatagccttactgtaagtgcaatagttgacttttaaccaaccaccaccaccaccaaaaccagtttatgcagttggactccaagctgtaacttcctagagttgcaccctagcaacctagccagaaaagcaagtggcaagaggattatggctaacaagaataaatacatgggaagagtgctccccattgattgaagagtcactgtctgaaagaagcaaagttcagtttcagcaacaaacaaactttgtttgggaagctatggaggaggacttttagatttagtgaagatggtagggtggaaagacttaatttccttgttgagaacaggaaagtggccagtagccaggcaagtcatagaattgattacccgccgaattcattaatttactgtagtgttaagagaagcactaagaatgccagtgacctgtgtaaaagttacaagtaatagaactatgactgtaagcctcagtactgtacaagggaagcttttcctctctctaattagctttcccagtatacttcttagaaagtccaagtgttcaggacttttatacctgttatactttggcttggtttccatgattcttactttattagcctagtttatcaccaataatacttgacggaaggctcagtaattagttatgaatatggatatcctcaattcttaagacagcttgtaaatgtatttgtaaaaattgtatatatttttacagaaagtctatttctttgaaacgaaggaagtatcgaatttacattagtttttttcatacccttttgaactttgcaacttccgtaattaggaacctgtttcttacagcttttctatgctaaactttgttctgttcagttctagagtgtatacagaacgaattgatgtgtaactgtatgcagactggttgtagtggaacaaatctgataactatgcaggtttaaattttcttatctgattttggtaagtattccttagataggtttttctttgaaaacctgggattgagaggttgatgaatggaaattctttcacttcattatatgcaagttttcaataattaggtctaagtggagttttaaggttactgatgacttacaaataatgggctctgattgggcaatactcatttgagttccttccatttgacctaatttaactggtgaaatttaaagtgaattcatgggctcatctttaaagcttttactaaaagattttcagctgaatggaactcattagctgtgtgcatataaaaagatcacatcaggtggatggagagacatttgatcccttgtttgcttaataaattataaaatgatggcttggaaaagcaggctagtctaaccatggtgctattattaggcttgcttgttacacacacaggtctaagcctagtatgtcaataaagcaaatacttactgttttgtttctattaatgattcccaaaccttgttgcaagtttttgcattggcatctttggatttcagtcttgatgtttgttctatcagacttaaccttttatttcctgtccttccttgaaattgctgattgttctgctccctctacagatatttatatcaattcctacagctttcccctgccatccctgaactctttctagcccttttagattttggcactgtgaaacccctgctggaaacctgagtgaccctccctccccaccaagagtccacagacctttcatctttcacgaacttgatcctgttagcaggtggtaataccatgggtgctgtgacactaacagtcattgagaggtgggaggaagtcccttttccttggactggtatcttttcaactattgttttatcctgtctttgggggcaatgtgtcaaaagtcccctcaggaattttcagaggaaagaacattttatgaggctttctctaaagtttcctttgtataggagtatgctcacttaaatttacagaaagaggtgagctgtgttaaacctcagagtttaaaagctactgataaactgaagaaagtgtctatattggaactagggtcatttgaaagcttcagtctcggaacatgacctttagtctgtggactccatttaaaaataggtatgaataagatgactaagaatgtaatggggaagaactgccctgcctgcccatctcagagccataaggtcatctttgctagagctatttttacctatgtatttatcgttcttgatcataagccgcttatttatatcatgtatctctaaggacctaaaagcactttatgtagtttttaattaatcttaagatctggttacggtaactaaaaaagcctgtctgccaaatccagtggaaacaagtgcatagatgtgaattggtttttaggggccccacttcccaattcattaggtatgactgtggaaatacagacaaggatcttagttgatattttgggcttggggcagtgagggcttaggacaccccaagtggtttgggaaaggaggaggggagtggtgggtttatagggggaggaggaggcaggtggtctaagtgctgactggctacgtagttcgggcaaatcctccaaaagggaaagggaggatttgcttagaaggatggcgctcccagtgactactttttgacttctgtttgtcttacgcttctctcagggaaaaacatgcagtcctctagtgtttcatgtacattctgtggggggtgaacaccttggttctggttaaacagctgtacttttgatagctgtgccaggaagggttaggaccaactacaaattaatgttggttgtcaaatgtagtgtgtttccctaactttctgtttttcctgagaaaaaaaaataaatctttttcaaata

SEQ ID NO: 159410 - DNA, 4177 bp, Homo sapiens
ccggccccggccccggccccggccccgccccggcccggccgggcagctggtaggtgccgtgcgcaaccctccggaagctgccgcccctttccccttttatgggaatactttttttaaaaaaaaagagttcgctggcgccaccccgtaggactggccgccctaaaaccgtgataaaggagctgctcgccacttctcacttccgcttccttccagtaaggagtcggggtcttccccagttttctcagccaggcggcggcggcgactggcaatgtttggcctcaaaagaaacgcggtaatcggactcaacctctactgtgggggggccggcttgggggccggcagcggcggcgccacccgcccgggagggcgacttttggctacggagaaggaggcctcggcccggcgagagatagggggaggggaggccggcgcggtgattggcggaagcgccggcgcaagccccccgtccaccctcacgccagactcccggagggtcgcgcggccgccgcccattggcgccgaggtccccgacgtcaccgcgacccccgcgaggctgcttttcttcgcgcccacccgccgcgcggcgccgcttgaggagatggaagccccggccgctgacgccatcatgtcgcccgaagaggagctggacgggtacgagccggagcctctcgggaagcggccggctgtcctgccgctgctggagttggtcggggaatctggtaataacaccagtacggacgggtcactaccctcgacgccgccgccagcagaggaggaggaggacgagttgtaccggcagtcgctggagattatctctcggtaccttcgggagcaggccaccggcgccaaggacacaaagccaatgggcaggtctggggccaccagcaggaaggcgctggagaccttacgacgggttggggatggcgtgcagcgcaaccacgagacggccttccaaggcatgcttcggaaactggacatcaaaaacgaagacgatgtgaaatcgttgtctcgagtgatgatccatgttttcagcgacggcgtaacaaactggggcaggattgtgactctcatttcttttggtgcctttgtggctaaacacttgaagaccataaaccaagaaagctgcatcgaaccattagcagaaagtatcacagacgttctcgtaaggacaaaacgggactggctagttaaacaaagaggctgggatgggtttgtggagttcttccatgtagaggacctagaaggtggcatcaggaatgtgctgctggcttttgcaggtgttgctggagtaggagctggtttggcatatctaataagatagccttactgtaagtgcaatagttgacttttaaccaaccaccaccaccaccaaaaccagtttatgcagttggactccaagctgtaacttcctagagttgcaccctagcaacctagccagaaaagcaagtggcaagaggattatggctaacaagaataaatacatgggaagagtgctccccattgattgaagagtcactgtctgaaagaagcaaagttcagtttcagcaacaaacaaactttgtttgggaagctatggaggaggacttttagatttagtgaagatggtagggtggaaagacttaatttccttgttgagaacaggaaagtggccagtagccaggcaagtcatagaattgattacccgccgaattcattaatttactgtagtgttaagagaagcactaagaatgccagtgacctgtgtaaaagttacaagtaatagaactatgactgtaagcctcagtactgtacaagggaagcttttcctctctctaattagctttcccagtatacttcttagaaagtccaagtgttcaggacttttatacctgttatactttggcttggtttccatgattcttactttattagcctagtttatcaccaataatacttgacggaaggctcagtaattagttatgaatatggatatcctcaattcttaagacagcttgtaaatgtatttgtaaaaattgtatatatttttacagaaagtctatttctttgaaacgaaggaagtatcgaatttacattagtttttttcatacccttttgaactttgcaacttccgtaattaggaacctgtttcttacagcttttctatgctaaactttgttctgttcagttctagagtgtatacagaacgaattgatgtgtaactgtatgcagactggttgtagtggaacaaatctgataactatgcaggtttaaattttcttatctgattttggtaagtattccttagataggtttttctttgaaaacctgggattgagaggttgatgaatggaaattctttcacttcattatatgcaagttttcaataattaggtctaagtggagttttaaggttactgatgacttacaaataatgggctctgattgggcaatactcatttgagttccttccatttgacctaatttaactggtgaaatttaaagtgaattcatgggctcatctttaaagcttttactaaaagattttcagctgaatggaactcattagctgtgtgcatataaaaagatcacatcaggtggatggagagacatttgatcccttgtttgcttaataaattataaaatgatggcttggaaaagcaggctagtctaaccatggtgctattattaggcttgcttgttacacacacaggtctaagcctagtatgtcaataaagcaaatacttactgttttgtttctattaatgattcccaaaccttgttgcaagtttttgcattggcatctttggatttcagtcttgatgtttgttctatcagacttaaccttttatttcctgtccttccttgaaattgctgattgttctgctccctctacagatatttatatcaattcctacagctttcccctgccatccctgaactctttctagcccttttagattttggcactgtgaaacccctgctggaaacctgagtgaccctccctccccaccaagagtccacagacctttcatctttcacgaacttgatcctgttagcaggtggtaataccatgggtgctgtgacactaacagtcattgagaggtgggaggaagtcccttttccttggactggtatcttttcaactattgttttatcctgtctttgggggcaatgtgtcaaaagtcccctcaggaattttcagaggaaagaacattttatgaggctttctctaaagtttcctttgtataggagtatgctcacttaaatttacagaaagaggtgagctgtgttaaacctcagagtttaaaagctactgataaactgaagaaagtgtctatattggaactagggtcatttgaaagcttcagtctcggaacatgacctttagtctgtggactccatttaaaaataggtatgaataagatgactaagaatgtaatggggaagaactgccctgcctgcccatctcagagccataaggtcatctttgctagagctatttttacctatgtatttatcgttcttgatcataagccgcttatttatatcatgtatctctaaggacctaaaagcactttatgtagtttttaattaatcttaagatctggttacggtaactaaaaaagcctgtctgccaaatccagtggaaacaagtgcatagatgtgaattggtttttaggggccccacttcccaattcattaggtatgactgtggaaatacagacaaggatcttagttgatattttgggcttggggcagtgagggcttaggacaccccaagtggtttgggaaaggaggaggggagtggtgggtttatagggggaggaggaggcaggtggtctaagtgctgactggctacgtagttcgggcaaatcctccaaaagggaaagggaggatttgcttagaaggatggcgctcccagtgactactttttgacttctgtttgtcttacgcttctctcagggaaaaacatgcagtcctctagtgtttcatgtacattctgtggggggtgaacaccttggttctggttaaacagctgtacttttgatagctgtgccaggaagggttaggaccaactacaaattaatgttggttgtcaaatgtagtgtgtttccctaactttctgtttttcctgagaaaaaaaaataaatctttttcaaatagggataccaggggtaagatcctgctagagtcaccg

SEQ ID NO: 159411 - DNA, 2548 bp, Homo sapiens
tcatacagcatacgtttggagcgcgtgcccagtcaggtaacatgaacatggctcgtagtggtaatcataagagatacctggtgcactagatgtacgctgctgtgagaatatcttcaccacagattaaataagaacgtcactcgagctgggtaaagcccgacgacgtatctggaaccaaggtcacagcattggacgctcctgacgtgatcttatgactggcactctatactaactatggagatccaagtcgcagcgtcgtatatcgaattacgtcccggtcagatttggcttggtttccatgattcttactttattagcctagtttatcaccaataatacttgacggaaggctcagtaattagttatgaatatggatatcctcaattcttaagacagcttgtaaatgtatttgtaaaaattgtatatatttttacagaaagtctatttctttgaaacgaaggaagtatcgaatttacattagtttttttcatacccttttgaactttgcaacttccgtaattaggaacctgtttcttacagcttttctatgctaaactttgttctgttcagttctagagtgtatacagaacgaattgatgtgtaactgtatgcagactggttgtagtggaacaaatctgataactatgcaggtttaaattttcttatctgattttggtaagtattccttagataggtttttctttgaaaacctgggattgagaggttgatgaatggaaattctttcacttcattatatgcaagttttcaataattaggtctaagtggagttttaaggttactgatgacttacaaataatgggctctgattgggcaatactcatttgagttccttccatttgacctaatttaactggtgaaatttaaagtgaattcatgggctcatctttaaagcttttactaaaagattttcagctgaatggaactcattagctgtgtgcatataaaaagatcacatcaggtggatggagagacatttgatcccttgtttgcttaataaattataaaatgatggcttggaaaagcaggctagtctaaccatggtgctattattaggcttgcttgttacacacacaggtctaagcctagtatgtcaataaagcaaatacttactgttttgtttctattaatgattcccaaaccttgttgcaagtttttgcattggcatctttggatttcagtcttgatgtttgttctatcagacttaaccttttatttcctgtccttccttgaaattgctgattgttctgctccctctacagatatttatatcaattcctacagctttcccctgccatccctgaactctttctagcccttttagattttggcactgtgaaacccctgctggaaacctgagtgaccctccctccccaccaagagtccacagacctttcatctttcacgaacttgatcctgttagcaggtggtaataccatgggtgctgtgacactaacagtcattgagaggtgggaggaagtcccttttccttggactggtatcttttcaactattgttttatcctgtctttgggggcaatgtgtcaaaagtcccctcaggaattttcagaggaaagaacattttatgaggctttctctaaagtttcctttgtataggagtatgctcacttaaatttacagaaagaggtgagctgtgttaaacctcagagtttaaaagctactgataaactgaagaaagtgtctatattggaactagggtcatttgaaagcttcagtctcggaacatgacctttagtctgtggactccatttaaaaataggtatgaataagatgactaagaatgtaatggggaagaactgccctgcctgcccatctcagagccataaggtcatctttgctagagctatttttacctatgtatttatcgttcttgatcataagccgcttatttatatcatgtatctctaaggacctaaaagcactttatgtagtttttaattaatcttaagatctggttacggtaactaaaaaagcctgtctgccaaatccagtggaaacaagtgcatagatgtgaattggtttttaggggccccacttcccaattcattaggtatgactgtggaaatacagacaaggatcttagttgatattttgggcttggggcagtgagggcttaggacaccccaagtggtttgggaaaggaggaggggagtggtgggtttatagggggaggaggaggcaggtggtctaagtgctgactggctacgtagttcgggcaaatcctccaaaagggaaagggaggatttgcttagaaggatggcgctcccagtgactactttttgacttctgtttgtcttacgcttctctcagggaaaaacatgcagtcctctagtgtttcatgtacattctgtggggggtgaacaccttggttctggttaaacagctgtacttttgatagctgtgccaggaagggttaggaccaactacaaattaatgttggttgtcaaatgtagtgtgtttccctaactttctgtttttcctgagaaaaaaaaataaatctttttcaaata

SEQ ID NO: 159412 - DNA, 3896 bp, Homo sapiens
ccggccccggccccggccccggccccgccccggcccggccgggcagctggtaggtgccgtgcgcaaccctccggaagctgccgcccctttccccttttatgggaatactttttttaaaaaaaaagagttcgctggcgccaccccgtaggactggccgccctaaaaccgtgataaaggagctgctcgccacttctcacttccgcttccttccagtaaggagtcggggtcttccccagttttctcagccaggcggcggcggcgactggcaatgtttggcctcaaaagaaacgcggtaatcggactcaacctctactgtgggggggccggcttgggggccggcagcggcggcgccacccgcccgggagggcgacttttggctacggagaaggaggcctcggcccggcgagagatagggggaggggaggccggcgcggtgattggcggaagcgccggcgcaagccccccgtccaccctcacgccagactcccggagggtcgcgcggccgccgcccattggcgccgaggtccccgacgtcaccgcgacccccgcgaggctgcttttcttcgcgcccacccgccgcgcggcgccgcttgaggagatggaagccccggccgctgacgccatcatgtcgcccgaagaggagctggacgggtacgagccggagcctctcgggaagcggccggctgtcctgccgctgctggagttggtcggggaatctggtaataacaccagtacggacgggtcactaccctcgacgccgccgccagcagaggaggaggaggacgagttgtaccggcagtcgctggagattatctctcggtaccttcgggagcaggccaccggcgccaaggacacaaagccaatgggcaggtctggggccaccagcaggaaggcgctggagaccttacgacgggttggggatggcgtgcagcgcaaccacgagacggccttccaaggcatgcttcggaaactggacatcaaaaacgaagacgatgtgaaatcgttgtctcgagtgatgatccatgttttcagcgacggcgtaacaaactggggcaggattgtgactctcatttcttttggtgcctttgtggctaaacacttgaagaccataaaccaagaaagctgcatcgaaccattagcagaaagtatcacagacgttctcgtaaggacaaaacgggactggctagttaaacaaagaggctgggatgggtttgtggagttcttccatgtagaggacctagaaggtggcatcaggaatgtgctgctggcttttgcaggtgttgctggagtaggagctggtttggcatatctaataagatagccttactgtaagtgcaatagttgacttttaaccaaccaccaccaccaccaaaaccagtttatgcagttggactccaagctgtaacttcctagagttgcaccctagcaacctagccagaaaagcaagtggcaagaggattatggctaacaagaataaatacatgggaagagtgctccccattgattgaagagtcactgtctgaaagaagcaaagttcagtttcagcaacaaacaaactttgtttgggaagctatggaggaggacttttagatttagtgaagatggtagggtggaaagacttaatttccttgttgagaacaggaaagtggccagtagccaggcaagtcatagaattgattacccgccgaattcattaatttactgtagtgttaagagaagcactaagaatgccagtgacctgtgtaaaagttacaagtaatagaactatgactgtaagcctcagtactgtacaagggaagcttttcctctctctaattagctttcccagtatacttcttagaaagtccaagtgttcaggacttttatacctgttatactttggcttggtttccatgattcttactttattagcctagtttatcaccaataatacttgacggaaggctcagtaattagttatgaatatggatatcctcaattcttaagacagcttgtaaatgtatttgtaaaaattgtatatatttttacagaaagtctatttctttgaaacgaaggaagtatcgaatttacattagtttttttcatacccttttgaactttgcaacttccgtaattaggaacctgtttcttacagcttttctatgctaaactttgttctgttcagttctagagtgtatacagaacgaattgatgtgtaactgtatgcagactggttgtagtggaacaaatctgataactatgcaggtttaaattttcttatctgattttggtaagtattccttagataggtttttctttgaaaacctgggattgagaggttgatgaatggaaattctttcacttcattatatgcaagttttcaataattaggtctaagtggagttttaaggttactgatgacttacaaataatgggctctgattgggcaatactcatttgagttccttccatttgacctaatttaactggtgaaatttaaagtgaattcatgggctcatctttaaagcttttactaaaagattttcagctgaatggaactcattagctgtgtgcatataaaaagatcacatcaggtggatggagagacatttgatcccttgtttgcttaataaattataaaatgatggcttggaaaagcaggctagtctaaccatggtgctattattaggcttgcttgttacacacacaggtctaagcctagtatgtcaataaagcaaatacttactgttttgtttctattaatgattcccaaaccttgttgcaagtttttgcattggcatctttggatttcagtcttgatgtttgttctatcagacttaaccttttatttcctgtccttccttgaaattgctgattgttctgctccctctacagatatttatatcaattcctacagctttcccctgccatccctgaactctttctagcccttttagattttggcactgtgaaacccctgctggaaacctgagtgaccctccctccccaccaagagtccacagacctttcatctttcacgaacttgatcctgttagcaggtggtaataccatgggtgctgtgacactaacagtcattgagaggtgggaggaagtcccttttccttggactggtatcttttcaactattgttttatcctgtctttgggggcaatgtgtcaaaagtcccctcaggaattttcagaggaaagaacattttatgaggctttctctaaagtttcctttgtataggagtatgctcacttaaatttacagaaagaggtgagctgtgttaaacctcagagtttaaaagctactgataaactgaagaaagtgtctatattggaactagggtcatttgaaagcttcagtctcggaacatgacctttagtctgtggactccatttaaaaataggtatgaataagatgactaagaatgtaatggggaagaactgccctgcctgcccatctcagagccataaggtcatctttgctagagctatttttacctatgtatttatcgttcttgatcataagccgcttatttatatcatgtatctctaaggacctaaaagcactttatgtagtttttaattaatcttaagatctggttacggtaactaaaaaagcctgtctgccaaatccagtggaaacaagtgcatagatgtgaattggtttttaggggccccacttcccaattcattaggtatgactgtggaaatacagacaaagggaaacaccggtgtctccctttgtctcagacttatttcccttgcagtcatgtaaagtggattgcttctgggacagaaaggatcatgtccttgccctctcttttctgccagctcatttaagtcctttgccattctttctttacgtaatcttgtcatccaggcttgaatctctcttctattcttgtcagt

SEQ ID NO: 159413 - DNA, 3878 bp, Homo sapiens
  misc_feature (3624)..(3624): n is a, c, g, or t
  misc_feature (3714)..(3714): n is a, c, g, or t
  misc_feature (3718)..(3718): n is a, c, g, or t
  misc_feature (3720)..(3720): n is a, c, g, or t
ccggccccggccccggccccggccccgccccggcccggccgggcagctggtaggtgccgtgcgcaaccctccggaagctgccgcccctttccccttttatgggaatactttttttaaaaaaaaagagttcgctggcgccaccccgtaggactggccgccctaaaaccgtgataaaggagctgctcgccacttctcacttccgcttccttccagtaaggagtcggggtcttccccagttttctcagccaggcggcggcggcgactggcaatgtttggcctcaaaagaaacgcggtaatcggactcaacctctactgtgggggggccggcttgggggccggcagcggcggcgccacccgcccgggagggcgacttttggctacggagaaggaggcctcggcccggcgagagatagggggaggggaggccggcgcggtgattggcggaagcgccggcgcaagccccccgtccaccctcacgccagactcccggagggtcgcgcggccgccgcccattggcgccgaggtccccgacgtcaccgcgacccccgcgaggctgcttttcttcgcgcccacccgccgcgcggcgccgcttgaggagatggaagccccggccgctgacgccatcatgtcgcccgaagaggagctggacgggtacgagccggagcctctcgggaagcggccggctgtcctgccgctgctggagttggtcggggaatctggtaataacaccagtacggacgggtcactaccctcgacgccgccgccagcagaggaggaggaggacgagttgtaccggcagtcgctggagattatctctcggtaccttcgggagcaggccaccggcgccaaggacacaaagccaatgggcaggtctggggccaccagcaggaaggcgctggagaccttacgacgggttggggatggcgtgcagcgcaaccacgagacggccttccaaggcatgcttcggaaactggacatcaaaaacgaagacgatgtgaaatcgttgtctcgagtgatgatccatgttttcagcgacggcgtaacaaactggggcaggattgtgactctcatttcttttggtgcctttgtggctaaacacttgaagaccataaaccaagaaagctgcatcgaaccattagcagaaagtatcacagacgttctcgtaaggacaaaacgggactggctagttaaacaaagaggctgggatgggtttgtggagttcttccatgtagaggacctagaaggtggcatcaggaatgtgctgctggcttttgcaggtgttgctggagtaggagctggtttggcatatctaataagatagccttactgtaagtgcaatagttgacttttaaccaaccaccaccaccaccaaaaccagtttatgcagttggactccaagctgtaacttcctagagttgcaccctagcaacctagccagaaaagcaagtggcaagaggattatggctaacaagaataaatacatgggaagagtgctccccattgattgaagagtcactgtctgaaagaagcaaagttcagtttcagcaacaaacaaactttgtttgggaagctatggaggaggacttttagatttagtgaagatggtagggtggaaagacttaatttccttgttgagaacaggaaagtggccagtagccaggcaagtcatagaattgattacccgccgaattcattaatttactgtagtgttaagagaagcactaagaatgccagtgacctgtgtaaaagttacaagtaatagaactatgactgtaagcctcagtactgtacaagggaagcttttcctctctctaattagctttcccagtatacttcttagaaagtccaagtgttcaggacttttatacctgttatactttggcttggtttccatgattcttactttattagcctagtttatcaccaataatacttgacggaaggctcagtaattagttatgaatatggatatcctcaattcttaagacagcttgtaaatgtatttgtaaaaattgtatatatttttacagaaagtctatttctttgaaacgaaggaagtatcgaatttacattagtttttttcatacccttttgaactttgcaacttccgtaattaggaacctgtttcttacagcttttctatgctaaactttgttctgttcagttctagagtgtatacagaacgaattgatgtgtaactgtatgcagactggttgtagtggaacaaatctgataactatgcaggtttaaattttcttatctgattttggtaagtattccttagataggtttttctttgaaaacctgggattgagaggttgatgaatggaaattctttcacttcattatatgcaagttttcaataattaggtctaagtggagttttaaggttactgatgacttacaaataatgggctctgattgggcaatactcatttgagttccttccatttgacctaatttaactggtgaaatttaaagtgaattcatgggctcatctttaaagcttttactaaaagattttcagctgaatggaactcattagctgtgtgcatataaaaagatcacatcaggtggatggagagacatttgatcccttgtttgcttaataaattataaaatgatggcttggaaaagcaggctagtctaaccatggtgctattattaggcttgcttgttacacacacaggtctaagcctagtatgtcaataaagcaaatacttactgttttgtttctattaatgattcccaaaccttgttgcaagtttttgcattggcatctttggatttcagtcttgatgtttgttctatcagacttaaccttttatttcctgtccttccttgaaattgctgattgttctgctccctctacagatatttatatcaattcctacagctttcccctgccatccctgaactctttctagcccttttagattttggcactgtgaaacccctgctggaaacctgagtgaccctccctccccaccaagagtccacagacctttcatctttcacgaacttgatcctgttagcaggtggtaataccatgggtgctgtgacactaacagtcattgagaggtgggaggaagtcccttttccttggactggtatcttttcaactattgttttatcctgtctttgggggcaatgtgtcaaaagtcccctcaggaattttcagaggaaagaacattttatgaggctttctctaaagtttcctttgtataggagtatgctcacttaaatttacagaaagaggtgagctgtgttaaacctcagagtttaaaagctactgataaactgaagaaagtgtctatattggaactagggtcatttgaaagcttcagtctcggaacatgacctttagtctgtggactccatttaaaaataggtatgaataagatgactaagaatgtaatggggaagaactgccctgcctgcccatctcagagccataaggtcatctttgctagagctatttttacctatgtatttatcgttcttgatcataagccgcttatttatatcatgtatctctaaggacctaaaagcactttatgtagtttttaattaatcttaagatctggttacggtaactaagggccccaatttccaaatcaatanggatgactggtgaaatacagccagggacctaagtggaaatttgggcttggggccattaaggcttaagacaacccaaagggttttggggtngtancnttggttgctctctatggcccctttcccttccctttatcttctttctcttttctcatcatcccttgctcctcattatattctttctcctttcagtactccacttcttttccttagcttctctcttcatccccctccttctctccttcttccccctcccg

SEQ ID NO: 159414 - DNA, 3309 bp, Homo sapiens
ccggccccggccccggccccggccccgccccggcccggccgggcagctggtaggtgccgtgcgcaaccctccggaagctgccgcccctttccccttttatgggaatactttttttaaaaaaaaagagttcgctggcgccaccccgtaggactggccgccctaaaaccgtgataaaggagctgctcgccacttctcacttccgcttccttccagtaaggagtcggggtcttccccagttttctcagccaggcggcggcggcgactggcaatgtttggcctcaaaagaaacgcggtaatcggactcaacctctactgtgggggggccggcttgggggccggcagcggcggcgccacccgcccgggagggcgacttttggctacggagaaggaggcctcggcccggcgagagatagggggaggggaggccggcgcggtgattggcggaagcgccggcgcaagccccccgtccaccctcacgccagactcccggagggtcgcgcggccgccgcccattggcgccgaggtccccgacgtcaccgcgacccccgcgaggctgcttttcttcgcgcccacccgccgcgcggcgccgcttgaggagatggaagccccggccgctgacgccatcatgtcgcccgaagaggagctggacgggtacgagccggagcctctcgggaagcggccggctgtcctgccgctgctggagttggtcggggaatctggtaataacaccagtacggacgggtcactaccctcgacgccgccgccagcagaggaggaggaggacgagttgtaccggcagtcgctggagattatctctcggtaccttcgggagcaggccaccggcgccaaggacacaaagccaatgggcaggtctggggccaccagcaggaaggcgctggagaccttacgacgggttggggatggcgtgcagcgcaaccacgagacggccttccaaggcatgcttcggaaactggacatcaaaaacgaagacgatgtgaaatcgttgtctcgagtgatgatccatgttttcagcgacggcgtaacaaactggggcaggattgtgactctcatttcttttggtgcctttgtggctaaacacttgaagaccataaaccaagaaagctgcatcgaaccattagcagaaagtatcacagacgttctcgtaaggacaaaacgggactggctagttaaacaaagaggctgggatgggtttgtggagttcttccatgtagaggacctagaaggtggcatcaggaatgtgctgctggcttttgcaggtgttgctggagtaggagctggtttggcatatctaataagatagccttactgtaagtgcaatagttgacttttaaccaaccaccaccaccaccaaaaccagtttatgcagttggactccaagctgtaacttcctagagttgcaccctagcaacctagccagaaaagcaagtggcaagaggattatggctaacaagaataaatacatgggaagagtgctccccattgattgaagagtcactgtctgaaagaagcaaagttcagtttcagcaacaaacaaactttgtttgggaagctatggaggaggacttttagatttagtgaagatggtagggtggaaagacttaatttccttgttgagaacaggaaagtggccagtagccaggcaagtcatagaattgattacccgccgaattcattaatttactgtagtgttaagagaagcactaagaatgccagtgacctgtgtaaaagttacaagtaatagaactatgactgtaagcctcagtactgtacaagggaagcttttcctctctctaattagctttcccagtatacttcttagaaagtccaagtgttcaggacttttatacctgttatactttggcttggtttccatgattcttactttattagcctagtttatcaccaataatacttgacggaaggctcagtaattagttatgaatatggatatcctcaattcttaagacagcttgtaaatgtatttgtaaaaattgtatatatttttacagaaagtctatttctttgaaacgaaggaagtatcgaatttacattagtttttttcatacccttttgaactttgcaacttccgtaattaggaacctgtttcttacagcttttctatgctaaactttgttctgttcagttctagagtgtatacagaacgaattgatgtgtaactgtatgcagactggttgtagtggaacaaatctgataactatgcaggtttaaattttcttatctgattttggtaagtattccttagataggtttttctttgaaaacctgggattgagaggttgatgaatggaaattctttcacttcattatatgcaagttttcaataattaggtctaagtggagttttaaggttactgatgacttacaaataatgggctctgattgggcaatactcatttgagttccttccatttgacctaatttaactggtgaaatttaaagtgaattcatgggctcatctttaaagcttttactaaaagattttcagctgaatggaactcattagctgtgtgcatataaaaagatcacatcaggtggatggagagacatttgatcccttgtttgcttaataaattataaaatgatggcttggaaaagcaggctagtctaaccatggtgctattattaggcttgcttgttacacacacaggtctaagcctagtatgtcaataaagcaaatacttactgttttgtttctattaatgattcccaaaccttgttgcaagtttttgcattggcatctttggatttcagtcttgatgtttgttctatcagacttaaccttttatttcctgtccttccttgaaattgctgattgttctgctccctctacagatatttatatcaattcctacagctttcccctgccatccctgaactctttctagcccttttagattttggcactgtgaaacccctgctggaaacctgagaggaggcaggtggtctaagtgctgactggctacgtagttcgggcaaatcctccaaaagggaaagggaggatttgcttagaaggatggcgctcccagtgactactttttgacttctgtttgtcttacgcttctctcagggaaaaacatgcagtcctctagtgtttcatgtacattctgtggggggtgaacaccttggttctggttaaacagctgtacttttgatagctgtgccaggaagggttaggaccaactacaaattaatgttggttgtcaaatgtagtgtgtttccctaactttctgtttttcctgagaaaaaaaaataaatctttttcaaata

SEQ ID NO: 159415 - DNA, 3117 bp, Homo sapiens
ccggccccggccccggccccggccccgccccggcccggccgggcagctggtaggtgccgtgcgcaaccctccggaagctgccgcccctttccccttttatgggaatactttttttaaaaaaaaagagttcgctggcgccaccccgtaggactggccgccctaaaaccgtgataaaggagctgctcgccacttctcacttccgcttccttccagtaaggagtcggggtcttccccagttttctcagccaggcggcggcggcgactggcaatgtttggcctcaaaagaaacgcggtaatcggactcaacctctactgtgggggggccggcttgggggccggcagcggcggcgccacccgcccgggagggcgacttttggctacggagaaggaggcctcggcccggcgagagatagggggaggggaggccggcgcggtgattggcggaagcgccggcgcaagccccccgtccaccctcacgccagactcccggagggtcgcgcggccgccgcccattggcgccgaggtccccgacgtcaccgcgacccccgcgaggctgcttttcttcgcgcccacccgccgcgcggcgccgcttgaggagatggaagccccggccgctgacgccatcatgtcgcccgaagaggagctggacgggtacgagccggagcctctcgggaagcggccggctgtcctgccgctgctggagttggtcggggaatctggtaataacaccagtacggacgggtcactaccctcgacgccgccgccagcagaggaggaggaggacgagttgtaccggcagtcgctggagattatctctcggtaccttcgggagcaggccaccggcgccaaggacacaaagccaatgggcaggtctggggccaccagcaggaaggcgctggagaccttacgacgggttggggatggcgtgcagcgcaaccacgagacggccttccaaggcatgcttcggaaactggacatcaaaaacgaagacgatgtgaaatcgttgtctcgagtgatgatccatgttttcagcgacggcgtaacaaactggggcaggattgtgactctcatttcttttggtgcctttgtggctaaacacttgaagaccataaaccaagaaagctgcatcgaaccattagcagaaagtatcacagacgttctcgtaaggacaaaacgggactggctagttaaacaaagaggctgggatgggtttgtggagttcttccatgtagaggacctagaaggtggcatcaggaatgtgctgctggcttttgcaggtgttgctggagtaggagctggtttggcatatctaataagatagccttactgtaagtgcaatagttgacttttaaccaaccaccaccaccaccaaaaccagtttatgcagttggactccaagctgtaacttcctagagttgcaccctagcaacctagccagaaaagcaagtggcaagaggattatggctaacaagaataaatacatgggaagagtgctccccattgattgaagagtcactgtctgaaagaagcaaagttcagtttcagcaacaaacaaactttgtttgggaagctatggaggaggacttttagatttagtgaagatggtagggtggaaagacttaatttccttgttgagaacaggaaagtggccagtagccaggcaagtcatagaattgattacccgccgaattcattaatttactgtagtgttaagagaagcactaagaatgccagtgacctgtgtaaaagttacaagtaatagaactatgactgtaagcctcagtactgtacaagggaagcttttcctctctctaattagctttcccagtatacttcttagaaagtccaagtgttcaggacttttatacctgttatactttggcttggtttccatgattcttactttattagcctagtttatcaccaataatacttgacggaaggctcagtaattagttatgaatatggatatcctcaattcttaagacagcttgtaaatgtatttgtaaaaattgtatatatttttacagaaagtctatttctttgaaacgaaggaagtatcgaatttacattagtttttttcatacccttttgaactttgcaacttccgtaattaggaacctgtttcttacagcttttctatgctaaactttgttctgttcagttctagagtgtatacagaacgaattgatgtgtaactgtatgcagactggttgtagtggaacaaatctgataactatgcaggtttaaattttcttatctgattttggtaagtattccttagataggtttttctttgaaaacctgggattgagaggttgatgaatggaaattctttcacttcattatatgcaagttttcaataattaggtctaagtggagttttaaggttactgatgacttacaaataatgggctctgattgggcaatactcatttgagttccttccatttgacctaatttaactggtgaaatttaaagtgaattcatgggctcatctttaaagcttttactaaaagattttcagctgaatggaactcattagctgtgtgcatataaaaagatcacatcaggtggatggagagacatttgatcccttgtttgcttaataaattataaaatgatggcttggaaaagcaggctagtctaaccatggtgctattattaggcttgcttgttacacacacaggtctaagcctagtatgtcaataaagcaaatacttactgttttgtttctattaatgattcccaaaccttgttgcaagtttttgcattggcatctttggatttcagtcttgatgtttgttctatcagacttaaccttttatttcctgtccttccttgaaattgctgattgttctgctccctctacagatatttatatcaattcctacagctttcccctgccatccctgaactctttctagcccttttagattttggcactgtgaaacccctgctggaaacctgagtgaccctccctccccaccaagagtccacagacctttcatctttcacgaacttgatcctgttagcaggtggtaataccatgggtgctgtgacactaacagtgaaagtctccgtcgactgggatcactctagatcgaccacaacatg

SEQ ID NO: 159416 - DNA, 3166 bp, Homo sapiens
ccggccccggccccggccccggccccgccccggcccggccgggcagctggtaggtgccgtgcgcaaccctccggaagctgccgcccctttccccttttatgggaatactttttttaaaaaaaaagagttcgctggcgccaccccgtaggactggccgccctaaaaccgtgataaaggagctgctcgccacttctcacttccgcttccttccagtaaggagtcggggtcttccccagttttctcagccaggcggcggcggcgactggcaatgtttggcctcaaaagaaacgcggtaatcggactcaacctctactgtgggggggccggcttgggggccggcagcggcggcgccacccgcccgggagggcgacttttggctacggagaaggaggcctcggcccggcgagagatagggggaggggaggccggcgcggtgattggcggaagcgccggcgcaagccccccgtccaccctcacgccagactcccggagggtcgcgcggccgccgcccattggcgccgaggtccccgacgtcaccgcgacccccgcgaggctgcttttcttcgcgcccacccgccgcgcggcgccgcttgaggagatggaagccccggccgctgacgccatcatgtcgcccgaagaggagctggacgggtacgagccggagcctctcgggaagcggccggctgtcctgccgctgctggagttggtcggggaatctggtaataacaccagtacggacgggtcactaccctcgacgccgccgccagcagaggaggaggaggacgagttgtaccggcagtcgctggagattatctctcggtaccttcgggagcaggccaccggcgccaaggacacaaagccaatgggcaggtctggggccaccagcaggaaggcgctggagaccttacgacgggttggggatggcgtgcagcgcaaccacgagacggccttccaaggcatgcttcggaaactggacatcaaaaacgaagacgatgtgaaatcgttgtctcgagtgatgatccatgttttcagcgacggcgtaacaaactggggcaggattgtgactctcatttcttttggtgcctttgtggctaaacacttgaagaccataaaccaagaaagctgcatcgaaccattagcagaaagtatcacagacgttctcgtaaggacaaaacgggactggctagttaaacaaagaggctgggatgggtttgtggagttcttccatgtagaggacctagaaggtggcatcaggaatgtgctgctggcttttgcaggtgttgctggagtaggagctggtttggcatatctaataagatagccttactgtaagtgcaatagttgacttttaaccaaccaccaccaccaccaaaaccagtttatgcagttggactccaagctgtaacttcctagagttgcaccctagcaacctagccagaaaagcaagtggcaagaggattatggctaacaagaataaatacatgggaagagtgctccccattgattgaagagtcactgtctgaaagaagcaaagttcagtttcagcaacaaacaaactttgtttgggaagctatggaggaggacttttagatttagtgaagatggtagggtggaaagacttaatttccttgttgagaacaggaaagtggccagtagccaggcaagtcatagaattgattacccgccgaattcattaatttactgtagtgttaagagaagcactaagaatgccagtgacctgtgtaaaagttacaagtaatagaactatgactgtaagcctcagtactgtacaagggaagcttttcctctctctaattagctttcccagtatacttcttagaaagtccaagtgttcaggacttttatacctgttatactttggcttggtttccatgattcttactttattagcctagtttatcaccaataatacttgacggaaggctcagtaattagttatgaatatggatatcctcaattcttaagacagcttgtaaatgtatttgtaaaaattgtatatatttttacagaaagtctatttctttgaaacgaaggaagtatcgaatttacattagtttttttcatacccttttgaactttgcaacttccgtaattaggaacctgtttcttacagcttttctatgctaaactttgttctgttcagttctagagtgtatacagaacgaattgatgtgtaactgtatgcagactggttgtagtggaacaaatctgataactatgcaggtttaaattttcttatctgattttggtaagtattccttagataggtttttctttgaaaacctgggattgagaggttgatgaatggaaattctttcacttcattatatgcaagttttcaataattaggtctaagtggagttttaaggttactgatgacttacaaataatgggctctgattgggcaatactcatttgagttccttccatttgacctaatttaactggtgaaatttaaagtgaattcatgggctcatctttaaagcttttactaaaagattttcagctgaatggaactcattagctgtgtgcatataaaaagatcacatcaggtggatggagagacatttgatcccttgtttgcttaataaattataaaatgatggcttggaaaagcaggctagtctaaccatggtgctattattaggcttgcttgttacacacacaggtctaagcctagtatgtcaataaagcaaatacttactgttttgtttctattaatgattcccaaaaaaaaaaaaaaaaaaaaaaaaaaaaaaaaaaaaaaaaaaaaaaaaaaaaaaaaaaaaaaaaaaaaaaaaaaaaaaaaaaaaaaaaaaaaaaaaaaaaaccttgtggcccgcttggcccaagcgatttttaacttgggcaaggtttatcattgcgcccgaatttggggctaattggccaatttgcccttatggggggcggtttaccattcaatggcccgcgttttaaaaccgtcggacttggaaaaccctggggttcccaaattaatcggcttggaagaaaatccccttttcgcaagttggggaatttccaaaaggccccgacccgatcgccttttcaaaacagtggccaaccctaaagggcaaatggaaattggaggcgttaatttttggtaaaattccggtaaatttttggt

SEQ ID NO: 159417 - DNA, 356 bp, Homo sapiens
agtaaacttacatatctgctagattcagaaagcactgaaactagactaacaattcatcagcagttaagtaagcactttactgtttcccttatatttccttcctcctcctctctctcaacccaatttaatggggtctgagactgaggctagcctagagaagaaaaggggtgaaggaatactgaggagaaagagggaagctgaccactctccttccatgactgcagggctggggcaggcccctgttggaggagggaagaaagctcaattctaaatcaactccagtgtttttgctagtacataatgctggacgtttcaggtactgaattatctggtgtttttaacctgaatgttttgtt

SEQ ID NO: 159418 - DNA, 447 bp, Homo sapiens
aaccgacaaaattgtgatgctcgttagccgcgtgttaaagtgtgactgattccaatgtacaagagtccacatgaagtcattctagtagtaaatcgtcagatcatatctccaagtcgtgactagcacagacctagcagtaacaattcatcagcagttaagtaagcactttactgtttcccttatatttccttcctcctcctctctctcaacccaatttaatggggtctgagactgaggctagcctagagaagaaaaggggtgaaggaatactgaggagaaagagggaagctgaccactctccttccatgactgcagggctggggcaggcccctgttggaggagggaagaaagctcaattctaaatcaactccagtgtttttgctagtacataatgctggacgtttcaggtactgaattatctggtgtttttaacctgaatgttttgtt

SEQ ID NO: 159419 - DNA, 606 bp, Homo sapiens
tgtactcttttttttttaaaacaaacaaacaaacaaaaaaaaaaccttccaagctctgtaagctttaggcgcccaagcccagctctgccctgctgtggcaagttttcgtttgggctacgatgttggtgccacatctgctgcatgtcctcagggggctctcatcccacagcagagatctgtcataggttagagccctccctacagaagcaacacctgaaaggcatccaggggagccagttctggggcaggctgaacctgcagcttcacttgccatgtaaattagagactggaaaggcttctctgacttcaatcttcctcttctgcaaaatggagataagaccttcctggaaaggttaaaataatgaaccataggtgaaactgcctggtctagccccaggcttgtcctgggagctcaggaaatgctgatgaaagctggatggagatggctcaggggagcccatgcctttcattgggatagtctgtcctgctgtctgtcaaattaacctgctgtgtgccaggcctggtattaggctctgggatacaagctgctggggtgaggtggtcagacgaatcaagaggtgaaagtggttataaactgtggagcac

SEQ ID NO: 159420 - DNA, 398 bp, Homo sapiens
agaagacgcaggagcaggagaagaagacatgggaccaggaggagaagatgcgagaggaggagaggatgcgggagcgggagaagaagatgcgggaggaggaggagatgatgcgggagcaggaggagaagatgcaggagcaggaagaagaagatgcaggagcaggaggagaagatgtgggagcaggaggagaagatgtgggagcaggaagagaagatgtgggagcagcagaggctgccggaacagaaggagaagctgtgggaacacgagaagatgcaggagcaggagaagatgctgggagcaggaggagaagatgcggggccaggaggagaatatgtggggccaggaggagaagatgtgggggcaggaggagaagatgtgggggcaggaggagatgcgag

SEQ ID NO: 159421 - DNA, 443 bp, Homo sapiens
acctctgcctgagacaccttacagctccgtcctgcttccatgtcattctgttccttttgtaaaatgtgaaccaggtctacagctcaatgtagcttaatgctatacctctataaggtttgttgtatgctaatccacaaatcaaagacaacaattccttctagaccctttaccctgatttggagttcaaaacaatacagccagcataatcagtagaccatatttatataccctttccttatatttgtgcttttgttttgttttaatggagagaaaaatcaacagtagaaaccacttacaagattacttactactgtagtgtggtataaagtaaaagattttacaaaattaaaaacatagtgatgggaaaatatggttagagtcaaacagtctgatttttttttaaggttgctggttacagatcaatgtcatgaacaaacagtaat

SEQ ID NO: 159422 - DNA, 100 bp, Homo sapiens
tctgcctgctctgcaagcctcattatccccattttgttaagtagctgggcctggagtccccacacaggttaagaaccacccaggggggaatgttatgttg

SEQ ID NO: 159423 - DNA, 426 bp, Homo sapiens
atcgagctcgagaccctcaaagcatgactccccgctagaatatttctatctggctattgtttttacttcttctttcccttatcatggttcattgaggtaagctagttaaatctcttggcccctttttctttacattcttgtgtgtctgtctctgtacccgctgtgtcatccttaattcagtatcaatggagaaatgccttgtccttcatcagtgcctatctgccttcaaaaccatcttgtcctcaagttttcccattcatctgttctcttcttcatccatgccagcacagatagtggatatcatctgtgtgccaggtactgggctaggaactggagctaaaaatgtagataggactgggcacagtggctcacgcctatagtcccagctacttgggaggctgggatgggaggatcccttgaacctag

SEQ ID NO: 159424 - DNA, 402 bp, Homo sapiens
tcctggcaaggtggaaatcaggatttgagccatgttgtgcaataaagtctccgaacatatttggcaaattagtattcctcgtctgcacttgcagcttatgaagattttgagcacagctttaagacagctctgaagttgggaagaactctggggtgcttttacctcatgggcagccacactgcctccactccaccttggaatcttgcttccttagccatctgaacacaagttctcttggttcagccagagccgggatcaggccaggaggttggctggtgacactgaagatgggaatattttccacaaagctgagaagtgatgaagggcttctggctcaagaaaatgtatgttcacattaaaaattcaaaactctcctgatttccacctgtcagggatttttaa

SEQ ID NO: 159425 - DNA, 412 bp, Homo sapiens
acccctcttgcctctcctaaatcccttgggaggtgtccccatgccctacacactgcctgctctgtcacctcaccaccctgcaaccagctgggctggctggttttcactgctgggaggtagatttttttttcaagaagtatgaaagtatcattggcatatagacagacctctgcactcagctggaactgggttttgaatcgcagcttcaggactcaataatgttgtaaatctctgaacttcttggagactttgttttaggaagacaggaccctataagacaaagtccctctgtgaggtccagcacagaaggcatctctcaccagggtccctttcttttcccttttctctcagcctgattctgtgctttctttcttccttttcgttgttatttaaacttatgcatgtaatttca

SEQ ID NO: 159426 - DNA, 199 bp, Homo sapiens
catctgatcccccattaaaaaataataataattacatagacattaaataacataccctcttaatattatgtaggttatgactcagacttaactttcgaggtaagaataacatttagtaaattactcttcaaaaataaaaatattttccagagcagttacttcagatcagatcaagcccagtttcttttttctttttttt

SEQ ID NO: 159427 - DNA, 214 bp, Homo sapiens
cagtttgatgcataaccttctagattctcatgtttgcttttgtaaatatatacacataggtagagcagtctattggtttttgtcatgtgtatctgggtgttaaatgaaggagtgatgttctacaacttgcttttatgatttaactatgtcttaggccacttttcctcctcccagggaagagctcttctctatggttttgttttgtttttttgtt

SEQ ID NO: 159428 - DNA, 461 bp, Homo sapiens
tttggtgatgtccctctagagaatgtcacctattagctaactttttggctgtgttacctcacagctctgacatcatcttatttctgatgtgcaccatcacatagcaaaatgaaatttaagttttaaagttaaactagccagagtttggattctagttccataattttctcagaaagttatttagcttttctgaaatgtgcatctgaaaatgagattactatttccttcatcactgagttgttgtaaggcttaaataagataaatacataatgtagccatctagcacctagcaggttctcaatatatgtttttgaaggaatgaaggatgggtgactaactgatgaaatgaatgaccttctctgtctctagcatctgtttaactctctcattttaaagcctgatctcaggctgagaagctgtgagataggaacgaaggggaatatacatgcatttctgcaata

SEQ ID NO: 159429 - DNA, 548 bp, Homo sapiens
gtgtatcataatgttgcctccttttgagaagactgaaaggaaaagtttaatgtatttatttcatttccatcctcagagggcagcaaaaggagagtagttaaaagtgtctgtgatgatctactattaagtcaaaaggttgtaaatagttacaatcctaattttcttttttttttttaaacggagtcttgctctgtcgctcaggctggagtgcagtggcgcaattttggctcactgtaacctctgcctcctgggttcaagcaattcttctgcctcagcctccagagtagttgggattacaggtgtgagccactgccccggccgtctccaaacttcttatttaatttgatgactaatttataacaccaagaattgcctaccacttatcaggcatagtgtgagacactttacttcatctgtaatgctgtcaccaaaaccctgaaagttaggttttggttttgtttacacacaaagaagctgaaactgaaagaggtagtttatcgagcatcacagagctagtagctttgattgtaaaccaaatatgactgatt

SEQ ID NO: 159430 - DNA, 470 bp, Homo sapiens
gcttggctggcctctcgggggtggcttttcaggaggttaagcccccgacaggattgacttccacggcaaagttatcttaggaataaaacagcagggaagaagaggagaaaggagacttggccaccggcatggtcagcagagagtgagaaggaacgttagcctgtcatcgggatacttgctcctgcagaggatgaggaggctgaggccagagaaggctgcacaagtttgcccgactcaggtggatgtcggtaagcgtgacctgggtgaggtgtgaaacccagcagggagggccacacactctactgtcaccacctccagcacgggggctgagcacctgctgcaccacggacacatgcactgggagacaggggagccccaggtggctgggaccctcctcctgggttctagtttagcacctaataagagcattcccaagtgacgcaaacaaaaccccattgaccccagagatt

SEQ ID NO: 159431 - DNA, 351 bp, Homo sapiens
tctctttggatgccaaagagtgggaggggcccagcggagtggtggccagagtaaccccccgccatcccatcagctcagacaagggtcaaagcttggggccaagcccacggctcaggaagggtttgccaggcccccagatcccctctctctgagatagctgtgagcaccagtgttggctggggtgaaagccgggtaattttcctctaagctgtcctccctccgctcccctccctgcctgctggtgctggctgtgagcacgtctgcattccagagcttaggagagagagaacctgctgctgttaaggttgaggaagtagattgctaacagctgctgtaggaggggttggatgt

SEQ ID NO: 159432 - DNA, 395 bp, Homo sapiens
ctcttctctttttagatctctgatgacacaaatgttagattttttttttgttatggtcccacaggtatctgaggctttgtttgtttctcttttagtctctgttttttagactcttgtcctaactttagattgattcattctgtctttttactcttccattctgttgaaccatttattattttagttattgtatttttcagttctaaaatttccatttgattattttcctatttctatttaactatttctccttccttccttccttcctccctctctccttctcttccttcttctcttttctttcttcttgttcttgttcttcttcctcctctttcttctttcttcttcttttcttttttttttttttttgagagacagaatctcactctgtcatc

SEQ ID NO: 159433 - DNA, 411 bp, Homo sapiens
gttgatagctgactcttgagggaaaaaggacggcgagtgaagacccaaatttggcattagtttttgcttggggccaacaggtatctgaggctttgtttgtttctcttttagtctctgttttttagactcttgtcctaactttagattgattcattctgtctttttactcttccattctgttgaaccatttattattttagttattgtatttttcagttctaaaatttccatttgattattttcctatttctatttaactatttctccttccttccttccttcctccctctctccttctcttccttcttctcttttctttcttcttgttcttgttcttcttcctcctctttcttctttcttcttcttttcttttttttttttttttgagagacagaatctcactctgtcatc

SEQ ID NO: 159434 - DNA, 550 bp, Homo sapiens
ccaggtggtgatgatgccactcatccagggatccatttggagaaccactgctttagtaatgtttcctctagtctttgggctgcaaatgtttctcataaaccaaatttcagggaatgacaaaccaaagaaaggactggtaaggatctaggaaaactgcataagtcagaacaaagatattcaaaccttttcattatcttttttctccctttggcaatgggaacatcataggaacccaggaaacgttgtgcatagtatttggcagttgcaaggtctgagaaagtctgctttggagttgaaagtttcttaggatacaatattgtatgtaacatgaaatgttaaatttattttttaaaaaggatgattacctcattttgtgaacataaaaggaaaatacaaatgtgacttaaatgggattgaatggggttcttattttaaaaacttgactttctgacttgatgatttctgtatgagctttgtcaggagttcaagctcaaagcttacgttattgtgtgtgtgtgtgtttgtttgtgtgtgtgtgtgttaggatctc

SEQ ID NO: 159435 - DNA, 920 bp, Homo sapiens
gagaggagctctgaagagctctgatcctcatgatcctcccaggcgcattggtaggagggcaacctaagctggtccatcaagcttggtgaaatggaaccgaacccctactgtattctgctctttctactgaacagttctctgtttctggacttccagtctccggaaaagtcagaacagaatgccgggaaattttattagttatctatttatctattttgtgggccagattccatggtaattggcttccccagctaggttttctggagagaatgaggtattagtgaaaagtttctactagccagagatgtgtgttctcaggaaatcaagactgatatattctggccactttcctgtcagctcccacacatgtaatgtacactgtcaacaggataccaaattcaggaggcagaatgtggtcttacggcctaaggtagaagcctggggttccacctgccttctggaacccataaggtattctctctagtcctgcattggctcctctctcatgctttccctgcctccccctccactcccctctcttctcacattcctgtgaacggaatgtagcttaatgcacagggtggcaactggaggatttgttggtggcacttctctccatttccttttctgtccttcctcctgctccctccccagctttcctgttactcatcttcaagcctccacttttcttcttgactttaggtattccctttactccctggtccacaactgctttagtgacggggcccctctctatgactgtttctcccctgtcaccccccagaagtcttaaggcactacgggtgaaacccaaagagttcagccacagccttccactacctcagacccagcccggcccaatcagagggagaggaagaactgctggtgaagggttctcctggtggggcctgttatcccca

SEQ ID NO: 159436 - DNA, 548 bp, Homo sapiens
gaaagtgggtcctgagcagataagagcaaggctgcgactccagggaaggcagtggacttcattctatcagcagtggcaactaatggcccagcgaatctgaatcctggctttgtcaccaaccagctgaggtaccttggcaaaaatctcttctctccaagcctcagtttcctcatttgtaaaatggaaataataatggtatctgcctagtagggttgttgtagggattcacaaaaaggctctatgcccagactaaggtaatcactcaagaactgagaactgttgttactgagcaatggggagccgctgagggctcctgacagacagggacacaagcaaagctgggctgggaaagcgctgacccagctgctcaccttcaccacaaagaagcctgggactcaagaagagtggaaggagatcctggatctgggccagctgcctcattgaaggtttctttgacatctcctgttttatctttttttttttttttttggaaacgggttttggccccgtcccccggtgtttgtttgcgcgggcccattcttggccca

SEQ ID NO: 159437 - DNA, 713 bp, Homo sapiens
  misc_feature (600)..(600): n is a, c, g, or t
gtgaatcctacccttcccgtgtactgaagatccagcgtttagttctcctttgatttcctctccctctggccacccctgcccccaatcgtaaaaggggtcagtctgctcaggcctgctttgatgggaccccgaaggccaggaaggaactggtcctgggttttctaagagctgggggcggatggaattctcctgcctgcgggtctttaaagactgagacccgggaaaaggagaagatgaaggaagccaaggatgcccgctataccaatgggcacctcttcaccaccatttcagtttcaggcatgaccatgtgctatgcctgtaacaagagcatcacagccaaggaagccctcatctgcccaagtaagttgtttggaccctgagagtcacccagactcggtgcccactgaccctgatcttttcatctgtttttttctgcctggatccatgagggtcactcttctctctgatccccagctgggcccaaatgccagggccagttgcttgatcccttgctccctgtcctcactctgaggggtggtggctgttggaatatggcataagccggactatctgggaatgtgggggaggggaggctgtgcntgctcccttttgcactgtcatccaccaggcacccccctttgctcccgaacagctgctaaaggttagggggaaactgattggagaaaggaccagaatgtttgtatgtgtggaag

SEQ ID NO: 159438 - DNA, 632 bp, Homo sapiens
gtttctggtctttcagttccggcttaacttgcaacagagagaactgcagttagacacatggaaggccttcggtaaaagtggagaatcccaacctagtcccccaaagtagctggcagaggcggagctaggaggagggcagagtggggtcaggaaggccccagaagggtggggcatgtgggagaattctctcctctctgttcttcgacctctgggagtgaatcctacccttcccgtgtactgaagatccagcgtttagttctcctttgatttcctctccctctggccacccctgcccccaatcgtaaaaggggtcagtctgctcaggcctgctttgatgggaccccgaaggccaggaaggaactggtcctgggttttctaagagctgggggcggatggaattctcctgcctgcgggtctttaaagactgaggtaacgcagtaggggagggaaaaagggagggcgaggggagaagggaagaaggggagggcagaggggaaagggccaacctgggtccggcgagggctgcggggctgggttttaggaaaagaagagctaagaggcgggtctctggggctagagggcgcccccaggcgctggaggggaaataggcagaggggcctctcaaacctgtc

SEQ ID NO: 159439 - DNA, 291 bp, Homo sapiens
tgtgcccagccacatttatataatttattaccatatattgttatagttttatttttagttgttgttaatctcttactctgcctaatttataaattaactttaccatggatatacatatataggaaaaaacacactatacggggtttgatactctccctggtttcacacatccatgggagtcttggatcccccccatcagataaggatgacctaatgtatactcaaaataattgaaagcagggtctctaagagatatttgtgtacttagtgttcataggtatagcccattga

SEQ ID NO: 159440 - DNA, 171 bp, Homo sapiens
ccagcttcatttccgcctgagccagatgtgaggatggccgaagtaaatgcctcttggtcagcagcagccggcgcattggtaaacggcattgtcaccgcttgaacagaggaattctcagcagagcactttcccaggggaggtgccgtctgagctgccgcatcaggaagggtg

SEQ ID NO: 159441 - DNA, 328 bp, Homo sapiens
caggaacaccccaatctctggaacctttcctgaggcctccattttcaggaattttgttaggaatccagataacagaatggccatagtggtgattatgttccttctacctccttttcatcagcctcgctcaccttacccttccagacatgagaaaacagtttcactacaatatccagtagatttacctaattggtaaaataagaaaggccaaggaagttgctcttctcttcactcccacccctcctgttcattttgtttgtaacaatagagccaagtttcaaacaaatgtagaaaaggtgagcaatgctaatgatgtgtttcagatggg

SEQ ID NO: 159442 - DNA, 640 bp, Homo sapiens
gtacatggaaaatgcttagggtttgttgagtgaatgagcaaactgatactttgtaggagtggccaattttcaaatattttaggtaacagaaaacagtggtgaatcaactcaaaagatgaggtaccagtcaaatctcttcccttttgtcagtttctaagtagtattaaacttgagtgaactaagttttacttttttttcctttgctttgcttaccccttggtgagaggtaatggagaaaatatagacagagcaggaggaggaaagaaactcaatctcgaaatgactaagagcttgtggagcagcttgggagagaaccagctgggttattggctactctgtagttccaggtgtggggaattattctcatcaataccgtgaccgcctgccactcccctctgccctctttctttgtgttaattagagcaggggtctgcaaacattttctgtaaagagagtaaacaaatatgtcaggctttgtgggccaagagaaaacatcagcgacgttgtggaggtgcttacataacgacagacaaaacaaatttccatgaatttttatcgatgaaactccaaacatagtaatggggtacgattttctgtaacacaagtctgctaatgagaagaattgaattatttgagggag

SEQ ID NO: 159443 - DNA, 305 bp, Homo sapiens
ttggtgagatttcttccacaaccttcccgcaacagaccctagtgcttcctccagactcttttctaattgagatgcaaattaatctctctggctgattacacttcccttaaagctactgacaaatgcagctgtaaccagagtttgcggactttccaacaagtgacttcagctgtcagtatttgcatgctcagccaaggcccgcccgctcccagtctcagagccatggagagcttcctttaggcattacaagcctgttttatttatgtgtatacaatttacatacaattaagagttaaaaacaaaat

SEQ ID NO: 159444 - DNA, 399 bp, Homo sapiens
gccagaggcccatggcccatccatatcccgctggcctggccatgcaaacacagcaaaccacgcaacctctggccaagcctcattttccccacttgccatgtggagataagaatttctgtcctcctggctggatcctctcagggaagatcaactggatcaattagattagttggattatttttgtaaaatgaaaatcaagccagaagaaatttatgtattagtgctattctagcaagaactgacatactaaatgtccaaaagcacaatatcccagaaagtcactcaaacatactcttcccttattaatacttcaaaacaagattaaccctttggagccctggatcatgcccccaactctgggggattcaattattcccccatggtcaactctgatttgaa

SEQ ID NO: 159445 - DNA, 523 bp, Homo sapiens
cctccacagcaacttccttgatccctgccacgcacgactgaacacagacagcagccgcctcgccatgaagctgctgatggtcctcatgctggcggccctcctcctgcactgctatgcagattctggctgcaaactcctggaggacatggttgaaaagaccatcaattccgacatatctatacctgaatacaaagagcttcttcaagagttcatagacagtgatgccgctgcagaggctatggggaaattcaagcagtgtttcctcaaccagtcacatagaactctgaaaaactttggactgatgatgcatacagtgtacgacagcatttggtgtaatatgaagagtaattaactttacccaaggcgtttggctcagagggctacagactatggccagaactcatctgttgattgctagaaaccacttttctttcttgtgttgtctttttatgtggaaactgctagacaactgttgaaacctcaaattcatttccatttcaataaactaactgcaaatcactaa

SEQ ID NO: 159446 - DNA, 459 bp, Homo sapiens
aaacaattacaatggccctgcgcgggaacctccgtccattgcacttgctatgcaaattctggctgcaaactcctggaggacatggttgaaaagaccatcaattccgacatatctatacctgaatacaaagagcttcttcaagagttcatagacagtgatgccgctgcagaggctatggggaaattcaagcagtgtttcctcaaccagtcacatagaactctgaaaaactttggactgatgatgcatacagtgtacgacagcatttggtgtaatatgaagagtaattaactttacccaaggcgtttggctcagagggctacagactatggccagaactcatctgttgattgctagaaaccacttttctttcttgtgttgtctttttatgtggaaactgctagacaactgttgaaacctcaaattcatttccatttcaataaactaactgcaaatcactaa

SEQ ID NO: 159447 - DNA, 130 bp, Homo sapiens
gattacatgagcgaatccatgtagagtgcccagcatggagctggcaggcagggcacgggctgtgagtgttgctggggtgatggtggccatggtgaaatgggaaaaccctggagtcagggaacctggattt

SEQ ID NO: 159448 - DNA, 438 bp, Homo sapiens
aaggtctatactcctcatgtgtctcatgtggatagcagcaacacacaggccctgcaggtaccatggtgccccccagctactccagccagccttaccagagcacccacccttctaccaatcctactcttgtagatcctacccgccacctgcaacagcggcccagtggctatgtgcaccagcaggcccccacctatggacatggactgacctccactcaaaggttttcacaccagacctgagcaagccaggcctggttgcttctggttagttgaggtatatggaggtctcctgtgttaccctcttcccatgcatgtcccctcctggttccccttctttcagtcccagcctgaaacccaccatgtagctgctaagcgtgctctccagacaaggccagctccatccttccccgctggcccgcacggattttgaggacttggc

SEQ ID NO: 159449 - DNA, 285 bp, Homo sapiens
tggatacacaaatacttaccatggtaatacaaaggcctacagtattcagtacagtaacatgctacacaggtttgtaacctatgagcagcaacaggccatgccatatatcctatgtgtgtagtaggctatacaatctaggcttacctaagtatactgtataatgtttgcacaaggaaatcaccttacaacacatttctcagaatatatccccatcgttaagtaatgcatggctgtaggttaagacttaattttctaacagctaaagtacagaaacataactgattg

SEQ ID NO: 159450 - DNA, 1176 bp, Homo sapiens
tgacaccagtctcccgaaagaattagaggtaactgcttcctgtgttctaggagcctttcaagctaacagaaggtaatataaatataaggggtactgataaaaggaaatgtattaatagaccttttgaacatcaacttgttgattaaatctatcagtgcagtatatatacaaccttgtcagacgagtagctgacaaaggaatctccctagtacaacttgtagcagtactattataaagaattcctgacttgacacattttgatgaagttggttgaaataatttgttgggtttgttcaatttttggtgtcatttatataaaaagaataaagaagaatgtgaatggtaggaagtcaggggagaggcatggcagaaacattggtattcactagaacttgtatttttctagtgcatgtgaattggactcatttcacaaataacatttacagtataagtcactgaaatgcaaaaaaggaaagcagctaacacgagacatttatactttatgctcagacattctggtagtagaggagggctaggaccctagagctgtgtagtaaagaattgttgagtatcgttcagtttaggtaccacgaaggtggtatctcctgctctgccaccaatagaaacttgaagttaaaaagaaaagactctgagagcgctgatgctggagagatttggctgtttacccctctgggattggattcggtaagagtgcaattaattgccctgtaaccatagagccagaggagagggactaggtgctccgggctatgctctaggaggtgtgaggtgctttctatgctgtttataccctaggctaatcctatgaggtagatagtgttgggctttttttgtggatgatgaaacagagatgcaaagaagttaattcccttgttcaaggccacaaaattattaaatgaacactaggattcaaacctgggtctgtcttagatgactgaatctgcggaattttcccagctgttttgttagtcttgatccgtgtagatcatccttccaaaaacttgtgtttctaatcaagtttatgatctatagttgagcgtctgtactaaatgggtcgagtgattacatgggtaaatgaaattgatagaactcatatcattgtgctgaattccctagcaccatttaataagatgcagtcttgctgaagcacggcca

SEQ ID NO: 159451 - DNA, 499 bp, Homo sapiens
tcttaagaacccactttactacccctacccccaagtccccagaaaatactcttctctgaaacatagtcttctctctggaaaagtgggggcaggtgaggctgggaggtccactttggatacaagcctgagttgctgaaatgcgacccggccggcagacccattcaatacgccccatcgtccaaacatgcctgggtaggtaatggagacgaccataacagaaacgtgaattctaataaacactcggccaggataaaggccacttctgagcacgttagctctgtggttgagagaaaagatcggattcctggatcgatgcacagtcaagcactgcctccaccaatgacaggacggttcggccctttactaataatagcaagcggccttgtcctcgagtgttcaccagagtatgtggatgatgcttaggctaactagacggaacgtccaccagagcgcaccacgccatctgcccagccacaagcgcagctgcccggaaactggg

SEQ ID NO: 159452 - DNA, 276 bp, Homo sapiens
ggaattcaaaatgaacaaagagagtccattaatagtactttacactttaaatacttaggaataaattttgagagatgtacacaatctttctgtagaaaatgtaattatcttattagaagccataaggaaaatttagctaaatgaagagagacgtcaggtcctggatggaaagattaactactgcaaaggtatcctttctcaaggtaatgtaaacatttagagttagaatagtaattaagttaataaggttttattctaaaatttatttgctagtta

SEQ ID NO: 159453 - DNA, 818 bp, Homo sapiens
gagcatggaatctgataggcagctccatgatgctgtgtgattggcaggtagatcctcgtggggtagaagccatgtgttccccccacttccccagtcttctgagggggtctctcctgctcctttaggcaggatggggcattcttggcccactgctgcccccttgcggtctcataccttgtatcccgatggctgcaaacgtttcaactgcaagcttaaaaatgtagagtcggctgagtcctcaaagtgcccggggagagcacagaggcggtagagggttcaatgatttgttcaaggtcccagccgagacactggggagcaccctgcttcacagctgagactcaaggactggggggcctcaggcctcctgccaagaaaggcagtacagcctcaaagtacccctttctggaagagagagaagtacatttactgagtcctgctgtgtcccatgacagctaaactaaccacaaggatgacgatccctttttatagatgaatgtgaaggggacttaccaggtctctttcctcctggtccctaggagaccactaggaatacatgggatgcttctggttagcacaatgattgcaggacacctgggcattcaggggacagggccagggatagcaaacacctaaaatgcataggacagtcctacccagtgacaaatcatctcaacaagaatcccggtgccaaccctgttgagaaacaccatgccctgggttcaaatcctgactcagccacttccatcccctaccctcttggactccaacattgcctagagggccaggcatgaaataaaggacagatgagtgcctggcac

SEQ ID NO: 159454 - DNA, 176 bp, Homo sapiens
gtgggaattcaaatccgggagtcctgggataaagtgctgactgagaaatcatgggacctcttgggatccctgcagaatctcccaaggctcttggcccaaagcctgaagcactttagagaaaactgacggacattctactgcacccaagtccagacttccggatcaaccaagtatgg

SEQ ID NO: 159455 - DNA, 423 bp, Homo sapiens
cacaacatacttctaaataagccagtgatcaaagaagaagactcgaggaaaattttaaaatatcttgaactgaacaaaaatgaaaatataggccgggcacggtagctcacgcctgtaatcccagcactttgggaggccgaggtgggaggatcatttgaactcaagagttcaagaccagcctgggtaacacgatgagacccgatctcttaaaaacaaacaaacaaacaacaacaaaaaaataaaaataattttaaaatgaaaatacaacgtatcagaatttatcggatgcagacaaagcagggcttagattagggaaatctataccactatatctttacacaaagaagaaaggtctcaagtcaataacctaagttctcacctcaggaaactagtaaagatagaataaaataaacccaaaataag

SEQ ID NO: 159456 - DNA, 268 bp, Homo sapiens
gcttaatttcctttcattaaaatgttctaattacagatcaccttaaaaggtcatctggtttctcaagaagtgagaggttttttttttcttcttaaattgtcctagagaaccaccttggtgaatcaataactgctacttttacctactataatagcaagaccttaaaaggattcttttctttccttttaacaataaatacttataatagtgaaaataaagttctttaattaaacaaaggtaataccaagctataaaatttgcccatatg

SEQ ID NO: 159457 - DNA, 280 bp, Homo sapiens
aattaaacctcattcctttataaattaccaagtctcaggtatttctttatattagtgtgagaacagactaataaagctatctacagagaggaagaaaaagaaaaaagtgaataaaccaatctcacaggttaaaatgagatgtgtctgagtaaattatctcaaagtgaattttcttgaagccaagcaatagaagggatactacacattgatggttcagtaaacccgtgagactcccttaactcctactcaatgcactactggttttaaatgtacacacacg

SEQ ID NO: 159458 - DNA, 632 bp, Homo sapiens
cctcctcaccgtgaagaggatgtgcatcttgtttctttgcggaaaagggtcatggcaagactgactaatgggtgtgatgagtgggtcagaagacagagttctggggtgaaggtacaagggtagcctgggaggtgccctgatccctgaggtaagccaattgccacacgccccagctgggggactaagaaaacagcccaaatgctcgtggtttgagagaaacttcagagccagctggcagagttaacttgtggcgtgactccccaggaaggctgaggtgggaggaatccaggaccaaagacagatgtttccctggggatgtgcttggagttcacacaggggaaggccaggagtcaactttcttctaaggcaccagagacatctccaacccatcccacaggtatccaagtctcctaagggtcaacggacgcacagcatcccccagaaagggagaacttgccaaccctactccaggcctctgcatttgtgactcttgccagttccaatgccttcctctggctggctccttctcatcagtcgggcctcagctcaaacctccctagagtggccattgctaatgtacccccaccctcggccaagtcatcctctacctccaatcacctgttgggttttcc

SEQ ID NO: 159459 - DNA, 644 bp, Homo sapiens
acttccaggactatccagaataattccctaaataaggcaatgctttaaaaaccagccagccaaccaacaaacagcaacaacaaacaggatgagagttgggttctcatatctgattcaaaagcacataaacaatggaaaataaagtcttggttacccacatgatatggaaggggaaaatacctacagcactgaggaaaaaatataccctactgtcactaaatgattcttagcatgagcagaatgggaggtggcacattgtaagactatgagggtctacttgtcagggtacttctggttgtaagtgaaacacttcaaaataatgttggtttaagaaaagaagacatatattaggtcaaagagttgacagatcctgagtggtttgatttcaggcatagctgtatgctggcactcaagctgtgaggatagaaatctgcctctttttatcagctgtaatttctgtgtttatcactgaaaggtccacccttgcatccatgtagaaataatccagaaaatagatacttgttcccagttgttccagtgtaagtcctagggctgattcatacagttctagccagatgctaatatcagtttgggtcacatgcccattcctgaagccagaaaatagaacattctccttggccagg

SEQ ID NO: 159460 - DNA, 426 bp, Homo sapiens
ttctggggctgacagagatttgaattctccctggcatggaggtcttcaggtcctgccaagtgagtgacctcccaattgggtctccagccacccccaccggtgttcttgggatgacagagatttgaattctccctggtatggaggtctcagcgtctggcccagtgaaggacttcggcctccagccacccctgccagtgttttggggctgacagaaatttgaattctccctggcatggaggtcttgaggtcctgcccagtgagggacctctcaaccgtggcctccagccacccccaccggtgttctcgggctgacagagatctgaattctccctggcacgtagttctcaaggtcccgcccaatgagtgtccttttagctggggtctccagccaatcccactggtgttctcaggctgacagtgatttga

SEQ ID NO: 159461 - DNA, 491 bp, Homo sapiens
gatcgagctcggtcctcacccacaaacccctctctagccctcttagcacagggcactgatataactcactttcagcttgtttctctttgtctcccagcccctagtagaatgtcggctccccagacagggaactttgtctgttttggcctctgctctgtccccagcacccaggacagcaccggaacacaccaagcactcatgaaatacagagagatgccccttggcttaccacgggctcatcatatcccataaacccagtaagatgagaagatcaaaagtcaaaaatgcattgaatgcacctaacctagcaaacaccatggcttagcccagcctgccttaaacatgctcagaaacctgcattagccttcggccaggcagagtcatctagcacacagcctggtgcatcatagagggctggccgtctcatgtcattcgctgaatgctgtactgagagtgagaaacagaatgggtgtgtggatactggagggtgt

SEQ ID NO: 159462 - DNA, 149 bp, Homo sapiens
attttggaaatcacaccggtatatctagtggctttcctgggtgtatgtggctcattactgattataattttctttgggaattttagtttaaggggatggggtaagcactttcaaattctttgttgttagtagttttgatggaggatagg

SEQ ID NO: 159463 - DNA, 734 bp, Homo sapiens
acagggcacatccccacgtcaatctgagtccgagaggctccccagagcaggggacattgcagcagctgacttgacttgggaaggtggagtcagtagtcaatgcggaggagggaattccaagagggaactggatatgcaaagacacagaagcgggcagctggctgcactggggaaacaaccgatagtggtacatggggaggaaggaggacaaggaaggagaggcagggcctaaactgagcctaatgccaagaggacaagcagaggaattttggtgatgcttgactttacacatcctaaccagtgtccaggatgattccagcacaggggaggagtgtgaagcaccctggagggtgggaaggaggccggaaaacagtcagtgttccattgtgcccttttgggcctgcgtccatctatcttgggagacaggtcttaggaaaagaaagattttattgcatctcccccttctcccaagttaacaagtactggtgggaggagttcagtaaatatttaagtttataatagaaatgacttattagggtaaacgtgagtgttgacagaggaaatccacagggaggccttagaacctgcctgccacagaagcgctgcagaaacgctgcctgttgctcctattcctattattgtttacactgaagaaagaattggggtcagcctatatagttcagtgccacattcgtataatcaaggcatcctttttatgtgatgagagcattggg

SEQ ID NO: 159464 - DNA, 387 bp, Homo sapiens
agttatctttcaattttaactttacctagaaactaaaagatacatttctcagcactgagtcaatttacagatgaatacatgtgggtaatttaatgtatgtgaagtgaacttcaaattcgattttcaatatggactaagaaattcaaaaatacttgtatgaagagaaatgccatatttaagcataagaaaagttaatgtgtttaaaagaaaacaacttacaaaaaaaaaaagacaaaaaaaaaaaagaaaactttccaagtagcaattctagcatagccaatagggaatttaagaaatttgaattcattcatacaagtttattcaagtatttaccaatttctcttaaaaaaattaagaagaaaagaaaaaatagaataacttactcta

SEQ ID NO: 159465 - DNA, 277 bp, Homo sapiens
attccaggttgccagtttgtcagttgtgggatcatttggcaatctagaggagggccttggagtgccctctgaggttgctgtcccagctagtcccttcctcagtcttttttttttttttttttttttggggaaaatgaatttccaacagttggctcaggctgtcctcaaactttctgaccctcaagcactctcccgcctgtgcctacagtcctccacaaagtgtgcgggaactttacagcgactgtttgccacacatgtgctgtggtataatttttcc

SEQ ID NO: 159466 - DNA, 385 bp, Homo sapiens
ttcaactaaaaaaagcacaacatacttttaagttagtgtctgctattatttttctgaaattttatgcctgctgccaagtactgtgtattttaagaaatctctcattgaaaattacttaaatgaaacagtaacccacaatccttccagcaaagattgagcaaaaattgatgctggtagacttcaaggaggacgtatcctagagtctcaaacagaaatggaagtgacactctttaggggatactgttgtgctctggagcattgcgtgtcatcttaaaaaatccttgagctgccatcaaaagagaagacaggacaagaggaagtgaggaggcctgctcttgttcccatatttcccactgctctcccacaagtattcacttctccatgg

SEQ ID NO: 159467 - DNA, 521 bp, Homo sapiens
ctcatcctccttcccctcctgctctctttgttcatccttttggataaggcctatgttacactgcccatatgtcacgcactaacttcatctccaatttctctccaacttgtctcctgagctgcaatcaagataatctacttgctgtaacctggaagtgacttactcacaagtacctttgttcatgattaactatttatcagcacaatcctccctactttgtctctgctaacccatagctaccaccaatctcaagtcccctcttttgtatgtgttggaaagtatataacttaactacatatcattgttttcatcttataaccttatttcttttgtatttgtctcacagtgtgtattacagtgtttcctaactaaggccgtatatcacaatcacctatggagcttcctaaaaaatacgaaggcctggccgggcacagtggcacatgcctgtaatctcagcactttgggaggccgaggcgggcaaatcacaaggtcaagagatggagatcatcctggccaacatg

SEQ ID NO: 159468 - DNA, 557 bp, Homo sapiens
tcagtcgcccaggctggagtgcaatggcgctatctcggcgcccaggctggaatgcagtagcgcgatctcagctcactgcaacctctgcctcccaggttcaagtgattctcccgcctcagcctcctgagtagctgaggcaggagaattgtttgaacctagagggcagagcttgcagtgatccgcgatcgcaccactgcactccagcctgggtgacagagcgagactctgtctggaaaaataagaataatgaggaggaggaggaggaagatctcaaataaacaacctaactttacacttcagggaacaagaataaaaacaaactgagcccaaagttagcataaggaagttaataataaagattacagcaaagataactgaaatagagaacagaaaaattaaaaaaaaaactcttgggaggccgaggcgggcggatcacgaggtcaggagatcgagaccatcctggctaacacggtgaaaccccgtctctactaaaaatacaaaaaattagccgggtgtagtggcgggcgcctgtagtcccagctactcgggaggctgag

SEQ ID NO: 159469 - DNA, 457 bp, Homo sapiens
gctatgtttccattttctacttttttatgcttcttctcttctgttccttcagtggtggtagcgcggatgttcaaattttcagttctcagtaaagattgtatagacagtcccacggtcttcaggtttttactctgtgctacccaaacctacagtaaatactataaaagaaaacttattcaaacgtaatctttatctgcaaaaactttattgaaaaacgttaccatttaactattgctgtaatatagggggttccttgaaatatgataacctgcttgttatagctacttcagcagatcttatcctgttgcatagggtatcagcatatgcttaatcatttaggtatattattctccctttatttctttctatgtaaacatagaaaaggtatagtaatcatacatagaactgacatgctaggtattggaatttttgcttcagccctgcaaacaatctttca

SEQ ID NO: 159470 - DNA, 273 bp, Homo sapiens
attctacaagttatgaggaaggttaaataaaaatttctaataggaaaagaataatctttggagccaaattgtcctggatttactagttcagtcatgaaaaaaaatgtgcactgaagattgtctgtgatcatgagcaacttgagttttgttgtcatctgtgttacaggcatatcaatgcctacatttggttgccagtttccaagatggtccccaatgatcgtcatcttctggtattcatgccattgtgtagaccctgcccatattatgtaggga

SEQ ID NO: 159471 - DNA, 400 bp, Homo sapiens
cattcctttcttttttcggttctgttgagctagttctggcttgtgtgaaccaggcttttaccttttagctcctgtgtgtctgggctaagtgaagtcatagataagatttttactgaggctttgaaaagactgcacattgggccttgctgtcacttatagaatatctcagaaaggttttgcttcttgaggatcatatgaggatgtgggtggggtggggcttggctgtgacaggcaactgtgggacctcagctatctttttattcatgcctccccctgaatttcagaatttgcaggtccatgagcatgccagtattaaatccctggcactattctttgaacatgcccaaacaggacagagctttgctctatgagaatgtggtatttctgggtaatagttgat

SEQ ID NO: 159472 - DNA, 615 bp, Homo sapiens
gcaaacttgggttgggggctatgagctgagctcatcaatgaggtgggcacaggagagcattccagtgtgacgacacggcatgtgtgcctggatgaggctgcagcctgagacctgggcgacgtgcatgggaatagatgacgactttacaatctggtttctgttaatcaggaaggagaggaaggaggaaaaagaggagaaggagaaggatgaagaggaggagacacaagggtggaagaagaaaaaagaggaggacagatgaggagggggaagaggatgatggaggaggaggaaaagatgcttttggtttctgtgagctgtatatgatttctcacctggctattttgaaatattgaaaatggcactaagacccacccctgcctgctcctatctccacccagaatgaaccttcagagattttcagggttgagagcccaccatccccatgctagttctaaaggaagaactacttaattaggtcctgggtgaactggtcaagtcaccttcttagttttctgtttgtgaaatggggacaaccacttctacccatcataatttttgactcctgtcagctcatgttgaaaatggattcaccatggatgagtaacccagagtgtg

SEQ ID NO: 159473 - DNA, 209 bp, Homo sapiens
ccgagattgcaccactgcactccagcctgggctacatagcgagactctgtctcaaaaaaaaaaacaaaaaacggagtgcaatcctgagccctcctgagctcccaggtggggtgcacaaagccattgcaattgcactgaacccaacttcttcagcttcaagcttctcgttttctctctgggtcccacaaccccagcaacctctacactaa

SEQ ID NO: 159474 - DNA, 148 bp, Homo sapiens
tgactttaaacagcaccctccagtgatctgtgctgttcagtatagtgtgtacctgccacatgagcaatgagactggagagctacgttttaaatgttgtttaattttaatttaaatgtaaatggccacatatagctggtggctaataca

SEQ ID NO: 159475 - DNA, 561 bp, Homo sapiens
tataagttccactcacatagagcaaacattctcatgaatggcacttaagattttatttcttttatttgtttctagcttttgaattgtatcaatagccttaggcttgtttaataatatgcatacatagctgtataatatagaacaattagaatgggcttcaggttcttgaaagcacttagagacacagacagccacagaatgaatccatgggctgttctactcttcattttccatcaagcttgttgaccttagtcttttgacataatgtattgtggctaaggtttcggacacttgaacttctctaatcataaaatcgtggagatggtttagttctcatcacttttatctaaacatgatataatacatgggaaggttttttgatctttttatcactccgtgtgtagaaacagctaagtgtttgcagaccactgtcttctttcttagggtagatgttcagccttctccgctgtgccaaggacatgaataggtatatagagtcctatgcacaaagctgctttcttaactttaaatatttttcaaaatctatcttcttcatattgc

SEQ ID NO: 159476 - DNA, 363 bp, Homo sapiens
tatcacagaatccccacctgggggtggaagcttacacgtttgggtctcagctatgaaacagtttcctgtaagccatgatcacatcaggatatattatgatgacatgaatgccaatcaatactagatttaggcctggctctggtggacggtgtgtcttaaatgttcctttagcaaagctgtccaattattcctccccttccaagatcatgagtcagaatttgacgttagaggaggtggagccagatggctaaagagaaccctccagcgatagtcctctgcagcaacaccaaactcagctatccatgtaagaaagtatctacacaagagccaaaaaaccaggtgagagatcacagtatctggttt

SEQ ID NO: 159477 - DNA, 350 bp, Homo sapiens
agagttttcatatatttatctcaaaaactcctaatatataaggtgaatattcgttacataccaatgaagtattcatcagaaatgaaattaagtcatagccacagttatgaatccagatggccagctattatctcatactccctccctaaggtattaactttttaagcattcaaattacttttttttgtcctgtttccttccttaaactacagttttctatttctagcacaaaatacaaacaatttccaccacttttctacataaaaattttggccttagccataccactaacaatcataaatccagaagtttctagagcataaattaacaagtgcttatatgtaattaca

SEQ ID NO: 159478 - DNA, 467 bp, Homo sapiens
aagaagcattcaatacacaccagtctcccaaactgcaggcatttccatgcaaagtacctgacaaaacacttgggtacatgcttccattgttgaaatttaaccttgtcattgtccagtctcaaaatcagacaaactacctgtcatcaaagctaattattgccttttaaaaatcagatattaggccgggtgcagtggctcacacctgtaatcccagcactttgggaggccaaggtgaacagatcacgaggtcaggagtttgagaccagcctggccaacatagtgaaaccccatctctactaaaaatacaaaaattagccaggcatggtggcgcatggctgtagtcccagctactcgggaagcggaggcaggagaattgcttgaacccgggaggtggaggttgcggtgagccaagatcgcaccactgcactccagtttgggcaacagagcaaggctccatctccaaaaaa

SEQ ID NO: 159479 - DNA, 427 bp, Homo sapiens
gcgaattcactagtgattatccccgggtcttgggtacatgcttccattgttgaaatttaaccttgtcattgtccagtctcaaaatcagacaaactacctgtcatcaaagctaattattgccttttaaaaatcagatattaggccgggtgcagtggctcacacctgtaatcccagcactttgggaggccaaggtgaacagatcacgaggtcaggagtttgagaccagcctggccaacatagtgaaaccccatctctactaaaaatacaaaaattagccaggcatggtggcgcatggctgtagtcccagctactcgggaagcggaggcaggagaattgcttgaacccgggaggtggaggttgcggtgagccaagatcgcaccactgcactccagtttgggcaacagagcaaggctccatctccaaaaaa

SEQ ID NO: 159480 - DNA, 742 bp, Homo sapiens
attccaactagtatctttagctcctgacatgagctgttctactgtgggctcagcccttgtctgagactgtatccctatagggtcccggtcttctgttgacccctcaccttctgtgggcctgggcatggacctctgatccttccatctgaagaagctgtcaaaataaaagtccatgcttccgggaatcaggaagtcgcctcaaggcaaaagtagctgagtgtttctatatctgttttgttttcctttctatcttctctttttggtgggtaattcttcaccatcttgttgattctttaagtcttagcataacacacattttaaaaatccagttgttttagttgctttctgtcaccatagaaggtcaccatggttctcagccctgtcggacctggagcctggtaccatgaccagggacagggagtcctcatgccgttttaagcagtggtgatctaagttttatttcttaggtgagtcaaggtcggaaaagcttgagacccctgctctaggggctgtacctgtccctttctgccttttctcctgtctggactagggttcgaaggggctggtgggccatgtggagaccaagtagctgacaatccccaggacctgtgggctcagacacagggccctgcacctctcagcccttccggtctcagctcagcacctcccttgcctggcccctctttcctgcatgagctccctgcccctgccaggaggaacctctgtcctgtttctagatgcg

SEQ ID NO: 159481 - DNA, 103 bp, Homo sapiens
tcccagattctgctgcctttctatttttagcctctcctaatatccaataatttcccagttcttccttttgttctgtatctagactctatcctaaagttatgtc

SEQ ID NO: 159482 - DNA, 388 bp, Homo sapiens
tggcgttcagaggatcccccaagcgctgctcacatctattctggaccaaatcaccaagaaaagccacagctctctcatttctcagatgttacacacattaaagagcacaacacaattacaacgcaaatatgaggcagaaaaaaaaaggacgctgtgaaactgaaaatgttatagaagatgggcaattgtacaagttcaatggacattatgttgaagaatactggaagtatgcccatgtcaaactaggatctgggtgagtcagactaagaatttaagaaggaaaaagcaacagggacctaaaacccactttaaaggaaaaggatctccatttcaaccaatttggagagagctctgggaaaactgcttaagctctggaacatgttttgcg

SEQ ID NO: 159483 - DNA, 158 bp, Homo sapiens
ctggaattcagaggggagaacagcatccattgagacagcgggatccaaggcctagtcggggttagggagtgggctagcgaggagcccttggttccaagagcaggaggggaagggagagagaggacacaggaaggcagggccggaccctccaggaggct

SEQ ID NO: 159484 - DNA, 437 bp, Homo sapiens
cactgccacacgtcaccccttccctgagtacgtgtcctcccggtgctcagtgtctcctgtatggggcagtgacagcaatggtggccttcagggagcagctcagagtcctgtcagtgatctggctgctgccaagggccgtcccaaccccaaacttggaaccctcatctaagcaaccctcagagatgtgatccctgagacctggcaggctctgtggcccagacagagaagaacagatggtgacacttagtctgggcttcctatgagcccggcacaggtctcaacgctttacacagacgaactcgtttaatcctccctccaccccagcaattagtctcatacaaaggacaaagaaactgagggacagtcatgtcaagtgatttccccaggactcgtcgaaagtatatggcccaggctcacacctgcaatcccagcacttt

SEQ ID NO: 159485 - DNA, 286 bp, Homo sapiens
agattcctagaagactatgagttctctacaaacgaaacttgcaaaaccaaccattcagctattcaaattttataaacatcatctatgaagatataaaaggcatgcttatcaaagagacctaatacaaagctgggagaactaacacaaagtctctggctaattaagattaaaataatgtctgtaaattgaaacaatgctaaatgtaataaagtggaacataattggaataaagccctgaattcaatatttttaaaacactgcataagcataaacttccagtaaaaat

SEQ ID NO: 159486 - DNA, 321 bp, Homo sapiens
agctgggattacggcatgaggcaccatacctggctccagaagtgccttctaatacaatgaagtgcttttctggtattcatgttaaaaatgcatgacccaaaactgaggggcattctacaaaatagctcatctgcactcttaaaggagactaaagaaacacaacaacctgtctctatgaaaagcacaaaaataaataagtaaatcagccatgagcagtagcacgtgcctgtagtctcagatacttgggaggctaaggtgggaggatggccttgagcccaggaggcggaggttgcagtgagccgagatggtgccacggtaccc

SEQ ID NO: 159487 - DNA, 336 bp, Homo sapiens
caccctgattacaagataacataaacaatttatgtaccactaggaaccctaccaattaaatgaattcatcttgattccaatgacataaaaatgtaggagaaaatgtgtcttttagattaggtcaattttggcatataatttaaatgacaactgaaatacaaaactcacctctgttggtctatgagctactttctaataaagcaccatagaagcttaacagtgtttgaaaagtactaatatgttaatgttatagcagtaaacttgacctcgatattttcattttaaaagtttattattattactattttttgagatggagtctcgctctgtcgccca

SEQ ID NO: 159488 - DNA, 215 bp, Homo sapiens
tcagtcaaggagttaagtcagaagacgtttcaagatgacagtaaatcaaagaactgcagataacagacagctgactgtttaggggcttcaccagtgcacaaccgacagagagatccaatgaagggagggactgccccagagtccacttcggcccaccccactcacacttgacagcctggcacagctggaaggccatgtggcgcacttggtggatg

SEQ ID NO: 159489 - DNA, 256 bp, Homo sapiens
tgtagaatacaattaaagttaatcattaacaagatggacaggtagctggatgttgtggcaatgtcagactatagtttctaaatacatctttcaacctctggactcatcacaggtaagtcacaaacagtccacagatcaccactagtcactcctctctggcatgaagtcactcgcctgctgatcccacactaggacaatcatcaactctcattaggaggaggcctagggaggaggcatatgcagattgctcagcgct

SEQ ID NO: 159490 - DNA, 332 bp, Homo sapiens
aagagtcctccggaatgggtgactgtatagaaagcaatcgaatctttaatcacttttcctactttacacttcacgcagttcttattcctatccctgcttcatgcctttccaagagaatgttagaggcctctttcaattttcatttctcagtcttttccccatcccgttcagtaccctaaacttcgtcagttatttaaaataaccttttaccccctcctccccttcccaggatgtttcaacttctctggctctcttccccatccttacctcctccaattctttcatcctggtcctggcctcttaaacccgccaggggctgccctttgcctgtc

SEQ ID NO: 159491 - DNA, 325 bp, Homo sapiens
aagtttttctgactccaaaattccatgacaagtctaataacagttgctattaacaacgtatgattcttgcaaagcaatttcaagtctttcttccacatttcaggaagaaagcaattcatttcagcaatctaaaggaaacagatgctattagggacaaaagattgttagttgaccagaccgggcgcggtggctcacgcctgcaatcccagtagttcggaaggacgaggcgggcggatcaccagaggtcaggagctcgagaccagtctggccaacatggtgaaaccacgtctctattaaaaatacaaaaactagccgggcgtggcag

SEQ ID NO: 159492 - DNA, 164 bp, Homo sapiens
ggagtcagtccatttcagcattacctacaggctgaatgtacaaaattatttttgataggttaatctgagaaatctggctgaagtttagcctaattaggtaacggtttttgaaatatttggaagaagttgtccattcttcagtatgtttttacatctttatttta

SEQ ID NO: 159493 - DNA, 201 bp, Homo sapiens
aatatccagcaaccccatgtccctgtcctcaacacttgaatctttcttcctagccacgggaccagccccaccagctcgctgtgaggctctgcactcagcggtcagggaaacccagagcacgggctgccagcccaacgccagccacagggacatggagttgctggatatttctgccccttctcaccttgtcttgtccgtgcc

SEQ ID NO: 159494 - DNA, 584 bp, Homo sapiens
tgtgatcccagtgaggtgtgaactagaaaactcaaagcatgcctcacacattgcctgccaatgccttacacattcctgtcttctgaacatgttctatatgctttcgctgagccattacccgtgctttcctaccttccaccacagcaaaggcagcaatctggcattttgtgtaaagagcagtagtgatgccactcacttgagggcagagtgcactgacgtggtcctcccttgctctcccaccaacccttggctgtttataccacctcccacctggcattgccagctcttaagtacgtgtatctctgccttatttcactggcatacctcactgaagtcacagactctgtcttaatcatttctgaatctctagcagctggcactgtgcctcagtcatagtaggtactccataaatatgtgctgaataaatgaattattgaaaaaatgaaccaaacaatctattaatcagtgtgaaggggcttcctaagtttacatttctaattatgaggatgaagtttatgatgaagtgtgaagtttatgatgaagcatggcttttctgaacagagacattgcaatatttaaaacag

SEQ ID NO: 159495 - DNA, 136 bp, Homo sapiens
tgaaaggctgaggctgcagtgagctgtgatcataccactgcactctagcctgggtgacagagcaagaccttgtctgaaaaagcaaacaattttttaaaaagaaatgctataaataattgcatttgtttcatgtgtt

SEQ ID NO: 159496 - DNA, 134 bp, Homo sapiens
gccttcctgttttctttttcctgctaggcaactataaaagccccaattcttctaaccttgcaccctgcctgtaactccatctctctctcttactttctccattggttagctgaaagagtaggagtaagcactct

SEQ ID NO: 159497 - DNA, 556 bp, Homo sapiens
accagcgggagagcaagagtgcatgaaaacgctttttcttccccacacagggttatgaatgtgtgactaagcgcagaggattaggttgagcgtcaaaagtgatgttaagtcttttagtgtggttgactgggatggtgaagccactaaaagagggaacacagaagtttttgtggactttgggacacttacattcaggagaatcaaagggactgaaagagaactgggatggaggagaattagaggatggtgtggtgtttcccaagacatcccctgatcttgctatcccagcatctcctagaccttcccaagatccagcaactaaaagtataacacttgtcacaagaaggctaaggttggcctatgttctaatggggggtgatgtgggggtaagatggggagtatatgggaacacaatcacaaactaaagcttatatactaacacttttttgggaagttcaatgtcaaggaagttggagtgagcaggaaagggaagtgaggcaggaagggagacagcaaatacaagagagaacatgaagatgtgacgcggtgtattccg

SEQ ID NO: 159498 - DNA, 496 bp, Homo sapiens
gcatgcttgtgacttccgggaggacaagcccaggcagatcacgctcacgctctctccttctgtcacttcctcctacaaggcacgctgggccactctcctgcttcatctcaagagcacttaggggaacagaaaccactgaaatcagttactaggaggactccacggtgataagctcagcaatgagaaaaggaactgacatttccaacacaaattcacttatttagtcaataaatgttgagctgaaaaacaataaaaaggctttcaggctgaccacgatggaagcaccaggaagcacctcgaggatgctgggaggcagaggcgggcggatcacctgaggcctggagttcgagaccagcctggccaacatggcgaaaacctcatctctactaaacatacaaaaattagccggaaatcacttaaacacaggaggcaaagattacagtgagccgagatggcgccattgcactccagcctgggcaacagagtgaggctctat

SEQ ID NO: 159499 - DNA, 302 bp, Homo sapiens
aaagacacaagggcatacggatgtgcggagaaggagaggaattcgtctggttgaaattcagtgattctccataggcagttgcagttattatggctccagctatcaaattttactgacatttcccaatctgattctggtttttggttttttttggagacagggtttcactctgtcgcgcaggctggagtgcagtggtgtgatcacggctcactgtagcctcgacttcccaggctctggtgatcctcccgcctcagcctctcaagtggctgggactacaggcacgcaccaccattactggcccg

SEQ ID NO: 159500 - DNA, 466 bp, Homo sapiens
cacacacagctgggaaccctgggaagtcacagcaaactgactcaaaaagctcagagttggccaggcgcagtggctgacacctgtaatcccagcactttgggaggccaaggcaggtggatcacctgaggtcaggagttcgagaccagcctggccaacacggtgaaaccccgtctctactaaaagtacaaaaattagccaggcgtggtggtgggcgtctgtaatcccagctacttgggaggctgaggcaggagaactgcttgaacccgtgaggaggaggttgcagtgagctgagatcacgccactgcactccagcctgggcgacaaagcaagactctggctcaaaaaaaaaaaaaaaaatggccagaggtattcgggaaagtatcagtcacaccaagaccccagacaaaaaggacatcctatgagactcccaggagaggagggacctcaaggctgcgctctctgtgac

SEQ ID NO: 159501 - DNA, 110 bp, Homo sapiens
aacggctctactttccgacctggctgcactgcaactagcccttaaccaaggtgacctagcagccctcggtggctccatccacctgtggcttcctccctccaaggaccctg

SEQ ID NO: 159502 - DNA, 108 bp, Homo sapiens
gtgagtccacctggtgcagttatataaaataccagcacgcacgcaaaaacccttcttttggttttggttttccctctaaactggaagtagactcaggagcgagttttt

SEQ ID NO: 159503 - DNA, 277 bp, Homo sapiens
catcctcgtcctttggtgttatcacccaaaacacatctaaactcacaaggtgacagatattagagctacaaaagaaactttcggaaatgttcatctttattgttaaaaatttaaccatattaactatttattgccttaaggactagattccatgctgacataattttgtagctttgtttattcagtgatatctttgctatttcagggaccattggagctatttctgttacagttcttggaggaatcttaacagttctctttatcaggggtcagcaaa

SEQ ID NO: 159504 - DNA, 326 bp, Homo sapiens
cctttgttagattagggaagcaatgttttccgaatttagtggctttagcattacccaaagagcttactaaagattattcttaaggcctaggaatctgcattccaagagattcttgcacaccacagacattttcatgcaaatgattcttgaactacacttggagaaaccctgggctgtggactgctggcctctttccccttttcatttttagtgtggcacagaatatttttattctcttcttcccaagagttctgaagtagaagattgccctgtccccatgattcaagagttaatggcaaatttccgttcttttcttttcttttttt

SEQ ID NO: 159505 - DNA, 552 bp, Homo sapiens
gcagctgcatctctgcagtctctctttgctgtcacattttcacattgtgttaagaggacaatagccatatggaattaaggacctgccctatctcagtataaccttgtcttaagtcattatatctgcgatgagcctattttcaaataagatgtgaagttttggggctgagactttaacatatcttctttggggtaccaccattcggcccttaattgtatggtagcaagctttatgtctgtagtgtgggtgagagtagtatggttgtcaagcagtagggtaagaaagggaaggaaaggatcacaaaaatcaaatgactcatactgtattagatacttggaactctccagcctcgagactcaatgataaagattcaccgacgacctggggaagccctcttaattcggcagggataatcaagtacctcctgtgccagaggtccctcactggaaatgtttaaaaagttacatcatttattcttaccagcccccaaactcccttttaaaaagccctcagctgggcacggtggctcagcattttgacacttgtgatctc

SEQ ID NO: 159506 - DNA, 301 bp, Homo sapiens
ttttttccaggggcaaggggctcatattcacacagatgggagtccagttggtgagaaggtggcaggtggcacagcccccttatacagcatgccatactggtccactgtcagaccggtgatggccacagctccatcacccccaggctgactctggctcctgcctggctctgcccggccaccacaacccctgggaaccattcagaggcatcactggagggtatgtggttagtggagcagctggttgtggggaggtctcgtttctttggtggaaggcattcctgactcctctcatgaacaggtt

SEQ ID NO: 159507 - DNA, 363 bp, Homo sapiens
acgcctgtaatcccagctactcaggaggctgaggcaggagaatcacttgaaccccaggggacggaggttgcagtgagccaagatgacaccacttcactccagcctgggcaaaagagcgagacttgtctaaacaaacaaacaaacaaaaaactgcataacaatcttatactgacctacattcccatggtcataccatggatcttgtcaatactcaaaggaacttcatctgtaaaatcttaaactccaaatatctcattctcagatgagaatgtcttattttcacccttttcctatgctttggtcccacctaaactgttttcctgcattgttgaggcctcacttcctaattctcccagtgatcag

SEQ ID NO: 159508 - DNA, 444 bp, Homo sapiens
tggagagagtaggatggtttcgggggaagacgttgggtggcattccctggagagagtagaatggtttcgggggaagacgttgggtggcgttccctgcagagagtaggatggtttttgggggaggacgttgggtgacgttgcgctgagtgttttgggtttgcagttggtactgatcatcgcgtcctgtcctcattttgttggaattaaaaatacgttaatcacagaggtctggtaagtttccagagggaaggtctctgaagtggagctgggtactgccccagggttttggtggggttggtgagccgtagtggtgcagagggtgggctctggcaccaggtggcccgggcaggtcctggctctgcagctcacccgggcagctgtgggctggcagcctcctctgtctcacccttcttacatgtaatatgggagtcataacagtagcca

SEQ ID NO: 159509 - DNA, 417 bp, Homo sapiens
tagatttggaggggcagtgagcagaccagagtggattttttgtgaaggagagaaatgggaattgagaggacatgagatcaaattatgtaagctctttaaatcagaaggaagaatttgtactttaaggtgatgggtattgtgagctattggagatatggctgcaatacctgtcatctcttagtcaccagatctttcttccaacctcttcggtctgtctggttttctggtcttctgctaccatgaagtcagttgaatgttattcctcccccaggttgctccaggagcctcttaactgatctgttcacatgctctgtcttgccaccttccaatccattgctcacactgcagccaaagttacatttttattttgtgtttttaactaattcagattacatcacttcccagtttaatatgcat

SEQ ID NO: 159510 - DNA, 229 bp, Homo sapiens
tacaggcttgagccaccccacccagcctgaagtttattctttctttttgcttggttgaagcacaaccaagcaaaagaaatgtgtttaaaattatgatcacagaataagtgttacaaatttttcagtggtaacttaatccagatagtaataacccatacattaatttcttgcctttctcttgtatggagattatgcacaggagtttggaccttattctgtagacagttgg

SEQ ID NO: 159511 - DNA, 532 bp, Homo sapiens
ctagaaaaaccatcaaccctaaatgtattatggaaccagagaagagcccaccacagcccaaacaatactaaacaaaaaacagatctggggttatcacattactggactttaaattatactacaaggctgtagttagcaaaacagtatggtactggtataaaaataggcacttagtccaatggaacagaatagagaacccagaaataaaaccaaatgcatacaactaactgatctttgacaaagcataccaaaacatattttttagttttctgaggaaccttcatactgttctctgtagtggttgtactaatctgcattcccaccaaaagcatatgagggttctccttctcatagctttgacactgtataaagacactgtataaatacaactatatttgcctcttagggaatcatattgatcagtcttatggagaaccaggaaacttgcatttacttagttaaaaatgtatttgtcaagcattattttcacaccttgaaaacaaattttctacataataatttaggtaaaacg

SEQ ID NO: 159512 - DNA, 292 bp, Homo sapiens
gtttactttgacacccagtataactaaaaggatcttttgagtcagagattgagtaacttgccagagcctgtttggaaataaaccctgaggatttttcatatcagtggttggttatgcaatgtctgtggcaagccctagaaactaaaagaccaaaccttaaaatgttaaaaacaggaaaggcagttaattattatacataatttgttataaaaggaactataacttattaaagtcagatgatttctggccttgatagtttagggtttagagaagatactgttgtgtactataa

SEQ ID NO: 159513 - DNA, 509 bp, Homo sapiens
ttcatcttagggtctttctccacatagccctgtaccctgaatatctagctagaactgtgttccaaggaagtgatcataccgttgtcatctaatttgttgctgatgcagtagtttaatctgtttctaattttacttgtttcctatcagcctcaagctatgtaaactcctaggaatagcaggtcaggcagaggaactgtgagaagtcagagcagtttcctcccaggttctagcagcctgacacgaagagcaggttacagaggggatgttgtgagctttgagtcccgagatgtgttcccagaggccctaaggactccagtgttggccagggcagatgcaccctgaatagcttgcagaaatcctgcagctgtcttagctctgaggagtctgtgacctggagtaccttgggttaaaagaggggccatctccgggcggatcacgaggtcaggagatcgagaccatcctggctaacacggtgaaaccccgtctctactaaaaaaaatacaaaaaaa

SEQ ID NO: 159514 - DNA, 229 bp, Homo sapiens
gaagcttttgcttcacaaagcttttagtttttggcaggacaagttgagggggaaagggagaaaaattgggtagaatagggacagttgtataaacagtataaagcatcccactttgagtactttaatgtcaatatatttttcaaaaagtttatagtaattgttttttctatttttttgagccagagtctggctctgtcgcccaggctggagtgcagtggtgcgatcttgg

SEQ ID NO: 159515 - DNA, 352 bp, Homo sapiens
tatgttgcccaggctggtcttgaactcctgggctcaagtgatccacgcacctcggccttcccaaagtgttgggattacaggtgtgagccactgtacccgtcaagtgtttacatttcttacatgtagagcagctagaaagcaaagggttgattagtgtattcgaactccctgttttcatgttgtattaggttgacaacatggagattgcaggcatttacgtgtcctgaagaatctaacagcagaagagctggtgtatgtaaatgtgctgtgcttggccttcccagacacaaatcactgttaaactggggaaggaatgggaactgtgagggcactgggtttgtggggacttaac

SEQ ID NO: 159516 - DNA, 572 bp, Homo sapiens
ggggaggaagccctgccgttgagagataaagtggcaggaagtccagtggggcactggctgttgtcagagcatccacgtgaagacgctggccaccctgccagcatcttatgaacaggggtaggagagggtgctggatttcattccccaaacccaaataagatgcatttgcttctgccgtctgggccagcagcattgcactgacacgtgcaattcatttcacctttcctttttggtgagctgtcttgcaggacggtcctcttcatgtgctcatgctgtgggtggtggaaagggtgggcatgccatgctaagctgctgagtccctgtgcccctctgctgtttgtagccagcattttacaggaggttaaacaaagaggccacagcatttgggagtggttttacaccacgtttgtgagcagaattatattcacaaatgcactgctttaacattacatgtagcctgcttcgagtgtgcttagttgatgcctgacaaactagcttttgttgctcattgtaaaggcttagagtcaggtccaccaggggacttacgatgggtaatctggaagtggacttcg

SEQ ID NO: 159517 - DNA, 233 bp, Homo sapiens
  misc_feature (32)..(32): n is a, c, g, or t
  misc_feature (36)..(36): n is a, c, g, or t
ttctggtggtgatgggtctggcttcttccacngganaatcctggtggtgatgttcccatttcacatactgagaaaacacagcagagaagctgtaagataaaatgactctgagaccacaccttgaatttcataccttgaatttctattgcgtcgctcttctgagaagcttggaacactcacccaaattgtgaaatgacttggccccgtcctcacagtcatactgagaccaggaa

SEQ ID NO: 159518 - DNA, 193 bp, Homo sapiens
ctggagctacaggcatgtactaccatgcccagctaatttttgtattttttatagagataggcttttgccatgttgcccaggctggcctggaattcctgagttcaagcaatctacccacctcggcctcccaaagtactggaatctctttttttggaatacgtttcaaagcatgtgatagacatcggtacagtac

SEQ ID NO: 159519 - DNA, 178 bp, Homo sapiens
tctcctcactccttttacaaaccctactagttttgaggctatattaattgggattacatttgcctacaaataacactaaaacatttctaaaaagtgatttaaacaagactgtttatttcattctcaagaatgtctcagatagtgatggtggagccacaggcttttttgtttccttgca

SEQ ID NO: 159520 - DNA, 221 bp, Homo sapiens
gccccctgcatgttcctatgtagctttcagaagactatgaacagtgatggaagtagcatacgtaacttctagatatagctttataacctttgcaaattttaacatacctctgtttctcttttttatttttttgtgagtgcagaactttggtgagatgtagtctccatgattctggcttcctaaacaaacattctctcacccattaccagttaatatgaaat

SEQ ID NO: 159521 - DNA, 944 bp, Homo sapiens
tgggttttttttgtaattctatgtattttattttatgcatttaaagtcattattctgaaaagggaatccataggcattcaccagataattgaaaggatccatggcctaagaacattaagaatattcatagtagcccatggctgttagagaatcagaaagccatggtggctcaggcctgtaatcccatcatccaggagcaaacctttgaaagtggtaagagactcaattccattgattatacccatttcgtggtgatcaggaagaagaatactcagtccagtcagagagcagggttgaagattatcaactgcaacctcctccttctgaaggaaaatgaagacatggagttgcaggaaaggatagtttcaaggcacgtggcaaattggcattggaatcaataaataccaccagccaagtctcctggagtcagtcttctcttcattataggacacaacttttcaatatcagacatgaagccggatgatgagagttcctgtctctagaagcacacaggtccactccaatttcttctgcatctcatagtccttgggatgatcccacagatgttggatgatgatgtaatgtggcactgtgcaaggcttctcatcatagggtccaggggccactcgatggccttaaggaggcgtactggtgggagctctttcctgggggcggcgctcaaggggtgggagatgggccccggttccggtccaatggggttggccatctgtggagcgaggaacggggccctgttgtggcatcgggggccgaaaacaagaagggggcgggcacaggcccaaacgcgaaggggaacacagttaggccccccggaaacaagtgcgcgggcgggacagaacaagaggccgaaggccctgggggagcatcaccatggaaagcaacacagcaccgaaaaacagggcacgaggaacaccacgaggggcaaa

SEQ ID NO: 159522 - DNA, 598 bp, Homo sapiens
gagagaactgctgaccacaagggctggaagaggtcaaggccttttgagttttctgatttggagcatcaaggcgtaatgaaacttaatatttattgtgcaccaactatcaggcactttacatgtgctattttatttaattgtgactggagtcattttggaggcttggaggctactgatacgtctggaggctaagcagtatctggaaaagaggaatcatggaaccaatcccaaggattctttaaggaagactctgggcttgacctaaaaatcagaagtcgggccaggcgcggtggctcacgcctgtaatcccagcactttgggaggcagaggcgggcggaccacgaggtcaggagatcaaaaccatcctggctaacacggtgagaccccgcctctactaaaaatacaaaaaattagcagggcatggtgacgggcgcctgtagtcctagctactcgggaggctgaggcaggagaatggcgtgaacccgggaggcggagcttgcagtgagccgagatcgcacaactgcactccagcctgggcgacagagcgagactccgtctcaaaaaagaaaaataaataaataaaaaataaaaaaataaa

SEQ ID NO: 159523 - DNA, 213 bp, Homo sapiens
tggggagttcaaggctgcagtgaactgtgatcacgccactgcattctagctttggtgacagtgagactctgtttcaaaaataaataaataaaaagggaagaagctagggagcccagatgtgtctaaacctacgcccaatggacagagctcaaagtctttgtaacactgtatacaaggaattcaccccaaacatattacctgcacagactttga

SEQ ID NO: 159524 - DNA, 344 bp, Homo sapiens
ataaaataagaattttaaacacacatgagggcctggcatatacaaaacattgaataaatagcagtgatctttttattgacatcagaagggggttggggacccagaggctatttgggctcctatggcatagctcttggaacgtgttaattttcaaggacaggggtttgcaagtcagagcaatgtcaagtaaagaacaggttctttgggaggccaggatatgctaatgggtgaacaatgtaagggaggcataataataatgccaaaggcctcctagagtacctgttcactgcacttttgggtctttggtttatatatgaagaaaatgaggtgcccccagaggggaa

SEQ ID NO: 159525 - DNA, 498 bp, Homo sapiens
gtaagaaaagcagctgtggtctcagtgctttgggaggccaaggtaggaggattacttgagactaggagtttgagaccagcctgggcaacataatgagacctcatttctaccaaaaaaccctacaaaaattagctgggtgtggtggtgtgtgcctgtagtcctagctactaggaagactgaagtgggaggatcgcttgagtccaggagttctaggctgcagtgagctgatcgcatactattgcactccagcctgggtagcaggaaagtgagaccctgtctctaaaaaaaattaaaaagccctccacatatgcagatttcacattcgagaatattcttttttagatccatgtttggttgaaaaaagctgtgtataagtggacccagacagctcaaagctgtgttgttcaagggccacctgagtatgttttcagtaaatgaacatcagaggcaagtcagataacacagcagaaatagagaagaagggtatgtttgtcaggg

SEQ ID NO: 159526 - DNA, 572 bp, Homo sapiens
tgtacccatgcacacctgagtctaagaactctgctgtaaggtgacattaaacagcacctgaagttatatttgagatgattactcagtaatcattgtacagttgattttcgtagtagggattcaaacactgaatagggcacagttttaattaaatctgtatttctcagttgaaactttattttagcagtacatgacttctatttcatgaatcataaatgtcatgtgtcttcacaaactgtagttctgaatttaatttattcaccattttgtcgtcaaaaagaagagttgatgtttttgaaagatgtaaacagctctgcacctgatgttctaaagaaataaaatataccgctgaacccagatcaagcctttgcactaaattaatgtgagtttgaatttctgagtttcagtagtaatattttctatctttggcaatcatttttggactgacgctcattacgttttattctctttgggctttattccatggatttgtaaaggacaccagttcgctttatttctggaagatgtaacacaaattaagtaatgtgcctttgattccaatgtaactgtgc

SEQ ID NO: 159527 - DNA, 172 bp, Homo sapiens
tgtgtgttatcaacacagtctctcatgcctttattcaattaatggttattaggcacctactatgcaccaagccttgtgcatttaaatgaaaagaagtgaaataaggggagtctggaatgtgaggagtggggatgggagtgcattgtaagttaaaatagagtggtcaggatgg

SEQ ID NO: 159528 - DNA, 370 bp, Homo sapiens
ctcggcttttttttttttcttaaagttcccaccagttctctttaaagacagcaccaaaactaaaactaaaaaccaatttaattttacttttaaagcactccccctttttttttaatttttacaataatgaagatcttattctaggatgaaaataatgaataggaaagagctgtttattcttccttcttcccacccctgaatattgaagtaaaactaaataacaatgaaagtgactaggaacagcagacaaggggaaatatgtcagaatgagaacatctcatgtcatctccagggctgggggagaaacatctttcctggtacaaggtcccggtaccgaagaaatacaatttttcaaaaagttctgtaagtg

SEQ ID NO: 159529 - DNA, 126 bp, Homo sapiens
tgccctcttcctgactgctcttctgggtgcagtgagcactctgaattcagactgactgctgagtacaccatttctgactgacagctctggtcacagacagtaggggatggtcccagctcacatacg

SEQ ID NO: 159530 - DNA, 512 bp, Homo sapiens
aatctcacctaaaagggcatctggaatgctgatgttccaccctcaaatctcacactgggtccctacccacggactaagccagggttctggaacaccagtggtccatccatccaggctctagaatgacaacagcctgttcactgcttcatagactgggttctaaaatattgccagttgacctccacattttttattttttgagatggagtctcgctctgtcagccaggctggagtggtgcaatggcacgatctcaactcactgcaacctccgccccctggattcaagcgattctcctgcctcagcctcagcctcccatgtagctgggattatagacgcacgccaccacgcctggctgatttttgtatttttagtagagacggggtttcaccatgttggtcaggccggtctcgaactcctgacctcaagtgatccccccgccccggcctcccacagtgctgggattatagccgtgagccaccgtgcccagccaacctgcacatttttaacattc

SEQ ID NO: 159531 - DNA, 656 bp, Homo sapiens
tgtcttagcagtcccagctagagtaagactccattcctcaagcccccttccacttgttagctttgagtccctaaaccaaatacatatgaagtctccagaagtctatcacctatcaacagagacagagttctcggtatatatagccactggagtccaacccagtaccagttgtcagccttaaggtcagtcaggcagatcagagccagtctagaggtcatttagtccagtctctatattttataggtgaggaaaccgagacacatacaattagtcaatttgggctaggcgtggtggcttacacctgtaatcctagcactttgggagggcgagatgggcagatcacctgaggtcaggagtttgagaccagcctggccaacgtggtgaaaacctgtctctactaaaaatacaaaaattagctgggtgtggtggtgcgtgcctgtaatcccagctactcaggaggctgaggcacgagaattgcttgaacctgggaggcagaggtagcagtgagccgagatcacacgactgcactccagcctggacaacagagcgattccgtctcaaaaataaataaatagccccatcccttccccggctcccccggtgtccgccatggccaaagcctacgaccacctcttcaagttgctgctgatcgggga

SEQ ID NO: 159532 - DNA, 286 bp, Homo sapiens
aacaaacccaggcccaagtagattctgctgcttttcaaaacacataagcaaagttctctgagtctcacaagttcactcttgtgagctccttgaataacaacaattattcaaggtcataaataagtttacattctgcagtcccaggagcattcctatgtcggttatacctcttgcgtggaatctctgcttaaattaaatttgtcatttgattttctctgagtgagaaagcccctttaaaagaagacttggagttagtgatggccccatattagttagttaacaccgg

SEQ ID NO: 159533 - DNA, 486 bp, Homo sapiens
gaacagaagagaaagtatgtgcttgcagatccctttaatggtatttccagggaaccagaaccaccttcgaatgaaacaccttcctccacagaaacatctgctattcctgaggaggaaatagactggatagagaaacattgtgttaagataaacaacgatcttctaatttccaaggtcttttattttttcttttactctgcctatggctctctctatccccttttgcctgtgtattacaaacagctgggaatgtctccaagccagagtggactactagtaggtattcgttacttcattgaattctgcagtgcccccttttggggtgtagttgcagaccgctttaaaaaaggcaaaattgtcctcctcttttctcttttgtgttgggttttattcaacctgggcattggatttgtcaaacctgctaccttgagatgtgtaccaaagattcgcccaacaactcaccccaccaatgcaagtcaccagtta

SEQ ID NO: 159534 - DNA, 337 bp, Homo sapiens
gatgtcctcctccccacagcacctgcccacaatatgtgtttaagacactcttccacatgatacagactaacaggaacatcactctacacaatcagaacctgcttgtgccgaagtctgaagctgatatcccagcccaggccgcatccctgaagtccagacctgatcttcactgaggcatctcacagatatcctgatggagcatgtctgaagctgagtgcccacatctggccctgccagacttccccatcccaaagacaacttcttctaactgctcaggccaaacccttggtcctccttgactcctctcctgcataccccatctagtccatctgtaaat

SEQ ID NO: 159535 - DNA, 187 bp, Homo sapiens
cttgaatgtcaggacctctgccagactctgactgggaggagtttggattggttacagagtaagttcagaattctcagtgggaccaagttgggtgaaccctatctggtctgtagccatgagtaggggtcctgcagtttcccacctgactaagggcaggttctcttctgaatagaacacttctcaatct

SEQ ID NO: 159536 - DNA, 653 bp, Homo sapiens
tgtaaacattctgccagcattgagagtcattgagtttcagcattcttaggaactgagtggtattatttgagataattgtcaattccttggctcgttggaaattcaagactgggtataactgagtagaatctgtgtttttgcttgtaacagaaatgagactgagatcctctttctgctctgatttttattttttacctcctcttctctcggatttaattctacttaaaatcatactggtcagttaagccgctgcagaataacagatatgtacctgacacgtagtaaatgtttgataaacgttaattactgttactggaatccagatgtcagctgggcttgtccagctccttaagctgactgcattgaatctccagtccatgtcctcagagcatctgctaatttgatgtttgtgggactctaccggcctctgccttggtgtctgctgctgtgcctagagttgttctgcactgagttgacccagatgtgaaatcacccctccttcacacaaaaccctcataataataccatgtgtatatagcacccacataaggtaattgctgtcattatccccactttgcagatgaggaaactgaggcagagaagttacataacgtttttcctagattatccagtaagtgcgtggtggagcggac

SEQ ID NO: 159537 - DNA, 201 bp, Homo sapiens
ttttctatgtttgaacattttcaaaagatgttactaaaataaaacagattcaacacattaaatttatatatatccataactccatacagatactttaaaaaaaactaacttcccacattagaggtgtttacatccaaacttcatagtctgaaaattgttaaaagactaaagttcacccccagttgatacagacaatctatt

SEQ ID NO: 159538 - DNA, 498 bp, Homo sapiens
tcgccatcttttgtctttctgtggagctgtcgccatgaaggtcgagctgtgcagttttagcgggtacaagatctaccccggacacgggaggcgctacgccaggaccgacgggaaggttttccagtttcttaatgcgaaatgcgagttggcgttcctttccaagaggaatcctcggcagataaactggactgtcctctacagaaggaagcacaaaaaggggcagtcggaagaaattcaaaagaaaagaacccgccgagcagtcaaattccagagggccattactggtgcatctcttgctgatataagggccaagaggaatcagaaacctgaagttagaaaggctcaacgagaacaagctatcagggctgctaaggaagcaaaaaaggctaagcaagcatctaaaaagactgcaatggctgctgctaaggcacctacaaaggcagcacctacgccaaagattgtgaagcctgtgaaagtatcacgcttcccgagttggtg

SEQ ID NO: 159539 - DNA, 255 bp, Homo sapiens
gactcttgcgtgtgaccttgatcaagtcgcttaacctctctgaactccaatttcaagtacaaataaggggcaagagccaaatgttccataaaaacactatttttaaaaactgtcttgggttctaagaacatgatcttgtaaagcatgtcaagatccttacaaggatcttgtaaggaaaaggttggtgtcgtggatgggccagttgtccaggtccttcctcgtgagctccatgagggcagtgcccttgttgggcct

SEQ ID NO: 159540 - DNA, 278 bp, Homo sapiens
atatcccagccctttaattgacacagttattcctagcactcattgttgtaatgacctgcagccaagacaccaattttctgctcctactgcctggcaacattgtagtaaataggactgcatcactcaaactacccaatagcaaagttagacttccacaaaaaggtttgtgcagacctaaaacccctcatctatttcactgtagctagaatatctctaaaaagacaaatcagattataaaattcccctgctaaaaatcttttactgattccccactgttg

SEQ ID NO: 159541 - DNA, 162 bp, Homo sapiens
ggaaactgtttactaatctttgattctccaggatccagcaggatgcctagcagttagcaggggctcaaaaaacggttttgtgaacaaatatttaaaagtgacactttaaacaaattaactaacagacttcctggatattgccaatagtgacactgtagcaag

SEQ ID NO: 159542 - DNA, 329 bp, Homo sapiens
agattgatggagcaaagacaagctggcacagctggggccaccctagatcatcctgctcccagcagagcctgcagccaactcacgcccttttgagaactaatgaagggctggtgctggagacatgaagctgggcctggaagggccagtagctctgcagcagcagctaatactccatttgcacgtccacaccctacttctccccttcatggggaagctgggcatcaggcttgtcacctccctctccctcatcatcaagtcccatggattctgtgccaactcagtctctgaggtgtatgtctccatttgcagcattcccagtccctttcctg

SEQ ID NO: 159543 - DNA, 465 bp, Homo sapiens
cggcggggttgggggaggctcagaaaaatgcaaccgctaaaatttctctggatggagttttcttcagtaaacagtagaccctgggaaacataacaggttccgaaaacttaattttgatgactgaaagtcagagaaacagccagctgaatcagctccttcttgggcagtggtttagcctacttatctcatatcagacctaagggtccagctgcttttccttggttctaaagagttctattctggccaggacccatcccgagacagacacttctgtctgcagccctgaaaactagaggtcaatggaagggctcaaattaaaggcccacagttgggcttacaactctccatggtgttcaagccttctcagaggagctggtgtggtggagccagggtcaaaggtcatagtaaatagaaagtagccagctttctgcctgcataacatcatcttgcctaaccagactcaaa

SEQ ID NO: 159544 - DNA, 435 bp, Homo sapiens
atggagataatgataatagaaaaacagaagtactggccaggtgcggtggctcacgcctgtaatcccagcactttgggaggctgaggcaggcagatcatgaggtcaggagattgagaccatcctggctaacatggtgaaactaaaaatataaaaaaattagccgggcgtggtgtagtaatcccagctactcggggggctgagacaggagaatcacttgaacctgagaggcagaggttgcagtgagccaagatcacgccactgcagtccagcctgggcaacagagcgagactctgtctcaaaaaagaaaagaaaaacaaaagtgcttctactcctagcaactctcaagagttgatgctcccacagtattgctgggttacccacaactatactgaaatattttatttctatttctatgccatgctcactcttattagg

SEQ ID NO: 159545 - DNA, 261 bp, Homo sapiens
tctattgatcttgtcaccttttcattttcccttatcccccttatgtattcacttccctatttaactctgctttgtcattgtcagatcatcattatcactctcaacagagcgagactctgtctcaaaaaagaaaagaaaaacaaaagtgcttctactcctagcaactctcaagagttgatgctcccacagtattgctgggttacccacaactatactgaaatattttatttctatttctatgccatgctcactcttattagg

SEQ ID NO: 159546 - DNA, 510 bp, Homo sapiens
gtaggaggtgggaaggacattctaggggaagcgaatatatgggtgggtgtcaggggagtcatgaagtggctgtcacactggacgggtgagaagggagcaggaggtggggtgatactgtgtgagcagtgcccctcctcaaggggcctgatggagctgctgggaacatgaagacaggacactcgggtcacccctcagaaagagccttctggcccagggtgaaggccggagatggagggcaggagagcctgggaaaggaggggcaggcggcagggagtgaggaggaggggtaggttactgtcagggtgagcggggtttcctgggtcagcctcttcctcagctgacggctgtggaaagccagcactcctgcctcctggacagacctcgcaccaggtcccgggcacttgcgggtgggcgtgctcaatggcagaacacgtggggctgagccctgtgagaggtgggacccagagagggggctggggccgaatgggtgtaaaggtggcaggtgacgcc

SEQ ID NO: 159547 - DNA, 598 bp, Homo sapiens
gcgtccgcccagctgctcctgccctggaaggcgcatccgcccagctgctcctggtcccaaccctaacctgcttctcagcctttcctgcatcctttcgcatagcgctctgtgcagccttgcctggatgcatctagttgaagcccctgcccccagtccctctctggaccctcttggagtgctgtagcgcctttggccttatgatatatcctctgccagatcctgccctgcttgaaactttgagctcctggctgtctggaatcccagctacttgccgactcactctcgcagttgggtggcacagttctttgtctacagacctgtgtacaaatagcagctcacttatacatagcattgaattggactgaaacttacagcatcgccgagggacccctgggctgctgggaatgacacccctttgtcatttgttgtgtgtgtgtatccatctggtcacgcagcacatctgcgttattatctattcacagacacctgtatctaccatgttcaggatgggtaaattgggcttaaattccccaggaactctagcatttagatcataggggtttgattcaaccccttttctcaagtcattggctgcaat

SEQ ID NO: 159548 - DNA, 607 bp, Homo sapiens
tgtcagggtgtgagggagcgagttagggtggcagagatggacagaggtagcagctgactaaatctcattggcaaaggctatttcagagaagtcgttttgtttcctgggtgcctttgtaaccagtccagaagaataatatttcataaattcacccacatgttagtatgggtggattgttacgacagtgagaggttttctgttcatacgctatatattcatgtggctctaaattctaaaagcatagagggtcatacagtggaagattcctccagctccattctctcatcatccgttcttactcccaaacctagctatcagtttcttatggaacagatttttttccctttttctactttccagtccagaagacccctgacattcattggtttagagtttgtgatttccaccttccaagagtgacctgagggctcctcacgtggtaatctggcagttttgcgggactggatttcagtgctcctctgtgaggctagcacaagggagcttgtccctcccagggtacaagccacctgctcagctaccccatgcccacgaggcactcatgtttctctttccttatggaccatgcagtgattcttacaaaggattt

SEQ ID NO: 159549 - DNA, 218 bp, Homo sapiens
ctttcttgaccatatcctttggtattttttttttatgtttgggatcttattatatattccttaaagattgtatattaacctatttgtttgtttgtaaactggctaatgtaaaatccactatagacctccctattttaagagatgctgcagtaagtccttttataataatccctattatgctgatttggtgaatctgtatgtatgttaggttttcttaa

SEQ ID NO: 159550 - DNA, 102 bp, Homo sapiens
gaactgattcagtgaagaaggaaaattaataacaggataaataagggagaaatgactcagtatttgaataggcagagaacttgaggcctagtgcatacatgg

SEQ ID NO: 159551 - DNA, 739 bp, Homo sapiens
ttctccttcaccttccgccgtgattgcaagtttcctgaggcctccccagccatgctgaactggttctgcaggatatacacgaagtatggcaccaacatctgcttctggtgaaggcttcatgaagcttccacccatgacagaaggcgaagaactgttgccagcatcatgctacaagcctgaagggaaggtctactgacagagaaggacagagaccagggaaacacagaaaaggagagacaaagccttgacataccaaaccagtgcctggcctacctatggacttctcatgccaacttgggagacatattatcaagactgaatcagagagttgacagcataccaggaagtgtcactgtatagtttggaagatggaaatcatactacttttttcccatgtaagcactccaggaaattaacctccaaatacaactgaggaataggcaccgttatggcttttttacagatcaataaactgatgaaatacggtgaagctatgtaagtagaccaaagatgtacaagaagacacacattgagcagaaaataaatttaagcctggcttctcaactctttatttaaccagagacggttctatctcaaacatgaggttctatatgaaagcaggagggaattaggaagtaaaatctggtgagcatttttcctgaaatattacagctgtcattctcagggccctcgtcctgagatagtggcaggttaagatattaaatttttatttctctgg

SEQ ID NO: 159552 - DNA, 347 bp, Homo sapiens
cgcaaaagcatacctttattgccataattctgtgtcactaagtagcctagaatgccagagaaggtgctggcatccatcccctattgtacctccagggctgagtggcagacaaaagagctttaagctccccttgcccaatcaccaaggtgccctgtgacttaggctggtccttccacttcccttctctgcctcagatttcctcacctagaatttgtgtctgaatgctgttacttctgagaagccaaattatgaacttgaccccatcccactgttttgctgacggatgaagaaactcttgcatgtaaggtttgacacgtgaggtatggaaatgaactattatacacata

SEQ ID NO: 159553 - DNA, 97 bp, Homo sapiens
aactgagtcagtcatgccaaagtactacaaaaattgatgaatcaggccgggcgcagtagctcacacctgtaatcccagaactttggaagctgaggtg

SEQ ID NO: 159554 - DNA, 377 bp, Homo sapiens
ttccctgctggtgtgtggtgcgcagggtcctgcacgcaacagcatcgtccacacacactgcacacatcgtggaatggtcgtatgaaaaacagcccctggtccacacaccacacacgtcgtggaacggtgcacgtcgtggaacggttgtgtgaaaaacagccactggttgcacacagggttgtggactgttgggaagaaacatcgatgctgtttctcacatgatttttcatcctgtggattttcatttaattgtaacatatttctgatcaaaccaggagtagtcttattgcagtcctgtattaacctctgttcttgaaaagagaccacgtgatttatcattttctctgcagcagtaattcacactgggttagtaagca

SEQ ID NO: 159555 - DNA, 157 bp, Homo sapiens
tgttcacagtgttaggtgatgttggctggaattgtttgccttcgcctctagctggaaaaatggaatttgcaggcagaggtattgtaggatctgcagctgtgtgccaggaacagcactattgagtcatgatgacacgaaacagcccagttttaaagaa

SEQ ID NO: 159556 - DNA, 450 bp, Homo sapiens
tgtattgtacgtatttaaggtatacatgatgcttttatatacatacacaaagtgaaatgatgactacagtcaagcaaactaacacatccatcacctcacctagttacttttttacactgttgtttctctcatagcacttttcacaggttgttattatgtacttattagtatttgtctaaagcctatttcccttgcttcagtgtaatctccatgggtatagaacaagatgggttcttttttgattactgttgtgtacttagaatctcagatatagaaggggctcagtaaatatttggtgaatgaataaatgagttcaaaggctgtcaagacactgctatttctggggattcgtgttcccaggtagatctcccaggccacatttctccatgtgattcaccaattctttttttcccagtatgttttctttcctttttactcccgattgttcct

SEQ ID NO: 159557 - DNA, 360 bp, Homo sapiens
gaccagtgttctggtctcttgattcctggcccaggctctggacctgcctgtggtgccccatggcactgtggtcagcctggcactgagaaggcaggcaactccactttacccataggaatggagacagcaatgggtggatgctagaatatgggtaacagctgttgttatgagagagggagacagctgcgaaaacaatggataactccactgtaatagacggatagtatggattctgaatgtgtgggcggtggctgtcttttaaacaagttctccttccgaaatactcaattcgaccaatagtgaaaggcaccagggcaaatccatgataagtgaggcccagaccctgcttacaaggaactc

SEQ ID NO: 159558 - DNA, 107 bp, Homo sapiens
gcctgctccagcagcgggagtttgaggaccggcacccctcgtcgcgggcgcactcgggggatcccgtgggaggagccccgctcgcccctccctcgctgcctgtctcc

SEQ ID NO: 159559 - DNA, 233 bp, Homo sapiens
ttaggacatactatgtactagtattgtgtgaagtgctctacacaacttaatttaatcttcatgcaacacggtaagatagatgtgttatttctaacaagatcagataagtgttccagtgttgcccacctgggtaagtggcagaggtagaattccaagatgggactatgcccatcttctttccatttttcctcactttctcaaatgttggtaccatagaaaaatccctggaatta

SEQ ID NO: 159560 - DNA, 390 bp, Homo sapiens
tctctagcttacacctctcccctgaactccagattcacttattcaacagcctacttacatctctacttggatgtctaataagcatttcaacttcataaaaccaaaattaaattgttgaaaccacccccctaacatcccacctcaaacctgttcctcctacaatcttctccacttcagttactggcaactccatccttgttttttcgccgaggccagatgccttggcgtcatccttaacttctttcctctcacaactcacattttatctgttagcaaatgctgttgactctatcttgaaagtacatacaaaacatgcttacttctaaacactactacactatgctgtatttcaagccaacatcatcttttacagatcactgcaattgactc

SEQ ID NO: 159561 - DNA, 532 bp, Homo sapiens
atactcagtgaggctgaagctagtgccctaattggtaatggacaattggcgtattagcctttctggaggcaatttgactacattattgaaatatttcaagatctttcctttgactcagcaagtctacttccaggatttgtccaaaagaaataatgaggatggtttcataaagatgcaagaataatatgttaaatgcattgcacataatctttttgttaaaagtgaacaaccagagggctgagggtctctgcctccatgcccacgtctcaaaattgctaactcctgttgattccactgtctgaagagctcttctgtgtctacttcttcctagttgcactgccatttcctagttcaggccaccatcacctttcacttggattactgcaacagcttcctacatagcatcccatccctttccggtttactctccacctggcaggcaggatgagatttttaaacacaaatcaaataacctcccactcctgataaaggtcttcactggcctcccatagccttatgtccaacctccttg

SEQ ID NO: 159562 - DNA, 481 bp, Homo sapiens
tagggaagatctgtccggtgttttagctagaggcaaatccaggctcactgccttgtgcttgggattataggactagaatggtagtacctacaattaggtattctatatacagatctttaatctccctcttttcacactcatccttaattctgtgtatagtatagggtacacatcttcaggttccatcaggtagactggcttccagcccctggtaacagattctaggctgtggctttctctagttattttatcttcaacctaatcctctctgctcctcctctcctccaaaaaaatggaaaacctcttatttgttggtggcctcctttattctttttactgttatgggatttcagtcagctctttgtgtttttttcagtggggtctcaggaggtgggcagatgataaatgcatgtgctttgtctgccatctcaaagcttcagttttctattgttaattgttaccaccttctgaagtgatagcg

SEQ ID NO: 159563 - DNA, 311 bp, Homo sapiens
ctgagtgtgtgtttttcagtaacatctattttgcatcactgcagaaatatttgtacagtggctgaaacaacagaggttcatttatttcactcacagaagagtcaaaggaagatgttctgtctggcaagcatttttttttgcagtattcttgtcataaactttcaaaccagctgggtgcagtggctcacacctgtaatcccagcgacagagaggctgaggtgggaggaacacttgcatggcctggaaggtcaaggctgcagtgagctgtgatcatgccactgtactccagcctgggcagcgacagagaggct

SEQ ID NO: 159564 - DNA, 126 bp, Homo sapiens
tccatagcttgatagctcatttctttttagcatatgaataatattccattgtcttaatgtatcacagtttattcattcacatactaaaggatgtcttggcagcttccaagttttggcaattaataa

SEQ ID NO: 159565 - DNA, 360 bp, Homo sapiens
caagaaggcagctattgcaacatccagcttatctcacgaatttcagtgattagtcatgccataaaggttctggtttaaaacctgaactgaaaaaaggctaggcacggtggctcacgcctgtaatcccagcactttgggaggcagagataggcagatcacttgagctcaggagttcgagaccagcctgggcaacatggcgaaacctcatctctatgaaaaatacaaaaacatagccaggcctgggggtatgcgcctgtagtcccagctacttcggaggctgaggtgggagaatcacttgagcccccgaggttgaggctgcagtgattgtgccactgcactccagcctgggtgacagagcga

SEQ ID NO: 159566 - DNA, 430 bp, Homo sapiens
cactgaggggaactctgccttcagctaaggctacacaactatcctgatggtggactgtagcaacttgtaggcaaggggtacagctcagggcagctacctctccctcttctcgggccaacctggaggaagttccttccagagtccaggctatacttgcttctggcctgcaaattcccgagaattctttgaaacctaggaggggcctgggtattatgccgttttgagtgagaattcagaggccagtggaattagggcaatcaggcatttcctgatcatctgctatgctccaggatgctgacttgaagagatgaacaaggcaaaatgcccattctgacggcactcagaatttcacggggaactggaaggataaatgaatctgggaggaactgctaaaacaggtaggagagggtaagcttgttagaacctgaga

SEQ ID NO: 159567 - DNA, 413 bp, Homo sapiens
ctgggcaggaattctaggttgcaggcaggcaatgagaacacatacatccagtttctatggtacctgttagatgccacccatatgctgacactgccagctcttaaggaacaggagccagcacatgtgtacaagaacatgtgccctcccatttggccagagggctaggactacaaatgccagtgtcatgagactgcctcagaggactgtagggtccttgagcgatctttgatcaaagaggtggagagaataaagaacagtaagtagagtgaatgaagtgggaaattggcagtataccatttgaggggtgaggtagggttctacggctatcctttgtgactccagaaagtttacagaagccttgagttaaatacagatgccattaccattattgctgtcactttattaacagctga

SEQ ID NO: 159568 - DNA, 216 bp, Homo sapiens
cccgaagtgcagggattacaggtgtgagccaccatgcccagccaaggtgctctttatattcaatcagacaaggttcttgttggttcagttttttgagggcctgttaaaggagaagttgtagacagcagggcacaataaatttaattgtccaattatttagcaataatttcactctacgatttttgtttttttgaatgacacttttttctggggcag

SEQ ID NO: 159569 - DNA, 273 bp, Homo sapiens
caaatcctggcttaatgtaatatccagcatgctacttaattttcttgtcttcaccttttcatatccacatccacctaggtgccacctcacagtataagccagcataatccattcttctcaatgaaaccacaatacatctgaccctgcatctcaggagaactgtatcagccacagcacttccagttgactatgaatctgaatgttatgcctcaggagaaacatccttgctgggactgagtagtgattcaaggagatagttatgattcagtcaag

SEQ ID NO: 159570 - DNA, 628 bp, Homo sapiens
tatttcagagaagcttggaaaaatcattacatcttccacctcaacttctatatggtcccattataagcatctggtactgccttggcaaatttttagcataatcctactgttttctagacatctggattgaatatgaactgtagaggggctgtgggtcttttttttttttttttctgccttattggaaatcaggtattatgatttgggcattttcctcactgaatggtagccgggacctgattttggggtgggagatcttttattttgtttctcatctaattcctggaaggcctctctttccttgtgtcatgtcccagtttacccttatgggaaaggctgtagcactgtgagccaagactgggagtcggccatgggataaaaagaattggcatgagccatgggctcagtgaaccaaaaaactccagccttgactgactttcagctggaaatctatcagatggccttacttttccttaaaaataaatcaagctctgcctactattccagacttttactgggccttgaaagcaggggcacacatccaactacagtgtgggccgtactcaccagctggtccatcttgctaaaagtatttggacatcactgatgaacctacaaacgccaagaa

SEQ ID NO: 159571 - DNA, 565 bp, Homo sapiens
acaattatttttaattttaggtgtgatataatattgtgtatattttttaaagataaaagatgtatttagagataaaaagatatatgcatcccaggtatatctgggatttgcttcaaatgaatgcagtggtaagggggtaggaatagacagggtataaggaggcaagattggccatatgttgatattattgaagcaaggtgatgtcgatgtggaggttttaatatctttacttttggtatataatttatatttgcattcaaaaataaaacaaatagctctgatcaaaaaataaaaatattgggggcagagggtgcaggagatatttccagtgaagtatctctgcgtgattgagcacagtaaagacattctttactgcttcccctctcaccaaatcctcctgcattcataggactagaaacctaaagaggcatctgaagtcacatcttaaggatgcataatggaggggagtttggagagggaacaaaattattaaggaggattatactgtcaccactcgacacaatggagactgctgcttttaactgccttaaacaagtcttgcttc

SEQ ID NO: 159572 - DNA, 272 bp, Homo sapiens
gaaggacctgcgtacggctattttacagttaacttttttatatatataagtaggagtacaccgtaaataatgattttaaaatacagtaaatagataaaccagtaacatattcattatcattatcaagtattaggtcctatacataattgtacatgctatacttttatacagctggctacttaataggttcgtttacaccagcatccctacaaacgagtgaataatgtgctgctgtatgatgttacgacatcactagatgatgggaatttctc

SEQ ID NO: 159573 - DNA, 315 bp, Homo sapiens
aatagtagctttgatactaaaaatgactgagcaattttttaaaacaaaaaatattaaaacaggctagtaggctctgactcatgttactcaaataatatttataaaaaggctagccattcttggccaaaactataacaaagacattccaaccatctactttctgttgcttccagaaaatcagctgtcccattcactaaccacctatgtatttatccttccctttgagctggttaaaataagctaatacctgaaaataggttaaggcttaactctatttttgccttttttttttatatatctggaaaagacttcagg

SEQ ID NO: 159574 - DNA, 461 bp, Homo sapiens
tttggtcattctaggaaactgttcagattaggatagagatatatttaagtgggtgaaagggagaagaaaatatgtattgcctgtgaaatgctattttagaatgttctatgaaaaccctattacattccaaggacagcttttgtagttaaaaacaaaataaaaatcatatgatatggatcacagtaaacaatgacatttccagtattggtgcacactaacttttttaagtgaatacttgtcatgtgccaggcccttgctaagcttttcacataaacagcctcatttaatcctcacatcaacatcagtccttttttggggggtgaagggtagagacagggtcttacagtgttgtccagtgtgatctcaaactcctgtgatcttcccagagtgcagggattacaggcatgagtcactgtacctcgccacattaatccttaaaatgttagagtacccaaaggttt

SEQ ID NO: 159575 - DNA, 283 bp, Homo sapiens
gtgcctgtaatcccagctactcggaggctgaggcaggagaaccacttgaaccagggagtcggaggttgcagtgagccgagatcacaccactgcactacagtctggcgacagagtggagttaaaaaaagagagagaaatagaaagacttaagagatatctatcttatatatagaaaaaaggagaaaagtttttaaaaagatgtatctaagactttaaataagggaactattgcatgaggaatagagaagtagagttgccaaggatgactctcaggtttctgcct

SEQ ID NO: 159576 - DNA, 178 bp, Homo sapiens
cagccaagtccagcctaaactgcagtcacaaaattgcaaactaaatgaataattgttttaagccacaacgttttggagtgatctgtaacccagcaaaagctaactgatacaggtaagaaatgaagaaatgtaattaacaaaataaatgccatctctacaatgatgatttccacatctc

SEQ ID NO: 159577 - DNA, 220 bp, Homo sapiens
ctcacactccaacatacacacatatgcacataagcatacctgcacacacaaacatgcagacacacgctacctcacactcatgccaacatgcacacatctgcatagaaacatacctgcacacacacacaaacatgcaggcacatactacctctcacaaacatacacacacatccatataaacacatgcacacacagacatgcacacactatctcaaacatg

SEQ ID NO: 159578 - DNA, 735 bp, Homo sapiens
actgctctcttacaggtggcctgtgaccccctggccaggccaggacttctcacaggtctcattcccagagaccagaggtgtccctgttgacttgttcctgcttctgggcttctgtattgaaccaaggcgcctcctgtcatcttggcttgtttctctctggtctggccgagttgtctagtgtgtgtccgtgtttctgcattccctccctctgtgtgtagagccttaacgttgccattggctcctcccaacatccagtatgtctttgttgtcgtcctgtcttcttttcacaccaccctgcccctgcagacctgctggtcggtctccagggccccagcacgtcttcccttcagttggtcccacttatctccactaggctagtttctcataaaatgctcatcaacctcatttctcccttctcagtagctggccccgttacagcaatgccatcacagacctagctctaatgtaaaatgctagctttcatcccgcccacctgtttctgaaatgtgctagtagaataccacagcagaggcaagcttagctgttaaaatctttgcctggtgaaagtagatactgtatgcttgtaaggtttatattgttacattcattttctccagatgtttctgttctaaaggtgggaacagtatcatcattatatagaccgccctttgtgaaatgtagctgtggtgtcagctgtggtgtcagaatggtcttacatttctgttttaagaaatg

SEQ ID NO: 159579 - DNA, 603 bp, Homo sapiens
  misc_feature (3)..(3): n is a, c, g, or t
cantgagccacaaacaccacaccagcatctccagggccaaaatgcctgtcaggggacacattctcagggaccccctctgtgtgtagagccttaacgttgccattggctcctcccaacatccagtatgtctttgttgtcgtcctgtcttcttttcacaccaccctgcccctgcagacctgctggtcggtctccagggccccagcacgtcttcccttcagttggtcccacttatctccactaggctagtttctcataaaatgctcatcaacctcatttctcccttctcagtagctggccccgttacagcaatgccatcacagacctagctctaatgtaaaatgctagctttcatcccgcccacctgtttctgaaatgtgctagtagaataccacagcagaggcaagcttagctgttaaaatctttgcctggtgaaagtagatactgtatgcttgtaaggtttatattgttacattcattttctccagatgtttctgttctaaaggtgggaacagtatcatcattatatagaccgccctttgtgaaatgtagctgtggtgtcagctgtggtgtcagaatggtcttacatttctgttttaagaaatg

SEQ ID NO: 159580 - DNA, 384 bp, Homo sapiens
ctaaatggggctatctccagatataactgtcactagtacgtgatggataaattaaatacttgcttcaaatccactttataataagactagtaggtaaattgatgaataaaggttaaaagtcaccatgtgtctgaaaagtcagttggactttgttgggacagttgtgattggcaccatgttttgcctacttgaatttcctgcatcgtgtttctcccacaggatgaccattgttcctttactgattgtggaatagaatgcaaataacttcagctctttatgattttgcatatgctgaattatcagtatcatattttccactgttctccttcacataacatatatcagctaagccaaaagttgtatatattccctgtctcaatgtcc

SEQ ID NO: 159581 - DNA, 128 bp, Homo sapiens
cagctactttctcctctggcatctattatctgctcttctccttcacccgttcaggtcccggggggatggaagttccctgggggtagcctgccatcctcatcctgggggagtgcacccccggctttgct

SEQ ID NO: 159582 - DNA, 365 bp, Homo sapiens
caagcaaggtaggagaggatgtgctctgtatcaagaatgttgaggcctagggtaaagctggcaggtaagggcggagcaagaccaactaagaagcatcttcccttggagaaaactgtcactcatcaagtggatgtccatggcaatctaaatggagattttcccaaagggactacaaatgtcagaactcaggtgatttgacatcaacaaatctccctgaaagccactcgggagaatatctgatggcatgagttagcatctgtggactagggttggaagatctgacttgagcgccaattcctctgtgtacactagtcagctgacctaagatacatcattgccttctctgagtctcaaactcctcatct

SEQ ID NO: 159583 - DNA, 380 bp, Homo sapiens
ccagtttcaaagctgaagatgagaagcagagggacaagtgtcatccaagaattcacttgagtcctatgcctgcaacatgaaagcaactgttgaagatgagaaacttcaaggcaaaagtacaacacgctgtagtaaaccctgaccagaccacaaagaaggcttctctccataaacatcagatcaggcagctagaacgattactgggctctctagtaactgtcacctgtggtgggtctaattacaggctaccccagcaagcacgcccacatcacacagcaataaaagggccctccgcttgccaagcacagccagacaatggcgagcacatgccacctgatggggagccccaaaagatcagccagagagactaataaaaatga

SEQ ID NO: 159584 - DNA, 421 bp, Homo sapiens
ccctctccccttcctttgcacatgtctgtatcatgcatctccgtgtgaatatctcatttccccactttccattttgacaacttctactcatctcttgggctacagttcaaatacaacttcctcaggaaaaccttccatgactcccaattttaacttcggtttctcacttgtaatactgtattttcttaaggtagaacttatgacaaactgtaattatgtattaatttgggtattatacttgaatgtgaatttcatcagggcaggcactatgactttcacatttcacattcacggttataaccccaggagccagagaagtccctggcacatagtaggtgttcaatacatatttgttaaatgaataaatggatgaatggtctgtggaaatggaggtcaaggtcaggcatgcattgttgtagaa

SEQ ID NO: 159585 - DNA, 588 bp, Homo sapiens
aggttctggccttctatttttctgttctgtaaagttgattttttccttttcagttcttattgagttgattggggatagagctgattatttccattaacccaacctaaaatagacttgagaaaggaccagaatgctttttgtaaaataaggagaagtaccaagcgaagtgaagtgccctgtttagctggtcagtgttttggggttttttgttctgtctcttcttacagaagaaggatctgacacctttatggaaagttgtttggtgaacttgtaatcagaacaaagcagttatttgcattcctaggacagtgtagttggtgactgataaatgttcatgttcttttggtttctttccagtgtatagagaaatctaccaaatcaagcagaacttttcactggtttgtcagggcactctttaccctgtctctgccaaaaacacttcaacaagtctctgagttttttttttttttcctgccatagattttatacagactaattggccttctaataatactctttgtcaaactaataataaatgacaaattaggttatatcatattccgtttatgcctttctgagggaatatac

SEQ ID NO: 159586 - DNA, 566 bp, Homo sapiens
gtcagtactcaatacatatttgttggactggttgcactacaacatttttaaaaggttccctctgaagaacagtgatcagccctcaattttacttttctgcataaaatcttaataaatacatacagctgtaatgtaaacagtatgacattcttatagaatctgtgtcagtagaaaatgagtgagatgtagttacctaccattcatgaatgtatagaagaggtgagaaaaaaggacagagacttaaataggttctccgcagaagacgatacccagttggcccaagaacatataagaaaggcactcaacttcattagtcatcagggaaatgcaagttaaaactacaatggaaaaaaggataatgtccgtatgcagaagaatgagctaagaaattatggtatatattcacaagtgggatactacatagcagtgtgaatgaataaactaaaatgcataaattgtacaaacattgtacagttgtacaaattgtacaaacattgtacagttgtacaaactgtacaaatattgagtaaaaaagccagataaaaaatatagtatattgtataaca

SEQ ID NO: 159587 - DNA, 441 bp, Homo sapiens
tgccctaggactcttctctccacctgataggctctttccctagatatctccatggcttgctccctcacttcgttcaggtctctgcacaatgtctcttgacacccctctatctaaaacagcaacatctcccctgctgaattctcctttacagtactcatcgccctccattgttcatatatttcttttttcatgtatctccttccaatatgatcaactaggaacttaagccccataagaacaaagacattcttcagttcactgctatttccccagcaactacagaatgctcaaatatttgaataaatgaatgaaaattaagtaagtttttcaaaaatctagaacacacttttagcatagagaaaactgaagtacgataggaggttaattcacttcatataacagcataaactgcccttccttaagtaggagacaataggtaca

SEQ ID NO: 159588 - DNA, 515 bp, Homo sapiens
aatctggaagggggaacattaagttttgggataaaggtaaaattatagttaaagtggttgggaaagtctttacagatgacattacactgaaaaaagacctgaaggagttaaaggagtaatctttggaaattcagaggaagagcattctaggaaaaaagaatagaaaacataaaggcattgagggaggggtgtacttaggatagtcaaggaatggcaagagccagagtgtcagggcagaggaagcaagagagagttgcagatgaggtgggggatcaaggattctactccatgtccacccctaagtgcagtctttcccaaagttgtatcatgaactcacttggctgtctatcttcttcatctttgccatcaggtccattcctaagccttcattgaccacaaactctgtaagttctataaagaaatttccaatataaaaatagaagttgtaacattagcatcaaagtggcatgactgtttaaaaatattgggtttaattctgttaaggttaaaaatat

SEQ ID NO: 159589 - DNA, 477 bp, Homo sapiens
ctgttgtagtggcagtttacacataaggggaagaggctagaatgatccatgtggtaatgcactagagttgaatatattagtatgaccacatgtttagtttaatatagatgactacatatagaaatatttattcatgtgtctgtatacatgggtttgtatacacacatatatttccttgctctgtcagctgagaggacctagatgcaacaacactccagtaacaatgaacatatctagtgcccagatcttagattgcaataccattctacaatcagtgcaaccaaggatctatggagaaatggctgatttctaggactgaggcaggaaatatataagatgggcctggagtaccttgtagctccagaaagtaaggaaacattcaaaacaaatgaaaaaaacaaatcaggaatgggagtatgtcagagacaaggagcaaaatgaaagagcttccatgggccaagatggaacaatttgacc

SEQ ID NO: 159590 - DNA, 269 bp, Homo sapiens
gtccagtgcagaaaccgtccatctgatgcagtgtggagagtccacagcagagcagccgagtgtgtgggggggtgcacaatgggatcaggagggtaggagggctggaagagggtcaaagagggaaaaggaggaccggggtgaaggacagagagcgtcaagtcacttcagatctcagctgcctgaacatttcacaacatcagctttctgccaatctgcacacctgaaagcggagtcttctaaagcccccttactgagaaaaggaggtgaaa

SEQ ID NO: 159591 - DNA, 101 bp, Homo sapiens
ctccacatttctttacctgaggtctctaaaaggccttttgtttgtgtgggttatatccacatatattctccatctccattttggaaattaaaactcagaaa

SEQ ID NO: 159592 - DNA, 434 bp, Homo sapiens
cacaccacctgagtcaagttaatcatttccttctaattttaatgcattaagttttacaataggcgttaaacctttttcaaatgcaatggtttttcctttagtcctttaatacattgactcacagaaagattgttttgttcttgggacaaaccctacttgatcacatatatttttaatacagttcacctaactattaagagatgaagcaggaatttgtatcctactgtgaacaacccaaagccagttcgtgatcttttcaatgtgacattgtcacagggtacactttgtcacggtgttagcacattttgtcttctttggagcaagttacagttcataatagaacttttgttgtggggaggcctaattttctagggaggaagaggagaaaatgtgaagagattaaggggagatacacctgacaggaggaaaaacca

SEQ ID NO: 159593 - DNA, 314 bp, Homo sapiens
gtaagtggaatttctggtgtgaggttatcttttagatatagatttcttttaaacttaaacaaaatatgtatgtctctgtaacatgtactctagttactggattttaacaatgataagattaaatggatgttttagttctatgagaacctctctaataatttggtcatgggtgtctttaagaagccatttagcatgaatctttagagaccaaaggttaggagtatttggtggggtagtactagtagtatcgtttaaagggaaataccagaaagaaaacctcttggaaactgctttctcaaataatgtaaagcttg

SEQ ID NO: 159594 - DNA, 237 bp, Homo sapiens
agggaatacagtggcattcaacagacaccttgtaactcatcacagatgtccatgagaagccacatggatggaatctgagtccaggcacacattttccagagaaagaaaagaagttgctgtgggtagaaaggagttttgaggctccatggagacaggctttagacggaaaaaagacattttagaaaatgcagtgtagaaagctcccacacatccagcccactaagtctctgaatgtga

SEQ ID NO: 159595 - DNA, 289 bp, Homo sapiens
ggcgactctagcaggatcttctaaatgactgtgtggtataagcttctgcaaaagtgactaaaatctgatgttagccatattcattggattcatcctattttattttcctcatagcattataatttttgaagttctttaaaataaattatccacttgtttatgagaaaaactatctctaatcaaaaaaaatctgctttatactatattatgttgcccaactttttatttgattttaattctcagccatacagccacttaggtacagccatttaggtaacagccatttagg

SEQ ID NO: 159596 - DNA, 717 bp, Homo sapiens
ggcacagaggaggaagggggtggcccttattcagaacccctcaggaaacagaacaaagtcgaaacaacccgctgactccgcattgttggtactgcgtgcaggactaggctttctgccccgcgttctcgggaacagacgcctggggatcccgaggccacaggggctcagatcagagtagcgttgtaaaatcaggaatgacttaaaaactgtttctttttgtagagacagggtcttgctatgttgcccaggccgttcttgaactcctggcctcaagggatcttcccggctcggcctctcaaagcgctgggattacaggcatgaggcatggcgcccggcccaaggatggcatttctgatgcaaaaataccatgagtgacatagcctgagtgtggtcattgctaatgtgggaggaaaatacggagaggaggtgtctctgcagccgaggaagagcgtgttgtcaagaggtaggagggcaacccgccatggctggtgagagccaggctgaagtgtctgttggacttagcaggtgggaggccggttcgccttcaggacgtcccggaggtggtggcagaagtcgggggaaatgggctgaaggacggatggatagaggcaggagaagctcgcatgcctaaagatgatgaatgtgttcacccgttcagcctggcagacaggtgactccccactgcccgctccccatgacaccctctcttctgcttgg

SEQ ID NO: 159597 - DNA, 373 bp, Homo sapiens
  misc_feature (17)..(17): n is a, c, g, or t
  misc_feature (28)..(28): n is a, c, g, or t
gctgttctagaggatcnctcacacgcanttggtcaagaggaaatggggagtcactaaaggttccttagccagggagtgcatgagcaagtggtgaggggcagtcactgaaggctgcagctgcagcctgggtgcagtagcgctagggtggagaggaggggacagttctggggggagatttgacagggatttggtcactgaccagaaagagagatgaaggagaggaaagactcaaaggcagctcctaaatttctaggatgagtaacttatgagggagacagggcctgaggatgttcatttttgggaagaaataaatttggagtcatggaatcaaaagtgaaatatggggattggggcctgggggcagagcaaagga

SEQ ID NO: 159598 - DNA, 316 bp, Homo sapiens
accagatgttcctctgtgggccttgctggattcataagtcaggataaagccagcgtggatgcatgcatgtcaaaaaaaaaaaaaaaagtcttggccagtgttgtagagaaatgaagtgttgtttcatctgcagttcctctccagtccttgctggttgggagcactggctcccgggagactggtggccctgacactcaagccattaactgagaatgctctctaatcccttgttttcattgttggtgttccggccaggctgcccgcacagagcctgcccgttttcattggctgcaggaattgttattggagtggctga

SEQ ID NO: 159599 - DNA, 1046 bp, Homo sapiens
acacaattaaaatctgaatgaaggttgaaaggactcatttctattgaagttttctttccaacaatacaggttacaaatatgacacacagacagaaatgtttaaaccaacagctcagttaaaaatatatttcatatctcagtttaaagaaaatattggcttaggcagaaattttaaaaatttttcagatgttcacactctgcaggaccctgtgctcaaggaagcagtttctcccattaccaaccatgcttgccttaagtctaactccttaccagtgattagctcacatacaaataagaggcacaactctgacaaacgaaacatgtgaagtctgctagaaggcttctcagtgagggtttcctcaatcttaggaagagacacaaaccacctcacacccattacaatagctagtattaaaaggaaaaacaaacggcagcccagaaaataacaagtgctggtgaggatgtggagaaactggaacacttgtgcattgctggcaggatgtgaaatggtatggccttatggaacacagggtggcagttcctcaaaaaattaaaaatagaattacctttgattcagcaattccacttacgggtatacacaaagaagggaaagtgagtctcaaagagatatttgtaccctgtgtccatagcagcattattcattaacagcccagggattggggcagcccagatgccaatggataaatgaataaacaaaatgtggtatatacagtgaaatgttattcagccttaaagaggaaagaaattgacatatgtgacaacatgaatgaatcttgagggtattatgctgagtaaattaagtcagttacagaaagacaaatgctatgattccacttttttgaggtacctagaatagtcaaattcttaggcgtggggaagggggagctatcgtctattgggtacagagtactgattgtgtaagatgaagaaatgacatggaaggtggtgatggtgcacagcaatgtgaatgtacttaatatcaccaaactgagcacttaaaagtgtttaagagggtaaacattatg

SEQ ID NO: 159600 - DNA, 526 bp, Homo sapiens
acagtaactaacctagagctctttcctcacatttcttcagcagttatctagcagagggagtaggatcatgagcggagctagccacttcagcaaagaaagtgtgatgaagtccatgaacccagagaataaagccctttggcctgtcaggggcagattcttaagggcacagaaggggaaaaacaacaaaagcaagtttatattcacagggaaacataatctgtgattataaatattttatgggcaaagaaagcagcactggctgagagactggggtggagagggtggacagcaaattagattccagcctgcaaagtgatagggcagctggaaaagcagcaaagccgaggctattctgggctgtgctgcgagggcctgcgtcacaggccctggccacagtctttgttgaaaccacagccttccagcggtcagcacagaacaccttggggagagggtttaagtccatgaagaccagaggaggggacagcgaggacagaggagagtcatctgaatgactctggtgaacctc

SEQ ID NO: 159601 - DNA, 358 bp, Homo sapiens
tgtacgtgttgtgggttcttgagtcattcctgagtgatgatcagggcatccaatgatctggccaggccggagactcaggccacagcctggtgtgcatggtgggtgacaggatgagggaggctgacacaggtagtgggcatggggtgcacaggagccatagtcctagtcctaaatcgttgacctctggaaggaaagagtgtttggaacactgagtccaagaagtaggcacaaagccagcacgatccccacagggaaatgtcttttatggggcctgacaaaaaagaagtcaggaagtagaggacagagagctctctcaattatttgtccacttttcagccccagcccaaatctaaatgag

SEQ ID NO: 159602 - DNA, 526 bp, Homo sapiens
tcagatgactgcagacctccccacaaggaggagggaagctggcctccaaggaggcgcatcccacagtgcagtggtctctggccagggtgggtcattacgccattggtttatagcgccatttgcttcggccccttttggtggcatcccagggtttaaagtgaccaggcagctagtgtggggagacgggacacagctgtctgaggtcagggggtctgtatgtgcctctccggcagggaacagcctcggccgtcagaagccaggtttcagcatttaggatgcagccaacagccaaattgctttcttggttttatatataagggctttttttggtaccataagggcgggtggacagggctgcctttgcttcctggagggtctggttcctttcggggaaggtctcagttggccactggagtaacagcactgcgtcggcccatgtggccagccagcatccctgtgctcatggctaaggacaggctgttactctgttctgcgggtcttgaagtcatttggtcaagtggacttc

SEQ ID NO: 159603 - DNA, 146 bp, Homo sapiens
agttaggtgaaaatgagtgatgttgatctgctggttctccaggttgtctgaaagtagaaaaaggaacatgggttcacattatagggtggcactttgcagagaagacatttctacattttcacagggcaaggattgaagaaatgcaa

SEQ ID NO: 159604 - DNA, 244 bp, Homo sapiens
ggaatccaatttaccaagcatgtaagacagcacctactggtactctacattactcaatatttattttctacttttcttttcctgcttcagtcaaccaaattaaaagtgactgagataatatgatggagatgtggcagaatttaaaaactgctaacttgacagaaaaaattcagttatgctggacacctggtgactagacattcagaagttgaggtcagaatgcagcagaatctaaagtgtatgg

SEQ ID NO: 159605 - DNA, 407 bp, Homo sapiens
agacataagggtatgcacatttaatatactacagtatagtgtaaacataacttcttttggagaggttctcgttcatgtgcccaggctggagcgagtaagtagtgtgatcacagctcacggcagcttcagcctcctgtgcccaagcaatcctcccacctcagcctcctgagtagctgagactacaggcgcatgccaccacgcccggctaatttttgtatttttagtagagacggggcttcgccatgttgttcaggctggtctcgaactcctgacctcaggtaatccatctgcctcgacctcccaaagtgctgagattacaggcatgagctgtgcccagcctataatggcattttcaaaattaaattagtagctttttacttaatatttgaagtatttcttctgtcatt

SEQ ID NO: 159606 - DNA, 312 bp, Homo sapiens
gccctcatcgccatcagcacaccacagccaccgctgtgccatttttaaatcattacacagatgcaaagcattttcacaggcattgctgcggtatcacatgccaactttattaaagtatagcagggatttcttccccctttctcagaaaaggaaagtggggtttccagaggataagtggcttcccaacacgcacacaggaacacaatgtttgagatgaacttggagcccacatcctctgcctcccagtccaagcttgggtctactcctccatgctcacgactttccagttcaaccaactgatgggcctttggg

SEQ ID NO: 159607 - DNA, 223 bp, Homo sapiens
tctcgtggggagagacattttgataaataacttctcattaaaatgcagagttaaagacccattaatgaattcctggtgtaaacaaatgcaccaccaagtgatctttgatcatcatcaaccttgaatatagataaagttattaaaaatataataatgtctaacactcacatgggactttttttttttactttccagagtgatcactagctctgtcatttattat

SEQ ID NO: 159608 - DNA, 407 bp, Homo sapiens
tgacctcaagtgatctgcctgcctcagcctcccaaagtactgggattacaggtgtgagccgctgcgcccagccattacaatattattaactatagtcatcatgttgtacgttattagttccccagaattcatttatctaataactgaaagtttgtaactgccatcccatttaaagtagctggaaaaccagataaaatatatgaaacagtagttttaagacattgtataagaggcagcacaggactttggtttctgagagaggagaagcaagtgagagaatacctatgatgacctgaacttattgcccagagacagtttccaggccacagcacagggaggggaacccaaacagagcctagagttgaggagcatagattggaatttggggaggtcaaagaggctagaat

SEQ ID NO: 159609 - DNA, 629 bp, Homo sapiens
atggtgcactggcaacgccaccacctgagtcgctccccattaagggcagaatatgtttccttctgcctgtaatgaataagatggaaccaaacttagaacagtgacaactcgaggtcaaatgccagaaagaaactaaactttaaccactggctcattcttatatttgttcctccttctgtctcctttcataagctcttccttttatcagcacatgcaagtgccttttcaatttccttcagtaggctggggttttatgtcctctccagtgggtggacagacgagtcccagtttacttctgagaaaacacagcttctactatttttggacagcctatctaaagagcaggaaattgccctgtaataatactttttggactgtggttgggaaatagtccttataatggagcagttaagaccaaggcatctattttctttctggggggtagagagggaagtatgtataaagtgttcttagatgaaaatgtccacactggtgttcctttctctagcctagttatagtgcttgattaccatttccctacagggctgtgggtggttgctctgggaagtcaggaatactcagcctggctgtcccctcagcacacgccttgggagccctggaggccaagt

SEQ ID NO: 159610 - DNA, 594 bp, Homo sapiens
atggcgggtgtctagaggatccctaatatgagaccagtaacccattcacaaatctaccaatttgtgaagacatcaattcccactgggaggcatgagttctccaagctctaagaacataaaatgcccaagagaacctcactttcatttgtgacccagtcatcagactggacaccagggcccccagagttccatcatcttccagaagaagacagcacttgaagaggagacatcagacccaaggtctggtctcagctctacttgctggtcgggtgaccctgacggggagatacctttccttggattcagttttcttatctcaatttgagatttggggactttaaggggaccaagtgccacagagtcaaagaacagaagccctgaagtcagacaattacaggtttcaattgagggtctcaaattatatcccctctctgagtctgcttccttgtttgtaaaatgagtacaatgtttacccttggcattcttctgaagtttgaatgatagagtataaagtatctagtaagctgcagacattttattaaggcttcattaatgttagtcccttccctctaaagtgttctctgtctagctctg

SEQ ID NO: 159611 - DNA, 492 bp, Homo sapiens
aaagatcctggagccgggtgcggtggttcatgcctgggtaatcccagcactttgggaggctgagacgggcagatcacctgaggtcaggagtttgagagcagcctggccaacatggcaaaaccccgtctctactaaaaatacaaaaattagccaggtgtggtggtgggagcctgtagtcccagcttactggggaggctgagtcaggggaatggtgtgaatctgggaggcggaggttgcagtgagctgagattgcgccactgcactccaacctgggcgacagagcgagactccgtctcaaaaaaaacaaagaagtaaaatcacagtatggcgcctcccctcgtgctcctcctcctgctctgctgatgggcgctgtgtgcggagcctccctttgccatagctgcctctgacgatacggcggcctcccaccttcacacagcttccctcacagtcactccgacaggtccacctcccaggtcactcgcacacgaccgg

SEQ ID NO: 159612 - DNA, 890 bp, Homo sapiens
cagcccgcaagacctcgccgcctgcccagctctgtcattgactaaggttgcttttgtcagtacagccgccaggggtttccacgctcattcccctccggacaaggtggacagctttggtgatagacaactgggaggtaaaactccacagagccatgccagcgactgaccgcccagggacaggagatggagacgttcagctgcaaaggctacggaggaacccccgcaattggaatctctccatgccttctgcagcatggaaacatactccgggacctaccggggctctctcgggccacctctgagtgcaagggaaaagagtgcagttcaaggaagggaatgtgtctgtcatcccaccacttgcgcgcaaggccagttccgggatcagcaggcttccttcaccagcacgggctcttcattagcaaccactgggagggaatgtgtgcggagtcatgtcaagatgggaaggcacatgttcctatcttgacagcagcagaaagaaaaatggcagcagaaggaaaacagcagcagaaagaaaaatttgactcagatgggttgagagggcaatggcaagcaatcttggtacatgtcagctgcatctcagagtctcgctttgttgcccaggcagtggcatgatcttggctcactccaaactccgcctcctgagttcaagctgctcgctggaattacaggtgcccgccaccacagctgtctaatttcttggtttttgtttttgtttttgagatggagtttcgctcttgtcacccaggctggagtgccatggtgcaatctcagctcactgcaacctctgcctcccaggttcaagtgattctccggcttcagcctcccaagtagctaggattacaggcatgcgccaccacacccggctaatt

SEQ ID NO: 159613 - DNA, 444 bp, Homo sapiens
cagcccgcaagacctcgccgcctgcccagctctgtcattgactaaggttgcttttgtcagtacagccgccaggggtttccacgctcattcccctccggacaaggtggacagctttggtgatagacaactgggaggtaaaactccacagagccatgccagcgactgaccgcccagggacaggagatggagacgttcagctgcaaaggctacggaggaacccccgcaattggaatctctccatgccttctgcagcatggaaacatactccgggacctaccggggctctctcgggccacctctgagtgcaagggaaaagagtgcagttcaaggaagggaatgtgtctgtcatcccaccacttgcgcgcaaggccagttccgggatcagcaggcttccttcaccagcacgggctcttcattagctattgagacttctcaaactagagg

SEQ ID NO: 159614 - DNA, 101 bp, Homo sapiens
gaaaccacagggaggtatttccatcaccagtaatggccttaaaactcctcagaattctaattattttcaaagtcttggagtttgagctttgcagcagtggg

SEQ ID NO: 159615 - DNA, 449 bp, Homo sapiens
ttatgttctgacccaccacaataggcagagtacatgggaacaaggccaagatacccatcaaagataagctggataaagaaaagtggtccatcagttggggattttatttctgttagcagaaaaatagaattttgtgtgtgtcatagttgagttctcacgagatctgatggttttataaaaggatttcccctctctttgctctgtgcttctccttgttgctgccatgtgaagaaggacatgtttgcttccccttctgccatgattgtaagtttcctgaggcctccccagccatgtggaacttgagtctattaaacctctttcctttataaattacccagtcttgggttatctctttattagcagcatgagaacaaactaatacatgtgtctcctttaatttctcccagcagtgttttgtatagtcttatgctgtttgttaaatttgttcc

SEQ ID NO: 159616 - DNA, 152 bp, Homo sapiens
ctctgcctcccttgcccactgctcaggccaccatcttaccactgtaacagcatctgggtgctctgtctccctgcttattctccatttaaggaccactgaattttactcctgcttgcagccattccctactgacctcaaggtcacagtataac

SEQ ID NO: 159617 - DNA, 210 bp, Homo sapiens
agaactgggtatttccatcattaggataatttcacatgtgcagtagaaacgtattttatgtcagagccccagaaacatacaaaacttcagatccctgtaggaatgtgttcatagggcaacaaaaatagcatcagtgccttgagcttcattattgtcaatttaaaaagcagtcatggccgggcatggtgactcactcctgtaatcccagca

SEQ ID NO: 159618 - DNA, 183 bp, Homo sapiens
aagggaaaaagaaagcaaagaggaaagaaagaaagagaaggaaggaaggaaagaaaaagaggaagagaaagaaagaagaaacaaagaaacaaagaaaggaaagaaagagaaacagagaaacaaagaaagaaagaagagacagaaagagagaaagaaagaaagataaagaaagaaagagaaaga

SEQ ID NO: 159619 - DNA, 258 bp, Homo sapiens
agagtggatgttacgttagcaggcacgaaaacactattcatctccttgtgctctctccatcagggctcttgagtaaccagtgcattgtcagtaagcagtaaaattttgaagagtcttcttttctgaggtggaggtctcaacagtggatttaaaatattcagtaaacaatgctataaacagatgtgctgtcacgccagctttgttgttccatttatagagtatagacagaatagatttagcctaattcttaaagggcct

SEQ ID NO: 159620 - DNA, 203 bp, Homo sapiens
tcccaaaaggggctaatgggtcctgcaacagatatgggtttggtttataaatatgtttttgtgaggagatgggcaggacagcagtctctgttgtataacatgctgcttcttgcatccttctgttattcctttcagcacagaatgcaagccttatggctttcctattctaaatctgaagatgctcttttttttttttttttttt

SEQ ID NO: 159621 - DNA, 415 bp, Homo sapiens
caggactgctgagaaacggtcaagtatcattgggatgccagcctaaagaccaggcagattctggtgcacccacactagacactagacacggatctgaggactcagctgctgttggcaggttatgtctctaggcaagaatgtcacgatgcctcacaagagcctctgggaataggccagaggtcatatacagttaaaattgaggtgtacaaagtaccatcaccatactcagcctgctggagagttaaggggcaaaggtgagagaggccttctttcttttccaggaatagtgtatacaccacagtcagggtctcttaggtatcctcattttaggtggagatatgaagccaataacttcattcctcctctctgggaatcatctctaggcagaaactagtttggaagggagtacactttt

SEQ ID NO: 159622 - DNA, 340 bp, Homo sapiens
cctccagatttataaaaatcaatgccaaaaaaattttttacaagcccaaggatttgataaaaaaaaaaaagtgttggaggaggaataaagagtgatgtcaggagaaggaagacatgttggttagcttattgacataataatgccacataacaaccaaccacaaatcctgaatagcatgcagcaagaaatatgtatctcttgcctgggagttttatgtcccctggagcggctctgctttgcctgcagtggctgagatgactttgcgtcactctgtgggttggctggtgtggctctgttccatctctgtcatcctcctatgataggctggctggtgatgagg

SEQ ID NO: 159623 - DNA, 433 bp, Homo sapiens
catctgctcctgtcttaccgccattcaatccctagaatctcttttaatcaacttgctggagctgtaagcccatcgtatacttttaagttgcctcctggctccatcggtctgagtgatgaaataggcatttttaatatttgctaaacaggattgtggagaaggtgaagtcccagcagggctcccaagtggtaactgcatcttgttgtctccggttaatcatgtacctaatctgccaattattgacttgttcttgcaaaggattttacttggcttgacatatcagtagcaatcagtgatgaactgtcaagcaaacttgctcactgccttaaccgcccaagattctgacttgctgcaactgcctctgagatttcctttgacacctagcactgtagccaggtcagattattctttttcttctgtctgttacctttct

SEQ ID NO: 159624 - DNA, 156 bp, Homo sapiens
gagaagtattaggagagcaaggattctaagacagccatgtgaagctgaatgaccatttatggtctaggctctgaggtcacagagcaccacttctaatgtactctattagcagggccatcaaggggaggggacatggaccccaccaccacttgatag

SEQ ID NO: 159625 - DNA, 403 bp, Homo sapiens
tccaaggaaataaaggttttaagagccttgctttcaaccaagaaaacaaaagtgtagccacaacacatatgcatattatttttcatgaaaaggacttcttcgaaatccagctgcgcatttttgtagttgaatttgtattaacaaaatacaaataattttaaagaatgaagctgaagttcctgttggaaaatgttatccttttcagtatttcaaaactattatttcttatataattagttgtagggctattcataactgtgcttgccttctctgaaaacattatagaattatttttaatgtattttctttttttttttttgagatggagtctcgctctgtcgccaggttggagtgcagtaacacaatcttggctcactgcaacctccacttcctgggttcaagt

SEQ ID NO: 159626 - DNA, 559 bp, Homo sapiens
tcttggtgggggcatggctcagcgtccacgggcccagcctcagggctctggccataggccttgggcacacacactttccagaggcccctctctactttccctgtgcccgagacccactgccaagcaggcggccaaggacagacaggctgaaccagagcagcctcctcaggctccgcacaccttcccagatctgggaggcctgcctggggctgatgaagccatctatacaactgggcgcagccccactgagcaatgtatttttaaatagtttctaaccaaacgaggtcaagaaatgtctccaatgatgccagtggtgttattccaactgtggctagtaaaatataataacatgcatgttgtttttgttacctatctagctgattaggtaataaaatatgctcagtattaaaaatttagctgaagccattatcatacccagaactcggggctcttggttttcctcagaagtcacccaaatctgtcacctttccagacttttaacctatttaaatttttctggagaagggaaattcctcttggtgtccaataaatgtgttca

SEQ ID NO: 159627 - DNA, 436 bp, Homo sapiens
cacaatcccagctcactaaaacctctgcctcccaggttcaagcaattctcctgcctcggcctaccgagtagctggaaccacaagcacggaccaagtaactggaactacaggcacacaccacttagtagagatgggttttcaccttgtttgccagggtggtctcaaactcctgacctcaagtgatccgcccacctcaatcttccaaagtgctgggattacaggggtgagccaccacacccaggctggtgctctatcttcagaagtgttaatatcattaaagacaaaggcagactgaagaactattccaggttaaaggagacttaagagacatgacaactaggccaggcacggtggctcacacattttttttaaggtctcactgtcacccaggctgagtgcagtcatgtgatcaaagctcattgcagcttcaaatttc

SEQ ID NO: 159628 - DNA, 559 bp, Homo sapiens
ctccagcatgaggcggtgaccacccggcttgggcttctcaggggtgtccctgggcccactgccttccggatgggccagccccacgctgggcaggggcaggggcaggggcagagacaggcagcagcaggggcttcctctcctctctccacaggtgaaccactcaccgaccccaagcccccacccagtaggacccactcagcaggtagcagtggagacagaggccgcctggggcatgctggctggacaggagctgtccactccccaaatgctgccaggccccttcagatggaggagtccaggctgtgacagccaggtggcccgcggggaactgctagaaggggccggggagaaagggggggatcccgtcggctgcgtgtcgggtggtggtttggtgggtgctccgcgccccgcccacactacgggcttgagaattcacagttctcctcccgtccacgtctccgcgccatccacgccccgcgcctggggccccagttgtgcgattctgcgcccgcccccgggccccagggcaggctgcccccagcccctccacggcggccgc

SEQ ID NO: 159629 - DNA, 471 bp, Homo sapiens
acagggaaactgattactacaatttatcttcctaatagcgaacttgtcataacaattttaaacattctttttcattctatctctcttatcctgatctcatattaatatgagatcaataaaaaagactgattggaaggcaggggtgggcactggccatggacccttactccgtgcttatcatacacaataatcctcattttattccattttctgaaaaagacctactcctacagattattattaagaagttgacagataactgagaaactcatgaatagagaaaaaataaattcacatcacacatcacaaaaaagaacaattagccaattagtcaaattcctttttgagatctgggttcttgtctgttcattgtccctcatcttcctgctaactagtattctctctgtgtccatacacaagacatgaacttgaaaaatcattctattgttctcaacatttcagctctggccc

SEQ ID NO: 159630 - DNA, 229 bp, Homo sapiens
agaggagcccacagagaagctccaaacctatttcccaccaagactggcttcaactcaaccattcagtcccacaaacaggcagattgttctgggagcaggtggaacaccatggggagcactaaagtggtatagggagagaggccttccttagagaagcaaagccatcctcacacaggccatccaggttgaaagcgggagaggatgagcagacgcgggtggtgtggctgtc

SEQ ID NO: 159631 - DNA, 395 bp, Homo sapiens
cttctttcgtcctttgctccagtggttgtagcttcctacctccttcttaccctcacccctaggcttccactttagagaatttggagaactggggaaagaaaagactgttttgtgcatggtgtgcctgcagcctagtgccatgagctggttcttgccgtgtctgagccaccagatccactccttctgtggttcacacgctattccctctatcccagccaagcttgcaaactctgatcatgaactaccaggtggagggggggcatggatatcctccccaggaagcctgtctggaacctctgaacttttctgacctgtgcatgcctctaccacagcacaccttaatttcttttgaaatcactgcatttgttcatttgttagttgtttgcttctagatg

SEQ ID NO: 159632 - DNA, 341 bp, Homo sapiens
cagtaagaacagcaattgtcgtgggggtttagtttaccctatccctcttccccagctctgtggtagacttgaaaatcaatagcccccatcacagtgaaaaccagcagcatggcagccactagagggggaaagccccatttctggaaaatgtcactatttgacctgtcttgtggttccttggaagaccctacttgtaaaactgtctttaattgacctgactcagagcttgcacagtgggaacagtattttcccggagggcatttgtccaaacaatcagaagtacttatttaccatcacagctacttgagatggaagataacagggtaaacaacaggctaacc

SEQ ID NO: 159633 - DNA, 571 bp, Homo sapiens
ttccacttctgagatgaaccctagtccctgctctccaccctcaccctccaccattcacctctaactcaagggaaatggctgcactgaggagccaaaccataattgagggcactggtacagatttggcctgattagcatcacagaaagtgtatcttgaattccagtccaatgtcctggagtcctctgaggctctctcacatgtgtctgtgaacacagtctggggctgccaccatgtgacatgtgccacttgccctcaatctccagatccacccaggcttctgagtcccactctcctcaccagaatgaaaatgctatgctatgccagcatttcctgttgtctctgtcaactctggaaagcccttgtggactgcagtgcaacttctcttgggttttgcttgacctcttattgtggctcatactcactagggtcaggaacatgcatccctggaggccaggtcagaggcccttctgactactcagccctgattccatgctgggtcatagtccttgggtcaggcttgtatcccttgactctctattgcccaaaagtgactccttctccccggtggaa

SEQ ID NO: 159634 - DNA, 467 bp, Homo sapiens
ttgcaaactctgtttgggcatagtgtgggaagttgagaaattgccaagattgttttttaaaacttcgattaaagtatctatctatttggtttaatctatatgttcatgaagactttcatttgactttgcgatgattgataattgccaattggggcttgaacctcatcattttaattgtcagttttccttaatacaattaagaatgctatgctaccagatatcttaagtcacagtttttgcattttagattactgttgtagtataatatgtgcgtagcaaaacagagacctatttgtttaggggaaccagtatttgttgaatcttgaatttctttgtgtctgtttggattttacaacttcctgattttcccacgtacagtaagtcgtaaattccagatcaaaatatagaaacggagcataatggaaaatggggaaaacacggtatgagacaaagataatgcactaaga

SEQ ID NO: 159635 - DNA, 468 bp, Homo sapiens
atgcctacttttcacagggcataatggccattatgccaagaggacttcacatctcccttaagatatagatctcaattctgttgctctttggggagaacttctttgaaaatcagcctctcaggggaactctaggaatggtcatttctgacatgccaccttggtggaccatgttttctttagtcattctggagttatctttctaagatgcaggaataaaactgaaggtatatgaaaggtaagtgttttagaaaaaatgaaatatgcataaaagctgtcccagatccttgggacaggaatgacttgacagtctgagaagacaatattaaggccctatcacaatatagtgcttctgtctgcaaaggactttcaacactctgttacattaaccctcctcagatgctgggagaggcaggaggcatcatttccccattctctcctgggggcacctaatacccatgagtaatgacc

SEQ ID NO: 159636 - DNA, 827 bp, Homo sapiens
acactggagtaacaccttcaaagcactgaaagaaaaaaccatcaacctagtgtactgtattaccagcaaaactacatttcaaaagttaagctgaaataaagacttttttacacaaacaaaaatgaagagcattcatcaccagcatacctgcattacaaaaaaatgttaaaggaaattatttagtcagaagcaaaaaaaaactggtaccaagggaaaatctggatctacacaaaagaatgaagagtgttaaaaatgataaatatgtgggttgaagactttttaatccctttaaagaaaaattttaaaataataaaacttacatgcagaaataaaatagatgactccaataacataaaccaagctgtgcaaactttttctgtaaagggccagaaagtaaatacttttggctttgtgagccatatggtctctatcacaactcaactctaccattgtaatgtgaaagcagccagccatagacaatatgtaaatgaataggtatggctgtgttccaataaaactgtacttttaaaaattgatggcaggcaagatttggtctgtgggttatagtttaccaactccaatgtaaaagataagaagaaatggaagtataatattgtaaggtccctatattacataaagtggtatatactgtttgaaggtaggctgtgtaagtaaaagatatacattgtaaacccaaaacaagtgaaaaataataataaagaattacagctaataaaccaattgtggagatagaaattgaatcctaaaaatactcaatccagaaggcaggaagagaggaaaaaaagaaagaagtgggacaagtaaaa

SEQ ID NO: 159637 - DNA, 314 bp, Homo sapiens
tgatctagaggatccctcataggttcgaggcaagatttggtctgtgggttatagtttaccaactccaatgtaaaagataagaagaaatggaagtataatattgtaaggtccctatattacataaagtggtatatactgtttgaaggtaggctgtgtaagtaaaagatatacattgtaaacccaaaacaagtgaaaaataataataaagaattacagctaataaaccaattgtggagatagaaattgaatcctaaaaatactcaatccagaaggcaggaagagaggaaaaaaagaaagaagtgggacaagtaaaa

SEQ ID NO: 159638 - DNA, 273 bp, Homo sapiens
gcagttatcgggggggatagagcaacccaggcagagggaagagaaagttccaaggctctaagatgggaattaggagtgcagcacgtgctcaataatctgtctggcaagagaaagagcagacgactgcagcagaaagagcacaggactgcaagtcggaagaactgggtttgagtaccagctcttcatctgtcactgaacctgttttcaaatctatcagttgaagaaaatacctcctctgtgaggttttataaggagtgagtaagatcggctggg

SEQ ID NO: 159639 - DNA, 244 bp, Homo sapiens
ctggttccccaaatctactttcttgcctcttgcagctgggtggctgtctttccccacttctagaagtcttttctgatgagagtaaatcagaagattcctgaactagggcacgccatgtactcctgaaagaggaggcaccttacaaagaacaggggcattaaatgaaaatgcacatgctaaaatttgagactgcaccccccccaacatccttcttaccccactgggcttccagaaagtttgaagc

SEQ ID NO: 159640 - DNA, 611 bp, Homo sapiens
gctagctcggtaccccacaccacctgagtcaccacctgagtcttgagtaggctctcaacaaatgattgttgtgcttattaattgaagaagaatgatcttatatgtgaatcagaaaggaaggaaattaggagtaagtgacaacgaagcaagtgatttgtgaacattgtgtccgaaagagaatctgaggaaaagggtgttttgaggttagtagcagggctgacattgaatctgagttccatgcccagcagtgagccacaccctttccttactaaggaatctggaaatgttgccagccctgccttttatctttgaaaacacagggctatttatgtctaaacacaatgcactgaatttaccttcattggttgacacagttatctttcctgatcctcaaaacctcaacagacagcaaagtgcacaacttgctatgtaatagaagtttggtagatgggaagtctacatgcaaagctgatttattttggcaagataactcagccgcaaggggttacacggaaggcagagagaatggatgtaaagtgtagtcaggatactactgagaaatcctagtcaaggatgttgcaatagcctgtgaactaggaaaggagtgatat

SEQ ID NO: 159641 - DNA, 405 bp, Homo sapiens
tcacgtgaaaaaaaaatctttcacttccttccttgggaaatgctcgtttacatttagtgaatggtcctggtagttttgacaaggaaatatattacgaactaatggagaacctgctttggagatctgtgccacatgtgttccattaagcccacttctcctgccgcattctcaaccgaagaaggctggcctccggaatcatggccttactcattggtaaagaattctgatataagtatacttatttaaagatgtaaatagaaggtaacttagcatgtttcagaatttaaaacttgcctcatatgaatttattttgatgtgaaagttgctgatcaatttggaaaacatgagtggctttgcttgttactagttttttattgctagttacaggtatgtctaagctcatat

SEQ ID NO: 159642 - DNA, 457 bp, Homo sapiens
ggattgacagctgcaggatgtagtgcctgcctatagtactgaggccatgacccacctctggagagaccacagcctcatccctagagtagaactggaaattctccattgagacaggaaggcagcacttgaacctggcaggttttggagtgaagtgtctaaggacagaatttctcatttctccacctctgcccatgtgtaaggcagcaatattttcatagaggtgaagaaggcaggtgtcccgtggttattatgacatctgtttacctcattctagtcactgtgccatgtttcacagccattgtcaactacatttggtgaaaactgtttcctccgtccacaactggaacattgacactaaccacattctagagttcattacatagagctgtgtctgtgggtaagttaacaggtagttttaaataactagatatagtcttttcctcttccatgtaagcca

SEQ ID NO: 159643 - DNA, 992 bp, Homo sapiens
ggaaaatagtgaggagttaagagtttaatgggtagagttccagttggggaagatgaaaaattctggagatgaatggtggtgatggtttcacaacaatgtgaatgtacctaatgccaaagaactgtacacttaaaaatgattaaagtgataaattttatgttatgtatattttaccataatgaaaattttaaaataccttttaaaaagtttgttacacagcaacagataaccagaacagttctacacaaacagaagtctgaaataagaactatactgcactaagcctcccttcacaaatgtacactggctattattttaggacatgattttaagaaatcttgcctccccatttaatttttaatgttctgagcagaatcttctgcaatacaaatattaaaacatatgaacagaactcagagttaaaattatatacttaattacatgcaaaattatcacactgtgtagcaatgagggataaataaaaatcattcatggaagtaaaaataattacaaccaaaccagtacttcaggggtcctcctggaggaaagcaaagggaaagaattatggccgtcctgcccttaatctgttcatcacctctaacaaggtttgtgaggaaagggggatggccctacgttaatatcaattccaccatatcctaattcccactaaaccatcaaataggccagatgagaatggttgatacaggaagaaagattagagaaaatataaggaaaatacacctggtgggaaaaaacgaggatactttcacaaaaccctacttaatttttcgaattcttagcaacaaaacagtaggtatttttatttgtttctgtgacagaataatatagcagaccagggtagctgtattaatgtctggagcactgctctctgagatcagatagttaagagaggaatataagaaacaaatttcaggccgggcatggtggctcatgcctgtaatctcagtcctttgggaggccaagctgggtgg

SEQ ID NO: 159644 - DNA, 183 bp, Homo sapiens
agcagagaaggcaaagtcctgccctcatggcaggacaaagaagtaaattatatagtgagttagaagtgccatgaagaaaaatagcacagagaaagaaatggataatgctcggtggagccgtgagttgcaacagtaaatgaaatagtcaaggaatgcctcacttaagtgacatctgacttaaca

SEQ ID NO: 159645 - DNA, 386 bp, Homo sapiens
aggtgcaaatgcatatataatcctatcttattacagattcagttcatttaatggacaactgagaatgaaactgatagtaaagttgaaaatgtcatcactttattctcctaattttcatttttctatcacataagcataaacaatgcttccttttgttaatgcaaaattattaacggaaattaaccaatattttctcgtaaaagtttcagtggccttgaatataattttgtgtgtcatctgtacaacacacacacatatattatgcactagagaacagactggttagcaaaaataatctactcaggattaatgccaataagacaataaaaaatacgaactcaactacatcagatactgacagatcaggcaagggcctgatcaagctc

SEQ ID NO: 159646 - DNA, 436 bp, Homo sapiens
acctcccaggttcatgccattctcctgcctcagcctcccgagtagctgggactataggtgcccaccaccacacccggctaattttttttttatttttagtagagacagcgtttcaccatgttagccaggatagtctcgatctcctgacctcgtgatctgcccatctcggcctcccaaagtgctgggattataggtgtgagccaccgcgcccggccagtatttcacttttaagctcaaaaaatgtgtttagcttcttacaatttcatgtagtatttgagattaatagctccatagagagatttgattgtttagccatccatgattctgtgaaggagaatgttaacaatatctgtgttttggaatttgaagatcgaatgattttttgttttttttttgagacggagtctcgctctgtcacccaggctggattgcagtg

SEQ ID NO: 159647 - DNA, 458 bp, Homo sapiens
gcggccgcctactactactaaattcgcggccgcgtcgaccttaggacaaatctggaccagaccaggtgtggcttctttttaacctagccaataggaagcacttgttgtaggaaccctcaccccagtctgtgtagatgtgtctagagctgagcctctttcttccagtttggcctttgtgggctctccttcccatttctggcctcaacaaactgacctgccagcaggttctggagccttcccaggcctgcagcaaatagggcttggcaatgacaagatctgtggtagggcagcatttattggatgtcctttgaaattaactttcccatggtccataagtgcctcctgggagtttcttcagggtcctggcttcccttgaacttcatgcttatgctgactcccacacacatgtctgtgtttttcattttaaagatgattggtaatgaattgggggcggggag

SEQ ID NO: 159648 - DNA, 933 bp, Homo sapiens
cttgggctgggccggggccgcatcccactgtccctccccaagggcaggcatgcaggggggtcagccacaagggacctgcccttctccctgccttctgtgggttgggaggctcctgactgagccacctggagggagagccctcacattcagagccctccaaagagtttgccaaatgttggaaatgcctccagggcccgtccaccagccgtccagcttccggtgcctgcatgagtctccgcttggccctctcctcggcctaggaacccgcaggtcttgtcccgtcaggttcctcctgaagcttttgttctgagaggaaaaactttccagggtttcaaacttggaaaaacacctgaacgcagccagacacattttccgtcgtctggtcagccaaggaagtgttggcctgtggctgcactcacttccttcagccccaggaagccttggtcgggggcaggagggagggtcaggcagggctgggggcctgaccgcccacactcctcctcaggcctgcggggaacgccctgctccccaactaagcagccttctctttgttctcttccttctctctgtaaacccccgtttcctgccttgttccctccctgaacatgctcttcacctggcaagcagaggaagctacgttgggatatgtgagcagtgtgctccgtggtgctgctgtgtgacccgccttcccgtagccccttgccccgctgctcccgctaggccctctttcctgctcctgcctctttccttccccatgcccaacaaacccaattccctggtgggccctgttcagggcttttccttctttccgtgcccccctgcgattcaagccccgttttcagctgaggcagaaagaaagtcactgaaagctggaaatgaaccaagttggcaggggagtggaaaaatgacggggcgaaatgaagtaggaagaag

SEQ ID NO: 159649 - DNA, 387 bp, Homo sapiens
gggtggggtgtcttcttacaaatactattaagcttgtcaagaaaattaagttatcagaaataaggtaacaacagaggccaaaacatgtttgctgctgaggcgagtatagagaaatgtaagatgttgcttcctaagactaaatctcaaataagaggacttaacaaaagagggaggcgcagggggtgacggcggcaaaacagctccagagtcatcagcgtgagggccgtgggacctgtgggtgtggccacgtgcaccttagggtcagacacagagccagatggctgctccatggtccctgcggctcagggccttcgctccctcgggtgcagatgtggtggctgggagcatggtgtcgccaactttttactgttagccccaggccatggg

SEQ ID NO: 159650 - DNA, 273 bp, Homo sapiens
accagattgcggtgtcacacctcatcagaaccttgtcactgcaacctctccttcctgtcaccacttcaagagcctctgaccccacacccagggatgcccaggaggaccacctcgtttcggttactgcagtgcaattatctcagacccccatggcttttcctggacctcactgacacccagaacagctgcagttggaccacctttgacttcaacagtcataatctctcttcatcccagttctccagcctcgtagtcccaaaacccttactctta

SEQ ID NO: 159651 - DNA, 482 bp, Homo sapiens
gtgattgtgccactgtactccagcctgggtgaaagagtgagatcctgtgcagaaacaaaagaagaaaaaaagagatatgaaagcctatatattgaagactaccaagtactgcttagagcagttaaagacctttggaatagaaaatgtttcttcttgcatttcaagattgcttttgttttggggggacacactattttttaggaatatgaagttcttcttaggcattcctgtaaaaaaggccacttcttgataggattgtattgaatctgtgggttgctttgagttgtatttttattttaaccatgttacaacttccaacccatggacacaagatgtctgtccattgatttaggtcttcctgaatctcctcgagcaatgttctgtagttgtctgtgtacaagtacggcaccttcttgaacaaatttattcccaggcatattattcttacaagtgctattataaatgaaatcattgtgtcaatt

SEQ ID NO: 159652 - DNA, 331 bp, Homo sapiens
tacagaccccaaactatttcagatgtagttccagccctcctaagcaagtgttagctcaaaccttctcactcttgctcagattcatagctgctcacctttcagaagaaatgacaatgctgaaagaggaaaccaaggggacaagagagatggcagccatcccaacagctgtcttgtgttgtgcccctactgtgtgccagacactgtcctaagcactttacttatattaactcatccagctcacaaccaacaaaatggccctaagaggcctctgctgatatccccgttttccaaatgagaaaactgtccacggggtcggtcagtaacttgttca

SEQ ID NO: 159653 - DNA, 318 bp, Homo sapiens
agttacaacagctccagttacaacagctcagataaggggtgggacagtgacctttctacagggaggcactttgggtttcatgtcaaagggtatggatatggtctccccctacaggtggcaggcaggtattttggaagaaatagaaaatcaaccacactgagaagatgtgcgagtgcagtgtccccagattaggggtcaggaccatccctgatactgtttaccttgaagagccagatttctgtgcttgagccctggagctacatcccaactgttggcgaaatgcctccactgtaaagtcctgcggtggaaaactagaat

SEQ ID NO: 159654 - DNA, 538 bp, Homo sapiens
tatgaccaaaagttgttggctctgcaacaagagcagactgatagccagcaccaagacagatggaggtgatgttctaggcagaggtggcttctagaccttcctttgcactgccagcttctagtcagtgttattaaatctagtccctttcataactgaaatttcaaacataaattatattgcaacatccctatagaaatgtctgaagttatatatgaagaaggaaggaagatgctgttctcaatacatcccacatcattaatatgtcaaatctcttttcttgtttaaaatgaaactgggatgttttccaacttttcatcctgatggtaaggatagttgcccgtgttgggtagggaagggagggaggtgtagctgaaagtacagttttgtgtttccactaatctgatccctcccaccagctgccctttccacctgccctacaaactctctgctcagaaagtacacattgatacaacttatcaaagccagccctctgttgtagccatttcagcaaaataagccaatttgggtttggtagatg

SEQ ID NO: 159655 - DNA, 156 bp, Homo sapiens
ccatcacccccctgcctgggcagccccttaatgtcagtgacagcctgtgctgcctctgtgcccactgtgtgcccagcactgggccaagccctttgcatcacatgatcctcactaccgtcctctgtggtagacactgagcttattcactaaggcaca

SEQ ID NO: 159656 - DNA, 567 bp, Homo sapiens
gggtagatttcacttttgaaaatttccagtcatgtggaaccaaatacgttgatctaaaaagaataatgctgttttttttaaatcaaaaactaaaaagtgtacctatgaggaaacttattttcttgaaggacctgtggactggttgagatagttcctgaagaattccaaaaatatttaagcattgacatcactggaataagtgaatgaccgtgtgaggcagttgtttttgtgttctgtgaacataaacattctgggataatttttttttaatcttattaattcacagtaaatcaaaaatattgtataactataaaaatcactattttcgtatgcaacattttcagtacctaaaaagatccatttttcagcttgggcaacatggtgaaaaatgggcaacatgggcaaaaaatacaaaaattagccaggcatggtggtatgcacctgtagtcccagctacttggggagctgagacaggaggatcacttgaacccaaggaggtggaggttgcagtgagccgagatcatgccactacactccagcctgggcgacagtgagaccctgtctcca

SEQ ID NO: 159657 - DNA, 340 bp, Homo sapiens
agaaatatattggggcttgaagggagaaaatttgacatctgattggatgtagagtgagaaaggatcaaaggcaaagaatctgagttttttccttggagacatggaaaaggtgggataatatcagccataatgaagaatgatctcaagaatgtcctcaaaaagttatgtcttagccgagatgggcggatcacgaggtcaggagattgagatcatcctggctaacacagtgaaaccccgtctctactgaaaatacaaaaaattagccgggcgtggtggcgggcgcctgtagtcccagcttctcaggaggctgaggcaggagaacggtgtgaacccaggaggc

SEQ ID NO: 159658 - DNA, 181 bp, Homo sapiens
aaaaaaaaaccatatccaaaccatagcattgactatagttaataataatgtatggtatactggaaatgtgctgaagtgttctcagcacaatggaaaaaaggtaactatgtgaggtgatgaatatatgaattagcttgattgtggcaatcatttcaaattgtaggcatatagtaaacatcac

SEQ ID NO: 159659 - DNA, 385 bp, Homo sapiens
tagatgtcatgatccacacgtaacgccttctgtaccaattctctcaatccctccagcagatacagacagtctctcctagtagtcagatcaggcctggtgggaggatctaaccttttatggggtgcagtaaacactgacagcctaaagcaaacgttgagaggggtaaaagggagaaagtaaggccaacaggagtagggtagaatgacagatgtcagccaaagctgcaggggaaggacatgtggtatacagtggtaatgagacatcattcaaatgcttcgcttcgcacacagggctgtcaagcctcaaactgctgttcctgcctctcactcctgctacgtaccaggtgtgagcacacactgctgttccaagccctccgattttgtct

SEQ ID NO: 159660 - DNA, 374 bp, Homo sapiens
aggttattacatgccttgctcaaggacagggggctaaaagtaggcaaaactaggaaccaggtcttctgacttctatactgcattctttctactacccatacgatcttcagggaagccttgtgtatagcattctttgttcattggtaagttattaaatattagccctttagaaaatgtaacaaacatgataacattatttacagccaaatccactgctcaacctatggcacaatctactaactttggaaacagcaccctgcctgtcagcatgacaatgttgccttattattagtaacagtgactaaaaattttcaaatgatttaacacatttctgaacctcttaaaaaattaaatgtacattattcctataaatg

SEQ ID NO: 159661 - DNA, 663 bp, Homo sapiens
gtacagaagaaaacaaagaaaatacctttgtgacttgggttaggcaacaatttcttaggataggacacaaaaagcacatacaaaaaaattaatcagttggatttatcaaaattaataaattctgataaatctgagcggtggttcaggcctgtaatcccagcactttgggaggccaaggcgggtggatcacctgaggtcaggagttcgagatcagcctggccaacatggtgaaacccccgtctctactaaaaatacaaaaattagccgggcgtggtggcacatgcccgtagtccctgctactggggatgctgggattacaggcatgagtcactgcgcccagcctatcctcaccttgaaacctttttattcttgacttccagaggtttaattttgattattcgttcttctcaatttttctctctgctctcctttctcttctctaagggtaggtattcctcaagattcttcccttgaacatcctctcccagagccttcttaggtaactaattgtttgttttagtgagatatgatttacaaggtgtttgattttgaagtttctctgtacagataattcacaagtctgtatctctggccttactttatttaagttccaaacttaaatttgttcgtcagtaccttcctaacatgtcggcttggatttta

SEQ ID NO: 159662 - DNA, 419 bp, Homo sapiens
cccccccaacaccgcggtggccttttcgcttgggccgcattccagggctccggacgtttacgattcactggcctctgccccgagggacccaggataagggtagggggtgtctcagaggtcattaaataaaagatgtttacagtgagctgggggaagggggtacccggggagacggcagccggagaaggcttcccagattcaaaggtttgggagatgacctcgacgtcggagagggggatgcgggccgccggcggcgctcactgtgggcgaggtcgccctgtccgaggcccagcgacggggctgattccccacccccgcccctagccaagaccactaggaaccccggcttcccaggaacgcagggcctgccgcccccagaggcccggatttggaggcggaggctgtgcctccgcggccgc

SEQ ID NO: 159663 - DNA, 295 bp, Homo sapiens
gcaatgtgcacttcataacgtgtttaaaaatgtaagttacgtgcttctgcatttgtcctggaagatcgcacgcacttaatcaaatcacactgtctcacaccgggtttccaaaaactgacatacacccaagcaacatttccgacaacatggtaagtagaaaattgtgattatttccttacataattatttcagagaattttgagtaaatacagacattcccactgaaacttgaagttataaaacatgtactacacagctctgagggttctatcttggctctgaaataccacctgtg

SEQ ID NO: 159664 - DNA, 391 bp, Homo sapiens
aaaaatgccctccgtccattccgtctttcatccaaatcaacccaagtcattaattatttcaagaaacatttactgagtacctaccataggcaagtccctaagtgtacaataaaaaacaagcctgggcattaccattcaggacataggcatgggcaaggacttcatgtctaaaacaccaaaagcaatggcaacaaaagccaaaattgacaaatgggatctaattaaactaaagagcttctgcacagcaaaagaaactaccatcagagtgaacaggcaacctacagaatgggagaaaatttttgcaatctactcatctgacaaagcgctaatatccagaatctacaatgaactcaaacaaatttacaagaaaaaaacaaacaaccctatcaga

SEQ ID NO: 159665 - DNA, 332 bp, Homo sapiens
gtttatagtatagaaagagaagagcaacattaaacaggatttcaatcttcttttttttgtttttgagacggagtcttgctctgtctcccaggctggagtgcagtggcccgattttggctcactgcaagctccgcctcctgggttcatgccattctcctgcctcagcctccggagtagctgggactacaggcgcctgccacgatgcccggctaatttttttggtatttttttagtagagacggggtttcaccgtgttagccaggtggatcacctgaggtcagaagtttgagaccagcctggccaacgtgttgaaaccctgtctctactacatt

SEQ ID NO: 159666 - DNA, 121 bp, Homo sapiens
cctgcactattatccttgataccaaaagtagacaaaggcaaaaacagaccagcatttgttacgaatacagatataaaattttccaacatacgtaccagcaacctggatctagcaatatgta

SEQ ID NO: 159667 - DNA, 390 bp, Homo sapiens
ggtgagcatgtgggcagctgagcatgtgggcgggtgggcatgtgggcaggtgtgcaggtgcacagatgggccggtgggccgaggcatgactcccatgcccccacagccttgcccagactccccagcaggcccccagctttaacctgctggtctccttaaaagctcctggacctcaagcagacttggtcttttggttgaataaacagcgtgactcccgattttggcacgagggttacccactctgaccttccccgtgagaccccactgttcagacttaatgaccctcctcggtagctgaaatgcactcagtgctaactcattttaacgttatcctgagaaaaagataaaaaaagaatacgaatccgcgtactagaactctaaagaacataa

SEQ ID NO: 159668 - DNA, 364 bp, Homo sapiens
tatagaactcaacctgcatctctttgccatccatgttctttttttttagagactgggtctcattctgtcccctaggctggagtgcagtggcatgatcatagctcactgcagcctcaatctcccaggctcaagtgatcctcccacttcagcctcccaagcaattgggaccacaggcgcatgccactgtgcctggctaatattttatttttttgtagagatgaggtcaatctgcattaaacttcatgttgctccaacaccgcattttatctccccactttcccagcaatggacaactaggcttgtgccaattctccatcaccaccagaaatgctgcaatgaacattgttgtatatattcccttttg

SEQ ID NO: 159669 - DNA, 195 bp, Homo sapiens
tgccctgccccctcttaattcacacaagtgtaatatcctgcccaccgtgccactccccagcacctctccaaagcaaagaaatcttaggccaggtaagctaacaaaaaacataaaatgagacatgagaagtttcttagggacctagggtcatcagatttagcaaataaaaatgcaagatgcccagctaaatatgaa

SEQ ID NO: 159670 - DNA, 239 bp, Homo sapiens
acacaaatttggtcattcttattatacccaattgaatcagagtgaatggaccaagaggaaaaagcactccagacacataataccagctccaaaaattgaactttttgcaaactcaggtgctgaaatagcctgctgtaaccatcagaccatttttacctggtagctgctgaaaaaaactgcctgggctataagactagttttacttgttactatcactcaccaatcagagcttgaccgct

SEQ ID NO: 159671 - DNA, 200 bp, Homo sapiens
gcgttgaaaacatattcccacaaaaacatacacaccgacctttatagcagctttatttctaattactaaaacccgaaagcaactaaaaggtccttcagtaagtataactaaactgttgtacatctagatgatggattttttatatactgctaaatgagccatcaaaccatgaaaagacatggagaagacattaaatgcat

SEQ ID NO: 159672 - DNA, 526 bp, Homo sapiens
aatactggagagaacccatgatgatgcatgagaagcctgggtccttaacgctccttcacacttgctaatccccctttttaatgagaggcagagcctgttaaaaggcaacagtacctagtgataattgaatttaataacaagcttttacttccgttgtatctgtttcttcctccatgtttccgctgtcttgtttgtggcggtggcttctggtttgcccagtgttgatcacaatataatgtttctttctaaaacaaggcgatttgatttacactggagtggttttgaaggcaaggaatagacagatactgtccaggaggtggcggaacatgggaaggtggtttctttcttttttccatgttgcccaggccagtctcgaactcctgggctcaagcgacttccctgcctcagcctcccaagtagctgggacgacagcattgcatgggaaggtggtttgagaagtgcaggcgtaatttattcactcggcaaccattaagtgggtacctgccttttccacggccctgttttg

SEQ ID NO: 159673 - DNA, 499 bp, Homo sapiens
tctgtagaccaatttgcagagtattccatcttaataatattaagtcttctgattcaggaacatggcatgtctttccatttatttagatcttctttcatttctttcagtgttttgtagttttcaaagcataagttctccacttatttatttattttttgagatggagtttcgctcttgttgcccaggctggagtgcagtggagggatcctggctcgctgcaacctccgctcccaggttcaagtgattctcctgcctccacctcccgagtagctgggattataggcacccgccatcatgctcagctaatttttgtatttttagtagagacggggtttcaccatgttggccaggctggtctctacctcccgacctcaggtgatccgcccacctcggcctcccaaagcgctgagacaacaggcatgggccaccacgcccggcccagactcgcttttataactgacacacttaggataacaaatctactcctgcgaacctatga

SEQ ID NO: 159674 - DNA, 253 bp, Homo sapiens
ttgtcatctctgttctgctattgagatcgcccagataattttttattttggtaattgcattttttatttctaaaatttcaaataggttattttaatattttctaatttctctgctgagaacatctatctttccattcatttcgaacgtgttttcctttacctcatgaaacagagttataatagttgatttaaactctttggctgacacttcaaacatctgggctttcgcagttgacatttgttgattgtcatt

SEQ ID NO: 159675 - DNA, 392 bp, Homo sapiens
gcttagcctttccggcgggcattacctcaaggcctccggagtctcccctccagacaggcatttcctcaaggcctccggagtctcccctccagacaggcatttcctcaaggcctccggagtcttccctccagacaggcatttcctcaaggtctccggagtctcccctccagacaggcatttcctcaaggcctccggagtcttccctccagacaggcatttcctcaaggtctccggagtctcccctccagacaggcatttcctcaaggcctcacgagtctcccctccagacaggcatttcctcaaggcctccggagtctcccctccagacaggcatttcctcaaggcctccggagtcttccctccagacaggcatttcctcaaggtctctggag

SEQ ID NO: 159676 - DNA, 198 bp, Homo sapiens
tgatctagaggatcccgtgttgatattgctagggtggcgcttccaattaggtgcatgtgaatcaccaagggtgtggtctggcccgcagtcagtgcctcccagaggtcagccactgccattcacaggaaagctagaacaggggtggcactgcttttgggtcatggcctttggctgcagtaggagggaatgaagacaaac

SEQ ID NO: 159677 - DNA, 690 bp, Homo sapiens
ggtttgtaagggtctgttgcattgtggggtctcacactcattgcctgccctgtgctgccctgggcagctgccttcaggatagagatttttgagtttatggttttgctgaaagaaattaactggaaatacttttttgtttacaaatcaccaatgccaatctattcatacattctcatggctaccagaatattccttacctgttcatccctgatggcagaaggaaactggttgatcagggtcagggtgagggggtgtgggtgtgggaactgtcttacttggtgacgcccaggaattgagatggcctcccaatatggcgggcctcctcaccagcaggaatgtgtttccacaaagtcctccagctctgtccatctgacattctgtctctgtctccgttattcttacgcggcacttctctttccagcccccgtgctgcccctcccctccctgtgacctctgccttgctattatggtttgcacagcccagtttgcataaagtggatacatctagaatgttctgccatacaaaagcagcagctgtttttttatccatgtgaaagcatttaatgtccttagccactataaattatgacagataacacactttgcacagactgtatttcaagaagaattttttacagcctgccctgttggtaggcaattcctgttgttacatatcacgagaaagcttgc

SEQ ID NO: 159678 - DNA, 594 bp, Homo sapiens
aattgtactactatgacttctagttttatgttgaataacagtgatgaaagtgagcatccttgtcatgttccagatcttagggtaaaggctttcagtttttccccactcagcatgatactagctgtgggtctgttgtatgtggcttttattatgttgagatatgttacttcgatatccagttttttgagggttttttttttatcatgaggggatactgaatcttaacaaatgtttttttccagcatcaactgaaataatcatatggttcttgtccttcattctgttgatatgtggtattatattgattgatttgcatgtgttgaataatcattgaggcctgggataaattccacttggtcatgatgatcctaatgtgttgttgaatttgggttactagtatttgcttatggatttttacatcaatgttcatcagggatattggcctgtggttttctttgttttcttttctttttttttttaaatgtgtctttggttttggtattaggatgatactggcctcacagaagatggacacattccctcctcttctatttttcagaatagtttgagtagaattggcattagttctttaaa

SEQ ID NO: 159679 - DNA, 132 bp, Homo sapiens
ggacctcacattacatctggctgttataccttaagagtttctcttttaatcactgccagcttcccttccactctttatgccatttatttgctgaagaatatacatcatatgtcctgtagtggagtccatatc

SEQ ID NO: 159680 - DNA, 262 bp, Homo sapiens
agagcatgagagagcttcagctttgatacttaatttctatatatcccatcttattccgaaaggaatttcagttagcttaatttccattttagtgctgtttctttttgtgttaatttattgttttcttaattgtgctgatttaaaatccagccaacaaattaatttaacgcttgtctgtctaaatgtattttcacttcaaagtctcttcagtgaatatgaagacaattagctatatttttgctaacaagatttgctgatgggg

SEQ ID NO: 159681 - DNA, 231 bp, Homo sapiens
ccctggcctagtcattagagaaatcgacatctttttgtggccttatacttgttccaaaaagtgaggatggaaagtaggtaatctatgagtcatctttgttttgattatggcatgtcttattcaaggagagtgacgatgaaggtagaattaatggtgaagaatattaaaagaaagaggtcaagtaatgtgattgaatcgctgggactggagagacaataatggggcttatat

SEQ ID NO: 159682 - DNA, 623 bp, Homo sapiens
aatggttaaaaaattatgatatatacatattatttgtcatacatgcatataataaatgctatgtagcagtccaaaatgcacccaacagttgcgttgtctgaactgccttttatggcttatggcaaactatgatatattatagttgacctcgagacaatgcacagcaaagtcatctctaaatcaaatgcagaaatagtttatgtaccttcattaaacatactggattttttcaaacatttcattcaggttttatataaaaattctcagtacatttgaactctgggattttctctctggtagataagtacaatgatattttcaaattaatggaataaggaatctgttctctattcattcccatctaaatagagtttcaaagagatgctgagaactttcctcagattagtaaattcaagtactcactgtgtatttacctctgtcactgaccatgctctgtacctctaaagtctcttccatttcattaaatgaaagtagtgaatgaatactaagaaatgctttttaaaaacaatagttttattgagatataattcacacaccacacaatacatctatttaaagtgtacaattcaatgacttttagtatattcacagagttctgcaat

SEQ ID NO: 159683 - DNA, 606 bp, Homo sapiens
gaaaagagatcactaagtgtaaaagatgcattttctcctcagcacaaagcagattccaggtgtatataattcaccattcagaaaaaaattccgtggcctgtcatgctggctcacacctgtaatcccagcactttgggaggccaaggcaggaagatcacttgagcccaagagttcgagaccagtctgggcaacatagcaagaccccctctctattaaaaaaaaaaaattagctgagtatggtggtacacacctgtagtcccagctacttgggagactgaggctggaggatcacttgagccactggtagcctgaacgacagaacaagactctgtctctaaaacacacacacacacacacacacacacacacagagagagagagagagagagagagagagagaaaagcctggtccatgggagttgtggttacagaaggcaaagcttttaatataccaaagatctaaagttaagcagaagtactccataagccttaccaattggctagcttgtataagcacccagtcttttctgaagtgctgctacctctcaataggaagcaatatcggggtccttccaaggtatcactgaagtattaggacaatgccac

SEQ ID NO: 159684 - DNA, 488 bp, Homo sapiens
actcactcatcaccaagagatggcatcaaagcattcatgagggctcttcctccatgatccgacacctcccaccagaccctacctccaacatgggggaacacatttcaacatgagaactggaaaggatattcaaaatatatcaccctctgcatgcatcctcttggtgtctatgtatgtcctaatctaataaggacatcggtcggattggattagggcctaccctaatggctctaccttagtcatttccttcaaggtgctatctctgaatacagtcacattctgcggtactgagggttagggcttcaacaaatgaatctgaggggacacaattcagcccataacatctatcacaaaccagacactgttctaatgctcgtgatcaatgaacaaagacaaaattcctaacactgtggagcttatgcactaacagagaaagtgtaccatgaataataatcataattttaaaattacgtagtgttagacggtaa

SEQ ID NO: 159685 - DNA, 316 bp, Homo sapiens
agcgcatcactctcttcccactcctaactgacaacctttttttttttcctcgtggcggggatttttcaccaaccccaatccccccaccttttttgaagtgggggaaagaagacaagatcatcccaggagacagacggaggtggggaagtggggggtggggaggggggcttgagcccggcaaacagccgcgcagctggattattttgcaaatagcaggaggaggggagagaaaggcggctgcggaatcctaggactggcgcggccggcaccctgctgggccgggcgcagggaccggggacccggagccggcggccgc

SEQ ID NO: 159686 - DNA, 385 bp, Homo sapiens
tcaggagcttgagaacagcctgggcaatgtggcaaaatcttgtctacaaaaaatacaagaattagctgagtatggtggtgcactcctgcagcgctcagctactcaggaggctgaggtgaaaggatcgcctgaacccgggtggttgagactgcaatgagccatgatcattccactgcacaccagcccgggtgacagagcaaaaccctgtctaaaaacaaaacaaggctaggtgcagtggctcgcgcctgtaatcccagcactttgggaggctgaggtgggcagatcacgaggtcaggagatcgagaccatcttggctaacacggtgaaaccctgtctctactaaaaatacaaaaaaattagctgggcgtggtggtgggtgcctcta

SEQ ID NO: 159687 - DNA, 829 bp, Homo sapiens
tcccaaagtgctgggtttacaggtggtgagccaccgtgcctggccactgcctcaggagttttgaacaatggacacatattagggttatagtgttatccaggatgcataataaccagagtttgactatattgagatatatgtatcaagtactgtactttctaaagtatcacgtcataatacttactctctgcatagcagctcagaagtcttttttttaactttaatttagccaatccagaagtaatgtttccataaaatagatccagactagaatgaactgaattgcctgagtaaataaagatacgataggcagatgctgaattgctcttctcactattaattgcctcaacactattgagttcctttgagtatctgagagtggctgttctgtctgagctttatttctgacctcagcactgaccttttgattccatcaaaagtcttataccttcatttgttggtatcatcacctgtaaatatggtatccttattgttctctcaggcaaactcagactgtgaaacttaaaaatgtaagatattcctgccactaacagcaacaattattgtgaggtcttccagcagcaaatataattggtctcaaaaatgattttgagtcataccgacctttttttgcagataggcctagcataactcaaagtggtcttttttaggaaatgaaattttgacaatagaggagcattttcttatgcactaatatagaatgatgtgacactactccctgtcccccaaaaattgagggaggtgattctagaatcaattaatttcaataagttggggaatttctatacactgtttccctgttggagag

SEQ ID NO: 159688 - DNA, 414 bp, Homo sapiens
tcaagacggcctcactctccagctcagctttccaggtttggaaataagaaagagtaattacggcttctgggagcaaactcagaacgttctctctcagccttttcttcttcataacaaatattcctggttcctcaaaccccataagctccaagggaaaaccacccttgtctggggagggtgacaaggggcattgagaaggagaagtacgcgttataagggagttcttggacacattccttccccaagttcggagtgagaggcaagaacagttatggacatgtctttctcttcctggagaatgagctgatattgacaaggtcaacatgataacccagctgtcacacttgcaaaagggcctgtccccacctgcagagccattctgaagcccagccaaaaacttcacccaagactcat

SEQ ID NO: 159689 - DNA, 211 bp, Homo sapiens
agaaaatccacaaatcagaaaccaaaaagacttaatcattaaattcaattttccactcactgtatctaaaatgagccacagacccgacagggcatgtgtattcagaacctggataaggatgatggtgaaatgaagtctttaacccatccattacaactaccttttgaatcattccagggaggctttacctacatgcacttgtgtaacagat

SEQ ID NO: 159690 - DNA, 368 bp, Homo sapiens
aatatattaacacaaggggaactagataatggtacatgggatgtctctgcattatttcccacaacttctacaattatttaaaaataagatgtttgaagtcattgatgattatttaatgacataaaagtattcataatccttcttcccttataaaaattagccaagacattcaaccacaaagtacctgaggcttaagtgaaaaccagattttaaaatcttacttatcattccaatcaaccaaccaggaaatatgcacacaaaaaattaacaataattgattgcagaattataggttgttttcattttgcaatctctggcttctaaattttctacaatgaacacacatactttttttttttttttttttt

SEQ ID NO: 159691 - DNA, 114 bp, Homo sapiens
tatgccttgattcactatctgaaaattagatctcaattgacaaaataaaacagaaatagctaataactcatactctgccctcccctgaggactgcagtgaggctatactaacag

SEQ ID NO: 159692 - DNA, 347 bp, Homo sapiens
tcactcaagccagaaaccagtgttttcctggattcccagcccgcacagccaagaggtcagagacttgtccctcttgcctatttctccaagctgttcctgccttcccctccccttggccatggcctcaacttggacctcgtcctgccttcactagcccctgcctggtccgcctgcccgtctccgtaccccagccctgcctggtacccacaccagcctcgggggggatctttctgacactcagatattgccctgtccttgtcccattcactcaaaaaagaaacctgaagtagacaacacacagcacctttgctccaacacaggaaaggagaaagagaaagaaaagcaag

SEQ ID NO: 159693 - DNA, 306 bp, Homo sapiens
atggccggtaccaatcagttacacaactcaggacagacaggatttgtggaagttgaagcttatataaaaaagaatacaaaattatgaatataaaaatttatacaaaagtgagcacttatttaaaataataaatctcaacatagaacaaaataaaaaagctgacaaataccccaactacctgaaaaaccattaaaacaacatatatttttattaattaactgcctgacagaatacttttttacctacaattttggctgcattctctctgatcacctcttcatatgaaaatgattgtgtaaactgatg

SEQ ID NO: 159694 - DNA, 659 bp, Homo sapiens
ctccctcctaaagacaaaaccccatgaatccagttcctttagaattagtggtttcaatcctgactaggcacacaaatcatctctgaggattttaaaaaccatgaactcatgggtgcatacccctagagattctgattccgtgggtctgggtgtctaaggtgtttgaaagctcgccaggtgctttggatgtgcagctgcaataaccagcatcaccagagaccttaggtggtgctaagaagctgacaggcagcatctcattccatcctcacaaccagcctgaggtaggtccatgacttgcttgctttaccgatgaggaaactgaggcccagaggaattcatagctcccctaaggtcatgaaatgagcagaaagcagagtctggatgcatgcggaagtcctagctccaacactggatggaaatgcagatgaaaaagttaggaccactcgtctaaaaccatcctgtgtccacttggctccttcccaaatgacggccaaaattctgtccctgattgagatgcaaggtaaggactgggatgaaactccaaaagctggagttttaaggaacatatatgttgtcatccaatgacatttatctggagccggatcagtatctagcaaaaccaaggctagattgcacaaccttggtgtgtaatctggaac

SEQ ID NO: 159695 - DNA, 299 bp, Homo sapiens
cagagaaattcctactcatccatcaagactctgccctcatgtccttaaaccaatcccaggagaactgcatgacaggcatttactgtgactctcggctacactgtggcctggagacagacaacactgtgcatctgcactgagagtcacgagccccagaacaagggtgtgacagggaacacatcacattcctccctgtccaggacatgaagccagtgcagctccctaacatgcagcagagacctcaaccacccctatcaggactagtgcctatgcttatcattggagtattcgtgggcaag

SEQ ID NO: 159696 - DNA, 482 bp, Homo sapiens
ccacacctgacccccatgactgtatctctctgatccccctgacattcactccatttccccctcctttcgtgttcctcatcctgatcacatttggtttattgatggcagttccaccaggcctaatcgccactcaccagcaaaggcaggctatgctatagtatcttccacatctatcattgaggctaccactctgccccactcccacagcctctcagcaagcagaactcattgcctaaactcaggccctcactcttgcaaagggactacacatcaatatttatactgactcaaaatataccttccatatcttgcaccaccatgctgttatatgggctgaaagaggtttcccccctatgcaagtgtcctccatcattaatgcctccttaataaaaactcttctcaaggccgcattctccttatgtcaagtctactccccccatatttggactccccacaacacaagctactatttctgtggtcac

SEQ ID NO: 159697 - DNA, 441 bp, Homo sapiens
ttacaacagttttacctccaagtcagatccccaacctgaccaacaatcatcatctccctggctactctcccatcactgaccatggggacagcaggaatgcctctattcattcctgcctcattccatcctcgataaatctttctaaagcacaaatcactaatgtcactaccctgctcaaaacactccagtgggccggggtgcggtggctcgtgcctgtaatcccagcactttgggaggcagaggcaggcggatcacttgaggtcaggagtttgagaccagcctggccaacatagtgaaaccttgtgtctactaaaaatacaaaaattagctgggtgtggtagtgcctgtaatcccagctacatgggaaactgaggcacgagaataacttgaacccaggagtcagaggttgcagtgagctgagaatgcatgactgcactcgag

SEQ ID NO: 159698 - DNA, 230 bp, Homo sapiens
gctggcccagcatccctgccccttgcttctgataaacgcatctcattttttactgagggagccactgtagcatagatttgtcatgcgggccaggccaatcggtccagaatatctctgggggtgggaagaggacccaagtcaggcccacagtacccacaagcattggccccaggacttcagtggcagccactgggaaggagaagccccctctccacttgctggccaagctg

SEQ ID NO: 159699 - DNA, 242 bp, Homo sapiens
ggttaaaggattgttttaagttagatatgataaagctgaaggtttgagcaaattgtgaaaggtttgtgaaagactaatcttgtaaaagaaattctgtgtgtaaacacattggctaaagttaaaggggtaatattcagtttttacataaattgaatattgaaataaaagcactgcagggttttcttagaatattaatcttttatttaacagaaaattttaacagtttataaaaggtttacagg

SEQ ID NO: 159700 - DNA, 397 bp, Homo sapiens
aattccatccttagtggccagcattttgcccgagggcagctcgtaagaggcgacactggaattcagacactgattgtttggctttttcccactaaccaccctgacacccaaagggcctccctgtcgccaccctctcctcatcaggttatttacttgtgactgttggaactcaacattttgagctttaactgtgtgctagacctggtggtactcggtggtttgcttgccacgcctttgtttttctcaggaaaaaggtcttgagacacaaccagcatcttatagctagttaggagatgaagctctagaagctctggaacccaaatttcccatctcctggccccagtccctgcccagtccccctgtagggacttagctactgactgatctttgggtgggg

SEQ ID NO: 159701 - DNA, 260 bp, Homo sapiens
tatggcattgacatgttgtgattagttgttatgcaccattatagcaaaaaaattgcacactgataaaagtaactgttccctcgttggcttcaccagctttcccaagaattgtttaatcccattccgtgtataaaatcactctctgctgagaatcctttttctgagaaaagaattctgagatttttttttctgcttgaggcagaccaacactcattccaagaacaactggaaaggctgaataaaacacagaaaactttttt

SEQ ID NO: 159702 - DNA, 243 bp, Homo sapiens
ccagaaatctctttcttcctgacccctcttccccagagtgcccggaattccactgtcagaaatgcattgtctgggttaaaaaacttaacacctgctatgatttcaacagtgtcaaaacaggatacgtcaaaactgggcgaggaggaaatgtatttgggttctaggatagtgaaagctctattttttctacttttctgtattttccatatttggtacaatgagcacgtacttagaacggtttta

SEQ ID NO: 159703 - DNA, 216 bp, Homo sapiens
ctcagatcctcctggcccaggactgccctgggtctccaaacttcacaaaattctcaggagtaaattgggtcaaacagcacccattctcccactcttgcactatttgaccaaagtgcctccaaagacttaagcaggactcagccgatgagcaggacccagggcatcgttacctccattttcgaaacacacacggacgctcatgcacacacaccacca

SEQ ID NO: 159704 - DNA, 416 bp, Homo sapiens
tcactaagaacacatttaatgtacagactatatgcatttttaaatgctctggttcaaggaaagttaaaagtgtttatagttataggtctacatttgagaaatacttgttatgaactgaggaacaggcaaatccagcatttgggccacaacttttctttgatagttccccagataataggctgaagagcatatgcagagatataaaagtcaatgaataagtgaatagctgaatctgttgaacactatgctcacagtttctagttcaagacaaatgaaacattaacataagttgttctgaattttctaagtgaagaattctacccttctttaagttaaaagatttataaccttttcaatagcagtatatattctgcaattcagcagcttttctttctgtgattttgaagaccatcttt

SEQ ID NO: 159705 - DNA, 530 bp, Homo sapiens
atgttgtggaggagttaatatttacaaacaaaatgtttgctaatatttacaaataaacaaaatgtgttaatatttacaaacaaacattcattgtgtaaatgaaacacaacaccttcattgccaatttgtcgaacatttgagtacttactgtgtgctagtcattggggacataggggtgagtaagacatgatccctattttcaaaattgtttatcccttctagtggagaagatagcacaaagagaatgggcaaaaatggttgggcacagaagggctgactgtaaaagtagccaaactcagaataccaaactgatagaaaggttatgatgaggtctttttatatcctctcccacgaacatggtttgcagtatctattaggtatggtaggacatatgccaagaaaactacacaaatcagagtgttcattagtgcagggtgcagtgtgtctggatgggatgtcaagtgcataaggctatgcagcatcccaagtattgtcagtcatggaagctagatcagttttggtgggttagg

SEQ ID NO: 159706 - DNA, 136 bp, Homo sapiens
tatcaataaggagactaacgaactgaaatatcaaatattttttaaacccaagaattcataaaaaaataaaaaagactaaaaacaattcattcatcaactttggaagactctaaggaaacagttcattagtttgaaa

SEQ ID NO: 159707 - DNA, 375 bp, Homo sapiens
aatagtgccattcttttcactagatcttttagagtgtaaaggggtcctgagagaaaaagtttgcaaggggcaactctagggcagtgatttttcttttttttttccagaccagaggctgggctctggattacagctcagtagtgggtcatggaatatgtactgtgactcaacccgtatcattttcaagaaagaagagagagaaaatcgttcagcaaatataactgaatgaattatctggttcacagagtatgtgcgtcttcagctttactcggtcatactaaattgttttaccaagtgattataccaacaaccctctttattttatgtcctcttaaatggatggtatcgtcccacttgtaaatttttgctgtgtgt

SEQ ID NO: 159708 - DNA, 479 bp, Homo sapiens
tattgacgccagaagctgaccggcgacagcagcgaggattttacgcaagcgaggcgcgctgctcgctgcggagtacgtttaccaccgcaggactgggggaggtgaaacatctctgcaatgagaattataaaacacagctcaaagaaatcagagaagacacaaacaaatggaaaaacatcccatgctcatggatggaagaatcaatatcattaaaatggctatactgcccaaagctatttacagattcaatgctattcctatcaaactaccaacgacattcttcacagaactagaaaaaactattttaaaattcatatggagccaaaaagagcctgaatagtcaagaaaatcttacgcaaaaagaacaaagctggaggcatcacattacctgacttcaaactctactacaaggctacgctaaccaaaacagcatggtactggtacaaaaacaggcatatacaccaatggaacagaataga

SEQ ID NO: 159709 - DNA, 875 bp, Homo sapiens
aaaaattctgtcatagactattaaaaaaaaagttttactactcccaagtacacacagttatgagaattaggcttttaaaaagttgcacagtgaaggctctttaggaacctactttacttaatcagtaaaaattgagtattattgatgcaccaactattcccatataaatgtacttgctttttcagataaaacacttctgaagtgctcaagaatgtctgaaaacagtttgttttcttaaataggataaataatcattccttttgcaatcttgtttacagtattcattctcttagccaatccctccacgcaaatggagacaaacttcatcccagtcctaaccagtatagttgaagggaatggagccttgtagtctatgatttttttttttaaatttccatcgaagggattggggatgtcagagagccagagctttcccctttccaggagctaagttggcttcggaagtcttctgggatttgtgaaaatattactgttgtaaaattacaaagtggtagccataacaactccctcagattggagacttgaaatgtcaaaactcccctcttcctttcccctagtttggtggatgctcatttattaattcattcaataaactattagatgccaggtaccaaactactgccatgggagtgcacatattaacaaaatgctctacctgctgccaaatggcttactattctgtggaagaaacaaagtatataatcctccccaataacagttatgtattgtttgttcacttaatgtggaaggcaagactgatgcagacacacaaggaaggctcaaaaatataaatctagcagcaatgtcatcttttttgattttaaataccatatgtgcttactgctaatcaggaa

SEQ ID NO: 159710 - DNA, 663 bp, Homo sapiens
ccaagctcggctaatttttgtatttttagtagagacgaggtttcaccatgttggccaggctggtctcaaacccctgacttcaggtgatctgcccacctcagcctcccaaagtgcggagagtacaggcatgagccactgcgcgcagctagctctgcctacagtttttaaatgacttcttagtctacttaggagaaaatataaactctttaccagagcctactggacttctcaaaacatgatgtatgtttatctcttccctttagctcacttggttttagccgactgaccttctgttctctgagtaaaacaaacttattcctgcaacggggcctttacgcctactttgccttctgccccagaaacagttctcacaggttttcccatgactcttttcttctccttattcagcatcaccccaaacatctccccctgagtggccttcgccaggacattcttcttaaatatctttccttacctcatcctgtttggttttgtttataacaggtgtcagctacaatactggttttgtttgtttatttactttttcttacaatggaaagcccatgagagcagggttgtgtctgctttattcacaactttaacctcagtgccagtacagaaccaggaccgtactagaaactcaatgaacatttgttgagtatt

SEQ ID NO: 159711 - DNA, 194 bp, Homo sapiens
aaaggtaatctttccatgaaggagcatatccatcaaatacaacttattgcaaaccctagctcttccaagaagatattaacatgaatgctgaatatataactcatcacacgtatggcattaattccatcaaaacatgatagatcaacctaaactgtcaacatacagaaggataaataaagcatttaaccccttgg

SEQ ID NO: 159712 - DNA, 237 bp, Homo sapiens
atttacagagccttcatacgtacttttttatattttaaccaaattactattttttggctagtttacaaatgtaccattggcaaaataaaggaggttatatctttctttcctttatattttctttactgaagcaattaggatcttcaaccttgggtctgaattgcaacaatattggaaaagtgaataaactattccatttattaaatgccagtttaataggtcagaaaacttatgttc

SEQ ID NO: 159713 - DNA, 242 bp, Homo sapiens
accaaacttaacctttgcccaagttagaaaaaaaaagaggtttagcaattaaaaacaaggctgggcatggtggctcatgcctgtaatcccaacacgttgggaggccaagatagaaggactgcttgaggccaggagtttgagacaagattgggcaacatagcaagaccttgtctccataaaaaattgaaaaattagccaagcacggtggctagtcctgagtagctaggactcaggaggctgag

SEQ ID NO: 159714 - DNA, 213 bp, Homo sapiens
gtgttgtaagtctcctgggagtgacaggatgcttgtggtgtgctgaatggtgtgcccccctcccccaaaaagatgtgtctacaccctaatctctagaacctacatttattggaaaaaaggtctttgcaaatgtaatgaagtatctggaaatgaaacaatcatctttaatcatctaggtggccctaatccaatgacaagagtcctttttttttt

SEQ ID NO: 159715 - DNA, 566 bp, Homo sapiens
cgcacaccaccatgccggactaatttaatttttgtatttttagtagagattgggtttcaccatgttggccaagatggtcttgaactccagacctcaagtgatccacctgcctcggcctcccaaagtgctaggattacagatgtgagccattgtgcctggcttaaaaaatctgttgactaaacggtgcatgaacaggacaagaatgtttaatcaggcttcactataaaatatccaaagattatccacttctctttgctcctgataatggacatgaagccttcgcaacaagtgaaaggaatctctttcattatcaactaataagtggcattttggtttatatggtagtctcttctccgtgggtcagaataaccctgagtcagtggacaaaatgaccctcgtagatctaaaatgctgaggaccagccctcaggcagtggtaaatcccctgatataatacaagcctgtaaagtatcatggccgccaggccatctctctcaatgccacttcagttgctgacagtaattacctactacgaggcagagatgctaaactccagttcatagctca

SEQ ID NO: 159716 - DNA, 327 bp, Homo sapiens
gctgaaaggtaaagattaggaaccttgatggaggttgaatttgagtttctcttgggactgaatgtgcttggggtttcctgtctgtctttgcaaatagaagagttgattttttgggaaataatctgttgatctcttaaccttagaaaggattacaggcgtgagccaccacgtccggccagaatgatccgttatttccagcaaggaatagcctgagaagcacggcaggccttgagtggcgttagagagaagtgctgacatcttgagtgatggagagggtggccctctgggcagggtgtgtcccacagggtgcctgtttggacgtggggt

SEQ ID NO: 159717 - DNA, 117 bp, Homo sapiens
ctgcctcagcctcccatgtagttgtgaccaccacaggcgtgtgctacacatgcggctaattttctatagaggcagggtctctctcactttgttgcccatgctggccccaaactcctg

SEQ ID NO: 159718 - DNA, 258 bp, Homo sapiens
cgaacttccaaataagagattcatttaaagccttatgtttagggctcacaacttaactgcccaaggatatcagagggcgcagctttacataaacaaatgaactaatgatacgtttacaaagaaatcagaccacaggtacaactattaaaataatcaattaaaaaatgacttttggccaggcacgctggctcacgcctgtaatcccagcactttgggaagccgaggcgggcagatcataaggtcagaatttcgagataa

SEQ ID NO: 159719 - DNA, 444 bp, Homo sapiens
agacgaaagatttgattgaaccgactcgaggactcgggatcctactataatcgtgctataggcatacaagcgatcgtagatggacgcgcgtacttgccagattatgtagcatgtagggtcttgagggcagaactactatcagcctagggggtacctttgtgcggtttagaaaaagaggtccctttctctgggcagacttggcaagaggagcaacactggactgtggcctctacttgttccagcactggagcaacagcctcacttgtaagaatttaggctttcctctgagtgagattcgaagcctttagaggcctgtgtgcagaagagtgggagagctgacttaacattttaaagaattgttcttggccaggcatggtggctcatgcctgtaatcccagcactctgggaggccaaggcgggcagatcacctgacgtcgggagttc

SEQ ID NO: 159720 - DNA, 309 bp, Homo sapiens
tctcgcaagccccatcttcccggcagtcaactaagaatcagactttcccagcccctgtcaaccaggctgatgagtagaagaccaagaatcctctccctcctctcttcctcttccctctctcaccagtccctgccaccaagcctttaggtgaagccacggaccctggggggcgccaggaaaagcaagtacagtctctcgagcactccagccaattacagaggtgcaattacagatgctgcatgtgcagctgccctgaggtttacagaattagcttatcaatgacaaaacagacggccatctaaaacacac

SEQ ID NO: 159721 - DNA, 334 bp, Homo sapiens
taactctaacattagtaataacccaaacaagcatcaatagtaaaatggaataaactgcagcatattcatgtaatgaaatgctatacagcagagaaaatgaatgaattgcgacaataggcaacaacatggatgcatctcacaaaaacatgctgtcaagtgaaagaggtcaggcacaaaagatatatgctgtgccatttaatcaatttaaagttcaaaaacaggcaaaaccaacctatagcaacgttggaagtcacaatggtggtgtccttggagaagaaggtggggttactgatggcagctctggtaatgttctggatatgagtgatggttacac

SEQ ID NO: 159722 - DNA, 407 bp, Homo sapiens
atccagattctctccagagttgagatcctccccaggccccagatccaggttcttgccatctcagctactccttcacccaatgcagctattccatgagcttcagcttctcctcatactctcgcccctcccagatcacaactgatctttgttatatctcagttcctctccagatacaagatgaacctctatacacgtcttctccaggtctgctcctccctgatctcagctactccccacaccacaaattatccaggtcctttcccaaggatgatctctctctctctctcaaatctcagcaactccaatgacaactccctatatcttctgcttctccctaaaactctcaccaatcccaggtgcacccaggaaaatttagatccccatagaaccataacttccccttaggc

SEQ ID NO: 159723 - DNA, 340 bp, Homo sapiens
ccactttataggatttgggtaggtagtggaaaattacagtcaaaggggatgttctctggctggcaggggccggggttacaaggtgctcaatgggggagcttctgagccaggagaaggaatttcacaaggtaatgtcatcacttaagacaggaactggccattttcacttcttttgtgattcttcacttgcttcaggccatctggatctatacgtgtaggtcacaggggatatgatggcttagcttgctgcacaaattccatgataattcctttcctatttgtacccagaaaataatgaacaaaaatcaaagcaccatttggacaacttgtttcaatttta

SEQ ID NO: 159724 - DNA, 310 bp, Homo sapiens
ctccagattaactagagaattaggtagctgttctggctgctctactttgatgatttaataagtggcctgaaaatcgctggagcaggaggttaagatcttggcaacattagagaatagttaggtgtacattttcacaagttggagcacagtgaatgatcaaggtggaatagtaatagggtagtcatgactagcagcaactcacttagttctaaggtgaggaatatttctctttgtgcataatttcacagactgtatcattccccagggtgatgtgaaagcaactacattctctggtaggctcattaccttt

SEQ ID NO: 159725 - DNA, 240 bp, Homo sapiens
agcagggcctttccagacaatgtagtctttcctgtaaagaaaatggttttggtgtgggatttggtaaaaacactggttagtttgtaatgaagaaagaattttggcatagacagtccgacccagttcatggatacagtttgatcccagggagtttaacaaaaggaagctttggttttgctagcaacagacttgatcttctatagtaattaattgcaattaaggttttccaggagctttctc

SEQ ID NO: 159726 - DNA, 594 bp, Homo sapiens
atttgtcctgtgctcttggtaaaacatggcttctatggtaggaagaggggaaaagtctatattttaaatggtttcatggactgccaagaactgttataaaacaatattttgatgagttacacagtacatgaatcagaaacatatgagattaatttccctgaaaatacatgtgggtttaaaaatgaaaggaaaggaatgttggcacaatgtgctatgccaaaccgaaaatgttagaaaaatattttatgatattaggatgcacaaatcctaaaagcagctcaatttgctcatctttcagtggcctgctcccaatgtacctgttgtgtctggtcctctacagtgagaataagtaaaacctaaacaagaaatttaaaagccatggtataagacaaggagccagaagttccaagtcttgggcctggttctgccactggctagctgtggaagtctagattaatcacttaatcttcctgggcctcaactcaggaaaacagtccatgacttgcagacctcacaggattgttgagagtgctgttagaatgcgagttcagaaagcagtgataagcccaggatgacagagaccagaacaaaaaa

SEQ ID NO: 159727 - DNA, 527 bp, Homo sapiens
catttgtctgttcaaaacagttaagaatctctcaattgatctaatgaattgaagaaatctatccccacgttagaaacatgcacatgttggccctgatttaatttcccagtaactacaattccccagtaactacatatgcatatgtaccggacaaacaaggcagctttccattcccaactcctcttccctggctgatggttctcaggagaatctaggcatctgagccctagccccagcaccctaatggagagtgcagggcacctggatagtggaggcaggcctagaagcttttggtgtaaaagatgaaattgaaataaaaagacccacaggtaaccatgtgtcaagcacacatctggtacccaatacatctttatggaataaaatagacattaaaatgctacaggtataagttaaaatattggcaaactgactagcaaggtttagaaatccacatttaagactggtctagtggtgataaattccgtcagctttttcttgtcagggaaaaactttaatttctccttcat

SEQ ID NO: 159728 - DNA, 220 bp, Homo sapiens
atgtgtagtaaggattgaggactggttaaaagctttgccacattcttcacatttgtagggtttctctccagtatgaattcttttatgtgtagtaaggtttgagaactggttaaaggctttcccacattcttcacatttgtatggtttctcttcagtatgaatattcttatgttcagtaaggtttgaggattggttagaagctttgccacatttttcacac

SEQ ID NO: 159729 - DNA, 457 bp, Homo sapiens
tcccctcttttcatcctctccgtttacactcacctaagtgaactttattgatacatactgccatgtatacacctaaaatactcaaataatttccaacccaggctgcttctctgagttgtatcagaatgaaatgtagccaactagcaacactccatttccactgaatatcccttaagtaactcaaactcactttgttcagaaatgaacttaaaatgttcccccacccaccacaaccacaaccattgaaaacaaaaactaaaacttccatctttacaccctccaggatttcctatctccgaatatggcactgcatttaatacttacgtcagaaacatgggcatcatccctgacatatacatctccttcaccatccacatcttttcaatcaacagatgctatccatacttcagcacaccttttgtattatctacttcttacaacctccacttccactacc

SEQ ID NO: 159730 - DNA, 679 bp, Homo sapiens
acacacccaggagctccagcctgttatgggatgggcatcctaccaggaaccaaggatgctaagatgtcctccaaaatggattgcctcatatctagtacccgcctgctgcaggcttcttcatctagttcctctggggacacactgtgcagctaattcatccaggcagattcactgggaagctgttgctcatgagggtgtaatgaagaatctccaggtggagaaatgatcctgaattatccagtgggccctacatgtcaccacattgcgatccttctaagtaggaagcagaagatctgacacatgcaggagaggggaaggcaatgtgaccatggaggcagagaggggagtgatgtggccacaaaccaaggattgttggcagctgccagtggccgaaggggcaatgaatggattctcctttggagcctctggagggagaatggccctgctaacaccttgattttggcccagtgatactgattttggacttctgccctctagaactgtgagggaatacttttctgttgctttaagccattgaatttatgatgatttgttacagcacccacaggaaacaaatgcatggatctaacttgaacctagtgagttagattacttcagggaaacacaataaatagttaacagggcttgtcaggggggtgggagtgagatgaaagtgtga

SEQ ID NO: 159731 - DNA, 666 bp, Homo sapiens
acacacccaggagctccagcctgttatgggatgggcatcctaccaggaaccaaggatgctaagatgtcctccaaaatggattgcctcatatctagtacccgcctgctgcaggcttcttcatctagttcctctggggacacactgtgcagctaattcatccaggcagattcactgggaagctgttgctcatgagggtatttctgagacttttttttgtgaccttgctgtatgactggtgtaatgaagaatctccaggtggagaaatgatcctgaattatccagtgggccctacatgtcaccacattgcgatccttctaagtaggaagcagaagatctgacacatgcaggagaggggaaggcaatgtgaccatggaggcagagaggggagtgatgtggccacaaaccaaggattgttggcagctgccagtggccgaaggggcaatgaatggattctcctttggagcctctggagggagaatggccctgctaacaccttgattttggcccagtgatactgattttggacttctgccctctagaactgtgagggaatacttttctgttgctttaattcctgtttataactccatgagctcctcgatcactgtctcctgagatgtcctttttgtcactggaacttgtattaaagtggttttgtaatgggta

SEQ ID NO: 159732 - DNA, 547 bp, Homo sapiens
gaatcccaactcaccacccaggaacaggagaggccaggctcctagctgcaaagggtgagaacttcctgaggctccatcccctcctcccagtgcacaggctggtgggagactctccagggaccttcccccttatcttcctcctgcatcgatcattactatgttccagacactgcatcaacaactttatatgcagctttctttgccaaagaagtctcaccaaaaaaacttcttcgaaagtatctgaacacacaaactcaggtgtctacatctcacagcagggacacatggtgcatcctccacggaagaagccgtgctggctaagtgtgtccatttctaccccaactgccctatgaacagaaaggatttctaaaaaaggaaacagagaaatactgttggaaatgtatttaaaacaaatcatcatctttccgtatttcctttttttttctttggagacggagtctcactctgttgcccaggctggagtgcagtggcgcgatctcggctcactgcaacctccacctcccaggttcaagcaattctcctgcct

SEQ ID NO: 159733 - DNA, 520 bp, Homo sapiens
gtgaaattccatctcaaaaaaaaagaaaaaaagaaagaaatgtctactcatccctcaagtcccactccaaagtcccttcctctaattgagctctcagtcccccaaggattttgccaatctcctgacccttcctctctcaaccctgctcaccaaggctgtgtccaaacccgcctctgccatcagactgacaggtcctcctgggcagggtgtgtgttgcacagtgcctggcatgggctggatacagaggagactgactgtgtgtctacaatgcccagccaatgcctcctggaaaccctgttccctgtattcccccaggtcacactccaaaaagtcctcttacctggcttgggaggaaggtccttgtagggaggtgttgagttctcatagtcatcatcctcctcctcctcctccatggtcccttccaggggaaaggcaagtcagagcccagccattccctcctccctccatccctcaagccctggtctctgcctcagctgccccatgatggggattctgtacc

SEQ ID NO: 159734 - DNA, 868 bp, Homo sapiens
ccttctcagtttccttctcctctgcagtgactgtgccgccctctgtggtctccccaggaccagtgttgaggcaccacttcagtagatccccccagatccttggaaggtctgagtggccacgagagggtggtgagagttggcaaggtgggccttcctgcagggaccacggggggtcagcatccttgcctccgttctagacacaggtgaatgtcagtgggcacccacactggcggagactccagtgtgagggcaaggaggagcctagtgagactggatcctctgcaggtggaaaaataggaccttctcagagttggctgtcacatacaaattaacagggactgtgggtgacgtttctaacaataataattaaaaaacaacaaccctgcagcacatgtcagcctggcgttgggcaagtctgccacctttcttttatttcgatgtgtaatggttcacatgatttggatgagaaaaggagggatcaaactttatagacaaaacccagctgtgtgaaaaacaggattaatgccagtgattggggatgatcaaagagaaaccttactttttctcccccagtactcattccactaaagggcgaattggcagagttcggcatccctggggggaaagagaagtgctagaatcatgcaacgtgtgagtgacgataattccaagatcaaaacttacacacttaatctgctaactcttatggtgagggtttcttgccatagatgctatgtgggtctgtttctaagtagaatcactatattaccccagttaataaagaaacatggatttagcagatttaaggttaatattgtttaaatttaaataaccttaaaataaatctctttctcttctaaaaaaaaaa

SEQ ID NO: 159735 - DNA, 347 bp, Homo sapiens
cctccctagatggcggcactactagtccctctgcttccagccttatccttctatggtctattctcaatgcggccagcacgtcagtcctctgctcaaaaccctcccatggttcttgtgtcactcagagtgaagcccatagcccttacaaggccccataaggtcaaacacgattgctgcccacttcccccatgacagctgtcactctgtctcctgttcctcctccctattccttcccccttctgctccttgggcaccccagctcactcccatgttaggtacttggcgctgaaatactcctctcccagaacttcttctggctcactccttcatttcttcaagtctacaca

SEQ ID NO: 159736 - DNA, 568 bp, Homo sapiens
acccaggctggagtgcagtggcacgatctcagctcactgccacctctgcctcccaggttcaagcaattctcctgtctcagcctcccgagtagctgagactacaggcgcctgccaccatgcccagctaattttttttttttttttttcagtagagatggggtttcaccatattggtcaggatggtctcaaactcctgacctcaggtgatccacccacctcggcctcccaaagtgttgagattacaggcatgagccaccacgcccgaccatatttatttttaaaagtaaatattagttctatgcgacacttgagccaatttcagtactactgggagggccaggaaaggcaaagtagttacaagctaaatcctctttttatctgctttatatttcaggggttctcattgagattttgtttaatgagtatgttctgatgctaaaataagtttgaagacttccagctggaagatgtgttctaaggtccttttgttactgaaatgtcagaggttctgtctaggtcctgctgctcactgcatagcgccagtcactgcattgagtatttccagggg

SEQ ID NO: 159737 - DNA, 313 bp, Homo sapiens
gaccaaagtgctaacaataggatgaaggggcacggggaggttttcccgttgcaacctcacctcatgaatcctgaaattagattgctagtttactgggtctgggaactccatttcagatgtgaatctgagagttcctcagataaaacatataattaaaaaggatgtttatattaattacaagacaggacaaaacatttgatctttataaaagaaaaaattatatctactatgtacatgtgtagattatatgtataaatcataatggaaaaaggtaaaaagtatacctgaaggaatttactaccaggcatcacct

SEQ ID NO: 159738 - DNA, 251 bp, Homo sapiens
gccaaaattattatcttaaagtatttttttcagggaaagaacatttaaattaaaggaggaattacataaaaacacttgaacaataatactctagaagcatctgaatagaaataatagactttctttcctttattcacagaaagtcacaatgtcccctgggaaaagtcatcttttaaatttgaaatcctctaactccttaagggattaagtacccagatttctgcactggtgacttagatttaataaatctg

SEQ ID NO: 159739 - DNA, 456 bp, Homo sapiens
acacagacatacacacccacagacagatacactcctctccaccatactaagcttctttcttaactctaggttctgcacgagctgtttccactgccagaaacacttcctcctcctagtatttttctcaacctgccacttattatattgtatcacatttgcttattaatgactctaggttttgaatgccatgagagcgggggctatttttacttctttgtcattgaatcctcaggactttgtctggtgcctggcacataatagcttctcgttaactgttgaattcattagtgaatgaaggaaatagcaacaggaaaagttttattcaccagtgtttatcctaaggttagctctgcttaggatgatctcatttgtgactggatgagaaaactggcaagtgtctgaataattcacaaatgcaagttcagctcctgaataagcagtacaataagcaatgtg

SEQ ID NO: 159740 - DNA, 363 bp, Homo sapiens
caggcagaaaacaccactggtcaaagaatgactgcctggattatagaaaatagtaagttctccagagaggcggcatttagacctgggtggcttcaaaccaggaaaacctaagattgatggtgcacttcccaggccaagggataaaagggactgtgatcagaagtaagaaagttaaaggggtggctgggcgcggtgtattcgagaataagaaggcaggcttggcatacgaagtcagagaatgccactgttcaaagattgactgcctgaattatagaaaatagtaagtccttccagagaggcggcatttagaccctgggtggctctcaaaccaggaaaccctaggattgatggtgcacttcccag

SEQ ID NO: 159741 - DNA, 188 bp, Homo sapiens
aatcgagctcggccccgttgctggcatttcaatagacacatggttttttttttcagtcatattaattaagttctgtgcacggtgcttgcacataaataaaaccagatgcttaaattgtagctcaatcattacgctgtatttgctcacatcccctcctgtaccactttcaagaaattggcttttcgcct

SEQ ID NO: 159742 - DNA, 528 bp, Homo sapiens
cattcaagtcaacattgtttactaagtgcctatttgtactttgaactcagctggatactatgtacaaagagagcatggtgtactcaaactatttcatagtcctagaaatccttcagggacccctctccttttgtgagctcccaggcaattcaaaagctacttgggatgagttatatcctgggcacaaagaagtaacttaagttggccagctccactccttcacagagcaaatagaattgaaataagggcagggtgttctttttcagttctttgcctaaccaacctaaatataatcctttaaatatcttctaaaatagtttgtcttacacattaattattttttgaatctatatcaaaatacatatttccagtacttagagatacttagaaatggatacaataatttcccaataattcttctggatacatgtgtgtttaaaaagtcaacattctgtttttttattgggacaggtgatctgtaaggtttattgttgacattctagttactttaagtttgatagccatgtt

SEQ ID NO: 159743 - DNA, 485 bp, Homo sapiens
  misc_feature (4)..(4): n is a, c, g, or t
  misc_feature (32)..(32): n is a, c, g, or t
aagncagttaatacagactcaaaacagaatanttttaaggagggactctggccgggcgcggtggctcacgcccgtaatcccagctgggcagaccaggttggtctcgaactcctgaccttgtaatctgcctgcctcggcctcccaaagtgctgggattacaggtgtgagccaccatgcccggccgtctctgacatattataagtgctcaaaaaagaagttattgaatgaatgagcaagagtatccatcaagagaaaacaaatgtctatgtctagaatgagcaaaaatacatgactgcagcagagtggaagaacccaatgacatgagttacccaagcaaggaaatgctctgaagagctgagaatgcaggttgaggctctattcctgtagaaataaaactaaagctataagtaccagtcaactggctgcatttcacaggggtcagccactctgggcagctggtgataatgagtctgtattactgctta

SEQ ID NO: 159744 - DNA, 479 bp, Homo sapiens
aagccggagaactgcaggttcaggaggctgggaggggccacagccagccagtgggcccggtttcccaggatggcccctgactctgatgccagcgacaagactctttcctttgctttccaggctggtgggtaatggccttgctgttgcttagagctctgggttgcttctcagtgccctgtttgacctctcagccatcccagcactggtttaaccatatcctggtgttaagtctcatgtttgcctgtctggactccaaatgacgggggcaggtgttcaggacactcgtcccctttggaccacacaaggatgtaaccttgggccagggtgtacacttccatctatcagaatcttggcagagacctggggagcggcgtggatggggagtgtcagagtgtgaatggcccattttaaagaaccaggggtgacgtcaactcaacaggaagccacagcaacgagggagccacaggtcactggggcaa

SEQ ID NO: 159745 - DNA, 215 bp, Homo sapiens
aaaacaagacaaaggcgatcctgtatcctggagtttccatcctagtgtgtatgggtaaacatgtattatagatgaaaaataaacatgaatcatatcagggttataaagcaggtttggtgagggtaaagagtgtcagctggatgaaggaaaggtgttctgttttatatctagtcatcaggaaaggtgctgctgctaaggttatgttcgttccattt

SEQ ID NO: 159746 - DNA, 674 bp, Homo sapiens
agagctgactcggggacaggataaagtagaaagagacacttctctactcccctttgggggacagcgatttgcaatctacaaagcacctacacatctgtgacccactgaatcctcacagcagcctgggaggcatgatttattatccccatgttacaggggaaactggctcagagtgtatgtgtaacttgcctgaagtcacatagctgctaagaggcaggatttctaattctgccttaagtccaaagcctccttccactcccagctcctgtaacaatccttcagccacttctgaaaatgctccttctagcgccgtggtctaatttaaggctgggaggaaccttaaaattatctaacccattggcttccaaagcctgggcctgggggagctgtgtaacattccagatacccaggccctagtccaggggaatgtgactcatagatgtgaagggacatctgggaatctgtatttttaaccagctaccccagtggggacactttctagtgccatctcatgcccctcccattttacagatgaggaaactgagacttgaagagggaaagagactttgtccgaggtcacaaaatggcacaggaaggggccctttggttgcccacccaggtggaacatccctctatccactgttccttctctctctgcaggctccaggactcag

SEQ ID NO: 159747 - DNA, 182 bp, Homo sapiens
tatggatgccaacaaaacccacccaacaccaaagaggaaatgttaaagcagcatttcccagacttaaggagtttgcataccaccttccctatttcagtcatttccataaacttccatctactccaaagattttagatcactattcaaaacagaagatcagtgtgtcatgtgacaaacagaaa

SEQ ID NO: 159748 - DNA, 249 bp, Homo sapiens
acattgagtagccataacattatctttaaacatatttattcttcatttcctaacttttcccaccttttggctaaatcgtatgttctttctctcacctcacttctgttttattactctctgggaaagatttttatataaaacgtctaagcaatcaaacctaacgcaggatgaatttctacacattactataccctctggtcactatttttttcttctctttattgcccatttccctgttcttgaaacatt

SEQ ID NO: 159749 - DNA, 338 bp, Homo sapiens
taaatccattcaaataaataaatccactgcatttataatctgggcttcctattcccctctctactctgttgatatcccctttttctctttactggcccacttttttttctcccattctcctctacctttttctatcccctttcaatgcaaagatctgagatcttgggcctctgaggtcagtataagcttagggatggaacaaaatatcactatattataatttatttggtcaactcaacatatttttccccaatctgatattttcaggggaattaaatcagtccatggtttaatatgcataaaggtgataattcctcatccaggtcaacttggatgag

SEQ ID NO: 159750 - DNA, 409 bp, Homo sapiens
gtacattttcagttttgacaaatgtatagatttttgtaactaccaccaccagtcaagatgaaaacgtttctagcactccagaaagttcccttgtgtcccttcttggtcagttattcccaccactgctctcaggcaaccacagttctgcttctatcactatataagtgacagaatttttctacagaatttcacatagatggaatcatacaatatgtactgttctgtctggcttcttgaggtaagccaaatgtcttttaagagtcatgcatgttttagcatttattagtagtttattctttttttgttggtgagtagcattcattgtatggatatattccagtctgttttattcattcactttttggacatttgggttgttatcaattttgggctcttttgaattaatccc

SEQ ID NO: 159751 - DNA, 378 bp, Homo sapiens
tgtgttgcccaggctgcagtacagtggcacaaccatagctcactgcagcctcaacctccagagctcaatcttcccatctcagcctcccaagtagctggaactacaagcacatgccactatacctgaataatttttgtattttttgtagagacagagtcccactatattgcccaggctgttctcaaacttccaggctcaagcaatccacccaccttagcctcccaaagtattgggattacaggcgtgacctgtgtctggcccaaggagagatactttgaacagttcattttaaagcaagaaactcaattaaataagaatttcattaaattaactgaactcttacaaactggaatatcatctctctgggatcagctgatt

SEQ ID NO: 159752 - DNA, 184 bp, Homo sapiens
acgagcagggcctccctggccaagctgcggcaaagcaagcctgtgtcataggaccccctccacaggatgcagctgctctctgctgcttttaacatgcaaatgcagacttcctagtagggcagggtgaggcagagcactcccaactaaatcttgacaggagagcttggtgctgggcggtatttag

SEQ ID NO: 159753 - DNA, 419 bp, Homo sapiens
ccgaactgtcagtccctttgttttccagtctacacaaaccttgttgtcacaagtttgcccttgccccaatgtggatagctgccaggccctctttctgagcctcctcgtcaccttgcctcaagccctcacatgtccccagcagggtcagtgtggggtcattgcaggctcagccatctgcctgttcttcttactcctcttgacacccataggacatgatttgatttctattaaatccagaaactcagggagctggagtgtgtgttatgtaactctcagcatttttcgtgaagaattacatactttctgtaagtgcagctgaggtcatcccataacctcatgcatgattgtgaaacagacctgatttggctcagtgctaatatggcctttgggatctttgttcatgaaagcatttcctcagt

SEQ ID NO: 159754 - DNA, 468 bp, Homo sapiens
atcaaagcacggtagggaaaggcactcactctgcattataaaaaggacagccagatatcaactgttacagcctttcaattcaacttccaaatttttcacacttagctttaatttacacatcagtatgcagtttaatttatgcctttgttcacgtgtactcacacatctgcctcaatgacatttcatatctctccttgcctagaacatctgtctactgcatcactctgaagcaagttatgggctttttaaacaaggttatacaagaatacggtgataatcatgctgtttatactgagtaataatccttcataagacatgcttagaaacgtttagactctgatatagtctctttctagaagtttaagcaaaagaaaaggattaagataccttttaaaaaaacatgttttccattatgatttcagtttaaatgctttaatctatttaaactgtttgtaccattagtatgat

SEQ ID NO: 159755 - DNA, 288 bp, Homo sapiens
catacacctacacacccccacaccacacacacatctacacccaccacacacacctccacacaccacacctccactcatacacctacacacagccctacacacaccacacctacacacccatacaccacacacacccacacacaccacacacacacatctacacccaccacacacacctccacacacgatctagcacccaccacagcctacacacagcgcccgcgacaccatacacgatagcacacgctccacatcaccacgggagatcctactagaggtcgaccctgc

SEQ ID NO: 159756 - DNA, 370 bp, Homo sapiens
tgttctagaggagtcccccaagctgtcacacacacacacattggatattgggtccaccctcagggcaaagccaggagagagagaaaaaaaaagaaaagaaaaagcaacaagatttcccctacactcttaaaaccacaggggacttaatttccagacattcctgttggagctttggatgtgtccttaccttcactgtgcaccacaatatagggctcactctcgagttaaacttataaaagaagacacaaaacaacatgaactgggaaattcatcacaacgtcggttatagccacaaattggactttcctctccaatctgcattggtctgatttacttttcagaattctcaggtatttatttgctttttgtg

SEQ ID NO: 159757 - DNA, 133 bp, Homo sapiens
ggaaaatatctaataagcaggcatgaagtttcagttaagcaagatgaattaagtgccagagatctgctgtataccaacgtacctgtaattaacagtactattctctacacttaaaaaaaaaaagtaggctggg

SEQ ID NO: 159758 - DNA, 285 bp, Homo sapiens
atctagagaaactctggatcctcagggcttgttcctccagaatagcaatccagtaaggggcatctgagagttgagaataaggggagagctgaactcatggctagacacaacttggcttactaaagttcagagatgaaaagcctcatttcagtaattacagtttagttttttagaacagctgtataaataccaaatggctattcatcatatctttcttcttcctcaaaacaagggttataccgtagacaccctaggacttgcctctattctttgtgtctacatttc

SEQ ID NO: 159759 - DNA, 561 bp, Homo sapiens
actctttgttgcttcaattaaaactacatactaagaccagattaactttcataagaatctactttttatctatcattcctttctccacatctactgagaccccacctaccaaatcttttgtctaactgctgaaatggttctcatttcctgttctacgaaagccttacatatgaaatagaattgaatttatagagtcagaaaatccaagtttgaattctggtgccacttactcgctgcggtctgttatctataaaatgaggatattttctctcacagagagtgtgaggcttaagattttgttttttgctttcagacagggtctcgttgtgtcacccagactggtatacagtggcacaatctaggctcactgcaacctccaatttccaggctcaaacgattctcccacctcagcctccaagagtagctgagactataggcatgcaccatcatgcctggctaatttttacatgtttgtggagtcaggattttgccatgttacccaggctggtctcaaactcctgagatcaagagatccacctgcctcagcctcccaaagtgctg

SEQ ID NO: 159760 - DNA, 417 bp, Homo sapiens
aaagaaaaaaaaaacatgttggaaacaaaatggaataagatggctgattccctgcagaggacatgccagctcgcatgacagcacatctctctctgccattggtcacgtggcttgatctcaatctcaaatttgaagagatgagttgggatgattcaaaatctgaagtaggaagcactctcacataaatgcattttttatttgctttattcttggagttctgtcaggtgctaggaatccacaatgaccaacccaaggggcctcttgctctcatggagcttgtagtccagctggctgtgttctggattctggggaaattacagataagtggaattccctctcaacctgcctgagacctgctgggcgtttcagaaaggcattaaaaaggctgggcagagtggctgacgcctgtaaactcag

SEQ ID NO: 159761 - DNA, 404 bp, Homo sapiens
atgctgggctccttggtaagtgctccatgtatcttttcaactattttcatgctctcaagagtgtttcaagaaaagcgctgtaggccgggcatggtggctcacacctgtaatcctagcagtttgggaggctgaggcggacagatcacctgaggtcaggagttcgagaccagcctgatcaacatggagaaaccccgtctctactaaaaaaacaaaattagctgggcgtggtggcgcatgcctgtaatcccagctactcgggaggctgaggtgggcggatcacgaggtcaagagatcaaaaccatcctggccggaatggtgaaacctcgtctctactaaaaatacaaaaattagctgggtgtggtggcgtgcgcctgtagtctcagctactccagaggctgaggcag

SEQ ID NO: 159762 - DNA, 343 bp, Homo sapiens
ctgcaaagttgtctaaggctggggaatttcatgaagttcatggatatgatgatagagaactgtcacagacacatacaaagccactgccaaaacgaggatctgacaggaggaaatccacaaggatgaggccatgtgggaccctgagaagaactgatggcaccctggggtgtttctccacagtggcccccttcatggtcgtgctgtgaaaggcagacatgaagcaaagaaggtccttctgtaggcagccccactgtcatcactctttgttcctataattaagacataaatgcattcaaccgtaattttgataaaatataagatgatgaatacatttttataattt

SEQ ID NO: 159763 - DNA, 419 bp, Homo sapiens
ggcttccaagttcattcattgaaatgaatacttattgacaacccactgtatgctaaacattttgctagattctggggttgcaatgataagcaaaccctgacagtcccaatcctcttgtggtttataggctagtagaaaagcaagacattagtcaagtaatcacacaaataaatgtaatattgcaacagtggtaggtattacacaggagaataacatggtacaacgagggcatatgggtgggtaatttgaccatcaggaagttttctctaaggaaatggtcattgagagctgaaataagagtaggtgttaactaggtaaagagaaaagggaagagtgactcaagtagagggaacaacatattcagaggctctgagttggagacctactttattatagaatggcaagttcgagactgatta

SEQ ID NO: 159764 - DNA, 499 bp, Homo sapiens
attatacatgtaggatgaacaaatagaaagggattatttcctttaacagaaataagctgtcttccccaaaaaggttatacctgcttacatactggtggaacctattctttattgcaggtcctctcctccccttgctagatttgtgggactcacaaagctgtttccagtgacacctgtggcgcccctgctaaactacccactagaacttaaaagttttcttggatactgtaggctttattttatctggagttagtaagctgaactacatgacccaaggacccttatcagcttcctatgctgataataacagaagacctttgtaactcttgattaaaccttaatgttttatcagaaatcctatatattttactagactcttgagtaactccattttcccccattaaaaggtagtctcagcccaatcaatgtgattccctcgaaaagtgtaacttgaaatgacacaatcatcatttactgatcttatgtaacatatatgaca

SEQ ID NO: 159765 - DNA, 583 bp, Homo sapiens
tttattcatgatcataagttttaggttatgcctaatttatactcacatatatatgtttactgcccttttattatgcttgccttctaagaaataagtttttttgtttgttttgttttgttttatttttgagacggagttttgctcttgttgcccaggctggagtgcaatggtgcgatctcagctcactgcaacctccacctcccgggttcaagcgattctcctgcctcagcttcccgagtaactgggattacacgcatgtgccaccacactcagctaattttgtattttcagtagaaaagaagtgagactctgtctctggggtttctccatgttggtcaggctggtcttgaactcccgacctcaagtgatccacctgcctcaggctcccaaagtgttgggattacaggcgtgagccaccgcacctggcaaaaataagttttaaagtttgtataggcttttttaggtttacttattggaaataatgttttcattgtcccttcttttgatagtttaaagaagatggtgaatgaagtgcagcttttagctctgtgtcatagtcttatcaatagagtcaatagaaaga

SEQ ID NO: 159766 - DNA, 877 bp, Homo sapiens
taatccctcccacggaggctgaggaatgagaatcacttgaacctgggaggcagaggttgcagtgagctgagattgtgccactgcgctccagcttgggcgacagagtgagactgtctcaaaaactaagcaaccaaaaacagaaaaagatggaatggaattaatatgttccatttagtaaagatggaatagaattggtccagtttgtgttcattgtagcatattcacctatttggtcagcaaccatttttttttttttaaagcctaagcataccctgagaacaacaaccttttttgattagaacagaagaaaaagccagagtgttcttgggctgccaaaatattaatacgtttgtctcaaagacgagccacttaggtgcttgcttagagacttctactttacacagaatttgaaaagtttgacagctggctacttactctgcaaaacggaagggagactttttagaacagcaactggtgatctggcaaaaatgaaaagtagaacttgtgaagaaatgagatggacttggtgtattaatagctaattttagaagaccctgtggatattctaaatcagcataatagtgatgtctgagccatagtgttaaattatgattactgtatttgaagtataagaaggcagaaaagtgtgatgctgttagaaaaaaatctcatttcaaatgattgaaggttaaaaacaattggggaaagattagagagggcaggcggtgctttaagggaggtggaataatacttggctccttattctccaaaagcgctggatagctgaagtttttaatattctggataattgatatttgattattagtttaggagggatagcatcttcagtgaacccttgtagctctaaggtaggcat

SEQ ID NO: 159767 - DNA, 379 bp, Homo sapiens
aagaaatacacatctatgtaatatttatataatctttgcacagagttactaaggttgcagaccataataacttatttcctatttctagcacagaagctttaaaataatataaaaatatcttgtaatatgcttcttagtaaaatgtacttattcagtatttgtgtttcatactgataggatgtaaatttttattgtatctactcagattatatgtaaataaatgatgttttctcttggtaaaattacattccaagaagataaattaataatatatggcatatgacacatcatcctttcaaagcactttaagtgggaaaagtagatgaggacttgttctggaatttgaaggaatggatgaatacaggaaaacattggggaa

SEQ ID NO: 159768 - DNA, 315 bp, Homo sapiens
agtatgaagacagagccgacagctgacttcctgtcattatgttgcctgcctgtgatttcacaagtgtggggaagaccctgcctgtgatttcacaagtgtggggaagaccggagccagaggctgcattgtaaaagagccttgggcagcagcatgaagatgcctggaactgggttgggcctctgccctgggccgccgtccacactcagggctggtggtcttcgggccgccctgccaccacacctgtgctcacacatgggcacaggggctcatgaagcagaggggaagccgggcctgtcagcgtggagtctcacccag

SEQ ID NO: 159769 - DNA, 219 bp, Homo sapiens
aattggaaaaagaggttcgcaaaaaaatgttaataaagttgttgaaaaatagtaaaatcaattccatcctctaattgacaactattgtaaaattggaagtatgtttgatcttttcttaaaagttcctctaacagataaggttttaagacattcaaaatatgttcatttggaatttccccctctgagaaagattctggcccagatctcatgtcttaggga

SEQ ID NO: 159770 - DNA, 560 bp, Homo sapiens
ataaaagacacaaatattcattacatgcttaacgtgtacacaagttaattcatcacctcctactggctctgcaaacatacctctcaccattctccagtggcccaagtcggaatcctagaagtcatcttcacattttccagtggtttttactatgtctaatagggctctgggtcttctttaagatctctttagcaagcaaaagttaagatctccttaacttttgtattacctgtgtctcccagcctgcattcacaaccttccccaactgacaaggaccagattgagcacttctggctccgcaaatgtgctgtgcccttcccggacctcaggccttcacgccttctgcttatttcaaaatgcccttcagaatcccttcccctgcttacctcctacttgcccttcagaatccaactcagacataactcccgcaaagaaactgaacttaactcttgaggctgcatcaagtttgtgccttccctgcaatgatgccatagctcaggtgacttacattttctaagtttatctttatttatctgtctcccataaagactaagcttttt

SEQ ID NO: 159771 - DNA, 441 bp, Homo sapiens
agagctgcaatgtgctggttacactcccattgcctgctctgagctttgctgctggtccccagcccccaccaacaccccccaactctctttcttctcgttgccaaaacgcctcctttacgtcctgttttggagtcagaccttagcactggaaaaggtatctgagactagcctgggagaagagaaagtggactctgggatccgaaggtttagatttgacttctagctcaaatagctccttatggtgtgactctgaccctgagtttcctcatctgtgagatggtaatgagaattcctgcaccctcccagagagtgttatggaaccagtgaggtgctccttgtgaaggtagttaggcaattctaaatagtacttagaaataaggacttatggagtataacagcctcataatagtagcttccatttattgagcgctgaccatgtgc

SEQ ID NO: 159772 - DNA, 511 bp, Homo sapiens
cacaccacctgagtctgccattgctggaactacaggcacatgacaacacgcctggctatttttttttaatttttcagacagggtctccttacgttgcccaggctggtctcaaactcctgtactcaagtgatcctcccccttcagcctcccaaagtgatggcattacagatgtgagccacctctcaggttcaagtgattctctcacctctgcctcccaagtggctaggactacgggcacgtgccagcacgcttgcctcatttttgtatttttagtagagatggggtttcaccatgttaaccaggctggtctcaaactcctgacctcaagtaatctgcctgcctcggcctcccgaagtgctgggattacaggcatgagccactttacccggccccgactaattcttaaaatttttgtagaggtagtatctcgttattttgtctaggctgggctcgaactcctggcttcaagtgatcctctcactttggcttcccagcattctgggtttacagg

SEQ ID NO: 159773 - DNA, 286 bp, Homo sapiens
aagcagttatacagactcacaattacaaatgtccaggattccttggcaaaatgcctgattctcagactgggacaggagatatattagatgagcctgaacccttttgtggtgccagaaagtaaagaaaaaaaaatgcacagggatggggaatatgtcaatggaacacagggaccaagtaaaaaacttcccagtggctaaagctgggacagtttctgtagtatagcaatagtattagatcataaccaaagtataaaataaatacctatgagtctgtattaactgcttg

SEQ ID NO: 159774 - DNA, 330 bp, Homo sapiens
caggtagacctaacgatcgtcatgtgcagtatgaggtcttcacgtgaaagctttatttgggtaggaaaacctagcctacgagaaacgggtccgtgcggtcacgcctgactgcctgtctccgggtcaaggctgccaggaccagccccagccctccgcccgagaaggctgtcctttcccctcggaactctggcttccctaaagcggccgcgcctccttccaggcctcacctcctgggttaggtctacctggccaggtagacctaacaactgctcaataagtatctgataaactcagttttttccaatttaccaaagcttaaggaccttttct

SEQ ID NO: 159775 - DNA, 454 bp, Homo sapiens
  misc_feature (70)..(70): n is a, c, g, or t
  misc_feature (79)..(79): n is a, c, g, or t
caggtggatcacctgaggtcaggagtttgagaccagcctggccaatacggtgaaaccacgtctctactantaaaaatanaaaaattagccactgcccccggcctccagtgctttctttatgcggcttatttgagaagcggagggaaggactagttggtagtgaagcatgtcagtggcatggctgagctggggagcagagtttcagaaccatgctttgtttggcaccatgggtataccaggctcatgtgctttttttctgtacacgctttggcatgtgatgtgtgtggctctgccttgaggacattatgctgagtaagagaagtcaggctcaaaaagacacacttatgattgcacctatatgaggttcctagactctcaaattcttaaagacagaaggaagaaggggggttgccaggggttgggggcagagagatgagagtgagtatttaatggg

SEQ ID NO: 159776 - DNA, 459 bp, Homo sapiens
tggtataccatggcgccaaacaaagcatggttctgaaactctgctgtgcggaccaatctcaacctcccaaagtgctgggattacaggcgtgagccactgcccccggcctccagtgctttctttatgcggcttatttgagaagcggagggaaggactagttggtagtgaagcatgtcagtggcatggctgagctggggagcagagtttcagaaccatgctttgtttggcaccatgggtataccaggctcatgtgctttttttctgtacacgctttggcatgtgatgtgtgtggctctgccttgaggacattatgctgagtaagagaagtcaggctcaaaaagacacacttatgattgcacctatatgaggttcctagactctcaaattcttaaagacagaaggaagaaggggggttgccaggggttgggggcagagagatgagagtgagtatttaatggg

SEQ ID NO: 159777 - DNA, 512 bp, Homo sapiens
ctgcctcagccttccaagttgggattagaggcatgtgccatcacgcctggctaattttgtatttttagtagcgatggggtttctccgtgttggtcaggctggtctcaaactcctgacctcaggtgatccacccacctcggcctcctgaagtgctgggattataggcgtgagccactgcgcctcttctgtaagagcctggctgcctcctgcctcccagctctggctaggtcagcccagcttggcattttcccagaggaaatagaggcctgcttagcctgagacttagacaaggaacccaggcatcctgagccccagcccaagaacagccatgccagcctcatcttcgcaccctgttccagtagccaaggaagggaaagaagctgggagattaagggtagggggattctggagcctcccagagcttcccaggagggagttggacacatcgggaaactcatgttagcctccccctcctcagcaggtgttccccaggtctaacctgagtgtgtatc

SEQ ID NO: 159778 - DNA, 361 bp, Homo sapiens
ttcacgtgtgcctgtgtctagcctctctctctgtgtctccaactccttttcttctaaggatgccggtgagattggttgcgggcccatcttaacaacctcagtttaacttactcacctctttgaaggctgtatctccatctccaaatacagtcacattctgaggtactggaggccaggacctcagcatatgaatttgaagggacacaattcagcccccaacaccccatcattactcttttctgccaggaagcccgcttctctttacctgtggtgccatctttcctcctctgctcatggcctgatagctttcttagccgccctccaccccttccccatttcctctccttgcccgtcctcactc

SEQ ID NO: 159779 - DNA, 405 bp, Homo sapiens
tatcagatcaatcctaacacatttgtcctataattttcagggaagtctatgatttggagaaacatgttgcccttaggctaagactaactacattaccttaaacgcaaaccccttctgtcaagtgctattacaagttattgtgaacaggctgtgttcaaaaagttcattagtttccatttggaatactgaatgcattttccccaaaaaccaatgataaaaaaaaaaaaggcagttatatgcccaaaccagcccaggaaaacaaaaccaaaaaaccacagaaatccccaccttggacccagagcaagcacagctcagctatattgcattgatggtatcataaagctgagttacctgcaaagcttaacctgctttctattgaaattacatttccaattcatactgggg

SEQ ID NO: 159780 - DNA, 468 bp, Homo sapiens
ctgcagctatcattttaaactttctaaggaattatttcctgacttcattatgcggcagtagagacgcagcttcaccatgttgaccaggccagccttggactcctgacctcacgtgatctggccaccttggcctcccaaagtgctgggattacagatatgcttaaggtgggaagagaagctggaaacctagaattatttcaactcaatcaccagccattcactgactttttaccatgtataaatcctgatcaacctcaaaaagagtaatattaagtttgattcttacactttttaaaaaaaatatatccaagatacaactatcaaaagatggcccagaatcaactgccagattaactatatggcccatagataatgatagaggagggaacttaaaaaactactttcttgtgcaaaaattatacctgtcacaaaataaagataaagtggagcactagaatttatgaggca

SEQ ID NO: 159781 - DNA, 442 bp, Homo sapiens
ggggtacacaaagatgacttagtgcggtccctagaagaggaagacccgagtaagtcacaatggtgatagagaggagggaacaaaaccctgaatcatttttgaggtgaatgggccagatttgacaatcaattgtcaggaacattgtgctgatggtgactgtaaattccttgctcaggaagctgtcttgactgtgcatggtggctcatgcttgtaaacccaatgctttgggaggctgagataagtagactgcttgagcccaggagttcaagacgagcctgggcaacatagtgagatcctgtccctacaaaaaataataaattagctgggcatggtggtggcacatgctactcaggaggctgaagtgggaggatcccttgagcccagatgttccaggctgcagtgagctatgatcatgccactgtactccagcctggacaacaga

SEQ ID NO: 159782 - DNA, 205 bp, Homo sapiens
attttattcttccctgacaccttccccctcactgccacccccaaatctcagacctcactggatatggtgacctgacaactgccctttacatggggatttgtatggtaaattgccactaagaggcccctgatccacaccttcctcaccaatttatgctgtcgtggctttcagacagaaactggggaattcacatgtggcaggcttg

SEQ ID NO: 159783 - DNA, 411 bp, Homo sapiens
ggaaaaatgagatagagtcaagaaaacaaaactaaacccctacatttatggtcagttgactttggacaaggatgctaagccagttcaatgggggaaagaaaaatcttttcaacaagtgacgctgggacaactggatatctgcttgcagaagcatgaatttggatctctgcctcatgccacatataaaacttaactccagatggatcagagacctaaatgtaagagctaaatctgtaaagcttttttaattaaaaaaacgtttaaaaaaattagtcataataagtgatgtaaaactcttaaaacatagcataagtctttgtcaccttggattaggcagtgttttcctagatatgacacccaaacaatcaacaaaagaaaaaagtgggtaaattgaacttcataaaaattaag

SEQ ID NO: 159784 - DNA, 392 bp, Homo sapiens
gacagaagcctttcagactctgacatgccatatctcagcagtctatgtcgctgctggacactgctattttattcactcaacaaatctccctcaggcaccaaatatgagtgcccagctctgcactaaacactttatgtaacaatgcaaagaagactgttagaaaatctagaaaggcaacaaatatatcatagcataaatatttgattacaattgtgataaatcttacaaaagggaaacacagaggttaatgagcacagatactcagggtatttttgccttagtacactgaagcaatcaacctagcctacggggtcagagaaggtactatttaagtgtacgcttgaagagttagaacttgaccataaaagcagcaagtaagagagagaaaaaaa

SEQ ID NO: 159785 - DNA, 502 bp, Homo sapiens
ccctgcctcagcctcccaaatagctgggattacaggcatgtgccaccacgcctggctaatttttgtatttttaatagagatggggtttcactggttggccaggctggcctcggggagcagagcctttctgtggagatcaggccagcctcctggcctccagcctccctgcctccagccttcctgtgctttgctatctggggtttgaggatgtggggaggggtctttcctctgagagatgaggccagtcctgtggatcacagtgaggcatgccaatcccagctggctgtgcctggccttcagctccaggagcctgagaatgataaggtctggagagctgcccttcctggaaacacagcatgtctccttcccccattctggggtcctgcatgtggcaggtgtgctagactctgcagggcatggctgggtggagctgtgtgattctggggttctgcgtgtggcaggtatgctggactctgcggggcgtggctgggtggagctgtgt

SEQ ID NO: 159786 - DNA, 344 bp, Homo sapiens
cattcaaaaaacaattaatgtaatccatcacaccaacaggctaaagaagaaaaatcaaatcttatgaatagatggaagaaaaggattcgacaaaatccaacacccattttttgatgttaaaaaaaaatagtcagcaaactagcaatagaagacacatcctcaacttgttaaagaacctctgcaaagaaacctgcagctgacatcatacttaatggtgagaaactagatgttttcccactgagagcaggagcaagacaaggaaggatgcccttttcaccactcacagattgtgagggatgaaataaagttgtccttatttgcagataacgtgattgtgtatgtag

SEQ ID NO: 159787 - DNA, 724 bp, Homo sapiens
tgatgcctccaactttgtctttctttcccagaattttttgactattcagggtctttctagctggcaatcatgttcaacatatgtaaatcaatcaatgtgatacatcacaataacagaatgaaaaataaaaaccacatagtcatctctattgatacagaaaatgtatctgacagggtccaacatactttattagtaaaaactctcaacagtttaggtacagaagaaaagttgctcaacataatgaaggccattcatgaaaaacccagagctaacataataatccatgggaaaaacctgaaatcttttccactaagatctggtacaaggatctgtttttcttctcaattgctgtgggagtcttttgtggttccaaatgaattttagaattgtttttaccatgtctctgaaaaattacattggaattttggtaaggattatgtcaaactgtatattgctttgagtagtacagacactctaacagtattaattgttccaacttggtaccctttgacttacctcctatttgctccttaccccgagaaaccccctggtaaccattttattctctgtctgtatgtactcaactttttttttttttttttttacattccacatgtaagcgagatcatgctgtatttttctttctgtgtgtggtttatttcacttagcataatgtcctccaggtttattcatgtgtggctaatggcaagatcttttttaaggc

SEQ ID NO: 159788 - DNA, 530 bp, Homo sapiens
tgtgtgttctggtagataaggcaaggtcataaaggtgaagggctgacagagattaggagagcctgcaattaaatggtacgaaaagagtcctaaataatcactgttcagagcttccaagtacttgactaaccaaagagacccagaaaactttgtatttcatctgaaaattgctttaaacagtgaaaaatgcaatctttgtgtaagtatctttgtatctttgtataagtgcaaagcactgcacatatatttgcaattgttgccttcaataacacttttgtgatgatatccagatgaaaaataatttaaacatgatacaataaaatataaataaataaaattaaatgtaagtcacaaacccatctgcatttcctcaatgacctgtttcctgagaagcaatgtgctatgaaatactgagagtggcctctggagtcagctgggcctgggtacacatcctgtcttaccacaccttgaaatcactgtgatttccatgaactgactgacaaaaaccacgaggatgtaaggagggtcag

SEQ ID NO: 159789 - DNA, 224 bp, Homo sapiens
tttattgtttaaggaagggaaattttagaaaattaaaataattataggctccctcacctccagcacaaattctgtttgctggaacaagtattattgtgatattagtgaactagcacttctcaaggaactggaatatgtggtgcctgagagaaggtattatatccacacctgtgtctttgttttgggtaatgggaagtgttggctgcagcatttactgagccagt

SEQ ID NO: 159790 - DNA, 424 bp, Homo sapiens
cagggcttctttctgttccaggagcagctcaaaatccataaattaaggaaattaactgatggggcctgcggcatctttgtaagctatttaaatctataaatttacaacatcttctgcatatatcaaataattgaactaactgcagggatgtaactttaatgagaaaatttccccctttttcctgtagttcgaactcgaaaataaataaataaataaaaccttcccttaggaggaaagtttcggctgattcccgcgtaaagaagttacggaagcgctgtctggacgctctctccacgcgcgcgaggtcctctagtagagggagaaagccccccccacttcaccttcctcccactggcaccccgagtccccctcaccccagctccaggccgaccccgagcgccccccaccccgggagtgcggccgc

SEQ ID NO: 159791 - DNA, 557 bp, Homo sapiens
ctgggaaatggtcttatgttgttattgttatcatcattttagtaactttttttccttccattgtctctggtctcttttccaatgatgacctttcacgccctgcattgagcccttaatttcatgttttattcttcctattttttaattttttttttttttttgcttttggagattttgactacatcttcagatcctcctattgagttttttctgcttttttatttttccagacaagggccctctagtctcttcctggggggccataagcctgatatgttcctgaactaaacatatttctaattaactgtgtcaggagaattttgctggcgcggggggtctatatttggaatttccctgaatccctttattcggttcggcgtctcattcttgccgtcctctgtgcctctctgttccggagcctccctgggtctgtttctttagataagaaaactcaactcttctgttgaaggtggcgggggagccacctgactgctcaagtttggagcaggacctggggtggaggacctgggggtctgatggcttctttctgccgccct

SEQ ID NO: 159792 - DNA, 441 bp, Homo sapiens
cccgggacccacaggtgtgtccggagctggccccagacacaaagcgccaagaattggcggggacatctcagccggcggggacacaccccggagtccgaggtccccgtcaccagggtgcagctgcccaggtagggggctcggccgccatgggccgcatccttcccctgggggccgcggggcccatagtcacgggcaccccctccctggcctcccgcacaggactgggcggctgcaggcgagaactgggcacccagccccgttcccgccccgtcccggccccgtacctggctttcaccgtcgcgggcacgacccccggcccaggagggctccgagtcccggaggggcagccccgggcccggcctggaggctgctaggcgtccggagacaccgggtcctgtccccatggcggccggaggaagccgcggtctgcgccgcccgccg

SEQ ID NO: 159793 - DNA, 108 bp, Homo sapiens
ttcctcctcctccccactccccccgggagtctccagaagccctgccattgccctgaccccagttaacactcctggtaattgctggggctgctgcagaaagcctaggga

SEQ ID NO: 159794 - DNA, 1024 bp, Homo sapiens
cctgcggctgtgcgcccacctcgactgcacacccgacatctgggcgctgcacaactggagcgcctggctcacccctttcttgcggggcaccactcgccgctttgacacggccttcttcctgtgctgcctgcgcgagccgccgcccgtctaccccgacttggcggaggtggtgggctaccagtggtcatctccatcagaggcaactgaaagtttcttatcaaaagaaatttggttgccacccccacagttctacgaagtgagaagacttgcaaactttgcctctctctctgacttgcacaaattttgtttgggtcgtgcattagaaggactggaaaggtggctgccgatcatcttgttaactgctgatgggatggtccatcttttaccaggtgatgagctatatttagaagattcagactttttggaaaatcttatgtctactgaaaaaaagactgaggaaatcatgaaggaaggcaagcagtttcaccggatagtgacataccatcgccacctttatgatatccacgtgactgttcagccaaagtataaacacgtttatcctaagaactctgtagtaagaaaaagccatttgtagggtgcttaagcttgtttgtaaaatggcctacttgaagtcctcatgaataatgagggttgactttcatttgcttgaaacttaaggaagtttgtgcctataaaagttactgcaattcagtatttctttatttttttcgagacagagtctcaatctgtcgcccaggctggagtgcagtggcatgatataggctcactggaagctctgcctcaggggttcatgccattctcctgcctcagcctcccgagtagctgggactacaggcgcccgccaccatgcccagctaatttttttttgtatttttagtagagacgggttttcaccgtgttagccaggatggtctcaatctcttgacctcgtgatacgcccgccttggcctcccaaagtgctgggattacaggtgtgggccaccacacccagcctttttttttt

SEQ ID NO: 159795 - DNA, 215 bp, Homo sapiens
acatgttcgtagaccgaatataaagaatcattctcacttggaagattgcgtaacaggcaggacacttgggcaggaaagaagtacgttcttattttcatttatacctctgttcaaatttccagaatatttttcctttctgattgatgtggatttggcagtgcctaccagcacttgagctaaaaatgtcggatttccttctcccttaggcactgaat

SEQ ID NO: 159796 - DNA, 551 bp, Homo sapiens
aacctgtcgcaggcaactatgcaaacagccattgttgctgagcgaggatgaagaagataccaagagagttgtccgcagtgccaaggacaagaggtttgaggagctgaccaaccttatccggaccatccgtaatgccatgaagattcgtgatgtcaccaagtgcctggaagagtttgagctcctgggaaaagcatatgggaaggccaaaagcattgtggacaaagaaggtgtcccccggttctaaatcccaacatttttgttggagagaatattctggaagagagtgagaacctgcacaacgctgaccagccactgcgtgtccgtggctgcatcctaactctggtggaacgaatggatgaagaatttaccaaaataatgcaaaatactgaccctcactcccaagagtacgtggagcacttgaaggatgaggcccaggtgtgtgccatcatcgagcgtgtgcagcgctacctggaggagaagggcactaccgaggaggtctgccgcatctacctgctgcgcatcctgcacacctactacaagtttgattacaa

SEQ ID NO: 159797 - DNA, 245 bp, Homo sapiens
actgtggggtaagctgacagcaaacccccacccatctcaacacaggcaaagcttgaggagcatcgcatataggcattgtacacacacactctctctctctctctcactttctcacttttcaatccccagcagatttccatacccacaaagacatctgtacagatatcaggagtgaggaccgagcctgagaccttccctggagcaagctttgatgacagcaaagttggagtagattggggcagcca

SEQ ID NO: 159798 - DNA, 408 bp, Homo sapiens
caaaaaaaaaaaagaaaagaaaaaaaagtatttctataaaaccacctgcattttctgttttgagaggtggcaagaggagttaaattgagtttttccaaggaggagacaaattggtcaacctatggcagaaagatttggaaatgttaaaaaatatattaccatgttgaacagaaagctacagatgatattcaaaggaacactgatatagaccatgtcatggaatcttatacttaattgctcatactgactttgccctcatgggtagttacttatgtttattgtgagaatagtgaggtacaagtatgtaaatggctttttagtgaggttgagatagaagagactattatcagctcttcttgggcttctaaattggtcaagctgacttaagtgtgtgtgtgtgtgtgtgtg

SEQ ID NO: 159799 - DNA, 368 bp, Homo sapiens
ctcacattccaaatagatcgagctatcacattaatatttttgtcaggaggcatttttcattcaatcataattcatgcacataaataatcacatgctctagtactatattcgaggaaatttttcctttttagtcaaaataagaatgaaatgcattaattcaagtcattccagcaggctatatgtggaagaccacgtcactgacttgaaagcaaaacttgaatcacaaaccctttaaatcaaaatataaaataagataaaatactcaagttcccttttggatttggaagcaaaaacagctgctgcaacaatgagtggctttccttctgagttcatcaagaggggagccagacgtggatctgatggccctt

SEQ ID NO: 159800 - DNA, 230 bp, Homo sapiens
tctggtgttgatgttagggtaatgtgggcctatcttgttaggaagaatgaaatgctctgcaaaaatggttccttttcccctccccaagctggaagcaggaggaggctcttctccaatattccttgtgagaacctagtgaagctccaggaagtaaaactcataatgtgtagacccctgatgattgagtcctcttggagtaaaactaatgtcatgaatgggccccctaatga

SEQ ID NO: 159801 - DNA, 228 bp, Homo sapiens
tgcatgggctggagtaagggtaatgaaagcagcaaatgctccttcactgtcttgcaagacccaacagtctgaatgtggtggtctggagttcctcttctctcccacctgcccgtaaaccttagcagaatctgatgcttgagcataatgtctaaaaagtattatggctagtatcatgtggctacatgttaactcagttaaatactgaattgggtggcgggattgacaagg

SEQ ID NO: 159802 - DNA, 211 bp, Homo sapiens
gacttgagaactccatacaacttggtgagctatgaggacatgcttgttaatccttggattctcctaatctgccatcaaaggcaggctctggggcagcctggtgctcgccctgtgaaaaactgttcaagtaagcagagacagaacaagaaatgctaggtaaatgtatgacaccttagcaaactagatgtcctcacacaaacaaaaaagcagg

SEQ ID NO: 159803 - DNA, 118 bp, Homo sapiens
ctcaaaatgcaagtttaattcataatttataccacaaggaagggaaggagagtaatagggatgagcgcactaagcaaacaattaaaaaataagctaagagtgtcttaaggcaaatcct

SEQ ID NO: 159804 - DNA, 394 bp, Homo sapiens
agcagtcctccctcctcggcctctcaaagtgctgggagccactcacaggtgtgagccaccacgcccagcagagcttcgtttcccaatctagaagtctgtcatacaaaaaggcatcccggttttctctctctctctctctctcacacacagacacacacacacacacacacacagagtcacctccccccacctttttttcctttttatccttctttggcattttctttcaagcagaaaataaaaacatttcccatggctacagctttgaaagcttccctctcctatcagcctccatcccacgcccaccccaatgtcaatccatttctagagccagcgtcaagtcaaaaacaaacccacaaagatcaagcctgacaggccccctcccggctgccct

SEQ ID NO: 159805 - DNA, 108 bp, Homo sapiens
tctcaccatcaacacaaactcaaaagattataaagttattacctttccacaaatcaacccattcctaattcctattcaattaccttcacccccgcctctgcaggcccc

SEQ ID NO: 159806 - DNA, 345 bp, Homo sapiens
ctgggctatgactatgggaaacagaaatatgactatgggaaataagggctatggctatgggatatagtgactgggaaatagacttcatagtctatttccctcacagtgcacagcttccgacagctctgcccccatgttttcctccttcttttaatcctttagcctgcctacctaggagttgcccctgcatcagtataagccccttattggccaaacgctgtgtttaagcctccttgactagtagatttttaccctttaccactgcatgtctgtgtggcttggaggctgctatcacaccactcagaaagtttatgtttttgtcctatgctcattcggagactagca

SEQ ID NO: 159807 - DNA, 125 bp, Homo sapiens
ctctaagctcaatgctttgttgtgagaaagaaaaatggaattctaagttccccaatcaatgggacatccatcccagagcaaacttggaagaggagttcttggccataatggtacgggaggtcagt

SEQ ID NO: 159808 - DNA, 530 bp, Homo sapiens
ggggagacaatgaaaagagagagagagaccgagccaacaaatcaccccaaaagcacaacccccacacttcttagttatgtgaacaaccaaaacatccattgttttaagctggatacagttggtttctctgtaacctccaactaaaagtgaccaataggaattgggcccacagacagaggcccagggacatgtgcaaagtcatacagacacttggcactggggcaggacaggggcccagtgatggtcctgggccaagacctgattttgaactgtggctccatccttcaaagctatgagaccttaaggatattccttcatgcctctaagcctcaaatgctggagatcataacatcccagggctctgaggattaagggaagtaaaaactctggaagcacgttctcgagcctgccgcagggctgcctctctttctggacattgccccactgacaggcagcaggggctggttggaaactgatatggtttggctgtgtccccacccaaatctcatcttgaatggtagctctcacaa

SEQ ID NO: 159809 - DNA, 342 bp, Homo sapiens
ttttattttatgatgatagaccatcacttatgtaaccaatgtcctactattaaacattggaattgttcctaaataaaactacgctacatggccttttatataaatatttgaccaaatattttattatttcttcaggatatattcccaaataagctcaatggggcctggcacagtggctcatgcctatattcccagcactctgggaggcagaggcaagaggatagcgtgagcccacgagtttgggaccaacctaggcaacatagtgagaccctgtctctacaaaaataaaataaaagagtagccaggcatggtggtatgcgcttgtagtcctagcaactcggg

SEQ ID NO: 159810 - DNA, 135 bp, Homo sapiens
ggtcaacttatttaggacttcatttattgattcaacaaatatttactgagcacccactatgatctaggcactgtcctagataaagagaaacagcagtgaacaaaacaaagtctctgattctcacagagcttacgg

SEQ ID NO: 159811 - DNA, 459 bp, Homo sapiens
tggaggagggatgtctggcctcacaacaggggccagtctttcgtgtccaggaacaggatcgatgacccttgtaggacactgggggcgctgttacctcctcaccgagcgcaggtcgctgccctgtggtctaacagagcatgtattcagacccgcaccctcatctttggcggatgctgaagatgcaagaaaagccacctgcttgatgcttgcttggcctggagatcgttctcctcttggtctgtgtcccgtggcggcaggccttgcagggaggggggcgcaacagtggggagcatccgaatggagtcccactttccaaccttggggctgctgcatcggcctcccacatgtgacctcccaggccctgatgctgcttcttttgaagggggtgaggcctgatgggcaggtcaagtcggtccttcagggaggggtctaccctcccttgcccgggggtggtgcccg

SEQ ID NO: 159812 - DNA, 401 bp, Homo sapiens
aattttaattacttacaagttgtagacccctttcatggatgtaaaactttgaataataccatcttctttattagctagtagccaacgacttttcttatgtccttttttccatattgtcaagaaaaagtaacgtgaatattgtttcacttcctgctctactttaatagaacagaagaacagaaaaattttttaaaaagtttggccaaaggatgggtgcttgggagaaaaataaacttagaccacatgatgtgcaagaagtatattataaatccttaagtactgattgatttggccagagttaagcctctaggactcactagggtaggtctcagggctgagtctctgcagtaattctacgtagctggtttcagcagctcagtcaagaaatattcagggatgga

SEQ ID NO: 159813 - DNA, 381 bp, Homo sapiens
catcaaccctaaatttaatatgtcacaaaatttgaaaaatatttttgataaggatttcaaaggacatgacttcccttattatcccatgtgttttactttctgcattagaaactttattctgagaagggctcaccaagttgctgagggatccattacactaaaaaggcaaagaacctctgctctaagaatcacagcagggccggaatagtgtttggagaatttcagacatgtggggtgagcattacttaatctggaaagccccagaagtcacatgtccccgcagataggcagccttcagagcagacctgactggcagctagaggtctgcttcaatggcttcttcattctcccttcataataaattcacgtcgatcagggtcc

SEQ ID NO: 159814 - DNA, 426 bp, Homo sapiens
aagccattctggggctaggatatattttgtaacatcttcgaggtgggctccctcacaagcatgtttctatacaattagtggtttgaggcagcctatttactgtttcatgccttcttgcctcttgttctcttctctagtcaggtttaaggctattttaataaaatttggcacagattaggcattgcttcagttaacttctgagagtagataaaataccatcattttcttttttttttctttttttgagatggggtctcgctctgtcacccaggctggagtgcagtggcacgatctctgctcattgcaagctccgcctcctgggttcacgccattctcctgccttagcctcctgagtagctgccactacaggcgcccgccaccacaccccggctaatttaagtgatcaccgacgaatttaagtgatca

SEQ ID NO: 159815 - DNA, 199 bp, Homo sapiens
ttgggtcctggtattacaataatgaacaagacaggtgaggtccctgccctcatggaatttacattctagcaaacataaagtcatcatggttgtgttggatccccccaactttttttttttttttttttggagacaagagttttgctctgtcgcccaggctggagtgcagtggtgtgatctcggctcactgcaatctccg

SEQ ID NO: 159816 - DNA, 141 bp, Homo sapiens
taatgcaaactgagcacttgctgtgtatttagtgcagtcttaggcgatgggaatacacactgatttgaacagaagagggtttggccagtaatgggacaagcaatgtagctgcaataagtataatataattcaaagcaaaag

SEQ ID NO: 159817 - DNA, 214 bp, Homo sapiens
tctagtgttgtcttatagaataggagcctaccatgataaagcacaatgtttaccaaacttcagttatcagtacaacagaagactttcattatttttgccatagccacatgctttgaaattattcactaaatattttatttaaaactgctcacttaaaaaaatgcttccttaaaaatcccaggctattgtagtggttcccaatgtgggaactttt

SEQ ID NO: 159818 - DNA, 376 bp, Homo sapiens
acagaagaaatttgattgttgtgagcgataataaaattaacgtggaactcttcctccatcttcctctcttctactagtggactaagggtagctttctagcctatacagctcaaacagcttccactgttccaacaacacaaaacaaaatatggtacccatatatagctatgtctgtagctctcagaagttattctaccttcagaatccagaattgtttattacccttgctttccaacgtgatgttactcactttcagaagctgcgtgttcctttcattttctgagatctgctagctctgagcagatcatcactccactggccccttgtttctgatcttctctattcttgtttcctactgattctgcagttttttttt

SEQ ID NO: 159819 - DNA, 126 bp, Homo sapiens
aggggagagagacagagagagagagagagagagagagagagagagaaagaaagaaagaaagaaagaaagaaagaaagaaagaaagaaaacgcaaggcaaaaccaaaaagcaaaaaaggaggaagca

SEQ ID NO: 159820 - DNA, 371 bp, Homo sapiens
aagcaaagggtacctccatgaggaagtccacacgtccatggtcagagccttcaggtggtcccggggtagtatttttgggcagtggtggcaaggaggggcccagagcaatggggcagcccgaaggggtcttcctgagagatggcctcttcctccgaggtctccttcagtggccacttgactgggttccagcgggtatggtctgtgcacagggactaccccctgagcttacttagcccaagtcacctcctatcaccccaaactttcaagaaactcaatctccagctcagaaataatccagcgcagtgctcagtggcggtggctcctttggttacttggaagggcacaaaaccactcctggatgggaagggggt

SEQ ID NO: 159821 - DNA, 209 bp, Homo sapiens
atgagccaccgtgcccggccgaaagtatgaatcttaaatgttaataattgttttagcacttttcaataatggaaccaagcaattgccatcaggaaagccaattcctagtctgatagaaatccaccacaaagctgatcttgcagagtggctagtgtgaagcacactggactccaggattcagatgtgggttaggagaccctcctctctca

SEQ ID NO: 159822 - DNA, 741 bp, Homo sapiens
ggcaggggcccatgtgtgcaggatagctgggctgtgtcccagtcggaggaggaggagcaggaggaggccagggctgagtcccagtcggaggagcagcaggaggccagggctgagagcccactgccccaggtcagtgcaaggcctgtgcctgaggtcggcagggctcccaccaggagctctccagagcccaccccatgggaggacatcgggcaggtctccctggtgcagatccgggacctgtcaggtgatgcggaggcggccgacacaatatccctggacatttccgaggtggaccccgcctacctcaacctctcagacctgtacgatatcaagtacctcccattcgagtttatgatcttcaggaaagtccccaagtccgctcagccagagccgccctcccccatggctgaggaggagctggccgagttcccggagcccacgtggccctggccaggtgaactgggcccccacgcaggcctggagatcacagaggagtcagaggatgtggacgcgctgctggcagaggctgccgtgggcaggaagcgcaagtggtcctcgccgtcacgcagcctcttccacttccctgggaggcacctgccgctggacgagcctgcagagctggggctgcgtgagagagtgaaggcctccgtggagcacatctcccggatcctgaagggcaggccggaaggtgaacccccaccccaccccaagcatcctgcatgtccaggggcccccattctg

SEQ ID NO: 159823 - DNA, 636 bp, Homo sapiens
tgagatggggtctcactctgttgcccaagctggagtgcagtggcacgatctcagctcactgcaacctctacctcgcaggttcaagtgattctcctgactcagcctcccgagtagctgagactgtctaagaaaaaaaaagcaatctgattcacaccactgtactctggaaaggccaggaactggaagcacaatgcatctctgaagggaggattgagtcatgtggccagaaacagaagagttggctgacaatctatagaaagagcagttaagtccttagttctcctccctacctgcccaagcaaccaggcaactacccatcctccaccctagataaaggctgcctgtcaactcaccagtccagagaaacaatcagaaaggctctggactcttcatccatgtccctacaaaggacataaaccatcattctgagcgaactatcgcaaggacagaaaaaccaaacactgcatgttctcactcataggtgggaactgaacaatgagaatacttggacacagggtggggaacatcacacaccagggcccgtcgtgtgtgggggaatggtggagggatagcattaggagatatacctaatgtaaatgacaagttgatgggtgcagcacaccaacatggcacatg

SEQ ID NO: 159824 - DNA, 347 bp, Homo sapiens
tgctgggattacaggcatgagccaccatgcccagccactggttccacaattttttaaatgaaaataaaacacaaatcagtacacgaatgaaagattaatacccctgagatagatctatgccactaaatttagacatgcatgtgaatatatacttatgatatacatgaatatgcatttaaataaatttgcaaagagtacaaataacaaaagaacaattatttaaataatcttctaacactcaatatatctatctaatttacaatgaccattcccttctcctgtcttcctctatctttctaaggataaaatatccagggggttttgtttgtttcatattagtataagat

SEQ ID NO: 159825 - DNA, 373 bp, Homo sapiens
  misc_feature (275)..(275): n is a, c, g, or t
  misc_feature (320)..(320): n is a, c, g, or t
  misc_feature (332)..(332): n is a, c, g, or t
ctcagaacagcttatcctttccccgttgaagtgtaatgttcctctgtcatatagtatgattctaaatagacatattttttatgtacacattatcatttgtctctttctatgctaataccaactgttttgattactgtaacattatcacaagtcttttttttttaagagatggggcctggccagcatggtgaaaccctgtctttactaaaaaatacaaaaattagctggtgtggcatggtggtgtgtgcctgtagtcccagctactcgggaggctnaggcaggagaatcgctttaacctgggaggtggaggctgtggtganccgagatctcancactgcgctccagcctgggcaacagagtgagactccatctc

SEQ ID NO: 159826 - DNA, 289 bp, Homo sapiens
ccacagaacttatatgacttcacactgtgtagcctagttttggcaattttcattaaaatgttatcttattgtacctgtaagactgtcatttcaattttattctttgttctttcttgcatgactcacatctcttaaaccagaaggatatgacagaaggaattcacaaaaggtttggacaaatttatgaatgacatagtcataaatgtctgggtataagaagtgagcagcatgcaaagaagaaggagataacttgcatttttttttcttttttttgagacggagtgtcaca

SEQ ID NO: 159827 - DNA, 190 bp, Homo sapiens
aaggcaagtgttcagtcctctctgcaggagagatggggtctgagagtcaaggcgagtgttcagtcctctctgcaggtgagatggggtctgagagtcaaggcaagtgttcagtcctctctgcaggtgagatggggtctgggagtcaaggcgagtgttcagtcctctctgcaggacagatggggtctgagag

SEQ ID NO: 159828 - DNA, 436 bp, Homo sapiens
tgtacaagtcactgctctgccagatttgtaaccaaggtgtacgaaactttgcaagtgaaaatgctaattataataagtagctcattaatacagttttcattaaatatcaataccagatgtagaatgtgaacaattatgcttttattgtttcaaataattttgaggtactactaaaaaaaaactgccaagggctaaactagatggtctctgagatccctacgtcaaaagcctaggaactgtaaagaatcagggttatggccaggcgtggtggcccacacctataatcccagcactttgggaggctgaggtgggcagatcacctaaagtcaggagctcgagaccagcctggccaacacggtgaaaccctgtctctactgaaaaaaaaaatacaaaaaaaattagctgggtgtggtggcacatgccagctacttgcgca

SEQ ID NO: 159829 - DNA, 486 bp, Homo sapiens
cgcggtggctcacacccgtaatcccagcactttgggaggctgaggcgggcagatcacaaggtcaggagttcgagaccagcctggccaacatagtgaaaccctgtctctactaaaaatacaaaattagccaggtgtggtggcgggcgcctgtagtcccagctacttgggaggctgaggcaggagaatcacttgaacctgggagacggaggttgcagtgagccaagatcatgcccttgcactccagcctgggcgacaagagcaagactctgtctcaaaaaaaaaaggaaaaaacacacagtaataataatagctaacacttgttatcatcatttctgtctgtttcaaggtaatagtcgatataaagtgaagcacaggtccaccagattccagaagctgtgcttttatctatgatgttctaccagctcccatccttttttttttctgtcaggttgacttctttcttgagaatagagacatttattatta

SEQ ID NO: 159830 - DNA, 545 bp, Homo sapiens
caacgatggtcctcagctctcagcagtcctccctcctcaacttctcaaagcactgggattatatggtgtgaaccatccatgcctgtaccagcaaaagtattctgagaaaaccttcgaggggaatgccagcccatttttatttaaaatttcccaatttctccccaacgatggtcctcagctcagccacggtgcctggccccagatgtctctcttaatgagtggctgagctgtatgttttttttactctcagagacatggctttcccttatccagaggcagtgtcactggtagggaggatctcgattatttagtctttgtaactgccctgctgttttagataggtagggcagggctgggcacagtgactcacacctgtaatcccagcactttgggaaactgaggtgggcagatcgcgtgagcccaggaagttggagatcagcctgggtgacatggtgaaactctgtctctactaaaaccacaaaaattagctgggcatagtgtcatgcacctgtagtcccagctacttggaaagctgaggcaggagg

SEQ ID NO: 159831 - DNA, 506 bp, Homo sapiens
tcaatttttttggtagacagtcatgagaagaaatggctaattcctccactttgaacatttacagtacaacatcccagttagttttaatgatttgggtattgaagatagttgtctggtttaagactggtatttaatctaagtatcacttgaaaacacaagctctaatgttctttattttggaaatttgtgattttgtaaaatattaatcaacatattgtttctattaggaactctataatcagaagggtttactacccagaggtagacaacctctttccaagtctattttataaatgtgtgttgatttttactttataaaaccaaaactgaattagattatttcagaatcacctgtagtcaggctgaagaaaattaaagcttttttcttttttgttctgcctaatgtgtatttctttgcgcacaattttttgttggtaagagtttgttaaatacatagagacagtgggattaaaaataaagcagtctctattctctttaaaatgtgt

SEQ ID NO: 159832 - DNA, 632 bp, Homo sapiens
ttatgcattttccacaggcttcagcttgactgatcctgggatggcacctgaaggaggggctttgcctgtgccgcctttaccctccaattgttctgtacttagtgactctacacatcagtcagggacttgctcagcttcaggtgcaatgatcccacccacttacgttgtactattcccagtcacctccatctgtcgctgcccatttctctatgtgcaattgatataagaggtgaaagccccaaggccagttctcagaatgctctgacccactctcttcccctggctgtacagtccactgtgtccactgcattagagtacatttactactcccaggataaactgctgcatcctggtccttcccctgctttttctaggtttctggaggtagtaattctatattcataggaaagcagacagctttgaatttctgcttttgcatttggaagtggtcatttcctctcctccatctgggccttccactatttaaagactcatgctgacagtggtgagaaaaatgttgagtaattccatgagtcaagaagtggtcactagcaccattgatattctctggcaagggccatgtccgtgttcaaaagtttgagtggtacagtcgtcctgcaagtatggttcct

SEQ ID NO: 159833 - DNA, 381 bp, Homo sapiens
ggtatctatagggatatcattctgaaaattaaactattctacataggaccatagatacaggctgactagatgactgggctggatgtgttccacagtgtatcagtcagggttctccagagaaacagaaccaagagggtatatagacacatacatgcacacacaccaggagagccagtgatgtaagccctgagactcaagacccaggaagagctgatgtttcagccagagtctgaaggctggaaaagaccaatcttccagctcaaacaggcaggagttccccttactcagcatttttgttctgctttggttttcagttgattggatgagacccactcagcagtagggagggccctcgcctcactcagtacaacctgccggtgg

SEQ ID NO: 159834 - DNA, 158 bp, Homo sapiens
ttcatctataagatgaaagtaatacaatgcaccatgtagcaaactcacaggagaccctagagatcaaataacactgtgaaagccaccaaatgaatattttaaaattttatctcatttctgccaaggtgagatatcaatctaaaaacaggataaatctt

SEQ ID NO: 159835 - DNA, 269 bp, Homo sapiens
gcagcatgactaatatgtgttgataattgcatattgttgataactgtaaactctgagattgcactaataaaaggtaataattcccaaggcaaccaggaagggaactggggagcggctgcaaatttagcctttgccattttgccagttgtttagcgtcatttacgttggtgggaattctagtgctcataatgcactggaagatttttttctggactacgtaagagtaattggagattgataatgtgtcgatatgggggcatgggaagtga

SEQ ID NO: 159836 - DNA, 218 bp, Homo sapiens
cgctggagattcactaacatgataaatatggactgaaagggaaatgtcaagagaaggaaaaaataccaccaactgtgacaaagaaaaaccatattggaagggatattcactgcttctcaagagaaaacaaggcaaaaaagccagaaatcatacctagggctagaggagtctacataccgatttagtacgactggtaacaaagttattaggatgcttga

SEQ ID NO: 159837 - DNA, 876 bp, Homo sapiens
ctaatacaaggcacatagtaggagcttattatggtgatggggtggcattggccacagggccttgggctcagcctgtccctctgtccctctgatctggatgggtgggtatccagggaagtacccctacttgataggcctcaagccctccctccttgtgtccagatcctttcagcacctgcctccacgtcctgcccctctgccctctctccctggcatgatcctggccttccagtcacatcccaaaatcactttgcctggtttcctttgggaagcaaagcctgtctggggccctccatagacagagaagctgtgaaggagataaatgctgaagaaggggtgaggagacagactcaggggccaatcaaagtcaggaaacaggctgggtgtggtggctcatgcctgtaatcccagcactttgggaggctgagccgcggatgacctgagttcaggagttcgagaccagcctggccaacatggggaaacctcatctccactaaaaatacaaaaattaaccgagcatggtggtgcatgcctgtaatcccagctactcggaaggctgagacaggagaatcacttgaacccagtgagccgagatcgcttcactgcagtccagcctgggtgacagagcgagactccatgggggaaacctcatctccactaaaaatacagaataaccgagcatggggggtgccatgctgtaatccccagtatcggaaggtgaaacgggcgaatccttgaacccaggaggcagatgttcactgagccagcctggtgcgaacggatcctctccgaacacacacacaacggggggggggcaccgaaccacctcggacgggggagccagacgagcacacagaagggaaccgtcaaaaacgg

SEQ ID NO: 159838 - DNA, 885 bp, Homo sapiens
  misc_feature (41)..(41): n is a, c, g, or t
tgagctggccccgttagtgtcgctcgataccacgctgtcangatcttcttgatgtcttggcgctgggggaggagttgccccctagggcagccagcaggtaggaggcgacgtagcgcatcgcggcggcgtcttgcgggggctgccagcccccgcagacgccagttcgtccctttccagttttacagtgaattgctgccgtcttgcgggcccgtcttgcgggggctgccgcagcccccgcaagacgcatcccaaaatcactttgcctggtttcctttgggaagcaaagcctgtctggggccctccatagacagagaagctgtgaaggagataaatgctgaagaaggggtgaggagacagactcaggggccaatcaaagtcaggaaacaggctgggtgtggtggctcatgcctgtaatcccagcactttgggaggctgagccgcggatgacctgagttcaggagttcgagaccagcctggccaacatggggaaacctcatctccactaaaaatacaaaaattaaccgagcatggtggtgcatgcctgtaatcccagctactcggaaggctgagacaggagaatcacttgaacccagtgagccgagatcgcttcactgcagtccagcctgggtgacagagcgagactccatgggggaaacctcatctccactaaaaatacagaataaccgagcatggggggtgccatgctgtaatccccagtatcggaaggtgaaacgggcgaatccttgaacccaggaggcagatgttcactgagccagcctggtgcgaacggatcctctccgaacacacacacaacggggggggggcaccgaaccacctcggacgggggagccagacgagcacacagaagggaaccgtcaaaaacgg

SEQ ID NO: 159839 - DNA, 283 bp, Homo sapiens
atgtggaccaagggggggggctctcgacagtcactggatgggtgccatcgcgtggaccgggtcgataatgcgtacttcaatgaagaaaagtatttttgtctgacagtggaatatatctggagaccacaagtaccactcctattctgttatctggactagaattttcaatcaatgtgtttgaaaataatgttgctatcacctatttggttgagttttggttttttctttttctttttttttccaaaaataaagacagcccatttttgtcatttccattaccaca

SEQ ID NO: 159840 - DNA, 833 bp, Homo sapiens
cagggactcgggtgcctggggcagacgaggccggcttctccgcggacagctagggagagtgtcctgggtgtcagccagaacatgtctttcaacctgcaatcatcaaagaaactgttcattttcttaggaaaatcactgtttagtcttctggaggctatgatttttgccttactcccaaagccacggaagaacgttgctggtgaaatagtcctcatcacaggtgctggaagtggactcggaaggctcttagccttgcagtttgcccggctgggatctgttcttgttctctgggatatcaataaggaggggaatgaggaaacatgtaagatggctcgggaagctggagccacaagagtgcacgcctatacctgcgattgcagccaaaaggaaggagtgtatagagtagccgaccaggttaaaaaagaagtcggcgatgtttccatcctaatcaacaatgccggaatcgtaacaggcaaaaagttccttgactgtccagatgagcttatggaaaagtcatttgatgtgaatttcaaagcacatttatggacttataaagcctttctacctgctatgattgctaatgaccatggacatttggtttgcatttcaagttcagctggattaagtggagtaaatgggctggcagattactgtgcaagtaaatttgcagcctttgggtttgctgaatctgtatttgtagaaacatttgtccaaaaacaaaaggggatcaaaaccacgattgtgtgccccttttttataaaaactggaatgtttgaaggttgtactacaggttcttcttgttgccaattctgacacggcagtgaagacgcagg

SEQ ID NO: 159841 - DNA, 879 bp, Homo sapiens
caggtgtggatggagaagatggacagtgttagttgggtcttgcccaaggtttgaggagctattgcatctcatcctcacagtagcgccagaaaggcagactgatgacctcattttacagttgaggaaactgaggtctatgagctgagtcgattgcctaaggcggcactgcaaatgacagagctaggattccagccaggctcatctgcccccaaagcgcatgcctacaggacaagacttcactgcttcctctgtgtcattgtacagtggagtgatgctttggaaaccgaaatgagaagtgaattgaataacttaagccagaagacctgtcaaggccctgggcgagtgtccccggatatagtgaacaaggcccagtgaccctgaggcgggtagcactcaggctgcatagtgtgtgcatgagtgagtgacttcatctgccacaagaggtgacactgcttttcagtagaggtggtaaagaggctttcatgaatgataataaagaaagtttattcttgtgttctctttagctttttgcccctcaagacaggactgcttatagctgactatttgggcatccttcatgcaatggatggctttgttgaccaaaagaagaagctctaaagaccaactctatggctaaggtcatctgatacacagtgttacataatgcgtacttcaatgaagaaaagtatttttgtctgacagtggaatatatctggagaccacaagtaccactcctattctgttatctggactagaattttcaatcaatgtgtttgaaaataatgttgctatcacctatttggttgagttttggttttttctttttctttttttttccaaaaataaagacagcccatttttgtcatttccattaccaca

SEQ ID NO: 159842 - DNA, 1272 bp, Homo sapiens
cagggactcgggtgcctggggcagacgaggccggcttctccgcggacagctagggagagtgtcctgggtgtcagccagaacatgtctttcaacctgcaatcatcaaagaaactgttcattttcttaggaaaatcactgtttagtcttctggaggctatgatttttgccttactcccaaagccacggaagaacgttgctggtgaaatagtcctcatcacaggtgctggaagtggactcggaaggctcttagccttgcagtttgcccggctgggatctgttcttgttctctgggatatcaataaggaggggaatgaggaaacatgtaagatggctcgggaagctggagccacaagagtgcacgcctatacctgcgattgcagccaaaaggaaggagtgtatagagtagccgaccaggttaaaaaagaagtcggcgatgtttccatcctaatcaacaatgccggaatcgtaacaggcaaaaagttccttgactgtccagatgagcttatggaaaagtcatttgatgtgaatttcaaagcacatttatggacttataaagcctttctacctgctatgattgctaatgaccatggacatttggtttgcatttcaagttcagctggattaagtggagtaaatgggctggcagattactgtgcaagtaaatttgcagcctttgggtttgctgaatctgtatttgtagaaacatttgtccaaaaacaaaaggggatcaaaaccacgattgtgtgccccttttttataaaaactggaatgtttgaaggttgtactacaggctgtccttctctgttgccaattctggaaccaaaatatgcagttgaaaaaatagtagaagctattctacaagaaaaaatgtacttgtatatgccaaagttgttatacttcatgatgtttcttaaaagctttttgcccctcaagacaggactgcttatagctgactatttgggcatccttcatgcaatggatggctttgttgaccaaaagaagaagctctaaagaccaactctatggctaaggtcatctgatacacagtgttacataatgcgtacttcaatgaagaaaagtatttttgtctgacagtggaatatatctggagaccacaagtaccactcctattctgttatctggactagaattttcaatcaatgtgtttgaaaataatgttgctatcacctatttggttgagttttggttttttctttttctttttttttccaaaaataaagacagcccatttttgtcatttccattaccaca

SEQ ID NO: 159843 - DNA, 334 bp, Homo sapiens
ttttacaactggtacaggccggggaagagactcaagtaggagcgcctgcccgagctgagactagatgtgaacctttcaccatgaaaatgttaaaagatataaaggaaggagttaaacaatatggatccaactccccttatataagaacattattagattccattgctcatggaaatagacttactccttatgactgggaaattttggccaaatcttccctttcatcctctcagtatctacagtttaaaacctggtggattgatggagtacaagaacaggtacgaaaaaatcaggctactaagcccactgttaatatagacgcagaccaattgtt

SEQ ID NO: 159844 - DNA, 120 bp, Homo sapiens
gttgaggaatgttagacattaggatatcggctcttaattctttgattcacaatctaatttaagaagctgataaaaagtggagcctcagttccagaaaaatacaccttcacagttaattcc

SEQ ID NO: 159845 - DNA, 243 bp, Homo sapiens
caccagatgcaaacttgatcttgactaggagggcccctcctagtcaagtagattcacaccttaagtcagtaaatcctagccactcctttagtcttcatcactggcatttgatggttttcctcttcttcatggccccaaatttctggttctctttttattatattatctatgtcctttactgtaactcacctcacaaccttttcggaaaaaaggactcaatacaggaaaggaaaaacagccgcg

SEQ ID NO: 159846 - DNA, 362 bp, Homo sapiens
aacgactaatatactactcacttgcattttattcaagaaaagaaaatatgtccatctataagaatacagaaatgtttttatttcctgttgtcttgaaaacagttactaaaatgtaattcaagatactgctgggcttctcatttgtatcatgaaggtgacagcacagacagtaacaattcataacatcatggctttccagggtgggcacgcacccgctatgctccttatgctattgccactgtcctaactgaacagtagcatatctccctcccttacccagagctgggatttgaacccaggcctgtttggtgcccaagactatgctattatcattaacgaaccacttctcacacggtccttta

SEQ ID NO: 159847 - DNA, 1546 bp, Homo sapiens
gtgtccctatcattaagcaagagcctttctcttttattcttcctgcttccctaagctgctcagggttctctgagtcttgccctctgatggcaagtcttatatataactaaacctatttttgtcacccatcaaaacacatcctcagtagactgtgtgaaggtgtgaaggtctgataatgacttgatgctttatctccatagacatgaaagccatgccctctgcctctagatagggtgatccaagagctcctgaaccttaggaggttcaaagaagctctactgtctgtgcccaggaggtagcctgccagcaagagccctcaggagttgcacacacagccaaagggtgttcacacagatctctgccggtctagccaggggaggccagagtctcgtcagtcaaggatgggcttcccccttagctgtgtccacagctgctcaagctatactggtcagagtgggctttgaagctcctttgtgagctcgagctgctgactgccactatgggagccttgccacctccagcccctccatcccaaagacgctcctgccactggggccccaggtcctgctgtatcagttctctttggtggggggctaaggtttggggcgaggcaacctgagacaagaaaacgcagtaaacattctgattccctgtacacagatgcagcaccaggggaagggccagtggtgcaagtatttctttttaacaggtgaagtttttggaaaaagtcactctccctacccctcagtatccttaccatcaactttggttttatccttccagtctttattatatgcttgcttttacatagttgtaataatatacacataaagtattttgtatcctgcttttatcattcaacattgtacatgttataagcattttactatattgttatatatcttcacaaagttgatctgtaaagctgtgtaatttgaaggcatccatagggtgactgtaccataattttgattcatcccttgttgttggattcttggtcaggggttgtttgttttgttttattggtaactttaaaattttgaatacaatttcagatttacagaaaagttgcaggaatatcacaaagaactcctatatatcttttatccagatttactgagtgtttacattttatcccatttgccttatctatatttcatgttgcattttcttaatcatttgagaataatttgcacagataccccattatgcccaaaacagtatgcatttccctaagaacaggacattctcttctaagagaagaagagaattactttaagcattattcagtatttttttaagtattattatcaaaatcaggaagtttaacagtgatttaatactgttatctaacccatgattcatatttaaattttgccatttatcccaataatgtcctttgtagccattcttttaccttgtgcaggatcatgttacatttgtaaacgtgtgtctctcaatactgcagattcctcaactttcttttgtctttcattaccatgacatttttgaagaatacaggctattttgtcgaatgttacctcag

SEQ ID NO: 159848 - DNA, 532 bp, Homo sapiens
ggaattcccgggtcgactactactactaaattcgggcccgcgtcgacagaaaagttgcaggaatatcacaaagaactcctatatatcttttatccagatttactgagtgtttacattttatcccatttgccttatctatatttcatgttgcattttcttaatcatttgagaataatttgcacagataccccattatgcccaaaacagtatgcatttccctaagaacaggacattctcttctaagagaagaagagaattactttaagcattattcagtatttttttaagtattattatcaaaatcaggaagtttaacagtgatttaatactgttatctaacccatgattcatatttaaattttgccatttatcccaataatgtcctttgtagccattcttttaccttgtgcaggatcatgttacatttgtaaacgtgtgtctctcaatactgcagattcctcaactttcttttgtctttcattaccatgacatttttgaagaatacaggctattttgtcgaatgttacctcag

SEQ ID NO: 159849 - DNA, 628 bp, Homo sapiens
gagctcggtactttcacaggggatcttgcccgtggttaatgatggggcttatttagttgcgtttgggccaatcagcttaaagggctctgtagaaattagctcattaatcctcacagatcaagagtaagcactttgagtgcgtccacctgcctgtgttgtggaggtaggcaggcagaggcctggctctcctgaggtcttaggactgagaggtggcctttctggctggattaaaggacccagagctccctgccacagttctggcatctgtagacattgtagggtggagtgggaaagtcccacactgcccttcaaaagctctagagctttcttttcttttgtatatcagtgatctctctctcttgctgttcatgtatttatatataacactcaccttgaagttctgtggagcctcttcctgtgtaggaatcagggctgctggagacgatcagggatgcaggtgaaacacaggagcagaattgcagaacaagtggctttcaaaggttgttaggatggcaggagttctatttttataaattataagggactgacatgataggatggctgtggtacctgctaagaccatagaaccgggtcattctaatagatgttataattcctttacagtgta

SEQ ID NO: 159850 - DNA, 146 bp, Homo sapiens
gatgatcactccaccagcttgacaagactccagctaagaaagaagtaaggaatgttcctcctagaattcatcattaggtaaactctgtgagtttgttactgatgtcggacttttataaacctggattaaaaacaaaacaaaacaaa

SEQ ID NO: 159851 - DNA, 466 bp, Homo sapiens
gtgccctggaacatctatggctgttcgggaatctcagttattactctcttgtgtaaagtataaataaattgaatgaatgtgtagtattaggtaattctcacttatttgggggataatattcaaaattaagtaatcatcttttcagaaattcatggcctttgtgaaaaattcgattaaaatggacaagtagctcatttagttgtagcaaaatgattctgaaagtgttattcatatgaaataaaattacagatagtttaaaatggtccttatatgatatggtgtaatatttttattgagaactttagtataaacataatatttgattaatatcattatgaggattcttaagaaataaaatataatatacttcactcgtatttctctgtaattacatgtgtcatggttatcgggagacggatgggttgaattctgacttttactctaactagtctaaggctaaactgag

SEQ ID NO: 159852 - DNA, 235 bp, Homo sapiens
aaaaattattttcatcatttcaattaatggataaaaaatttgggtgttgtcatttttaataatggggctgcattatataatatgatgctattgaaataagaaagagaaaatctataaaggcataattatagccaaatgtgcagttattttggtctcttagtttggagagggcccttaggaaatttttcttaaaaagagtttgtaatgattcataatttcatcagatctacaaaat

SEQ ID NO: 159853 - DNA, 378 bp, Homo sapiens
ctttgcaatccagagagcaggtggaaggtgtttgctgctgtttccctggaatgtgcccaggaggagctcccctgtgcctttcttggctccaagggttcaagaaagcatttctggcttcatttcccacaaccccgtgcaaagaccagggactcttgttgctgctgtgaccaagactgggagtcagataaggaaactgctgtgcctttcatgacaccaaggctcagggagaatatatgcagggaagatggaacaggtcctgcagtccttggcccttggcctgagtccactctctggacccactttcagcttgttcttcttgccacagaaaacactccacagtcaccgcaacatcaggtcaccgctgcatttgcttcactg

SEQ ID NO: 159854 - DNA, 367 bp, Homo sapiens
gcccaggtcatgtaattagaatgcaacataacttgagccccaacttagatctgaatgactccaggactagagcccttcataagtgcaccttattcctttccacttttttgacaaattggacagatcatatgcatacaagtgtacatgatcctccgaacctcttgcacaataggctagggcagcgctcaaatgatcaatcgtggtttagtagaattgctcaacattctgccttaacagatcaccatcacatcccactctcctttattgaatctttggaaccagacaaatcttggttcaaattctggttagcacttcatatctgtatcatgtgggacaaatgacttcatttccatgtgacttagttctc

SEQ ID NO: 159855 - DNA, 242 bp, Homo sapiens
ttatgtcagcataactaaaagtaaagctggataggaagaggttacttgaaaatgatttcacctgaactcaaatgaataagctggctactgcataaagcaacagaggggtccctttaatttaaaagctcaggactctgaatcaattgctggttgggagaaggtagagacattctttacttctgcctagaactggggaaaatggcgtagacttctgctctgaagcagtcctcagtgctgcttcg

SEQ ID NO: 159856 - DNA, 555 bp, Homo sapiens
gttgcatgcccaggacccatatctccaataatgatatcattcagaaaaatagtaaaagtagataaaattaaggatatatatcaaggtttgatataacccaacatacataacactcaaccatttcaataatccgaagggtaatttagagtcaaattatcaataaaattaaaaagatgcctgtggcagattaaattattgctttaacacttatttcatcacagtctgtattcattcccgttgttacatcattttgcaagttcctcaacaataactgagatacacttttctccctctttagaattggtcgtttgatttacttcagccaatgaatgtgagtgcatgcgacatgcctgaaggcaacaaaagcatggcatgaatggacttgttcccttgtacttttgccatcatcgaaagagcatgcagctagccctgttgtctaacgagatgagatagcctggagtaggactacatggctgatgtgaaaacctgcagcttgagtattatttcggcctcagtagctgatcctccactgaaagagactcatgagcaagctta

SEQ ID NO: 159857 - DNA, 483 bp, Homo sapiens
agagacatgatgtggtataaaaggtatttggtttctttctgccccagaactcctaaaatcctagaaatttcctgagtgctaggaggatcttctgttattcataattagctcctttgataagtcctgagtttatgctaatgaacctgcttagggcggggcccgtagatagcttcaggatggggctagtcaccagaaagtccaggtgattagaggattagaggattggaacttaagccccacccaccaacatctggaagggctgagggtgcaagaaatttagctctattaaaaatttaaacactgcagtcggctcgagtactcccagtaacgaggaggtgttctcggtcgtcccaccctcccctgccgtcgccgggctgcgccgccggagccgggacgcgcctccgctgccctcgcctcctccgtccccgctgccctcgccgcccccgtccccgctgccctcgccgcctccgtccccgcggccgc

SEQ ID NO: 159858 - DNA, 582 bp, Homo sapiens
cacagagtgagactgtacttcacatctggaaattccctcattcctcttttgctgctctactgttggtattactttaacatgaaatggagctgacaatttgaactgtgtaaatagaagcccttaacaaaatgtacctcatagtaaaatgatggtttaatgaaacctacagattagagttctgctttaagtcaacaaggtgttattttaacaaacttccaagctctaaagatgtagagcacagtttacaggtatatggcacactcaaagatctgctacctacaggctctgacttgcaatcagaggcatttatcttatttggttcaggcaaggcagtatcaggtgcagctaagatcctttaagaaaaagagttggaaaactcatagcttggccactcccttgctctgtgactttgggcaagtcatttcatctatgtgggcttgtttcaacttttataaatcgaggtggtgctgaattatatcatcctgaagtctcttttagttttaacattatcattcttctaaatatgtttttatgcatgaagtttacaatgtttgtgattataaaatgattcattaaagaaaa

SEQ ID NO: 159859 - DNA, 249 bp, Homo sapiens
aaaggggaaaattcaggggggtggggggagaaagccccttgcttagtgcaagtggaccccccctaatccttatgtcttttcccagttcagaccaggttgaattcctcgggcaggggttccattggtgtggcagacgagaagtgcccatccattggccctgtagggtctcagctaccaccatggctttctaccacccacctcccccatcgtggctgttgggctcagaccttgcctgctgcaggcatgcat

SEQ ID NO: 159860 - DNA, 245 bp, Homo sapiens
gtattatgttgagtgaaaaagacaaagaatttgtactgtattacttcatttatatgaagttcaaacacaggcaaaattaagctatagtgtttagggatgcatactgaaatgcagtcttttaaaacagctttagttcatttattttcattgctgcataagattccattgtgtaattatacccacttgtctattctgtgttgatggacatgttcccgtttttggcaatttgaataatgttagagata

SEQ ID NO: 159861 - DNA, 310 bp, Homo sapiens
cgacggtgttatcgatgccacccactcttaatcagtggtggaagaacggtctcaaactgttgtttcaataggccatttaagtttagtagtaaaagactggttaatgataacaatgcatcgtaaaaccttcagaaggaaaggagaatgttttgtggaccactttggttttcttttttgcgtgtggcatcgattgatttgccctgataccatctcttgctgcagccttcatgcctagtgcctgatcctgcctcaccctgctgcgcgttggcattcagatttgacttaaaatccgagtggctcagcctctgct

SEQ ID NO: 159862 - DNA, 475 bp, Homo sapiens
gggtgaggttgggggttgagggtgaggcccaaggatgagactgaggcacaggagtgctgcccaggctctcggttcttcctgcccctcctggtgctcacagtgggtgtcagcctcgcttttcccaagtgggagaaagcagatctgcggaggtgggaggtgttgggtccatggcagagcccttctgctgggttcctatctgagagcaggcagagggtcctgtgccagcagacgctcttcctcctctgccccaaccccgtacccctgcatccctctttctcccctctccaggtggccggtgaagagccctggcaccagccttgacctcaccctctgggacagactgaggcaggggaccgcgggctgccggagccctcggggcgagctccccagctccccttcccctccagcatctgccttttgttccacctctcttctccctcccttgactcaggaaaaccttcatccctatctcctg

SEQ ID NO: 159863 - DNA, 548 bp, Homo sapiens
atgctggagaatgagaagaaccctacatggggaaaagctctggggtcacatcctccctagaagtgtctgggtgcacctcaggaaagaagagtctacttattatgccctgacaggatcccacaggcccaatcccgccggctcccagcagcctccgcaaccctgggtcatgtgtgaggtgagacctggcacgtgcctgttctgaacgctcccacctcacatgcccgtcccaagcttaggatttaaacacttgatgctgccaccaccctacatccatccatcaccaggtcctctcgattctgcctccgagtctgtcctacttctctaccctggcagcctgccctgggtctcatctggattctgctcccgactcttcctatccaccaaagtcagaccccatttcccacagtgaaccacccctcagaatgcagtcggagtcctgcacaccaaatgtgccaggctcggccatccacccgcttctctgctcccttcccagcccagtctcttcacccagctgtggagtctgggtggcggcaagcgtgttgaggagg

SEQ ID NO: 159864 - DNA, 156 bp, Homo sapiens
tgcttaacccaggtctcagtccaaacctcccttcagagaggccttccctcaccccaatatctaaataagcatacacatacccttatcaagcttaatttttctatcatcattacctgaaattgtatcatatatttattatttggtttttttgttctt

SEQ ID NO: 159865 - DNA, 287 bp, Homo sapiens
agaaaatgtcatagattctagtcagaacaaaacagaaaaagaaaatattcccttcagaggaaaaagactacctgcatcagacatcttttctgcaacactaaaaatgtccgaaggcaaagaggaaaatctttacgtaattctaagaaggaaaagtggtgaccatggattctacatcaatccaaactagcagtcatgcttgatgaataaaataaacaaattccagcttcagataggcaaggacttggaagatcagtcaccaagagattggctaactacagtgcactgca

SEQ ID NO: 159866 - DNA, 543 bp, Homo sapiens
gggaccagtagataagatctaaatgtagccaggcacagtgcattacactctgcctgtaatctcagcaattgggaggccgaggcagggggatcacttaaggccagaagtttaagaccagcctggcaacatggcaaaaccccatctctactaaaaatacagaaattagccaggtgtggtggtgtacacttgtaatccaagctacttgggaggctgaggtggggtgatggctcgaacccaggaggcggaggttgtagtgagctgagattccactactgcactccaggctacggtgagatatgatcatgccactgcactgcctgatgacggagtgagactctctctaaagaaaaaaacaagtgtatgagatcattgtgtggatgagtaaagagtgaggaaaatgcctagaagcaagttctgaggaactctaaacacttaggggttgggtaatggaggagaagctagacaaggagaacaaagaggaactgtgggggaacagtagtgagtggtgagaggaaaactactagagtgaggtaggaagaagct

SEQ ID NO: 159867 - DNA, 606 bp, Homo sapiens
tccccaaacacagtactttagtagtaattgtgacacacaaaataattgcttttgctctttctagattatagtcaataaatgtcattttttcaacaaaggtttgatgggcacctactgtgagaaaggtatctgccctggaagtcactaacatgatcctaatccacttggaggttagcctggaagaaggaaaagacactcaggaataaatacaaagccacaacatgtataggtgctcaagaagagtccagggggctgcatgagtcagaagagaagagatgagatgtggctggggttatcaaggaggcttcacaacaggtagcatttgaactataccccaaaagacaggaatgatatgccagatttaggggagaaaaagaaaagaaaaaaaaggaaagaacattggaagaagtgaactgtcctttttttgttttgactttttatttggaaaatttcaagcttacataaagtaggcctagtagtataataaatcctatattccacttcaatggttatcagcccatgagccatcttgatccacctactgtctcaccacttcatgtcccactctctgaccagattactttcaaacaaatctaagacatccca

SEQ ID NO: 159868 - DNA, 277 bp, Homo sapiens
caacgatcacttgaggaagctttctgtatttgtcaaaagagattatttttacttcggctcctaaataaatcagactaacagttcctaggacttcacaggtatatttaagattatctcttgtatcttactagccttttttgggggcgggggggggacgcagtcttggtgtgtcagtcaggctggagtgcagtggggcaatcaccgctcactgcaacctcaacttctggggcataagggaccctcccacttcagcctctcaagtagctgggaccacagg

SEQ ID NO: 159869 - DNA, 379 bp, Homo sapiens
ctgatccggagcaggagggaacaaggtgagctgtgcttccacaggacgggcgggctgggtggacacagccccttaagttggccaagctgatccgcagcagaggccaggcaaagatttatacctcaaaggtgcagagaaagaattcgttaattgcaagtttttgacaataaagtctctaaaaatagggaggtcaaagacctatagccaggaagaaacctgtccaagatttagtcaagctgaagagaatgttaatgaagtccattctggtcacagcttgggctgatattcactttttgggtatgaaaataattgttttcaattatagaatgaatttggttactgagggaggattattgggcttctgcccataaaaaatgaa

SEQ ID NO: 159870 - DNA, 350 bp, Homo sapiens
cactcttactgattaccacacactgacccatctagggagtggtttaccctgaggccaggtcactaagccagtcaaaatccagctcgctttaatttgtagtccatgcacgtaacaaacactggtccactgctccaggtcatcattcgaatgtcagtataaactcaccagtggtcccaagagttctgtttctttggcatttgctttctctggtattatgtgccattttacaacaacagaaatcctgatctgtcaatgtcactcaattattaacatttcctggggtgttctacaaaccccattaagtgggatttgctggaaaggttgatgctctgctttgccccttggcccct

SEQ ID NO: 159871 - DNA, 294 bp, Homo sapiens
atgagaaaactatggggctaggagagtgcggttattcaagagagtgagtggaggctgtgtggcttcttgaagtagagtctgcaggaatggggggtgggggtcctgaatcatctggaggtgtcttcactcagaggtcttgcaattgacgccagctgttggaggggctgtggactagggcaactacacaggtctctatgtgtggctccggtttcctcccagcatgatggcctcagggtagtcagacttcttagacagagagcacattccttggccccacccaggcctctaaaagtg

SEQ ID NO: 159872 - DNA, 288 bp, Homo sapiens
ccttaacttccctattaagtcacaagctacctgagggcaggatctacatccccctttattttaattttacttttttataaatagacacgaggtctcactttgttgcctaagctggccttgaactaattcctgggctcaaacgatcctcctgccatggcctcctaaagtgctgggattacagatgactcaccatgccccgggggccccccttatcttttaatctgaatataggtttgctcattgaaaagtaataatttgtccgggtgaggtggctcatgtctataatca

SEQ ID NO: 159873 - DNA, 439 bp, Homo sapiens
atggctttgaactgcgtgccagcacagtgtgcctgccgcagttgttccccactccttcagggttctgctgtattgccagaggctgcactggaggctttgtttcagtgacgctttcaaactcctcctgccctgtttctaattgctgctcttcaactctgtacaacaccaatgctgttactttgctgccttccctcccttctgtgcagcattgctagtcctgcagctcaagtgatgagtcactcactttcttgaactcgcctccttcttcacctcacttgacttgagaggtgcccaagaggctcagccccagccaaaggatagtaccaatcctaactttatttcagggaaactcaaggaactcttgcactcctgctcacactttagtgggtggttttgccagagttcctaaactcttcacatcagttctggaactcagttc

SEQ ID NO: 159874 - DNA, 464 bp, Homo sapiens
ttgttggggagggtgaagctctgtctacactgcaggcagtggaggggcagcaggtagcaggcttggcagtgaatgagcctctgtctacactgcaggcagtggagggacagcaggcagcagactttttgggaggtttgaagctctatctacacagcaatcactggaggggtggtgggcagctggcttgtcaggtaggtgaggctctgtctacacagaaggcttgtggtggggggcgaggctctgtctacactgcaggcagtggaggggtggcaggcggcaggcttgtggtggggggtgaggctctgtgtacactgcaggcagtgaaggggcagcaggcttgtggggtgggtgttgtcccacgccctgcccttaccctccgaggcctttttcttgcgtgaagcatgaagggcgactttgcggttggagcctggtcccgcttcttcccatgagtgttttgttttccc

SEQ ID NO: 159875 - DNA, 379 bp, Homo sapiens
gccacatctccagagactctgaattgggctggtgtagcacctaggtccagggacagatccaggtccatggggcctaaggagcatacagtttgagggcctggttaagaagaacaaaataatatcttacttttacaacttttacaaaagtatgactttgtgaacacatcactgtggtcccttctatcctggagccttgggaatagtttgtgcaaatgagtgaccctgaaggttcacttcattgtttgagagtaagtctagggatgccccggcatcagtatgttgtaaacgttccccacatgatttcaccacgcacagttgccatgtgagaaccactggggtagacaggttttcaatccaaaggttggtactccagagtatg

SEQ ID NO: 159876 - DNA, 376 bp, Homo sapiens
tccttcttctctttcttctttccttcactcctagataccagcaattgccaattgcaactgaattctattttacagtcttgagaatctaccagttgagccatctatcctacttcaggctcttctcattcagtatagagtatagagcaatagtttcctaattggcatccttttaggcagtctttttgtcttctaactcatactgcacacaatacctcttggtgcatgttctccagtactcgactccttgtgctactttgtcttcattcaagctctactctccacctggaaaggctggtaatctctctaagtctaggaaattcataactttctctaaggatccagctcaaaattgaaccaccatctacaggacctgagc

SEQ ID NO: 159877 - DNA, 222 bp, Homo sapiens
gccgggagggcagcgggaagtggtggtctaccgtcaccggcttcaactgtcactatcaagcctaaggctgcttctagttatttttctccactttgaactttttctcttccttcttcacttaggttagatgaaaagtgcaaagattttggggtgagtagcttgcgtattaagctgcaatgctgtccctccttgacagctgccgttggaaacccaggagcccag

SEQ ID NO: 159878 - DNA, 807 bp, Homo sapiens
gcgcgaggatgtggagccagcgcggacaccttcccccagcgtctcgcgtgccttcaggcagggactctaggatcttaggtatttagtggaggtctgaggttgggggggaggaggtgggtattggcgtgcagtagccgctctagaggttgttacttgtttttttgcggggtgcagcgaggggaacttacctgaaggtagaagtggagcgacctcctccttcatttggctgctgagctaagtaagggtcggtgcctaggtctgtgttgggtccagtcctaccctgccctgctgtctagggaggaggagggccgcgccagagaagaatgatgggaattggattcctgcaggtgcctggaagacaatggagaaagtcacgttgtgtagaggacagtgactttttgaaagtgccttcaatatgcgcaatttctggcttcttaattttcccgaatccccctctatggaaagatgcaggccagaacttgtacgtttcgtttaatccagggagaagtggggagtcaacagctggatggctgatgatgccagtttactgacatgcgatctcagagcaggaaaaagatttgagagggaagaaacgagtttagtatgggattatgtttttaggcatctgggatttccagtaggtctacggatagtcaagtgtatagctcaggaggagaactgatttcgaaatgccctgttaccttgtaaatggtaactgaggccttgtaaacaaattaaattacctagggagagtgtactgaggagtaggcagagggacagggccctgaaggacaaataagaaataag

SEQ ID NO: 159879 - DNA, 461 bp, Homo sapiens
gagcgtctctctctttgtccagtccctgtcttctaacagatgtcatccaagcctaatcaagcataaaatggtcataaatatttctttctggtagatttcacattcacatttcatgcagggacatgatatttttctgctacctccagggagagcctaatgcaaaaaccagttacttacattctagcctcatgttcctttagtaaaatgcagagcatgttctcagttcaaagacataaaaaggtgtaagactttatcttctggcttttgtttaactgcaccttttatctttccttcctcccccaccgccccccgcaaatgtatcttcatcttatagtttatcctgatgcattagaaatgttcttttgtgcctgagaaaatataaaacagggtctaaaatgagcccatgtctaccatatttcagttactttaggttttcaacattaggctccttaattactggc

SEQ ID NO: 159880 - DNA, 412 bp, Homo sapiens
aacagaacaaaaagaaaagaaaagaaaagattagattctaggccaggcgttcacacctataattctagcaccacgggaggccaaggcaaggggcttacttgaagccaggagtttgagatcagcttgacaaccaagtgagaccctgactctaccaaaaaaaaaattaaattaaattagccaggcatggtggcatatgcctgtagtcccagctacttggaaggctgaaggctgatgcgggaggatggctgagcccaggaagctgcagtaagccaggattacaccagtgcactctagcctggatgacagagcaagatcttatcaaaaaaaaaaaagccaattctcaaagaaaaatccccatttaagtatagaaggtatattactgaactccggcatgtacatattcataccatgc

SEQ ID NO: 159881 - DNA, 287 bp, Homo sapiens
taaaatctgtgacctttgaaaaggcttcaggggattgtagttcccctgaaattgtatgcaaaataatatgtcagttttctagggtaggtgttcacagcttcccttggattctcaaaaggatcatttacacgtccccacccctaaaattcaaaactgctaagctaacctctctgcctgttttttcttttcactttttcctcttgtaacacattactttgaccaactcctatcaggcaagactacccaagggttaatgctgtggcagaaggttggaactcttgatttag

SEQ ID NO: 159882 - DNA, 638 bp, Homo sapiens
gtggatcacctagtgaggagtttgagacgagcctgaccagtatcgtgaaaccccatctttactaaaaatacaaaaattagctgggtgtggtgggggggtactgtagtcccagctactcgggaggctgagggacgagaatcgcttcaacctgggaggcagagattgcagtgagccgagatcgcaccactgcactccagcctaaaagtcaatttgcaaactcaataattaaaaaaaattaatttaaaatggtcaaaggatctgaatatacatttctccaaagaagatatgcaaatggctagtaagaacatgaaaagatgctcaatgtcgttagtcactagggagatgtgaacgaaagccaaaatgagagcccacttcacactacaggatgtgtaaaatcatttataggatggctatactaaaaaaaaaaaagagacaataacaagtgttaaagatgtacagcaaatgaatggttggatacggttggagttaaatgggaagcaactgctaatgggtgagggtttctttttgcggtgatgaaaatatcctaaagttaattgtggtgataatcacacaactttgtgaatttactaaaaaccagtgaactgtatactttaaatgggtaaactgtatctcaagct

SEQ ID NO: 159883 - DNA, 322 bp, Homo sapiens
ttgagccaacgagaaagaatcctaaagcccttgtttctggatggtctgtcaaaagaccagtaaggtagcctcagaggaagtgctgaggagcctctggaagcacagcctggaccaggagtgaagactgaggtctgcccttccactgagtgaatgactgaggggtccctgcatctgttgagattccctactgtgaaatcaggggactgacaggtgatgtctgcagcccttacaatagtcacatttgatctctgaatcagaacccttgattgtatctgaagaacaaacatcataatgtattatttaatgccttcaaacatattca

SEQ ID NO: 159884 - DNA, 215 bp, Homo sapiens
cttctagagctatacaaataaggttaatttctcgtttcatgttatgcctttaatatctctgaagctaactatacccagtatgttctcaatcctgtctcctccctgcccacccaccatagaattaatttttgcttaggcttaatattttccattccatccatcacttctaataagaaaatatcttattctcattgcttttcccagaagtcattaca

SEQ ID NO: 159885 - DNA, 269 bp, Homo sapiens
agcgagactctgtctcaaaaaaaaattaataaataacaacaacaataataataataagacctctccataaaacatttgataagaactagcaatatggcaggctataacctcaaacctctctaaggattaacacttagaagtgaatctgttatgaaaaccatacgtttgggaaggtgcatatctgtcagggctgtaagggagacactcttggagcgggaagaaaagagaccattctggaagtactccatggtcctagtagacagtactcg

SEQ ID NO: 159886 - DNA, 694 bp, Homo sapiens
agaaaaaggagagcaaagcggggcaggagaaatggaaaagaggtggtggggagtgggaggagagacaaagcaagccactgtgccactcatgggcacaaatactgcttagttttgagtgtgtctttatttctacatcatggtgcctaatatctcttacaggacaggaaaactcgacacaaagggtaactttagggtactgaccctaaaattatgacagcttgtcaacattaatatttatcatacttccactgccacacgatagagtaatatctattattcatatggaaacattccatgtaacacacaagcttaaaattacaacaacttgtcaattaagatttacttaactggcttaagtcagtatttctttaatttggctaagaatataaatcatctgggccaggtgcagtggctcacgcctacaatcgcagcactttgggaggccaaggcagatggattgcctgaggttaggagtttgagaccagtctggccaacatggtgaaaccccatctctactaaaaatacaaaaaaaattagccaggcgtggtggcacatgcctgtaatcccagctacccgggaggctgagtcaggagaattgcttgaacttgggaggcagaggttgcagtgagccgagatcgcaccatcgcactcgagcctgggcaacaagagcaaaatctctgtctccaaaaaaaaa

SEQ ID NO: 159887 - DNA, 256 bp, Homo sapiens
ccttcaggacaccccttcttcttgccaggcacaggcagatgggtcagcaccctccagggtgctttagcctcagcacctgaggctggcaaccagtagtcagtgcctatactaccccacaaagaacaggtcaacctcccctggatctaaaagaggaatcattagtccctccacccaacagaaaaggaaagagagaatcctgcccgccccagccacacatcactaaaaagggacctggacaaaccatcctgcagtaaag

SEQ ID NO: 159888 - DNA, 440 bp, Homo sapiens
tcaaagtgctgggattacaggtgtgagccactgtgccgggctaaccatctgtatttctagtaagttcccaagtgatggttatgctgttggctttggtatcacactttgataaccactgttctatggtatccacctcagaatagattgtggaccaaagattatgggaatcttcaattttgctagataatgattttctgaattgtttgaaccagtttatactcttgctggcagtgtatgaacatgttcattgacttaccaacactatactaatctggtaggtatgtctcattgttcgtgtgtgtgtgtgtgtgtgtgtttcttttttctttttcttttttttgggacaggatctcattcttttacccaggctggagtacagtggcatgatcatggctcactgcagcgtcgacctgccagctcatgcaatcctccttcctcag

SEQ ID NO: 159889 - DNA, 415 bp, Homo sapiens
agttacaacagctccagttacaacagctcagccataaccttcagggttttaaatgtcactgttaatgcatcaggaagcccaaagacagacagtctggagaaatagtatgtaatgtttagatgattttggtaaacagctaagtttttaatgtatgtttaatgtgcattctgtttggggcctctgagtttgaatccctgagaccgagctgatgtttagcaaccatttcttaaccaggaaaagcctcccctactcccagcccatagccatttgagcttcactggcttttttgaacagaagcatttcccagtttttgcttggttcagtgaacacggttactgtttaaaaacagtggctgtcgagttgtatgtctcaccaccctttgctctcctcttgagctacctcaagctgtgtgaga

SEQ ID NO: 159890 - DNA, 425 bp, Homo sapiens
ggtgaactttataagtaatatgatgcaaatgtctggtatttttccttatacaatattttaaaatatctttgtgtgcaaaatacacttatacaaggtgtattagtagtttaaaaggtgctcttgagtgacttgggtcacataatttggttttaaacttctgttgctttattttaaacatggaaactgtgtgagcatgagagtggagtgggagagagtggagtggcagagatcgagtgtgtatgtgtttctttttgcctgtcagagagagagaagttatttagaaatgtccagttgtgtgatatatagcagtttggtctaaagttgattgatgtgatacttccttgtttcttgactgtttttctaagttattttgatagctttggctgtttttgcagattctggaattgggatgccatcttactgaa

SEQ ID NO: 159891 - DNA, 690 bp, Homo sapiens
atcactccttccctgcctttcctacctatcactctcgtgctgaaagttggagctccttacccaaagactgggcggaaagggtgaccgccctggacccctgcccgacttcccgttaggccaagccgctgtcctgaaaggggatcgtgtccaggccggcttcctggagacacacctgcgcctgcacacacccaccgcggtcgcgtcaccagtgccgcggccacctggacgaagaccaaagtctggagggaattccctcagccacaaagcgatgggaaagcgggacccggtggagaccagagtcttgctatgctttccaggctggttttgaactcctagcctcaagcgattttcctgcctcagcttcccaaagtgctgggattacaggcacaagccactgcacccggccctgttgttgttaagaaaattacaagttaaatcttgtaccagtgaacaagattagggatcgtgatgtggagctgcacttcctggttccaaatcctggctcttcccctcatccctgggtaagttgagggatgagagcaagagaaggttgatcctgactcagatctctgcatggggcatgtcactgatgacggcggcattccctgagagagggaacactaagtttgaagttgggcatagtgagcactattttggatgagttaagtttagaagtgcctgaagacatcc

SEQ ID NO: 159892 - DNA, 734 bp, Homo sapiens
atcactccttccctgcctttcctacctatcactctcgtgctgaaagttggagctccttacccaaagactgggcggaaagggtgaccgccctggacccctgcccgacttcccgttaggccaagccgctgtcctgaaaggggatcgtgtccaggccggcttcctggagacacacctgcgcctgcacacacccaccgcggtcgcgtcaccagtgccgcggccacctggacgaagaccaaagtctggagggaattccctcagccacaaagcgatgggaaagcgggacccggtggagaccagagtcttgctatgctttccaggctggttttgaactcctagcctcaagcgattttcctgcctcagcttcccaaagtgctgggattacaggcacaagccactgcacccggccctgttgttgttaagaaaattacaagttaaatcttgtaccagtgaacaaggtttgtatagatgattttattgtcttgaaattttattttatctcactttaaaaaaatagaagcatattagaatatactttgttctatacccaaatcttgtgttaaactctttaaaaatgtcttttcagtgtttggtaaaagctgcaatgagtcgtacagatgtatatttcacattaattattaataattataatttagaaatgttaattacagtcatttaaaggaacttcaacaaactaatggttattgaagttacattaagaatatctataatcatga

SEQ ID NO: 159893 - DNA, 440 bp, Homo sapiens
ggaagcgtggctcgcctctctttactcattcggtttaccacgtcttagcttgggttatttttgagatggagctcgctctgacgcccaggctggagtgcagtggcgtgatctctcactgcaaactccgtctcctgggttcacaccattctcctgcctcagcctctcgagtagctgggactacaggcgcccgccaccatgcctggctaattttgtttttgtatttttagcagagatgggtttcactgtgttagccaagatggtatccatctcctgatctcgtgatccacccgcctcggcctcccaaagtgctgggattacaggcgtgtggctctgcatttattaactgtggattaataactacttgagtctgttctctctttaaaagtaaggacactactgtaatttctaaagcttattgtggggatcaagttaagtaatat

SEQ ID NO: 159894 - DNA, 236 bp, Homo sapiens
tacgtcatagcatctcacagaatttaaccctttcgaattgtccctaagagataatgattggctccaaaggaaattaaagagacagaacaaagaagtttaaatatgcaacacacgaattacacaaaattctaaacaaaggttaaaagtaaaaaataaatcttttaaaagatgcaaataaaggctggttgcagtagctcatacctacaatcctagcactttgggaggttgaagtgggt

SEQ ID NO: 159895 - DNA, 140 bp, Homo sapiens
tcccaccatgtgctagtggtgagtatagctaacatacttgtgctgacagtgaagttttgttggagtctgtgaaagttaactggaaatttataagaaaattgcaagactgttattaggtgattttagttttcttttttatg

SEQ ID NO: 159896 - DNA, 210 bp, Homo sapiens
acaaatatgaaatacaactaagtagagccggtattcatttacacataattatcttataccatttggaataagaatttggggcacgttagcaaaccaaaaggctcagaaagaagttgtgatatttagttcttgtctccctctacaaatgtgaagcactcttctatccggcattactagtggagttcctattttcaactttgcaaattctgg

SEQ ID NO: 159897 - DNA, 403 bp, Homo sapiens
ccttgcctgctttgtttttatttcttagctcccaatcaccatttggtatactacatattttattatctatcttcttttttgtctgtttctcccactggaatacagagttctataacaacagggatttacctgctttattcattactatattcccaacacccaaaacagtgtctagtacatggtattcaaaaaatattttggaattaatgtgcagtcaacagctaatctttttaaaccaatcatttatctagaaattatactcataccagcttattacataaatatatgtatgtaatacaggacttgtagttttcagagtaatttcataggtactttattccattaagaaacagaaagaatggctgggcgtggtgcctcacgcctgtaatcccagcactttggg

SEQ ID NO: 159898 - DNA, 353 bp, Homo sapiens
tgagttctgtgtggaaatcgttgtgggggaagtgatgggagcagggaaaggaggggcgcaactgtgcggggcatctggcacctggggaggaactggggagccatggagggggccggccatgagcaggggaggtgctggggctggtgggaggttggctggaagggaggaatgcgaggaaggggcaaagagagctggcggacggggggtgaatgtcctttgttccgtccagcagcctctcctgaggacacttgcatgctaggccctctgctcggtgatgccggggaccctgaaggtccagtttgggggtaacccatctaggtgagctgtgtgacagtggcagtcgcagcactgca

SEQ ID NO: 159899 - DNA, 317 bp, Homo sapiens
ctaggttttctaactggggatagttaatgcatccacatcatctgaggttggcaaacagctggggaactgtagccataaggcagcaataatgaattccagaaagagaacaaattttccttacttacaatgtccagactcttacattggttgtattcagcactgcccttaatgcattgtcgtttcaacttgttttaaggttctgaggtgttttgcatttggaaagggaaaattagtcactgagacgtaacaggaataaggtttgagaagttctgctttctaactttttccagtaatgacattttctaaaaagatactac

SEQ ID NO: 159900 - DNA, 175 bp, Homo sapiens
agggaacatacctctcagttcccatgagctaagaaatgcccgcaggctgtggatttctagtcggagctggtgaaggcactccctggggccacccagcctctcctggaagttgcccagaagcagacagagaattagcaagtgaaaggcagcagccagccctcaacaggtgctgggg

SEQ ID NO: 159901 - DNA, 225 bp, Homo sapiens
catgcaaactggtttgtttccattttacttagctctgtaaggtgccatgttttacatattctgcaaattctccccatgtacaatacacataaacccagtattatttttaacatctccaatattttggtacacttcaatttatttaccacttgttcccaattcttggtgatatcaatgtgtcaagctctttcaaaagaactttggtttatcatccgcctttcaccc

SEQ ID NO: 159902 - DNA, 147 bp, Homo sapiens
gcaaatcccctatttccactctcaaatatatctagaccctattccactctcaaatatatctagaccctacactgttcaccacctcatctgctatcagcctagtccaagtcatctcacctcttcactggataattgcaagtttcctga

SEQ ID NO: 159903 - DNA, 685 bp, Homo sapiens
cttttacttgtagctatatgaaaccagcaagtatttaattaggctctgtgaacacttcggtaacaatctaaattaatattctgaaaagatgagttttaaggttctttctatgaaatcattaaagaaaaaaccctggaatcattaaaaaaaataaaatttgcaccagatgctacctttattgtatgcaaacaacaaaaccaaagttttctgaaccagccatctgtctttgctgcatggagtggccacaggacagagctgaaccacattttgtggttccacattagtaccctaatcagttatcgatgttatagaatcttgatccttcatcatactaaggaaaagggcaacctatgcccttgtccccagtcgtcagtcattatatagtacccaatgattgagacccaaagagacactccatagcaatgatgttttggctcatcctggattagtctggtgatcctggcaatgcctgattcactctgaacttcagtttccttacctctagcacaaaaacactggactggaacagtaacattaagacccatgcaacagtaacattataagccaatgtgcatgttaaagtcacattccattgattttcaaatactgagaaaatagccaaaaggaatggtgcgaagagaatggtgggtccttactatgatttgctctgactttcaataaaaat

SEQ ID NO: 159904 - DNA, 474 bp, Homo sapiens
tttgaagtaggcaaagttgttggtgttatcaaggaactgcaagaagaccagtatacatcaggtattatgatcaaggtgggcaagagtaatagctaatttgctagggcatttaagagtgtagagcccattttaaggattctagattttatcctgtgaccatgaaatgccataaaaggctttaagcaaggaaagtgatatgatctatgtttccagaaaatcactttgactgtttaaggaagtttaacaatgatacattttagttcttttccatattggtagttgactattattaaaactctaaaaactcagaattcaggatgtccttaggtagtagtaacttgattttgatacatatttttcagcaagccttgcaggacagaaaaagagagcaaaaaggaatgctttttggggccagatgacattttattctttggttaaaatgtcttcacttcctgtgaaacacgtttacaaaat

SEQ ID NO: 159905 - DNA, 227 bp, Homo sapiens
actggagatccagaaagcactggcccttgactccttgttgagcttgtgtttgtagattaggaagtgattcacaaaacgtggtgtagaagcgctagaaaagaaaattgggggctgggtatggtagctcatgcctgccatcccagtgctttgggaggctgaggtgggaagattgcttgaggccagaagtttgaggccaacctgggcatcacagcaaaacctctacttta

SEQ ID NO: 159906 - DNA, 252 bp, Homo sapiens
agcagggcaaggggagatcttccaaagtctcccaaaatctcctagagagacaccaagggaaagcttcagtgttgctgacacatagggttggtcttgccagagcagacgcctgctttgctctctgggcagcctccttactccaccttccctgagttctccggcggcctctggaggggatgcatggacagaaccagagctgagggtgggtccttcaatggctccagcagcaactgataggaagtgatagggatg

SEQ ID NO: 159907 - DNA, 290 bp, Homo sapiens
tctttcaggcatcactgacccaacagctcaagaaaaactgcattctgtgagactggtgttatgccaagtactttgcctaatcctgatgccacagggccaatctcattatttcccccctttccagattaggaagtggaaacttagagaggcatgtcacttgcctaatgtgacacagcttataagtaatggacctagataacaaaggggatttaaaagtcaagcaataagaaattcacatgcagctcacatcatcaaaggcattctgcatgactttggaattctttagtggg

SEQ ID NO: 159908 - DNA, 425 bp, Homo sapiens
aggaccacaggcgtgcaccaccacacctgactaatttttttgtttgtttgttttgttttgttttgttttgtagagacgggtcttgctatgttgcccaggctggtcttgaactcctaggctcaagcaatcttcctgcctctgcctcctaaaatgctgggattacaggtgggattacagagcaccatggcactctgccagactcaaggactcaggtcggaccaatcaacagcagccttgaggctgtggccggcccctccgcgaaccaggggaacttcactctccattagaagtcctaagttggctgctcaggagctgcaggtctggaaggtgacttggacattcgggaagaaaaaaaaccatttaaccaagttcccaagagaatccagcacttgaggctggatctgttaagggtcatgttcaccctc

SEQ ID NO: 159909 - DNA, 329 bp, Homo sapiens
accatcgtcacgtttgtgcttcgttgttgactgcaacatcactatgcggcacgtaactgtctatctgcttgggccttctaaaattgatattgaagccaaagatcttacttaagtgtaaaatcttatacatcagtttgtgccagactattcccctggataccatttctttcctgggcctcattttgggcctgtagactttataccagttttgtttggtctcttttccgttttctttccttctttcctacatctttatcattaccatgtcctggttggtctctagtttttaactctaggtactaatattttcatctttcttctcaatacac

SEQ ID NO: 159910 - DNA, 209 bp, Homo sapiens
ttaagacacaaaattgttctatagtggaacaccagcccctttgatttccccaagtggactgtccactggctgctatattacctacggtgctcagcaagctcttttcccatttctttgaacaacagagcttatcagtccaaccttgttctaattacttgctaccaagttttcacacctagaggcacaactatgtactaatgaaactttgg

SEQ ID NO: 159911 - DNA, 539 bp, Homo sapiens
cccttcttcctggaggtactttgtgataattctgagtggaaatggccccctggagaatcctgtactatggacttcttcttctcccacaaagattgcatggtcctcttgggctcactcccttgcctggcttctgccctctattgtaacactctgtgcaggaactgcatgggacctaaagcttctaaaccccttgctcttcctggtactgtcttttgtatcatgtgtgtttaatacatatttgtggctacttcctccagaaaaataaaggtatgcatcccaaataaaggtttgaaacccctaaccaatctcagaataaagctgaaaggttgtaggataaacattctaacccagctgaactcaggtggaaacccctaaccaatctcagaataaagctgaaaggttgtaggataaacattccaacccagctgaactcaggtggctacagcacctgtctgtaatcctctcctttatccttgtgaacgaatatggagaaggagttcaacatttcaacagaacagctaggtgaaatagctgagtaa

SEQ ID NO: 159912 - DNA, 482 bp, Homo sapiens
catcagtatatacacattcactaataatatcataatttttcactttatttgaaaaattattttaatattttgaaatacttcaaattcttaatttttgcttttatctagctcatttacataccattttggtgtttgtttgtttagttattttctttctccttaagagaatctcaaaacacattctcgattctccaggttgccataacaataaattgtgttgggggtgccaataatccacttttctttttctccaggtttggaaatagaggaacattcagtagcttctttagtgaatcacctcctaaatatggagctgaatctccaactgtgactgctgtttaccatctaatggatgttttatcaaaagtctatcacttggggcacttctgttcctattcttttttctttttctgggttcaaattgtaattacaaaaatatgtagttaggaggaaggagaagaatgagtcaaaatataagtggg

SEQ ID NO: 159913 - DNA, 287 bp, Homo sapiens
aaagtgctgggattacaggtgtgagccaccgctcctggccctcctctgccttcttggagggattaggtgtttgtattttcatggcatgctgtgcatacttctgccatggaatttatctcgctgtgttacctccctcctctgtctggcttactctaatttctgggagggctaggattttgtcttgcagctactcgttcttcacaccaggcaagtgttgtctccttatgaatgactccagtgtcttttgactaaagataagcattgaaattgcctgactagcccaagga

SEQ ID NO: 159914 - DNA, 169 bp, Homo sapiens
ctcccaaccaatagggtctcatagttcgaatactaccctgctcattgcagttaaatgattcttcctacttgaatgcctttgctggctccctgaagtctacaagaaaaatgatggcaataaatctgctccctccaagaagcagtcgctctctctttggtgttttcagttg

SEQ ID NO: 159915 - DNA, 1873 bp, Homo sapiens
  misc_feature (581)..(581): n is a, c, g, or t
  misc_feature (597)..(597): n is a, c, g, or t
  misc_feature (718)..(718): n is a, c, g, or t
ttcaacctgaccctcaaggagatccacttcctcaagtggctggacatctactgcccccacgtccccttcattttcaaaggcgacgatgacgtcttcgtcaaccccaccaacctgctagaatttctggctgaccggcagccacaggaaaacctgttcgtgggcgatgtcctgcagcacgctcggcccattcgcaggaaagacaacaaatactacatcccgggggccctgtacggcaaggccagctatccgccgtatgcaggcggcggtggcttcctcatggccggcagcctggcccggcgcctgcaccatgcctgcgacaccctggagctctacccgatcgacgacgtctttctgggcatgtgcctggaggtgctgggcgtgcagcccacggcccacgagggcttcaagactttcggcatctcccggaaccgcaacaccggtttggccctggaagtggacattcctctattactgtgaagttttatttatgaagaatttggagggagaaggctccaggcttcaggagggggtggtgtcctccctggccctcctcccttccctcccctcattccagctgcctnccctcagcacccccangcccctcacagcccagccccctccagagccctgccccaccgcaccctgcttctccagggcctagcagaccagcatctgccccggtgaagggatggatcagctgtgggggtgggtgcagaangttgccacctcctacctcagcgggagtcacctaggaaagatggagggattgacactattttctcaataaaatgggacttttttttttttttttttttttttttggtgtgaaacttcctgttcccagctgcatcagagagcctgtctggggccaaggttgccagagatttctgaagacacagcttgttccttgttcttggctggtgggtgcacaaggacttctggaagggatttagacggggctgagtgctaggattaaagtggggatgggagtacggcaacagaaaaacctgggagctagcaatgcacccagcccttgactgtgccctggtggacagccgagctgtggctctagcgtgagccagtgccttcctgtccctgccaagggtgaggccagagttggccccgaggctaatgtttcagtgggtgagattaggtcggccgtacagaggccggtgggctccctgacatcccttccaggcaacctgaaagcactgaaatagcttatggccctgtgccagggaccttggcccaagctgctgacctccagggtggggagggagctacccccaggagaagagtcactcagacagcagtatgagcaagccagccagcagctccgtgcctgcacccagctcaggggaatcccagggggttcagatgcccaggaaggaaaaggggacagcgctactgctatggaatgagaccaccacttctcctgttgtccttcccagcttctccccaacctccccttttccctagtttataagacaggagaaaagggagaaagcaaaaagctggaaagaaacagaagtaagataaatagctagacgaccttggcgccaccacctggccctggtggttaaaatgataataatattaacccctgaccaaaacgactggtgttatctgtaaatcccagacattgtgtgagaaagcaccgtaaaactttttgtcctattagctgatgtgtgtagcccccagtcacgttcctcacgcttacttgatctattatgaccctttcacgtggaccccttagagttgtaagctcttaaaagggctaggaatttctttttcggggagctcggctcttaagacgcgagtctgccgacgctcccggccgaataaaaacctcttccttctttaaaaaggtgtc

SEQ ID NO: 159916 - DNA, 549 bp, Homo sapiens
tgagtttggtaagtatttactgagttatgatacagggccccaggtacctgtgagggtctctaatcacctcatggatagtcccatgcccaagagagcttgtcattcaatagcaaataaaaaataagtgacaagttgagagagacacctgggaagaaagataaaggaattcattttcctggtgtttgaataaaaggcctgcattttcattttgttctggacaagtgataaagtcagccctgacaattgttaatagtgaactagtgcttggaaacaagcttcacctttggaacttattgattcgtttccataatttttacattttttttaaacatggtatatgaatagatttggttgtacttagaaccctaaggaattcccaaatattttataataagaattgtctttccacagattaaattgtttgaaattgagctatttatagccttatagtagtaacaaaaggaatttgaatttaaaatatggatttgcaaaattaatatcaaagttttacaattatttttaccctgaaattgttgaaaaaaaagcaac

SEQ ID NO: 159917 - DNA, 463 bp, Homo sapiens
ctcactgacgaggtacaaatgtaccgtcgtatagcaaagtcgatattctgtaagaatggcgcgcatgctcgctactgattacgttttacaacggcaggtgtagggaaacataaaaagacctcaagatgagaattccatctatgaaaaccatctaggctttatcttaatacccaaacttcgtatccatttttctatggaaaaaaatacatactctatatatttttctcaacttccaccaattctttatggaataaaggggatgagtgaattcattcattggaaaacacaggaaagtgaccactccttctttaaggcaaaaattagaaatttatttatcttcaattaagcaaatctctacatattgttggcttctttcttttcatatctgtaaatagttagactaccatttactactaactatagctccttgatagcaagcgccaggccttattaactcaaccca

SEQ ID NO: 159918 - DNA, 517 bp, Homo sapiens
ctcacagagggcctccacagtgatggctcgccgttggcgtgggctgatgtgggctgacggctgagaagctctgggcagaggcacgcccgtgctcaggcagtgaaggagggcagggggtgggggtggtgatccagacagaaagcccagcgcctggacatcccaggaaaggttgtgccggacgcccctgggtgcagagggaggagcaggcaggatctggtcagttcacatttcctccagctgaagattctgaccctgactcagagccctcaaggggcatggcaagcataggcttttctacaagcgaggtccctgagagtttaggcattactggttgaaatgctgcaacggggcaaaaaagagaaagctggggggaataatagcagtgctacttcataagagtgtggggttaaatgtggtaatgcatttaagcacttagcacagtatgtaacacgttataagtgatcaattaatgttactatgattctcacatatgatcactggttttatcccaatctct

SEQ ID NO: 159919 - DNA, 166 bp, Homo sapiens
ttttggggagttggaggcctgcagacctttctgcagcagatgcataataaaatcttagaacagtctgctgtatcctgctcagctccggatcccatttccaaatatatatccattttccccattttttaatcctaggggactctgctcttcattgggttctttttgt

SEQ ID NO: 159920 - DNA, 236 bp, Homo sapiens
cttgttctttattccctatgaatagggaagttcagatgattattgtacattattggaagttaatatcacgtctacgtcttgatttagaactaaaaaattggtcctctgccaggagacatgaattaagaaattgggaacaaattaaaataacatttcagttacttttaaacatatttgtctttatggttgtgtttattacatgtgcagtgaagtggagaattgaggcagttatttca

SEQ ID NO: 159921 - DNA, 423 bp, Homo sapiens
tccacctcagttcggtcctcagctccagcgactcataggaacaccacagatgcacgaaaagcagccgggtcactcctcatggaaggcgtgccagccgggcacagcaggtcccatccgtccttctagggcggccagtaaagagcctttctggtaataaatgtaatgaacatgtgatcattctgctgactgcagcctgctaacaagcttacgattaggatcaccgagattctccaagtgcccgagtgtctcagcctattacatggaggtgacacgctctcataccaccctgggaaatgcaggatggctcctggcagcacaggtggcagtgggcaccagtgggcaaggttagaaaggcattgagacccagagcccagagtggagaccaggaccctgtgtttgtccagaacaacagtgtttccaaag

SEQ ID NO: 159922 - DNA, 191 bp, Homo sapiens
ataggaattgcttggcccaggtcactgaagcattttctgcttactttacttaggaacgtttttgggggtatgttgaacagttttcatgtttcatataaaaacacgtcagatgtgtttatatgtttttgaaaaatgtaaaacaaggcttgaaacgttccattgtatgcgtctgtaggatacacattttgaca

SEQ ID NO: 159923 - DNA, 238 bp, Homo sapiens
agctcggtgacctggcatcctcctagctcatcctcaagaggccttttgggccaggtgtggtgactcacttctataatctccgcaactttgggaggccaaggtgggaggatggcttcaggccaggagttcaagaccaggctgggcaacacagggagaccccatctctagaaaaaatttaaaattagctgaatatagtgatgtgtgcctatagtctcagctacttgggaggctgaggcag

SEQ ID NO: 159924 - DNA, 241 bp, Homo sapiens
gaatgccaaaggattacattagtaatctctgaattattatgcttttatggaagaactattcctgaagttactcaaacccagtagttttcaagtgtggtgctcagatcacctgcatcaaaatcacagttttcaaaacttttttccttgagataaaccttacatataataaattgcataaatcttacgtataatattcaatgggttttgacgaatgcacacaactgtatgacccaaccccatc

SEQ ID NO: 159925 - DNA, 344 bp, Homo sapiens
ccacctgttaaagcacaccagagataggaaatgcaagagaagcagtttagggtataggtagggaatggaaagtgagtccagtgtggaaattgtggaatttgaagtacccagagggagcgcaggacattttgacatcattttgagctcttgtatgttttgaccctgctgttttttttgttcttgaatataaacattgccgtcaagatgatatcaacactgatgaattttgtggtaaagatttattccagggttaacttcgttaagctagtttaatttattgacctatttcctatattgcaaatttaatcttttccaatttgttccctcctgtattgttttactag

SEQ ID NO: 159926 - DNA, 207 bp, Homo sapiens
gctgccttcgtggagcccgaagagggcttggccctggcctggacaccttcaccacccctagaggggtgccagagctggctatagttgcttccgagagctgactgggaaatgttcccatgtaatcatgttcatggtttgaaagccaccatggtgggagtatttacactttggaaactctggtaaatgctacaaacctgggctttcctc

SEQ ID NO: 159927 - DNA, 644 bp, Homo sapiens
accccatgtaaaaggaagcatttgagagtcattaagcagaacagagcactgccgttgccaaggtgttcctaatagcgtcttggttgtcctgctgccggcaaggccagagtgtgacgctgagtttcttggagctgcagactttccaggaaggaaagaggtagccacacttgagaacttagaatctttgagaagagggcatctccaactaaggaagaaaaggtcactctcaaaacaggctccctaaagaacagattcctaaagagctccaatcccatatttcagaccttcccatggacattccagaatcttactcttaggcagagcagaaaaaatagcagtagcagcagcagtgtctctcaccatgcaagtctaaataggtcttaacagctcagggtttgagctcataaacaaggtactgaaatttttctttgatgtcagtaatacatcccaagatccttttctccacatggtaatgtgtccctgaattatagttgcaggctagaaaggttgcagagtgagcggagtagcatactaatttttgcatgtgcacacacagtctcagagctactggaagctcaggaggtcatcctgaccctttgtctgccttaggcaggactacactattaccattccctctccacaaa

SEQ ID NO: 159928 - DNA, 540 bp, Homo sapiens
acatgattgaattaatagtcagaatgtctattgagtccactttctctgaatgactgcccaactctccttgatggtggatgcaataggattatctccattgcatcattaatcaagtagaactgcctggaggtagcatgggccaccacctgagccagggaagtattttcagtgtatttcagagacactgtaatattgaccctggtatggtttcattaatagagaatggcccaagagctctttctttctgcatgaagggtagatttggttaatgtcgatgtaaataacttcccgtctttatcagaaatacgcatcattaactcatcacaggaaggacttccaccaccatcagtcaccttctcaaacatggacccagactttcttcctcacccttacttcctggtgattttaaacctcctaactaaaggaccaacatccctgctgaagaaacttaggaaactcacactctcttgatccaagagaaaactttctttctagaccccagtaacttggcattatttacctttccctctacaaaatcct

SEQ ID NO: 159929 - DNA, 587 bp, Homo sapiens
actgacgtaggaggtgggattaaactctggaagcaaggctcagacactagaccaaattgaggactagctaaaacaggtcagggcagaagtaactccctgtaagacctgcccaccagtgtgccatgtcagtctaccattgccatggcaacatccagaagttaccaccccctttttttgtttgtttgagatggagtcttgctctgtcgcccaggctggattaaatcaaattcttacttcgcaatgacagcagcagcagagctcattttcgtacggagtgtgtactgtttctgtaagaattgacataattagcaaagtcttgactcctgtgtaaattccatcagagtgcggtacatctggtgtttctgactctgggatccaggggaacagcttgagatggccttccccaaacttcccctggaccatgggatgtagggtaggacacacccattacccacagaagcattctgtggtatattaaaagactgtgagaaatgctgggttcaacaatgggaataaacaggtgtctttccagcaggacttttcagaacctttaatatgctgatttgccttttaggccctctaaagca

SEQ ID NO: 159930 - DNA, 404 bp, Homo sapiens
gctgtcctcagactggacattagtgaatttggatcatttagtctgggaaagtttcaatgaagaccccagtgtcaactgggagttttgcccccttgacacagagcttttatgacgtagttggtccaactacatgcaagtgagagcaaggatggctgccccaaccagtagttgtaatttctaaaaccataccttcattttactaaagatatagctccccctaactttcaggtaaactagtgcaactcaatacaggttattatttcaaaccttcaaagttcttccccttctctaagcgaattcccttctttaagctggttttatgatatgggagctgagttttcagaaacagaccctattggttctttgaaatatgcttcatttctcccctactgcttacagcttcc

SEQ ID NO: 159931 - DNA, 239 bp, Homo sapiens
aatttgggcataaaacatggaaaaataatatctacaatttgggcagaagtagaactttagagatttcctagagctaatttcaaatgtacaggtgattttggcataaaaacagacatacagaccaatggaacagaacagagaaaccagaaaagaactgattcccaacgacgctgacaagaatacacaatggagaagcacagtgtcatcaataaataatatttggaaaacttgatttccac

SEQ ID NO: 159932 - DNA, 562 bp, Homo sapiens
ctccagcctcagcctcctgagtagctgggattacaggcgtgtgccaccatgcccagctaatttgcatgtttttagtagagacggggtttcaccatgttggccagactggtctcgaactcctgatctcaaatgatccacccacctcgacttcccaaaatgctggaattacaggtgtgaggcactgctcctggtcaagcaaccagctttaaaaagcatagaattcaagggtagagcagagctgcctgacagctaaaccaatagatgaattccctgtaaattgcacagtgctttaagatcaggaaatacttcatctagggttcttccctattgctgttaatttggatgaacagagcaatttaaagatgcatagacttgaaaaaagacagacacttggattctgccccgtgggttgtttaagctctgggtggtaagaacaggccacacagctagggaacactatgcattgggtcagcacatctaaaacagctactgtctatggtaatcacaatctatggttccaatcaaagtgagaaattgggggcacgtggtctgaccaagacta

SEQ ID NO: 159933 - DNA, 561 bp, Homo sapiens
gtgaacaacagctctagttcatttgttctcattgctatagaataatgacaatttgccacaatgtatatatccattgaactggtgacaggcattattaatcttttttttaatcttctgatacgagccccacaaagcagggttcagagtgcagggtagtagaaagagcacagtccctggagtaacaaaaatctgttttaaactagcttctgttaataactatgtgtccttctacaagttatttggccattatgggtcttgacttccacatctgtaggatacaaataataataattgaaaggacataaaccaagtacctagtacatggtagttattattgtaaggcttataaaatgtttgctacagacttggaaatcacttacggattactgtcacatagcttaattctttagcaccttggccacttgatcttccctgctaatgcactctggtagccattgaaacccaaacatggaaattcaaattatttggatctatcaatgggtggtttgctgatgtttccttcccctctttcccagagcaagcactggcctttggaatgca

SEQ ID NO: 159934 - DNA, 386 bp, Homo sapiens
gcgggtgctctgaggatcccgaaaaccaattgtaagtatagtaggcataatttgtagactgcatacttaaatatacaaagatgtaattttctttctttctttctttttttttttatttttagagatgacttttggtttgtttgttttttgttttttgaggcagtctgcactccagcctgggcaacaagagggaaactccttctcaaaaaaaagaaaagaaaaaagaaaataatatggtgctgtgctatgggataatggggaatacctactttatatagggtgttcagagaaggccttgaaaagaagaaacatttaaactgaaattaaaggctgagttgaagcaacctattaaagagctgtgggaaaggcatcctaagtgaaggaaa

SEQ ID NO: 159935 - DNA, 235 bp, Homo sapiens
tgaagggttgggagggtgaatgtgagaaattctgtactgagaaattacttaatgggtacaatgtacattatttgggtgatgaatacccttaaaagccctgacttgaccactgcatgatctatgcatgtaacagaattgcacctgtaccctataaatgtttacaaatttcttttaagttttgagaatcccttgtctaagccacgacatagacatgggtatattttgctggagatca

SEQ ID NO: 159936 - DNA, 281 bp, Homo sapiens
aaccaagcacagactcactatcacgagagcaacactgaggggcaaaatccactcccatcatctcatctccttgtaccaggcccctcctacaacactggggattgcaattccacatgagatttgagttgggacacaaatctaaaccatataaccctcatacacatgtattgtaattcagaatttgtcattttaaaaaaaaatttttaagattagcttatcaatttaaatgtttccagccctgaactctcaaagtcaactttaatgagttttgatttttgccg

SEQ ID NO: 159937 - DNA, 383 bp, Homo sapiens
atgggggtgtctgattggtgctgtgacctgcggcagcacagccgcctgcgttgagtgcccacggtgggctggacattgcactaggtgctgacaggaccggcagaggtggccactgccctcgtccccagcctgcactcctgggcgaaggctgacgctgaacaggtacttgtaagagtcgccgaagtgcgtgccgggagggttctgggaagaggcagctgtggggcctgaagcctaaatgtggggtgggaggcatccaggctgcggctccaggcagagggcacagcccggctgtgagccaccacgcctggccccaagggccttcctgtgtgtccaattctgggctcagaaggtggggctgggctcagaagcagggggtcaccctg

SEQ ID NO: 159938 - DNA, 282 bp, Homo sapiens
gggaaaagaacattgatctcacttggaaaatgccacagtcagaaagctcgcagtcctccaatacatggaccagagaaagaaatttcttcatcccctgggccaagaggcaaagaagttgtttcaaagcctaacaagctcagtggccactttgtccttctgaacatctcaacgtagaccatgaatgtgaaactagggtgcccagcacaaagtgagctgttgtgattcttcattctcattgccaaaattcagacatgcagaatgagcatcaccagagaaggagca

SEQ ID NO: 159939 - DNA, 631 bp, Homo sapiens
atggaagaaagacaaatgttgtataagtttagtgcagtgttaagcgaacagtgtttatgaagcctgcagtagtgtaatgacttaggccttcacgttcactcagcagtcactcactgactcacccagagcaacttctctcgtcctgcaagtgccattcgtggtaactgccctatacaggtgtaccattttaatcttttacaacatatttttactgtaacttttctaagtttagccatgtttaggcacataaatacttaccattgtgttacaattgcctacaatattcagtatagtaacatgctgtacaggtttattgcctaggagcaataggttataccacctagacttgcatgagtatactgtatgaagttcacacaatgacaaaatagcctaagaacacatttcaccgaaggtatcctcatcattatgcaatgcataattgtattttgaaatatcttgtacattattaataactacagtcacctaactgtgcaatagaacatcaggacttattcctcccatctaactttaactctgtagccactgacccatctctcacaatataccctccccgtgacgctacccggactccggtaaccagcattccactccatacttcaatgagatcaac

SEQ ID NO: 159940 - DNA, 289 bp, Homo sapiens
tgggtgggaaagggagctcggagtaaacactgttcaatatttagtctgatgtccatctcagtgtctgtgtctttgtttcaggagtctcttgagttccatttctccagagaccataccacctacctccggtgggggaagggttgtcagcaggtaaagacggaacgtcgagttataactgactctaacacagacttcaaataatccctgttttcagcctctctccttacctgtgccatcttggtgtttccagtgtctgaatatttccagagtttaacatggtgacttagct

SEQ ID NO: 159941 - DNA, 511 bp, Homo sapiens
gttcattatgtatctccagactatagagaagagcaaccaggagagtcattgaggagactgatcagaggatacagaggatttctttgaaaggagttactggcctagaggtcagggctattcctaccctggacctgaagtcaagtcagaagtctccattagccgcagtgctgccctgtactggagcaaaagatgctgagagagatctggaaaaatgtgacctgtgtctcctggagttaagggagtgcagagtccacttcccaactctttttcttttttcttttttgagaagaagtctcgctgtgttgcccaggttggagcgcagtgtcacgatctcggctcacctgcaacctctgcctcccgggttctggcaattctcctgcctcagcctcccaagtagctgggactacaggtgcccgtcaccatgcccggctaattttatcctttttaatattcatacaccaagtgggggagataagagacataagcatatgataccaaatagaccataaaa

SEQ ID NO: 159942 - DNA, 182 bp, Homo sapiens
gtcgacgaaactgaagcagtccctgcccccttccagatccgcagtcccctgctctccacgcgagcccccttcacagtccctgctaccttgtaactaacttgcacttttcccgagtccggttcttagcctttgccctgcagctcagctccttaaagctttcagatccccaaacttttattgta

SEQ ID NO: 159943 - DNA, 373 bp, Homo sapiens
gtaaaaagggagatttagcccaaccccctaattctcgagataagggagcagagatcaaccaattacagagtaagagaattcagacttgagcccaattcctgttgctgagtctatttctgagtgtatagtgatataattcaaggcaaggggaacaaaattaataattctccaaacaggaaccttgatacacccagcataaaaagtcttgagaaatcgttgacctttgggattggatcaaaagtcaacatggtcaccaagcaaagcggctttgtttcctctccccaggttgttaactaagtcagatacctgatcctacacacagcctatccgagccagggccaagccatctgtcaatttgtttcagctacacgac

SEQ ID NO: 159944 - DNA, 120 bp, Homo sapiens
aagtgctgggattacaggcgtgagccacagcacctggccttttacaactctttctagagtaaaattagcagaaacagtggtagagagaaggaatttggccaatcacaaaaatttattttg

SEQ ID NO: 159945 - DNA, 396 bp, Homo sapiens
aaatcccagcttttcttcatgccgccacggaaacggcgtcccatgcagaactgattctggctctccttagaccctcctcagactcctttggcgggaaactaatcttacaaaggaggcttcctctttccttttccagtggcattccaagcttcctttggagtgccctccctcctgatttacaaattggcctgacgttatcggagtacaggcttttttctggtggtttctggcctaacaggagacagattagtaagtaccaggatctctaataggtcaactttcatgatctctgctaaattctcagctgtttagacttacaatttttaacagctaaaaggaaagacaaatgctatctaaaactgtcccatcagcccatttacagggagcacctccccc

SEQ ID NO: 159946 - DNA, 529 bp, Homo sapiens
aatgattatttgtgagctgaaggtgtcccaggaagcaaacctcaaacctcctctccttctaggtccttggcctgcagcttgcctgtggaataaaccaacagaggaggtgagaaagtaaacggcagctgaaagcatctgcagctctgtcccgccttggctgagggaacactctgccagccagctcctgccctcaccagaatgcacttcaaaagggaaacaaatgacaatcagctcttcagaggctgctctgcttgatttaagtgtgtgtggccagggactctacaaacatggaagattggattgttttaattataaagggtggggtgagtagaaagaaaatgaaaaaaaaaaagacagtattttgaaatcctaacattaaaatagttattctggatgcagagaaattgctttctctgccaaaaccctgagggacttcagagagagaatgccgaattatttaccttctttacgggggacggcggggggaacaaaaaaaaattactgatgtatatttctttttaattcggtg

SEQ ID NO: 159947 - DNA, 109 bp, Homo sapiens
ggttgtcacaggaggtgcacgatgtgaagtcacaaggggacgcattatttccatgagttctcacagttcccagggcagccacagatggtagtggtttatgtctgcctct

SEQ ID NO: 159948 - DNA, 237 bp, Homo sapiens
ctgataggtttatgtgtggtttggggaatgctctcaagtctgccacattttctgctctgatggctcctaaatgggtgcagcttagcacatcttcacagccttatcaactctctgagttgattgtgatccatattacagagcagatatgtttccgtagaaaaagtggatccccactcagttctggtgcagtagtgcaggagtaccacttaggggaaaagcagggcataaatccaaagt

SEQ ID NO: 159949 - DNA, 537 bp, Homo sapiens
aatttcagatggtgatacaatttaggagtgttaaaaaagtaaaattgaaggatgtgataaaataactaggaaggcaattccaggttgcaaagttctcagaggtaatgcaaaagataattttgaagagatagtgcacagagctaaagacaatgtttaataaagtgactatcaagtcaaaccttcaatgaagtctccaaaactaccagaagcaaaaaattaccactcattccctgattatcagaaaagataactaaggagttatctcagtcataacctaaagcagtaagttatatagttagtcaccagatggcaagtatttccacatgaaccaaactattgaaggcaatgggccaaccaaattaattcttagatgccccagcacctacatcagtgcttaataaattactgctgaacaaatatatgacggaaagaagaaaacaatgttaagatgtcactgccatgagttaaataaatcccttttctggccaagtggcttcaattcactccaccctacccctgacacccgtcttaatcaca

SEQ ID NO: 159950 - DNA, 238 bp, Homo sapiens
tttgttaactggcccaagaaacaaagactgcatcttatgaagataatccctgtatttcatgctgtctttattagggtttttggttacttaggaaaactgggctttagaagggttaagggtttggggtttttgtttgtttgtttcccatccatgtaactttctgtattgcttttgaaatcttttgattattactgtggttaaattaatgactattatttcacaatgacctatgattctg

SEQ ID NO: 159951 - DNA, 403 bp, Homo sapiens
aaaaatgtggactagcggaggtttcctgatgtggtgtaaagaaaacagattcaagagaattgaagatttttttggtttctgggtacttttttctttttaaattaggactaatgtttctttggtggcgcttgagtccacctaaagcgtttggtttcattcctcaggaagtgagaagccacctgaaactttcaaacagggataaacaaggctgggcgcggtggctcacacctgtaatgccagtactttgggaggccatggtgggagggctgcttgatgccaggggtttgagaccaacctgggcaatgaagtgagacccccatctctataaaaaattaacaaattagccgggggtggtggcatgtgcttgtagccccagatacttcggaggctgaggtgggaggat

SEQ ID NO: 159952 - DNA, 381 bp, Homo sapiens
attccagattcctcaaaaaattaaacacagaactaccatatgacctggcaattccacttttgggtatatatccaaaagaactgaaaacagggactcaaacagatatctgtacacccgtgttcacagcagcaccattcccaatagcaaagccgcagaaaacacccaaatgtccaaatgaacaaacaaaacgtggtgtatacatgcaaggagatatcagccttaacgggaaagaaatgctgatctgcccgacgacacagaagaaccttgaagacatcatgctaagtgaaataagccagtcaaaaagggacaaatacatgattccgcttatataaaggacctagtagaggcaaattcagagacacagtagaacagtggttacca

SEQ ID NO: 159953 - DNA, 160 bp, Homo sapiens
ttttatttgggaagttttagttctgtatagttaaggcagattcttcatttgcaacagttgacattgggacatgtgtgaacatcttcaaggtattaggacatcttcaaggcattactttttggcagtgttgagaatttttttttttttttttttttttttt

SEQ ID NO: 159954 - DNA, 363 bp, Homo sapiens
atgttccccaacaaaaaaactaacaggaaaaaaaagcagccatgggtcctgttggacaaataatcatctaagttatctacacagatgtcacaacatgggagctaatgcatttcaggcaattctccagtatcaaacactcatacagccacaataggtaacattttcctatagagaaagcacttttaaccttacagtgagtgaataaacagaaacagtgcttttagtcaaaattcttttaaaagctttgtcactggaatttcttaatgacacttgaaataatagtttccacggattaaaaaatataccacagaggccaggcacagtggctcaatttttttattttttagtagagatggggaacag

SEQ ID NO: 159955 - DNA, 349 bp, Homo sapiens
tggtgctggtcaccccaccgaggtgcctcatagccaatcggactcagcagggtgtgctcctgtcctggcttccgcctgccaaccacagctttcccatcgaccgctacatcatggagttccgtgtcgcagagcgctgggagttgctcgacgatggcatccccggcaccgaaggagagttctttgccaaggatctgtcacaggacacgtggtatgagttccgggttctggccgtcatgcaggatctgatcagcgagcccagcaacatcgccggcgtctccagcacagacatcttcccgcagccggacctgaccgaggatgggctggcgcggcctgtgctggcgggaatcgt

SEQ ID NO: 159956 - DNA, 404 bp, Homo sapiens
cacattctacttatggagtcttgatcaaacaaaaaagcaagcagaagaacctgaatctgacctagctttagatccaacatccaatttacaggaaatacatgggataaagaaacatgttaattgacaccataaggatgcaaccagcaaaatccagaccatgagaatctccaaggacaattggcccagtttcctgaacaaataagttaaaagggacttcaaagacaaagcatgggccggccacagtggctcactcttgtaatcccagcactttgggagaccaaggtaggtggatcacctgaggtcaagaccagcctggccaacatggtgaagcccccatctctactaaaaacacaaaagttagctgggcgtggtgtcgcactcctgtaatcccagctactcagaag

SEQ ID NO: 159957 - DNA, 207 bp, Homo sapiens
atgatgaacatgagagatgcccagcacacagcctgctcgccgtaaacagcaattcttcttaccaactgctaaaggccattcgtgaaatgcatttctctggaccgtgaagcctcttagaaagaagccgtgacagcagcatttgtgggtcgttaggtcaggtctttgaaggatgtggagcaacagaaaccctcattcattgctggtggg

SEQ ID NO: 159958 - DNA, 715 bp, Homo sapiens
agaagatgagttcttgcttcatgtccgtgaaagctcctttcctctataactgtgatcatcccccttactcctcatggatcatacctcgctctcctcagatgttttaatatatccttgagatggggtcttgctgtgtcacccaggctgaagtatactgagtggtacaatcattgctcactgctggccttgaactcctgagataggaggcgatccccccatctcagcctcctaaagtgccgggattacagacgtgagccatcgcatccagcctggaagtattttgaaggttcagtgtgaggcatttgctgacagattgagttggagagaaatagaggagtaaataactccaagggttttatcttgttagaaggatggtgttgccactaactaagatgggaagcctgtggaagactggtttttcagggaaggtcaggactttgtgaacatataaaactgcagatggctattagatatccaagtagagatgctgaagagatgaatgtatatagaagtctgaatttgggagagagatctggataggagatacttacctggtgtttaacagcttacagattgtgtaaagtcatgaaacggataagaaccttaaaagagagaaaagggaatagaggttaccaaatgaattgcagtttccaaattgcagagggcagagagacaaggagaaaccagcaaaagagagtaggaaagaagcaactag

SEQ ID NO: 159959 - DNA, 480 bp, Homo sapiens
cgttatgaagattatgccagatgcagaagcatgacccgtgccggccagcgcaccaggttcaaggcatttgctgacagattgagttggagagaaatagaggagtaaataactccaagggttttatcttgttagaaggatggtgttgccactaactaagatgggaagcctgtggaagactggtttttcagggaaggtcaggactttgtgaacatataaaactgcagatggctattagatatccaagtagagatgctgaagagatgaatgtatatagaagtctgaatttgggagagagatctggataggagatacttacctggtgtttaacagcttacagattgtgtaaagtcatgaaacggataagaaccttaaaagagagaaaagggaatagaggttaccaaatgaattgcagtttccaaattgcagagggcagagagacaaggagaaaccagcaaaagagagtaggaaagaagcaactag

SEQ ID NO: 159960 - DNA, 419 bp, Homo sapiens
tgcggatcccggggaccggcccctgcgcccagatccccgctggtcgcgcaccccctgccctgctgcagccacccggccccgacgccgtaccggacgccttagacgccctcgcctggcgctgggggatcccagccgccaagcccagccccgccgcgtcctcgctggccccggcgtcccctcgtcccgcgggccccgcgtggcagggcggctgagctccgagcggcggtggccagcgcggcggcgccttttatgcggcgcagccgcccttcccggcgccggaatgtgcccgcgccgcgctggcccgaccggtttttccgggcggggcggctcccgggcccataggtcccgcgactgatcctccacggcccggggacctgctccgcgcgcccgcgcgggggtggccctgactcagcggccgc

SEQ ID NO: 159961 - DNA, 206 bp, Homo sapiens
tcaagatattcaagaaagtcctgaggaaaataataaaatgattacggagacataggatttatgaaaacagttggaggttctcagtgtaaacagatgaagcctaaggaagggaagaatggcaaatctaatatatttgagagtcagaattgccaggtgaaaaacaggacgtaggccgggcactgtggctcacacctgtaatgacagca

SEQ ID NO: 159962 - DNA, 551 bp, Homo sapiens
taagtaaatccagctccccaattaaaactagctcctgtcccaccatctcctagggccaactacatgtgcctggcacatgaaagacaagaattccaaatctgacatttccatgaggcgggtactgttaccacattcatggaagaagagactgaagttcagagtagccagggagtgaaagagacaggtggacctcttcttactacactctgtggccttctcaatcccagctgggcttgattccagaccagatcccaccctcctctgtctcctccttgggtagggccctggtgtctctgccatggaggcccgtctgtgagactgggttgttctctctggtctctggccttcaggtgggactgctttctcagcccctcctctctggcaccaggtctctgccactctgtctacacaatcagtcttggatcctgctgctctgtaattccaacctcgaatgtcctttctcttccctagcctaaatcctcgattaggctgggctcagtggctcatgcctgtaatcccagcactttgggaggctgatgcaggaggatcgc

SEQ ID NO: 159963 - DNA, 629 bp, Homo sapiens
ctgacattttatagggggacatgatggtaatagaggaatgtatttggagcaagtaagaccctccttttcagtgccctagaaaggatgattctaacaacccccagatgttgctgacagatgtgtttatgagtatgaacaaagtgctggatattattagtacccgatgttactaatatcactagaattgaatgctattctaaatacgtagtgacattatgtagcattaatgaagatgaggagtagggataaaataagaaaagtcaaacaacagcaggatagcaagcaaagaaatactgtttctttgaggtttgtaagtgcgtacttcagggtgttcgtttctattcatatttctatccacagaaatttctaaatgctacagagaactttgaaattaccttcatttacataaataatgtttctcatttttcgtactctcttaatcttaaaaaatctgtttttcttaaattttgtgtctgagttaggtgaaggagtgtgttgaaaattcagtttaatagactagcaggtaagtttaaaacactttgtttatcacaattgtattttggaagtcccatttataagaaagtatgctataaagatgtacctcattattcgtaataaaggttttcctt

SEQ ID NO: 159964 - DNA, 525 bp, Homo sapiens
  misc_feature (374)..(374): n is a, c, g, or t
gactacatacttccgcatcagaattgagtgtgagggctttcgtgcaaccagctgaaacacaaagctactcaggagaccagtttggattttaaatgttctcaatccagactaaagacaaccaagtattcttctcagaaagtgataggaactcctcatgccaaaagtttggtgcaaagattccgagaggctgagtccttcacacaactttctgaagaaatccagatggcagttgtatggtgcaggagctgcgttcctttggaggaggagaggcactctgatttttagttttcactttttctgctctgttattttcccatgtttgtggttttatctacctttggtctttgatgatggtgatgtacagatgggttttnggtgtggatgtcctttctgtttgttagttttccttctaacagtcaggaccgctcagccgcaggtctgttggagtttgctagaggtccactccagaccctgtttgcctgggtctcagcagcagtggctgcagaacagtgcatattgatgaac

SEQ ID NO: 159965 - DNA, 820 bp, Homo sapiens
gactacatacttccgcatcagaattgagtgtgagggctttcgtgcaaccagctgaaacacaaagctactcaggagaccagtttggattttaaatgttctcaatccagactaaagacaaccaagtattcttctcagaaagtgataggaactcctcatgccaaaagtttggtgcaaagattccgagaggctgagtccttcacacaactttctgaagaaatccagatggcagttgtatggtgcaggagcaaaaaactcaaggctcaggccatttttctgggtaacaaacttcttaaaagcaaccggcttaaacatctggaagctcaaggtactagtttgccaaagaaactagagtgcataaaaacgtctatttgcaaccaccttcttcgtggctcaggtatcaaaacttcaaagcatcatctgagacagagaagatcacagaataaatttttacggagacaaaggaaaccacagagaaagtttccggtttcggagagaaagacttattgtgtgtgcgtgatcaagtctgttttaaagattcactcgctgctttcatctaataacttctggtttttcataaaatgctgacatcttcattggaaatttttttcatgtaactgttttcattttcagaaaatatataagggggtcattccaaagttcagaatgatcctatttttttaaaaaacaaaattcctgtaaaacaattaactccaggaacttaaaatttactccaagacatttccctcataacaagcaaaaaaccccagcaaagatcgttacatcacaaaccaacacaagaccgcctcggaagtatgtagtc

SEQ ID NO: 159966 - DNA, 156 bp, Homo sapiens
ggaaactgcaaaggaacaaattgaaaaagaaaagggcagataagaaagcacaaggaacattgtttcaaatctgctcaagactcaaggtgaaagagagagtagaggaagggcaaaggacaaagaacagtagatgagagattctgagggggaggaagg

SEQ ID NO: 159967 - DNA, 392 bp, Homo sapiens
taaatgtctcgttagcctgtcattcaatgctaaatactctagcctcaaagggcttttctggcttttactctccttgtttccaacatatttcagccaaccttgactattccttatttctcaagtaagttcaatttttcctacattttcttatgtttctcctttcacttggaaaaaaaggaaaatttactgaaaaccatgttcctgtaaatatttccacctatagatattctcctctttctaatgcctcactatgtactgctatttttctctttttatcccaaatgctatttaatttcacttagagatttaggaaatcatccttttatttgactcctttcctccagaatatgtcctctgagcactttgaagctttcttatggatgtgtaccatg

SEQ ID NO: 159968 - DNA, 341 bp, Homo sapiens
tggtctctttcctccccctgccagtgccacctgattgcagcagtggttgtggggtaagggggtggagtgggcagggccctgagcaggaccagcatgagacagggagctggcagccaaaaacccatcccaggaaggcaggacggcatcaagctgaggttccaagcccagcacatgctccacagtcccatcagaccttgcttacaaaatactaattccaagttaaagttatttggaattacaagactgtgactgcagagaattaaaccaagcatggagcccatcttcatatgtccatcaagatagccctgaccaacaacgaatatgcaaaggggagatgttgg

SEQ ID NO: 159969 - DNA, 469 bp, Homo sapiens
ccaaattagtagacagagataataaagattaaaatagaaataaatgaaatgtagactataaaaacaccaaaaaaaattaatgaaaaaagttggctttttttttgaaaatcaacaaatctttagctagactaacaataaaagagagaagacacaaataaataaaatcagaaatgaaaaagaagacacaactgagaccacagaaatacaaagaattataaagactattatgaacagctatatgccaacaaagtggaacatctagaagaaatgaataaattcctggacatatgcaacctaccaacattgaaccatgaagaagtagaaaacctcaacaaactaatacctagtagcaagattgaagccataataaaaggtctcccatcaaagaaaagcccaggacttgatgtcttcactaccaaattctacaaaacatttaaagaagcaatacaaattatattcaaactcttcc

SEQ ID NO: 159970 - DNA, 374 bp, Homo sapiens
ttcaagttgatacactgacaaaatcagaagcatgacattttagttttaagtcataacctgtaactggccagtatcttgttaacggtcttatcaaacaagaaaaataatcacaggagtatggatctgtatcaggctatgaacataaagggatccaatatgaaaaaggattggtcaaaaatctctcctggagatgcaggtctgatcaaactaaaacgggcgcggatttctctgaagccactggatctgtccagagagccaaccagggaatccaaggagaagagaaagaccagcaaaactcaaccacatccaggatgctcgtttgaaccaattttctcagctgttcctaatccactttgacagagaaggaagccatg

SEQ ID NO: 159971 - DNA, 458 bp, Homo sapiens
tcacgggtcctacaggggctgcatcccatcacctcccacatctctgtcccaccggactcgggcgaaccttatgtgtgcacacaataagaggaaccctggaccagccctactcccagcgatcaggtgatctgcaggtacctttgaggactgggcacatgacttagcaaaggaacttcagatgctttatgtgaaagctgcctcaaagacggtgccactcctgcaaactgtgagtctctctactacatgcaaggcagttctcgaaggcctgggaaggatagtcagggtgacccacaggttctgttttcagcaacaggctctgccccaataaaacaaaactaagagggatactagaatgcctccgagggaccaggcactgcagactgagatcctcagctttattcgaatgtacttgtttgttcctgagaattacgtgctggccagcaccccagggcgagctc

SEQ ID NO: 159972 - DNA, 515 bp, Homo sapiens
tcagagggtacagcacaagcaactggaggagaagctgaagcaagcagaggcctggggctgcagctgggaaagttgcccgcctggttgactacatgattgtcagagcctcatttctgtcttggaagagcagataacctcttttgtggccaacatccttcaagtgaggtggtgggtggcatgtgtggaggtggcaggcagtccagggccagatgctgaggaatgtatactgacatctagcccctcgacctttcctgacccttttttttacaggccccaaggcagaaaccctttctctcatcacagctggtctttgatgatcatggtcaactgtctcatgtgccctgtgttgaaaatatgatccagactctaactggaggcctacagtctgtcaagacctctgccttgcaggtattctgaattgggcagagagctggctgtgggaattcccagttcctatcctctgagtaatcagaagctcacaacctggtttgaatccctcattgcttgttccgctg

SEQ ID NO: 159973 - DNA, 694 bp, Homo sapiens
gttaaagcccacatgcctaagaccagtttactttttagtaaggtaaattttgtttacttcaccatgctaaacatctgaagtcaatatgagcttatataaatggatttttctgtaattaagtagttttatttgatgttgccatatttaaattttaccttaaattatctcagcatacatgttaaaactgatgaatcatagctttcagaagtaggattctgttttttttttctagttttagagagggatagagaaaactcgtttagcgtgcggagtactttttgagaagtcaagccttacatagcctacatgactgttttacttggagtcattagaatgcttaagggacagcgtcataggttgccaagcttactgaaaaagaaggaaaaagacaccaaaaaggaggtgattggaaacttagagcaactgttagaagtttacctgtgaccataatgtcaataactacctgtgtagcgttaaaaatcattcctaatgcagtctcttgtgctatagaattaagctgaaggccataataatctcagagggtaaaaaatttgtttctacttctctctgatcctttttttaaaggaataataatggctagtatttattatttacattaatattatatttgactcattaagttatatcacctcttattgagtttctgatgttggtacagcttattaccaataga

SEQ ID NO: 159974 - DNA, 298 bp, Homo sapiens
ttggcctcccaaagtgctagtattacaggcgtgagccaccgtgcccagacctttttgcttttaatgttaggactaaacttcaattttcatgttgcttaagtgtcggtgattttccctggtttaatgcataaatggtcaccataagaactcggtatttttatttctgtagggaaaaacttgcatcctgaaatttactacagacagtattcagagaaaactgctgttattgggagtttgtacttctagcagcagacaagaaaacttttgaactttgttttagaataatggcttaaaatga

SEQ ID NO: 159975 - DNA, 165 bp, Homo sapiens
aaggagcatggggaaactttttgggatgatggaaatactctatatcttggttttggtgggactatatacctgtatatattactcaaaactcatagaactgtatgcctaaaatgagtgacttctattgtgtgtaaactatactttgataaaccttactgtaaaaaa

SEQ ID NO: 159976 - DNA, 485 bp, Homo sapiens
gacaattctaatgatgttcctgtgtcttcaaaacccccactcattgacttcctttatagttgtcattagttctgctccaaaatattttggctgtctgccttcctaacacagagtaagaatgcatttcctagcctctttgaagttaggcatatgacttgtaatcaccaatgatacaagagaggaagtgacttatgttctatccaggaggacattttaagggctggtacaaggtttgctacatttccttttcctgcctgcatgaatggggaaatatgtgtccaaatggagcttctgtatgcctgattctctgagtgactaagaagagcagagcactctcctgatgacctgtgttgaccttgaagcatgaatgagaaataaactcattgtattaagtctctggaagaaaatgacaagttcttagattgcttgggtttgaatcctggctacacaccatttactagttgtgtgatcttgggcaacttccc

SEQ ID NO: 159977 - DNA, 224 bp, Homo sapiens
cagggatagaagaacaaggtcagcaacactttgagcaagcactatgctaaatctagaatttggggcatcctataggacagtggaaccagtttagttaatgagtcagtggcctgtgaaaagaaggaaaaaaggaagagataactattctatgttaaaagggattaagggatctcagagacataaggaaatataatgagtagacattgttaggattcttatttgtg

SEQ ID NO: 159978 - DNA, 326 bp, Homo sapiens
gaagttgaagtgggagaatcacttgagcccaagaggtcaagggtgcagtaagctatgactgtgccactccacaccagcctgtgtgacagagtgagactccatctcttaaaaaaaaaagttaagttctggacttctgtcaaactttactcaatctacaatgaagagtaattcaagtctgaatttatcaattccatgaatatttactaagtacttgctatttgcaaggcattataacagatattggtagtataatgatcaactagaaattttctctaacctgtatcaatagttatttcattctaaggtactgaagaactaattatata

SEQ ID NO: 159979 - DNA, 555 bp, Homo sapiens
ttcttgactcgtcaaaccaaggtcatattagattatctggtgtgggggggcactggctctcagccccaagccctctaggccagagattttgagctcctcccaacaggtcaaagctttgtttttgttgtttcacttcccaccactgtgcacacatctcatctttgcctctgtttttaaaaaacattttctggagcaaatgctgaaatcagaaacctgcatttctcattttttagttgcccaccagagctgttgctcagtgcagggaaaccaggaaatggtgactaccagtcagaaacaaaaagactgtcttttaaatcagctgctgcagccttggtattcccagcatggaacttctaaaacttttggaatttccttagcgataggactgttttcattctgctaatgagggaactcactttgtccccagatagcttcagcttgggctctgatcaccagaaagatcaatcagatgaaattgcagggtttcaggaggctgaggcaggagaatcacttgaacccggttggcagaggttgccatgagacaagatcgtgcca

SEQ ID NO: 159980 - DNA, 614 bp, Homo sapiens
cttcgacggtgttctgtgttaagtgtgagagtagaaaaaagtttttttcctatatattatggatgtctattagacactcaagcagcaatattgaataggcagttagaaatacaagtcattatatgtgcatgatgctaacacaacaatagggaatgagatcccatgggagttagtgtggatacaggagaggtctgaggatggagtctgtgggcactcaacacttacaagttggggaagaagctaacaacatactgacaggatcaaatcagcatatattaaccttgaaaataaacaggctaagcaccccacttaaaaggcacagagtggcaagctggacaaagaagcaagatacaactgtatgctgtctttaagagacctatctcacgttcaatgacgcccataggctcaaagtaaagggacagacaaaaatctacaaagcaaacagaaaacacaaaaagagcaggggttgctactctaacttcagataaaacagactttaaatcagaaatcatccaaaaagacaaagaagggcattacataatgataaagagttcaattcaaaaagaagacttaactatcctaaatacatatgcacccaacaccggaacaccaag

SEQ ID NO: 159981 - DNA, 312 bp, Homo sapiens
aggcttcaggggagaatccatgcttgtcttgaggccaatggcacttgctggcttgcaccgctcccacctctgctcccaccatcacgtctctgggcccaaccctcccatctccctctcataagtcccctggtgactgccttgggcccactggataagccaggctcatctttccatctcaagaccctgaattgaatcacacctacaaagtccctttgccatgtaaggtcacgtattcacaggctccagggattaggacacgggcacctttggggggccattattctgtctactgcacacctagagtctggctcc

SEQ ID NO: 159982 - DNA, 151 bp, Homo sapiens
tgatccaaaatataagtagcaattagccatgcaacagtgttccatgcaatgggaacaggatatgcaaaggctctaaggatgcaaagggtttggtgtgtttgaggaactgaaagaccaatgtggctaaagcattgtacaaggatgacagtgg

SEQ ID NO: 159983 - DNA, 281 bp, Homo sapiens
gaataacttgagtcaggctgcaacatgtgaaagaattcagctgatcaggatttataacactagctggattttttgctttctttggggttcatgaagcatggtgttgtgagataccacaggagtcccagagtaaagttacatacctatttctcttccttatttttatttttttggcatgttcatactattttattgcctagtccaaatgtcttcctaagcagggtccagcctcctaggggacacgtctcttctgacttttgaaaaattaggaccacagacag

SEQ ID NO: 159984 - DNA, 166 bp, Homo sapiens
cggagtatcgccggagtatgctcagccggctggtgtatcgttaagtattcaagagcaactgttagtttcctttcatttcttacgccaaaataactggctaaaagctgcagaacattccaagtgggaaactctaaaagcatggccaaaagatcactgtacccagtag

SEQ ID NO: 159985 - DNA, 653 bp, Homo sapiens
taaaacaggtgctctgcctgaaccattgaattaacctctctgggcctcagttttttcatctgcaaagtggggagatacatcttggttgctgtcaagatcaaagccgtggcagcccttggaaaacagtgaaggaaccgccgtctcaccagcttcatttctcagacgcagaaacccaccaagttacttggaccctggctcctggcccctcctagggatatgataacatccagcattgcgcactggggctgggggccacatggtcaatggaaagagtgtgtggtttgatcaaaagacagacttgggtttgaatcctagttccagcacacactggctgggtgaccgggaggcaggttacttaaatgctgaagtctttggctgggcacagtgactcacgcctgtaaatcccagcactttgggaggccaaagcagatggatcacctgaggtcaggagttcgagaccagcctggccaacatggtgaaacctgtctctattgaaaatacaaaaattagccaggcatggtggtggacacctgtaatcccagctactggggaggctggggcaggagaatcactggaaccctggaggcggaggttgcagtgagctgagatcatgccactgcactctagcctgggctagagtgagacacagtgag

SEQ ID NO: 159986 - DNA, 332 bp, Homo sapiens
acagcaactccttattattacgtaggtcaaagatttttgagcccttgttagcaatacataacttgccaaacagctctactgggattaaaatttaagagaaagatgaacttaacaccaaatgagtactcatatagttccttcacctttttctcattttcccttttcaccgcatgttctcttatatttaagagtcaatatatcaaggagaaagaaaagaatcattatcagctttttaaaaatggctgctacctcttcctctcctctgttaaaaatatgtaggcttgcaatgtctctgagatatttggggctgatgagatgtgataaagtcaacg

SEQ ID NO: 159987 - DNA, 278 bp, Homo sapiens
tctggtaatttcttttttttcggattctttgaattatgaattcagttttcttgatagtggtagggctattcaaatgatctattttatatttggtgagttgtggtaatttgtattatttgaggaataagtccattttgcccaagttgtcaaagttacatgtgtagagttgttcctagtaattcctaattatcttttttggtatctttagagtccgtttcatcactaatgttggtaatttatgtcttttttttttttttttgtcagtcatgcttagagag

SEQ ID NO: 159988 - DNA, 836 bp, Homo sapiens
cttctcacgattcacaccacctgagtccattcctcggttgaaagggcacttcccagagtggcagtgtagtgaagtggttgagaacacagatttgacaactcataatgctaagtgactttggggaaattatttaatcttgctaagttttatttttcctattgtaaaagggagggggaagttatagagtaaacaaattatagtttataattacaaattatagactaagcaaggcaaagtttgtacagtgtttagtatagagcctgtagcacaataagcattcaaaaaataaaagctattgtttatttccttgttatgaccattattgttttgttgctctgtgcattttcttgctgatgttgtgttgattctctgttgatgtgttaggtggctgacattgcactaaagtgatgtgcgctgtaataaccatgcacttctttgcccactagggcagaagatggggctggttgttcccactgctactgtgcttcttcacttacctaatggtcagtttgggggtcctttggcccctctcaagtcacataagggaggcaacagccttgtcttttggggaccaacatgacctgggaatagacaagttcctttcaagtctgtagtcatttttgattgccatctatgcagccttttctttttctttctgtttttgttttgatggctgcctatgggtattggagacttaaatttcttttacttatataaatcaagagtaaaaaatacctaaaacaaagactctatcgattatatatttgaggaaaaccatgggcaagcataaggaaaaccatgggcaagcataaggatgcagcattctgcaagcaggt

SEQ ID NO: 159989 - DNA, 179 bp, Homo sapiens
tcaggagctcgagactagcctgggcaacacagtgagatcctatctcaagtcataataattataagatatgataaaggttatcttagtgagaagtacagaatgctcaggaaatacagccatcctctggtatcttgggggcttggttccagtaccccctcagacaccaaaatctgcgcata

SEQ ID NO: 159990 - DNA, 255 bp, Homo sapiens
acctgtaagatggggatagtgagtgacaatggaagtggagtttcatacaaatggatcagagagttgatcagtaagcaccgactgaatggcagacacatggctagtagtgggagacgctaggtgagtgatgtatttgccgtgccttcacaaaatgtgtggctgtcaaatggaaggatgagttagaaggaggaggtgtcaaagtcagagagagtaattaaaacacagtctttactcatgaggcgattagagcctggg

SEQ ID NO: 159991 - DNA, 350 bp, Homo sapiens
aggccccaaagtccccactcttgcattccaatcactgctgagccatccccaccccctccgctcccccatgtgccatgagcttgggtagacacatgcacgcacacactggtccagctcactccacatcaccatcaaggaagcagttccagtggaagtgtcctgggcacatctcccctcagtgagacctgaatgtcgggctctcctgccccagctcctcctccctcatcataagccccatcaggcctaccaagagataggaagactcggcattaaaaatacatcagtgttccctaattaatctctaaagtttacttggccaggtgcagtggctcatgcctgtaatgccaaca

SEQ ID NO: 159992 - DNA, 525 bp, Homo sapiens
ttttatagactgagcaatccaggagagcatgatggtccctaaaataactttcatgccctaactttggaagtcacatgccatccttttgtttatatcctattggctatatgagtcacttctatacaagggcatgaaagctaggaagcatggattattggaagccatcttagaagctgtctatcacattcatcatcatcatcatcatcatcatcatcatcatcatcaacttttgaatgaatgaatgacttaagcaatgagaaatatacaaacattaagaaacgtgctctctagataaaatttctttaaagggaaaactatattttagatgtgctttcttcactcctgacatgacattctttactttttagttggaagtgggcaacaataatttctacctaaacttaatgccaattaacacagtaattacaagacagtagctagtcttacatgataattgatgataattgcttcctgctttaattgccttataaacaagactgcaatagcaatccaaacatttcctca

SEQ ID NO: 159993 - DNA, 266 bp, Homo sapiens
catcccttacttaaacgatatagaaattacaaaattttagctgaaaaatggaaagattcactgggaaacaatcgctacatccagatgtttaatttctgtcccaagacagtggggtgacgtctcagtgccccagaagacaggacttgaatgagtacgcggatgttctgaaaacatttgttttagttgactatagaaaaaaaatttctctcaggccatattggggcaagagagctatgaatatgtggggaaagtgccacgtggcagtt

SEQ ID NO: 159994 - DNA, 452 bp, Homo sapiens
tttttctggatatctttctctgagaggcttctgtccttcccctaattccaatctatactcacttctctctgggcctgctgccaccacagctgctgacctaggctttcatctgtttgcaggatcccatgttttcttggtttactttttgttttagctggaatatatcttcatgtagcttcctaagaaaaggttgtagtaggtaaactccttccatccttgagtggttaaaaaatctttattctgcctccatagtttggctgggtacaaaattctacattagtaatcattttcccttgaattttgaagataataccttatcttcttgctttagtgttaccagtaagaagtctagttttcatttagttgcaggtgcccagtttttccctctctggagacaggatctttttgtcttgaaaagtaaaatgctatgtctctaggtttgtttttttcac

SEQ ID NO: 159995 - DNA, 910 bp, Homo sapiens
caagttcctgagtcaacgactagtgggatttctatttcacagatgaggaaacttactgtattttacccattatcaggcatgcattttccccaaatttcaacataattcaaagtggaatctcgcatctctgcctctcgcaatgataactgggagtactgtcttcctcctccttcttcttctttttttttttttttaagagacaggggtcttgctctgttgcccaggctgaagtacagtggtgcaatcatagctcactatagccttgaactcctgggtcattcaggcgattctcctgcctcagcctcctgagtagctaggactacaggcatgcaccaccacgccccagcaattaatatttttacgtttttttggagagacgagctctcactttcttgcccaggctggtctcaaacttctggcttcaagcaatcttcccaccttggcctcccaaagagctgggattacaggcgtgagccaccacgctcagcctgctgcctccttcttagtggcacatccactcacggtgtgccttaccctagaggggatctcaaagtgaatgacatgctcagtgcacaggctgggacctggctcagcgtccctccggaatttgagcccatagctgctgtgcctgaccatccattaagggaacgactctccacacctctcagcccagcccgactcctgcacggaggctcactcagggcccccaggactcaggagcacaagtcagcaacgctgccatcccacagcctggccagtgcctaccctggcaggcagagccttggatgtacccaaccaaggacagccaagctcagggccatgattgtctgtggagagatggctgcaggggtcagccacatcctctccgggaaggctttcctgagagccagacaagcaaggagacagtcag

SEQ ID NO: 159996 - DNA, 426 bp, Homo sapiens
tgacatattacactgtcgagttcggtacctgtgggtagcacaagaataataaagaaaagtttaaaacttcaaaccccctagcccaaaaaacaaaaaaacacagctgcacagtcaccacaaaaagaacaaagcagttctaatgacttttttgagttgttgcttttttacacactgtgaaactttgttctctaaaatcagttattagaaatttgctgtttgaaattctatcagtaagaaatatcagaaagactgaaatatcccactttcacctggagggcttatgtaatattttgacaccaagaagaagtatccatttacaacccaggtgctgagtttcaaagaaaagacttctgacacaacattccacatctactcaaatttactgttttccaaggaaatgcgacaccgtgttgtgctcaccaggta

SEQ ID NO: 159997 - DNA, 363 bp, Homo sapiens
gcaccacatatgctcaaggtcattccatttatgaaacaggaataataaactatgatttttaaacagctgtattgggtaagcacaagaataataaagaaaagtttaaaacttcaaaccccctagcccaaaaaacaaaaaaacacagctgcacagtcaccacaaaaagaacaaagcagttctaatgacttttttgagttgttgcttttttacacactgtgaaactttgttctctaaaatcagttattagaaatttgctgtttgaaattctatcagtaagaaatatcagaaagactgaaatatcccactttcacctggagggcttatgtaatattttgacaccaagaagaagtatccatttacaac

SEQ ID NO: 159998 - DNA, 519 bp, Homo sapiens
ctcggggatgcgatggaacctcactacctgataagcaggcctcccagggctctagtggcaggggagccaaatgggcagtgcggagctgtgagtaggaggggtgttccgttggctgtgagcaggcagctgcttatcaggtagagagggaggccagtattcggggcagaaggtgtgccaggtgcggcggcacagcagtaagccaggcacagccagattggggcacagagaataggctggcttggttagaactaaggcttcgtgtcacagtacaggaggcttagtgccacaccgcaggagccacgtctgccagggtggagaaggcagattcactctgaatcagtggtcttaaaaagtatggtcctgggggtgccctgacccatttcagggatttgataaagtcaaaactattttcagagataccctggttcctgccttttttttgctgtgctgatggcacaaaagcagtggtgggtaaaactgctagcccctcaacgcgaatctaggcaggggccccaacat

SEQ ID NO: 159999 - DNA, 177 bp, Homo sapiens
acgggagggagatcttgtatcctaacaacaacaaacccaaaacacaaatattgctgacttattcattatggatttttagattcaaaagcctaacaaaaggcacacgaaaaattataatctaattcacatatcgtgcactgtaacgttaacagtaaccttcttcaccccattaaatgt

SEQ ID NO: 160000 - DNA, 559 bp, Homo sapiens
tggcaaggctgtggagaaataggaatgctttcacactactggtggaaatgtgaatttgttcaaccattgtggaagacaatgtggcaattcctcaaagatcaagaaccagaaataccatttgacccagcagtcccattactgggtatatacccaaagaaatataagtcattctattataaagataacatgcacgcgtatgttcattgcagcaatattcacaatagcaaagacaggaaatcaactcaaatgcccatcaatgatagactggataaagaaaatatggtacacacacaccatggaatactatgcagctataaaaaagaacaagatcatgtcctttgtagggacatggatggacctggaagccattctcctcagcaaactaacacaggaacagaaaaccaaacactgtctgttcttacttatcagtgggagttgaacaatgagaacacgtggacacagggagaggaacaacacacactggggcctgttggaggggtacggggaaagagaaaatcaggataaatagctaatatgtgcagggcttaatacctaggtg

SEQ ID NO: 160001 - DNA, 271 bp, Homo sapiens
tatattgcttaggtgtcataatttcactaagaccaacttgaactgattccacttttgaaatctctgcccttattttatttccattgtctgtctcctcagggtcaagatcttgtggctgggactatcttgagtctcctataaaaactattcttgccgggcgcggtggctcacgcctgtaatcccagcactttgggaggccgaggcaggtggatcacgaggtcaggagatcgagaccatcctggccaacatggtgaaactccgtctctactaa

SEQ ID NO: 160002 - DNA, 245 bp, Homo sapiens
tttctaagtaatgagaaattgttaatcttattattattaaatttaacttttattccattatgatcagagaacatgctctggatgatatccattttttaaaatttgttgagatttttttcgtggctgagaacatgacctatcttggtgagtattccatgagtgcttaaaaaatgcataattctactattctgtggagcattctacataccaattagattctgttggttgcttgtgttgttcagttc

SEQ ID NO: 160003 - DNA, 701 bp, Homo sapiens
atactctaacattaagaaaaatatcagcaggtgaatttatgaacggtgcggtattaaccaaaggagagctctgatggctttctccactggcccaattctgtgtcatctaacacaattgttcccaaacacggctgatagcaaagataatctggaaaggacttttttaaaaaaaatacatattctgattactacagggttaagataggggaaggaagcactatcagaatctcactttcctaatgtaataaaacgattgtgtgtgtgtgtgtgtgtatgtatgtgacaggtcctcctctgttgcctaggctggagtcccacagtgcaattatagctcactgtagcctccagctcttaggcacaagcaattgtcccgcctcagcctctcaagtagctgggactacaggcaagcaccaccacgcctggctacttttaaatattttgtagagataggagtctcactgtgatggccagtgtcatcttgaattcctggcctcaagcaatcctcctgccttggcctcccaaagtgctgggattatagatgtgagctgccgtgcccagcctagagggtttttattttttttaagtaaaagctttattgagctataactcatacaattcaacctctcagtgtgtacacttgagcagtttgtagtctattcacagagttgtgtaatcatcaccactatctaatgttagagata

SEQ ID NO: 160004 - DNA, 391 bp, Homo sapiens
gagccctggaggtcgaggctacagtgagccatgtttacactattgcactccggcctgagtgacagagccagtctgtcacctgtctctaaaaaaataaaaaataaaaaaaaaatatgagccaaatttggcataatgtagatttccatcattaaaacaaaactcacagaaaacagcaagatttcaaagccagcatgcagtgattaagatatccctttggagtcgggtccttgctttgcctccgcaggctgcgtgacctggtgcttaacgcagttaccacatggtggcgccacgtcagctgagagcagaaatagaaaggtccccgttcttcactagtgcctggcgaggggtctgtttacatgcatcagaacacctgtcctgggttttgaggact

SEQ ID NO: 160005 - DNA, 325 bp, Homo sapiens
caccatgctgcctctcttgacatgaagaacagagaaagaataaagtgtgaagacatgccgtggcgattttaaggtgcacagactttatctgttggaggcagaaggatgcctcgctggaggtacgagagcggtaaggttgaaagagaaccagaacattagttcagatgttggctgtggcgtgtaccagtcaagggacttaagtgacttcaccctgagcctcactttcatcttctgtaaaatgataattataccataatgtcaataatattaggttgatgcaaaagtaattgcagtttttgccattggaaataatggcatataaacc

SEQ ID NO: 160006 - DNA, 391 bp, Homo sapiens
tgcagggactacaggcatgagccaccaagcccggccagtaacctaacttcttaaaggtaacagttttatactcgttgaatggttaagaaatacataaatactacaataaatatagcattttaccttgaaaaaaatgtgcagtttgcttgtggaagtgggtatcaaaagaaaggcagtttgtaagttattttgaagtgatggaaggaacagtgtctgaaatcagagggaaagttgtaacaccagatgtggatgggtatggctcataacatgagttacaagtagatgtttaaggtgtgtgcattttgtatattcctgcatggccgagtgcacccaagtgttgttgtctgcattgaccgagtgttctcactgatgaaatctggcataggcaaaa

SEQ ID NO: 160007 - DNA, 567 bp, Homo sapiens
attgagtttgatgtctatttattgctatatatttgcatttaaatacagaaactatatatttttttcttttttatgacccagtgtgtctttggggatagctttatgagctctttcttgaacgcttaattatttctttctaggtggctttgtcataggctgtcatgcttcattgaggtatcagctcagctgatctgttccactttctcttaggaaaggcaccattttggggccttcagtgggtaacagatttctgaagcttctcttagccccattctggcaacactgggctgatttacaaccggcaatatggaaaacctccctacacagctgcctcagctgcatttgaactactgcctgagagtctctggctgccttgacactctaacagaccctggcggcaaggcaggtaccgccttctgctatgctgctgatcattgctgaaaagttgcgtaagtcatgccaattgtttataacatgtatttaagccgtgtatgaacctgggagtcatgagtctgtgctcttatttcaatgtaataaagagaagaagaaatactggatggtttaaat

SEQ ID NO: 160008 - DNA, 327 bp, Homo sapiens
tgtgtccatgccctgtgttgtcattggaggtcacatggggaaaagcaatgagccacttttatccaatgcagctagggtgttattaacatagactgagtggggggcctgaatccccacttctacccagtagtactatggggcacctccccaactcaagtgtcagtggaaactaaatggagaaccttgacttacattcccacctggcaataatgaggaggcactcctccttctttattatcccctgccaaaacagttttatagtaagcctgctaaaacagcagatctaaatgcaatccagagtctcttcacaaaattacctaaatattt

SEQ ID NO: 160009 - DNA, 374 bp, Homo sapiens
gctgccctggtatcagcgtagtaacaattcaggcaagaggcatcaaaggaggctaataccaaagtgtggaagtggaacaaggaacattccaggtattcctggaattccttcagttcctgggattccttaaaatacctattaactacaaaaacgtagatgatgagtaatttttctgaaggttctggtatcagctgtaagccgaagtccttgtttcctattgatatgttacgaaaaaacaaacaaaaaaaaacaaaaacaaaagccctccgtccggggggtggaagtcaagcataccctactccacccgacccgaccagacccgaaaactccgtgcgctgcatcgcttggccaggccggggcctcccagaccggaa

SEQ ID NO: 160010 - DNA, 495 bp, Homo sapiens
ctagaatgtagaggttaggatggtgcagtggaaagagccctgggtggggtcttgggaaacttgagttctggtcctcactcttcttgggcccaccttttaacttgtaatgtcttagtttccttacttggaggtaaagagttggcctgaatcattcgtgttcaacccttgttgtatattagagtcacctggggaatttgatgcctaagccatgccccagattaactaaatatttatccctggggatggggtggggcactggtgtttttaaacaatccccaggttgattctcttgtgcagcccacattgacagcttcaggactaaggatctctaaggtcctttacatttctaatattctgaaagtccatgacttaaacccaatgtgagtgtagctcaaattttatgtagtgacagatccagtgatcactcagcccccatctcaccccagcaaagaaccctcaactcttccatatagttggtcagttatgtggtttacg

SEQ ID NO: 160011 - DNA, 457 bp, Homo sapiens
tggcagggaaaacggggtgtctctggctttctccagcccctgaatgaatgcgactttcatttatttacagggcatccatgtgctgctggctgtatattcagattccccaggctgtaccagggcaggaggaaaatgaatcatgctcttgaatgcattaagtaagggtctaaatttagtcctcctttctgcttctctgagtatttttacaagtttagatagtaatgtgaaagcagaatgtccaaaacttactttctaccatgacaacttaatattatctagccctttccattcactccaaattagctatccaatctacttaatgcctgggttacttttttttcttactgcctagggcttttccatctaaaattaataggtagtctggggtaggaaggtttttgttttgtttttgctttatttatgtatgtatatatttagtacaaaggtttgctataaa

SEQ ID NO: 160012 - DNA, 449 bp, Homo sapiens
gtgctgaccaaggaaacggagttcacgaacttgggtgtgttctggagacagaatcagtggccttacggacaaatcagaggataagaggggggaaaaaatcaagatgacttccaagtttctcacagttaattaggttagagtgtcttacaaaagacgggaaggactggcaagaatcaggattcaaagatacagagaaaccagaatcaccaactgaagagaagctggcttttgtctctttcttcaaaaaggatggtgctttgaggtatcacagttgtagtttcctctgaagctgtctaccattgccatctactgatgcaaactaaggataaaggctttgggggtaatttctctaaggcttcaagtagactcaacacactaaaacagcccaacaaggcagagcacagtggctcacacctgtaaatcccagaactttgggaggccaaggcaag

SEQ ID NO: 160013 - DNA, 215 bp, Homo sapiens
ttcagagttctttcccatcagctcaattcctcctgttttgttttaaaggactcttgagactttcttttgccctggagcagctgcagtgacagtcttcccacagttgctccttgagaaacagaaatgatgttgtgccagggacaagccaggctcctggcctgacatacgctcttgttttgttttggtgaagactccactgggttgctcggagtgca

SEQ ID NO: 160014 - DNA, 373 bp, Homo sapiens
tcacttgcagaagcttcccagttggtgtctgaagtcattggtgtttttagaaatagcaatttctgtatagtgttggatctgaaactgtgttaaagtgggttaaagaagtgagaattctaccagtgattcttaacctctataactacaactgccaaccaagacaaaataaagtgctttttattttcagagtttctgttataaaaacactttgcttttttaaatataaagttataatttcgaatgtagtttttttaaagtcccatatgtctggatattttgatcctcccctttaatattaaaacctaatatttcaagacagttaatgatagaggtcaagagaggaatcagaagcttaagaggaagacagagtaag

SEQ ID NO: 160015 - DNA, 307 bp, Homo sapiens
cagctaggatgtgaataagctgggcatcgctgtctaggtgtcatcccaaatgtcacctcccagagaggcacctgaccacacagcctggcgaaaggaggtcgctcccacacttactctgtgtgtttcaccccagcttactgtcttcatagcacccatctgcatctgaagttacctgcctgcatatccatttccttggtgattatttatctcctgcacagaaggcaagctatccaagagcagagtcccttgctcactctgacttcccattaggagaaaggacccaagccagatcttggtcaacaagcaa

SEQ ID NO: 160016 - DNA, 270 bp, Homo sapiens
acaagatcaatggctcttcaaggaaataataggtatggctgaatacaatgaaggttggcaaactaggacccaagggccaaatctaaacatacccatctgtttacatattaccttctatgacttcttttgatataatggagtagttgcaatggagactttatgctataaagctaaaaatatttactatctagccatttacacaaaaagctggccaacccctgatatagaataaaataagttagaaatctttcaaatagatgcccataatca

SEQ ID NO: 160017 - DNA, 308 bp, Homo sapiens
cctctgatgtgtccattttacttctcttctcctgcctcagcttctgctctgaactctgtctctaacttacaagaaatcaagctcactggattctgagctcttcggggtcaaggactgtgtcagtagttcatgtctctttctagagatcacagcttagtatctggcacagagcagatactcagccaatgccaaatgattcatttgccagaaggctgaatatcatccataatcctagtcaatgcaaatacattttgccggtggggtgtgtttgtcctctgaaggcgttttcccaggctttgtaaatacat

SEQ ID NO: 160018 - DNA, 521 bp, Homo sapiens
caatgggcgttcagggggtggggctctgtattcccttagcctcgcagggcacaccgggctgctcgaatctgcaaaaagccaagtggccagtccccagattcccggccggtcctagagcccacccgtcccaccggcgccccctcctcacccctgtcccagggcgttaaagagctgcgtgcaaagggagaacttcttgctcccgagaccctgagggaggaggggagttagacagcaggccgctcagagcccgcagaaaaccggtccggctgcctcagccttcgcgaagccaggacccggcctctaaccccctccctcgctagacaaaagtttcccctgttcgggagcaggggagggggagggggcattcctcgtgagtgacattatccgtgacctacagctgccgcgctgccctcgcccgcaccccagcctgcccccggccccgcgcggccccctaccctttgtcctcccacccccgcgcgcggggcccggccgactccacccgcccgcccggcgcccgcccg

SEQ ID NO: 160019 - DNA, 290 bp, Homo sapiens
ctcactccgtcacccaggctggggtgcagtggcgccatctcaactcactggaacctctgcctcccgggttcaagtgattatcctgcctcagcctcccgaatagctgggattacaggcgcgcacaccacgcgtggctaatttttggatttttagtggagacggggtttcaccatgttggacaggctggtctcaaacacaccttcactttctccactggaatttttgtttatcatgtaaccagtaacaatattctcatattcccatgagaagaggttgaggaagaaaagaat

SEQ ID NO: 160020 - DNA, 424 bp, Homo sapiens
ggctcaagtgatcttctgccccagcctcttgagaagctgggactacagacatgtgacaccaagcctggatagttttttaaagaaattttgtagacactgtgtctgcctatgttgcccaggctggtcttgacctcctgacctcaagtaatcctcttgcttgagtctcccaatgtgctgggattaaatgtgtgagccgctatacctccattttcatttctgattttagtaatttgaatcttctctcttttttcttagtcaatctaataaatgattgtcaattttgttgatcttttttgaagaaccaacttttggtttcattgattccttctattgtttttcaattttccattttatttatttaaactctaatccttattatttccttcatgtactatctgtggtttgaggtggttctttttctgta

SEQ ID NO: 160021 - DNA, 804 bp, Homo sapiens
gaaagccacactgtaaaaatgcttgcattggtttcagatgagttcacagtctgcaactacaaatgatatgcccctgtgtttgcttttgctaagatctaagtcaaaatttgttaaaggaataaagtaactgataatgggtgatgtcggaacttttgtaggagctcccgattaacaaagtgatattcagaaacacattgtcttcttggcctgcctgcatatatatatatagatatatagatatatatagatatacatatatatatatgtgtgtgtgtatatatatatgcgtgtgtatatatatgtgtgtgtatatatatacatatatgtatgtgtgtgtgtatacatatatatatagtgtgtgtgtgtgcatgtgtgagagtgtgtgtcctatctcttataattaccttatgaatcagtaagataaccaagaaggtaaacatagccattcctcatgattgcaagtggcatattttttctgttgcagcttccaaaatgatactatgtttatagttgcagtagctgttcctttattaatcactaatttcagggctttatgtgtttgttgcaagacaaaaaaagaagcttggctttcttgggtgtgtgtgtatgtgtgtgtgtgtctgagtgtgtgtatatatatatatgtgggtatatattcatacatatagataatttggaaatcttttttaaatagcaaaaaccgtctccatgtgtatgtgctggtgctcttaaaactttagtgtgtaattttaatttttatgacatctgtgaaaactttatatgaatataaaataattcaaacaa

SEQ ID NO: 160022 - DNA, 293 bp, Homo sapiens
gcagggcccttgaccactttgctatttaccatcatacctagataggactcttccttaaggagtccttccttgcttcccaggaggttgctggtgttggatttatactgctcctctccccactcctgcagattctccagcacaagcaagcattttggataatgattgaaaatattgaagcaaaatgtagttcggtgttgttaccttgttctataagggtttgtggttgtccattgtgagagaggaatttgatttttcttgtgactgctttattaattaaattgatcatattgcat

SEQ ID NO: 160023 - DNA, 247 bp, Homo sapiens
cgcaaagaagtgagtggtgggctgctgggattctggggcctgagtgggactggagctggggggccctgagcggcccacccttccaggaatgcgatcggacagcaggagggatttctcagcagccctggcggtgccgctgactcactgccagcgtctgtgatcaactcgcctttggagagagagcattgccaagactcccccaccaccagcctgagctgggttcaatgcgcttcactcccaggacgcg

SEQ ID NO: 160024 - DNA, 243 bp, Homo sapiens
caaaaagaagaaatagagaaaaagaaaacatttgaccaattcctgccagcacagctccttagttctgggctatcttcttccatggagacaaatagataacctgtgttgaggtcttaagatttgcaaatgagagtcctaaacatttttctttcgagtaacatcagagaaggccacaggttttcctccactgaaaccctgtataaactaaaatttaactccgaaactttacttgggctcctagaa

SEQ ID NO: 160025 - DNA, 509 bp, Homo sapiens
agatgtcagagcctttcacaggggtattagccttttcagcagtttccatcagccactcggatatgctatggaatcagtgttagttttttcaggagccagaaaacacactgccaccttatggtagtgacaagggatggtgggatccgtagagtcagcatgactttccaaaaggttgaggaaaagagaaggattcaagcagatgcctcaatatcttgagagtgtgcccttggagggaagatgcttgacccctcactggtcaacttactccagtttcctgctgggaaggaggaccaggagtgtggcacccttgcagactttgggagggtgctgagggctcactgcccaggcaatgccaatgctattgccgatcttttccatttataggtgaggagttagaggctgggcaagttaacctacttgctcaaggtcacgcgggttataaataatgaagctggacttgaaacccaggttcttgaactctgggcactctcccccaggacgctccctga

SEQ ID NO: 160026 - DNA, 480 bp, Homo sapiens
tttgaagcaaatcccagaaattatatcacttagttcataaattaatagaacctctaaaagataagaattgggtttgtgtgtgcacgtgtgtgtttttactatcacaataccatttaaattcagcttggaaacactctttattactcttggggaagttaggaaaacgacttgtacttctttccatgaaggtttaactgctgccagaatttctttcctgtaataaaaaactagaaaatcaaacacaaaatatgtaacaactgttttcagatagcagacaacaggcaatgtaggactgtgagacctgagaggagggaaatcaataaggccggcccaacaattgtcccagcttcctctctgaggctgatttcaggccaaggggcaggaaggagaactgaaacagagcccagccaactcactgaattgaggaggcggagactggagttaggggaaacccactgggatttgcaagacagaatatca

SEQ ID NO: 160027 - DNA, 434 bp, Homo sapiens
cccatcaattcatggttttctatcctttgagggtcccattttgcaaacttgatgcaaacgtgtccaacggtaccttcttcgagaaaacacccagtgacacgagatgcctatcctgcaaggagtgctggaggcccagggcccctagagtcagaaacataggatacaagtaaattcctgtcaacaggatggaccatctggtagaggacataatgaggtttataaagaagcctcctctcctacctccaagactgacttcttcctagagtcatacctaaaagatgaactcctaaaacctcacttggaaatttgcctggtttgccaggtgaacctggtctcaggcattcacagccatcacagactacaaaagccatggtggcctgcttattattgggtattccagggaaatagcaacacaggcctcatctggataaact

SEQ ID NO: 160028 - DNA, 402 bp, Homo sapiens
acctgcagcgatggaggtaacaaacttgacattgacggagaggcttagattctcctggaccttcaagaccagtcctgcgttgcttgcgggattggaagggctgagcaaggactactgtcttggtcctgctttctcaatgaagtagactcttccagggagctgttgaagtcaattatctactgaatatatggcaagccagcccatccatattgccctctccaaattataagagtgtggacgtggcaacatggtgggaggaagatgaggttgaaaggctcctatttccttgggtaatgagccatctgtgtacaggcctgctttttacttctgtcctcaggatgggtcctaaaccacacattctcactatctctttctctctctctctctctctctcttttgcat

SEQ ID NO: 160029 - DNA, 779 bp, Homo sapiens
aaggctcatggattgggcctgtgtgaaactggtagatctcagcatttcttcctctgttacctccatagaagatggaggttgctatttgatgcaagtgactgggaggaatcatgttatagggttaaacttgaactttctttgtctctttaaagtgggtaatttacaagctttgtgacttaattttattttcacactcttcagatggattggaacacaatgcctgtcaaaactccatggctgaaagccaaagtccgcttataaccagatgtaatcagacacagtagaggctagtggttatgaccttccactccagaaccagactgcccaggtctaaatgctggtttcaccactgttagctgtgtgactttgagaaaggtagaaagcctctctgggcctcagctccctcatctgctaaatgggaataacaacagcacctgccttaaagggttgtcatgagggctaaatatatgagttaatatacaaaaggctctcagaatagtgccttatagatagaaaaactctttatgtgccatccagcattacgaatattttctttttattacatcaaacttgatcaccagaacttctagctcccaagagatcagaagtaagtcttaagggggagaaaggcacacatccagaggcagacaccaataagaagacaacgcatagtttaacagggaggtggacactggaagcaagaaaagcagcccaagaactccaaagcccagcacgccaagccatgcaatgcggggcagacagcctctgacaactctgag

SEQ ID NO: 160030 - DNA, 328 bp, Homo sapiens
gaccagtaagctttgatatgcaaatgcaggccattagaaactgggtctacccaatatggcaattcccaccttcctcttatcacaaggtgtgcccagtgtcatggccacctccagataactcaacatgttcaggacgtcatggcagcccacatttacatattaaaagactaaggtgggaggaccaggtttttctgtgggctacgtgaatgatgcagctggtcaaaccaatcccctgggccctatgcaaatcagacactgcctcctccagcctccaatataactgaccatttttctgcggcacacaggatttctctcttggagcctccct

SEQ ID NO: 160031 - DNA, 277 bp, Homo sapiens
aaaaaaaaatgtgaaagcatgcatcacttatgcacttctttctctttttccctcctcccagaaagaaatctagaacatatcttaccatgctccctccttccctgattgtccatggtcgctattgtgtttgcatcccatctctttcagcctggaatgttccccttcagctggtccccctgccagactccactgcagtgtctccctctcttgctattttcccaggtggctttaggcgctacctgtacctcctttgtgcctgcctctagtagagctgtca

SEQ ID NO: 160032 - DNA, 223 bp, Homo sapiens
tatgaaacagacccacagcaaaactccattaaccacctgacctccacaaacccctactttgactgggaggccacactcattctaccaaagtatgggttagtgtcaatttagaaccacgattcaaaaatcccccataaatgtgatacttttcccttccttggggaacacgtccctggtaaatgagcacttgtcccgtcgacgcggccgcgaatttagtagtaat

SEQ ID NO: 160033 - DNA, 498 bp, Homo sapiens
agctacattttcctccttgtgcaagtttcttaaactctacagtcctcagctgcttcttctataaaattaagatattaacacttacctggcagggctattttaaggattagaaatattgtatataaaccgcttaggccacacgtggtagacactaaagcatgatagttattaatcgattctttaaagggggttcttgtagagatacaataacttgttcaagcactggttttgctagtggtggaaagtcaaggcagagtgacaagcaaataatgaaaatgtgtgagggccacaaatggtgagctctgagtgtcccacgagtgcccctggggtggctatgggtctaacccacaggtcatgggataaatggggtgctgtgagttcccagctctgccaacgatattagcatgggaatccgggtaagttgctaatcttcttgcctcaatttccctggctcattttcccactgacgagggtgatgctcaaagatgggtaccgagc

SEQ ID NO: 160034 - DNA, 115 bp, Homo sapiens
aagaaaaaaaagaaaagaccttgtctctaaaaagagagagagagaaaccctgcatggacctccattcagatggccgttctgttactagaagggtccagaccaacacaagagcact

SEQ ID NO: 160035 - DNA, 401 bp, Homo sapiens
cttgatggtggagagattcgaagtctgagtggctgcctgctttctgtcttcagggtatgaaaagccatttatagaccacagctatccccttcaagaactagcattttcaaaggaaaatgcgctctgttttattaattttattaaattaaattttgtctgttcaatgtgcactctcttctcaagatgagaaaaaaatttaatgtgcactctcttctcaagaggagaaaaaaactcctgagccccctctgctggctgtattggagaagaacaggcgagtaaattggaatgatctcttaaaatcatgcacgtgctcacaggggcatagagacacctacgattacagaaacagccacatatactcacatgcctttgcatacaacatgcacacaaagacatgcaca

SEQ ID NO: 160036 - DNA, 436 bp, Homo sapiens
caacgcaaacaacttcagctcctccacaagtcttcagctgcacgacgctcaatctagaacatcagctcctctccgggtctgcagctgcaagaccctcaaactacaacgtcagctcctctccgggttttcacctccatgaccctcaatctagaacatcagctcctccctgagtctccagctgaaagaccatcaaagtgaacatcatcagctcctccccgagtcttcagctgcacgatgttcaatctagaacatccgctcctgtctggttctccagctgcacgaccctcaaactacaacctcagctcttccccgagtcttctgcagcatgatcctcaatctagaacataagctcctctctgggtgtccagctgtagggacctcaaattagaacgtcacctcctcccagagtcttcagctgcacgaccctcaatctata

SEQ ID NO: 160037 - DNA, 271 bp, Homo sapiens
agctatggaagcattaaactatattttcatcatgttcttccccgattctccaggtgtacgtactttccactgctagtacgtacgctgcctgtttgttggctttcggctgcgcgactttgtaatcttaatcttctcagctcttccccgagtcttctgcagcatgatcctcaatctagaacataagctcctctctgggtgtccagctgtagggacctcaaattagaacgtcacctcctcccagagtcttcagctgcacgaccctcaatctata

SEQ ID NO: 160038 - DNA, 415 bp, Homo sapiens
tcctgatgttacttagtaattttccatccattgacccctaaccctgctccttggctataaatacctacttagccatgctgtattcagagttgagccctgtctgtctcccccactgcaaagcccagttgctgcagtggtctctatacctattgcaatggcttcctcactgtgctttaacaagtatcattgaataacttttctttaacaatatatatgtatgtgtgtgtgtgtgtgtttgtgcatgtgtgtgtgtgtgtattctgtatattctaccaaaagtttgagttcatatttaggtctttaattcatctggttttttgtttttttgtgtttttttttcagatggagtttcactcttgttgaccaggctggagtgcagtggcgcaatcctggatcactgcaaccttctcctcct

SEQ ID NO: 160039 - DNA, 279 bp, Homo sapiens
taaatagctggattttgattttgttttttaaagcctcaggatgtaaaaagtttctttattctattcctgggtgggtttcttccctaaggtcacaagatcaaatcaaacaagataggtagactggttttaaattttaaaaatgaccacctgatgctatttggaagctaatatgaaaaaagatagtgatgctgagttcagacctcagggcctgtggtacaaaaagtactatattgtttgagtcacacaaccatagaacatattaaacctcttttttataga

SEQ ID NO: 160040 - DNA, 159 bp, Homo sapiens
gcctgtcattgggcacaggcggcagccaggagaccagaggatggggtgtggcttgggccttgtggtcagaacaggtgagatggtcagatgcaggacgttctgagggcagagtgacaggatttgccagatggatgtgcagtggatgaagcgaaggagagg

SEQ ID NO: 160041 - DNA, 234 bp, Homo sapiens
agggaggtctgtgagaaccagaatacagtgagaatccagggtccttccttcccctaaacagcctttctcccagggttccccatcaggctgagaagcctgggataggtttccgaatgttggagacaggaagtctcccatacactgagaatcactggggttacattagagcctgcagccagagtagcagagctaatggaacgattcctacattaactgaattcctgggtgagtgaa

SEQ ID NO: 160042 - DNA, 227 bp, Homo sapiens
ccactccctgtctctctccctttctcaggccaccctaatgcctgagaccaaacaatattgaaattaggccaataaataaccctgcaatggcctcaaagtgtccaactgaaaagaagaatcgattcagcatgacttggtcaataacaacaacaacaacaacaacaacaagtcaaacatctcctacattaaattttaaaaagctagaaattgttaagcttagtgagaag

SEQ ID NO: 160043 - DNA, 433 bp, Homo sapiens
tcaagaattgaattttccacatcgccagctgcagaaacagcctgctgtaaccctaagaactgttttacctagtagctgctgaaacaacctgccttgactagtcttacctaccgccttcactcaaatcagagtttgcagctcccaaaagcttctctagtgccaatgagcttcctttccaaacaatacatgtttctcaagtaaaacccccaacctctcattgctcttcagacatatggaagatcacaacagtctgtgtgtaggctctgaattgtaattctatgattctcaaataaaacatttaatttagagatttgtctctatattttattttgaatttgacagtgtacacgaaacataaataaattttgtgtttagacttaggcatcatccccatccccaagtcccaagatttctcattactacatatgcaaag

SEQ ID NO: 160044 - DNA, 161 bp, Homo sapiens
tcccagcacagagtaggctcataatgaatgtatcttgaaccaactgcacctctgattctgacttcacttctatctgttgtggtggttcccccgctgttcagtgttttcacctatcctgaagctgtatttcactgcacttttaaggcatttttttttttcca

SEQ ID NO: 160045 - DNA, 415 bp, Homo sapiens
ataaaccttcctttcacaattatcattgatattacatctgcaagactttcgtacttgtaagtagttttaagaatatttgtttttatttttttacccacatctgcaaaaatgtgtgtggatatctgcgaattatttatggatatacaagtttctgaatgcaagcactgaatgtgactctacacacattcaactgagtggttctttttctaatcaagtaagagcagtcagtacaagactcaaaatcacagggggagccaaacttaaaaaaaatctttgacaagaaatgagctaaataatggctttctctttgaaataaataggggctattttgtcttgatctggggccatttgcctccatttccccccaactgaacacatgtacttgtgtctgtacacacactctcttacataggct

SEQ ID NO: 160046 - DNA, 389 bp, Homo sapiens
tcttgttgctcttgagtatcccactagtccacggttggtctagtccacttgttggctactagttcacggttggctgagctgggctgagctgagctgggccgagcaaggctaggctgagctgagctgagctgggctgcgctgagctgggctgggctgcgctgagctgggctgggctgagctgggctaggctgggctgagctgggctgagctaggctgggctgggctgggctgagcggggctgagcggggctgagctgagctaggctgggctgagcggggctgagctgagctaggctgggctgggctgggctgagccaagctgaaccgggttgagcgtgctgtgctgggctgagccaagctaggctgagctgagccaagttgagcttagct

SEQ ID NO: 160047 - DNA, 355 bp, Homo sapiens
ttttgttaccgatacagctaccaggacacctttctcccttttgaaatttccatggctcaacgcttcctactgactgccagcattttcggattcttcgggagagcctttaacatgtttgcacttagaaacatgtccatgagaatgtttgaggaggacacctacaattcattcgttgtttcaggaattctcaacattgctgctggtgtctttaacttaattgctgtgctccagaactacgatgccgtcataaactcacaggggatcaccttcctgccatctctccaaatgcccttcaagccagatgtgcaggaagttggcactgccattcaagtggcagggataggtgtcttgccga

SEQ ID NO: 160048 - DNA, 507 bp, Homo sapiens
cttaaccacatgtttctgagcatttcttagcccagttccccagtacatattattaacagcacctcattatttataaaattcttgggtgggcacagtggttcatgcctgtaatcccagcactttgggaggccgagcaggtgaatcacctgaggccaggagttcaagaccagcctgaccaacatggtgaaacctcgtctctactaaaaatacaaaaattagctgggcacagtggcgggcacctgtaatgccagctactcaggaggctgaggcatgacacttgctcgaacccaggaggtggaggttgcagtgaccagagattgcaccactgcactccagcctggggaacagagcgagactttggctcaaaaaaaaaaaaaaaaaaaaaaaaaaaaaaaaatttatgagaatttttttttttggaaaaatggggggggtacccatgggaaacccttttggggaaaaatttaggccctctcttaaaaagggaagggggcattttgggctttt

SEQ ID NO: 160049 - DNA, 317 bp, Homo sapiens
cctactttatcgaggaaaatggattcatcacttaatagtatcccccaacttcctacccttggcactacacatttatttacatccatatacgctcacctttactctaaaatccttcctcctgttccaggaaaacccttgatcctatgccctcaaactaattacctcctgcctcctccagggcctgcctccaccagcatctcttttttttcaataccccctttcttctgatgccttcctctcagcagatcagtatgctaaaatctctcccttgaccttgcactgctctggttattgcccagttcctctcttccccttct

SEQ ID NO: 160050 - DNA, 280 bp, Homo sapiens
aagattattgtcgaagtaaaaatatgctattagtgaaacactgaattaagtttctatacacagaaagttggtatacacagaaagttcttaaactttcagtatagtgactataaagtaacatgacttaaaaaacaaaaaaacaagcatacccacaagcataccaaaacataaatccaaaagagtaattttctcctcttcagaacttatcttgggattcctttctgggaattgcttcagagcctgcatattggtggtacttgtcctttgagaatgattttga

SEQ ID NO: 160051 - DNA, 339 bp, Homo sapiens
agaatcacttgaactcgggaggcggagtttgcagtgagctgaggtagcgccagtgcactccagcctggacgacagagcgagacttcatctcaaaaaaaaaaaaaaaaaaaaaaggaaaaagaaaaacaatcaaagccccacttcctcatattttattgacattgtcaacacagccattataggttgcataacaatctattaggtggatcctgcatagttagtcctcttattgttggactaattcattccaggcctcaggacatgggcttccagcctgtggctgggcaatggggccagatgcaactcaggtggtgactcaggtgatgtggactcaggtgg

SEQ ID NO: 160052 - DNA, 361 bp, Homo sapiens
atataagcaaaccataagtaatacacatgagtctttaaaaaacacaaaaagccataatgccatgaggggttaaaagaggtaggttaattctaactgagtgggatttgggaggacttctttgagagggtatatttgagctaagctttagaatatgagtagggtctggataaggacttcttaacttgaagtccatggacctttaggtgaagtctgtgaatttgaatgggaaaaaaattacatctctattttcaccaatctctagctgacatttagtatttccttcaggtactaaggtagactacatgcacactagtattagcagaaccagtgatttttgtcaccagtacaaatcccagatatt

SEQ ID NO: 160053 - DNA, 343 bp, Homo sapiens
ctgatgaacttaaaaaagaaaaaataaaaaaaaatcttgatgttttacgaaattctaccaatttgtgttgggctgcattcaaagctgtcctgggatacatgtggcccgcaggctgcaggctggacaagctagcatactatactctgaatatcagacagatgagtgaaatatagacccattgttagaacacattagtgattttggtgtgatgtatatttaattcaatttttaaatgattacacttttagttcaactaatgattggtttaggtacttactgaggcatttacttcctaagcagatttttaaaagatggtgaaaataggaataatttttagactgca

SEQ ID NO: 160054 - DNA, 364 bp, Homo sapiens
tgataaggagtagagcgcacaacctctccattatgtacagggaagtgctcctgtactccagttactccattacacctattttactcttgaggcaaaaagagaaaccccaggcacctgaaaatctaatcctgagcacaacaggcaccagcctgaatgagtaggaaacttgaacttgcttttcttctttcacaggtctgtgttcatctgatcctgccagctacatccaatcacttcatttctcccttcctgtccttttcctatgccctttcctcattgcacaatgcttgaatgctctgctttaaattctcttcagaggaaatggcttatggataaatgtaacaaatgggaagctaaagccttgaac

SEQ ID NO: 160055 - DNA, 361 bp, Homo sapiens
cagggggtcagcagagggagctgaaacagtaagactataagcagaggaagagtggcaggaaagaacaaaactcaattcaaatgttgccagcacacagtgaattgcagggaaccggctatcatgagagagggtcccaggagtacacacatcaaatgtggtttttgaaccagaggacctcctgactgctggtggcaggatgtctctattccatgtagttatcaatgtgttactcttttctttggttgaaaggattttgggtcaggcactgatctttctttgaatatatgtgcctgttggatgcctgaacagtgagaaatgcaggaacgtggtagttagtgatggttaggagagcaggggaagg

SEQ ID NO: 160056 - DNA, 389 bp, Homo sapiens
tgtctacccaaaggtgttatgtttttattgtcttaagggggcccttcatttgatggcataaaaagttatgaccagccatctgtagttcagttaataggtcaagaatatcagcagctattgttatgttgaggtcattatttatcaagcttcaacacataaaaagcaaaagtaggccgggcgtggtggttcacacctgtaatcccagcactttgggaggctgaagccagtggatcacttgaatccggaaggcggaggttgcagtgagctgagatggtgccattgcactccagcctgggtgacagagtgagactccgtctcaaaacaaacaaacaaaaaacaaccaaaaaaaacagtacttacaatgtggtaaagagagacaaagggaaaca

SEQ ID NO: 160057 - DNA, 360 bp, Homo sapiens
tgacgaggcaaaaatcatacaatgtaatgtagggctgggtccagcaaataaccttgttgtatatagaactactttgtccatctctaacaaagaaatacccaagttcttcctaatgccctcacgatcctgcctatgaggaataaaatatcaatgagccttaacgtaataactcagtttcagggaagagtagagagtattttacaacaaatgggaatgctaaataatgaattaataattatagagaagccaggttgaataattctataaattgatatatttaccaaataagtaatcacaaagaggctctaagataaataatcataaactgaatactactcttttgtgagtatgttctcaaga

SEQ ID NO: 160058 - DNA, 443 bp, Homo sapiens
taaccatgagttgcaatgcgtgttttgcatgattgaacttttgtttttgagacagggtcttgctctgtcacccaggctggaatgcagtggcatgatcttggctcactgcaacctctgcctcccaggctcaaggaatcctcagtctcctgagtagctgggactacaggcgcatgccaccatgcacagcttatttttaaatttttttgtagagatgaggtctcactatgttgcccaggctggccttgaacttatgggctcaagtgatcctcctgccttggcctcccaaagtgctgggattacaggcgtgagccactgcacccagcccatggttgaaattatagtgcgtatatagtttgtattttgttaatctaacagtgtcactgtaattttttacttcgttatattcttcacagtcattatcaacattgcataatattccatca

SEQ ID NO: 160059 - DNA, 272 bp, Homo sapiens
caggagacggaggttgcagtgagccgagatcatggcactgcactgcagcctgggcaacagagtgagactccgtctcaaaaataaaataaaaaaatcatgaaacttcaagaataataaccatgagaatcacaacattgtagtaaaaatcgtgaaaatcaaaggtgaagaccttattcctgagctgtgatgctgtttaaaaattaggaaaaaaacctaacgcctaacatcacactacttggtgaaagtgcttgttttgttggtctacaattagg

SEQ ID NO: 160060 - DNA, 937 bp, Homo sapiens
tcaaaacaccacccagtgattgaaaactgcatagcttcggttttccggttaattatgggacactggggcctttggttgactgatgagcaggacagtagtttggacattctgcattcaggaaaatagagtggaaggcaaatgtctcccactgagaagtgtaattgcagagttggccatgatcttatttttagatggaaagttttcactgaaagaattctttttgcagcaagagaagtagcacagtggtatgctgaaagctgaggtgggaacttgtggcttcccttaccttgtaacgagcaggtttgagctggtccttcccaagcacagtaaataaatgtcactttgcatgggagaggagagaggaaaaatgcagcttcccaggccgttcagaagagcagttttctttgttaaataagtttgaaagtcataggggcctttttagttgaggactgagaaagagctttctctggtcaaatatagagttagttggcaggccccagtggttggggacctggctctgagaacacacaggccagggctgaatcctggtcctctcattgagtaatactggaacctggcaagttgtctgaacgctcccagctgttaccacatctgtaaaatggatgtgatcctagtgctaccccctcggtttcttttgaagattaactgagatagtgcccaccacagcacccagcacagacagacctgcggcacactgaggggccagtaagcgcgtggctctggccattgatggtctcatcagtgatgggaatgccaccatcggtgctcccaagtaactgattacaacaagaagcgtcttcacaaagtagtaggaatcgccttgtttctctgtaatctggaaggatttagatgatctgccgtgatcgacgtgaatgtattttctgtctctctctgactttgtccctgctgcctgttt

SEQ ID NO: 160061 - DNA, 363 bp, Homo sapiens
tgttattcctcttcaggacgaggacaagaatgggacagacggctgctctgccctcaccctgactcagaactctcttcctctgcttcttcagagtggactacattccatgaattatgctaggacatgtgcacgtggtttaattgaggttggtagcctgtcgagactgaaaacaaactgctttaaaacatcaccctttacaataaaggaactgcaagtttggggtgcatctccgagactgttctctatggagcagcatttcaaactgttctgtaaccatgcacaatgtaaaaaaccaaacggtgaccaaaccatgaaggcagaatacaacatgtcaacatgctgatatccttgcttgttccgctg

SEQ ID NO: 160062 - DNA, 601 bp, Homo sapiens
ctggccgactctacgaggaccccatacattgtctgatgacaggcaaattattagaacaaaaggatggcaaacagaaaatagtggcctgggtactgggtcacttctttgagtaggtgccccagtctgaactgccttgcttttcacttttctgttcttttctctcgagataaatgaactcctcctgcctgttaaagccactggcagtcagagtttccagtgcttatagccaaataccattctaactgatgtactcaccaataataatcgtaacttcctttcatatgacacttcatggtttcttcatcagcattatgtgtgacacacgcaaaaacaaaaacaaaaaaactgccaatgtatctatttcaagacatccccagaattctgttattaaatagcattgatgaggcagtcagccagaatgtttaagctgtcctaaattactgcctcctctgtgtttagggagtctgctcttggtcttacaagtccaaaagcagaatattacaaattcacatagaagtgatcaggatctagagacttgatttatgccatgcagattcacagggcatttgtttataaaatttgtgctggaagattacttgtg

SEQ ID NO: 160063 - DNA, 345 bp, Homo sapiens
tatttagaatttttagtagtattttgacaaatatagatgctttcctaaggcatatcattttgtaaaaattgtattgcaaacctttttctcttgattttcccttccttaacttctcccttcctttcctcccgccccttacctcctcacctctcatttatgggtctgtatatttttcaccttaagaataatgattgtagcctgggacttgtcttataaattcagttctttctaatgaggcactaaagctgtctcctggcttttgggttttcctgagaactgttaattacctttgcactttcctatacccagctcaaaagtaaattgcagagggaagagaggatgatg

SEQ ID NO: 160064 - DNA, 114 bp, Homo sapiens
ggcaatttagcttcaccacagctaggctatatgcgacactgctattacaacacacagcttttcaagtccttgctttaaacaccaattagaaaacccagaaagggagaaggaaag

SEQ ID NO: 160065 - DNA, 403 bp, Homo sapiens
cgggcagaacccctgaggtcaggggttcaagaccagcctgaccaacatggtgaaaccctgtctctactgaaaatacaagtattagccaggcgtggtggtgcatgcctgtaatcccagctacccaggaggctgaggcaggagaattgcttgaacccgggaggcagaggctgcagtgagctgagatcacaccactgcattccagcctgggtgacacagcaagactctgtctcaaaaaaaccaaaaaaagtagtgactgagggcctgtgggactctccacagaacaaagcgaatgtcttcattttaatgtgtggatcttgtgacgttgcttagcttctcagaggccttatgggaccacctttccatgtgttggaaggattcatcatttgagtgagaatgctgcttt

SEQ ID NO: 160066 - DNA, 741 bp, Homo sapiens
acaaatgagtagttcctggaatggagaagtggccgcccatctgggagacaagaaaggcaagaggggttggtgggagggagaggtggctgcacgggctgttctcattcatttgcttcctgaatcctggaaacagccccagagagtggagtttgcccactggacagatgggcacaccgcggcttctcaaggctgtccagagaaggctacatcccagcgctagccactgaggcctgatcacgcaagaagccccttcccaggctccaaaggagggcccccaatttgtaggctgtagctgggaggcgggcccctgtgttctagcactcggaaaggaatcctgaagtaaggtacccccagagtcctccttccagctgagaggggaagtagggtccaaacctcctccttcagctctgttctcccctctaccctcctaccacccctttccagagccgttgtgccagacactcaggggtagtcatgggcagactaggagatggccagacagacagaagaattcacacggaagagaggagccagcgctagccaggaatcaagctgtaagagtcagccagagagaatcaaacagggtcccctaggagtcagctagccagtcagacagtagaggccagctggtgtcacccaacagagggactgctcagtgttaaagtctgtgaggggcacggatgggcggccagacagcagaggtcaccctggacagctagccagacagcagggggctgccag

SEQ ID NO: 160067 - DNA, 915 bp, Homo sapiens
ttgctagacacgggtttctctaagagatctgtattctccacagtctgtatacagaaaagatagtctcaaatctcctctgatttagggccctgataaaaattacttggtcttctactctacaacctcaccataccccttcaggttttgaacctgggagagacagaatatggaacactttcttaaaaataaatgcatacttgacattaataagggatttacaatctattcactatgaaatcctcaggaacatgtaggtttttccaagaagtaaaaaacaattattttcatttaagtcatatgtcaattaacaatattttttacacaattaaaaatctcatttttgttatgaaatgtgaaacacatttcctttgtttttgaggcagggtctcactcttgtcgcccagactgcattgcagtggggtgatctcggctcattgcaacctctgtctcccggattcaagcaattctcctgcctcagccccccaagtagctgggtttacaggtatgtgcaaccatgcccagctaatttttttttgtatttttttcagtagacatggtttttttttttaaattttattattattatactttaagttttagggtacatgtgcgcaacgtgcagatttgttacatatgtatatatgtgccatgttggtgtgctgcacccattaactcgtcatttagcattaggtatatctcctaatgctatccctccccactcccaccaccccacaacagtccccagtgtgtgatgttccccttcctgtgtccatgtgttctcattgttcaattcccacctgtgagtgagaacatgtggtgtttggttttttgtccttgcgatagtttgctgagaatggtggtttccagcttcatccatgtccctacaaaggacatgaactcatccttttttatggc

SEQ ID NO: 160068 - DNA, 482 bp, Homo sapiens
acaagtgcatgtcctccgtggcaaatgaatatgaacatgaatttatataaatcagagcaactctggaagatcattgattgaatcatcacatttaattgcttctcttgcattccaaacacattgtgaaatggatacttcacaacgggccggaaacagaaatacataaattctgcttatttctcaatgagcctaaaaaggaaccggaaaataccactccttttccagttgatgtaacagaattgaagcagcgttaagaatgattccagaaatcaagaaactggtttgagacctaggtccaccatttactgacagcaaatggtcatttctggccatttcacctttctaagccccaagtttcttaacagtaaatcaagcattttagctatacctgatataaatgccttgtaactgcccaagtgaggcagttaagtaagtgcttggtaacagtaagaaactagaggtatgttatagtcatttggact

SEQ ID NO: 160069 - DNA, 507 bp, Homo sapiens
cgcgggtagacgagctcagaggatcccgttaggcgcgttcagcggggccaggaatatgaacatgaatttatataaatcagagcaactctggaagatcattgattgaatcatcacatttaattgcttctcttgcattccaaacacattgtgaaatggatacttcacaacgggccggaaacagaaatacataaattctgcttatttctcaatgagcctaaaaaggaaccggaaaataccactccttttccagttgatgtaacagaattgaagcagcgttaagaatgattccagaaatcaagaaactggtttgagacctaggtccaccatttactgacagcaaatggtcatttctggccatttcacctttctaagccccaagtttcttaacagtaaatcaagcattttagctatacctgatataaatgccttgtaactgcccaagtgaggcagttaagtaagtgcttggtaacagtaagaaactagaggtatgttatagtcatttggact

SEQ ID NO: 160070 - DNA, 725 bp, Homo sapiens
aatactgttgctcccaatcctactttcacaggggacagaggacagggaagaaaagtgattccaaagttttaaatcttagggaactgaaccgaagctgatgggcaagtagcatatggaaacaaatgaggagaatgatttcaaccagggtaggtcctaggtaaaaaaagttggggaagcttatacattttagggtttacgactgcctctcagaggatcaaactggccttgcacgttcttccttccctcttgcagctgctgtgaacacagcccttctgctgctctgcggagctgcccctcctacgttattcctgctgtttgctctctcctcaggattggagatacccagtacaccttgctccttcttttccttgaggctttataactttacataagggggacaagtttacctaacaacacagggaagagtctaatattaagaaatatgcaaagttcttttagtcgtggatgctggtctatcactcctgcaacccttttgagagtaacggaaagctctgttgagtctcaacttttctttcagtgggcagggctcaccaagtctctctcccggcgtagggcaggttgaccccttccatgagccacggaagaggcaatctgagcagcaaaaggtgcttctcccttagaagtggggaatataaatgctcacctggaccccagaggaagcgcctccttgggccattttcttgtacatagcctgtggaaaagta

SEQ ID NO: 160071 - DNA, 475 bp, Homo sapiens
aatctatatgacaaaggactcatatccagtatatacaaagaacttctataaacaataagaaatgggcaagagacttttaatatgcactttacaaaagaggatatccaaatagccaatatgataagttgtttaacttcattagtcatcaggggaatgcaaaataaaacaatgagataccactacacaaacatacaaccattaatttaaggttaaaattaaaaagcttcacaatatcaagcgatgatgaggatgtggaacatctataactctcattcactgttggtcagaaagtcacttagtcaacagtatctactaaacctgaaagccaagaattaagaactcattcacacatcacttcttggctttttgggttagatcaagactagtatctgtccttcgtttagcaatacaacagccaggaatttaatttttgatatattttaaactacattaaatattgagtctgttgccttta

SEQ ID NO: 160072 - DNA, 513 bp, Homo sapiens
ttcatagggatctctgatacccaaaaggattaataataactccagagggagcagaatgaagctctccattctggtgatccttgatgggtccatgaccacagggagaagtcgtgtattggactagtctagaaccctaggaggaggttgtggggaaatgagagtgggagggagaagagtggcaagtgtgcctgctccaggggccgcaggtcagcagctgcaagtcctgctgtaggtcctggaaggaaaaaggctttggagaaatcacgagtggcctttgaaagcaaaactttcggaaaatttcacagaggcaagatttgagagggtgaaagaaggcttgggtgaatgcccttccatgcattcattcatctggtagttgacgtttattgaccgcctctagaatgccagaacctgctctaggtgcccaggactccacagtttgcaaggtagacggtgctgtgcccttcttggagcccaggactccacagtttgcaaggtggatggtgctgtgccctt

SEQ ID NO: 160073 - DNA, 420 bp, Homo sapiens
ttcaaaacccaggcacagccagttacttcacccccttcccccgtgagcaaaacaacaaaacaactaacagtgtgaatcatttttcttcagctcttggtcattattaagacaacaattaggggaagtgttattctcagattgtctttttaaaatagacacattaatgatactatataaaaccgtgagatttatttaaaatattttcaatttaaggggtgtgcaaatcattaacaccagatggcatctacctaggattttttaaaaggtggatttgggatacttgtagccaaaatgtagaaatttagcttataaacagttactgtgccaacagattggtcagtgcaaattgaacgtgtcgatgcaagaggatttagagcttttgttgtccatctttcctgctaagctctggtacctccctga

SEQ ID NO: 160074 - DNA, 364 bp, Homo sapiens
attttcaagatcgattatcttaacacaaggtaaaatgcttaaacttgtattaagaggctctcagaagtagcatcgggctagtttctaaaggatcacttttagagttaccaagtttaagaacacacttctggctgggtgcggtggctcatgcctgtaatcacagaactttgggaagctgaggtgggtggattgcttgagcccaggagttcaagaccagcctgggcaacatggtgaaaccccgtctctactaaacatacaaaaaattagccgggtgtggtggtaggcgcctatagtcccagctacttgggaggctgaggcaggagaattgcttgaacccaggaggcagggaggttgcagtgagccg

SEQ ID NO: 160075 - DNA, 197 bp, Homo sapiens
cctgtctttttacttcctccctttgcttttcagcagggtttaatcttgatagacatttcaaggatcactgttctcttttgtgttttcagctaactagttgcatctatcacattattattgatttttgactctagctcttgtactaaagatctttctttgataatatccctcataataggttttatagtagattctac

SEQ ID NO: 160076 - DNA, 377 bp, Homo sapiens
tcttgcccatatatttatcctttctatgacatattcattagaaaacatactgaagaaaaccaagtttggtttgggaaaactcatggggcttcatagtgaaaggtaattctgcaaaagctactggagatttaaaaggcactaatattgaataagctgacagaaataaaccaccagtccaataatctgtttaaaattcagaattttaatggtgaccaaaaatcttattagtagcagggggagactagggaaaagggataaacgcattctgggaaagagtaaatacctgtgcactcgtgcccaaaatagacatgatttgtcctcaaccacctctcctgagtttagccctgggccacatgacaaatacaaaacagatgtcc

SEQ ID NO: 160077 - DNA, 231 bp, Homo sapiens
gtatggcatgaggctgagatcccgtacttttttttcttgacaattattccttcataagagatcctgtactttaaacaagcacttcattgtaattggcaaaaaatcaaaaataaagagttttgaataataaaatcatttttccattttacaaacatcactcaatctacttgtagaggatggcccagatgccacgaaataaaaggttatggacacactgctaatagatgagag

SEQ ID NO: 160078 - DNA, 516 bp, Homo sapiens
cctctttcttaattagttctgaactcaggagaggaagatgttatttattaacaccactccctcttaacattagacaacacctttgttttaacagagaattctatacaaatggaaaaagtgagatggtctggatgagatgctctgccaagctgtcaaccatccatgccttggaaaaacctacccactgagctggatagttacccccaggcaagtgctcgcttacagcctcaaagcctgagggcctggggcccagaagaacacaccagcctgcagacaaaggcccttgaacttctgagcctcctaaatgacaacagataccatgaaaggccttcacagggtcctcacttgatcttctgtcaatagggaaaccattagagattgatttctgggaaaaatcagacagtagtattgaaatcatcattcactcaatatgaagtttcaaaccgcagctttctcagaacagatatctaggcataccttggagatactatgagtttggttccagaccaccgcaat

SEQ ID NO: 160079 - DNA, 502 bp, Homo sapiens
tttgtgagttacctaacataattttccaaagatacagaccttttagtttgtgtgcctcatgttgtcattaaaattctacctgaagtcacaagcaccatacacaacagaattagtcccctccaatttgccctatagaagtaagttgggatctccacaatacaacttactgtctttagttttgatatttaacctcatactcctgaataatgttccatacactatttcttgattattttagttttagaaatgatccagtaacctactactatagatgataaagatgcagtccattaaccccaccacctgaaatgcacacacacatgcttatttgatagactgtaaacattattcactatttttgttttaagtcagtgttcagcgtagcttggtgtctttcatcaatttggaaatttttcaaccacaaatattctgaaactttcctctttttctaagatcacaattatatacataactgacactgttttatatgtcacttatgctt

SEQ ID NO: 160080 - DNA, 481 bp, Homo sapiens
aatcaacaagaaaaatattaggctattcctgcatgaaaaaagaatcacaaaaagtatgaacaattagttcacaaaggaaacacaagtgagtcttaaatgcatggcaaattcactcttgctcataataaaagacatacaagtcaaagctcctctgagaagattttctaccttttagattggtgataatgaaaactctgttgatgctgatatggaatgttaagttgggatacctgcagtatgtgggaagaaggggcagtggcaatttgctctttaaaaattagtggtgctcatacccattgacccaacaatttcacttctatattcacaaatacactcacacatgtgcaaaatgatacatatatgaagttattcattatagcattgtttgtaataatgggagaacagaaacaagctagatgttctaaaatagtaactggtcaatgcactacggagcttgcatggacttatattgtgtgcacct

SEQ ID NO: 160081 - DNA, 735 bp, Homo sapiens
cacctggctgcccaccccaatttcagttttcctctaagagttagccactattatcccttcagagtggatattcaggcttttctttcctggcatggacatacatatgtaaatgtacatatataaaaataattagtgacaccatgcatggtagctcacgcctgtaatcccagcactttgggacgctgaggtgagagaattgcttgaggccatcagtttgaagctgcagtgatctatgattgtgcctctacactccagcctgggtgacagggtgagaccctgtctcttaaaaaaaaattcgtatttggggttagtagtagtacctacctcataggttattatgggatcagtacagtaggccagacaaagtgcgtatgctattattttgcatgtagtaagtaccagcatatactacctgttatccagaaatttgctgaaatgtgccttgtattttctctctttcgattttgatcagtcttcctagaagtcatcagtttgagttttttcaaagaaccagttgttggttttattgattttgtttgttttctttttcattgatttctgctttactctttattatttccttttttctgctggctttgggttccatttgttcttctgtctcttctagtttcttaaggtaaaggcttagatcattgacttcagattttttgtcttttctaacaagtgttcaagactataatataaatttccctctaagcattgtttagccacatt

SEQ ID NO: 160082 - DNA, 134 bp, Homo sapiens
agtgagtatcaggtaggaggaaggaaaagaaaaacttgtcaggccagtcaccaagttagcagacagccaaagggaaagccgcctttccattacgatggattttaactctacccgccttcttcccaaaaggattg

SEQ ID NO: 160083 - DNA, 293 bp, Homo sapiens
tgatgagaataatctggctgcttctttggtacttcagttcactgatactgcgaattagagtagcatatacagaaggatgcagggggtccctaaaggaatcacagaattagtgaaaccattatttgagagtggcagtgattcttctgtcctggcacttttcccagtttgggtgcttaaacttactatccactggaaatgtgtcactgcctgtcacttcacaaagtatgtgcctttcactgcagtcaacaagctgtttacatctttgatgaaatgatggccacgcatctccatag

SEQ ID NO: 160084 - DNA, 667 bp, Homo sapiens
ctacttttcacagggtgtggcagagtacagccaaggaggacacagaaaacaaaccggtgcttagcactcagaacgtgcctggcactcctttaagcaccttccatgtttagcttgcttaattaatcttcacaacaaccctaaagaaagtctgacactcatttcacagttaaggaaaatgaggcacagacaggttaagtaactgcccaagatcacacagctagtcagttatctgaaaccccagagtcagcatggctccgtgattcctgcttcagcacagactgtgatgtcaacactgtgctagtctttacgaccgtccacctgtgccagctcaacattaaacagggccaagaaagcagctccagctttacctggagcaatgtgtatgacagtgaataactccttcaaataagaaatatgccaaaaataatctcatattgagagttgtaaattctaatcttgtaaatcaggctaataaagatataacactaagcataaatgttgaaaatgagtaacaaaaaaaggttattcaaagatctgctaagaaaaccagtaacgttaagaataaaatcctgctcgcgtctcagcaactccagagcagacaagctttaatgctgtcaggaaatcctgtgtgctggtggcacaaagaccctccctgtgtgcagcgcta

SEQ ID NO: 160085 - DNA, 534 bp, Homo sapiens
ttcccctctatatctcatacacagctttgttgttctataaccttctacaagttcctaggctggaaatatctgcctaccacaataaccttggcttttatattaaaagatgcccattaaaatgaaaaaacaaacaacagcaaaaaaagaaaagaaaaacaactagctgaggaaattggggttttgaagacatacaatctaatttccacttactagctgtgtgactctgaggtccagagagtcatagatttactcagtgtttgcatttttaaaaatggagccagtgtgacttacatgatctcacaaagatgctgtaaatgtgaaatgagttcacaggtgtaaaaaatgtttggaaactacaaagcactatacaatttattgtataatagaaatttgagaaagtatgtataaggtatgaccaaagtttatttatgaggtggtagaaagacttaaaatttctaagggaaatgggtggctctgggcacagtatctgaagagagaggcacctggtggactctgaattttgcaggtcctgag

SEQ ID NO: 160086 - DNA, 493 bp, Homo sapiens
tcattacagctgtctgagaagcagagggagattagacacacagaaaaggaggaggcaatctgaccgtgtaggcagtaactggagtgatgtggagataagccaaggaatgccagcagccaacagaagctggaagaggaaaggaacagattctcccctggagactctggagagagcatggccctggtgacagacaccttgaatccagcctactaatactgagttcagacttctggcctctagaactgtgagaataaacttctgttgtttcaagccagtagaactggtaatttgttaaagcagccataggaaagcaacacacggtaacttctttaataattcactgtcctaggtttgctgaaatcagttctttgcaggcttctttaatgattcactattctacctggatattcaatagggggaattcctcaaaatacaggacaatctcatctcagaatctttaatgacatctgccaaaatttcccataaaagataa

SEQ ID NO: 160087 - DNA, 518 bp, Homo sapiens
gaaatagaacctgtttcacatggttatgcagaagacaacaaaagatagcatacgtaaattgcacgatagctaagtactcaataagtattagttctttctaatggatagacattttttaagggaggtaactaccagttcagaataagaactaattttctagtaattcttacctttcccaaattgtgacgtaatgaaatttcagcctagaagtgtttagttaatcatcctttagagacgttgtaaagggaaaaacattgaatggaggttgggctacataaactttataaatgactttttagatatttaaacagtgaaattctttattcaaatgaaatctcacagaagcagggccactcccagtaaaacagggttggggattctagagaccccacctgctaggctccacttttgtggaccccttagggttctgaggagcagagcttggaaagtgaagccaggacataagggttctgtgtcacctctgtcacagctgactcagtgaccttcagtgagtccat

SEQ ID NO: 160088 - DNA, 250 bp, Homo sapiens
tccttatcatccctacattcagttgattaccagcttgtttcttgattgcttcaacatctctgcatctccactaacagcattctcttctctattatgaaaatctcttatttagtctacttccacttgctttccttcaatccattctcttcacagcagccaatgtgattaaaaagaagaaattagaccatattactgtggtttgcatcacactgtacttgactatgcatccaaattccgtagtgtgatctgt

SEQ ID NO: 160089 - DNA, 179 bp, Homo sapiens
agcatgtgaaacatattcatgtttcgcaggaatgtttgccatcgccttcatatctgaagaggattattccatgagcgtgatctgtaggcacacgtgtctgaataggtcctgctgtatatgtgtgcgaggacagtgtgtgtttattttgtcctcttcttgatggttgacacagtcggcaa

SEQ ID NO: 160090 - DNA, 281 bp, Homo sapiens
gttttttgcactgtcttcaggaactttacaattccacactgccgtttcacctctcagactgtagttgactttcatcctgaatcctcatcttctcacagagggtctggcacctggtaaatgcctcttattggtcttgtggaatgcatgaccacagacctgaaacagttatttcccactcctatttgtgtttatttgctttgaaagagaagaaaggtgataagaaaacaatatttagccatgtgtaatttttttaaagtttcattagcaagttcatgagatga

SEQ ID NO: 160091 - DNA, 497 bp, Homo sapiens
acatggagcaggggaatcaaactacgcaaacgtcgtgatctcagctacattacaaagaaaaagaaaatggaaggagagatgcccagatatcaacagtcatggtctttgcacagtaggatcgtggatgattttcttttcccctttgtattctttttgtattttctacagtcactgcttttataatcaaacacacatgcacacaggacgtgactgattctgttctcagagaaagctcctgagacccgtggccctggaggggtcggaaaagatgctggcctgttggtggtacagtgggggtctgcacctgagggggtgagagattaggtgactctggagtctaggggcaggccttcaactgctatgcctgccagcctaggaatgaggaagaagagggccccctgggcagatgggggtctagggtactccagacttcagccaagctttgcctaatagtggtgacacaagcccaggcctccagaggtgcctctgaggcccta

SEQ ID NO: 160092 - DNA, 442 bp, Homo sapiens
cagggctgctcaggcatgcaaagggctcctcctacttgacatattccctatctttggggcgtggggcgtgtatgtgtattggccgcatagttgctatgggtgaatggacgaagggataaaggcatgaatgaatgagttgcatgtgtttatctgctgtgcatgtgtgagtgtgagaaaaaaaatcagaagatagagacagacacagagaaggaaggatggtgctagggtttgaatgtccccctccaaaattcacgttgaaatttaatcctcagtggcagtattgagaggtggggcctttaagaggtgattggatcgtgagggctctgcacccatgaatggactaatccattcatggattagtggattaatgggttaatggattaatgggttatcctgggagggggactagaggctttataagaggaagagagacctgagctac

SEQ ID NO: 160093 - DNA, 141 bp, Homo sapiens
cctcgtgatctgcctgcctcggcctcccaaagtgctgggattacagacgtgagccaccgcggctggccaacagttatatttaaatttaaaaacaataggcagtagtgagaagggaagaaagaatagaacagggagttccat

SEQ ID NO: 160094 - DNA, 267 bp, Homo sapiens
gagatgctgagtaggcagtacattgcaaaagcctgaaattcaggggagaagtttaagctgcagacaatgtggatatacactaatgactactaatcagtagtcctgactgcacccttgaccgctagattcacatatccaacttgcctgcttaatttttcattgagataactattaggaatctaaaatatgactggttcctaataaaactcttgattccctcctaaccctaaattcatggttttgcttagctcagcaaatggcattgtt

SEQ ID NO: 160095 - DNA, 738 bp, Homo sapiens
cccgtttcgccctaaaaatctggagatgacggggctactgcttaatcatgacagtgtggggaacggtgtggacaccacacttatgaaagaacatcgctgggatggatccagacacatcagaatggttctgggagccaggcgcggtggctcatgtctgtaatcccagcactttgggaggccaaggaggctggatcccttgagcctagacgttcaaggccaaggccagcctggataacatagggagaccttgtcaaaaaaaaaaaaaatacaaacaagtgtagaaccctagctgcaagagaaataggtatttcattgacacatctgtcatgattcagtatacactgataagctctcaatagagacctctcataaatcaggtgaatagtcccataaagcagtgcctgtctcatagttgcctcatgggcttgttttgaagaggaaatgaaatgtcacagacttgtgtggatacccaataaatgtcagtgttacacaagtttttacttcatttgatgttgaaatgcatcctgtgctgagatacgtccaaagatatacaatcgcaatgatgagggccctgatttttcaataccctgcttaagctgatgaactggagacttccaacgggctgtgatctgatttgtaaatttgaagtaggaactggggaacaaaaaagcacttgtttacaagcacaaagtcatgttttctgatgccataatagctcttggatggagatgggggaga

SEQ ID NO: 160096 - DNA, 564 bp, Homo sapiens
cccgtttcgccctaaaaatctggagatgacggggctactgcttaatcatgacagtgtggggaacggtgtggacaccacacttatgaaagaacatcgctgggatggatccagacacatcagaatggttctgggagccaggcgcggtggctcatgtctgtaatcccagcactttgggaggccaaggaggctggatcccttgagcctagacgttcaaggccaaggccagcctggataacatagggagaccttgtcaaaaaaaaaaaaaatacaaacaagtgtagaaccctagctgcaagagaaataggtatttcattgacacatctgtcatgattcagtatacactgataagctctcaatagagacctctcataaatcaggtgaatagtcccataaagcagtgcctgtctcatagttgcctcatgggcttgttttgaagaggaaatgaaatgtcacagacttgtgtggatacccaataaatgtcagtgttacacaagtttttacttcatttgatgttgaaatgcatcctgtgctgagacagcatatacaggggatcctctagtgcat

SEQ ID NO: 160097 - DNA, 379 bp, Homo sapiens
aaatactttggagaccatttgtttaaaggaataatccccaaatcgccacataattccattccctaaacagctcaaggaatttatatcattagagctcaaacttgcccaggctcagtggctcacacctataatcccagcactttgggaggccgaggtgggcagatcacctgaggtcaagagttcgagaccagcctggctgacatggagaaaccctgtctctactaaaaataaaaaaaaattagctgggcatggtggcctgtagtcctagctactcaggaggccgaggcaggagaatctcttgaaaccaggaggcagaggttgcggtgagccaagattgcatcactgcattccagcctgggctacagagcaggattctctc

SEQ ID NO: 160098 - DNA, 244 bp, Homo sapiens
atcgcttaagggtacaaagtgtctcccaaagtgctgggattacaggaatgagccatcgcacttggctatatttttgcaagttttgttgtgcctgaattgctccattccttttttttttttttttttcttttttgagatggagtttcactgttgttgcccaggctggagtgcaatggcatggtctcggctcaccgcaacctacgcctcctggatttaagcgattctccttcctcagcctcccaag

SEQ ID NO: 160099 - DNA, 356 bp, Homo sapiens
tatcaatagctccccagattaataaataatttcagataaagaagaaatgggcccactccaaaaatcttccattgccaaattcttgatgttgcaggtatctttcatctgcatgaagagtttggaaggcccaggttctaggcccagtcctgctgtaaacagctatgtgacccatgacagccacttaactactccaggcctcagttttttcatctctaaaatgagagggctggaccaggtgatctcttaaggcccttccagctacagcattgtatggtctgagcccttctggttaattgcctctggatgattacatttattgtgtttattaagcagtttggggtttctccattcagagc

SEQ ID NO: 160100 - DNA, 465 bp, Homo sapiens
gcaacctattttcactctgtttttacttcgcctaattgggcttcatcccatttcagaggacggacaagatggctcagggccggctcccttgaagaccgtcttgagaaagggctagagaggcttttagtgcaagccccacgggatcacaagttgaaagaagtatttacatgtgtcagtaccctctcattcctgaacttcaactaggttcagggttcagtattgcaatcacattctcgtaagttctggctttgggaggaagatggagtcagtaatgcataactttgatttttttaagtaatcatgatatttgggtagaaataactcaattccaaagaattatttagattagtctaaagttgtttttttttcctgattttgaaattgttacaccatgacttttcaacaaactcacctctttgtttattttctattatgcttacatcagaatacataacattccctagc

SEQ ID NO: 160101 - DNA, 239 bp, Homo sapiens
ttggtgaaagattattttgaattatgtttggttggggaaaaattatgctggccttggtatgctgagtgaattagagagctttatttacttttttttctcaagtgtctctcccctgacaccccctgcccttgcctccctcactttactcagaatttaagcttcttaaggctgattggtgctgtaagtttcctgtgctatatcccttgtaatagtgcctctcacacagcgtagtagtgtct

SEQ ID NO: 160102 - DNA, 265 bp, Homo sapiens
ctaacatttgtttgttataatttgttctcggtaagcctttttctgtgttttgcttgtggttccattagcttctagatgagcgcttttgtatatctaatttagaagctttacattaagaacagtaagagaaaatcctttaaactgtatttccacttaaagtaagattataataacatatgctccaccacatatagatgttcacaaaacataagcaagtatgaatattttttcataaccacttatgaagaaatagcagggctcctat

SEQ ID NO: 160103 - DNA, 232 bp, Homo sapiens
atgcaaagaggtacaactggtgcttcaaacagtacgtccctatttggactgaagacattgtttcctatcccggccagcttctagtgataactccagtctgcactatcaatcttttccagcctctacaggctgtttctttcagataaggaatttccctttataaacctgtcagctgacaatgactatgctttgttttgtttctcatttgtttctgtaagcccatctgttcctg

SEQ ID NO: 160104 - DNA, 272 bp, Homo sapiens
cagagctgtgagatagtctagtccaacaggttctcaaacttttcgatttcaggaccctttgactctattaaaaattgaagatcccaaagagattttactgtgtaatatatttatcatgttagaaattagaattaagaagctttaaaactattaatttcatttaaaacatatcaataatgaaacctatttcatgttatgtgaatgatgacttcatcgtgggtattaaagcgcctcaaaaattctactctatgcttgttgagagagtaagagtg

SEQ ID NO: 160105 - DNA, 753 bp, Homo sapiens
aaagttttacccagaagcttagccaacacctaagtttctccaggaatacttacagatacgtagaatgatgtttgcaagcacagccaatgatttatatctctgtgatgatataaaaagaatttagacattttctatccaaagcactctgcctataaaataaggaaataacctggaaattaattttctcttcatttcattatgcagcattaaaaacagcctaagactggagtttaaaaatatattttttactttctcttttgctaatctgttatgtgattatgtgaaattaattaacttctttaggctcaagtgttacattctgaaaaatcatggtttatgttgtcccaatggttctattcaatttcaacattcccgaatttaaattttcatttatcagttatctgccataaaatgttgcacttgaactctcactgcttcattcaatagattcaaattcatgtcccaaattatctctgtctaataaaataaccttagaaaccactgccttctatagataataataaaactacttaagctttgatctcattttattcctataaattatattttttggctttgcaaaattaaacagtataattttacccatgatcataagcaaaggctcaaaaacaaaagatcaatattaatgtcattgagagctactacttattgagtgcctaagtaatgactgttaggaatcttttacattttttaccctcacaataaccagcttgaggtaagcattagcattcc

SEQ ID NO: 160106 - DNA, 252 bp, Homo sapiens
agataaagccatagcttgcctgactctcaacttcaataatttccccgttattctatattagattataaatgtataagtgtgaatttataactgcgcccagcctagtcttctcttaatatacacatgtgatatcatgcatgaaggtggcatgtagattataaaacataggaagatgtaatgcagaataacttttattatgtattaataagatgcttggttgtttatggaggagtctgggaaagttatagatgt

SEQ ID NO: 160107 - DNA, 656 bp, Homo sapiens
tggcagatttgtaaccatctaagccaagaatctgacaaggatattattttttctgtttcttctgattttattgaggtctttttcttttgaacccatctgtttccccatctttctcaaaacaccctgagtataccagggtctgcacgtcttatgaagtcaaagttagaatcacttcagttgtgagcttgcctttcttaattacacaaacttcttctgacaataataggtataaactagaatgacataatttgatgtaatataagaccatttttcagagtacagaaaagcatattgtattcaccttgatttgcaaatatctcatgaagagaattactttattctttgggcctatttttcacttgtaaagctggcctgggtccccataaatactctgtccagtttaatttgagtttaacatgacactgaggagtagtctgatattactcagagagggtgatacaactctgaacttgttggcccttatcagatataatttaaatttcccctggaaagggaaataagcactttgaatcaaggcaaagagccaaatccagcagattatcaagatggtcggtgggaggaaagtctgatggtttccgctgctaagcgtgggagatactgacctactctcattcacttacttttgtacatagatg

SEQ ID NO: 160108 - DNA, 454 bp, Homo sapiens
gactctcaaaaatccagtgattccaagagtaaatgtgcaatattcagagttttattgcccaagaagagcttggtctcattattagggattcatatcaggagtcaacactccagctatcctgtggttgccctgatttgaacactttccaacctgcttccatctcgcaacttctaactggttattcatccttcagatttcaaacgaaatgatgcctcctttaggaagccaatctggaacctccaaaattagacaaggtgcccaccattaatgtctctttaatagtttgcattatccttatgataacccttacgtcttgttttgcaattacttatttagtgttcctttcctctctaaactccatgtgggtagaaatttgggctttccatccttagggtctagcaaagagatttttccatatgtttttattcaataaattagttttttcaataacata

SEQ ID NO: 160109 - DNA, 452 bp, Homo sapiens
gctgtgtctctctcccaaaattcacatgttaaaaccctactccccgatgtgagaatatcaggaggtgaggcctttgggggtgattagggtgaagccctcatggtgggattagagtctttgttagaagagacacaacagagatgattgtttctcttcagccatgtgaggacaggacaagacgtccatctacgaaccagaaagagggatctcaccagacaccaaatctgctgctgccttgatcttggacttcctagcctccagaactataagaaataaatgtttgtggctgggtgaggtggctcacacctgtaataccagcactttgagaggctgaggcgggtggattacttgaggtcaggagttcgagaccagcctggccaacacagtgaaaccccatctctaataaaaatacaaaaattagccaggcatagtggcacatgcctgtaactcca

SEQ ID NO: 160110 - DNA, 250 bp, Homo sapiens
gaaagagggaaggagagagagaaggaaaaagggagtgaggaagaagggagggaaggaaagaagggaggaaaggaagcgggaaggaggggaaggaaggagagaatggaaggaaagtagggaatggggaaggaaggaaggcagggagaggggaaggaaggagggaaggaaggaaggatagaggtgggaaggaaggagggagggagggaaggaggaaaggaagaaggaagggaggggagataatgggggtggg

SEQ ID NO: 160111 - DNA, 381 bp, Homo sapiens
gacaatcctgcttacaaagaagagacatcgtattcaccttcccctgaacagtaatcactcccacctcccaggctctgcctttttacaggaaaggaaacatccgcatgtcacaaacaaatgcctttgggagccataccattatataaaagagccaagtaggatgcgtaaaaggtacattttgatagaaacgtcttatttggaaaacagagtctttgcagatgtaatttatttagggatctttccccttagcgccacaataaaaaaaaatgtgtgatgataagtgggacctgacaccactctctgttagggaagcagagcttggaagacctggggggtggaggggaagggtctgcacgcacccaggagtaggatgtgtgcgcg

SEQ ID NO: 160112 - DNA, 109 bp, Homo sapiens
tgcattctttcttactccataggaagagctccaaatcatcaccagcatcaagttatcaccatcatttgttgtggtggtgatgacattaagccgtctactgtttttctct

SEQ ID NO: 160113 - DNA, 564 bp, Homo sapiens
tttaaataaaggtttctgcatgactcgggatttctctgacaatttcttaatgattatcttgccaaggtgaatgaatcctttacaagcatacccgtcatgaacagtgagagcacctcttaggaccaagcatcagggactaggggaacaagcagtagatgctgacagtttctcctctgtccactgaaccccatagaggctatcatttcatgtttttctgactgctgaattaggtttagccacagagatggcacagggaagacagaagggtggtactgtttcctgccaaggcagctctcctcataaggtccaatcaggtctaaaaatgaagccaggatagaatgatggaatgtgaccataacgccacttaacaccgggagctaccacgagtgtccctgatagaggagtcagggcagggccaatcatcctgattaccccgcagggtcttgtgacttgtcagtgatttctagagaaacaacctacaccagccgaagttcactaaactggatactcttcaagctggggaagcccagtctttccttcctgccaaaatgtcgaagttcaaag

SEQ ID NO: 160114 - DNA, 566 bp, Homo sapiens
atagaatcgagctctgtacccgatgagtaaatctggcaagacaatttcttaatgattatcttgccaaggtgaatgaatcctttacaagcatacccgtcatgaacagtgagagcacctcttaggaccaagcatcagggactaggggaacaagcagtagatgctgacagtttctcctctgtccactgaaccccatagaggctatcatttcatgtttttctgactgctgaattaggtttagccacagagatggcacagggaagacagaagggtggtactgtttcctgccaaggcagctctcctcataaggtccaatcaggtctaaaaatgaagccaggatagaatgatggaatgtgaccataacgccacttaacaccgggagctaccacgagtgtccctgatagaggagtcagggcagggccaatcatcctgattaccccgcagggtcttgtgacttgtcagtgatttctagagaaacaacctacaccagccgaagttcactaaactggatactcttcaagctggggaagcccagtctttccttcctgccaaaatgtcgaagttcaaag

SEQ ID NO: 160115 - DNA, 452 bp, Homo sapiens
atgacaacaaatcaccacaggcttggcagtttaaataccactgattatctcacaattctctaagtcagatgcctgagttcagccaggcccagctgggtcctctgctcagtctcatggggccagtgtctgaggtgctgggttcaccctggaggccttcaagcttatgcacagttggctcaattattccttgcagctgtaggactgggtcccccttccttctcatgctttccaagtggccccctccagcaatggtgggttgggcagtctcagcctctagtcttctgccatgtctctcctgcctccggccagagaacattccctgactgtgactatattgagcccactggacaaccccagatactctccctgttctacagtccagtcttagccacacctgcccaggccccgtggagtggaggcaatgcagtcacaggctccaggtcatgggcctc

SEQ ID NO: 160116 - DNA, 393 bp, Homo sapiens
ggttgtcaccactggttatgtagtacttacatatcatacaaggaagctggccatgtcctgaaaccatctgagatgcctgcccctaaggttagtggaactgtctctaggtcttatggacagtacctaaatggcacaaattcaagccatgtacacaggtttatgcaagaatccataaacagtctcagtgtctgtcaccttgctccacatcctgcaatcaagagatggacttcacttctgatctgataatttcacattcaaatgctcattccctccacctcagccagcctcctctgcttctgcaatggtagtcactatcctaagccaacccatctttccacacagcctagacaatttctgtaagcacagaacttccccgtacaataatgcccgtct

SEQ ID NO: 160117 - DNA, 379 bp, Homo sapiens
cataatagcaatgctgatgaatatgaagtggtatttcattgcgcttttgatttgcatttctctaatgattagtggtatttagcatcttttcatgtacttatttggcatttgtatatctttggagaaatgtctattcaaatcctttgttcacttttgaattgggttgtttgttttcttattgttgagtttaagggattatttatatattctggatattaatcccttattagatacatgattgcaaatatgttcttccattttgtgggttgtctttttactctgtcagtagtgtcttttgatgaacaaaagttctaaatttcgtccagtctaatttatctgcttttacttttgttgcctatgtcttttgtgtaaactgatg

SEQ ID NO: 160118 - DNA, 214 bp, Homo sapiens
agaacatctgttactcagagtcccccaggttagcatggaagctcgtggttcagaccaggctgtccttgcctgctgcacttgcaggtctgtctgccttccctgcaaagcagcatctcccagtcctggggggtctctgtaccaggtctaaagggggtcagggtggtgtactgcatgtggtttgtttattctcttaagtttatatgcaataaaattc

SEQ ID NO: 160119 - DNA, 273 bp, Homo sapiens
tgtcacatatgccccagcctgataaaactgaaaaagctcaggctttgtagtcagacagacctaggttcactctatggctttaccactaatagctgtgtgaccctgaagaaattacttagattctttagtgtactcatctataaaatgataagtacatctaccccaaataatttacataagaatttttttttttttttttttggagtgcaggggcttgatcacagctcatgtgcagcctccatctcccaggcctacaagcattcttcccacctc

SEQ ID NO: 160120 - DNA, 575 bp, Homo sapiens
aaaggcaaagtagaaattaaatgttagaaactattgatagaaaaaatgatagacaacctataaactgcaagaaaaaaagacaaaaatctaagaactaaaaataaaaaccaaggcaatcgggaaaactcagcgtatacacattgaaattgaaaataagatacagctatatgtagagagaaaattaaaagaactgtgacaaaatgcaatgtctttcaaactgtaaacttatttaagggcagagcttgtacctatattgcaatcgattttatctccattactcagcctagtgcctagttcaaagtgtatattcaatagaaatctgttgaacgaacaaatgaatataaaaccacatgctcctattatttaaatctaactgaagtagataatattccaggaaattgtaaatgattacagctgaagaactcatgaaaaggtagtaattctaagcagactaataacattgggagaaactgaagaatacagtaattatttatttaaaaagtatagggttcacatggtttcataagcaaactttaaaaaatttttggccaggtgcggtggctcacgcctgtaat

SEQ ID NO: 160121 - DNA, 437 bp, Homo sapiens
aacagagctgagtcaaatttggagtcaataaaggtttgtagttcttcaaacaagaacccttgctgtgaattctaaaaataaataacagacatgctgaaaatacatttcattttatgaaagattctgcaccaaagccttttacaaaaatagtatacaaaacccactaaacatcctgttccatcttccactctgaaatcactgcttggtctaaattcacagtttcattaataaaaatgaacacaataaaacagtactctatgcccccatcccaccccaacaattatcttcaaaggatgtccagattttgtacactatttgccaatcctacataggtcttaaaaaaacaaatctcagctttagaggaaaatcactagttaattaaaatgtcatttagggttgtatttgttttctatgaagggacaataatggaatatttt

SEQ ID NO: 160122 - DNA, 317 bp, Homo sapiens
gcaggagaggtgggacctcaacgtctgtctggaagcagagcctgggcccagtcgctgccatgtcagtgcttagaggtggtgataaagagactctagagagagataggtgtgacttcaaaagccagtctactctgggcatggtggctcacgcctctaatcccagggctttgggagacccaaggcgggaggattgcttaagcccaggagttccagaccagcctcggcaacatagccagactcccatctctacaaaaaataaatgagcaaggcgtgaaggcacatgtctgtagtcctagctactctggaggctgaggtgg

SEQ ID NO: 160123 - DNA, 298 bp, Homo sapiens
ccgcgcccagcctctaattttgtatttttagtagagacggggtttctccatgttggtcaggctggtctcgaactcccgacctcaggtgatctgcccgtctcggcctcccaaagtgctgggattacaggcgtgagccactgcgcagggccacatttaggctttttattggctggttctaggtgcttggtgatgctgacaaaacacatgataacactaagtccttttgtgctaggtcctttgtaataaatcactcagctgtttaacaaattaggtatattgaccacctactatatgacag

SEQ ID NO: 160124 - DNA, 203 bp, Homo sapiens
aagatacacacacaaactcagagacacccaacaaactagggcaggcaaacaaagttttaccctcttcagtgcctaaatgattaacagctaccctttttctgcctacagtaacataaaagggttaactgtttaaagaagtaaagaacacaggagtagctgtgtattcatatatcaaaaagaaaaaagcagtgatatcaagggag

SEQ ID NO: 160125 - DNA, 360 bp, Homo sapiens
tagattgtccactgtctcaccaaatcttgctttgactagtaataatggcagttagagagtactgcctatcacttgaccagactagctaaatgctgaacattcattataatatttaaatctttaaaccaaccttgatttttattttgatttatgagatgactctaccaaaggttagattctgattttggagagctagatcataatagagtcagaattctgttcttaacttctacactgtactccaacaacagtcaaactgttactttctcattcagggtaaaatcctgaccaaacccattactgaaaaccttccttttttatctcagctcccagtctctcaccccatgtatctgatacacc

SEQ ID NO: 160126 - DNA, 216 bp, Homo sapiens
ttttcatgaattaaatttaattgtaactacagctgcataattcctatttttgccaggggtttttatcctctccctggccaaggaacttcagatacaagatagaccttcattttgaatctaacgtaatgaacagtgtattgacttgtaacattacttcaaatgctgaggaactactgttcactgtttcaggtacttctgaatgaaactgttagctgc

SEQ ID NO: 160127 - DNA, 354 bp, Homo sapiens
catttcaggtgcctatttatggataagtgagctactgaaaatctcaatgctttgcaagtagggagatgtagtaaagtcctttttcagaaactggtagagtacaccagtgcacattagacccaacactatctttagtagctccatctttattttatatttaatttttttgtgtgtggcgggggggacagggtctcactctgtggagtacagtggtgcgatcctggctcaccgcaacctccacctccacctcccaggatcaagtgagcctcacctcagcctcccaagtagctgggactacaggcgcatactaccacgctcagctaatttttgtgtttttttgtagagacagggttt

SEQ ID NO: 160128 - DNA, 610 bp, Homo sapiens
aaacgagtaatgtctaataggactttgggggacagacagcagcaggctctgcttacaggtctctgttctgtgcccaggtgagcacatatggactctgcacatggtagtgagtgtgggcggcacaatggattggcactgcctgctccttgccaccaccttggagtgagctgcgttgagtatgggcgatgcttggggttcaaacaggatccttctgagactgatggttcctagaaacagttgcaggataggacttcagagaaaatttaccccagaaagcccagtacaaattactgcccatttttagatggggtgcttgtgtcagtctttgttctggtctatttctgctgacaaatgagacatctggggcatgaatcacaagacaaaaaacaaacaaacaaaaagataaataaatcaaaaataaaaataaaaagcagagagtaccttggtgagagtgaagtctgcttccgggtgcacaggctcttgttcctaaagaggaagaaagatcacacccgagaacgtgtggaagcagcagtgcagtgtgcaaagcagggaccctcagcctgtctcctgggctccatccatgtggcttgttccgctggggatcctctag

SEQ ID NO: 160129 - DNA, 513 bp, Homo sapiens
aaacgagtaatgtctaataggactttgggggacagacagcagcaggctctgcttacaggtctctgttctgtgcccaggtgagcacatatggactctgcacatggtagtgagtgtgggcggcacaatggattggcactgcctgctccttgccaccaccttggagtgagctgcgttgagtatgggcgatgcttggggttcaaacaggatccttctgagactgatggttcctagaaacagttgcaggataggacttcagagaaaatttaccccagaaagcccagtacaaattactgcccatttttagatggggtgcttgtgtcagtctttgttctggtctatttctgctgacaaatgagacatctggggcatgaatcacaagacaaattagataagacaaataagacataaagataagacgatgactgggatgcaaggggacttgagtgcatagtggccctgccagggaaagtcatgaggtgccttgatgtatattcagcccacagccctttatta

SEQ ID NO: 160130 - DNA, 151 bp, Homo sapiens
agccaagatcatgccactgcactccagcctgggtgacagagctagactatgtctcaaaaaaaaccccaaaaaacaaagttctatttgtggggatgccagagagaggctgatggtagggaaaactcaggtaggggtggccatggggatgtgt

SEQ ID NO: 160131 - DNA, 345 bp, Homo sapiens
ggggcagcaggctgtgatagtgtgagttcgcatttgtcagttttttttttttacccatgtgggtgtctaggttagagttgcaatgtttactctcccttttcatcaataaggacatattttcttctgtctgtaagcaatttccttgaagcttcaagaagaatcctcttgtgaaaatgttcatatgattttatgattctgcttccttccctgtccttgggaaagagtatattcaccctcagagaaggcgtgaggaatcaccaaaccagatcttttctcccaaatcagtcaagaaatgttcactggaatgttgctatggtaaaaataaaagtggttttatgatgtcca

SEQ ID NO: 160132 - DNA, 3290 bp, Homo sapiens
  misc_feature (1428)..(1428): n is a, c, g, or t
  misc_feature (1448)..(1448): n is a, c, g, or t
  misc_feature (1452)..(1452): n is a, c, g, or t
  misc_feature (1485)..(1485): n is a, c, g, or t
  misc_feature (1490)..(1490): n is a, c, g, or t
  misc_feature (2713)..(2713): n is a, c, g, or t
ttttaatagagacggggtttcatcatgttggccaggatggtcttgatctcttgaccttgtgatccgcccgcctcggcctcccaaagtgctgggattacaggcgtgagccaccgcgcctggccgatgtggttcatatttcaggggtcccggaagagttgtttgaggtttctatttggccaagtcaggccctggtggagtttggacagtccctagtggtcaactgcagcactacttgcccagacccaggacccagtggaattgagaccttcttaaagaaaactcaggtgggcaaagggcctcagtggaaagagtttcttctggaggatgtcacagagaattccatcctgcagtgcttcttctcttgtgcagggattcaaaaggacacaagccttggcatcactgtgtatcagccaccagagcaagtgatcctggagctgcagcctgcctgggtggccgtggacgaagccttcacagtgaagtgtcatgtacccagtgtagcacccttggagagtctcacccttgcccttctccagggtaaccaagaactgcatagaaagaactttacgagcttggctgtggcctcccaaagagctgaagtcatcatcagtgtcagagcccaaaaggagaatgacagatgcaattcttcctgccatgcagaactggacttgagtttgcaaggtgggaggctctttcaaggcagctcacccatcagaatagtccggatctttgaattctctcagagtccccacatctgggtctcttcccttttggaggctgggatggcggagactgtgagctgcgaggtggctagggtgtttccagccaaagaagttatgttccacatgttcctggaagaccaagagctgagctccttcctttcctgggagggggacacagcatgggccaatgctaccattcggaccatggaggctggtgatcaggaactgtcttgctttgcatctctgggtgcaatggaacagaagacaagaaagctagtgcatagctacaataagtggcctggctcttcctttttcatacgggttctctgctgctgaaaacacagagtaacgggttggtgattcggctgtagacatccctgctgccctttgctgggtatgctctcaagtgaacatgagtcttcatctttctctggcttccctccaccaatcctggagctaaaagaatcatacccattggcagggactgacattaatgtgacctgctcagggcatgtattaacatcacccagccctactcttcggcttcagggagccccagacctccctgctggggagcctgcctggcttctacttactgccagggaggaagatgatggctgaaatttctcctgcgaggcctctttggtggtgcagggtcagcggttgatgaaaaccactgtgatccagctccatatcctatgcaaccacngttagaggaatccagttgcnctgncaaacagacctggctggaagggatggaacacangctcncctgcgtcccaaagggaaacccagctccagccttggtgtgtacctggaatggggtggtctttgaccttgaagtgccacagaaggcaacctagaaccacactggaacctaccgctacacagccactaaccagctgggctctgtcagcaaagacattgctgtcattgttcaaggactggatgaaggaatcagctctaccctctttgtcattattaccgttgcccttggagtgggtgtcatcaccatagcactgtatttgagctatcggccctgcaaagtggacaggaggaaattgctctataggcagaaagaggaggacaaagaggaggaaagccagtttgctgttcaggaagagaaaagtacaactcatataattgacagctatttgattgaatgagacttctgctactgtggtttcccagggagggaagaagggatagaggagaaaggaagaaacacaatggcaggctgcattcccctttgtgtacgtctgtcctgtaaaacggtgtttcaggcccccatgccccatgtcctgtgtgtccaatatgtccacaagctcacctttctctctctgtctctttttttttttttgagatggagtctcgctgttgtcgcctaggctggagtgcaatgatgcgatctcggctcactgcaacttcagcttcccgggttcaggtgattctcctgcctcagcctccctggcagctgggattacaggtgcacaccacaactcctgtctaatttttgtatttttcgtagagatggggtttcaccatgttgaccaggctggtctcaaactcctgacctcaagtgatccgcccaccttggcctcccaaaatgctgggattacaggtgtgagccactgcacccagccacctttctctttagagctcactctagtcattaagaatctcagtctcaatgtttgatttgtaagaaggcctcttgctccttgccaggtgcttcatcagtccactcttagatacaaaaaaaagatcctgctgtttctttatggtttccactgcccttttctcttaaacatcatactaaagtcaggcacatcttagaaatgcaactcatatttcatggttttctgattactaactgggaactaaatttgtagtccagggacaggactttgaagggagtaagtatcaaatatggggctaggaatcagagctctgttcccatctccactttcccttgctcccctgacctgggcttntggagtgccagctcccagagctgagcttgttgacatcattaaggatcagtggcaagcttcaactcagtaaccatctgttgtgggtcttgggggagtatacagatggtaagaaattccactttgggccagacaagcatcctatctagcccagtgttctgtctctgaagtagaaggtagagttcttccatgaaattggcctcataggttaagagctccaaacatctctgaattccttttcatagagtgatcaactgtgagttcgcatttgtcagttttttttttttacccatgtgggtgtctaggttagagttgcaatgtttactctcccttttcatcaataaggacatattttcttctgtctgtaagcaatttccttgaagcttcaagaagaatcctcttgtgaaaatgttcatatgattttatgattctgcttccttccctgtccttgggaaagagtatattcaccctcagagaaggcgtgaggaatcaccaaaccagatcttttctcccaaatcagtcaagaaatgttcactggaatgttgctatggtaaaaataaaagtggttttatgatgtcca

SEQ ID NO: 160133 - DNA, 369 bp, Homo sapiens
gctgggggcggtgagcagtgggtgagtgggtggcattagattttcattgcagcgtgaaccctgttgtgaactgcacatgggagggatctaggttgagactctaactaatgcctgatgatctggggtggaacagtttcatcccaaaaccatctcccaccccctccccacctgtggaaaaatagtcttccaggaaactcgttccctggtgccaaaaaggttggggaccactggcttaaagcacacacattcaaaaaatataaatatatcttgatagaatcagggaagtcatgaacactggatttgaaaggaactgaaaagggagaatgctatcaaacaagaaagttaaagccttgaaaggggtctgaccag

SEQ ID NO: 160134 - DNA, 281 bp, Homo sapiens
ccggggaagcagagtgcaacttgtcctgctgtgaaccccttgcaaagtcaccattgatgcctaacaaataaggctttccgtttttctggatggcaaaaaacaggagattgatggtgatcaggagatgtaacatttgctttacaagatttcatgtcagcgaggtgggaagccaactctatctgaagcagttagatgaaggcaaagtgttcttaaacctttaaatttcaggcccttttgcattcttaaatattattaaagagcccaaagagcttttcttgatg

SEQ ID NO: 160135 - DNA, 801 bp, Homo sapiens
agatgggatctcactatgttgcccaggctggtctcaaaactcctggctcaagcaatctccagcttcagcctcacaaaatgctagggttacaggtgtaagccaccatgcccagcctaagtttgttttctgtgctgtttaggctgtttctactgttttatcttccagtttactgattcttctgtacccccattcccactccacttggttgttgggtacaactacatagccttttatttcagttattacatttttcactctaaaactttcatttggttgttctttacattttctatttctttgctgagactatttttcatttgtttcaattgtgttaccaattacttactgaagcatttctatcaaggttgttttaaatatttgtaatcttggtgtgggcatctgctgtctttttttaaaattcattttgagattttcctggttctggatatgatgtgtaattttttattgaaatgtacacattttcataagactctggatcttatttaaaattcctgttttagctggttgtttgaagactctgctgtatgcgggaaaagagcagagaatcaggtgaaagtgctgacttgtttctgtcaggtggaggtaaaattatatgttccctactcaatctctgttgacacctgggaaacagggaagatcctcattactgatatgtggaagcaggagttctggcttcctatgtgatgttcactgacacagtcgtaagggtgacctcactactgctgggtgatggtaaaagtcccaattctccatgaggcctcctctgaaatgactccagtg

SEQ ID NO: 160136 - DNA, 220 bp, Homo sapiens
acacccgagcaccacaacaccgtagcccgcagccgtggctcactggactcatcggggaggaacgcggtggtggtgcagcctctctccaggcatactgcgtgaaaaagcccctccttgagaatgattgctttacagtctccaccatgaccaaccaggatttgctgtaggaatgcaggaaagtcctattaataaaatgcaatcacattagtgggtcaaataa

SEQ ID NO: 160137 - DNA, 568 bp, Homo sapiens
agttacaacagctagccatttatgagaaatcacagaaattcttccagtagtatgaaaatagtttaaagtcagacagcctcacggtgaaagaagagaaattaacttttacattttcttgggaacattgatctcacaggcagcatttttagatgcattgctgctaagctattttttaaatactcagatggcgtggcagacatgatggcggcgcccatcagccgtccaactctctttcctttgttacgttcttgattttcatttggtgagccacatcacccccacacagcttgtgttttggggaacgctagctccatctctgcataggactagagcacttggtgccagccttaaacaagaaagcaatggctctggacgtcaccggcagccatcttgtgaccccaagaaggaagtgattatgtcacggaagctgtggagagcaggcaaacggcagggctgagacccagctcttcatctcgttgttttactgaatcaattctaacataagcccaccctatctctgggagaccagatacgtcaaccagtgaatcccacatgtcacttaagccga

SEQ ID NO: 160138 - DNA, 164 bp, Homo sapiens
atttctcccaccggcaggtagaattatttttattcccagatgaggaaatgcaggcagaagaaatggagtaagtttaatctcgatttcaccatgactactggctttcttccttccccctccttctttccctccattctttccttcctcctcttgcttcattccca

SEQ ID NO: 160139 - DNA, 398 bp, Homo sapiens
gcttacgtacttttctttatgaattttatgtctgtaacattggctgatatctacgaaaaggaatatatcaatcactgccttttcataacactttgccacataaagaaaacagtaaaatctatcatcattggcttactgaacttcagggaagtggcaaatattaatagtatggtacatatgtttttgaactatatttttcccaggggtagaaaaaatatgtaagacacaggattctgaattacaattttagcttttaaggaagaatatgaaatttccatccccaagtcaaagacaatagtagtaaaattaacaacttatacatagtagtcaataaatatttaaatgaatgaatatgttaatacactccataaaaataccccagtttttccaacataact

SEQ ID NO: 160140 - DNA, 541 bp, Homo sapiens
aattcctggttcatcgtgtaattcacaaggaaaaaaaaggacctgagtggtgatatcttttaaattacatattcagataactcatgagtatttggagctgtgaagtattcaggtctttattttacaatattgtaggataaaaacaaacagtctttagcttttactaggagaaaatgtatgtggatttaaactgtatgcctattaccacttaaaaggaaaacccatccaataacaaaaattactccgtatgtgtaatcaatttctttcacactattttcccacacaatcatatgcttttatttcttaaagtccatactctaggggttaaactcatcaagcatatattgtgtgaacatatcccctcccttctatgcctttaattgtcttaatcttctaacgcaacatttatccaaatacaagacccttttctaaaaagcacagaggagtttttgttcagctcggctctcatgttgtagtaatatgatcactttccaaagccaatacatagtaacatgctattcctgaagctctgcaatgaaaa

SEQ ID NO: 160141 - DNA, 295 bp, Homo sapiens
agtaaatttgaacccaaaagcatgaataaaaatctcaaaatacaacctagtgtgaaaatttgacatgttggcagatgctgacccaaattgactcggcaacacattatctccaatgggatcactcatatgtttcttgtgttaagtctaaggctgtgtgcactgtgaggccattaaagcagaccacgggcatgtgtggtatcttgcaggaaagtaggcagaataaagaggcagcctatgacatcagtgatcctactaagaaggaacccccaggctcacagataataacattaaatgg

SEQ ID NO: 160142 - DNA, 424 bp, Homo sapiens
cctcactacaagcgtcccccagcaaagctgcaccgccatttcctgtgcttgggaactgaaggcaaggtgagcccctcccggctgccccggcccgacctcccctgactcccaagcttgggctactcacggcctgcgggctgggcagggtcccccaagggagctcccctccccgagggcgcgctcaccctagccgctgggatcggcgacctggtcctcggcccggcgggagtgaacgcctcccagggaagaggccgggcctccaagcaggtctgcacccccggagttatgtttctgggatccgaggactagcgagcttggggcccgggagagcggccaccctcccggaagctccgcctggcgcagggcgtgaaccgcagtctccaggccggccgggccgcggccattctcggagggcagcggccgc

SEQ ID NO: 160143 - DNA, 321 bp, Homo sapiens
attgtctttttccagtctctttctctaatggcttggctaagtccaaccctcctattccttgtttggctagcagctcaagttttttagagaaaagcacacagccaagtgattggtctttaatccagagccatactaaatgactctttcactagttataggatcatttctaatttctactgtgctaaaggcttatatgaaagcacctctggatggtaaacttttgactagagactttcaaatcctaattacccatccctagactgtgtattcttgatgagggtactcaaatattaactgatcattcctagcatgtatattaaa

SEQ ID NO: 160144 - DNA, 423 bp, Homo sapiens
gactgttcaaatgtactgaaggacggttgcttccatttcacccgaagttggagacatagaaacaaactcatatttatgtggttgcccacgatggggcagaaagcacactggactatgctatccccttgggcttttaagcagcagtgcagtcttggataagtcacttctagttccttcttgaccatgaggtcgccctgtgatacctgaaggtacagccatgcttaaagcagtgactcagtttgaaagccacacttcctattttttaggagtgtaacttttttttttgatagaaatgaaacttgtacttaaaaattaaagtagataaaatgaccttcagcatttgaaacagtataaacaagtcaaaggaataaaaatgacgagaaggccgggcgcggtggccacacctgtaatcccagcactttg

SEQ ID NO: 160145 - DNA, 324 bp, Homo sapiens
ctctttctcacgtctcatttactctgcactacacttatgcccttacccccacttggcgctgctccactgaaattgctcttacttggtttcctaaggacgtcgtaaagccaagtccaagggggcagttgtcactcactcctcttcttacagtcttaactgtatctgacacacctgattattttcttacatatttttgaaacctttcatttcctgtggctctggtggcaatacaccctccagatttcttcttgtcttttcattgttttccttaagggctcctttccctcccccatcatgaggatggtccgcacagttgctttccct

SEQ ID NO: 160146 - DNA, 285 bp, Homo sapiens
ggggaagctaattctgagggctaaactgggatgctcttcttcagatattggctttcttttgttgctttcaccaacctggagctgctaccaggctggcactgctctaaccccagtgcaggaatctcaggcttggttctcttaccttctagtgatttcagtgggttttgccattatccccaaggggcaacccctgatttcctattcttttactgctcactgcctctagttctgacttcagggttttttcccttttgttttgatttcttgtccttggagaagaattca

SEQ ID NO: 160147 - DNA, 591 bp, Homo sapiens
atgtcggagcctggatatagtgaggagtaggaagtgtttctacttttagaatggtatatttaatgactgtgttccctggttttaaaagtgcactgtcttcagaatctactgaggcattcctgtgttagagacttacgctttctaaatttttttctgcatttttagtttttcagcctcctgctttattgtcagtatacctcctgctgctgtgtatctcatttttgcttttctagtttgcaacttctaatctgctgtgagtcaggaaaacatatggcagagttaaattgtgcttttggttaggttagatagaatctgtggaaaaacccaaggtgtttctcttataagtaaataatatattttagtggaaaggctttgtgacatattattggctacttgtagtcctttctgttcccatttttttttcagttatgctagagtaggtgatcaggtgaccaaattccagatagctgaggtattactgtatttgccagaatttttatttgcatgtggttgcagtaaatctggaacgccccactatgacaaatgaattataaagaaatagagactatctttaaagcgtagcagttatat

SEQ ID NO: 160148 - DNA, 244 bp, Homo sapiens
tagcaagaaccaaggatagagcaatttcacagtacctttatgtatgcattacttgggatttgatgacataaggaattgcaaaccaacatagactgttgagtgagaggcaggatggtataatgaaaagaaaaggattttggagtcagtgtcctaggcttagagtgtcatagattcaaattccaactccatatttagtgtgaccctgagcaggttgctgaatctctgaggcttggatttctcattt

SEQ ID NO: 160149 - DNA, 567 bp, Homo sapiens
aagggcacttcacaacacgctgcgtatcgggggtgcctggtggcgccgtgcctcactctcgggacggggcccaagagatcatcgggtagaaaccggcctttggggtctggcagggctctagtcccaaggacactcttcccaccccgctgaggtctgaaggatccgcccagcgagatcttctgtgaatgatcaagggccgctgtctacagccatggtctggagatggttctgatctctccacactccaggaagagacccccaaaacaaccagttccaccaccctctcaccccaatttcctcaccacacttcatagggagaagagcgctgcttgtggcagggtggcgtgtggctgtcattaaagtgcgttcctttaatgagcgctcagggctcccaggggcctgctgctatgccatggggtggggctgccagcagggcagggggttgatcccatcacatctccccagacacatcctcaggaaaccacctcaaaaccacctaagaacaaaggaagttatcacactggggacagggacaggggtcagagttcagcttctcaagtaggatag

SEQ ID NO: 160150 - DNA, 306 bp, Homo sapiens
acgcaggaccttgcagaaaggtggatcctttccatgtgcagtgaaaaatcctgggaggggatgagcaggacttacgaggtcacactttccctgttggaatagagcaacgggggcggcagtagaggcaggaagaccaactgggagtccctgtggccgtccaggtagacaccgtggccttgtcacagtgcagccctggagagacacgagggagacagaggctggggcagcactgacagcacctgctgttgaattgaatatggggagaggatgtggagagaaggggaatcaaaatgatctcatcacatt

SEQ ID NO: 160151 - DNA, 325 bp, Homo sapiens
tgtttcagtcacttcaagctgaattcatgccctcaatgtaagtgctgtgtccagacacatccaaatgagcaccaagctggaagtttgtgaacactctggaggatgccccagctgttgtaatgcaacagcataccttgaaaaaaaacagtagctcccaagggactcagcatggcttggtcttcgaagtggagttttgtttgtgtattcctagtccagcagtaaattctgctttaacataactgtcaggtttgctactcgaaatttgcacataactggaagtgaaacgatatctttctcatattttttggcctaacaaacacctata

SEQ ID NO: 160152 - DNA, 174 bp, Homo sapiens
tgcccttgtggaactggggagactggccgttagctaatggcacagagaagtacaccatcacgggtgcctgtaatcccagctactcaggaggctaaggcaaggagaatctcttgaatccaggaggcagaggttgcagtgagctgagatcacaccactgcactccaacctgggtgg

SEQ ID NO: 160153 - DNA, 490 bp, Homo sapiens
tcccttttataagagaacccttaatccttaggggtaaacagggatgaagatccatctttagtaatttcttcaggttgaatagcggtgatgatattcctgcctattagggtctcttgtatccaaggtagagaagagatcagtcagaaagtgtcagtatggtaagggccattcatagttctgacaaaaggtgatatcacgggtcaggaaccctatacagggactttgtggaaaaggtatgaggccagttttcccaaggggcttttattggctctctaagccaagtttggttccttaatagaaagcactccattccaatcaaagccttggtaaaataaccagtttctccaattgtatcatctggtttccagattttggagaaatgaggtagagggaaacaaacatcctttaaattttgttcacaggagttttactcaattgttaagaactgtcaatatgccaggcatggtggctcatgcctgtaatcccagca

SEQ ID NO: 160154 - DNA, 242 bp, Homo sapiens
agaagaagaagggacaaaaaaggatgatgcacacacaaaggcaggagcagcaacatgagaaaactacgcagatacaacgacctgattaaaggtgcaatctggaaaacactcagttggccatgactgtggctcaaaatgctgactctaactaaaggtatcaatcaattagcaggtactgttaaggctgaccatacacccaggagactgagctagggttttttttttttttttttgagacagag

SEQ ID NO: 160155 - DNA, 443 bp, Homo sapiens
attcgtattgttacttgtctgatttgatgtatcttatgctcaagcaacctcttactttcttgatgagagaagtgcctttgataaattctatttgtaacatctctaacaaggcccttaaagttttattgatcaattaaagaatgccttatttctagtagtaagaaaatattttgttaaaattatgccataaaataaaagtgctcttacatgtaaaagcattataagagtgaatcaaaatgaatttcctatctttcattgcaaataacagtttaccacttcaattagaactaccaatttaacttatggtgcacaaaattatgtaataaatttaatgactgaaacagttcacatgcacagaaaagaaaaagttgtcttgaaccttggcttaaatgaaaaaggccatataacaagataataattttaggattggataagtcacaata

SEQ ID NO: 160156 - DNA, 327 bp, Homo sapiens
ggaatcttccctccactcccaggaggtggggcaggcagagccagcccagcagaggcccccggaagcgtcaggaacaacaggaaaggcagccggggcacagggacttcccacactcgtaagcagggtgaccctgcacccaccccagctggctctccttagccctccagctccgggagctcagggtaggagcaggtaggaggggctgcaggcatcagcctcaggcctaggggaagtgagatgacagtcgacagtcggatgcttctccagctaagtggtccctagaacagacgggtacactgaggcaaagtgtcctgggaggggcgagag

SEQ ID NO: 160157 - DNA, 328 bp, Homo sapiens
aagtgcccatttcttcagctcatggatggaaacgacagctgaatggtttgagtttttaaaagtatactttttcaggaatggcagcaccctgtattcaaatagagagaaggagaaagatttctctgaactcctatagcaaaagatctaagaccgtggggtcctattcagtgtaaaaccacacagcacataaagaatgagattgggcagagcatggtggctcacaactgtaatcccagcactttgggaggccgaggtggaaggatcgtttgagcctaggagtttgagaccatcctgggcaacacaacaagatcccatctctacaaaaatt

SEQ ID NO: 160158 - DNA, 447 bp, Homo sapiens
gacggaacactgagggttatttgtatttttaacctttggaaagcaaattgtttaaattatttaaagaaatagtgcaagattatggctggcatactaaaaacttgcaggatgttatttaaggacgatcactgtttgaaagagtctgtggcagtaattcttagctgtgcttgcaaattagaattgtcacctggggagcttccagaaaaattaaatattaaataaaagaaccaggcatcagtattgtgtttaaatccactgtgtgaccaggattaagagtcaaagatctatggctaactcataaatataagtttgccagcaaatggaaaggatatagaggtaggctttatttcagatccttttgccagcttttatagtaacagtcttgtattgaggtctctgtttttcttcagttcttatctagtcaggtctggaggcaaccaaggaaca

SEQ ID NO: 160159 - DNA, 408 bp, Homo sapiens
tgaacgtcttcactctctctcctacccttctcaaagacaaacagaaactgctgataactccaataccatcatgactagccaatgtcagacaggtcccatgagcaattccagcatcagccttccttacattctcccacgatcaccaccaccaccaccaccacgctataataaccaaccaccatctagtcatcggccaggcacagtggctcacacctgtaatctcacactttgggaggccaaagcgggtggatcacttgaggttaggagttggagaccagcctggccaacatggcgaaaccccgtctccactaaaagcacaaaaattagctgggtgtggtggcaggtgcttgtaatctcagctacttgggaggctgaggcacgagaattgcttgaagccaggaggtggag

SEQ ID NO: 160160 - DNA, 327 bp, Homo sapiens
cttagatttgtgctgctgatcccctaatattaaaatactttgttagatttgggaataataaaaagaaaacaaaaaagtaaaataaaaatgtttaaattttaaatgaatgaaaggttgagtagcatttggaatcgctttcaaatgtacattcagaaggaaaagtggtcagtggtggctgtggctggtgggggaaagggctcagatgtggcttctgggattcccttacgacatttgcagaagtgtgggaaggatgacaagttctgctgcactctggagctgctgaacctgagtagccacatctaacatcacatcactcgtggggagcag

SEQ ID NO: 160161 - DNA, 248 bp, Homo sapiens
ccattttgggtcaaataatagttggaactggggtaaatgaaattttaaaaatagacctatattgtagaaattatcccataattctaacacaaacatttttccattctctcgaaaacatttcaaagtaagaaggaaatgaattaaatgactgattagatataaggaaaagagaagatgtgaagaaactgtggttttccggcttgaagacattggttcaatttaagaaacacataatgactcaagtacag

SEQ ID NO: 160162 - DNA, 988 bp, Homo sapiens
cagttttaagtgtatacttttgtcctactggtcaaaattttatgacttattttcaatcagtaaccaagtcttactcctttaatgtgcccagcatcctagaacagctaaaataaaatgaaaaaagatactcgaggaaagtaaagataagccaaaataattttcaagtataaaagcagcaaagtgttaccaaaatgcaaagactcaggaaatacagttaccataagctattcctaaggaatctactagtgaacaagtttcaaacagtcacaatgactgcagagacattgacgtaaagacagatggcaaatattaagtgggtgggtaggtagatacagctgtagatatggccagctgtttgctggaggcaatttggacaagcttatgagagccaatgaacttttcaagaattttatgagttggttattaaacatagacattatgaacagttaaagtatatacatgtacgtacatttaaataaattaaaaacagtaaacactaaaaacacatcgcttcataattatgttactacattttacaattatctatgcttttgaggttatttacattgattgtatcaaatggtggagatagggtcagcttctgcacatcttttcccgaactccacatttaatgatgtcaccttgatagctcaccaatggtgaaagtatttactccatggaaagctgcaaaatgctatgaatcagggctttttccccctttttctggagagtctcttgttaaacatttcctagcacatcaatggattcaaaaaagagaagctagtatgcaacagatccatgacttgacaatgtagatacaccaccactctgaagacatatgaggagggcactgggagagcgtatgaaaaatgtctttttagcctttcagtaatcattttgggtgatagtgatgtcatcgttattctgagaatggagtgtgtgcaatgtcaattaaagcaaataaataatcatatgatatatttaattg

SEQ ID NO: 160163 - DNA, 375 bp, Homo sapiens
gacccctgaggaggcttaccacctacctgctcatggtaattctgaggggtaaagtaacgacagttctagaagtttcgaagtagttgaaggctggaatttgctgccgttattacaaagctgataggactagccatcagagatgaactagatcttttttcatcttcctgccaacttccctgtagtacttcctactggcagaacctaataagcagcagtcagaggggtcagagaagtgtagtttgcagagtcccggcctcagcacacagagcagaggacagaagggtggaattggagctgagaaacaatagatgaagaaccagcacactggtttccttcaaagactcatttttatctaaaggtattagtccctaaaac

SEQ ID NO: 160164 - DNA, 332 bp, Homo sapiens
ggggaactgatcagaagacacaaaggaagcaaagaacagcagaatggaaagagacagggcatgagcgatctgtccagaaaggggcagtcggggagccctctgaggaggcagcctcaaatggtggtgcttcaaggagagcgagggtgtgtttccaatttttaaaatagctgtgctatgttttctcgtaataacagtatcatccccaatatttaaagaaagtcagaaaatggaaggaaaaaaattgttttcctctggttctacccccaatcacaatttactctaaatgtgaaggattattgctttccattccctgtgtatttggatgatttttc

SEQ ID NO: 160165 - DNA, 441 bp, Homo sapiens
tgctgatgacatgcctgggcctgagacctgaagggacgaggaaggaagcctggagctctcaggaaggatgaagagagcaggcattgccaaggcccctgggttcagggaatgcctggggagtctgagaaatagaagggcagtgtgagctggcaaagcgagccagggggaggtggcaggagacaggtaggatgtgatgccggggtggctactggggtggccttcgattcctcattgtcagaagagctagggtagatggggtgatttgggaggtgcattatggatctaaaattctatgatccttggatgtgtgtgggacacccacagcgcccataaggagaagataatcacaggacccagtgacagggccaggctttccagaggaggggccatctgggcagaagggtgtgccgtgggcagcaggacagggatggtgcttgttca

SEQ ID NO: 160166 - DNA, 781 bp, Homo sapiens
aaaacttgcgtggactgaatccaacatgtcatcgaaatctccagcagcatctatgccaacagtcatcacggaaatagaaaggttctaaatatcacatttttgaaatgcccagtgcctgaaactatggtagcatgtatggatacacaaaattttgagttccatgaaaaggcaaattgagtgtctatgagacactggtcagccaaagttgttttgaagagagagaaaaagcaagtttgagtgaattcaagcaaatcctctgctttatcacaagtaaaaatcaaaactacacactcctgcccagaacaattcttatcatcacttcttctcagtcttctgaatgctttgggaattatttctatgggaacatggtctttaacatcatcatcaataacatatgagctcatcagaccacctgtccactcgccagctgagggaactgttccagctgttgggtgtgggcaggattccaggatccctgaaaccttgtcccactagattcctggtaggtgtctcctgctggggcctgggcacataaggcccttcccccactgtccagggttggcagtgctttctgcacaggtcaaggacagccagggtgacattagccccagtcactgagttctcagggcaagggtgactggggcaagtcccgactacattctcaaagagccagtagctggagcttgatgctgcctatgttcctccatcccttttctcaggaaaatggagccttccctcatttcctgcacgttttcttggcaagtcggcagtggggtctctg

SEQ ID NO: 160167 - DNA, 276 bp, Homo sapiens
taaaacttagaaatgcaatgtaaaggattttttaagcacacaaaaccttgtttctaactttaaaatgaagataaataagcaggccctaactctcaaagcaaaggtgtctcttacaatcagggtctgcaaaacctttctagaggaggagctaaggcaagcttgtccaacccgcagcccaggacggctctgaatacggcctgtttacgaacacaaatttgtaaactttcttagtgtgacggtagtaaagtccagcccacagaagttggttttggggtt

SEQ ID NO: 160168 - DNA, 543 bp, Homo sapiens
accatttccaaccgctgtgaagaactcatttattttaaatgaatgtggtagatattgaattgcttttatatttatgtttcattgtgaatttttaaaaatgatataacagttatagtttagaatgtcaacatttaaaatgtgccaaaagttacatgctttacaactgatctgtcagttgaaatggctgaagttctttcaaaattattttacacaaggtgtcaacagaaaaacttgaagcacactgctctttactagagtgtttcattcatctttgcacttcccgcactataaggaatacacttaaaatacgtttatcaataaatatgcatacttttttcttatcatgaaaatatagtgagttataatgccatgcttttcattgtacaatgcatttgtgactagaacaactaaccttatttcataaacttcacttacagaaggaaaaattggatctagaataatgcaacctaatattacatgtatcagatggaaatgtactactaataagcaaataaatataagactttcaagctatgggtggaa

SEQ ID NO: 160169 - DNA, 601 bp, Homo sapiens
tccctagcagcatgtttgctttacctgccttcatctaggtttctacatcatcaggggtggaaatattagttggcttaattaagcttgggagttgtaccttacttgctctgttgagtgtcagttctaccttcttttgaagcaggcaaaagcagttcatggcacaaatgccagaaatagcatgcaaaccactttgtagtggtatgcaaactaatttctgctgtgtccttttcttaatgcttgtgagggttactgtttacttaagagttaatatttggcttatgaaactagtatcagatgagaaattccagcatccctccccaccccagagaaagatgtggtcattggggactgctctgaagtctgccagccctctatcctaaaagttggtagatcagttattatatcttgatatgtacccctaattcatatgaggggccaagagagattagttactcctgatttcatctgttagaagataaagggagtgtggtttgtatctatattagagtaatgggaatgaagggtagggatggatgacagagatattttactcctaggaaaaatcagcaggacttggacagtgactagatacagagaatta

SEQ ID NO: 160170 - DNA, 220 bp, Homo sapiens
agcccaaagtgaaaacacttttaaaactataatgtggtatacatatatttaattaaataatcactttcctaaaaacaaaactctaatcttgattgctgcaccagccaaacagaaggaaacactatcgcagaagttctcacatggactaagaaaataagtatacatactcccaattcttactgcaggttctccaactttggtaagaggatagactacaaca

SEQ ID NO: 160171 - DNA, 429 bp, Homo sapiens
gggattacaggcacccgccatcatgcctggctaagaaatcagattttaaaagaagataggaatttgtttttatgagtcagggtgctacctgttttgttctggtttaagatcacattaccttatttctacttagtattgccttttttttggatttgtattacttgttggttagaattcagtagtactgaaggaagggcccttttgtgatccttgctgaatgcccagtgcgtagtgggcactccatagatgttagttgaaagacagaaaataatgagctggaggatggtagtgtaggcatgccctagtcattaacttttctggtcatctttgatctgagtgtgctgttgtgtatgtgaaagaaaataacacaaacgtctttaaaacttttgagagtctgttctaaatagctgtctcgaatgccttatcttt

SEQ ID NO: 160172 - DNA, 611 bp, Homo sapiens
  misc_feature (555)..(555): n is a, c, g, or t
ctggcatgctaaaccatattgttcttactcatcttggtatacctcacaatgctccccttagagtgagtgttgcagcctattcttaaatttcttgtagagacagagtatctctatattgctcaggctgctttcaaactcctgggctcaagcaatcctcctgtcttagcctccctaagtgctgggattataggcattagccactgtgtctggccacaaaatgatttttaaaaggagttcagatgatcagaaatggggttgaaagacaaacgtaggacccttgttatgtgtggtctaggcttattcagttgtttattctatttctcctgccccttttagagagatacgttgtaagggttttgggcactgttattaatatgaaatatttctgcaaatagaagataaatgtacatcctacagcagttgcttgagtggtttacacacatgaattagataagttatttatagattttcttttcttctgtattctccattctgttttctcctcttcagtccccttaaacctgccctagagcagaccctcctcatctgttctgngacttttccaatagcctgtactttatgaaggactatcattagtcatattgttcttg

SEQ ID NO: 160173 - DNA, 534 bp, Homo sapiens
aagaggatcccctccataatgtgtgcccaggcgtgggaatgcacgtacgctcccagctactcagtaggctgaggtgagaagattgcttgagcctgggaggtggaagatgcagtgaaccacggtcactccagcctgggggcaagaccctgtctcaaccaaataaaccaaaacaaaaaaggcaatttatatacccgtgttcatagcatcgttcacaatagcccagaggtaggagcaacctagtgcccatcatcgaatgaatggaaaatcaacatgtggcccatccatgcggtgggacatgattcagtcttcatcccagcacttagggaggccgaggcgggcggatcacctgaggtcgggagtttgaggccaacctgaccaacatggagaaactctgtctctactaaaaatacaaaattagccaggggtggtggcacatccctgtaacctcagctgctcaggaggctgaggcgggagaatcactcgaacctgggaggtggaggttgtggtgagccaagatcgtgccactgcactcta

SEQ ID NO: 160174 - DNA, 610 bp, Homo sapiens
tcccatgccttccagcttcgtttatacagaggtaattcccaagtctctcactctggcctgatcccctatcacttccagactcatgtatctttctgttgggcatctccacatggacatgccataggcacttaaactcattctctttctcccaaatcctactctcccaaatctgagagaatggaacccccagctatctagtgatcaatcaagaaatcttagtgtcttcattgattcctccatctccctccaaaattctatcaatctcaataactgaattttgaaaatttctctcaaagtcaaccattccttcaagttccttccactgatccagcttacaaaaactatcttttgtctggattattccaatgcccttctgatacgtctatctgcttcagtcttgccccagtctaatctaatctccacactacagccagagtgttatttctgttatgccaatctgctcacatcatttcccagcctaaaacacctgaagggggtccccattgtcctcaatttacatggccttggtgttctggctcgcatatttaaccacacccttttctgcagcctacatggcagctacagaatttcttttagttcctttaagcta

SEQ ID NO: 160175 - DNA, 159 bp, Homo sapiens
cccctcatatcctctccacaagcacggccacctctcggaccctcaacatctcttgccaagtttccaatgcaccccctccaatatgctcccattcagtggtcagggatatctgtgtaacgcatatgccaatgtcactcccccactcaaaaccgatgtgca

SEQ ID NO: 160176 - DNA, 336 bp, Homo sapiens
actagaaaataaacccccggtttatttctaaatgtctgttcatctctttttctctagttcacaccaaggatttgaactgtcttaaaaatttgtcttaaaaacagatatgtagaaaatatattgaaagcattggccctctcttttgtgggactgcattcagtcagcctcaataagtgctggatgtgccagcggctggtgaggctcttcggcccattaggatcagggttggtgtggctctggttcagtgtgactgccccaactttaaactctattattgtggcagatattcataagctcttttttttttttttcttttgagctggggtccaatttctg

SEQ ID NO: 160177 - DNA, 249 bp, Homo sapiens
tgagttttcagttgccatggacccaacactcaaggtcacataatctgagcatgcccagatgaaccaaatgtgtaaccatgggtggaacctatatgcttggactgaggtgtggagattaaagtaaaaagtagatgctgggcacggtgactcatgcctgtaatcccagcactttgggaggctgaggtgggtggattgcctgagctcaagagttcaagaccacccagagcaacatggtaaaaccctgtctct

SEQ ID NO: 160178 - DNA, 447 bp, Homo sapiens
acattttgttggtttgtgagaagattctgtctgctcagtcactatcagggctcactgacactagatgccactctgatatcagagcggtctcttatttgggggtgaagacactacagtgggaatctgagtatgcaaaacttctagctgggccagatgtcacctgacacttcttcatcacactggcctggcctgaggactgctgagtatactggtaggggatgctggaaggctggcagcagtgagcacagaagctgaggcaacccaagggaaatcaaagcacatcatattattagcaggtccctgcccaaaatttatagattttatcatcaagttagttatatgctatttattaagtctgataaagcagaacaagaaaatgtgccagaaactcttaaaattgcatataaatataaccatgtgcatatattacatatgtcaatgagctta

SEQ ID NO: 160179 - DNA, 259 bp, Homo sapiens
cacctggcccagcctgataactagtttcctacaatggcttcctgcgtggtctctttgcattcactcttcccccatacagcccattatcaaacagtactcaaaatatttttaaaacataaaccttatctcccaccactgctaaaagctttctaattgcttcctattgcattaaccataacatccaaactcatcactacagatgaattataatgcctaacaattcctttcatccttgggaggggatcctcagaccacccat

SEQ ID NO: 160180 - DNA, 150 bp, Homo sapiens
gggtctagtcctccaaggatgaggaactgctaaaagctttctaattgcttcctattgcattaaccataacatccaaactcatcactacagatgaattataatgcctaacaattcctttcatccttgggaggggatcctcagaccacccat

SEQ ID NO: 160181 - DNA, 721 bp, Homo sapiens
cctagtttggttctgagggagactcatctgtaagactttggctggagaagtgggcagggcgcaaaccatttggatgccacgtatatacctgctgagttcttctggtgaatctgctgccttaagtagagttgcagagggagatgcctgacttgatgaggttgaaaagtaaatggcgtgtgggaaagctgcactgaagaaagaagtttggaaggtaatgtaagaaaaggaaagaggtagaaactcaaggggagaagggcttgggacttttttgggttagagagaatggtgggcacatttatagactaaaaagaatgagcaggtggaaaaaaaaagagtttaatgatatgggaaggagggggaaattgttgcagcaagaacctacagatatacacaaattaagatggttaaaaaaaaccaaaacagcaaaggaacacggtaggcagaatataggcagcctatggtttcaagatggtgtctagaacagcatagtgccatgtaagactatgcttctaagaaaaatagcaccaggtgccattccccgcatgactccaggggagcagggattcccctccctgccatggccgtgaggtgcagaatatccctgaagtccacagggtcttcatgggcagacatgcaaatgtacaggcaggcagcaatgaggagaaaggaagaaggaacagtggcgtggtgagtacccaggatttcccttcagttccctttg

SEQ ID NO: 160182 - DNA, 750 bp, Homo sapiens
gttttggaaagggagtctcgcgggttcgccccggcggggttgccgggttaagaggcctcttggactttggctggagaagtgggcagggcgcaaaccatttggatgccacgtatatacctgctgagttcttctggtgaatctgctgccttaagtagagttgcagagggagatgcctgacttgatgaggttgaaaagtaaatggcgtgtgggaaagctgcactgaagaaagaagtttggaaggtaatgtaagaaaaggaaagaggtagaaactcaaggggagaagggcttgggacttttttgggttagagagaatggtgggcacatttatagactaaaaagaatgagcaggtggaaaaaaaaagagtttaatgatatgggaaggagggggaaattgttgcagcaagaacctacagatatacacaaattaagatggttaaaaaaaaccaaaacagcaaaggaacacggtaggcagaatataggcagcctatggtttcaagatggtgtctagaacagcatagtgccatgtaagactatgcttctaagaaaaatagcaccaggtgccattccccgcatgactccaggggagcagggattcccctccctgccatggccgtgaggtgcagaatatccctgaagtccacagggtcttcatgggcagacatgcaaatgtacaggcaggcagcaatgaggagaaaggaagaaggaacagtggcgtggtgagtacccaggatttcccttcagttccctttg

SEQ ID NO: 160183 - DNA, 165 bp, Homo sapiens
taaatcaataactgttgatgtaactcagcactactacactgctctaggcacataatttgtgtaaaagacaatgaaatacctattcttatgccagatttctttttacgaacatagaatctaagttattcagagaatatgtcattttattacttttttttttttttt

SEQ ID NO: 160184 - DNA, 468 bp, Homo sapiens
atttatgtccgaaataactgcacagggccctaaatacaattctgcaattacaagcaggatcaattattaaaggctgattatacacatttttggtattatattttccctgcctccttcattgcctctccagtaggtttgactgtcttttacttatcgattcattcaatacacatttatgaaggacctatttaggaggcagatggtaggatacaaaaataacacttccttcaagaaggtcattctctcaaggaagaaaaaacaagcaacaagtagtatgacaaaagaaagctaagtctaaggctggaaggccttgtcctctcatatccttttgtcccattagaatgcagtagctaaaggcaagagtttatcttattcaactttccaccctggcatttatgtctggtacatagtaagagctggtaagagctcaattaatactgtcaccttcaaaccaatggccatgctggc

SEQ ID NO: 160185 - DNA, 202 bp, Homo sapiens
acccttcccagattcccctcagtaattataacaaacttcgatgagtattgaagtcatgtctttaaatttttctgtatgacttgtcatactgccaaactctgatcaagggtttttggaaacccaagaacatagggccaaagtggaggtaagccacaacagccacctctggtcatttagtcaacatcatcactgtcgtcttaaa

SEQ ID NO: 160186 - DNA, 509 bp, Homo sapiens
ctgtttcaaaaatctttaggggcctagactaagctacaaaaatggacaatcctccttatgtcttgcccaagaaaatgtttctgtgtaatctacaataatcatgttttcacttacgagaagccacaattcctacagcaaccttaaaatgaaaccaagaggcgacaataaaaacattgctttaaaacaactgttcttgaaaaatccctttggatctggaatccattaccactgtatggcttgccttgtatctcaataacagtcatcacaggtgtttgaaacaagcaggccttggctttggtgttccccccacccaaaatgggacaactctctgatcataatcactcaggctgagtgtaatcacctacagttttctgaagtgagggtcaataatgtctccttttagtttctatgaatagcatttttcatagttgctcagatgccttccctcatgtaggcttgggtaggccatgatataaataaaacactgcctagattattttataagcagg

SEQ ID NO: 160187 - DNA, 243 bp, Homo sapiens
tccctggctcatgtgcacactcctcctcccaccatgcaatgcaaatgcgcaacccttatctctctttctgcattcatggcagacatcactaatcgatccccacattcttcctgaagccaggacctcagccctggagtggcatcacacacaccaagctgttgaagacctggcccagctgaaaatgatttaactcaaccttggacaaggactggcctgaaccaggcactggaagacagcatgagg

SEQ ID NO: 160188 - DNA, 589 bp, Homo sapiens
tatagaatgcttataattgcacagcattccagtaactgatagaagaaaagacaatgatagatgctgatccttattccacgtcaaatggccttgtatagacttgcctaaccagagtctcagatcccactgagtgcttttcaaaaggggcatttttccctgttataacacaggtactatttttggcctcacaaagccttcagcctagacagtgaaatcccagctatagacacatgcaaataatcctagaatttgcaaatatgctacagaaaatatcattctctcttttatgtcaaccctcacatcaccactagtactcccataggcaaggggagactggcaaagattctttacactggaaacaagtgattctgatacactgcagatacttacctcaatacaggttgatagctcattaacacagcttagatttcatgaaaaagtctgcttcctggccggcgcggtggctcatgcctgtaatctcagcactttgggaggccgaggtggatagatcacgaggtcaagagatcgagaccatcctggccaacatggtaaaacaccatctctactaaaaatacaaaaaaaaattagc

SEQ ID NO: 160189 - DNA, 740 bp, Homo sapiens
tgctttttttttttttcatttcaggttctagttcaaattgaatccaagtgaagtgaccccataatacatgttaattgtggaaaaaaatttaaatttagcaaagtaaagaatagagcatgtcactctaccatccactcaacatttttgtggttttttttcatttaattaattccatttattcattctcttaacacaatgcctacaatatgccaggtatattatattggtgttaggttgggctataatattaaaaaggacagtcatggttcttgcccttgaggtctgttagatcaggaattcagaagtgggttagctgagtggttctagcttgtggtctctcatgagattgtagacaagatttcagctgggacttcagagtcatttgaaggcttaactggggctggcaggcctgcctccaagatggctcactcacagggctggcgagcagtgctggcagttgacaggaggccacagttccttgccacacggacctctccacatgcttcttgcgtgtcctcacaacatgtcagcagctttccccagagcaagtaatccaagagatcacaaggcagaagtgacatgtctttataatcacagatgctaccctgctgttctgcagtatcctgttggttccccagtctaccctattcagtgagggagggcactcaccccaaatgtgccgggaatcagtgggggcattttggaggcttgccactcgctgcctgtaaaatgagcatcat

SEQ ID NO: 160190 - DNA, 742 bp, Homo sapiens
catatcaagtcagcaagcccccttttttgtagcagggtctcactctgttgccaaggctggaacaagccctcttcaacaaagctaagatggtccatattactcatgtggatgagggtgttgaaggacatttactgccttccttcatggtctcacttcatgatcaaaccaagatgcacaggaaataggtttgacaatttacctttaccaagaaagacgattcagcaacagtggtagagctgcctgtttgaacttaaccttggtcatctcagtttgaaatacaaatggcagcatggagagcaggctgcccgctttttggttggacatttctttcactctgagtttgaggtacagcaaatttcccaaatcattcagatgtaaatattccaatactcagaccaggggcccattcaggaggctgagtgcaggaagatggcctgagctcaggagttcgataccagcttgggcaacacagcaagactgtcttgagaaaaagaattctaaacaaaataaatacaagaattcaaaacaaaattcatgaaagatataggaagggtgagggaagaagtccaacattttatcacccaccagctaccaagtatctaacagcacaatgtcctagctctgcggtgctcttgaaagaaaaagtgaaaaccctgacaagggagccatctggatttgtattcctcaccatttaccatgactagaatgcttaggagtgtgcccttcagaaactgagcttttc

SEQ ID NO: 160191 - DNA, 378 bp, Homo sapiens
ggcctcaagctacttccactcatggtggaaggggaaggggagctggtatgtgcagagatcacatggagagaggaggcaagggagaagggaaggtgccaggctctttttaacaactagatgttgggagaactcttgctggaactaacagagcgagaacacactcattacctcatggatggcaccaagacattctcgagggatccattcccatgacccagtcacctcccattaggccccgcctcccacatgggggatcagatttcaacatgaggtttggaggtcaaatatctaaactacaacaactgcccttgcttaaacccctcctaacttctcatcttgcttagagtaaaacccaagcccctcacttggttgtttcaa

SEQ ID NO: 160192 - DNA, 393 bp, Homo sapiens
cacatgtgtagcctcggtggttttgtgttgtagatgataaggactaccaaccaccagaggaagaatctttgccaagggtggcatggcaaggtatccatccatctgcaaacagggttttgactattcagtatttgactaggcagtgttattcagtgtaatacttctttctcttttttcaaatgtcctcagtcttccctgtaataaacatcggtttctgaaaagtgtaattgtgaaacctcagatatctgaccaccaggaaatgctgttgagaggctccttggcatttataataatagcaataaactcagactcagtaaagatggttactgtgatttcaggttttgggtaaacagacgggaagccacaagatcaatgtcgcttgagcaggtgcgc

SEQ ID NO: 160193 - DNA, 468 bp, Homo sapiens
ggcttcacaggtgcccttcctgctgtctgggaccctttgccagactcctccccacctggccacccttctttccaaccaacaacgtggctcctcggttcctccaggttccttcctgccctgtaaaacccctggcctcctgccaggctcaagaaatgccctcggatctcttccgtgctttcgccccgcaggagacacagcctaggtcccgcctccgtcacgcgacagagactcagaaagcgcccacgcgggcagggcccgggcaagactacctcaccgccgcccacccatccccggagccttcagcagcgcggagctcaggcttccctgtctcccctctgcccccgcgccggccgtgcgtgcagtgcttcggcccctaggctgcgcccgcgccccgtcctccctcccggggttggtgcgggtctcccaggccgggccggggcactggaccgacgcccaggaagcggccgc

SEQ ID NO: 160194 - DNA, 495 bp, Homo sapiens
aaacttagcatcctccaaggttggcctaagggaagaacttccttgtgaagaggacactggctgaactttgtaactctaatttcaggtcaaccaaattcaaactccttttgtgctgctctcactattagctgttccccacactagcctggcctcgggagagcagagatgatgatgccactgtcaacactggccttgtgcagcaagggtgacagcagagtctccccttaattcccagtgggacatccaagacaatggtgtcatcataagcctcattattggacactcatcattatcacaccatcacaacagctgtttgatttttattttcttggtttctttgacttctcattatgtaatgcgcgttatcttattcaacagtgctgtgatcgagggcgtgatagaagcctgaaagtatacgaaaaatcaaaccaaatcaaataatctcccgaatagctgggactacaggcgcccgccacacacccagctaattttttg

SEQ ID NO: 160195 - DNA, 628 bp, Homo sapiens
cccttcctatgcatttttttacccagttagtgcttttaacacctgtatttagtgctctatagttttactatattgtgaatagtttgggactctggtttacttatttattcattcattctgcttgcaaatagttgagctttctaaattgccactctttcaacaattctggaatattttcagtttatctgtttaaaaaacacctcttttgtattagcttattctaaaatgccaattagacatcaatcaaattttctaacttttttcttcatgtcatgcaaactttcttttgtagttaccattgctctttctgagattgcattctagatgctttttctattttaactttatatagccaagctattgttttttcatcagtttcttaatttttgatctttgattttcatttcaataagttgtattagatctcaatttactactgcttttgaatattttcttctggcttacattttgagctttttaaatttttttttttaattcttgatgtatttgactacatagtaggtatacatacgagcttattttttattatcttaatatatggacacttcattatcttttttggaaaggttcataatatataactttattggcctatctctcatactcc

SEQ ID NO: 160196 - DNA, 359 bp, Homo sapiens
ggcagacagaccacgcttttattttcttataggcatttatgttcttacagggatggtttagagaggcttatggatgaattaaatggtttgcaaaattaagactggattctctaccaagtagataggcagggacaataaaggaataaaaagccacatttggagctaatggcattgcaaaaccaattctggatggagaagttggaatcagatgaccctctgaacttgaagacatttggtgaaacagcctggagtctgcccatcatgcactgagtcacgggtggttggtgtgggtagacactctaaacattttggctctaagcgcctctgtttatacaacattctttcccgttgcgtcagga

SEQ ID NO: 160197 - DNA, 486 bp, Homo sapiens
tggttgaagtgatttgttacatgatcttcaatataattaaactacatgattaaaataaaaatatataatttgtattcagcattagttcattatataacacaattttactctgaaatgacattaattattggcctagaattagagaccaggcttttacaaagttgaaaatgattgatagtatactcttaggatcatataatactaaaatcattcaattatttatttctagatatacagtcaccctcaaagcttgtatgtatagattttatgaatcacttaaccattttgcatctctttccatatgttaaatatgtcaataatacacatgtcaaaagcataaccattaataaccttacagaggtataatttaagtaactttaaatcattacagtcaccttccagttgccaggctatcttgaaaatatgtaattgttaagttgatgctatagtaactgtcaatgtttctaatggcaaccaagaaaagca

SEQ ID NO: 160198 - DNA, 296 bp, Homo sapiens
ccactccatcatacagattttccccagcaaatacatgcatatgaaaaaaaaactgtaatttgttcagcagcaatagatataaattaaaaaaaaaaaaaggatgcgatcgctcacacctgtaatctcagcactttgggaggctaaggcaggtggatcacctgaagtcaggagtttgagaccagcctggccaacatggtgaaatcctgtctctactaaaattacaaaaattagctgggcgtggtgatacacaactgttaattccagcttctcaggaggctgaggcaggagaatagctt

SEQ ID NO: 160199 - DNA, 362 bp, Homo sapiens
cactatgcctggccttgaaattatattttgaaaaagagccacagattattttggtggggtttcacattctccaatttttttttaacttttacttttactttttagaccacttaatgtggtctaagattcacatgtgactctaagtgcctatttttcaggtagctttaatttttttaaattctaaaatctctacttagaatccttcctgttaacctcaactggaattaggttaaacttttttttaaaatggaaagtttcaagcatatataaaagtagagaggatggtataataaatccccaagtttccatcgtccaacctcaataatcattaactcctcgtctctgccccaccccccaatccc

SEQ ID NO: 160200 - DNA, 200 bp, Homo sapiens
gcaaagtttacccaatacatacaatttcagatgtatacgatttttaatcaatacccaaattatcttgagtccctttccttataccttaacaactcccatttaaaaagatcagaaagatactcctttaggatgaaaaggtagatgtgatgacttctaaagtgacaataattctagaattctataatactctggattaattt

SEQ ID NO: 160201 - DNA, 547 bp, Homo sapiens
gtttattccgcgtctccaaggggaaaaagaccctcccagccccctgcatctgctgctgtttaatagcggttacaggtattccagtgatacaactatgctgcttagttaccctccacgcattattttttaattgtattaatggtacgccatatcccttactgttaagtacttacatgtgaataatcgtaagaatatgattgcttattgatagcctataaattcatgtcaggaacaatagtgatgtctagcaaccgcagactgtcaacatggatggctgagatggtgacacctttgctttctgatggttcaatgtatacacacttctttcatatatgaaaatattgtataaaattacgttcagactggccgggcatggtggctcatgcctgtaatcccagcactctgggaggctgaggcaggtggatcacgatgtcaggagatggagaccatcctggccaacatggtgaaaccccctctctactgaagacataaaacttaactgggcatggtggcgcatgcctgtagtcccagctactcaggaggctga

SEQ ID NO: 160202 - DNA, 280 bp, Homo sapiens
agcattgtaagtgcccaataaatggcagttttcatcactatttccttatcttggaagacaggagtagctaaattatcatgtgccattgataccaaaggcctaagggagaagaagagaatgcatagtgaaaaaggagaacattttagtggccagaaaattcagaatatcttgcccactgacatatcaccaccttccaataaccaacccacagctgggctgcctccctggcatttctgtcatgtccttgcctaggtttcttcaatttatgcttttctttttg

SEQ ID NO: 160203 - DNA, 291 bp, Homo sapiens
gcaacaagagtgaaactccgtctcaattaaaaaacaaaacaaaacaaaacaaaaactaaagtctggctaccttctccaaacattctgaattaattaagatggaatgtgaccgggcatcagggttaaagtgtcttcaagagactcagtgtatagcaaagtttggggattcctgttttaacatgaagcagagttacttctggtgacacgtacctcaacagagcaagcctagacaccctgaggaatgttttctgacacttgaattaaattatactgtatagataccacgcttgt

SEQ ID NO: 160204 - DNA, 659 bp, Homo sapiens
ggaaatcaggctatgatcaattgagtatcgaagttcgagcgtcggtactccggcagccccctgcaagacgcagagagccaaggggatttgctgagacttaacggggcacttccagttcattaagagctctatggagaagggtctttcggggtgcagggatcccccaaagaaagggggtagggtgtcggatcaaaaggggggcacagaaaatatgtattgggcatctgaaggggaagtggcgctgcttaactctacccatttgttcatggaatactaggaggtaagagttggctgcgtgaatgttgcatgtgtggttctcaacatcattttcaataatactccttgtatttttgttcacaaaacctttaaaaagtctttgaccctgggctctttttgtcatatttatgctaattgttttaccactcgaagatggtgacctccctgtctgcaggtgtgcaagctgggtaggtccctcggggaccctgtgcgctaggaattcctgcactgggtgggttaaagtagatgatgcatctgctctcctaatttaatgtagtaatttctgtgcagtgcaaagaacaactggtcacatgaaaagtctgatttgatgcctcagccgctagctagctctgaatcttgagtaaattaccttctctctctga

SEQ ID NO: 160205 - DNA, 333 bp, Homo sapiens
tgacagctctctgtccagaccatacagccgaaaaaaggagtctctcacagggtgccacctgcatgccagcaggaatgctctctaccagaatttgggtcttggcctgggtcactttcagtgtttgccttcactttcttgtcagccgttatccgcgtatatgcttcggaagtgggcggcaagacgcagagagccaaggggatttgctgagacttaacggggcacttccagttcattaagagctctatggagaagggtctttcggggtgcagggatcccccaaagaaagggggtagggtgtcggatcaaaaggggggcacagaaaatatgtattgg

SEQ ID NO: 160206 - DNA, 237 bp, Homo sapiens
tatctcagctgctcctcacaataatattgtaaggtataatagatatttattatcctcccttgcacttatgctgttttctccagtttcatctccaaaggtcaaatccaaaggcctccaaacagtcctcacctaaactggccaggatgaaacatcaagtcatcaaagcctctccaactctctgctacccacctgctaaatgtggatgctccctatggtttcagcttccactctcttctc

SEQ ID NO: 160207 - DNA, 465 bp, Homo sapiens
aaaaggaatgaaattctgatacatgcgacaacacaagtgaaccttgaaaacatgctaagtgaaataagctagttgcaagaggacaaatattgaatgattccacttaacatgaaatatctagagtagtacacagattcttagagacagaaagtggattggaggttaccagcagctagggggagcgggaaatagggaattactgcttcatggttattaaagagtttccctttggggtgatgaaaaagctttggaagtaggtagtgatattggttgcacaaaattgtgaatgtaattattgccactgatttgtacacttaaaaatggttaaagtgattttatgttatatcttactacaataaaaaaagtctttaaaaatcacagcaagatgtttttgtagatatagacaagcttattctgaaatttatatgaaagggcaaaagttctagaatagctataacaatttag

SEQ ID NO: 160208 - DNA, 297 bp, Homo sapiens
cctataaatgtgtgatcctgctttatcatgccctccctcttaatatcaaccacttaagcgaaaacagaactacctctgcctcctacagtgtcctggccctagtcaagttaggcacactgctgggagtggctcccatggctaaatgctgtggtgccatgggatggtgatagagctgatatggaattttgctatacaagccagccctcactattgtaccctcatgttgagggagaaaaaaacatggctttagcacctatcacgtaccaggcattgtgctaggggctttacatacattaa

SEQ ID NO: 160209 - DNA, 257 bp, Homo sapiens
ctcatctcccaggaaccaagggcaaagcccagacctctctttgggcaaggttaatttctttactatagtcataaaagtgggacttcaccttgtcagagagaaagcctctctgagtaagtgacagttcagctgaaatctaaaggttaagtaggtattaactaggggagagaggttcaggatcattccagattaattacagctttatagcaaaagtgagtaagactagtaaaaggtacaggaagaagaccaatgtagct

SEQ ID NO: 160210 - DNA, 370 bp, Homo sapiens
gcggacggtggacaggcggtgtggacggtggacactgtgatgcggacggtggacaggcggtgtggacggtggacactgtgatgcggacggtggacaggcggtgtggatggtggacaggcggtgtggacggtggacaggctgggtggatggtggacactgcgatgaggacggtggacactgcgatgaggacagtggacaggtggtgtggacggtggacactgcagtgtgaatggtggacaggtggtgtggacagtggacactgcagtgtggatggtggacaggtggtgtggacggtggacaggcagtgtggacggtggacactgtgatgcggacggtggacaggcagtgtggatggtggacaggcggtgtg

SEQ ID NO: 160211 - DNA, 517 bp, Homo sapiens
ccgaggcaggaggatcccttgagcccaggaatttaaaaccagccagcgccacagagggagaccctgtcttaaaaacaaaatttatatgtacaagccctaaaccccaacacggtcatatttggacacgacgaaccttttaggatatcacataacatttataaaagagggccctcataatgggattagtgagagagagagagaactctgtctctccaacatgtgaggacaaagcaagaaggcatctagctgcaagccaggaagatagccttcactaggaacaaaattgctggcagcaagattttggattccccaagctccagaactgtgagaaacaaatttctgctgtttaagaaactgagtccatggtgttttgttatactagcctgagctaagtcaccccaagagtcctcacattaaccatatactgtcatacaagtgctgcatttggatctacctggaatgtctccaaattttctgcttttcctcttggacccattgtgagaataggtttgcttca

SEQ ID NO: 160212 - DNA, 204 bp, Homo sapiens
acttttagaacatttctgtcacccaaaatattccttgaaccaatttgtaaacaatcccctttcctaccacccattatgggtaaccagtaacctatagatttgccctttcttgacatttcatataaatggaataataacaaaaatgaccttaaaatgttattgaggtacattcatgttgcactacctgtcattagcttaatcttt

SEQ ID NO: 160213 - DNA, 145 bp, Homo sapiens
taaccatgcccatggtagcatgctccatttaccaggtatgccttgtccttctttagatgttccttgaggccaacctggtttcccattgtcctcagagaaaaggtgagatgtggttttcagccctactctacagcagcccacccca

SEQ ID NO: 160214 - DNA, 610 bp, Homo sapiens
aagcacttgctgagtgcatgagtactaggctacacttgctgagtctttgagggctgctatcttgccccctctctgtttctaggcagggaaaatgacaccttaaccattctcagttcaccacctcagaggccctcctgagtgctgatgtgattctttagccgccctgccacaaaataaggctctctctgccctcttgcctccaagacaatcagaagcagctggtagtgcttttgtactgttatgacaccaacttgacatttccctggatctgtgggcaacaagtactagatgctttctttacaattcttggaaagaatcaactgagaagccaaattctactggacattgtctagctggttatcctctagcttctgagatgatgctcaaaacttttaacaaggacattctagagaaatgacagataaatgctttgggacgccaccgcgacctgttgccccataaatgcacaagagattcttaattctttagtcagccaccatgccagcaataattaaacaagcccaaagggagcaattcatagctgctattggaccatcaatctggaactcatgacagatgccatcagaaaataatctgcagacgtgagcac

SEQ ID NO: 160215 - DNA, 360 bp, Homo sapiens
gacactcatactcacaggcacgtgcttgtcagctcagtgcatacacaagagcacacctacacacgtacacatatacacacacagatgcagggcctgcacatacgtgcacgcacacatgcatgtgcacttgtgtgctcggccctcagttgcattctgctcctaacagaaggggcacccgaggcttccccagtccctcaggagtcccactttctgctttcttttcccagccgagccacttcccaccagcgctgggcaggcttagcctggtgcttgacctgcttcccccatctacatgatgcggatgatcagtgctcacacgggaggtccccagccatgtgcctggcacacactgggccacaa

SEQ ID NO: 160216 - DNA, 373 bp, Homo sapiens
gcatcactgttcattccccaacacataccagacgcttgttactatcatcctcatctcgcagatgaatagacaggtcatttaagttatctaatcaggagaggggctgagtgcaggagctctgccatctttacatcctgccctgtcgtgagcagatttgcctgctggctactttgtccccattccgtgagagaacagagcagaccctcctcttggccagaagagaaaacagcgtcaatgaaagagcaatcaggctgagtggcctccaattcaacctggcgctcttttgcgtccttgcctgagcacaaagcccttcactccctgttggaatagcagggagcaatgaggatggagtcccctgacctcatgaccaagg

SEQ ID NO: 160217 - DNA, 641 bp, Homo sapiens
caggaggtggtaaagcagacaaccattgagatatctggtagaggagcaagtgaagtggacaggaatatccaaggaagagcctgatcagtgttggaattatcagggaccatatgttattctgtaaactttacagtcaaatgaagctttgaagagtggaatgtctctaaattaagggattttttcagatgttagaatttttggcaattttaaatgaggcttagtgggataagactggagaactatatgaggtcagcattgattaaatcaagcacctgaattcaaaacttggagatatgaacttaatgggataatttttatgcaacaacaagccctgggcatctacttaaatctgtttgtgtgaatttccccaggtcacacatattgtagaatatctaatactagaaactggtttctgaacttcctgtccaatgcatttatttgccactggaaaaatctcacccaatgcatttcccactaacttgcctcttttgtgtttgaagaccttgcagaaatattgactaaactgaaaattattttctactcttttctgagaactgtaggggagagtgatgtggtggtgatggtgtcagtgagagcatatgtcctgagctcccaactgctacatcactgaatttcaccag

SEQ ID NO: 160218 - DNA, 380 bp, Homo sapiens
gtaactctcattaaccaagtgcactgtgttttcagaattatgaaaacagctcagaaacagttaaagtgacattagtaaaaagtatgtgtatttgtattactatgatatttatattcaagaagcttatatcaggaaatagtctagatactcagtggtatgtttgaagcataggtctgtttcatgtcttaaccctgctgagctgatgttcctggatgaaaccaactgcacttaaactcctgtatttatttttctgtctctgggccctgtctgaggcttcttaagatgttgttacaataatctactatgtggagtgtctggaggtgtctcttacttctctggcattaagagacagtgattcgttggaaagcagaatttcaaat

SEQ ID NO: 160219 - DNA, 492 bp, Homo sapiens
  misc_feature (299)..(299): n is a, c, g, or t
  misc_feature (371)..(371): n is a, c, g, or t
  misc_feature (375)..(375): n is a, c, g, or t
ctcaactgctttattacttcacacattccaaatgttaatggagagtatcttgaagagggaatgtgtgagggatggaagcggaagagaaagtagagacttttaattttctgtcatgtatttctatttgaattttttttgaaaataagtgagagtacctgagaagtctgtgtaagtggccaagagcactccgttggaggaataggcagcagaagagtaacctgacaaagagcccgagcaggagctgccagaagagggggattgtggagccagcaggaggaagagtgaggagtagtggaganggacttgctgatgataccttcgagtctgctgtgaatggaaaggagatagggcagggttggtccgggtctgtntctngtatgatggtaactgtgagaatatttgaaggccaataggcaggtgctagtatacatgttagagatttaaggtattttaggagggcaggagttgtgaaccaagggaagtataaagcgt

SEQ ID NO: 160220 - DNA, 613 bp, Homo sapiens
ttgccattttacttattcaatggggagttttattgccatggcagtgcagctttcatagctacaggatttcagcattatgctcacccaaatgattcttaaaacttaagagtcactgagaaaggcctaagggcacttcagaaagcaatggctttcccattcaccacagcttctggtatagatggcaaaggaaatagtgcccggagcaaaactgagatgtttcccagttacctcttggagctgactctctgaaagatggttatattatcaatgccaatcagaaactaggcatggagattacagtcctaccttcctctatgaacacaaatacgcctgcccccaccatcatccctctctccattagcaataacatttacgaatgatatgtggagtggctcctggacccctctctgatgttccctttttgcacagcaaaatgatgacagccagggactgatgatgcagttatttgtacattaggcatcaatctggaaaactccttctatagaaacagtagttaggccgggaaaggtggctcacgcctgtaatgccagcactttgggaggccgaggcgggtggatcacatgaggtcaggagtttgaaaccggcctgacca

SEQ ID NO: 160221 - DNA, 273 bp, Homo sapiens
gactgtggatctcaagccctcagtgccagcctggcactgggaaagcgtgtcaattgcagcagaggtgtcaatccatcagacccaagctccattcagtgcattccccttacctgttccgctgcaaaacccagagtccctcattcctagttcaggaagaatctcattttaagtggggagaaaggaagcatccctccacttgtgctgttgatgacaaaggaattagtgatgctctggggagtgtgctggaaatcctctacagagaattagaaaact

SEQ ID NO: 160222 - DNA, 435 bp, Homo sapiens
ctgtgagggcaattatttaataatcttaatgctttcttgaggattactgttccaattatgatttccatttctccttgagtcagctttaagttttattgctagaaaagaaaaatgccaacttgccgtcatctctgctgtcactattttgtgttcaacaattgccttctctatctgctgtatctttttcagcacagaagctgtaatgttattaaacaaagcaatgtatccagatcactcagaatctatgcctgtcacggggagcaggagaagagggtgaatgaagagccacagcatggcaggggagccactgcaaggatgctgaaactcgtgtgaacagagttgctgtaggcaggctgctatggaaccttttggggaagcactgcctcttagggatggcagtgaaaatgggagaagagggtggcattgcctccagat

SEQ ID NO: 160223 - DNA, 406 bp, Homo sapiens
ttaaaaaccttaattcccagccatgatgagatgcgaggtcagagacacctcgttacaccccctccttccctagccaccataagtctttctttcctcagtgtcgaacaaaaatcaaccctctcaaaagacttgttcactgctgatttcaaccaatggcctcacgctgccttcccttttgtggtttccacacagcaactgaccggcattcctttctgataagaggccactgactatggtgtggttctggccaggccacggaggctgtgcactcagtatctttctgtcctctgcttcaccttctgatggacagggtctaacagtaatacatttaaatattaagtgtccatctcaaagggcaacaagggacacatgtaacaaacgtgttagtttatgacacatgcatgtg

SEQ ID NO: 160224 - DNA, 587 bp, Homo sapiens
taaggaaaagataagcaacacatctggggaaaagggcaggtggccagcaatcgatgtggtagctctttgcccctctcggacagcaggaattagcttccccaggcattttctgtatgtgagttgtattgtgggatgtacaaatatcatctgttcctttgggtttccaggccagtagctctctattttgggttcaaacatgggttctcaggccgggcgcggtggctcacacgtgtaatcccagcactttgggaggccaaggcgggcggatcacgaggtcaggagatggagaccatcctggctaacatggtgaaaccccaactctactaaaaatacaaaaaattaggcaggcatggtggcgggtgcctgtagtcccagctactcaggaggctgaggcaggagaatggtgtgaacccgggaggttggaggttgcagtaagccgagattgcaccactgcactccagcctgggcaacagagcgagactccatctcaaaaaacaaacaaacaaacaaacaaaaacatgggttctcaaaaggcatgcccactgtctcccatggagcttgacagcccatgccattagctctcactg

SEQ ID NO: 160225 - DNA, 367 bp, Homo sapiens
tatgaggagcaggaatatttagagcagagggaaaggctggagccggacactgggggaccccgctgggatggggctctgccttcaagtggactccttcctgtgtgcagtgtctgccagctctgtttgctcaagccaggggggacgtttgctgagcttgcaaggggactctgacccttaaccattttgcagcctatggggaagtctcaggtatttgcacccattggaaatcaaagtaaagctaggagtctactgttggcttgcctcctgtatttctggttttctttcttgaggagtttgtggggggtttggaggcaccaacccctacccctcttgcctagtccttgcctgtccaaatcactaggtgaga

SEQ ID NO: 160226 - DNA, 439 bp, Homo sapiens
gttcacacaaaaacatgtatgctaatgttcatggtagtattattcataatagtgaaaaagtagaaataacctaaatgtccatgaactcatgaacggggaagtaaaatgtgaaatatccttattaataagagcttaattagctcttaataagctaacgcaggctgatgcagtggctcacgcctgtaatctcagccctttgggaagctgaggtgggtggatcgcttgagcacaggagttcaagaccagcctggccaacatggtgaaaccctgtctctactaaaaaatacaaaaaattagctggtgtggtggtgggcacctgtaatcccagctacttgggaggttgaggcaggagaattgcttgaacctgggaggtggaggttgcagtgagccgagatggtgccactgcactccagcctgggtgacatcgagattccatctc

SEQ ID NO: 160227 - DNA, 151 bp, Homo sapiens
aacttatttgacaaaataatacctgaatattttctactctataaagagatttagactcctacatacaagaagattagagattccaaaataaagtagaaaagatcttctccagggaatatggaaattatactgtcaagtgtcaacaacaatg

SEQ ID NO: 160228 - DNA, 253 bp, Homo sapiens
ttctcctttgcctgctgattccatctctatgcttgggtgagaagaccatggctacatgctgcgaaggcttgggctctccagctacccagtgttctctacaggtttccatcttatcagtctacttcttgggatctggctccctgctgccatgttttccaaagtcttaagtggctgctgatcccagttagtttgttccatcaaattctaccttttctagggctactggtgcctgctatgctgttactctctctga

SEQ ID NO: 160229 - DNA, 388 bp, Homo sapiens
ttacagtgaaatcaagcaaactccaccttcaccaagtaactaaacagaacatcaccagcaatggggcacagccaagccctggaccacctgctaggaggcaagaaggatgcagcgtggaggcggagctagacccctacagttgcgtgacctgacgctgctgatgggggagcattctgtaaccaaaggaggctgtaaccttccaaagagtcaaggtcatgaacatcaaagaaaggctgaggagcagccccaggttgacagagggggacacagccacaggcagcccagggtcctgaggctgctctatgctatgaagggcatttgctgggacaattgtggagaagtggacgggtcacggattgctgctgttggctggatggagacggattga

SEQ ID NO: 160230 - DNA, 265 bp, Homo sapiens
ggtttaacatacacatatcaataaatgtgattcaccatatacacagaacaaaaaagccacaagatcatctcagtagacacaggaaatgcctctgataaattcagcacacattcatgttaaaaaccctcaacaaattaggcattgaaggaatatatctcaaaaaaatgatcatctatgaacaccatactgagagtgaggggtcaccgagctcgcaattcgctagtccatggctcatagcgtgttgtccgtggagctgtaacaaggc

SEQ ID NO: 160231 - DNA, 175 bp, Homo sapiens
agcgagactctagagagcagccccgctgaagtgcagtggcacaatcatagctcactgcagcctcaaactcgtgggataaagcaatcctcctgcctgagtctctcaaggagctggggctacagatacatgccaccacacctggctaatctgtaaacattttgtagagatagggtct

SEQ ID NO: 160232 - DNA, 228 bp, Homo sapiens
gcctatactgtcccatctgcagataaatccacagaggctcagagaggttaagtaattggctgatgatgacatggcaggtggtgaagccaaaactagatcccaggttttctaagtctaagttcaagacactctctactcacataacatactgcatcatccattgatgatgcatcagtttcctcatcttcaaaatagagtgttatgtgagtagagagtctccgtcgaact

SEQ ID NO: 160233 - DNA, 207 bp, Homo sapiens
cgggagtgatcccaggaaacaatggacaggagtgaggaaataagacaggaaaggaggaaaattactaaaggagtgtgctaatgtgcagaattgctgctgtgggtaactggggctcaggccctttgggactctagggagactttgcaggacattcctcaatgttgtcctacccaagaggtgagaagttgggatatttatccagcattt

SEQ ID NO: 160234 - DNA, 913 bp, Homo sapiens
tgcctcggcctcccaaagtgctgggattacaggcgtgagccaccatgcccagccgaaaatggctttcttgagagatcagctttgaagctctactccttcattttaaagtgccccaggagaagtggacgattacaaagttgagattccacttaagtgtccccttagtttaactgtgggattcatctcctggggaggttgccaggttctggaaagtgggtgttaatgaccagggagggtgcccctaggctagcatcctgtaaccctcaggaattgagatttttatggaggttttctcttcctctctgtgagttttctctctgagaaacctgtctagggagggaggctctaggctagcatcctgtaaccctcaagtagtaattgagatttttatggagcttttatcttcctctctgtgagttttctctctgaggaacctcagtgtaccttttactggcctcctaggtaatacttgtttggagaatatgtgtgatgtctaagtcttcccagtacaagaaatttgtgtggtgtttgactgattgatggatggagtcttgttctgtcgccctagctgattgtaccactgcactgcagtctcgacctcccaggccaagtgaccctcccaactcaccctcccaagtagctgggactacaggcatgcaccagcacacccggctaatttttgtatttttttttgtagagatggggtttcactatgttgcccagtttggtcttgaactcttgagctcaagcagtctcccagagtgctgggattacaggtgtgagccaccacgcccagcctcgtgtggtctttgatacccctgggttcattgtattgttcttcccacactgcttttcattcattcatttattcagtcattattaattgagcagctactatgtgctgctgctgctc

SEQ ID NO: 160235 - DNA, 289 bp, Homo sapiens
agccctcaggtcactgggacatgcactgatggagagctgtggaactctccctggccaagaaaggtgtttgctttccagggaccctgggaccatctaggaagtggatgcattacctgcatgtgtggctacaaagagccttcctctctccaggaggccaccgtcctattactaggtcctcccttccctctactttgccctattcaaagctaccttccctctactttgccctattcaaagctaccatcaccaagtatcaaaacaaaggtcccaactccgcaaccattgtgtg

SEQ ID NO: 160236 - DNA, 442 bp, Homo sapiens
accagctcagccccgagctgccgcagcctcaggcagaacggaggtcaccttctctccttatcttgggaaccaggccttcctcccggggactgttctgggattgaaattgtgcatactccaaactttcgcagccatcttcccgctcagccccagacacccagcaatcaagccagatgagtaccacaaaacagtgtgtccccagcagctccccaccccagagccaaatgacagtagtgcacttaaaaaggaaaatcaggcctgttgtccttctccggttgcattcagatgggtcattagggccggaccctgcctgccccttggcttctcagggctttgctctgacaccatgacagctgcccggggctgagggcagctggctccactcaaatgaggaagaagggatcactcccattagggcctgctttgcttatgcatgtgtgtg

SEQ ID NO: 160237 - DNA, 1464 bp, Homo sapiens
caccatagaggtgggccgttggcgacgttagaggcgcgggtgttcggctacatcactggggcgccatggtgcctggagctgggcagttttctcatcagagtggggactggtaagagtgacctccccgccaggttctgtgtgttgccggctgaagaagggtagctgaaaaattcagacccagcacagtgtttatgttggtcaaaaatagaaaactatgtctggcgcggccgaggcgggaggacccttcaggccaagagcagcctagcaacatggcgcaaccccatctctgtagtcctacctcagccccccagctacttgaacccaaaggttcaaggctccagtgagctatgatcccaccacagcattccagcctgcgagattgagatgatgattattccccaccttctaagagacaaagaccaacgagccaccacagccaccagtcccagaacccgccaatgctggggaacggaaaatgagggagttcaactctggccctcacaatccagtggaggagacgaaactcatctgcctctgtccctctgggcacgcctcatgccaggtgcatctgtggacaggggccatgctcctgggcttccaaagttggagaaagctgccaggctcaggtctgaaggccagaattctacagtaagtcctactgagtcaaggtgggagcagggtcggtagcttccgaggctctgcgggagaatctgtttcctggccgtagaggtggcctgcactcctcagcctgtgctgcccgtctcgaatgactggagtttcctgcttctgtcactacacctcccaccctctccatcacctgctctgctcttacaaggatccgaagaaatggaatcatcgtatcgctgatctacgtaaacaaactgaagaattgtctgaaagaaaatatgacatgaacttatgaattcaacaggtgaagatttacaacttgataaatcaactttgtcagctcgagctgtaaaagccaaaggtccggtgatgatcccatacccttttttccagtctcatgttgaagatttttatgtagaaggccttcccaaaggaattttttttttttttttttgagatggagttttcactcttatcgcccaggctggggtgcaatggcgcaaccttgctggtcactgcaacctctgcctcctgggttcaagaaattctcctgccttagcctcccaagtcactgggattacaggtgcccaccaccacaccaggctaatttttgtatttttagtggagatgcggtttcaccatgttggccgggccagtctcgaactcctgacgtcaagtgatcttcccgcctcgactcctgatatcaagtgatcttcccgcctcggcctcccagagtgctgagattacagacgtgaacccatgcctggccaggaattttgttttttaggaaggctttctactaatggaattcctggccttgagaggatgttactttag

SEQ ID NO: 160238 - DNA, 708 bp, Homo sapiens
caccatagaggtgggccgttggcgacgttagaggcgcgggtgttcggctacatcactggggcgccatggtgcctggagctgggcagttttctcatcagagtggggactggtaagagtgacctccccgccaggttctgtgtgttgccggctgaagaagggtagctgaaaaattcagacccagcacagtgtttatgttggtcaaaaatagaaaactatgtctggcgcggccgaggcgggaggacccttcaggccaagagcagcctagcaacatggcgcaaccccatctctgtagtcctacctcagccccccagctacttgaacccaaaggttcaaggctccagtgagctatgatcccaccacagcattccagcctgcgagattgaggtaaaccctgtctaaaaaaatttaaaaaactatccaggtgtgcaacagggagggactgctaaataaaacatgaggctggctgggccctactgtaatcccagcactttgggaggccgaggcgggaggatggatggcttgggctcaggagttcgagaccagcctgggcaacatgacgaaaccccgtctctacaaaagatacaaaaattagccgggcgcggtggacacctggcctaatttttgtatttttttctagagatggggtcgggcaatcttctcaccttggccatcagagttgtcgggattacaggcgtgagggacagcgac

SEQ ID NO: 160239 - DNA, 256 bp, Homo sapiens
ttgactgctctcaggttactcaggaaaagaaaactttgagagggaggtagaccctaaaagcaattttaccactgtcaagtctcagccctttcactcctacaaactaggaggtcttgctttttccttcccactcatcccccccccatggaaagtggctcctgctgtttgtagcaaaattaatatgagcctcatttcttcatcttttgtatgaaggaatatgaatttatcttttgtatctaaattgtgcaacttagta

SEQ ID NO: 160240 - DNA, 396 bp, Homo sapiens
cacccaagagaaaagattcaaaaatatgtatctatcctataaacaaccctagcagttcttatgtcaacagtaaaaaaaagaatcctttgttccaaaaaaagtgttcttaaaaatgcgttgtaggccgggcgcagtggctcacgcctgtaatcccagcactttgggaggccgagatgggtggatcacgaggtcaggagatagagaccatcctggctaacacagtgaaaccccgtctctaccaaaaaaaatacaaaaaattagccaggcatggtgcgggcacctgtagtcccagctactcgggaggctgaggcaggagaatggcatgaacctgggaggcggagcttgcagtgagcagagatcgcgccagtgcactccagcctgggcaaaagagtgaga

SEQ ID NO: 160241 - DNA, 488 bp, Homo sapiens
aaccttccccactgaccctcactccccttcatcctaccctgagggtcacctccacccctcctcccaggaatgcctggagaggtttgaagatgctcgcatgagccccctgaggttctgcttctccaggcctcatccccagttcccccagtctgtcttcattacagcctaagcctcagccctgcccctcccaatcctggccgcttcccctggccataccgtcatctgcccacatccctcccatagggcagggcccagaagtggacaggatgggtgttttgtttcattttgttttgagacggagtctcgctctgtcgcccaggctggagtgcagtggcgcaatctcggctcactgcaagctctgcctcccaggagcctttgatgaagtgacctcatgcctggtgaaggtgccagagaagacagaaggtggcaacaacatggctctggttgagaatgtcaccacccttcagaagagccaggatctgcgggag

SEQ ID NO: 160242 - DNA, 220 bp, Homo sapiens
atgtattttttacagttctaaagaccgggaagtcaaacatcaggcagctacatctggtcagctgctgtggagggcctcatgctgtaccctaacatggacaaaagcatcacaggacaagagggaaagggtgacagcctaaactggctgtttatgacagaccgactctcagacccactctcatgataactaacccacacccatgataaattgttaattgatt

SEQ ID NO: 160243 - DNA, 263 bp, Homo sapiens
gtcagcagtatcatggcaaggttaggctgcaggatgccaaaaccggaatcctcatacctacccccgaaccatccttccccaccaagtcccaagctgcatcagtgcaggtgccatgaaggatggggaaggctggccccagggagctcgtcacgtggcaaatagctgcgagaggagaaggggctgcattgtggtagttcatctcaaggacctcgaacaccttaaccccacccatggggaaactggactcacgggggctggctctc

SEQ ID NO: 160244 - DNA, 277 bp, Homo sapiens
cttgcttgaatataggaggcagacgttgcagtgagccgaggtcacaccattcactccagcctgggcaacaagagcgaaactccgtttcaaaaaaaaaaaaatgacttggacttgtggtgaggggaggtcatctgtagactcctggacctgtttttgccttacttattctctaaagactgaaatatttcctaaaatgtatgggcactgtttaccagaaagtaccttagttaaaacataaaatcatttatgccttataaagctatattttttcaattgc

SEQ ID NO: 160245 - DNA, 623 bp, Homo sapiens
ataaattaaaaattaaaaattgatggtggaagaaagagctgatgcctactgtacaacagtaaagaggtagtagcattgttgaacatcccaaacaccgtatcttacattaagacaatataataaatgtgaaaatactttgcagaattgcccaaattaaaaactttttttatatttttatcattactttttaaagaattctgtaatttcagtcgtatttcaccttctacccaagggttgtttaatggaaaagctttttagggggaaaggcttttttttttctattttaattgttgttaataatttatagttttattacattccaatcagcgttgttcttgtaatatttcagcttatggaacttactgatgatgtcttatgacccaatattgattttttatgaattttccatgtgtacttgagaagaatgtatatgttttattattggctgtaaagttagagatatatatatatatttcccacaatagactaagagctctatgggatcagcaagatggatttcatcaatcttggtatttctagaaccatgcttagtacttagcttataagaaatgctcaaaaatttatagatggtatattagcatttaatcttggactttctagag

SEQ ID NO: 160246 - DNA, 313 bp, Homo sapiens
gcctccctgcaggggctacttcattaccaataaatgtttactaaatgcccaccatatgcaccaaatggtagacgattggaatacaaaagcagaagggagcaggattctcgtcctcaacaggcaaggatctgctatagactcacaccatccttcaagtctggccaccctccccatgacactcccttctatgttgcctctgggttatcttgtctctaattaaacactttggcaaagtgggatctcgttacctggggaagcagcccttttcccctgaatcagttcctttccttcagttagctgaggtacttactgg

SEQ ID NO: 160247 - DNA, 396 bp, Homo sapiens
attatagatctttaagctttcaattataagaactttaattttatatatgtttagagatacagctttcattttcttaaggtgttctggcatcaaaatgtattattttattctaataaatttctggcttgaacattctgacacttaaattatagcatgagttttttctacaaattgatatataaaatttttcatttgtgaagttttaaaaactttcatttcagtatcactttaagttttctctattctctctattatgctcctagcatcccacttacagcgccttcccaatgttctgcttctaacctttcacccctcaccacgaagttctgaatatgcatctctactgaggaagagatagcactcccgcaatgtgtcagaccctgtgctaaaaaagag

SEQ ID NO: 160248 - DNA, 199 bp, Homo sapiens
aatacatgttacctgggttacttcaatagtttaactggtctctgcttccattttccccacatctttactttctacacaggagccgggatgattcttccaaaacttatgatagactgtgtcccttcctaacacagacattcctactactaacactttttgcttcaatacatcacagtcatcaccaaggaatgacccaagt

SEQ ID NO: 160249 - DNA, 373 bp, Homo sapiens
gcacatttctaaaacattgccagaatctttaaagcgaggaaggagaccttttcttcaactccaagaaaaatgcgtctcatttatccccttcacgtctttctcctgagccatttctgccaatcctccaaatatgtatttacatacatgtcttcaaacacgatccacttgcccaatgtactttaatggctacaataaagaattaacactgtggatagagctaaggcattttcagtgcagttaaaaaaagaacactgtggtttggttctgctgaggcgatattgctcaacagttaatgtaatcatattacaagtgcttgtattaaaatcatatgcaagacaaaaatcggtctgaatggcagcaattaacgaaagac

SEQ ID NO: 160250 - DNA, 230 bp, Homo sapiens
ctttttcatttaaccatttatcttggagatcttttaattcaatacatagaaagtttccattcaaagtggcccccattcaaagtgggtcaggaaagtctgaagtccaacaaatgagagcagtttatcagcactgattataggggagtagtgggctcatgccagctgtgagaatagctgcctgtttccacaatgacatggcttttactcctcagaaactctgtctcaacccc

SEQ ID NO: 160251 - DNA, 163 bp, Homo sapiens
ccctgcactccctggctcctccccaggctcagcccagcaccggaaggatcacaggacagggcctgggggctgcaaaccctccaccgacgggagtggacacctacagtgtgcctgacagacgtgagctgtgcctcactggtccgtacctgtccctctccctgcc

SEQ ID NO: 160252 - DNA, 328 bp, Homo sapiens
aactagagaaggtaagagtaggaaaaaaggaatacagttcattccacataaatgcaacaccactggggtcccccccaacccatcagtatcagggaagccttactttgagagttttatgtatttctgtatttttgccagttgccaagagttgaataaaagttttcctggttcttaagcactgagttacaatggaattccaacagaattacacacgacatcccacttgaatgcccagcagggactttaaggtcattgtaataatgaatggccaagaatcaataggagttgagccttagcagccttcctgtgctgcagctgggcagaacag

SEQ ID NO: 160253 - DNA, 193 bp, Homo sapiens
accttccttcttttctcccacttttatctgcgttttccaccctaattgtgactcctgcaattctcccatagaatattcatttgctctttcccctttgtctaaactctgtgtggcagagtcatctctggaaaagtctgtacgtcacggggcataattgggtcacccaggccacctcccttgatcggggcccctg

SEQ ID NO: 160254 - DNA, 208 bp, Homo sapiens
tcctacatgtatgaaaaaaataataggcttacctacactaaaggctttaatagatatatacatgctgtttgctcaagtaaattaacgtagctataatcctcttactagcatgaatgactctctaaaataagtaactcacccccatccaactaaaaattcaccttcataagaattaagacatcccactgggtacctctgggaaaatgtt

SEQ ID NO: 160255 - DNA, 569 bp, Homo sapiens
ggcatgcacagtttttctctcctgatgtatcatgtgctgtgagtgatcttcctggaactgagggatggccatggagggagtgctctgtagctttgaaacctaccagtgggccttagttacagacatggccccaaaggaatcatagcaagcttggctcacagacaagcacaaggaaagcaggtaaagaggaaccccaggagacactgcagagctgactccagagaactgtggggtctgctgggcacctccctcccctcttcttcacaacagagcattgaagttatgtttttaacacatttttgcaacgtcaatagaaacaaactgtcttcttgctcctagaatatagagaagtggtagtgggatattagagttccactctttaagtgtgtattcccaactgatggaaaataacacccaaaccaaaacaaacaaacaagtaaacaaaaacccagtccaaccactgggggcctgcagaatatctcaggctagccgaagagaatgtgataaaagtaggttcataccttaggttccaagtattaatctcaaccagcctctctctctctctctct

SEQ ID NO: 160256 - DNA, 117 bp, Homo sapiens
ccatccatcatctggccttcatccagattcaatggtctataattaaagaatcacaaagatcagaattgttatcaaatgttgggcaaaacagctgtcaaaggagggaccgcccagaca

SEQ ID NO: 160257 - DNA, 617 bp, Homo sapiens
atgtcctaaccccagggactgtgaatgtgactttatctggaaatagggtctttacaaatgatcaacttaagatgaggtcattcgaaaaggctctaacccaatataactagtgttataaaaaggggacatttgaacacagacagacatatacagatgtgaaggcggtgagagaacatcatttacaagccaaggaacatctgaggcaaccagaaactagaagagatgcatggaacaggttctccctcacagccttcacaaggaatcaactctgctgacaacttgatttcagacttctcgcctccagaactgtaagacaataaatatctgttgtttaagccacccagtttgtggtacttcgttattgttattactatgagacagggtctcactatgttgcccagctggtcaaaaaaaatggcatttatcctgtcataaattatatgtttttgctgtcgtttgctttgttttgtttgagacagagtcttgcgctgtcgcccaggatggagtgcagtggcgcaatctcagctcactggaacctccgcctcccgggttaaagcgattctcctgcctcagccttccaagtagctgggattacaggcgcatgccaccacgcccag

SEQ ID NO: 160258 - DNA, 449 bp, Homo sapiens
ttcattaaaaaaatgggggtgggggcaagggtcctgagaactcagagatgagcctgtttacacaccagtcccagaaaagcctacagaaaacctggggaacaccacactgaccactgagaccataaaagccccagtaaagtccacagaaaacccagaaaaaacagcagcagtcacaaagactataaaaccttcagtcaaggtcacaggagacaaatctctcactactacctcttctcatctaaataaaactgaagttactcatcaggtgcccactggttctttcaccctcattacatctagaacgaagctgagttctatcacatcagaagccacaggaaacgagagccatccatacctcaataaagatggctcacagaaaggtatccacgctggacagatgggagagaatgattcattccctgcatgggccatagttattgtggtcctgg

SEQ ID NO: 160259 - DNA, 663 bp, Homo sapiens
ggaccacatcacccaatgacaagatcacctcatctgcagcagagtctacagaacatagagatagggctacatcagccaatgtgatcacaccagccccagcagagcctataaaacatgcaaaaaggaccacattggcccatgagaagatgacacaagtcacagaaaagtccacagaacacccagaaaagaccacgtcaaccacagagaaaaccacaagaaccccagaaaagcctacgctatactcagagaagaccatatgcaccaaagggaaaaacacaccagtcccagaaaagcctacagaaaacctggggaacaccacactgaccactgagaccataaaagccccagtaaagtccacagaaaacccagaaaaaacagcagcagtcacaaagactataaaaccttcagtcaaggtcacaggagacaaatctctcactactacctcttctcatctaaataaaactgaagttactcatcaggtgcccactggttctttcaccctcattacatctagaacgaagctgagttctatcacatcagaagccacaggaaacgagagccatccatacctcaataaagatggctcacagaaaggtatccacgctggacagatgggagagaatgattcattccctgcatgggccatagttattgtggtcctgg

SEQ ID NO: 160260 - DNA, 237 bp, Homo sapiens
acagcaggccccaccccggggtcactgccaataggggccacggggcagactgctgctcagaaacatgatggaaatcagcagggcctgggtggaagccacagccagccccgccatgccccacgtggccaggcccacatcggacagggtgcctcccagctgccacccaggggctctgtcccacgagccccaaacgccatcccctctaagggaagaccctggcaggcctctgggtcacag

SEQ ID NO: 160261 - DNA, 228 bp, Homo sapiens
atgagtaaaggatgagcaccttccaactgtctcccagtaaagacttaagggggcaggaaacaaaactgcaacatagttgctctcaacctccccttcaggacttctcatacttaacacacaggcctctctgcttagtcatcaggcttcccagagataatctctggccatccaagttcatcacctcaaccagaacacactcctcttttgaatattccttctccctccagg

SEQ ID NO: 160262 - DNA, 228 bp, Homo sapiens
tggccctgtctatgcaaaccattcccaacatcacacaagccagaaactagggagttatcccagactccaactctttctgccccaccaaccaagtcactccatccattacctgattacatcaaagagttcacagcaatctttgacccaatcacctcgttctcaatatctactgtcagaaaatcattcaaaatatagaaaaggttataggtacaaaaaggctcatcacag

SEQ ID NO: 160263 - DNA, 254 bp, Homo sapiens
gtctggttgtgaggatgacggaaccttgcccgaggaaatgggcaatgaacaggagcctgtttgtttctccttccagctcctgacctgtctagctcctgaccctctcagtgtcattcttgctcacccctggccctgctccctggatatgcagacaggatgggcttcttccctttagaccttcactttgctcttttggactcctcttctggccttgccttcccctggtgtcatctgctggctccctgcctgatact

SEQ ID NO: 160264 - DNA, 279 bp, Homo sapiens
ctccttgacctgacccctgctggtcccttcagtcctacctctacttagtctaccttgcacatacatctagtcacattcaactgcttccagcttctcacacacaccaggccgtttcacatgtttgtgtctttgttcctcttggttgtgctgcctgtaatacattttccatctttattcatttggacacaatttattttctgaactcagtttagatgtctcctcctccaaaaagccttccctagatgcccaggctgggtctagtgatcctcccctctgcac

SEQ ID NO: 160265 - DNA, 379 bp, Homo sapiens
aggctgatgcccatggtctctgctctagggctggacccatggaaaatgtaaccagaacactccagcccacctgggatcattaattagcctgcatgcactacccaaatctgtctactttcactttctaggtccctgctttttccatttcttactgcttatcagggtctccaccagatgtgcattaaagaagtaaaaggaaaataaatcttttctccttgtaagcagttatgagtaacgttttagtcacttgagagtaaaacttttgactaatggggagactgttatgagggaaatgatcccttctgttgttaacctagctggaaccacggaaagtgatcaggaatgccggtgatttacaaggaggatgaaggggtgggga

SEQ ID NO: 160266 - DNA, 367 bp, Homo sapiens
actcccatgcttactgcaacattcttcacaatagccaagatatgaaatcaagttaagtgcccatcggtggatgaatggataaagaaaatgtggtaaacacacacagtggaatattagccagctgttaaaaagtgaaatcctgtcatttgcagcaacatgaataaaccggaggccatcatactaactgaaataagccaggcacttagagacaaatatcacatgttctcactcctatgtaggagctaaaaaaagtagatgacaagaagatagagagtagataggtgattaggggagtagggaggaagatgttgattggaaggataaaaatccagttagatagaaggaataagctctagtgtttggtagt

SEQ ID NO: 160267 - DNA, 367 bp, Homo sapiens
caataagcatctcccctctagccttgagagacatccttgagggcatctttttatcctactgcctaatagattaccaggcattaaaaaaaaccacttatctgtaaataaatacccagaaacaaaaagatgcagatgcaggagcaattgtcctttcttgccccatggctcccagagctgccagggcttcctaacaatactactccctcagttatcaccctattcctccaggggctcaaaatgtattgggccacccctctccttccctgccagctctgttagaaaccaactaacccaaaccctctgagtcaatcatcaaatcagtagaagccaactttctgtaaagggcctgtgagtttctaatcaggaa

SEQ ID NO: 160268 - DNA, 490 bp, Homo sapiens
tagaaattaataagatccttcctcctttgaatatgcaaaataagattttatggcatttcttatactcttccttataatatataatatcttcctactattgagagggaagggattacattttatttattttgtaatctactgaagtccttagcaaaatttaatcattcattaatttatttattcatcaagtaatattttttgatcacctactaaatgtcagacactacaaggaatgaataaataagtcaatattcctgaagaatttcagagaaaccagatgaatagagttctgaaagatgaacaggatgtgtccaaaataaaaagtgagatgtagattatgaggttgggcagtgtaaacgcaagaaaaaaatatactaaagcctgatagctcatgagggtgtttggggacttccgtcagtctggtatgctgggatcagtggttcatagtcaggaatgctcattaaaatcattcacaaaattttttcaaaat

SEQ ID NO: 160269 - DNA, 1226 bp, Homo sapiens
tccgtgtcacttgttagtgatgggcattaggagcttcatatgttgcacaccttgtatcactcttccgaccctgagtcaggtagagctgtctgctcgaggtcgaatccagtgatgggtgactaagctctgctcggttaatgtaaacagacaagtgttgatttctgtcatgtggaacggtgtttcgacagttaagtctagcacccagtagtctccttattggtagacgattctaatttcattggattcaaaaatctctgactcaagggtctttccttagtgcgttttaatgggtgcatggctgagggaaaatccaagtcattgttaaactctaggtaaaagacaagagtatgggataccctcctaaccataccggtagttgtcagttttatttaaagtgggttccacttggccaggattggtggctcacgcctgtaatcccagccctttgggaggccaaggcaggcagatcacttgaggtcaggagtttgagaccagccgggccaaaaatggtgaaatcaggtctatactaaaaataaaaaaattaggctgaacgtagtggctcatgcctgtaatcccaacactttgaaggccgaggtgggtgaatcacttgaggtcaggagtttgaggccagcctggccaacatggtgaaacccccctctttactaaaaatacaaaaattagctgagtgttttggtggatgcctataatcccagctacttgggagactgaggcaggagaattgcttgaacctgggaggcagaggttgcagtgagccgagattgcgccactgcactccagcctgggcgacagagcaagactccgtctcaaaaaaaaaaaagtaagttccaaatgatcatgttttgtggcactgtcttcgtaaagtggccgctggtgtgatggaaagcattgctaaactcaagtgagacaactgctgttttgctttggattttccctgtgaaaagagaagccactgcctgttcgtcttgttagaaagacaagactttgaatgaagttccagactttgaatgaagttccagactttgaatgaagctggttgttgcccagagtagaagattcaggcacctacagcaactcacagcaactcctaactcttaggagggctccctcctattggccgtgaagctgcaaaccagcctctctcttttccctggatcttccttgcccctagttctgagccccagcccagaggcaggcctcatggctaa

SEQ ID NO: 160270 - DNA, 164 bp, Homo sapiens
atgtttccttttgaatatgagtgggaatcacctttaaaactatataacatttgcatcttctcaaaagccccaggtcctactaagattgacttagggctacatatcaggtctcattttcaaggaggaaacacagggaagcctcaagatgtgcagaagagagggat

SEQ ID NO: 160271 - DNA, 374 bp, Homo sapiens
ggaccactttcattgtgtggactgagaagagggagcaggacttgtgcagggttatacaacctgtagcagtgtcagggcctcaaactccaggccagtttccttcttgctgcactactccaagacagcgcaagagaaacggaccatccaccaaacactgcactgaggggtcctgggcttctcctgaggctctcttgtgcacccctccatccatccatccctccatccttccatctctccctccatttctcgatccctccatctcaccatttctctattcattcatccatccatccatccatctatccattcacctctccatccgtccatccttccttctcatttctccattcacctatccatctctccatctgtca

SEQ ID NO: 160272 - DNA, 601 bp, Homo sapiens
tggctatatagtagaggagttcaacaaatacttgtgagaaagaaggaaaagaggaaggaaggaaaatcccaaagaaagaaaggcatattaaacagcacagaaaaaagggaaagaagtgacaggttccaacttaagtgcctacagcaggccaaacaccaggctaagaacttacatccttttcatcttttaatcctcacaacaaggctctatgggaggtattatgatcaccattttatagaagaggaaactaagactcaaaggggttaagtaattagtaatgtcatacctagtaaatgttaaacaactgctcatgcaaccttctactctctttttccttctgaggttggttcccttcatttgggcctaattcctggcaaaagatatgtgaaactagttcctgttgctcactgagatcaaaattatttccacaaaaatcagattctatcatgaaaaagtggaaaaagatggaacaaacagtattcaggaaaagatgctctcaaacaattccagtatatttctatataaatattctagatagtgatgacagctggaagaaaatgtaaagaaatacagacatcacaacatacagtgtgtgactctt

SEQ ID NO: 160273 - DNA, 357 bp, Homo sapiens
tctgtggagactgctgaaggacaacacccttacttcttagggcctttggtttgccagaattgttctctgagccattgccttggattttttcctgacttcttaacaaaggattttataggtgggaccttcaacactctggaaattgccttagctacattcagccatctccttaggtacattttccatctcccacattgtagcaggcaatggcgttgctaaactttccatcaggaaataacaaagatctccttttccagtttccagtaacattttcctctctacaccatcatccacagtctcctgaaaggccctccaggttctagcttttccagggctcttcaggggttttcgaactct

SEQ ID NO: 160274 - DNA, 167 bp, Homo sapiens
acttggcatatagtagatgctctgtaaacatgttattgtcattcgttatttgttaactcaactgaaaagtgctgtgggacttccatttaaacatactgcactcaatatataaatttccttcagttccttcctaaaaccccattaaattaacagcaaatagattttca

SEQ ID NO: 160275 - DNA, 186 bp, Homo sapiens
cggagaggaactctagttcttgaagatgagccatattcttgaagagaagtgcgtgccctgtcgtggtcccccaggtgccctgtctctgaggagtgaccagggtcagtgctggcaccggctctgtcactgcacactggtcgcacctttcttctcttctgcttttcgtgtagctcagtggggttccca

SEQ ID NO: 160276 - DNA, 516 bp, Homo sapiens
atctgaagctaatacccatgttcttctggcaattctttatactggcaatttggaaaatgccagtgttttatcgctacctattcttgtattatgacatgaattaatacatatctgcctcactattcctgtgggcaaaaaaagactgtgaattatgtgccagagagagattttacaaaattaaatgaggcaaagtacttttcctctgtatactcattagaaatatgctgagtagttcctttcagttcctttcactttccgataaaatataatcagttcagccatataacagatatcttttaaacttttaatgtcctctgttagaatgaatatgatatttgggaccaattcacattttggaataatgtacatactaagcataagtgaagaatttaaacattaacttgatttaggactggactcttaagaggttttaaaaagttgaaaaacggaattccaacaaatttaaatggcttgtttagggtttccacaggcaatacgggtgggtgcaatggaaag

SEQ ID NO: 160277 - DNA, 429 bp, Homo sapiens
caagaaggtttgcgtcttataattttccccaccatcctgactgaactcccccaatggtaatacataaagttcgtgtacaagtttttgtgtggatgtgttttcagatctctttgatgcacacctaggaatggtggaattgctgggtcatgtggtatctgactgcttagcctgtgggggaactgccagattgttataccactttacatttctactagcagaggatgagtttgtcagtgtttccacgtgcttgcagttattttctgtttttttgttttttgtttttttttttgaggtggagtattgctctgccacccaggctggagtgcagtagcacaatctcgactcactgcaacctccacctcccaggttcaagtgattctcctgtctcagcctccctagtagcgggattacaggtgcatgctacccctc

SEQ ID NO: 160278 - DNA, 373 bp, Homo sapiens
cctgatttagagatcctataaaaagatcagaaaacaaaacatctaaagataaaatgagatttacaccccttataatcaggatagtccagttccccagaattggaaataaatacagaatgcatcccagctgacattctcaactactggcggggaagagacttacagggacgtgaatcctgtttctagatgtcaaaggatatgtttaataattaaataccagaagtgtacaaaaagagaaatgcagcatgtacctgtcactaaatctaaggccagtcattttctcaggaaaaacaaattgagcaaggggaaaggtacaaattactcttaaaatgtctttaaagcctaaaagtcagtcacagaagtagacttccaa

SEQ ID NO: 160279 - DNA, 401 bp, Homo sapiens
tcctcctgcctcagcctccccagaagctgagactataggcacatgccaccattcccagctaatttttttcatttttttttttagtagagatggggtcttgctatgttgcccaggctggtcttaaactcctgagctcaaacgatcctcctgcctcagcctccaaaagtgctgggattctaggcatgagttactcactgtgctgcccagcccaattttttaatacatctcggtatctagattataaggggcagtgtttcttttctttttttttatttgagacggagtttcgctcttgttgcctggactggagtgcagtggcacaatctcggctcaccacaatctctgcctctcgggttcaagcgattcttctgcctcagcctcccaagtagctgggattacag

SEQ ID NO: 160280 - DNA, 469 bp, Homo sapiens
atgtgaaaaaatgaatgggtcagatttaaggcactggtttgccatgaaagctgtaacccaatgttggtgtcgtggcctccctctccgagagtggtaactctgaaggctaagctcttccacatgcaggcctttcccttgggtaagcagggtcgcgctcacactgtgtctgaagtttcctacccatttgtttcgttatcagacactcaagggattgtctctgaggacaagtgactttccccgggcagcgtggaagcacagccctgctgacagttggtcccagtgttagagactcagcgggctttggggcctttcacgttagagtttgaatatcttgaaacgccactttcagagtcactgagctgcacacaaagagattacaaccaggccccaatctcctccaaacccccaaaatggggcacccagagtaatacatggcttctgattttcacaaatttcagggtcccccagt

SEQ ID NO: 160281 - DNA, 556 bp, Homo sapiens
cctattgccatattgtttatctgtatatcataattagttttattttttagagacaagctcttgttctgtcacccaggctggaatgcagtcacatggtcatagttcactgcaccctcaaactcctagactcaagagatcttcctgcctcagcctcccaagtaggtaggactacaggcacgtgccaccacactcagctcactttttaatattttgtagagaagggatcttcaccagtctggcctcaaactccgtaattatccttttgaattgtttgggtatgttatgaatagtgtaactatgaaattacagtacatgtatttgtggaaaatatatgtatgcatttctgttgagtatatacctagttgtggaattgctggatatgaatatgtttactttcatcagatactgccagttttccaaagtggttataccaatttatactcctactagcagcgtataacagaaccagttgctctgtatctccttcatcaacacttagttttggctgtctttttcatgttagccattgtgggtgtgtgtgtgtgtgcgtgtgtgt

SEQ ID NO: 160282 - DNA, 342 bp, Homo sapiens
tttaataagcctgttttttatagatacaaatttgccagtataccaatttattttgtcagtttgctttagttagaacctctgaaacaatgttgaataatgatcccgggctgtttctgatatgcgtggaaatccgcatgtgagagttgagcggtgagagtttcggcaagtggcttttaaaatgttggggtttcctttagtttgtcttgcggctgctgggactcaccggtagttgccagtcctgcctgagttgggcgccagggggcagcagtcacacagaatgaaacgtgggctgtgccccctggaaactggctgaattttgtcaaatgcctttacaccttctat

SEQ ID NO: 160283 - DNA, 195 bp, Homo sapiens
aaggggctgaaagtgctttcacgtgtctctcattcatacttacaaaatgcctgtggtataggtgggtattattatttccctcttacagataagtaaatagatttttttgcaagcataacagcaagggcccacttcaattcaattttgtaagtaaagctttaatttaaatttaccatactgttgaagtaccagtat

SEQ ID NO: 160284 - DNA, 482 bp, Homo sapiens
taggtaatatgttcatgtctatagggtgtaatgttaatgttcaataaaaattaatatcaaagtctgtcatagattttatgttttggggcctccaggtaaatggtttgtatcatcattgggaatttatggaagttgatttaagtatacagtagttagcactctattaaatactgaagtcatgcactgtgtcaccttgatcaatgagcaagtttttttttcttttctgattctggaatttcagcactttcagctttgaaggttgccttgggtttgtttttgaattaaaagtgtcacaggagaaaggctgattgttacattcatgaccaatcagaagggtctgtaggactcaaaatgtttggtacattccttaaattagaagatatgcttctggacttttcccagggaaagcaggtccatgtaataatttaccaaaaggaagttgggaaaatgaaacatcaccttttgtgagaaagaggatgggg

SEQ ID NO: 160285 - DNA, 740 bp, Homo sapiens
gcatatgccaccatgcccagctagtttttgtatttttagtagagacagggtttcaccatgttggccaggcttgtctcgaactcctgacctcaagtgatccactcgccttggcctcccaaagtgctggattataggcatgagccaccgtgcccggcccttcttcacgtttgtatctaactgtcactaagattctgtttctggcatctatcttagacctgttgatttctctccttccatgactcctggcccactctggccccatgtaatccattcttcatgagaggtattttaaaaacacaaatctgatcatgccactctccagcctaaaactcttcagaggtttcctattgcttttcggataaagaccaaaatcttcaacatggcctttgcccacttgtccagcctattctcctgtcactcaaatgtgccagcctccctctgcctgctgctccctctgcttgcatgtcaccccattaccccatgtcctctgcttgcctggctaacttgtgggagatagcatagtatagtgaccagaagcacaaagtcaaatcagactgcttggggtcaggtttgaattcttttttctttcttttttttttttgagatgagatgaggtctcactctgttatccaggctggagtgcaatggtgtgatcttggctcactgcaacctctgcctcccaggctcaagtgatcctcccacctcagctttccaagtagctgggattacagacatgtgcc

SEQ ID NO: 160286 - DNA, 362 bp, Homo sapiens
acactagagaatacccctgcttgtctgactctgcttgtcctgcctctgcttgtcctccctctgcctgctgctccctctgcttgcatgtcaccccattaccccatgtcctctgcttgcctggctaacttgtgggagatagcatagtatagtgaccagaagcacaaagtcaaatcagactgcttggggtcaggtttgaattcttttttctttcttttttttttttgagatgagatgaggtctcactctgttatccaggctggagtgcaatggtgtgatcttggctcactgcaacctctgcctcccaggctcaagtgatcctcccacctcagctttccaagtagctgggattacagacatgtgcc

SEQ ID NO: 160287 - DNA, 551 bp, Homo sapiens
tggcagacatgacactcattttcttcatatttactactaagggtagaaaatgtataatacagaatttgtgcaccacattattacctaattttggtctaaatgtttgtacccactttaaatcaaacctttctaatgttaatgaacttgtaggatatcccataaattcaacctattttacgttttcttcagccagtatctgagaagaaatcagtaactgaaagaaaaaagtacaatgtacaagatacttacaagtacacttgtaagtacaagaggtaagtacttacaagcacaaggtgtaagtacatacttacaatgtacaatattgttaaggatctacaggaggaaaagaaaaacttcttatcttctctacagatgactactgcaacatgtagctacaagctataaatttgtaaaacctccaagctataaatcagttaggtcagaaatgagactgggggaggaagcagttagaggacgacagatgttcaagcaaatataaccaaatctgtacttcacctttaagatacctacaagatgccaaactgaaaaac

SEQ ID NO: 160288 - DNA, 155 bp, Homo sapiens
gctctggctcctcgtttgtcattggtgctcaggttgggtaaacccaccccagtttgctcgggatgataataatagtatttactccccagggaaggatgaattgagctgctagaagaagagtgcttgacagagggtcagcactcagtaaatgttgg

SEQ ID NO: 160289 - DNA, 322 bp, Homo sapiens
cccatgtctcggcttcctcatgtgtacgatgggggtgtcaggaaccctggggaattgctcccaggcttgggtgagatgcactcacagcgctgctgcacagggacgtgaaataactggcagtgtggctggtcaatgttattcatccccagttggatactgtcaaacttgttttcttcattttgttttcacagtattcaatcttggattttatataaaggaaatcctattcttttatgtcaatgtatggcatttgacaatttgactacatttgacaatgcccaggcctgcctttccaacagccgctgaggtctctaattatgtc

SEQ ID NO: 160290 - DNA, 116 bp, Homo sapiens
aatctcctgcatcttttcccccttcaaatttatctgttgaagaaaccaagctgttcacgctgtggagtgccctagtcttgattttgctgatttcatctgcgttgcagtttaacagg

SEQ ID NO: 160291 - DNA, 325 bp, Homo sapiens
cactgagtccattttgctgacaaaatcactagttttctttagcagggaacagtaccatctattaccttaggtgaaaacctggaagaacttcattgacaatgctaaaaggtgtgtataagggagtgacatgaccactttctggcttcatatgcaaggtcaatgaagctccaattccctaacagtgctgccaggtgcaagcacacaattgttcctcagcactaccattatggtttactgcttatggtttccatttcttggtttggcactttctatgtaacctggatttctcaaaacacagaaatctaccttttgctatatttcctca

SEQ ID NO: 160292 - DNA, 586 bp, Homo sapiens
gccacgtgtagtgcagacatccacacatcctcactagtggctattcattaagaaatacctcccactacagacgtcactgtttaaatttacttttcacagggatttatccctaaatgttccaaggagcattactcaggcaatttaggttgaaatacagtgagcttatgtcttggaaatatagattacatctggaacatagagacctaaaaattcgcttcccttcagactgaggctggggcacaataggggaagaggcatcagaaggggcctggaggatagagaaggggagctggtcaatgttttactaactaagccaactcagttaaagttatagtttaatggaaaagccaacatgatcataaaacaaaacaaactgaaaacataaaacaggtcatccggagaacatcagtaaataccataaacatcctgttcctaattggcaatagatgtcttgatctggcccatctgagcactggcaaatcactaagaaacaatctgatacaattagaattataataagcagaactccatgtaaataaaatgaaaaaaacaaaataaaacaaaacttccaaacaaaattaaaacc

SEQ ID NO: 160293 - DNA, 332 bp, Homo sapiens
ataatacatatatagtctaatattctaataatatagtaaaacggatgaggtttagaacaaattaggagacacattctgtgtcagatgccaactgcatctgcaattttgggcaaggtaattaactacctggagtttctgctaaattgaggttggcaggggcactgggttgattaatttgatcttgaaagtgccatgaggtcatggactatcttcttatctttattagggagctatttcttacatttataagactcctttactaagttaaaggtgttttccttcctctaccatatacaatttttaaaaactgttcccagctgggcgaggtggcg

SEQ ID NO: 160294 - DNA, 342 bp, Homo sapiens
agggacatcctgtgacctcccctcagacagacttgccatgtcttccatctgttccattccggcctggggaggttagctgctgtcaggacgtggtgcggcccacagtgacttcgtctctcttgttccttcagaagcacgcaggccgtggctccgcgccaggttggagcctttcattcagggtgtgtgcctgccgagcccggaaacagtgcggtgaggggcagggcatcctggttttctgctgtgtcgcctggcactggtggacgtgggcgcgtcggtgccgccgtcctgtccctgtttggtgtctgcagctggagggcccagttaacggtgggtgtgtgcaga

SEQ ID NO: 160295 - DNA, 523 bp, Homo sapiens
tacaaataggccaggtgcggtggctcatccctgtaatcccagcactttgggaggccgaggcaggcagatcacgtgaggtcaggagtttgagatcagcctgaccaacatgatgaaaccctgtctctacgaaaagtacaaaaattagccaggcgtagtggcaggcgcctgtaatcccagctactctagaggctgaggaaggagtattgctcgaacccgggaggcagaggttgcagtgagccgagatcatgccactggactccagcctgcgacagagtgagactctgtctcaaaaaaaaagtacaaatatacagttagataaaataagttctcatgtttaatagcacaggaaggtgactacagttaccaacaatatattgtatatttcaaaacagctagagagatttgaaatgttcccgtcacaaagaaatgataaatgtttgaggtgatgtatattctaaataccctagtttgtatgtaatgaacacattgtacgcatgtatcaaactatcatatgtaccccaaa

SEQ ID NO: 160296 - DNA, 401 bp, Homo sapiens
tcatgtaaaagctggcaggaggatggtcttgggccttatgttttcacagggcactacttagcctgagtcagtgtgcctcggctagttagccgactgatgtctatgacctgtccccacacttccatcctttcacaattacaagcagcttacagggcctgccagctacacacagcaggcctccgggaacgacgcatcccaaatcaaatccttcctgttgctgcagcaaccccatagatgccaggctcttcctgcccaccctagccagaagggtgcgcccacattcctcctcatcctcctcccgctctcaccttcatgctctagcagtgtgccaccggctagagaatcgactggccaggtgcaaggcaggggcctgagctgggggtagacagcagtacccaaaa

SEQ ID NO: 160297 - DNA, 801 bp, Homo sapiens
ttctattttattggggtctgaagttattgtaacacttaaaatttaactcatgatgcagatggtgaggcaaaagtgtctctaaattcagacaaatgtagacctatttctactttttttcacacagtagtgcgctgtttcagagttaaacaaacaaaaaaatagcatactttaatggtctcttaattcattcacctgcagtgtctgaacaaggcagggcaggtgctgagtggggggcttcctcttacaagaggctgcatctcagtacacagtggtgcaagtcaagctgaccatagaaatatcaagttaggggagaacaggctggaagaaagattgagaaggaaggcaattgagataggacctccaaggattatgggaaactgttgttaaatggaacagaaaacatgaaaaaataatatgagtggaggctctggcaaggaaggctgtgtgactgcaacctcatatcaggattcctgacttttatgctacctgtgtttcttctagactgaagatttgaaaatatatccatgaacatttcaacatgaaacaaagaattatagttccttctctggagatgtccataaagaagtaattatgatatgtttaaaaccagaccgggtgtgggggctcacgcctgtaatcccagcactttgggaggccgaggccggcgcatcatctgaggtcaggagttcaagaccagcctggccaacatggtgaaaccccgtctctactaaaaaatacaaatattagccaggcgtggtggcaagcaccttaatcccagctacttgggaggcagaggcagga

SEQ ID NO: 160298 - DNA, 397 bp, Homo sapiens
ccacaattgcataaaccaattccctaaaataagtgtctttctctgtatgtagactcatcctcttggctgtttctctggagacccctgactaatatgcataggtatgactcctggcacagtgcgtgctacaaagaggagaaggcactacctgtgaatcagaccatctgtgagtatttgcaattgcccaaccatatcaatttctcactttcacttcctggtgagtcatattccgagcagctggctaggatcagaagaaacaaggcattcttttcatgctcagacagagccctgttgaacgtttaccttcctgaagaaggcagaaagaggaagggcctcctagtgacattctccagccttgaggaagaagaaaattctgatttaatgagcttgagtttga

SEQ ID NO: 160299 - DNA, 431 bp, Homo sapiens
tgtgttttctgtgtactatctcatcatgacaagcctgaagcaagtcattattggccccattttgcacaggctcaggcaatggtggaattatgtcaagcaggcaggaggcttggtgatttttgtttggattttctttggcttgggaaagacagatttgccttttgctagaaaagaaactccttcagtgagctatcatttcaaagttgatgtctcagaatgttgtggagatgcagccagttcacctgaaggtagtggtggtggttaaataaacatctctgtaagtctagctcttcctacagttgtgaaatctgagattttttggtttgtttgttttaatgtttattggtagaaatagatcatcaatgcatactttgtatttatataaactgcattctcttaaaggtttttgttttcattggaaatatttagcc

SEQ ID NO: 160300 - DNA, 590 bp, Homo sapiens
gccatccaggtccttttgtctcctctttccccttcatctacttgccttctgccatgtccctacgcattaacttcccctagggactaggaaggggagaaggggaaaggttagaaaatagaggtagtcattgttgcaacctatgcccagctctaagaaactccaaaagcaaagatgcaaaaagcaatttaaactgttggccaaaattaaatggggagttgggggggagtgtgaatagacgtacagttttctttcttgcactattcccaggctctactacaacatcaaccacagaaatgctccaaaaatggtaaacattggctgagaggagaagggacagctcagcaaacgctaaggctgacaactgcaattccatctctgccaggagacacttgtttattaaagtctctctctcagccttgctgtattcacacatggaacaggaggactcactccaactccattttcagagctaaagtgcagggcaatggaaaagactagagaaagctctggaaatggagaaccttaatgaaccaactgctgcaacagtggtcagttcctgcaagttatcactgattaaagggaaagcaagc

SEQ ID NO: 160301 - DNA, 370 bp, Homo sapiens
tgaggtgtcagtgcaggggagaggagaggccaatgctgcagggacaagtaggaaaggaggagaccccgcatgacacgtggggagcagcactggcctcggagccagagccttgggttccagccacgcctctgccaatggcagtgggtgttggagtctaacttctctaagattaggaggctgggctcaatgcctcttgcacagcgggtccctgcctgcccagtgttcttgtgtaggtgatacattcagttagcacttgggggtcttttacatttgctacctgcttcgcccatgtttgatatccaaaaagatttcaggttctttgagggtaaggaaagctgtcatattccttctgtatccttatggtaccaag

SEQ ID NO: 160302 - DNA, 102 bp, Homo sapiens
acaccagacacacacacacacacaccccacactacaacggggcaagcacatctaagcctaagacacagcaacttggaaggtgccgggtggaaaagggagtag

SEQ ID NO: 160303 - DNA, 460 bp, Homo sapiens
ttgacagctgctgcctcccagagccccaccctgaaaggctagggtctgaggttccacggttcaacatagcatctggcttttgacctccatggctaatgtagaaatcaattcctttcctacctgcaatcagaaaagtgttgtaacaacaaaagctaaagttaaaaacaaaacctgccaactgacaacaggcggaactatgtactgtactatcccaagagtctagaactgaaacagctatgtttaaaatttcagctatcaacataaatctcagacatgcagacacaatatgaaccattttggtccttcagttattttcgtatcttttgaaaattctaactgattaattttttagagatggggtcttgctctgtcactgaggctggagtgctgtgacacaatcatagctcaatgcagcctcgacctcctcctcctgcctcagctcccaagcagctgggactac

SEQ ID NO: 160304 - DNA, 352 bp, Homo sapiens
gttttgcattttacaaatgagaaattaagtccgggagatatttaagtgaccacccacagtcacacagctggtggagccaggctgtacacccccagactacccacccagtctcacattgtgccaccctcaccaccgggctgtgctccttcacgtctataaatgggcgtttcagcagcacccgcctcacaaggtcatggtaataactaaaacagacaatgcatgcaaaatacacaaggcagactaagggctcagcaagtgcaactcactgttcctgctgttactgcgattgctgtgtaagctggatatggggtctgatctggatcccacagggggcagaaacatggccttgcgc

SEQ ID NO: 160305 - DNA, 139 bp, Homo sapiens
tttgtggcagtctttcctcaccttcgattccctgcttccaacctgttcaggtgtcagaaagcagttcaccaagctaactagacctaggtgttaagtaaaagtcagtggtctcaagcaagggcccagaagtctcttctgt

SEQ ID NO: 160306 - DNA, 307 bp, Homo sapiens
gcggccgcctactactactaaattcgcggccgcgtccctagggaggaaaaaaaaatcctcctttcgatagtcccatcattcccaagaaggctgctttcttattgcaacatcagctccagttcatccatccctccccgtcctccctatccatcagcccctcgtgtttcccttccctctctccctagcacatgtcttgcagtcaagtatttctgcagcacttgctggtcaccacctattcctctccatccctggatgaatccgtccatctgctctctctcttcctgctcctatttcacagggtccgacc

SEQ ID NO: 160307 - DNA, 659 bp, Homo sapiens
ccgaatgattgtcataaggatcttgaatagtgattgtagcctgtgaagtttcttagtgctcaggggttcagttagaagctccagtttctgagtatcttttgaaatcctgagcacacttaaaataaaattgacattacctgttccttgtactcttatggtgatggaaaataagctgggcttgagtctcttttaagggatctagactttgtttttatctacttactataaggcgttcctaacaactgctcagaagatgaaatttgtccagaaggtcttgatagtttaatggttctcagtgattttccttttcttttttttttccttttttcttttttgtaatcacaaccttgtttgattaaaccctattcttactgagtttttcaaaagcgataataactatgttcagtttcagaagatcaaagacatattttatccaggcttctaaggaaactaagcacttgtaaatttcaatttaacacagattactcatgtcagtttaaagatatttgtttattttatataacacagtggttgccactgttagtagcagtagatgttctaattctggagaggtttttggaaggtttcaaatgatgaaacaaatcaacaaaattcttgttagactagtgtctgtagcatagagggaagtgtggggtgtt

SEQ ID NO: 160308 - DNA, 263 bp, Homo sapiens
ttcaaggagctcacggcctggggtaggcggggagtgaaaagcatcattcagtgttttgggttcagactctcactcagtccctctcttcccagtacatcctcttaccacggtgcccagttctccagtcctctcccaaaaagaaacttccagtcatctcctgggtgggagaggggagagccctaggatctgaggatctgaccactccagtgaccgctaaaccctgttttcagccgcaggctatagctctgcttcaaggagtgggc

SEQ ID NO: 160309 - DNA, 549 bp, Homo sapiens
cttccgagggtcccggggatgatcggcctgtataaagacaagatagccttagtttgatgttgaaaaatttcccaggttttttaattttatattgaagacattagccaacagagttcttttctgtagatatgtatcttcagtggaggaaaacccaaggccctgtgtagcttctgatgaaatataggggaaaaaatctagaaaactataactggaagaagttatgtttatgctacttctatattcctgaataaatggacagcaaggcatcttcaccactcagtgaggcccccatcataagatttgagaacttgtttggcctcacttctaaccttattttagaattgcactgagaaccttggacaatggttattctacaaccaacgtctccttccttctactttccattctgttatgtctgagtcttttttgttggtaattattgattagaatagtgatcaataatctctttagttcttggcgttactagtgattataaattcttgctggtaacattggcataaagaagaatgtggaaaagacaatgagtat

SEQ ID NO: 160310 - DNA, 635 bp, Homo sapiens
gagctggcccccggacgatcgccgaccgacctgcccgcgaccccatagcctgcccgcgcgccatgagatccccagacggctcctccgcgcccagcgatcctcggtcccggcctcgtgctgcatccggcatgcgctcggcagaggggcgcgggacccgacacgcggcggcggcggcatgaaagtgacctgatgtgcttcggacggacccgggtggtcgtgccgtgcggggacggccacatgaaagttttcagcctcatccagacaggcggtgacccgataccggacggccatcgccaaggatccaaactactggatacaggtgcatcgcttggaacatggcagcatggcaggcaatactagacccttgatgacattctttgtgatgtcgcagacgcataacgacagactcaggcgctgcatgtggtgaggagttgacacctcctgtcaacaaccacctgaataagcttggaagcagaatgcccagccctgctccagccttcagatgactgcaacctgagacagacagccgtggagatccaactaacacacacctcaagtcctggcccacagaaactatgagtcagtaaatgtctgttttttaaaccactaagttttgggataatgtgttatactgc

SEQ ID NO: 160311 - DNA, 318 bp, Homo sapiens
ctgaggatcccattacgcaggcgagacaagtcacgtgtccaatttgaggtctggaagaagctgcaccagtatgagaatagtgggtcagttttctccaggatccagaaagtatatcaggcagccttggggtgaggaaaggagcccggcttctccagcagccacacaggcctgcagtaggatggggctggggctggtttggggtggaggataagtgacagccaaggtttgtcagcatgcagaggggtggctgactcatggactaggggctgcggagcccagtggttgcccttagttcttggatcctgggagacttctgga

SEQ ID NO: 160312 - DNA, 117 bp, Homo sapiens
agggagggaaggaaggaagggaagacagaaagagagaaagaagaaagaaagaaagaaacagagggaaggagagagagaaagaaagagaaaggaagaaaaaagaaagaaagagaggga

SEQ ID NO: 160313 - DNA, 130 bp, Homo sapiens
aagtgcttaaactcctatatattatacttctaagtgctgaaaaaaactgcataaaatgacaacaaaagactagctttaggtggggtatttcaagtagcaataaacaactctgttaagtaaaaggatggag

SEQ ID NO: 160314 - DNA, 203 bp, Homo sapiens
gcaattagctgaagttataaaattacttctggatttgggaagattatacctgagcatggcaaaggattagaaataatagctagcagctgggtgcagtggctcacgcctgtaatcccagcaccttgggaggccaaggtgggcagatgagaaggtcaagagacatagaccattttggtcaacatggtgaaaccccatctctactt

SEQ ID NO: 160315 - DNA, 625 bp, Homo sapiens
atatgatgcagaaggaaataatgataaaacaaccaaattatgccctctagaagaagcctacaccttggcagaataatatttataacaaaatacccctaatatagagtggaaaataagacaaaattgtaaatggcaaggctattatattctaggaaaatctgggaagctctcagacaagagccaagtggacaaatagacagaatctggacatatggaaattgggagagaagagagagagcaagtatacttcactcagaatacactttcacccactcacactcatgactccaatcccaataataatttctattattttctaaagttacaaataatagcttctaggggccgggcatggttgctcacacctgtaatcccagcactttgggaagccaaagggagcagatcatctgaggtcaggagttcgagaccagcctagccaacatggcaaaaccccgtctctactaaaaatacaaaaattagccgggtgtggtggcacatgcctataatcccagctactatggaggctgaggcaggagaatcacttgaaccgggagacagaggttgcacgtgatgccaggagtgcgcacctacactccagcttcggctaaaagctgatccgcattca

SEQ ID NO: 160316 - DNA, 423 bp, Homo sapiens
tagatgcaaatagctttgaatgtaaaaacattacaacaataatataaagaaattgaagtgttactggatcctgacaaaaagtctctccttgactatactttagtcaggctcctcttaatactcttctcaactatatatcaacttttgggctgctttgtccacctttgcatcgcccagttttaacaaaaattctgctaaattggtttagccacaatcccccgcttatccctaatgtttcctcttaataatttttcatccaatgacttctactctttattttggctatgaagtctcactttttcttgttgtgttttgagttgagcccaatctctgtcccttactgcaaaaccccatagcagtagtccccatacttattgcaatagtcctgaataaaatctactttacattttaacaagcgtcatg

SEQ ID NO: 160317 - DNA, 444 bp, Homo sapiens
ttttggacatggtatttacctttcgcttccccagagcagacatggccagttcccttgaggtatttccagtgggtaagggaaagagaagtaatatttccgaaacagccactatgtcccaggcaatatatagttattttctttcattcattcagagctagacattagggatacaaatgggatagcttccatttatttattcaactattgagggccgagaactgtattaacaatatgtcatttcattaacaccactttcagcaagttagaaattacagaggaggaaacacacctagacagggtcagagcttggttgtgatcaccaggttagttagcaacaggactggaactagctctgtggattcccattctgctgcttttcagtgaggggaaagtgtagactaaggaaagctgaaatcatcctgggtaggatactgtagacggaga

SEQ ID NO: 160318 - DNA, 348 bp, Homo sapiens
tggtcagaattctcttggcgtcctctggagcccccctagggagctgtgtgggcaccctaggtcctgaggcccttgcctgttcactgccttacggcaagttgcaaggctggccctccttcctcttatggggcttgctgaagaatcagagcctccccaagcaccctggtttcacagctcgtatgtaccccaacagaggtttagttcatttcagcagtgcccagcttcaaggaaacaaaggggctctcctaggtaggtgtttatattagtctgttctcacattgctgtaaaaaataccggaaacccggtagtttataaagaaaacaggtttaattggctcacagttccaca

SEQ ID NO: 160319 - DNA, 223 bp, Homo sapiens
acctcccgggttcacgccattctcctgcctcagcctccggagtagctgagactacacgcattcaccaccacacccggctaatttttcgtatttttagtagagatgggctttcaccttgttagccaggatggtctcgatgtttttaaagaaaaaatatttacatttattatcaaattaatcttaaaatctaaaatacattaagatatgcttttggaaactgttt

SEQ ID NO: 160320 - DNA, 297 bp, Homo sapiens
ctttctacttttaacataggactatattctgatatggatatgaatgatggtatctgaagttatactagtcttctatgtagagagaaacttgactgagattttacaaaaataatgccccaagtttctacttgtggttaacttttattatataattacaccaggatgtaaggagacaggaaccagttccatcttcctctctgttgtatctctatcacctgtgtggtgtttgtcacatagtaagtgctcaaaaaatactgcttaatgaataaattttgaagaaacaagtgattttcctaa

SEQ ID NO: 160321 - DNA, 313 bp, Homo sapiens
agacgtggctgattagaggaccccggaataaccagcgggaaggttgtggtatttctcagtctgaccggtcatgactttggttagttttctatttagataagctaaagattttctaactcaacttcaatgatttattctactaacaaaatagtacagggataacaaagaatgaaatgtttcagaagagaaaatactggaaatcttatttagtccaattcttgtcactgtatagaaggaaaatgagccccagttggaagaaagacagcctggtcacccagacacctagattcctggtacaaccgcggtgtatccg

SEQ ID NO: 160322 - DNA, 1284 bp, Homo sapiens
gttagccctcattccatctttaagagacaggcattatgattattcccattttacatatgcataaaactgacattgtgagaagttaagaaacttttccaataacacaatgacttctaggagggtgaagaacggttcctagaggaacatgggaggactgactgacttcacacttttgagctaggtagccctgtctaacttctctccttctaggagacagtttggatttctctctcccttcagaaaatgggctgtaacagaaaatggagccccagggttgctgcaatatcttaaagcccttggagaagtggcagagattgctttagggttaatcggcttcttttaaaatacgtaaaatgtcctccaggttttctgcctagaaactggtcccttgcctcatagcagagtttccccctgatcattatattgatgatgaagaatgattcccaatggagatagcccttggtgaatgggcacaggaagggctttagacagttggtgagaaggatgtacatctttcaaagaggaagagggtggtccagatgggatggagcctcctctgtggcctcatcttctccatcattgctgaatgcatagattaagtatatcctgaaaaatgcataagaagcttcataaaaggaaatccttgtccatgaagcatgaatttgggaatctgttatttgaatccttggcattgagggcataaagatatgaaggtcactcatggttgtccaatagggaagtgatcatttattagtaatgtaatttattattcctcttgtcatctctttctatctctctactaagacagttatcctgaaattctccctggtggtctgagcacatttactgacttgaacaaggaccatcattggtcttttgtccagaatttgcatttgtaatagatagtttttccaactactggtagtcaagtgaaacaaatgttgattttggtttacataagaaatagttttaatctctttaccgcaataaattttgtacttaaatttctcttttgccattttttttttgcatcagaaaaaaaaatcaataaaagaccataagtcaaagtattattctctggttaaactaacacagtgtcagaatgagttgatctttctgcaaacccaaacattattgaactctaactgctgatttggaaaataacttgggtgtgtctttttgaaaataaaataccagtagttatttgttcatttttttaacatttcatgtaaggcagaaataatatcttggcaatgtgaatcagagcagtttccagcgactgca

SEQ ID NO: 160323 - DNA, 669 bp, Homo sapiens
gttagccctcattccatctttaagagacaggcattatgattattcccattttacatatgcataaaactgacattgtgagaagttaagaaacttttccaataacacaatgacttctaggagggtgaagaacggttcctagaggaacatgggaggactgactgacttcacacttttgagctaggtagccctgtctaacttctctccttctaggagacagtttggatttctctctcccttcagaaaatgggctgtaacagaaaatggagccccagggttgctgcaatatcttaaagcccttggagaagtggcagagattgctttagggttaatcggcttcttttaaaatacgtaaaatgtcctccaggttttctgcctagaaactggtcccttgcctcatagcagagtttccccctgatcattatattgatgatgaagaatgattcccaatggagatagcccttggtgaatgggcacaggaagggctttagacagttggtggtctgagcacatttactgacttgaacaaggaccatcattggtcttttgtccagaatttgcatttgtaatagatagtttttccaactactggtagtcaagtgaaacaaatgttgattttggtttacataagaaatagttttaatctctttaccgcaataaattttgtactta

SEQ ID NO: 160324 - DNA, 951 bp, Homo sapiens
gttagccctcattccatctttaagagacaggcattatgattattcccattttacatatgcataaaactgacattgtgagaagttaagaaacttttccaataacacaatgacttctaggagggtgaagaacggttcctagaggaacatgggaggactgactgacttcacacttttgagctaggtagccctgtctaacttctctccttctaggagacagtttggatttctctctcccttcagaaaatgggctgtaacagaaaatggagccccagggttgctgcaatatcttaaagcccttggagaagtggcagagattgctttagggttaatcggcttcttttaaaatacgtaaaatgtcctccaggttttctgcctagaaactggtcccttgcctcatagcagagtttccccctgatcattatattgatgatgaagaatgattcccaatggagatagcccttggtgaatgggcacaggaagggctttagacagttggtggtctgagcacatttactgacttgaacaaggaccatcattggtcttttgtccagaatttgcatttgtaatagatagtttttccaactactggtagtcaagtgaaacaaatgttgattttggtttacataagaaatagttttaatctctttaccgcaataaattttgtacttaaatttctcttttgccattttttttttgcatcagaaaaaaaaatcaataaaagaccataagtcaaagtattattctctggttaaactaacacagtgtcagaatgagttgatctttctgcaaacccaaacattattgaactctaactgctgatttggaaaataacttgggtgtgtctttttgaaaataaaataccagtagttatttgttcatttttttaacatttcatgtaaggcagaaataatatcttggcaatgtgaatcagagcagtttccagcgactgca

SEQ ID NO: 160325 - DNA, 1002 bp, Homo sapiens
gttagccctcattccatctttaagagacaggcattatgattattcccattttacatatgcataaaactgacattgtgagaagttaagaaacttttccaataacacaatgacttctaggagggtgaagaacggttcctagaggaacatgggaggactgactgacttcacacttttgagctaggtagccctgtctaacttctctccttctaggagacagtttggatttctctctcccttcagaaaatgggctgtaacagaaaatggagccccagggttgctgcaatatcttaaagcccttggagaagtggcagagattgctttagggttaatcggcttcttttaaaatacgtaaaatgtcctccaggttttctgcctagaaactggtcccttgcctcatagcagagtttccccctgatcattatattgatgatgaagaatgattcccaatggagatagcccttggtgaatgggcacaggaagggctttagacagttggtgagaaggatgtacatctttcaaagaggaagagggtggtccagatgggatggagcctcctctgtggcctcatcttctccatcattgctgaatgcatagattaagtatatcctgaaaaatgcataagaagcttcataaaaggaaatccttgtccatgaagcatgaatttgggaatctgttatttgaatccttggcattgagggcataaagatatgaaggtcactcatggttgtccaatagggaagtgatcatttattagtaatgtaatttattattcctcttgtcatctctttctatctctctactaagacagttatcctgaaattctccctggtggtctgagcacatttactgacttgaacaaggaccatcattggtcttttgtccagaatttgcatttgtaatagatagtttttccaactactggtagtcaagtgaaacaaatgttgattttggtttacataagaaatagttttaatctctttaccgcaataaattttgtactta

SEQ ID NO: 160326 - DNA, 490 bp, Homo sapiens
ttaatactttcactatgtttcatgtcttcgggaaagcaaaagaacaacgtactgtgccaaaagcactaacttacgaaaaaccaatttagaccaattctttacagcgttaagtatgggttgaaaaccaactttcctaatacttgtggtcagtgcctcaaggtcgttaggataaaaataaagcttccaagacacttcgcagccttccagcacttccagaaaggccaaataaaccagcattcaccttcccgctccatccaggccccgattctccgaccagagagggcgctgagtgcccgggcacggaggggcagcgccctggggcgcccggctctgcccagggcggggctcggcggggccgaagctccggacgccgcccacggggaccaccggcccttgggccgcccaggggcagctgcagcccaggggaggagctggaggagcccccggcggcaccagggcccgagccctgacggcggccgcccccggccga

SEQ ID NO: 160327 - DNA, 327 bp, Homo sapiens
  misc_feature (1)..(1): n is a, c, g, or t
naacttagtctcagctataagcaatacgctgcgtgttcccctctccttcaaatactctcttcactgtccgtatattgtatgttgttgctgagacaggtctcgccatgatgtttctatcactggaactttgaatgttttcatccgtaacattcttatccttccagatacgatcctttagaatcactgctgagtaaatccacatacatgacataattttctcctaaactcccagtttggagtttctgtcttcagactatatagcacctcctttttatggtgcatctacacacacaggagaccctcccctcacttgtagatttacatttc

SEQ ID NO: 160328 - DNA, 688 bp, Homo sapiens
tgcctctgagtatgagctgacagaatccattcttccaaatccattccggttattacctactgtcctattcactcacatttataggaagtgtttatttgttctaatattttcatttatttcaaagttctagatagagagaactctatgtctttctttgcctacctaatatgcatagaagaaaaaaatattaaaactgaaaatgactatcttcatctgatgctgaggtttggggtgaaaattcatattagtgggaaagcagatctctatactgctccttctcactctgagatacctggggagggagaaaagacaacactgaaatgtcaaagctcctgccagttcctcggtgctgaaacattaatgagcttctgaatgtgcaaaggtgggcccagagccgaaggatgtttgagagttaaattgctctgcataatcaaggaaaggtaattgagtttcccgaggaatcagagaatcaagaggtctaggagaagtgagaagggcagggagctatgaaggtggctgctgtctaaccccacatgacgtctctcatgatttccacattaccagcaacactgttcccaaattcctgacacagagctatagcaagctctcacatgggggacagcggtgagtgaggattctgtgggtgactcctgtgggtaagcattggggaaatactttcagatcacca

SEQ ID NO: 160329 - DNA, 284 bp, Homo sapiens
gttaagtgacttgcccaagttggtggaagctggattttaccaggtgccttggttctagagtctacagccagcactcttaactgcatgctactttgcctcctatgattagtaaacccttaacgccccactcaagacctcttaaaagtacagagcagccagaatgacatctctaaagggtagtagtgaatatcactgctgcactgcagcctgttggtggcttgtgaggacagtctctgtggctcacctgcacacacggcccatccttcctctgcatcctgtgtgtc

SEQ ID NO: 160330 - DNA, 658 bp, Homo sapiens
gatctgaacagcctcccttggttctagcagaaggacttaccaagtgagcagagctcccatccgatactcgccagtgctgaggccaactcttccactcctcccacggggcttgcatgacctccattgaggacgtccatgccccgggacagagtgcgaagtaaaagtgaagctttggagctcttgacccacatggattctcagcagccacctccatcccacctcaaactcagaagacaacctggatgtgaccgacaacttctttgtgatggatctgaacagcctcccttggttctagcagaaggacttaccaagtgagcagagctcccatccgatactcgccagtgctgaggccaactcttccactcctcccacggggcctccgcatgaagtaggcgcttctcaactaccaaatgattctgaaattctctcagtggaggtctatgttagcctggccaatttgaaaggatggagaatacaggaaaacagtaacatttggttttggaatacattgtgtaatccatctgcaacgaacctcaggtcttgcttcagcaaatattaatagcgtcagggcagcctgtggagtgactgggagaggccaccacgcagctgaaaacttgcctctggggaagccacatgcggatcatatggagctgttgac

SEQ ID NO: 160331 - DNA, 569 bp, Homo sapiens
cagcggcgaacttctcttccgtttgcggttttctgcctaattgtgcaactgaggaaataatttatttttcacatgaggaaatgcgtagcttgtagagacggctgattcaagttacatgtacagcctccaaagggctgtctccattctgtccccttcccataaaagaagtgggggtgttcgagaagaccagggaagggacccttgcctcacccctccccctggcctcaccttgctcccagccatcgtgcccagtgttaacctcggctggccttcactaaggggactagacctccctctccccaggagccccagccccagagtggtttgcaataatcaagatatgtgtcgagtcatttttctttcaactccctcatttttcattgaacaaatctctgcttttcaagagttgggggtttctgctattttttgctttctctccctccccctgcaaagatgagaaccaatgagttttagggatgtttgtgcgggtagactccatcatccatatgtaacttgttttgaagagaagtgtttccgttgtgtgtcacgtccatgagagggatccttaa

SEQ ID NO: 160332 - DNA, 679 bp, Homo sapiens
cagcggcgaacttctcttccgtttgcggttttctgcctaattgtgcaactgaggaaataatttatttttcacatgaggaaatgcgtagcttgtagagacggctgattcaagttacatgtacagcctccaaagggctgtctccattctgtccccttcccataaaagaagtgggggtgttcgagaagaccagggaagggacccttgcctcacccctccccctggcctcaccttgctcccagccatcgtgcccagtgttaacctcggctggccttcactaaggggactagacctccctctccccaggagccccagccccagagtggtttgcaataatcaagatatgtgtcgagtcatttttctttcaactccctcatttttcattgaacaaatctctgcttttcaagagttgggggtttctgctattttttgctttctctccctccccctgcaaagatgagaaccaatgagttttagggatgtttgtgcgggtagactccatcatccatatgtaacttgttttgaagagaagtgtttccgttgtgtgtcttgatgtaaatatttgttcatatttttgtgaattcaatactatgtaccattgtattatagtaacttttataaagcaaaccataaatatactgacttttcttacagaaaacatacacaaaacaaaaaaaggggg

SEQ ID NO: 160333 - DNA, 428 bp, Homo sapiens
ttcttttttagttcttttgtctaactttcatttcttttgccaaaccttagcagaaaactctgttgttgatcacatctgatttgagagatgcagattgctggttgctgccaggaataatgtgtcacattatataaataaataaaacaagcgccatgggaatgagcagtaggcacctcacagaaaccaccgggtagcatccaattgacaggctgttctaggaaaagaaatctacagattcagggctgtcaccatcagagacttctaaaacaagatacataatacaaatacacacaaatataatacattggaaagtaaatttttttttttacatgttactttcattgctttagttacgaataatttcatagtagtggtggagccatgtggaatccagttagagtaaacatgcctgtaaattggcactaatg

SEQ ID NO: 160334 - DNA, 246 bp, Homo sapiens
gatggatctctcttcacatgtgctatggaataaccatttctcatgacctacactccagtgaatctctatttcacattttacacatctactgaaaaattattttttagtctgtattcctgaaatatttctcatttcatttcacccgaaggagatacaatactaaataaggaaacacccaacccattttatttagattatcttggtgaatctagtttctgttcctatcactcagaatagtatactata

SEQ ID NO: 160335 - DNA, 293 bp, Homo sapiens
caagcggggacgaatgctggaaccagccagatgctcctctctggtgggagcaggctctgtgcaggccccgtagcagtgtcctagcccctgccctttcagcatgtgggttcttgtccagcgtcttagaaaattgaggttgcacaaaccgatagtgggtagtgtatgtggaggatttattgggtgatggctggcagcggatgggagttggaaaggggatgatgcgggaagaaggtgatctttccctgaagctgcaccatctgaagttagctgcatctgtctgtagtctctgatgc

SEQ ID NO: 160336 - DNA, 475 bp, Homo sapiens
gcggtgactcagaggaccccaagcagttatacagactcatgatttcttcagattaatgttcatagccacactgagtatatccatgatgtttgtaggacagttgttgtagttccaggatgtactcaatagagggagacaagaagttctgtgttacagcaatccctccccccttttaatcgtatttccaagtttgacttctccaagttttggttcctgtgccaagcacttttacccaatatggagtctaataattaatacaatcattgaaagcttgtattaagggtgaagaaaacctaacactccagaattagaggatgttcattcctagaagtgaaaaaccaccagcggactcaatagttaacaaaatgttaactcctttggaattacatacctggcttcagaattctttgtgggactcaacagaacttccaaaaaaagagaacttccatatatctgagtttgtcattgctatttt

SEQ ID NO: 160337 - DNA, 878 bp, Homo sapiens
tccccacttccttactcccagccctaggcaattactgatctactttctgtctataaatttgcctattttggatatgtcatataaatgggtttatacatatgtggtcttttgtgtctggcttctttcacgtcacatgatgttttcagggttcatccatggagtagcatctgtcattacttaatttccttattgctgaataatattcccttgtatacatgtaccatattttatttattcagtcatcagttgatggacatttgggttgtttttactttttaactactttgaatacttgtgtatatttgtgcatgtttttttgtacagacatattgttttcatttatcttagatatttacctaggagtgcaattatggggtaatacagtaatttctatatttaaccttttgaggaaatgctagacggttttctgaagtgactgtactgtgttacatacctgttaggagtgtatgaagattgttgtttctctggatcgtcaccaacacttattattgtcttcttgattataaccattctagtgggtgtgaagcatgaggtggttttgatttgcatctccctgatgtctaatgatgttggccatcactgtgtgtgctaattgaccatgtgtatgtcttctttggagaaatgatttattcagattctttgcacacttgaaaatttggttgtcttttcattattgaatggcaagagttctttttattttctagatacaatgccatcatcagattgatgattttacagtatttcctcacattctgtgggttgtcttttcacttcgttgacggtgtgcttgaagcataaaagattttaatgttgatgatgtccaatttatctatctttttttgtgcttttggtgtcct

SEQ ID NO: 160338 - DNA, 160 bp, Homo sapiens
gaagatcaatgtaaaggaaatcccatcatttatttgcacttctggaagtatattaaaggggatccaacttatccccagcaccccttctcatttcatttctccttcttccggcattccaattttcccacactctctgactgcgtccttctgacctcctttc

SEQ ID NO: 160339 - DNA, 125 bp, Homo sapiens
ctagccctgcccactgccctttccggaaggccttcagttccccattgccttatgtatgcgtcatcagccgtgctgctgggcacggtagacaatcccagcgagacccgcgcactgtcagcaccccg

SEQ ID NO: 160340 - DNA, 424 bp, Homo sapiens
cagctggggtttctcaaactctcctgctgtggtttgattccattactttttgtctttggctgcttggagacatgaatgcagaaattgttgacaaatttgcgttagaaaaatgatgctcatcagggccccgatgaacttcctggctgctccttctcctctgaggcaggtatatttttcaagtgagattgcttaatgctgcctccagactagccagagaggagtctactccctgggagggaaacctgggccacatctcttgtgctaagtgtttaacttatcttaagagcgctaaagaggctgtggcctgaattgtattaatgaccattgggcaggatgctttggagagagttcagtgttaacacagtgacatattattttcctgatggctcctaaagctatcaggataaatcacacgtttagcaac

SEQ ID NO: 160341 - DNA, 317 bp, Homo sapiens
ggcatagctgagtcaaagaataagtgcattaaaaattctggcagatattgccaaatcactctctaaaaaaacgtgctatggcaatttatactaccataaacagggtatggaagtgtttgagaaagctttggggtgcttccaaaaacctcaaagtatttactccaaattaaggaaactgaaaatgttacagtacaattctctttaaactctacctaggaaggagaatgcaatgaaatctgttaaaatatgaactgtgccaatttgaaaattatttacaattgtttccagggtctcatcaaaactcttaaaataacatc

SEQ ID NO: 160342 - DNA, 462 bp, Homo sapiens
agcaattctccttcctcagtctcctgagtagctgggattacaggcacatgccacctcgcccagctaattttggtatttttagtagagacggggtttcaccatgttggccaggctggcctcaaactcctgacctcaggtgatccacccgcctcggcctcccaaagtgctgggattccaggcatgagccattgcgtcccgcccacacttccaatctcatctgcaactgcgcacccgagtatctagggtggtcacacatgaaacaagttttctttcctgtggtttctcggggttaagtgaaaacaaaatagggcaatagggcttctgtttgagactaagatgttagcttcattactttgcaagaagactgattctagcttttgttattcattgaagcaatgttcttaagcactggcttccagagttatctttaaaatgtatgtgtgtgtgtgtgtgtgtgtgtgt

SEQ ID NO: 160343 - DNA, 238 bp, Homo sapiens
caacgcatgcacatcacttcatttgcatggattcaatgcagcattcagtgagcagcaaattcaagttttgctttctggaactctgtggaatgttttcccctgaacactgtcgatccagggtgggtcgaatccatgtggaacctacagatacagagggcccactagttttatgtggttttacataatgaagtaatagacttcaggtcagatggacctaacctgctactgctgtaaaggg

SEQ ID NO: 160344 - DNA, 302 bp, Homo sapiens
tctgactcagcttcttcctcctattctcaggtatacatcaatcttcttgtccaccttccaagtggtccttggcactctaggagttggtaatgtatattccaggttctaaagctaaactaattaagcttctagcaaatcaaagatgacagtaggggctgaaggaaacacagtgcaaggctaccaagccagagcttcctagcatcctcccctgagagctggactataaaagagatttaataaaacccagcacagaagtgcagaagcagtagagaataataatgatgctgagctaagagtaggaa

SEQ ID NO: 160345 - DNA, 389 bp, Homo sapiens
caccctgagaagattctctttcccaggagtcagtattggcttgtgatgcacgtctaagatcctacataaaaatgactatagtaagccagcagccctgcggcggccagcaattccattagatgagtaggaagagagctgtgctttctgctgttgtttttactggctggtgaagctatacctttgctctgatgttatacccagaaagggaatcgtctcctgaaacttgaagtgttcctctgatgccgaggcctggccttccctgagggattgccccaaggtccctacaccagtgctggcccaggcttgccctctccagtcactctggtttgttgtcaggcagagaattttcactttcatctttgctgctgacttcgccctctcacctctta

SEQ ID NO: 160346 - DNA, 504 bp, Homo sapiens
tactttccacagggatgttttgatacagggatgatacggacatctcacatcttatctagaccaagatgtaagatacagacatctcacatattatctagatcaagatgtaagatacagacatctcacatcttatctagaccaaacctcataggcaaagtaacacatttttctatattttctgtacagggttcaaagttagtatcaccaccattgcatccctaatagcttagataactggctgtaaaacagtacctcaaacccatctatcccggtctgcatggagaaaaccaagttttaaagaccaaggaaggcggttactcactgttagagctagcagcttcccataggtgagatgagcagggatgtggtcagtcttggatctcagtgattccatataccaatgctctgcttcggggagtttgcttaaacgcatatatgcttcacccatcatgttgtacaagctctgtggaaaagtacccttggaaaagtaccctgtggaaagta

SEQ ID NO: 160347 - DNA, 989 bp, Homo sapiens
agcagggagtcctcgattgaagtggaagggagtgggcaaataatcataataattagccgcgaattctctctacgaggggaggaagaaatagaaaataaaatgcttctacgttcaaacagcaagacagcctggaacgtctcaatgtctcagtgacagactgagatctctttcctctctgtgtagttgcaaaagaataaatttaagggaaaaaaataatccttataggaaatgttggtaaggagcgagcaaaacgagagctgccggggagcggagggggagggggaaagggagatgtgtcttcaagtttgctttccaagtccttctccttgattgtcttaacagggtaaagaagcaaacggaggctgaaattcagagaggaaaagcaaagaaacaaaagcaaagccgggggctacaggcccggggcaggggccccggcaagggtggaccgtgcagaaagtgaagttgggcgcggggactctgaggcacaaagcgagcagcgtgctggctgcaggctcccgccgcgcttgctgcgaacacgtgcagcagcggccgcggggccttggggcccgggggcccggagacggagggcagccaggggccctgactgctgcctccatgcccgtccagctcggccagctcggccgcggggtgacggttccctgggcctgccagttggtgaaaaaggaagtgaggtttggaaaacccggctggttaacctggtgcagtctcagtatctccgcacacacctcaagcgcgggtcctgagattcattctgtgtccacaagcttacactttttactttgggggatctctgcaaatgcatttcccccgcaattctgggcactgggtgtgcgcggcggcggctgcggttattcattattaatgacgctgcctgcccgcatcattatgatgataactattactattgttgtgattccgagctccgaggcgagagggggggtgtcgggctgcagagccgcccagcaagc

SEQ ID NO: 160348 - DNA, 397 bp, Homo sapiens
gtgcactaaggtcatttggtcttgaggcttataaagtctagcttgaaggagatctaaagattgttctaggagatacccaaagtgtaaaaggtgctaagtaccataaacttcaaggatcttgatttttcactaagcatgattaaaattaattattctaagctggcaaagaaaacctgatcatcaaaactgcccaactcaatttaattcgtggctaagtgccccacgtcagattttaatgctaaggcctttgggattttttcactccgaagggcagttacccacacaaaaacatttaattacaaagtaaactagttttatacctttccacacccatgtcaagccaggagaagtgtcggagatggtgtgtcagaatttgggggtccctctgtcaatgtgg

SEQ ID NO: 160349 - DNA, 321 bp, Homo sapiens
aagaatgtggcaaagcctttaattggtcctcaactctgactaaacataaggtaattcatactggagagaaaccctacaaatgtaaagaatgtggcaaagcttttaaccaatgctcaaaccttactacacacaagaaaattcatgctgtagaaaaatctgacaaataagaaaaatggaccaggcgtggtggctcacacctgtaatcccagcactttgggaggccaaggcgggtggatcacaagatcaagagattgagaccatcctggccaacgaagagaattactggagagaaaccgtacaaacctgaaagatataacagtg

SEQ ID NO: 160350 - DNA, 319 bp, Homo sapiens
aaagattccaggtgtagtggggtggagtggaagctccttagggaagccacttacctgatttgaagggtggtttcctcatctgcaagatatgcagattagtactctttcactcctatttctctttctctctctacttctcttttctttcttctctccttctccctcttcctcccttctctccttccttctctttttttttccctacacatatttataagtacctactttattccttaattgtactgtgccctggggatatagaatgctcctacaagggtcagggcctcacagaggagatgaacaaataaactgctgtaca

SEQ ID NO: 160351 - DNA, 348 bp, Homo sapiens
aggtaaaatactgttgatagcataggtgatgaaaatttaagaaaaatgtaattgaaaaactattgatatgtacattttgtagtctttatttccttaaagagctctattgttatttctctttttcagtcatgttttccaacaagaacacttaatcattttaactagttattaatttacatttcactatgtggtagtaaaagttaaagtaaacttagaatgtttcttgatgtggcagttgtattctcccttgcaaaatgcctaagtaaattatgacaaaccaagctaaatatagcattagttggagtcactttttattgttagaaaataaatacatttattcaaataaag

SEQ ID NO: 160352 - DNA, 630 bp, Homo sapiens
tgctaattgaaataagctagacaaaaaaggacaactatcatatgattccacttacaggaggtacctagagtagtccaattcataaagaaagtagaataatggtttctactttcattgaatgaggccaggagagagggggctggggaagtcatcttttattggctacagtttccctttgggaagataaagaggttttggagatggtggtggtgatgattgtacaacaacgtgaatgtacttaatgccacagaactaatacatttttaaatagttaaaatgataagttttatgttatatttaaatattgaaatttatatttcaccataaaaactatggaggactaaatccctgtacaaaagaaactggtttcgtcttctgggcttcttcaaccaggttgtttaagttctggaagccggctaatcctttgtttattgtactttttcatcaggtctggtgacttcccatttgcacagttaataggtagagtccagggatattgacactgggcttggttttgaattttcaatacttttttatacagtagttatccgtggttcttgacatccattgccacacagaaaagtgccttgctgaacagcacaagaaggaggcagtgattcggtgatatag

SEQ ID NO: 160353 - DNA, 329 bp, Homo sapiens
atcttggactacttcttctccaaccccaaatccagtccgcacaattcttggcccttgtttctcccttcctctctgctcttgttgttgcactacagtctagaccctcatggctccacatttgatgaccacctcagccccctctccttaacccctcatataacccacttctctaacaaaatgctgcagtcccccagtgtagaggacgctgagtctccactccttaactgggttggtagggccctccctgatctactcacactcccgctgcaaccagattccctctacttcccaatgctccggcgccaccacagccaggcctgtcccttatc

SEQ ID NO: 160354 - DNA, 321 bp, Homo sapiens
gaactaggtcccagaaagcaaatggtcatcatgaccactttagtggaaagtgtcccacagaccacaccttctgtggctttgcttccagcttagcaagctcaagttggcagaagctacaattcttcaaatacaggagcccagagtggttcttccaatgttttgcattgagtactctcacctgagttgggttttgtgctttcaggttgttttttgttttctgggtttttgttttgttttgttttgtttttttaatgattaagtgtactagaatgcgaagccgatatggttcaggtttttaaaaactggtacagtattgtattt

SEQ ID NO: 160355 - DNA, 292 bp, Homo sapiens
tagaaaagtatactcttagtgcacaatgtgacaaaaggacattatatttcataaaacatcatatttgaatggagattaaatttggaaataaattaacaggaaagggataggtagagaaaagttatcataatggcaaatgtttagagcaaaacagagaccaggaattaccagtaggtggcaataaaaggaaataatgacgtcataaagcatttccaggaattaaaggtcaagataacatttaacattgcgtgtttctctcatccactaaaatattcgtgaatatctccagtga

SEQ ID NO: 160356 - DNA, 300 bp, Homo sapiens
ttcccatcactgacactgctatcaatgagaggttttatgtaagctaattcaggggggaaatatacaatttcatgcaagcacacaaccacctttgtttattaatggtttactcccccaaagactgtccttttttctcttcaccaagaagaaatagctctctactgagtatttttgatagcaatccagcagaaacaaatgatggggttcatcatcaaagaagttttgaacaaaagccacatgcccttattgagataaattgaatgcccagaacagtgatttttttccttcatggtccctgta

SEQ ID NO: 160357 - DNA, 411 bp, Homo sapiens
tagaaacgttttaaaaatagcttacatttttaaaaatttaggaatgatattgattttcattgaaaacttttcaacatctgaagaaaatcttttcttcctaacctattaatagagctcctgattttcaaccattcttgtattcctaaaataatccatattggtcataatgtattcttcttttactaaactgttaaaataagttgggtgctgtttttttagattttggcacctgtgtgagaggagggtgccatggcagggtggctaagtgtgcccacctgtgtactagcattgaattttgaccctttatcccattggctctaaacactacatctcaggtgaagacgcccaaatgtttatctctactgagttacagattcctataacaattgcttaaattgatactcccacttg

SEQ ID NO: 160358 - DNA, 203 bp, Homo sapiens
tccattcccctcagttattttatgtcactatatctggttatttgaaatttttcagtatccctaaataatcaagattcagataaaaagaactatgattgtgtaatggaacacaactagtatctagatggtcgcaacattaattttgcctctaaacttctctcaaatctgttcttttcttctctttccctctataccactgccca

SEQ ID NO: 160359 - DNA, 175 bp, Homo sapiens
accaacctagtttctgctgtcttcaggagattcacgtaacacataaggactcacataaacttaaggtaaagggatagaaaaatatattccatgcaaatggacaccaaaagtgagcaagagtagctattctcacatcagacaaaacaaactttaaggcaacagcagttaaaaaaga

SEQ ID NO: 160360 - DNA, 564 bp, Homo sapiens
acgattcagctcggacccacaccacctgagtcgaatttaaagccttcaaatagaattctgtgtatggctgacatagcatggagtagggaaggcttctttgtaatttctgaggagaacttgggggcatgtagaggtcatgcttaggttctttccttacccagacctgacctgtgccgggccagagaggtttgccctagaaagctgatgacttaggaccttactggtgtgcagctttgcaggcctgtaaacttagttagttcatccaggtttcagttcctgggggcctgcctcaggcatgtgaaattcataagagaccatcaagtcacagttccagttaactaactccaataaacatgacgactaagttgatttatgtggacatgtaagagcatctctcctctgtaggagagattagctgggaagccagctcccctctggaggaaaccaaggcaaattatggtggcaagcttttgggtcatagcatcagatacacccagatttaaaccatgtaacagctgtgagacttcagaggagctactcaacccccctgctcctgtgtcctca

SEQ ID NO: 160361 - DNA, 272 bp, Homo sapiens
ggaggaccgcagtgcccagggtaagcgagtggggatgcgctggggaggcttggctgaggacaggggggtcgacttttctgtggtctccacttggtctgttctgagcaacgctgctctcggaagatgttgaaccaacttggggactccgggatggagaggagtgggaaaattgtaggcaatgacactttaggactgggaactgagtttggagctcggttatcttgaaaaaggaaagggagcgagctggggtcttagtagttagggttaaatgc

SEQ ID NO: 160362 - DNA, 415 bp, Homo sapiens
gtctgagttcgtcccagctgtgccactcattggctgtgtgaccttgggaaacttacttaatctctctgtgcttgtttctttccttgctggaaaatatagataacaagcataacaagagtacttatttcaaagatttggtgttaaggattaaataaactagtatgtgtaaagagcttagaacagtgccaggcacacagtccccagtaaacacaagctattattattactataaatttgcatgtattgtcaagaatcgatgaggttcttccccgtaggactttagctgattaaccttaatgttgggccaggtgcagtggctcatgcttataatcctagcactttgggaggccaaggtgggcggatcacttgaggtcaggagttcgagaccagcctggtgaacgtggtgaaaccttgt

SEQ ID NO: 160363 - DNA, 488 bp, Homo sapiens
taggagtgtattttcttcccatctgtgtgtatatgtgtgtgtgtgtgtgtgtgtgtgtatctgtgacatgcatttttttcccaaaagtgaggagatgcagtatttctgtgtttaaattattttttatcatttagcgtggtctgaaggtttgtgtacccccaatttcataggttgaaatcctaagccccaaggtaatgatactgatttggtcatgagcgtggtgccctcatgaatggggttggtgcccttatgaaagcggccctagagagctgctttgctctttgcaccaggtgagaacacagctagaaggcagcgtctgagtcagaaagccggcctccaccagacactgaatctgccttatcttgggcatcccagtgtccagaattgtaagaaatacatttattatttataagccacacagattatggtattttgttatagcagcctgagcagactaagatatcacctttttaaaaaaacaaataagc

SEQ ID NO: 160364 - DNA, 155 bp, Homo sapiens
taattctcattcccacggttcctcatgctgtgcataccaggaagcagtgaaaatcctgtacacaagctcactgtactgtgtgtgcttggggtgccctgaacccacttctcgaagggtctgctcacttccaccccatctgacacccttatcagcaa

SEQ ID NO: 160365 - DNA, 161 bp, Homo sapiens
cccaccagctaccagaacctctgtggcactggatcggtgccaccctgctggggtggggtggctgtactccatgcaggaaacatcctccaaggggttctttgctttcctcgtgcttcacttcagctctctttcactcagtacctactgtgtgcttggggtca

SEQ ID NO: 160366 - DNA, 126 bp, Homo sapiens
ataaaacatattggaaccactattttttttaaaatgctgagaaccacaaaaccattcctgtaagagaacagtctaaaaaattaaatctactttcacttctgttttgtttaccttctgctttccata

SEQ ID NO: 160367 - DNA, 834 bp, Homo sapiens
gaccctggtccctagctttgtgggtgaagaagatacctctttagcttgtgccaacccatccctctgggctacaggccattctgtagtcaccttgcagtcacgtctttccttctagataactggctctgggccttggaaaccttctctttggctctagctaattttgctgttttattccgtttacttaaaacctattcacttggtcattgaggtcagaactatcaggaaagctgtgctccttaacccatcatctaagctaagcttgggccaggtttttattacctcttgaatatatataggttgcaaatactatgctgctatgtgtgttgaagacgtgagatgtcagtgcataccctgtgactctgttcgagttgctgcaagtgtatctctctggagcactgtggagcaatagtctagtccagagaacatatgatattgtggtaatattattgctaatgcgggagatgagcagtcattgatagcgctgtgttcagggttaacggcttacgcaggaaatgaccggtccatagcaagggctcagtctttctgtgtctctcagtctttacctctcttccccatctagctttctgtctaagttcctgtttctagtctcagggcatatctagttgtcagctcctgagcagagcagaggtataagtgtcaactcatgcttgtgttaccagttcctacccctgtcagtaacctctgatgcttacaaggatactatcacctatgccatcagtggggaatgaccttccaaaaatatttttaacaatactaaaaatacctgaaacatactgggtgaaaataagacattggagctgctgctcccca

SEQ ID NO: 160368 - DNA, 395 bp, Homo sapiens
taacagtggtgtggacttctcattgagctctctgcaactggtcaaagcccagcgagtaagggcctctcttgctgacaggaaagagaccctgagacgctgctgaatgagcaaagcaactgcaaaacattcataggccatggtcctgtttcttacagtgtgaaaaagtctattcaggcctgtgtcactgtgtatctgcaggtgcatagagaaagatctggaagggtacactgtcaaggactatttccctgaggaatggagaattttgcttttcattttgtacatttttaggttgtttgattttacaaaaaatgagcatgtgctactttttgtatttttcaaaaaggtgatgtattttaaaagtgaatgacagatgaggaaacagcatgtgtaggcaa

SEQ ID NO: 160369 - DNA, 866 bp, Homo sapiens
tgtcaagcagctcacaagaggcagagctgggatttgggctcagatatgtctgaagattccagtaatccctcaggtctttttgaaggaggatcctactcctataaacatgatgcccattaaggaaagcacttcattttcagtgggctgaaatattatccacacatatacccttctaaatgatccatcagagagagagaactttttctgtccagccaaatgtgcacattcttcatatagctactcagaaggaaatgggtgtgtcattcttcagaccataggatagatgccaacatgtcccttggtagaaactacctgccagccagactatggatacaccttctctctagctcagaggctgcttttaacacgacaggttcccatctcaccctaaaggcacttatcagctgtgagtcaggtctctgcaggaggaagcacaagcatgtcagcctggtgtagctagggggctgtaattgcattcactagtcttcatccagaaaatctaccttttattaagtccttatcaaatagtcatatatagaaaagccaaaattattttttgaaaaatcagaaatagcatttctatttgctatgtaattgaatcaaaagcgtttcagctttggctcttctctctggaatccacccttttgttcactagctaagcaagtatgagcaccatataaaaactacaagcaaactttctgaaaaatgtagagaaaattaattctcctttctatgtgtgactgtacacacaatctggaaaggagtgggtctggtaataattttgatttctgtttcactgtaataaaacaatcaatctacataaaaactacagagcaaagggagaacagcaaaattccctaagagaa

SEQ ID NO: 160370 - DNA, 205 bp, Homo sapiens
agtgttcgtgttgtcatgtagcatgattccgatttttatttttaaagattgtataaatccagaaaggatcacaagaagaactaggtcaaaatgtaaacagtgtttatctctgggtaatgggattatgggtgatttttatcttctcatgtgtctgtgtccttgtattttcaaaacgttatataatgagcgaattatttttaaaatc

SEQ ID NO: 160371 - DNA, 192 bp, Homo sapiens
tgctgggattacaggcataagccaacatgcccggcctacatttttcttctttaagtctgcaagttgggccaaagaggacacaaaagtcctatggatttgtataagccaggcactaagacaaagcttcagttatactactgttgccaggccatgggtggcaaagaaatcacacatgtcaactttgcagaagaa

SEQ ID NO: 160372 - DNA, 335 bp, Homo sapiens
ggagtcagctgagaacaaggcaagatctgtcaaaaaggagttggaagaaaatatatttgataactaagaagagcaagaagtggtctgtaagtgagtttttaaagttttaattaagcaggattcagaaaagagaggtgagatgcaattgtgcaaccttttactgttctatgacccttagtaaatgcccttggttagaggcctggatcagaccaatcagaaaaataatttcttctccatgggagattataacaggtaaagaaaaagagagcaagacgtggaagacatcgctagtgttcatcctctaattcctaggcccatggaaaacgagaaactag

SEQ ID NO: 160373 - DNA, 311 bp, Homo sapiens
gtggtaaaagagagctcttttggaaattcaagtaactacagttaaaaggatccatcaatcatttatacagtagtatgaatgcattttaccagatcagtttcctgctatctcaccattgaaaaaacaagatttctgaaaccaggagaggagatgggtaattctagagcctgggatatttgaagagagtgaatgcattattcctatggacctcccctccagtgatttattggctgagaaggtagtgttggagaggggaaagcctgaggtcttggagaagaagataccagaatagaaaagcagcaaggaaagcg

SEQ ID NO: 160374 - DNA, 157 bp, Homo sapiens
aataaggctcacagtgaccttagcaacaagctttgctgcccattggctgtcactgctgccgcctgccaatgcggcctcctgaaggccagcactgatgctgagctgaaacttctgcatgtgccaaggtccagctgcctctgtcagaaatcaccgtcct

SEQ ID NO: 160375 - DNA, 339 bp, Homo sapiens
ttaattacccattatataagtaaggaaactgaggtttgggcagactaagcaactggcccagaacatcacagctagtgttaaaatgttaaatatgtcagtatattttttaaaagaaaaatcttgctctggattgatcagcgatgcgcttttcctagatccataagccatacttgagaacatgattagcatataacgacgtttgtatataacacactgtgtggcaggcaccattttaggcctttttacatgtgtgaactcatgcaaccctcacaaccctatgtttgcaaatccccctttaaagatgggaaaccaagtcacagagaggtaacttaacttgcc

SEQ ID NO: 160376 - DNA, 254 bp, Homo sapiens
gtcagatgaggaagacaaaaaatacaacacccaatgttattaaaaacatgggaaaacaggcaatctcatgtgctaatagaagtttatattcttaagggtagtttggctccgtgaattgacattttaaatatgcataccctttaactcagctggcaaatttcttggaatttatcctgaagagatagtgcacaagcatgcaaagatgtatatatcaagtgtttatcatagaatgctcacaataatcaaaatattgc

SEQ ID NO: 160377 - DNA, 315 bp, Homo sapiens
agattacacggctagtatgtagcaaaggtagaaattcaactctggccaactgaccacgctcttaacttcatgctctggagatctttctctagtctaactcatctgctgagaggttgtccagcttgtgtgttaacacctgatggggaactctcttcttcatcagggtaatgaatttcagctcttgaatttcatgatagaaataaatgaccctgtctctctgcagtcatgcattggttttagccaaactatttgggctcatgaagaaaatgtcttgcctgtgttttccatgacagacctccaaatatttgacaataa

SEQ ID NO: 160378 - DNA, 333 bp, Homo sapiens
agttgagcaaaaaatttagtactgagcggagaaatcactttacaaagaaacacaagagttgattcatattcatgatctaacagaataccagtataatagagagaaaagtccttgtcagtgctgaacacttagatttttttcagctcagattttaaggaacgttgaataacattgagtaatgactgtggtctttactagccgatttttagaagataaggagatgttattcatatggctgtttatttagtaaatcagaactttataagttgtttacatcatagcacaaacagaagaagatattttgttttttgagatggagtcttgctctgtcac

SEQ ID NO: 160379 - DNA, 421 bp, Homo sapiens
cccggtccgggttactagaagataagagaagacgctggcctctgtacatgaaatatgggctcctgatggacctcattcaattctgtactgtgatttccatgccgaacaactcaagccttaaagagagaaatatgaacaaaagaaggacaaataaaaggaagaaaggatatgaagaagaatgaatggatgatggttggatggttcgttggatgggtaaacaaaccaattaattaacaactaactgggctactttaagtgaaatgcgtatggaatgctgagaccacatccagttctaccagttctctcagttcatttaatgtaaacttggaggtgaatgctcaaatatcaagggcatacatgcaaggcgtatctgttcttcagttaatcccaactgttctatccagtgccctgggtcctattc

SEQ ID NO: 160380 - DNA, 650 bp, Homo sapiens
tttatagctataattcgaaaagaaaaaaaagtagcaggtaatgggtatattatacactatttgcgtgatggttacaccagactttaccactacatactgtatttatgtaacaaaattacacttgtactccttacatttatgccaaaaaagcggcaggatcacaaattcacacatagttaatgtgcccctccaacagtcaattatgttctatgactaacctgaggatctttatagaatctgagtaatggaaatgcctgggtttttccatttaacaatatattgggctcttacagttacaacagtcttctttcgggttaaatatttcttctcttgaagggtccactccttattaaagataagattgaactgaatgtttacttaaacgttcagtcttttggagtttctttactcttctcaaaatggtggttggatatataagaacttgctgtgtcctggtagtgttgaggggagaaggtgacaacttactgtggatgtatgttagctggtgtccactgagaatagctgtctggcctcactcctgggaattctgctggcatctgctgtgaagtctgcagttgctttaatctgtagtctgttctctttgatttggcctcattctggctgtccctggtgctgtcttatctcttgag

SEQ ID NO: 160381 - DNA, 472 bp, Homo sapiens
cacccgtgcccagggctgccttccgagcacccgcagacctgggcctgcagtaacaggagagctatctgcaaaccgcagtgtcatcagccgcacggcctctggagaggcctgagaaaggccggctcagcttgcaggcgaggaaccaaacgaaaggcaaactcctggcccctgcagcctcgcaggtcccctatccctcctccctgccttcctttccgccccgctgacaccacggtctgcaaaccatggtcctcctcgccacccctgtcacctcctcctccgccccccgccggcctccgacgcaaagtcgccacccagtcaccccgcctcggccccgcctggtttgatttcctcccgtgtgtgtcacccatgaggtggccgtgcccctggcctgtttacagctgtgcgcaagctcctcgcgacccgaaagcgagacctttgtctgcggcagctccgcgccgggctgggcggccgc

SEQ ID NO: 160382 - DNA, 523 bp, Homo sapiens
aatttgacagaagttacaaaaaagaagataaaatagaaaatgaaatgcaacacctttattcatctcatctgtctctttctcattacccatccaccaagacacgaacagcctcagtacagagagagaaattgcttgttcatttattgtgagaatcttttccagataagtggcaatttgcatccacatgagcaatgtatggcaatgtctcatctggcctaatgcagtatgcaattttgcacacgatgtcatgctgacttgaagtaactaggatatattgcttgtgtaagaaatataatgcgtagggaaatatcacattcatgtcttccagcccacaattttattatgccatgacaatcaagaacacagcagatgccacacctgcaaatattaggaagctaattgacccacgaaatatcatcaggaattttcattcaggcaacaaaaataataaagttcacttagattagagacagcaaaagttttatataactcttaaacatgtacaaagaaaatgatttaataa

SEQ ID NO: 160383 - DNA, 297 bp, Homo sapiens
ctttacacttaaactctctttaaactcgattttgaccttttaaattattttaggttaacaactgtgactttatttcttcacttccttctactgctaaatttctctgattcagagtttcggaatagagaaaaagccacatcaaagctaacattagagtggttatcagtgagaagctggactggcaaaaccagaccatcaccctccctaggacacagtttcacagtttcaattctttcaagtatgaattactttaacaagaaaaataaagccaatacttgcttcctctctcgatatgca

SEQ ID NO: 160384 - DNA, 277 bp, Homo sapiens
agaggagaaaagccagaagagtgtgatgctctggaagccaagcgaagaaagtgagtgaaggcgggtgagggcagagggtggaattgatactaggtttgacagagaggaggtcattggtgacctagacaagaagagtttcacagaacttgatttgggtcagttaaaacaagtggggacagtgcctgtggtcactgccttttctgtgaggaacaggcagagacctgagattcacagggcgtagggaagtctgggggtgaggaggagccagcctgacctg

SEQ ID NO: 160385 - DNA, 298 bp, Homo sapiens
gagtgggaagaaaggaaagggaactagaaattagaaggcccattaggaaattcctgaataatttaaacaagcaccaggatagcagtgagaaagaaaggagacacattatgaaaaagagtccaaattaattggcgcctgattgaatgtagggtgtgacagaaatgaaaaataattctggtttctagcgtagatgtcagttaagagaacaggaatgcagaaaagaacatctgatggtgagtggcctgcagtgagcgcggaaacgtgagatggagatgaaggaacatctggcagtgagtgg

SEQ ID NO: 160386 - DNA, 750 bp, Homo sapiens
caaggggactgattccgcagcacagctttgcagatcatgaaaagcagtttggagtatatgctgagaagactctggaagattttgcatggaaataaagcaatctgatttatttaaaaaatataatctggcttttgtgtagagactatataacgtgggcaagcataaaaatctggagtaaagggtcaatttggaagttattaagtaatttaggaagagaaggtgataacttgtatcagggcagtagtggtcagggtgaatggaattgcttggcacttttcttactgtcagagtaactacgatgtatcctttttcactgtctcatccattctttgtttttcttcttttttgacccaacttcccagcactcctctgcttcctcgatctcttcactggctcatgtggaacaccccccgacccccaacccaacagcatctcatgaagatttaagctgtgttcaccataatcttctgtaaatattgcctctaccttcttgtattaattggctcacttctattgcagttcattctctcacctctctgtaggtaaacttacagtcagagtcataaatgcccaaagatacttcctatcttcctgaaaaccatgagtcttttgaggtctgtgccattttgtcatactagagggcactctgcccttgctcttgatgtcattgtaacacttatcacaccatatgttaattgtatgctactttctaatatttatagtatattaaaacttgtaagctggagctgg

SEQ ID NO: 160387 - DNA, 139 bp, Homo sapiens
acattctctactctccataaactctatccttttccaactctctttaagcaggtatcttttctcttacttcacagaaaaaccaagaccatcagataggtactccctcagcttctggcttccttacccacaaatctatcag

SEQ ID NO: 160388 - DNA, 286 bp, Homo sapiens
cctgtaccccctaaaaatccctgcattctttggagaaatacaaagcagggaaggtgaatggggggacctacaggtattcatctataggtgaatagggcatgttggagggaggtaatcagggaagacttcactgtcagcaaagacttgtagaagataagaaaaccatttatttggaggaagagcttcctaagcacagggaacagcagttgtaaaagtcttgaggtgggttctttttgagacctttcagctaaatatagcaaaatggtttttgcggctggagtagcat

SEQ ID NO: 160389 - DNA, 513 bp, Homo sapiens
ggcctcatacatggaggatgtgtgcgtgggaggaagattgacagtgatctggcctggatagttgtgatggtaggtggtacccacaatgatggcccttcaggggatttgaagattgtgaaggaggaccaagaggagctgtttggaccacctgtgatccaaggcgggaactaggaagacacctaccggaagtctttgtggatcttttgggattggattggattagcagatacagaacgtttgacctatagtaaccagctgactgttcagcaaacgcttcacttcctaaaaggcttcttctttccaaggcaaactggggcatgtgaggaacaggaacttacaagagcttctagtctgaactccaggtgctgacactgttaacagttgctgagtggagtccttctcacttgggtggaaagtaacctgtaaacttggcccaagtctcccttttcctgtcctttggcccatgctgttctggtgctagatgttggctctggcctttgcactgaccatctc

SEQ ID NO: 160390 - DNA, 504 bp, Homo sapiens
ttcacttcctgccccttggatgctaatgagattgactcatctttattgtttgttgtgtctttctccacatgcttgtgaattctttcagtttgcattatttgattaatgatgaataatttcaggtattcgtgttttttttttaggaaattgctcacctatgtcctaagcccacttttccatcaggatcttcttctttatgtcatatatatattgcaaatctactagtttttggtccatttgtgttttgttttgttttgttttgtttacttaggagccaaataggaaataattgtctaaaagcaacagtgaaatgaagcaaatgaatctgtgaattaaattggtgacatgaccacacacaggaactattccaaatatctttaaaatgagtaatttagctatacatccttagagggatatattcttttatttttctttttgagacaaggtctttctctgtcacccaggctggagtgcagtggtgcaatcacggctgactgcagcctc

SEQ ID NO: 160391 - DNA, 372 bp, Homo sapiens
tatagcaaaggatatgctttatcaataattaaatgcatggatatttgctaatttaaacagaatagcagtgcaatgaacatttcttaagtgaatgtcttttagaattcttaaataatttcctaaaattatttagaagccattctaatagaaaaatgatttctggagttaaattaaaaaataagcaaaacaaaacaaaacaaacatacacacacaaagaagaaattgggtttggggggagatttaaaagatgctccggatgaggtcaacgggagggaactgaaatcaaaagcaggcaaagtgaggagaaaaactggaaagcatgaagataaaagttcggaaagagttcatctttggatagaaagccttttttaa

SEQ ID NO: 160392 - DNA, 486 bp, Homo sapiens
taacatctgtgactacaaccttctttcatcactgttctaccaatgatgaattttagtccattgtgtcttcacaaactcagctctctaatgggctttgaaagatggtggtttatagattatctatgtgttgtttttgttagtgtactagtgaagttctcttgtgactgcatcctaagtggaagtgaaaaatattttctgcaacaaatacagaaataaaaatcatatggtttttatttataatgtgaccactaggaaacaaaggtacaggattaaattcagcttcatgaaggtaaatacttaagatatgaaataaatatgtttcaaagatatcaattttcagtgttccaaagattaaatttagaataatgagatgaagaaatagactatgtacttttaaggcaatctattgtaaattttacttctcttggactgtttttagcagatggacagcagacagcttgatgctgttcctggagttgtacaaga

SEQ ID NO: 160393 - DNA, 260 bp, Homo sapiens
gtagcagccagagaggtactaggcttagtgggacccaggtactgccacaaaaccagatgcccaaagcaggcccctagggacgtcagccaacccaggacagcacagggggcaacgcggtggcttgaaacccagatctgctcttgactggcttggcaagctggggcaggttacttaacccctctgtgctccagtttccccatttggacataataagagtcatagaatggctgggagcatcaaatgaaatggcaactaccaag

SEQ ID NO: 160394 - DNA, 512 bp, Homo sapiens
attctctgaatcgcccagacctcgtgtgtggttgaatatttgcagatgagtgaagtcctcaccatttcaagtgctgtcttagctgtgactggttttcagtgacactaaccacttgggtgattaatttattaaaatatattgtaattacactgaggtagaaacaaaagtgaagggaatgtttcttgtttctgtgcttttggaaactcccaaaagtttggcacaatgggatgaccaagacaggcaggaatgggcatgtaaaactgactgagctacattccaacagtgcatgctgcctgagtgcactctggtgtcagggaaatggccaagttgtgggaaaactggatgttccgggttacacgataggccatctcttgtcgtcggaggaggcggtggcccctcccagttcgacacggtcactttatgtttctaactgatttctcttagttctgcagctgcctcagaagcagtaggcttgcttgtgtgttcatgaaaacaataaactggttccctca

SEQ ID NO: 160395 - DNA, 141 bp, Homo sapiens
ccatagcagccatgagaaccggaagagacagaagagaagacagaagcaagagtggggctgctttcccgcacggcagaggctaatgggtgagatgtgtccctggaagttgtacctagccctctgctcatttctctctggtcc

SEQ ID NO: 160396 - DNA, 591 bp, Homo sapiens
atagctgactctagagggtacacctccataacgtgagccaagattcatggaaatggctctctcaggcagagaaagaaactacaatgcttagcctctaaggaaaagtggcttactataaatcaggcccttgagaatggtgtcatttagatgctccccacagctgttaggagattcattaaatattcaataactaggccaggtgcagtggctcacacctgtaataccagcactttgggaggctgaagtgggatgattgctctgaaccaaaagtttgagaccagcctgggcaacatatcgagaccccgtttccacatacgcacacagcatggtggcatgcacctgtaatccaggctactcaggaggctgaggcgggaggattgcttgagcctgggagttcaaggctgcagtgagctatgattgcaccgctgtactccagcctgggcaagagagtgagaccctgtctccaaaaaatgttgaataactgaataaatttgctttcttatcgacaaaaattggtcttaaaatagtgtaggaactgggggttaaacctcatttccttctcagttctgtgtgggacactgaattaattat

SEQ ID NO: 160397 - DNA, 851 bp, Homo sapiens
tggttcaaacattttgtaaagtaatctggcaatataaattgagaggcacaaaaaaggttataactttcaatttagcaattccagctgtaggaatgtatcctaaggaaataatctcaaacatggaaacagctacaagcaaaaaataataatcatctaagcattattcataatagaaaaaaatgagggaggagagaaccctgaaaaaattggaatagctaataaaagaacatgtaaattatggtacattcatttgttatattctgcaggtggtaaaaaatgatagttatgaaaaactaggggaaaacatggaagaaatcttatggtgggttaaattttaacagcagaatgtcaatttgaatatatttatgattgcaattcttcaaaaatatgctttttgaaaatacatgaaaaagataatgatagggctgttaggtgatgagcgtatggatacttttattctttttctatacttattacatttttgtgatgtgattatattactctaaaaataaaaatattgttaaatttttggaatggagttttactgacttggaggtgttggtttttttcccgagtgtttttactggcttgggatagttttttcccccaatgtttttccaccttcttcttctcctttattttattttattttattttaattttattttattttatttcattttattcatttattttgagacagggtctcactttgctccgaggctggatggagtacagtggcagaatcacagctcactgaagcctcaatctcaggggctctagccatcctcccattgcagcctcccaagtagctgagactacaggcgtgtgccaccatgccccgctaattt

SEQ ID NO: 160398 - DNA, 992 bp, Homo sapiens
accatggccccgactgtacacaaaagagccatccttgccctaaatgtctgtgtgatgagctgtaagaccctacacggcactttaggaaggggcactgattatctgaggctaccaccacccatctccccagagtacctgaggcctcatggactccaccagttaaagtcccccctgcaccccatgccacactatggacaaaacattcaacaaccagccctacagccactgggatgggtatttagcagggcaagcgttgggcacacacaaaggatgcttgaaatagaaaggcagagaccctccttctcgagcttcagggaagctagtgtccacacaactccacttctacctggtttgaatctctctctctgcacggcacctgctccctcaaagtcatggcgaatcgtgagcccacatttccaaactcatcaccacacagaaaaccctgagattaagcagcagtgggtctgggccccaagggccagctgccagcagccagcaagccatgctgtggtcagctcccaagccagtggtgctgcacgtctgcaccctggccacttttgtcctgtgaggctgagatggaggcagcaccctgatactgcccaggccaggaaggatagtcaggaccacatgacccagcctgagatggaacctccaggggccaaataccacagctgtctcccggggctttcctttcaattgcagaagtaaaataaacattttttgttttattttttaaatataggtcaggttccatggttcacacctgtaatcccagcaatttgggaggccgagacgggaggatggcttgcatgcaggagttcaagaccagcttgggcaacatggcaaaaccttgtctctataaaaaataaaaaattagctgagtgtggtggcgtgcacctgtagtcccagctacttgggaggctgaggtgaggtgggaggatgacttgagcccaggagacggaagctgcagtcagccatgaccacacctctgt

SEQ ID NO: 160399 - DNA, 346 bp, Homo sapiens
actacatacttccgttctattcttagccccaccactcagggtgcctgtagggaatgcaaaaccagagatataatgagcagaagctctcaaaccaataagcatatctggactggtgagaatcaacctcccacttccccataagtttaaaaataattctaatttacagcacatgttattctaatttcggagtcactctctctacatactgcactattactaactagtgtgactacgatctgctcagacaataggaaatggtaccaggttccgtttacattcttaaaatgaatgtacacttgaaggaaaattcattgttgagttttatgcatacacaccggtaagtcgg

SEQ ID NO: 160400 - DNA, 270 bp, Homo sapiens
gccaccactttagtccaaatcactctccattactgctagctcacaaaagtgcaataactttccaactagtatccctgcctctcttctttcccttagctatcattcttcacacagaaacaagaggtcatttaatgatttaaatcaaatcatataattctcttgctttaaaaactcctgataacctcacagtagaaaaccaataataaatgtgaaaagaatgatggaattagaaaatcaccatttggcaaccattgtaataatcaattcaaa

SEQ ID NO: 160401 - DNA, 437 bp, Homo sapiens
ctgcaaagggtctggaggacggcccttctgctaaggtgtccgctcccaaggcagagggcttgggggagctggaggaggctgggttccaggaggggtggccaggtaagtccttgggccagtagggaagaagtccaactgtgtacaaacgttacctctgagccacaccactaccctgccaggaggtttgatgtggtcccattttacagaggggaagactgagtctgatttcttcactcaacaagtgctcactgaatgcctgggatgcagcggtgaacaaaaccaacaaaagaccctgcttttatggagtttataatctggtgaaggatggggagagagcaagagacaatttcgggtgctaagcacatgcagatgaagaaaataaaccaggaggggtggggagaggggcttatctgcacaggctccctcagctgagacct

SEQ ID NO: 160402 - DNA, 566 bp, Homo sapiens
aagtatgtatacaatgctacacccatactgaaaccaagaagaacactatcatgtctgtaactaaaatattaataagaataaaggaattgcttattaatcagggaaatactctttagaatagctttatattttgatactataggtaaagagtacaaagatttcatttcaaattttgttttttgcctggcttttcacagactttaaaaaaattatcacttgtgatacaaaatacctgggtgctacattctctgatgtttaatttgttttatacagtatttaaaataaagtatcccaagttgctgcaatggcagacaccagatctatcactgaggtcccttctctccttattaattagtaattgggagacacattttggcagctttcgtttccccattattttctctagtttgacacaaaaccctgtcagaagcaccactatttgaactgtacccctcttagtgctgggtcactaaattttaataaacggagctcccgccagaaaactactgaaataggcgtaaaagtttattgaagcagtaacagtaaacaaatatatgaagaaagca

SEQ ID NO: 160403 - DNA, 474 bp, Homo sapiens
tgagagaccgtgttgcaatgctttgcaaaatatgtgaaagggctttgcaaaatgtaacccgagattcacatgtgagggtaggtccctaagaatctgtagtagtgatgcaggtggcacttgccaatacaacaacctttattgatcaacaaaacgaaaattaccaggagttagtccctcccctcagcaggactaaaggatgccagtggtgtaggcattctatggcgcaagctcagcggacctacccttcaaggaccagcacctgtctacaaaaagattcctcagatggaaacagctcttcctaaggacgagtgcggcctggccagaagcccattttcctcaaagctctgatatatttggctaggagagaggatgcccagtcatgctggagaaatttcctggaggctggcttctcttcaatggctgtcactcagagcctgacccagccccggggagcccaggtgccatctatgggga

SEQ ID NO: 160404 - DNA, 389 bp, Homo sapiens
ccccgccgctgtgacatgaggctacaggatctaatatttccagtgctcttgagtttagagtacacattaatcagaaagtacctccaccaaggatctttatggacctaccatcataatcagatgtgtgatgtatggagtgactgatagagattgcctaacgagctaccgatctcaggcttagagatggccatggtttgaactatggtggtggcaaaaagatgcagtgatgaagaggctatgtaaagatattcagaagatttgaaggacagagttggtaatgtgtgctatatctgcaaggaataaaaagaagtcaaagacaactcctaggtttttaggctgcacagctgtttagatagttagacagtggaatcaaaacacacattcatgtg

SEQ ID NO: 160405 - DNA, 171 bp, Homo sapiens
tgtgagctgtgcctgccttttgttacaagggcatattaccctttgttgtgaaaaaaacttttttgatcggacacagaggctcagtcctgtaatcccagcagtttggaaggctaaggtgggacatcatttaaggccaggagctagagactaatctgagcaacacagcaaatg

SEQ ID NO: 160406 - DNA, 112 bp, Homo sapiens
tatgagagaagcggcaattttgttccagctgccaagaaaacacaaaagatgatgattttccaggcccagagaagggcatgaacagcactgaggcaggaaatcatcattttca

SEQ ID NO: 160407 - DNA, 569 bp, Homo sapiens
tagtccccctacctttccagcttatcctcttccatcaccctctcttcccagtctcaccacactattcaacatgccttgaacaagtattgcacctttatattcacatcactgggtatcaggtgtgcaataagcttagtgatgctgccacattcattcatacacccaagtgcacatgcatacacacacacacacacacacacaccaaagtgctactcaacacccaaaggcagaaccaatctcccctcccctacacctctggtgtactcttcaacttacataacacagacttgcatgacagcatttgccataaggatcactgcagccacatcatcaccatatctcattcatccctccactcataacagcaatcgcattgcttagcacaaaacatgtaagagcatgttgcagaaacaaaggaatgaatataggtaatcaggaagtaaagtttctgatagtgattgtgtgaggattacctattcaaaaaactgtcatatttctcagcattaaattactggatgatatgatttggctgtgtccccacccaaatctcatcttgaattcccacatgt

SEQ ID NO: 160408 - DNA, 500 bp, Homo sapiens
aaaaaaaggaaatggatgtagaaataaaaataaaccattggattcatcagtcaatccagttttcaatcatctaagaataaaaatgttttccacttatacaggaaggaaaatggctgaagactcctcaacaaagttatgatacatcaaatatttcaaaatgatgcaaataacggattttgtcaaggcaagtgtaagaagaaggaaaagagataatgataggctagaacttattagggacatatttgaatctcagaatcagtatttacaaggtggatatgttccaggttcatatacaccacatgtctccacatgcagctggttgcattcacagaatgttgcccaattggaatatatatgccttcaaaaccagaaaaatataaggaaaaaattaggtgtgctgtgcttaagtttctattataacttctaattatgttgtttttctactatacctttatttttacttttgcaaattagtcattttattaaaaagtcatttatta

SEQ ID NO: 160409 - DNA, 198 bp, Homo sapiens
  misc_feature (157)..(157): n is a, c, g, or t
  misc_feature (171)..(171): n is a, c, g, or t
aggattcaccaggataagcagaaatctgttagagagtaaaggaggtaggggacagtcctaaagaaagatacaggctggacacagtggctcacacctgtaatctcagcactttgggaggccaaggcgggcagattgcttgaactccgtgacctcaagntgatcctgtctgcnctcatgcttcccaagagtgctgggagt

SEQ ID NO: 160410 - DNA, 446 bp, Homo sapiens
ttgcaatgcttagaagaaacacagatgaaagggcaggcccgaggcctgggaacctgagtctttccagagaaaaacgtgagttgctttcctagtatctctgcaaagagtttcaggatgacctggaggacagagatgggaacagctactcttgggccagctctcccagagcaatctggaccttctagagcattggcccctgcctcttgcagccctgctctccctccctatctcaggtgcccgtgtaggctcttggtagccttacacctgaggtagcgtaagttctcagcaaacatgtggcttaggataataagatgcaatatttactctagcttctgaagagcagcaagtttagaaccgtaactctaaatacaaaaacaggcaggttcaatctaatttaaaaatgggcaaagggctgggcacggttgctcacgcctgtaatcccagca

SEQ ID NO: 160411 - DNA, 453 bp, Homo sapiens
gcaccattcacacaggccaaaaggtggaaacaactcaggcatgggtcaacaggtgagtggataagcaacacgcgctccatccgcacaatggaatattactcagccttcaaaaggaggggaagtctgacagttgctgcggcgcaggtgaacctagcggacattaggctcggtgaaataagccaatcacaaaaggacaaatatcgtgtgactcctcttacaggaggtccctagaggagtcaaattcaaagacagaaagaacggtaggcaccaggggctggggaggagagttagtgtttcgtgggctagagtttcagatctgcaggctggaaagagttctggagatggactgtttaaacatgaatgtatctgatgcagtttggatgtgtggcccctccaaatctcatgttgaaatgtgatcagggttgaaaatcggcctggtcggaggtgtctggg

SEQ ID NO: 160412 - DNA, 375 bp, Homo sapiens
taatactgactcatttatctgcagtgcaggctgtggagggagccagagaaagaagagcatcttcaccttcgagaactttttggatttttacatttatttattcatttatttattttagaaacagggtctcactgtgttgctggggccagagtgcattggcatgatcatagcccactgcaatctcaagctcctggcctacatggtgaaaccccatctctactaaaaatacaaaaaattagcagggtgtggtggcacgctcctgtagtcccagttacttgggaagctgagacaggagaattgcttgaacctgggagacggaggttgcagtgagccgacattgtgtcgttgcactccagcctgggcgaactctgtctc

SEQ ID NO: 160413 - DNA, 247 bp, Homo sapiens
caagttcattcaactcatatacacatgaatattccacgacttgttttatttttagttaagaagtaataattgtacatatttatgggatgtagagtgatattacacatgtatacaatgtgtaatgatcaaatcagggcaattagcatatctagcaccttgaatatttatcacttctttgtgttgtgaacattcaaaatccccgccaaaataagatgttttatttggtaatctctaagcctcttctagt

SEQ ID NO: 160414 - DNA, 409 bp, Homo sapiens
ctgggatcagaaaccccctttcctgtaacacatcttgaactagctattactggttgaatcactgagtgatcactccttcccagaggttggggatggggctgaaagtactaaccctctaatcatggctcagtctttccagtgaccagccccaatcctgaagctaaccagaggtgaccaggcatcagcaaattcattagcacacaaaaagacacagatcactttggagattccaaagattttaggagttatattccaggagacatgaggaagaccaaatatatattttacaatatctcacctaccacccattacaactgggactctagcaggagatgccactctttcatcttagaacagctaagatccctactttcccactccccatacccagcagtttaagaaaaacacg

SEQ ID NO: 160415 - DNA, 332 bp, Homo sapiens
tcaaaataggccgttatttgaagttgacaaagaatactgtcaaataacatgaaaggtaagaatagtcaattcccctaataaaaacacatctagcgcatttatattacaacctcaaccttacacagaaagctaatgctttgaagacaagtgacattccactgttacacaccatttctccagaaactaaactagacaacattataggtcaaaatacatgaaatacaccttcaactgatcacataacgtcacataacgataaaaaataaggaactaaattggtaccttaaaaattaaagacactggctgggcgcagtggctcaagcctgtaatcc

SEQ ID NO: 160416 - DNA, 394 bp, Homo sapiens
tatcttaagaaaagggaaaggggtttttttaaaactgtttacccacattccacaaaaagaaaatgaaattgaggaaacagtgttactaatgataggaaagaagaagaaattttaggattgcagacataaacaatctgttcaaaatcaaccaatgaacaaacagtatgctttagaagcttctgcaacggaaaaaactaatcaggaacttcaagaaaacaaaaagctgtctaataggaagctatttaacatgtggaataattctgagcacttgtaagaaaatctaatctgtttcatcagaacagtacaattcttccaagaggggaacaagtttactgacatatttccctaactctagatccaaccaattactagatctgtcatgaacaatgtttat

SEQ ID NO: 160417 - DNA, 620 bp, Homo sapiens
atgggcacaagcagcaaaggaaagaaggaagtatacaacataatttcatcttccacacagcttataatcttgtttgaaaagcaaaatcagtgtgttcattattactacagaaaatggtttaaggattgaactatgtgatgaaaatcaagctgatgtaaattcagagtacaaagtgattagtatggactagagagagtattaatggctttatgaaggatatactgcaactactgcaggaagggtaggtatgcatactgggggaagtgagatgaactgaagtcacagaggcaagaatgtgcctttgtattaataatctcttgcgtttcctagctcagtgaagcaagttcaccactgtccacctagtttctccagccagaaacttacgagttacttttcagttacctttctctcttcatatgtgctctatcaccaagtcctattgactctacctccaaaaatctcttgaatttctccttttttgtctcccccattgctgtttccttagtctaaatcatgtacatgtctagcctggattctgccatagcttcctagctagtctctggcctcagtgccttttacatatactgttgcctctgccaggaaagttctgtgctatcttc

SEQ ID NO: 160418 - DNA, 314 bp, Homo sapiens
tgaatgactgcatccctaacatgaggcaatgatcattcccctgcctgttagacataattcactgcctgggaaggcactgtgctgtgtagatgcagcaagctggctaaaatcaactgtagcatggcctatgtcccaagcaggttgtcctgcccatacgctcaataatgaggcccactgaactctcctggtttccagaagcctcataagcaagcacgctcagtgaaggaacaggaagtcctttctggagcagggggagagaaaggcatccagttagccatagaggggaatggctccttactctttaagagtcattt

SEQ ID NO: 160419 - DNA, 511 bp, Homo sapiens
gcctgaaatactcatcccacatcccttttaaactaaagttcactcactcttcagatcacaagacaggtgaacaggggaaagacttcttggactctttacatcacatcttcccattggcagctctcaaaactctgtgcccctctcctgtctggtacctgttgaggctgaaactgtgcatgcatttctgtgattatttaattaacatgtgtcttccctgttagcagtgagttccacaagggcacatgaaaatctgtttttcactgtatcctaaaacgaagaacatgccttatatattgttggcactcaataaatatatttgttttgtatatcaactcccattcaacatctttgtaagaatcagtacagaataataatgactagcacaagctgtgactcaggtagacttgactttgtgattttattaattcattcattcatttgtaggttaattcaataaatgttaatttatgagggcttactatatgttagacacaatgcaaaatgcccagga

SEQ ID NO: 160420 - DNA, 153 bp, Homo sapiens
aagcatatccagctgttgcaattatgaactaaagtacacttttaggaaaaattaaagacccaccaaaggaatatcagatccttttacaacactcacactttgcttctaatcttggtccatgtttatgtgttgcctagctgtgcgaataccact

SEQ ID NO: 160421 - DNA, 276 bp, Homo sapiens
gtagagacgggggtctcgctatgttgcctaggctagtctcgaactcctgtgttccagcgatgctccgccttggcctactaaagtgctgggatcacaggaatgagcccccgcgcccagcccagggcgttatctgataaagctgtcccctctcccgaagtcacgatgcgtcaaaggccccacgcccgttctcaaactcatcaggagaaaagcaggacgctgcatccctaaaacatctgcccctgccccccccgctctgctcaacccttcccacactca

SEQ ID NO: 160422 - DNA, 410 bp, Homo sapiens
catcatcccactcaacacatcatcattaccattgtaactaccaccaccatcatcatcatcacaagaatacaagctcactgagggcacagattttttttaaattgattttctttttcttactgtattcctggggtctggtacacagtaggtggccaaaacaaatttgtcacaagcattcttatacaccaataatagacaaacacagagccaaatcataagtgaactcccattcataattgcttcaaagagaataaaatacctaggaatgcaacttacaagggacgtgaaggacctcttcaaggagaactacaaaccactgctcaatgaaataaaagaggatacaaacaaatggaaaaacattccatgctcatgggtaggaagaatcaatatcgggaaaatggccatactgc

SEQ ID NO: 160423 - DNA, 233 bp, Homo sapiens
atgttgttataccagctttcttttgcaccttcctgatatatttttcactgtctattttcaaactttctgcatcattttggcttagacatgtctcataagcagtgtatagttggattaaaaaattatttttgtgatttttttctttttctattctggcttctcaataagatttttttttaacttagtctcatagactctgtcttttagtagatgaaagaaagtgtgtgtgtgtg

SEQ ID NO: 160424 - DNA, 214 bp, Homo sapiens
aacctgaacagaaactgttttatgactttgtgtatttcatgttttctttacatatactgtgatcctaaattttattattatctttgtaggtacttacaatataaatcatgtaacataaagatcatatataattgatcatataatacatagaaaatattagaaaatatacacacatacaccaagatcaaataatacaaattcagaacctttcttt

SEQ ID NO: 160425 - DNA, 215 bp, Homo sapiens
tacttatctctctatccttagtctctcatccttaatctctctatccttaatcctctatccttaatcccctatccttaatctctctatccttatccctctatccttaatctcaagaaagtgtcctaaaaggaaatggtacttaaggattattaatctggcagcacttctaggggtatctaggcattttctgtcataatttaggtgtggggtgatag

SEQ ID NO: 160426 - DNA, 456 bp, Homo sapiens
ctgaggagacttgcttagattattataaaaattagacgttatttcctgagtgtaaattgacagtggagacaaatgaccagaaccattctggatgaaaggaaaactacatcggagctgtggaatcagtgaatatctcacttcacatcacttggtagtagagatgtgttctgataaagttatacataaattgaaatttgatatatcaattataccatactaagcaaacactgcatttaaattaataaatgaattacgaaaagaattctttttcaaagcaaataatcatgtctctcacttacctctttataaggcaagcagttaaaatattaattttgcttaaatgatacccatgtattcaagcagaaaataaaatcctgactccatgtacaccaaaggttttattgccacattcctctatcattgtcttcagcctgtatgatctaattaacacagtag

SEQ ID NO: 160427 - DNA, 339 bp, Homo sapiens
aagatccgatcatttcaaattgaatttccaattagaatattcacaccatagaaacacttctgagataactcagcactataatggagatccttcaaggttatttaggttacaatcatccaagccatttttaccttggttttccctcttagaagtctccgctgcacctgtcagttctcaaatgcacaagtccttgccagaccacccagcctctatgactcctgaagcaagcaacacaggaccaaggaaaattcacacaagcgctaacaagtctggtttgattattttctgcaagctcatccaatagttcctcagcgactgagtctagacttgaggaaagag

SEQ ID NO: 160428 - DNA, 425 bp, Homo sapiens
atgcgaggtgttctagaggatcccgtatattggtgagcctgacacatacagatcaagacaaagaactgtgataacactttcttaacattatagaagagcactgtttagaagtgcagtctaataccaacagtagtgatttaaaaaatagagatgcctaattacgaaggagggtaagctactggctgtatttgattttctgggcaagagggagcaaatgcagtttcttgagcaaaggagatgatgaaaggattatactaagactattaatctagtagtaatgtgtatgacagactggaaggctaaggagaatggtgagagggaaataagaggtttcctaagtaatacacagaggaataacttgagtagctcagagtaggaagagagaaacgtgaaatacataagacagccaatcacagaactgcaga

SEQ ID NO: 160429 - DNA, 336 bp, Homo sapiens
gagaaaataagagcacagcaataaaacaagagtggctagaggaatgagcctgacacatacagatcaagacaaagaactgtgataacactttcttaacattatagaagagcactgtttagaagtgcagtctaataccaacagtagtgatttaaaaaatagagatgcctaattacgaaggagggtaagctactggcgctgtttacaaattaattgctatttttgtacaaattgctaaataatgaaaatgtgagtagactacatatacttaccaggtaccgagaataagcctgacaaaatatgtcacgactttcgagattcggtaccggctcgattcga

SEQ ID NO: 160430 - DNA, 260 bp, Homo sapiens
ctagccccgttgaatagtccatcctcaccaagtgtgaatctagcattcagagcaagtccaggattctaagttgatcctggtgtcacatctctctgtgcccaggttgtgccctcttacatcctccactttctcccctacctgaaaggacaggcaagcaggtatcccatttatgtccggcaggtgggaggggtggggagtcacggagtcctgtagagacctatcctccttccccatctattctctctgatgtcccctgtctc

SEQ ID NO: 160431 - DNA, 307 bp, Homo sapiens
cagatgagtaagacatactacttatcctcaaagagctcaatatggtagaagagagtgagatgtatatatatacatacacatatatatacacacacatatatacatatatatacacatacatatatatacatacatacattatatatatatatatatacacacacacatacacatacatatatacatgattgcaaattagagtgatggaaatcacttactgctggaggactgtggttagtaataataatagctatcttttttattgcttaatattgccttggcattatcctaaccatttaatacatgt

SEQ ID NO: 160432 - DNA, 258 bp, Homo sapiens
cacagacagcctgggcaatggtccttatcttgtccacaattggaagctgcagaaacacaaattataacaaaattgtgtaagtttaatctggttaaagattttttaaaaagtttagtgacacttactgtaattgcttaaaattcccttatcagggtaccccctcagcaactgcaggattccttgcaaaccctcttttttccttttagcaccctaaagcactgaaattttcagtgtcagaatagatcagatgtcaaatag

SEQ ID NO: 160433 - DNA, 471 bp, Homo sapiens
caggagacagctatgcatcatcaacttacctgtcaccgccaaagctggtggaatggaagtgccaggattggccagggcctgctctgaaccctctatacacaaacacacaacttccccctccctctttctcatacccagagttttctggaacccacttttggggtttaggccaaaacaggtgaaaccactggctttacaatccctccctcagcctgagtagcctatggcttcaggccccgaggcaatcctccaatctgtggttaaccagagaaccctcctccccagccttcagagtttaggttctctgtctcattgttggccaagatctcttggcctgacccacatgtcccttaagcaggaggctggtagccctgaagaccacaggcatacctggtacagccctagaccctgtccctgaacaagccagcagcagccaagaaggctgacagtaggtcttcagagtgcaaagct

SEQ ID NO: 160434 - DNA, 702 bp, Homo sapiens
catggtggttcttgcctgccgtgtcagttacttggggatctgaggtgggaggatcacctgagcccgggaggcaaaggttgcagtaggacgaggtcatgccactgcactctagcctgggcaacagaacaagagaccctgtctcaaaaaagaaaagaaagaaaaaatcataaggaagagaaaatatatttactatttgtcttagtctatttttgctgctaaagaaggaatatctaagcctgggtaatttattaatataaagaaaagagatgtatgtggctcatggttttgcaggctgtacaacaagcatggcaccagcacctaatttcagtgagggtctcaggctgcttccacccatgctggaagaaaggggtgctaagaacacagagagagagagagagagagaaagcaagagtggaggtggaggtgcctcttttcaacaaccagttctctggaaactaagagtgagaagcaagaatgacacctcaagccattcaagagggatccaccccctacaatccaaacaccaggccccaccaccaacactggggtatcaaatttcaacatgaggcttggagaggtcaaacaaaccatatccaaaccatagcttttttttttttttttgggtgggttggtgggttaaggattatctctcgaacctcgtgagcctcaattgccccccccacggggttccccaaggtgcgg

SEQ ID NO: 160435 - DNA, 504 bp, Homo sapiens
ataattaaccaatactcactgaccaacctgtcaggggcaaagaggaccagcccaggaagggggcacatttccacatatcacccaagagcctctcacgctggctcagacccacagacaagactgggaagatccgcccacagaatgttcctccttgccctccatgaccagattctcactttaaaaagagcccttagtccggtgcatcccgcggagaacagacaagaggggcctaagtccccaggaaaccagcaccatccatccggtgagattgctggccactcagcccaggggtgatggctgctaacgggtcacttaaaaaaaatgaccatgcattaaaaacattattaaatcatcactcacaagagaaccaaggaggtgtcacaatcccttcagaggggaagtcaaagaatcacaaaaagacatggagttggctgggggaatggggatggattgggccatgatggattgataattagggggcttccttttggggtgctggaaatg

SEQ ID NO: 160436 - DNA, 277 bp, Homo sapiens
agacatggatgggttacagagaaatgtaggaagtagaggtggcaagacggtaacaggtaagacacaaagtgtgagggagaggtaaacgtccaatgtgatagaagactgttaaaggaattaaagaacaatgaacatgtcaagggtaggccaagggactggagggagagactgagtggtgagatactggggttggtactggacaggagggatgtgaggtgtctttaaaacatctggtagagatggccgggcacagtagctcacacctgtaatcccagca

SEQ ID NO: 160437 - DNA, 297 bp, Homo sapiens
agtaagtatagacaatcttgaggaatttcactgttaaaaggaacagaaatggagaggaagctggaagaggaaagagtccacagtagatttttcttaaagatgggagatagttgcgaatgattcaatagagagaaagattttgatgaagagggtgaaaattattgaagagttatgttcacacaggttagaaagaatgggatctggtgaagtgtggccataggatcatgggccatttattaatatcatgttctgggagaggactcagattatggacccgtgttgatagcaggttaggtg

SEQ ID NO: 160438 - DNA, 815 bp, Homo sapiens
  misc_feature (769)..(769): n is a, c, g, or t
  misc_feature (788)..(788): n is a, c, g, or t
  misc_feature (794)..(794): n is a, c, g, or t
ttttttagatgaagtttcactcttgttgcccaggctagagtgcaatggcacaatctcagctcactgcaacctctgcctcccgggttccagcgattctcttgctttagcttcccaagcagctgagattacaggcatgagccaccatgcccgactaattttgtatttttagcagagacagggtttcaccatgttggccaggctgatcatgaactccttacctcagatgatccacccactcgacttcccaaagtgctgggattacaggcgtaagccactgtgcccagcccatgaaactatttaaacaacatgtgattacttggccacttttctattcaaaaatatggtttattagtcctgattatgtgcccttcttggcagacagaatgatactgtgtacttctgctgaaagaaatagaaactctcttccattttctagataagagagtcctaaaacagaatttccaaaaactccagttagtggaggtaaacttaaaatcctctttaagaaggataattatctttaaaggttgattcccaccctccctccccagttacttaaggaactaagtgagtacatctccagttgcccatgaaagcataagtttgttttcctcagctgaggcaagtggtagagtatacaggataacgaagtaacatgtaaaaggcaggacgcacataaaggtgacatggctattggttcacctggagaaaccacatgattgggacctgaaggttactgactgctacaggggctgattgtgaacacgangaaccccatgtgtgtgganctgtanggtgagagccccccattttta

SEQ ID NO: 160439 - DNA, 816 bp, Homo sapiens
agtgatttcaaatcaaacctcccttaagtgcctatttgactagtaactgcttaaattcagggtgattcacacatttggttaatgaaggacaccatgaaacctaacatagttgagacatattcctggaatttctgaatccacaatgattaccacctttgttttaataaaagtggtcaagaagagactggactgtagatgagacactgaactttcactagaaaaacataaatgcacttatatgccaagccctcacactgctaagcaaagaccccctgagtcaagaacatcacagagtatgcgtctcaaatcttaactatgccaacatttcacggtttgaaaaaagtaaactttatacagtgtcctatatgtcactgttgcataaactaaaagataaaacacacagcaattcaatgatgattgatgaaaacttataggttcgctaaattacactcacctggaaacaatgcattataatgcagattcttcttttttcaaagaagggtatcacattctctagagaaaatactgcctttcaggggtcagtattataaatccgccaagtgatcccagttcaaaattgaaatgttttgtcacctaacatcaaagctttaaaaatgtttttacacttaccttcatttaagaaaaaggataaatgaccctcttacagttaccataaaatattattataaaaaatattttcccaatctgattttaaactcaagggtagagaatatgtcgtttatctcttttgtcgcacatagtacctagcaaacggtattaacaatatgcttgctgagtgtgcttaatatttgctgg

SEQ ID NO: 160440 - DNA, 223 bp, Homo sapiens
tgaccacattacctgattttcaggttttctgttaggtacacgagcacacactccttctatcacagaactgagtgtaataattgtaataatctgcatgtcttaattttttaaataacaaaagtgaaagaatgtgcagtccagcttaaaattaaattcaggttcagtttaaagatcagtttcaaagatgatccaaatgattgccaagaaaattaccttccctatg

SEQ ID NO: 160441 - DNA, 340 bp, Homo sapiens
aggtctgtccacagattattttcagctctctgccaaccagacacttggtaaattgtacctccttcacttgtgattggtgggttttattttattttttactttttttttttgagacagcgtctcactttgtcgcctaggctagagtacagtggcacgatctcagctcactgcaacctctgcctcctgggttcaagcaattcttgtgcctcagcctcccaagtagctggtattatagacgtgtaccagcacacctggctaatttttgcatttttagtagagatggggtttcaccatgttggccaggcttgtctcgaactccttaccgcaggtgatccgccca

SEQ ID NO: 160442 - DNA, 734 bp, Homo sapiens
ctcactgaaaaggcagaatgtttatttccctttaattggttttcagagtagagagttagtgaaaaatattttccaatagtgctggatgagtattaatttgtcttatttacttaattttggcgggggggggggcagagtcttgctctgtcacccatgctagagtgctgtggtacgatcacagctcactgcagcctcaaactcccaggttcaagcgatcctccaacctcagcttcctgagtagctcagactacaggcgcatagcacaatgcctagctcatttctgtatttttgtagagatggggtttcaccatgttgcccaggctggtctcgaactcctgaactcaagtgattcccctgccttggccttcgaaagtgctgggattacaggtgcatgagctacctcacctagcacccagctcttgttttcattcattatgagcttgtggatttttattatatatattcagagtgtgtgtgtgtgtgtgtgtgtgtgtgtgtgtgtgtgtgtgtgtgtgtgttttagagacaggctcttactctgtcagtggctggaatgcagtgatgctagcacagttcactgcagcctcaaactcctgggctcaagcaatcctccaacatcagcccactgagtaactaggactataggtgtgtgccatcatgcctggctaactttttaattttcttagagataagatctagctatgttgcccaggctggtctaaattcctaggctc

SEQ ID NO: 160443 - DNA, 157 bp, Homo sapiens
ccctctccggacacccctaaaaaagaaaggctgagttcagagttttagtcatgggtgaccctataaattgcaatttctttttctccctaaagggttttctttcactattacatgtttgtgttttcctgattccactcatgctactgttaggtgttgg

SEQ ID NO: 160444 - DNA, 246 bp, Homo sapiens
aggtggtggtatctatccggcacgatcgtgaaatggataggataatgtttttaaacttagtgggagagagaaatgaaaaccaaccagaatataaggccatctagagtgctaaatagactcaagcaggttctatggaggaggaagaagtgattaattctgatggggaggctggggaagcaggtgtctaaggaaaggttaccaagaaggtggcaattgaacttggccttgtaggatacagtagggaga

SEQ ID NO: 160445 - DNA, 148 bp, Homo sapiens
tctcctgtccagttgttccagtatctgtatcttcttggggtctggatgatgactgctctgtctcttcggactgtgctttttcttacctttaggtatgcctcataatttttgctgaaagttagacatgttgtataagacagtagacata

SEQ ID NO: 160446 - DNA, 507 bp, Homo sapiens
  misc_feature (507)..(507): n is a, c, g, or t
agatccgttggtttgggatgctctgggacagccaagctggagatgttcttcagggagctggatatttgagcctaaatctcaggaaataaaaaaaaaaaaaaaaaaaaaaaaaaaaaaatgtgtgtgcggcgcgcgccccgggcccccgggaaaagcttttcaaaaccatcgcggtgtggggcgcgcgggggccccagaagggtaaggggaacacgggggccaaagggggttccctagaaggaaaccgggggccgagtgaaccagaggggcggggaatttctctccaccaaattaaaaaagccccggggggaaaacgagagagggttttgtgaaaaaaatcccagagggggagtgtcgggaaggcacaatacgggggagacttattacacaagggggggtcaaaagggagacccaggaattctaaaattaaagccccgggtctgtggggtggaaaaaaccagaggggaaacagaaaagaaaacaacaacaaaaaacaaaagacgaacn

SEQ ID NO: 160447 - DNA, 137 bp, Homo sapiens
ttaaagagaaaatgctgctatccgtgacttccaggcccgggatttctacttttggctacaatagaaacaacaagaagccatatgtgtcattggctcagcagatggcaccacctagcccaagcaacagtacacctaac

SEQ ID NO: 160448 - DNA, 2395 bp, Homo sapiens
ggcaccaggtctcccaggcttcctcagcgtcgacgccggggagcgccctggggttgggagcgcccggggcccgcgaaggaggaggtggctcaggtgtcagggcgcaccgtgggaaccggccccgggggaggcgtggaaacgcggggcctgggactcgaccagcctctcccgtgcggatcgcaaaatctcggagctgaaacagcccgttgttcgcagcctccctctgacccgccaccctgcacattgttttccattcgcccgggtcgcgggtgggaggagaggcacgccggggttctggagcttggccgcgcgccaggcttgtggccttcgtccccctggggccactggggcggccacgcctctccggcgggaggagagaacgcgtgggtccgggtggctgctccggcccttccgcctccagctcggccatggggtcgcgcagctcccacgccgcggtcattcccgacggggacagtattcggcgagagaccggcttctcccaagccagcctgctccgcctgcaccaccggttccgggcactggacaggaataagaagggctacctgagccgcatggatctccagcagataggggcgctcgccgtgaaccccctgggagaccgaattatagaaagcttcttccccgatgggagccagcgagtggatttcccaggctttgtcagggtcttggctcattttcgccctgtagaagatgaggacacagaaacccaagaccccaagaaacctgaacctctcaacagcagaaggaacaaacttcactatgcatttcagctctatgacctggatcgcgatgggaagatctccaggcatgagatgctgcaggttctccgtctgatggttggggtacaggtgacagaagagcagctggagaacatcgctgaccgcacggtgcaggaggctgatgaagatggggatggggctgtgtccttcgtggagttcaccaagtccttagagaagatggacgttgagcaaaaaatgagcatccggatcctgaagtgactccgtttgtgccttgggcttgctcctgcaaccagtatctccttggaattcatccaaagcccccatggacgcatggacgcagggcgacaataaactgtattttcgtttctaactctatttagggccaagagaagaaagctggaaggatgtgtactaaagtctagctcagcagtccccaacctttttggcatcagggacagtttttccacggatgggtgacaggggatggttttgggatgattcaagtgcattacatttattgtgcactttatttctattatgattacattgtaatatataatgaaataattatacaactcaccataatgtagaatcagcaggagccctgagcttgttttcctgcaattagacggtcccatatgggagtgatgggagacagtgacagatcatcaggcattagattctcataaggagtgcacaatctagatcctttggtgtgcagttcacagtaggatttgggctcctatgataatctaatgccactgctgatctgacaggaggcagagctcaggcggtaatgcaagcaatggggagtggctgtaaatatagatgaagcttcagctcgcctgccgctcaccttgtgctgtgcagcccggttcctaacagaccacagaccccacaccaggtctatctcatttggtctcagagctgtgaatcagccagcaatattttagttgcaaatcactgaaaacccaactcaaagtgacttaagtcagaaagaaattttatgaattcaggtaattaaaaagtccagaagtatctgcctttaggcacagctggatccaagggcacaaatgatgtcatcaggctccagttattctccatctcccagctcagctttttctgtctgtaagcctgattttcaggaaggctctttcctagtgatggagatgaccaccatcagctccaggcttctatcctgctaacccagtaacccagtgggaagagatttacttattccaataattccaagtggagagtgtcattgacccgtttggggtctcatctctacttctaggggaatgaaacactctgagtggccaggcctgtgtcatgtgctaattcctagagccagggaaataaggtctgaggattcaggatggggtgaaaggtggttgcttaaaggaaaatgaaatacaattagcagaataaggggaaacgagtggtctgctctgctcgggcaaaacaagagatgcccattactgtgagggacccttgaagtctggactcttaaatgggtttttgctgatttcctgggtgcatgctaggatgatggggcttgatgcagtagggaagagacgatgtaaaaataataaacaatatataccttcctagagtgtgaatgcattcgaaga

SEQ ID NO: 160449 - DNA, 2368 bp, Homo sapiens
ggcaccaggtctcccaggcttcctcagcgtcgacgccggggagcgccctggggttgggagcgcccggggcccgcgaaggaggaggtggctcaggtgtcagggcgcaccgtgggaaccggccccgggggaggcgtggaaacgcggggcctgggactcgaccagcctctcccgtgcggatcgcaaaatctcggagctgaaacagcccgttgttcgcagcctccctctgacccgccaccctgcacattgttttccattcgcccgggtcgcgggtgggaggagaggcacgccggggttctggagcttggccgcgcgccaggcttgtggccttcgtccccctggggccactggggcggccacgcctctccggcgggaggagagaacgcgtgggtccgggtggctgctccggcccttccgcctccagctcggccatggggtcgcgcagctcccacgccgcggtcattcccgacggggacagtattcggcgagagaccggcttctcccaagccagcctgctccgcctgcaccaccggttccgggcactggacaggaataagaagggctacctgagccgcatggatctccagcagataggggcgctcgccgtgaaccccctgggagaccgaattatagaaagcttcttccccgatgggagccagcgagtggatttcccaggctttgtcagggtcttggctcattttcgccctgtagaagatgaggacacagaaacccaagaccccaagaaacctgaacctctcaacagcagaaggaacaaacttcactatgcatttcagctctatgacctggatcgcgatgggaagatctccaggcatgagatgctgcaggttctccgtctgatggttggggtacaggtgacagaagagcagctggagaacatcgctgaccgcacggtgcaggaggctgatgaagatggggatggggctgtgtccttcgtggagttcaccaagtccttagagaagatggacgttgagcaaaaaatgagcatccggatcctgaagtgactccgtttgtgccttgggcttgctcctgcaaccagtatctccttggaattcatccaaagcccccatggacgcatggacgcagggcgacaataaactgtattttcgtttctaactctatttagggccaagagaagaaagctggaaggatgtgtactaaagtctagctcagcagtccccaacctttttggcatcagggacagtttttccacggatgggtgacaggggatggttttgggatgattcaagtgcattacatttattgtgcactttatttctattatgattacattgtaatatataatgaaataattatacaactcaccataatgtagaatcagcaggagccctgagcttgttttcctgcaattagacggtcccatatgggagtgatgggagacagtgacagatcatcaggcattagattctcataaggagtgcacaatctagatcctttggtgtgcagttcacagtaggatttgggctcctatgataatctaatgccactgctgatctgacaggaggcagagctcaggcggtaatgcaagcaatggggagtggctgtaaatatagatgaagcttcagctcgcctgccgctcaccttgtgctgtgcagcccggttcctaacagaccacagaccccacaccaggtctatctcatttggtctcagagctgtgaatcagccagcaatattttagttgcaaatcactgaaaacccaactcaaagtgacttaagtcagaaagaaattttatgaattcaggtaattaaaaagtccagaagtatctgcctttaggcacagctggatccaagggcacaaatgatgtcatcaggctccagttattctccatctcccagctcagctttttctgtctgtaagcctgattttcaggaaggctctttcctagtgatggagatgaccaccatcagctccaggcttctatcctgctaacccagtaacccagtgggaagagatttacttattccaataattccaagtggagagtgtcattgacccgtttggggtctcatctctacttctaggggaatgaaacactctgagtggccaggcctgtgtcatgtgctaattcctagagccagggaaataaggtctgaggattcaggatggggtgaaaggtggttgcttaaaggaaaatgaaatacaattagcagaataaggggaaacgagtggtctgctctgctcgggcaaaacaagagatgcccattactgtgagggacccttgaagtctggactcttaaatgggtttttgctgatttcctgggtgcatgctaggatgatggggcttgatgcagtagggaagagcgaagactggcagagggcacaaacgggagg

SEQ ID NO: 160450 - DNA, 759 bp, Homo sapiens
atcctgatgaatgaattggtaacactttagaaaagtaaaggcaggagacagaaaaccgggctctgattcttaagattcggattctacaggaagagaatttcaagaacatcatggatatagacagactggaaaagaagattgaagacttgtctaaaactgagacagagcaccaaatgcagttacacacatatgagaacactttgcttaataaagatacaagtttgcagaagaaaggcttatatatagaagaacttaaatcaaccatcatagaatatggaagcattatagagaatttacgaggggaaaaaagtaaactggctcatgagttacagcacttgcaacaggcactcatcacaaatgggatccagttgaatgttaatggagagtgtaacagtatcatctctgaaggagaaaagtctttacattacgaactcactcttgctcagtctgcagagaacactgaaacagaaaggcagcacaatgtaatcaacttgtcatctctggacgccatgatggatcaggaaatgctgctattactaagagagcccgcacagaaggcagtggaattcacagccacgcttcagaagctgcacgaagaaatttctaaaattgcaaccctcattgaaaactctcgacggtgggtaactaatccagaaattactgtgaaagaaaagtgggaggagcagcttactgattcacaatatcatggaagagaagtagatcttgcatagtaatgctgtaacattttgggaaacaaag

SEQ ID NO: 160451 - DNA, 477 bp, Homo sapiens
ccagagagaaaatatcaacagcttttttaggatgtaggagaatttcacaagactattgagaaccaaatgacaaggacaatgacattaactcatgagcatcatttttgttaagtgaaagtaatgaatgttctttattcagatgtcaattgtgggcatttcgatccttgtttcagaacactgaaacagaaaggcagcacaatgtaatcaacttgtcatctctggacgccatgatggatcaggaaatgctgctattactaagagagcccgcacagaaggcagtggaattcacagccacgcttcagaagctgcacgaagaaatttctaaaattgcaaccctcattgaaaactctcgacggtgggtaactaatccagaaattactgtgaaagaaaagtgggaggagcagcttactgattcacaatatcatggaagagaagtagatcttgcatagtaatgctgtaacattttgggaaacaaag

SEQ ID NO: 160452 - DNA, 243 bp, Homo sapiens
ccagagaaagtctaggtgcttaggggagaacagagactatgaaaattataccatgagggattccaggtagatctcagaaaggacttccaggtgggagagatgagtttggagaactggtaggggggaagaggagtgtgcagaatgggacgcctccctccaccccctaccccagtgccccatctagagccagagtagctgaaagccaaaggctgccagggcaaatgggagcaggtgtgaggaggg

SEQ ID NO: 160453 - DNA, 269 bp, Homo sapiens
ggggaagggggggctccccaacgcgggccaagtgcacgctgtggggctctgggaagcttacccagccacccctccccaggcatagtgctggggggccgaggcgcggacacagccccgagaggggcctccctcgtccgcttcctactcttttgcgccgctctcggagggacaccgggggcgggaggcgagactgcagcgcaggggccagaacgctgcgactttaagagccgaggatcccggaccatgtgctcggcgtgagacaaaagcaa

SEQ ID NO: 160454 - DNA, 219 bp, Homo sapiens
gaaaaaatgaaatactaagcatttgtcttttgcaatcttcatagaactaatgagatgatagcagaggtcagtacacaacttactgtggagaaagagcagaccagatccagatctctattcactgcttatgctacaaggccagtcctagagtcaccttgcgttggaaatcttaatgatagtgaaggtctcaacagaaaacatattccaagaaaaaagagg

SEQ ID NO: 160455 - DNA, 323 bp, Homo sapiens
tatgggattctaccagtgctcagcccaggcagcaacagaaaaaaaggggcctctctgagagcctattagccaagttagggaggtgctaaggggtgaaaggtgttggggtggagatcaaagaaagacattaaagggagtagtttggaggagaaaccctggagatttgaaaggctttgctggtgtgggaacctgctaggagaggtcagctccaccctactttttgcacttctcagaataaaccgatgggggaaattacagttcggagcagccttttccagagtgcatcttccatctctgtgatgtccaataagatagccatacaa

SEQ ID NO: 160456 - DNA, 215 bp, Homo sapiens
cccaaatgaactgagctgttagaatacgcaaaatgcacatgcgcacgcaaatcaaagatgtaccagctaccttagttcaccatgagtgttattagcgatacccattcacaagtggtgttacaactttctatccaatttcagagaactctcctcctgctaattcacattaactcacaaactacatccctttcgacacccactttccttctggtgcc

SEQ ID NO: 160457 - DNA, 241 bp, Homo sapiens
ctgggattacaggcacgcaccaccacacttggctaattttgtatttttagtagagatggggtttcaccatattggccaggctggtctgggcagacaacagggacaccgtgacccctccccgccactgggcttgacattcattgagtgtgtgtgaaggacacacacagaccagaggaaatgtacatccagattcctcctgaaaggcggtcacaggatgcccaaaggagaggcgttccagaaa

SEQ ID NO: 160458 - DNA, 243 bp, Homo sapiens
ccagaaatctctttacttcctgacccctcttccccagagtgccggaattccactgtcagaaatgcattgtctgggttaaaaaacttaacacctgctatgatttcaacagtgtcaaaacaggatacgtcaaaactgggcgaggaggaaatgtatttgggttctaggatagtgaaagctctattttttctacttttctgtattttccatatttggtacaatgagcacgtacttagaacggtttta

SEQ ID NO: 160459 - DNA, 390 bp, Homo sapiens
tgccaagaaattaagaaactgttattttaatagctcttattcttcctctccacaaaggaggtggctgaaagtcacaaaccaaacatttcaaatacccagaactcaaggatctgtttgaaaggaaattaagttttaaaaactctcccagaatatgagagttttgctccatcaaatgcttgtggctactcattccaatcactctactatacaaactaacacaacacttgaaatgggctaactctagaaagtgtaaattccctgtttctgagagaaggagtggggagtctggatcatcagtatccaaaatgagtaaacaagaggtcccttgagatgtggagaaaatattaaaaacactatatttagttttgccacatccttctgagctatttc

SEQ ID NO: 160460 - DNA, 548 bp, Homo sapiens
ctgtcaagaattagtagtttttgttgctaatggggttaaatgtccaggataggaaagcttactggtttgttgttgctttaattgcattggcttgggagtgaacccatctccctttcttattgacctcacatttttttaagtggataatgttatgacaagtttgataaaaatgatgcttctgactttctggagacaggaatcaattaccaagaagagataacatttctctccattgagccattaaaaataaaattcacaggcttctagaccttacggctttttgaatctttttaggttgacataatttgcctgtgattctttctggattatttatttgtatgtttggttttatctcctgaattttagattacaaataatccttccttagattttgaccatttttaggacagcattcctgaaagcatttaattctcacagcatttgttattgttttttagaaattaattaattaattctcctggctcagaataagacataatttgtgtggttcacaaggtggttgatcccttccccctgagtttctggca

SEQ ID NO: 160461 - DNA, 567 bp, Homo sapiens
tatagttgaagctgcaagtgttaaacccaggggtgtcaagggcccatgtctctgagcacacaggacagggtgtagttgttagtgctgaagccagtccagcatgacgtttgctagctctgtgatacacagcctcacctttagacctcacattcttcctgtggaaaatgggatgacaattcctgctctgtctttcttacaggtttggatgaccataaaattaaatagggtatgacaaagagctttggtgactgtgaactactatataaagcttaggatcgtcatgatgtcatcagcattgtctgcaggggtggtcttggctggctgactatgggttgccaatcccatggacatcttggtgtcctccacgccctcttctcggcgccagggtaaaatgccaatcagtgacgtgtccctgtgggactcaaatgacacaagatgatcaccctctggagctctagctctgcatccttgggtcaggccagcaagtgctgccagatgtgcacctcccagtccagcagccactgcaaaggcaggaaattagcaccagctctgagtaaacatctctgt

SEQ ID NO: 160462 - DNA, 362 bp, Homo sapiens
tcatcattggagttaattaggagaaaatcatattgcttgaagaaattagccataaacactttataatgtgtttaatgtctactaagtcaaggacttagtagtcctctaatatataatatataattaaaataactatatataataattttatatattttatatataaagttattataatatataattgaaataatatataattaaatatatataatatacaattaaaatatataattaaaataactagaatggggagaaaccaaaatgaatacaaacagtaacagtgaatgaacaataacagtaatattgataaaactgcttcactaaagtgagtgccgaagaaaaactaatttgtgtaactg

SEQ ID NO: 160463 - DNA, 213 bp, Homo sapiens
aaactgtggcgtggagccatggctgtcagaaagtgtggtccctgatcagctgcatcagcatcatctgggaacttgttaaaaatgaaaattgtttagctttattccagatctgttgaatcaaagatgatggtggtggagcccaaacaatccatgttttaacaagcccttcaggtgattctggtgcacactcaagtataaaaactactggtttag

SEQ ID NO: 160464 - DNA, 336 bp, Homo sapiens
gggtggcctaaaaataagttcttcttggccaagacaggttaatgaaagccagtttggtatcctgtcatgcagtatagctattttagtgtctcagtgtagctaatttgtcagccttgcctggacattagcacatatttagatcttgatgttctaactaatgaatgacagctaaggaatgtgtagcttcctggtaaagaattgattgcattatcactgattaggttgggggaattggaatttagtatctttgtgtataggagcaggaaaggtaaattatgatttaaaattcactgaaggattgtaggagaagagaaaggaagaggaaattgtggcagg

SEQ ID NO: 160465 - DNA, 562 bp, Homo sapiens
ggtgagggctttgctctgctaccagcgtttgctgttagcatttccacacccgagatttggaagggaatttgtcaggtttctattaaaacctctgaatgtccagttggaggaggtagtggttattaaacctcaatgttcataaatatgctaataaaaatgtaaaatttgcagtgagccattatcaatcacagacaggatgctccacctttgaacgatggcccccatgcctggctgctgaccgggagctggaagccaagtgtgcaccgctggagggcagcgaggagtctgagctacacgcctgccacgtgcggatgtgggcacctggcagggactagggtggccacgctcctggcactgcgtaccacctgcctgttgggctgcggaaatggttcctgttcccacacatatgccagtgcctctgtgagggtgaggcccatccacctctcccagacacccaggaaacaggcagcgacatgtgacatgtgaattcaccctgagtttggacagattggtgagagtcccctgaacaacgaaatgcatggccgtagccattcagcaaacg

SEQ ID NO: 160466 - DNA, 391 bp, Homo sapiens
gctgtgtctgggtatgtggggagctttgtgcatctggttgtgtagggagctttgtatttgctcagtttcaccagccagagtgaaccaggctgtgggggatgagatggctgtgggggcataaatgtcaggcctgctgaggagtgtttttcttgagtgtttctgcaacactggtttaaacggtcacctctgcacagcatatgcaggcatgcatgagtgcctgccacttcctccttaacttagacttgtggtccttcctcagttttctgcagatgtttttgagcccagcagctgcagttgcaggcatccaaccaggacaaggaggggctgtagcccaggaactctcattcataaccctcttcctctctgcctcaatagcaggctccttctctgt

SEQ ID NO: 160467 - DNA, 138 bp, Homo sapiens
ggttgatgtctttaatgcctgggaatcaatgtttcgatctatttaaaactaaaaagagaaaagttttaaacttaggacatttagcaaaataattccaacaagttaatccaaaaacaattacttaactcaaagagtcac

SEQ ID NO: 160468 - DNA, 394 bp, Homo sapiens
tcttcacttgcttccaattgtctttctccccagagctaaaaaggtacatgaggaggctaaataataagtcacagacctattctgcagaatatccacccatttcagacatcacagaacaattaaattaaggagattttttttttccattacaaaaagggaacatcgagatcttggttaaaatacacagagatcaggatgccacacagctgcgacctggggcaggatacagacactctgagtctcagcaggctcttctgcaagccttgtgaggaggtgttgggtggtgacggggcaccaaggaagtactcagtgaagtgctggcttctccatcatcagcagcaggctgagattcaggctggagcctcatcaccagctgggagcatctctgagcttt

SEQ ID NO: 160469 - DNA, 125 bp, Homo sapiens
tccctgagcaggcagccatggcttctttatctcctttcactctcttctgggaagatctacttcaatcccagtgccattatctctctctaccaaacactgctcagagaatagcctctgagacctgt

SEQ ID NO: 160470 - DNA, 559 bp, Homo sapiens
aaactgagtcaatacagctcaaaaatgaagaaatacgtatctccgataagcatattatgtgaatttcaacatcactattgagaaaaggaatataaatttgaatgaaaatgaaactctatctttctatatcacattgcataggtgtaggctagtgagtactttgatgtaaattgctgtatcttttgaggcatctatttggcaatatagatcagaattttaaatcagcatactttgtttgccagaaatctatcaggaccacttgtagtaattttgttaaaaggaatatcaaacacttggatgttcatcacagtattgattgtattagaggaaggaaagggagaaagggaggagaatggaagagagaaagggagggaggaagattggaagcaattgagatatgtgatagcatgggatttgctgaacacactataatataccatggcatggaaaagcatgcacacttaaaaaaggacaatgtggatggatctagctattgacatgagatgaaattaaatgaaaaaaaaaaagaatgtagattgaagaaacagtctgtatttta

SEQ ID NO: 160471 - DNA, 217 bp, Homo sapiens
tgctgggattacaggtgtgagctaccgtgcctggcctatcagtcatctttgaatgaggcaagtctagaccaccagatgtcaggagttgaagggcctgggctatgtatgctctaggagagcagcattcatgtgagtggataaccttcactcctcctgtccgctgagctcatcagatgcaggctcatggtggacagttgctcctctctgtccaacctca

SEQ ID NO: 160472 - DNA, 554 bp, Homo sapiens
tcgatatgaggatccccaagcagttacacagactgtagagagatggcccttttctggactgttctattcttcttcaccactgtgtaaggactgctaagtttgtgctacagaacaaaaaaagagctaaactcaaggaaggggaagagaattaacactgcctgagcaactccagggtcctgaaacttactgccctttctctctgcggttgcctcgtggcctggtggacaggggcgcccagagtgaagcagctgccccaccccatgcttctccgattgcatttccctgcctctgaggagaactaaatgcccatcacgcatgcctgtatgacctggggacacagaacagacacatctaattttagggcagagacaggcctcctgctttcaaaggaagaaagtatagattttatcatttatctttcctgccctgccttcagattccagctcaaaagatgctaaatggtgggacaggtaaggatgggaacaggggtggggacaggaggaaatatctcagatcataaaatgtggccttgattattatcaagaaagagaatg

SEQ ID NO: 160473 - DNA, 321 bp, Homo sapiens
cacgttagcactctgggacattcaaaaaacctgaacacagacaggcaagatcttttctcattctcatttcagagatcacagggaggcccaggaactaaaattagctctcacgtgaaaatcagcagtttattcattttcagtctttgttgtttgtttaacacattcagcttcccaaaatagcctattgtcaacaggctcatggccgatttccccagaatgactcctgctctaccactgatgaatacagtattaccattacagatggattttgaacagacacatttctgtaatccattgttaaaataacaatcattctaatcc

SEQ ID NO: 160474 - DNA, 481 bp, Homo sapiens
cctggaaatgggtatcctagttgctggaggtcagcgtgtggggtctcaagccttggaaagctggtaggaatgtctgatgccgcctgcatccagcagcatccggagggcgacacttgtgagttcttatcttaattcgagctctctggggactctgatacttaatctgcaatccacttatccccctgaccatcaaggccttttccattaatagaaatttctctctcctgacacagtcattaaagcctgtttcttctggctggttttccccagagtgcatagctcagcatatccatcctagaagggaggcagatttgagctcagtatttggataattttccttctgctttttcatcaagatgtagcattcgtagagtgaagcacagagatcttcagtggacattgcttttaaactgcaagaacagcccgactgtgaccccgtaggatggtgatctccctgtcatcagggatgttagcagcgtgg

SEQ ID NO: 160475 - DNA, 548 bp, Homo sapiens
agtgagctgaagtggagctgataaatctgtttttgttgatactgctgctgctgcggtttttaacacatgcttcaggtggttctaagcttaggaaaccttgcccaaaggataccattctgtctcttgggaaactgcctctatgataggcatttgcaaattcaccaagagtgacagatagtgcctcgggcactgccactgtctcttccaatgcaatttgtacattatgccgaatcataatacaggccttgtacttctgcctcagctgacttgtctgtgggatcctgcagctctcaaccatgcggaggaacgcttccattcacacattttgtccccctaaccctgtcttttctgagggtgcatcaatgtctgatgaatgaatgaatgatggaataaacaccaacatgggcaaacaagcaagtcaggcagttgtgaggagtggaagtgtttcataagcttcagtttttagttgcacgtagtagcatacaaacaatggcaaaaagaatattaacatgtcctgtttccattgctttccttctgacttaaagagc

SEQ ID NO: 160476 - DNA, 183 bp, Homo sapiens
gcgtggagaatgactgattagaggacactgtggaggtaaagagatcagctaggaggctgtcactgcaatccaggagagagctcaggtagcagcagaaggtaaggagagtatgttatgccgttcttgcattgctgtaaagaaatacctgaagctaggcgtgttggctcactcctgtaattccag

SEQ ID NO: 160477 - DNA, 440 bp, Homo sapiens
  misc_feature (186)..(186): n is a, c, g, or t
  misc_feature (267)..(267): n is a, c, g, or t
  misc_feature (317)..(317): n is a, c, g, or t
  misc_feature (374)..(374): n is a, c, g, or t
  misc_feature (382)..(382): n is a, c, g, or t
  misc_feature (389)..(390): n is a, c, g, or t
  misc_feature (423)..(423): n is a, c, g, or t
  misc_feature (425)..(425): n is a, c, g, or t
  misc_feature (427)..(427): n is a, c, g, or t
taatgagcagtggtgaaaaaacatagtgctccattcagctcccaacaatgataaataattcaggaaaagaactgccgcaatacagagcacagcagcaggatttaaaaatagaccacaggctagaaagccttggggcgggggtgtggggggaatcaggagtcacagagaaaatggatttctgtcaanaaattcccaagctctttgcaataaagggtgctgctgaaattggcacgcaaaccaaatgccaaattctaatgtacttcctcnaaaatcaaatatttttcaggaatttggcaaatctgataacaagagagctnataaacaatggtactatttggaaagagcagttatgatagagaaagcaaatctaaatnacataggnagatctnntttttaaaaaataagggattaaaactcgatatntntnccccccgaatcgg

SEQ ID NO: 160478 - DNA, 132 bp, Homo sapiens
ttacaacagctccaccgcgcccggccgttgtcagatattactttgtgtgtttatgtcttctttttccctactggattataactctttgacatctctctctctctcttttttttttaatatgttctgcgtctt

SEQ ID NO: 160479 - DNA, 421 bp, Homo sapiens
attttgaggtatacaaaaatacattatagtaattacttggcatggtttatggcacgcagtatgtgctgaataaatgctagctttttttcctgggacttttcaataacgtttgtagagcactataagagtagaagagtgtaggctgggcatggtggctcacacctgtaatcccagcactttgggaggcagaggcgggtagatcacgaggtcaggagttcgagaccagcctgaccaacatggtgaaaccccgtctctactaaaaatacaaaaattagccggatgtggtggcaagcgcccataatcccagctactcaggaggctgaggcaagagaatcgcttgaacccaggaggcagaggttgcagtgagctgagactgccattgcacttcagcctgggcgacagagcaggactccgtctctga

SEQ ID NO: 160480 - DNA, 188 bp, Homo sapiens
taggtactacaggtgaaatttggtagagaatgtatcgggctcagtttcctgacgttaggatagaagaacaaataataagagtttttaaaaatccaatcaaagattctttatgaaaatttatagacagaaatcaattctgtaaccttagtagttgtttgataatataatgctctaggttttcagagcaa

SEQ ID NO: 160481 - DNA, 288 bp, Homo sapiens
ctccaccatggcagccaccaaccagctatccagcccagagactctcactggctctgacctctccctcctcagcaccgcaaaatctgctgcccccagctattgtagtgaatcacctcccctcgctgctttcctgccttcccaagggttgagtatggtattcaacctggcctcctctaccatccaggatcttctctcctcaacctgagttagccacactgaggcccctggaatgaagccctcccacctgctcttccagctaggccccctgtcatatctgcagtatgaaca

SEQ ID NO: 160482 - DNA, 308 bp, Homo sapiens
ccccttggcaccatcttagagtttgaatcaggaagatttacgttgtaacctcagtacttccactaatgtgccctgtgatgttggaaagcttcctcatgttcctgtgggcctctgtttccacacgaacgcaatgagaaagtagaactcagtgatcttcagggtccctcccgggtgatggacagtgagtgcacagtggtctcctaagcccagtgaccaaggaaccaaggtggacacgaagaaggcagagccccagatgcctgtcatggataatgcaattcagaaacttgggtcggttaggtggcttgtgt

SEQ ID NO: 160483 - DNA, 469 bp, Homo sapiens
cagtttggttggatacaggacataaaagaggaagaataaaaaataatctgttagtcccaaagttgaggaaagggagattatagaaaacttgtgattgaaggctaataaacttgatttgggaaatcttcctttatgatacatccaggtaagacgggatggttgtccattaggtagttgaaaatgtaggcctggagctaaggttgaaaatagaggttacagataaagattggcagtaattagtatgtgagtaggtaagatcactcaggaactgtgtgaggatggagaagagagacctggatagaatctgaaggaacctggaagaaaattagctgggcatggtggcacacacctgtagtcccagaaacttgggaagctgaggtaagatctctggagctcaagaggttgaggctgcagtgagccgatgtgccagtacactgcagcctgggtgacagagcaagaccctgtctca

SEQ ID NO: 160484 - DNA, 240 bp, Homo sapiens
gcagtgagccgagattgtaccactgcactccagcctgggcaacagagcgagactccatctcaaaaaaaaaaaagacaaaaataaataaaataaaattaaaataaataagtaatgaatgtcagttgttgacctctctgtgtgactatgcttttcttttagctgggcagatttacttataacacagagctatttagagattttatgtattttccattggttattaaattattatctcttttc

SEQ ID NO: 160485 - DNA, 517 bp, Homo sapiens
agagaagggctctcactgtgtttcccaggctggtctaaaactcctgggttcaagtgattctcctgccttgccctgccaaatagctgggactacgggcatttttaaaaccttctaagtatgtgtagtaaaagtagttagggaattttagctatgcattgtttctaggcaataggaaaaccatctataattcaaataacagtactttgcaacagtgcatctattatatttttaatttcgtgttttaaatatctccacaatcttgcttatatttaatctgcaccacttaaatattttttttttttgtatttttagtagagacagtttccaatccaagtttaatacatctgcattaacaaaatgagtttttcactaggtttacaccactggattctagcaccagtgggcccacctctgctccgcctggctccaggactccactactccctgaatggaggctgaggcttggaggctgggccccctgagggaccccgcccacagccccacaggacctgctctc

SEQ ID NO: 160486 - DNA, 113 bp, Homo sapiens
agaaagaggtagaatattgttgtttcctctaatctctgactggtcttaactctcttagtgctgtttcaggttcgttatagaaacaacaaattgcctctatgcatagaagggat

SEQ ID NO: 160487 - DNA, 297 bp, Homo sapiens
attaattaatatcacatcacgaggaaggtaaaaacagctttgagaagcttaaaacttaccataggagtaagaaaaaggcacaaaattgtaccaaagagaatgtgaggcatgtaatgttttgcatcttcatttccctttgttgccccttaagcaacaactttgtcttaaatttacagtcctctttgtacattcttcatattttttggtgtatttttagtttttactacttaatatacaagtgaaaatatttgtaatgcattacgtgtatcatggaaaatatgcaacattttataagct

SEQ ID NO: 160488 - DNA, 141 bp, Homo sapiens
cgtctttctattctcactttttaacaataggatttcggacagtacgttttcctggtcttctgatgttggccttttctttgtccagagaatgtgaacagaaatgactaggtccctgttgcgaatccagactttaagagacat

SEQ ID NO: 160489 - DNA, 634 bp, Homo sapiens
gattgcgagctcggtaccccacaccacctgggtcaatgcaagtttgaattaaaagattttgttttgaatgtgccatgtttttatgaggttactaaaagatttgcaataaagtacaacttttctacccaagaatatcctaatttctttgaaactatccattatgtattaatatgtagctattccttgcctcatgaactatagatgtacaattattttaaaactccatcttggggactttctggtagttaagataattataaccatctaagctaaatctccccacacatcatttaaaaattgagcagatcaattaaccaaattgagcagatgtaccaatctttgtacagctataatataaagacaaccaccaatggcccatttcttcagcacaattagaaaaggaaggacgtcataagcttaaaatgacctgtaaatagacaaacataaacttccagtagagtcatttctgtagctcccaccacacactttactgaagatgagggaggatccagaaagactccagaaagagaagcaagggtggaggtaaaactacctgcagaaggaaaagtcccagttatgtgggaacatagtaaaaatgcatggtgaaggggaaatcgaagtggagaaaatggaa

SEQ ID NO: 160490 - DNA, 589 bp, Homo sapiens
tttttccattgaattgtttgtcttttgttgatttgtaagggtatatgtgtacatttttacttggtttcatttttaaactttatgagttctttttactatatagatatttaaaatttgcatgtagtcacctcagccttgttcctttttgtctcctagctttttttggtcagatctctcttcccagaagatattattcattttattgagatataattcacatatcataaaatttacgtttttgaagtgtaaaattcagcgattttagtacattaacaaagttgtacaatcatcaccattgtttctgtgcagaacattttcatcttcccaaaaagaaacccgttagtaatcactccctgttcctctcgcctcactcgcagcccttggcaaccagtaatctagttttttgtctatagatttacttaattctaaactagacatttcatacaaatggaatcattcagcatgttatgtttttgtctggcaggtgccaagatttttgaagtatgctttttaatttttttctggtattttctagatttaaaagtttagatttttaaatctttctggattaaaaagaaaagtatttttt

SEQ ID NO: 160491 - DNA, 109 bp, Homo sapiens
agataatctgagttcagacttcagattatcagactaccttctgtggccctggataaattagttgtctcaatgtgcttacttacaaaagtggactaaccatttatcctaa

SEQ ID NO: 160492 - DNA, 699 bp, Homo sapiens
actatttgggcacatttggttggaaaacacctaaaatctcacttggtaacggaattatagattattcatatttgaattgctatgcccatatatcttaaaagtttactttttggaaaattataggccaaaattacaaagaaggttaactataccatacccaggaaactaaattgatgacgataaagtaaagctaattgtaattcataactgaaaagcagtactaaaagcaagtgataaccagcagccaacctagtacagcactaatgatgtacaacaaacagccttctggacagcacagagtggaggcattgcagactgtgcagggatgtccgggaaactccagtgaggaggtgttcattgggtcttgggagcaccaaattttattcactcatcatctcctctaataacctcatgaactttagtcataatcagaatgatttgtatggcattgtataatatttgccaaaacaaactgaataaaatgaatgcattttgggtccattatctaatatttaatgggaccctttcaccctaccagtaactgcattttatatattgagaatctgatgtggatgaagccattattaatctcaggatgacatacatgtcataaatgttttatttagtcaaaaaaactaagacctttggttgtgtggtcttaatacagcacacaagagtgtacgatacaatggaaaatat

SEQ ID NO: 160493 - DNA, 526 bp, Homo sapiens
cgacactcttggttgctgtattaagaccacacaaccaaaggtcttagtttttttgactaaataaaacatttatgacatgtatgtcatcctgagattaataatggcttcatccacatcagattctcaatatataaattgcagactgtgcagggatgtccgggaaactccagtgaggaggtgttcattgggtcttgggagcaccaaattttattcactcatcatctcctctaataacctcatgaactttagtcataatcagaatgatttgtatggcattgtataatatttgccaaaacaaactgaataaaatgaatgcattttgggtccattatctaatatttaatgggaccctttcaccctaccagtaactgcattttatatattgagaatctgatgtggatgaagccattattaatctcaggatgacatacatgtcataaatgttttatttagtcaaaaaaactaagacctttggttgtgtggtcttaatacagcacacaagagtgtacgatacaatggaaaatat

SEQ ID NO: 160494 - DNA, 215 bp, Homo sapiens
tgaataacatgttttggagcagtgtcatccccttttcaaatgccctagttcttgacaccaagggaattaaaagtgactttttctttagaactatgaagcatataagttctgtgagttcacctttttgcagcagcttctgtgcattactcagttctacttcctgcaaacaattctttatttccacacctgtggaagacagtatggtcttgtagtta

SEQ ID NO: 160495 - DNA, 421 bp, Homo sapiens
  misc_feature (388)..(388): n is a, c, g, or t
  misc_feature (391)..(391): n is a, c, g, or t
  misc_feature (397)..(397): n is a, c, g, or t
tggctgagtgcgactctagagtagagcatcgcgagccctgaacttataattggacatagcatctacttgagacataatttctcctttagagttcttgaaggaaaggctggacatgagtggtgacagaacggacggaaaaagaaggtactaaacagccttgaagtatggaagctcctcctcttgtccctgtcagatctgtatgtccaagtgtgggccagagtttcttgcccaaacaagctgagatatttggcagggcacatggtaggctttcagtaagtatctgtggaactgaattaaatccctctagccagaggaataatctcttcccgagttgcagaggaaacgcaagcatatctgtctttgtgcgctccccgagggttaagggctnccngagggntaagggctcccggagggtaagggc

SEQ ID NO: 160496 - DNA, 596 bp, Homo sapiens
tgctgactgtctccagtcaccatctcattgctttctccaggattgtgagtggcttcgccctgaggaaagctgattgccctgggctgctgcctccggaagagtgagccaaaatgtccccggaatctaaaaggcttttcaacatcattattttggatggcctcatatgtgtaagttctcatgagactcaaatggaaattagttgtccctgaggttcttcatgcttggctgattgaactagatggtttgagagggatattttgtagattaaagggtgagattagggctggggagaacaatggtggtagagtggccttaaagaccagcctccaggaaagcctctggcagttggagtccccactccctgccattaatcatctgtcacatctggttcatcttccttttactaaccccagaatcttggcttttctctttgcccaccaccattagcccaggctgtccacatccctcacctggatcactgcagcagctcctggccagtctatccttgcttttctccagactgtttttttctgaaacgcaaggctgattttggtcattttcctcctgactctgattttacctaatgtcttagaatg

SEQ ID NO: 160497 - DNA, 230 bp, Homo sapiens
tgtttctaaggacgtgcaggctacaggaatgcagtgttcttttagtaacctttcccactatgaagtttcatatttactcctacttctctttctctcatttccccagcgtcttccttcctgttttcttcagaaaagtaaccagctgaattctgtagtatcctagagtttctgtgttgaaacagcatttttgatgtaaaattttattgagatatttatggatacacatggaa

SEQ ID NO: 160498 - DNA, 363 bp, Homo sapiens
ccgaagcctccaaaaaaaaaaaaaattccttcataaacagcaaacttttaactaatacacaatgtgcttttaatactgactttaaatcctccctcaaccaggaactcgtgaaaacatgtggtcagtgtggcaaaagggaactgctgggtcctgatttagttgacattctctttttttacaacctggattttatatcattcactgatgcctttctttaagctcatacatttcgtgcttgtggcacaggatactgttttcttaacatcaaatctttatggcactggcaaaaaattttcaatctcctacttaaatttggttcaactacacagtttcactatagccaacagtttgtctggataagct

SEQ ID NO: 160499 - DNA, 216 bp, Homo sapiens
ctctactcagtaaattatctttcacccacgtttttgtactcatagtctatctaacaaaagcactgtagtagagctagtgaaagaaagaaataaatgagctaaaacaaagcaatttacagttccaactttggatgaatttctcttctgctactcctctcactcttctatactgtatacacacacaccattcatttcccccagaaaaaggaaccaact

SEQ ID NO: 160500 - DNA, 286 bp, Homo sapiens
tttattatcactgtgatggagctcaaaactagggtgcagatccccatgctagtgttgattttataatggaagtcccctagacactgttttttaggtcttccaagcatagtggctcacttttacctaaggcataactcaagtactttcccagaatgctacccatttgctaaagaaatatttcacctcttcactcagttaagaattttaccattcttatcgggatagcctgctgaactgtttacacccttgtggactgtttttgtaacattttcattttatttccttt

SEQ ID NO: 160501 - DNA, 516 bp, Homo sapiens
  misc_feature (10)..(10): n is a, c, g, or t
  misc_feature (22)..(22): n is a, c, g, or t
tgatcgagcnggtactactttncacaggggatgtatgcgaggcagagatcttttggttttctggtgaagttcattttggttaagttaatcaatgtcccttctaaatcagagctcatattattccctctctctgatgccagccaggccccagtttgagagacctgaaatgcagaagagctgcacttttttatttttcttacccctcttctctggtcctgattcctccattgttggggcaaaaaggagggattagagaaaagaggcaaaagccatttgcacgattagcactattaattctctctctgtcctctgcaggttagttcctctctctgtcctctgcatgttagttcctctctgtttcctctgcatagttcttccctgtgccccttgcatattagttcctctctgtgccccctgcatattagttcctctctctgtcctctgcatattagttcctctctgtgtcctctgcatagttcttccctgtgccccctgcatattagttcctctctgtgc

SEQ ID NO: 160502 - DNA, 471 bp, Homo sapiens
ttggattcgtggatgaaagtgcatgttggttcagtgattcaaggcctctgtttatctgagtgctcatctgattcccttctcgtcggtgcctatcaagttccagttctgagagagcggaaatgtagaggatctgctatagtcgatctgtctgactgctcttttgtggtcgtgcgtcgtccatcgtggtcggcgacatgggagggattagagaaaagaggcaaaagccatttgcacgattagcactattaattctctctctgtcctctgcaggttagttcctctctctgtcctctgcatgttagttcctctctgtttcctctgcatagttcttccctgtgccccttgcatattagttcctctctgtgccccctgcatattagttcctctctctgtcctctgcatattagttcctctctgtgtcctctgcatagttcttccctgtgccccctgcatattagttcctctctgtgc

SEQ ID NO: 160503 - DNA, 577 bp, Homo sapiens
ttactcgatcaaacagtacatccaaaagaaaattggaacctgtataaaataaaaattaaaaaagcagtttgactcaataggctgcactcatttcagggctaacactggaaggttattcactatgggtccctatgttataaccaaaaaaggtatctgccaggaagtctttgtgtcttcagaggagtcagtttgtctgtatccatatccagtgtcttcctttctgccatggttgttggaaacataagaaacacatgaagctcaacttattgactctaacttggccctgctattgatctgttactttatattttctgggaagttcaatttttatctattactaatttctcatcttaacatattgactcttggccaggcacggtggctcacacttgtaatcccaacactttgggaggccgaggcgggcggattgcctgagctcaggagtttgcgaccagccagggcaacacggtgaacacatctctattaaaatgcaaaaaattagccaggcgtggcggcctgcgcctgtagtcccagctaatcgggaggctgaggcaggtgaattgcttgatcccaggag

SEQ ID NO: 160504 - DNA, 175 bp, Homo sapiens
tgagggaaattagacatgaatggtttgcttgtggaacaggtaacaccagaatttctattgcctgaaaacatactcaagtgaacttgttctcagtttccatcagtagcttttttcttctctattttctccagcagagtaaaaggattcccaggaaccatgagattgggtattaaat

SEQ ID NO: 160505 - DNA, 396 bp, Homo sapiens
ataagtggtgtgatataccatgtccatggatcagaatattttacaaacctctcctgagtggttcaccttgccaccactctctacttcactatacatcctcttaaatttgcattaactccccagctccagacagtttttcaaagcacagatgtggcaaattttcattattaggcccaaaaactcagctgtttgcttatattgatttacttcaagcacctggaatgaaaaaacataggactcctgaaggttaaaatcccaagtaaatgaagggaaagataatagcaataatgattagacaagaggagcacaaaacaaaacccactaagagaataaatgagctatgacttcagggaactctatattctctaactcccaaacctgcctactacttaaaca

SEQ ID NO: 160506 - DNA, 162 bp, Homo sapiens
acagagagaaccttggagtccaaagataggagaggatacccaccactaactttcaatgaaaccacaagctggccacttagcttttcttgtgctgtagagtcaaatgtgaaacaataggctttatttatttaatactttgtataaggcactttgctcagtaca

SEQ ID NO: 160507 - DNA, 113 bp, Homo sapiens
tggtacaggctggctccggcactgtactagacacacttcttggatctgtttttgtttttcccataactaatggggatgtgttagctaaaatgaaaatggataattaaaaaagg

SEQ ID NO: 160508 - DNA, 173 bp, Homo sapiens
tcaaaaaatcagtgaatgacagagagcagcaccttccacaaatttgtgaattactctggaaggatttgtttggcaagaaccctgacatctgaattgataatggcagaacggacacctgtccttcaacaccagtactcagttgaaccgtttgtatttgccccagtccctgcaga

SEQ ID NO: 160509 - DNA, 221 bp, Homo sapiens
tcacacagacgcaaataaaagtgagcaccagcagattgggaatatttcccaaggaatgaagagcagaagctaagcctgaagtatgggagagtgagcataatagaaggaaaaaaaaatgtatctaatacttatgtaaatatagacaataaacacatacagatagtgactcatttattaaatctgttgcctctctgacacttggggcaggctgtttctgtaat

SEQ ID NO: 160510 - DNA, 150 bp, Homo sapiens
ttaattcctgtaagtggcattttttatatcccattatgtttctttttcaccacacactatgttgttaacgtccagccatcagccacatactcattacttccaattgctgtataatagtccacctttgtctatgcaccagaataatgaggg

SEQ ID NO: 160511 - DNA, 220 bp, Homo sapiens
aattagttaaattgcaagacccgtaaacaaaactaacactactcatttcaattcagttcccagcctaagaaaattttcatttcagcaaggcttttcctgtcttttagactactggaaaaaatggttggttcatttcacatgaaagtaatggaccctggctttggtctagtattaataatgtagatgacagtgtgaggcaacactgggtctgggggttatt

SEQ ID NO: 160512 - DNA, 386 bp, Homo sapiens
aagatggcttttatcaactacatatattctccaaactagatgggttgtaatttaagatgtaaaaatgtaagctagtctcaggtagttactgttccatgtttcttaccggttaagaacttcatggtcttggtacctgccttattcccctctctcatcttcattcttgactgttgactgaaagtgatctagatctattgtgtctgtgctaggcatttaccttttatatcttaatctaccaaaatagcatatcctcccagtgagaaggagataacaggcgtggcaactaaaacaaatgccatttttgattttttgtttatagctaagattaataccaaatagaaaactgtacctgaagggttagtcatagtcatttgtgctcaggaatt

SEQ ID NO: 160513 - DNA, 171 bp, Homo sapiens
ctggggataggatcctcctaagtggggggcttgcatctgccacactggctgtcagatttcccgaagccattctccactccaagttcccctggcctgccacccttcttcctgcctccaatgcttctaacatcaggaaacacactttgttttgagcgcccataccctcctcgt

SEQ ID NO: 160514 - DNA, 269 bp, Homo sapiens
caccatgcccacccacaccactagacaatcttaagcacagacgtgataatgatttggcttctatttaggctctatcttttatattaagaagagactgtagaaggggaaaagtagaagcagggtaaccaattaggaggctattgtagaaatccaggtgatagattgtggtgatttagaccatagtagtagtcatgaagatggttagatgtggtcaaattctggatctattttgaatgaagaacctatggaatttgctgacttggattggg

SEQ ID NO: 160515 - DNA, 287 bp, Homo sapiens
acttcaagattataaattatctacctatctttcctttagttctctgttttcatttttatattctaatatcatttaacccatcaggaatttcctttggtgtaaagaatgggtaggggatttggtttttaattttgttctttttagtttcctggttgtttcaacactatttactgagtaattaatgaatagtgaggggcagttgtaaacttgtttttgaagatcagcagaatcagccttcttggttggtggtttcctgggcagttctaccactcgagcaagacctgaag

SEQ ID NO: 160516 - DNA, 104 bp, Homo sapiens
atttacaagaggaagaacaaacaaaattacttgatttcaaaacttgttataaagcaagagtaatcaagacaatgcagtatttaccagtcattggaacaccataa

SEQ ID NO: 160517 - DNA, 312 bp, Homo sapiens
ctcacacctgttctcccagcactttggcaggccggggtaggcagatcacttgagcccaggagtttgacaccagcctgagcaacatggtgaaactccatctctaccaaaaacacaaaaattagccaggtgtggtggcgcacacctgtaataccagctacttgggaggctgaggcaggagaatcacttaaacccgggaggcggaggttgcagtgggctgagattgcgccactgcactctagcctgggccagagtaagaggctatcaaacaaacaaaaacagcacaaaggcaaagggacctgacccgtctgcttc

SEQ ID NO: 160518 - DNA, 441 bp, Homo sapiens
acctcagttgactgagtagctgggactacaggcatgcaacaccatgactggctaatttttgaagttttgtagagacaaaatatagggtttttgtagagacaaaatggggtctccctatgttgcacaggatggtctctaactttttttaagagcatgagtatttcatatagccaaaggttttacccactgttcttaacctttatgaacatgatgtgacatgacagactatattctctgcatgaaacatgctttcttcatgtttatgccattttagggttttaataaatcaaaaaatctcagtttaattaaagatttaaagatttaagttactagtgacattggatgtatttttctaatgtttgtggctattcgtatttcttttgtgaagaaagagaagtgttaaaattagctgtagttctgctctgctgcttctaggtgcat

SEQ ID NO: 160519 - DNA, 521 bp, Homo sapiens
gggaaagccataaatatagacctcaaacaatgaggctaggcctatatgagtttgttcaggtagaaatggagtggttcaattcattgcatttttcctgtccaaccactcagaacagttattatagggacatgtgagtccaatttattagaagaaactatatgaaattgacaatattcaactatttttgcacacaaaaatggcattttcatatggttcaacctaatagatatgtttaattttgttatgttgctttcaaaatggtacttgatatataaggagaaggggaaaaaaggaaacaatagcaatacgaaaccactgtttaagaaaatttaaatttctgtaacttggaacctcctggtaggtaggaattatgaatatcattcttcattacaaaatcattaagaatgttcatttatgtatatcaataaatataactttattagagatggggctataaggaattattttgctgtatatcaagcaccaaaatattaaaggaagattctttcttacctcattta

SEQ ID NO: 160520 - DNA, 486 bp, Homo sapiens
gagctcaagtgatccacctgcctaggcctcccaaagtgctgggattacaggagtgagccaccgtgcccggccaattgatttaatttaaaaacaccgagtgaggccccacatgtacagccactgttctagaggctgggggcccacagggagcagagcagtctctacttgcctggagtgttcttttaggtgggggaggcagacaccaaacacgtgagctttcctggcctgcttaaatcttcacaagtgttgtgcattttcagccagaattttttgtaccttgtaaaatttactttaaaagtgcagaatttaatgcactttttttttgagacagggtcttgctttgtcacctcggctgaagtgcagtggcgagatcttggctcattgcagtatcgagctcccgggctcaagtgattctgttgcctcagcctccatccggagtagctggaactactacaggtgtgcaccaccacacccagctcagttttg

SEQ ID NO: 160521 - DNA, 416 bp, Homo sapiens
cctcagagcatcctcagtctagtgagaatggcatgcaaacaacagcctaacttataagtgctttacttgagacatatgcaagttactatggaatgcaaaggagtgtctgacgtctttcctggggagtaagaggaggcttcacagaaaataaggatgagtcggagctcacctggcagggagggggaagatcattccagtcagagagaacatcatgttcaaagccacagaactggttctttaagaaagcaggtaagtaggtggaaattaagagtgtatatggaccgggcatgatggttcacgcctgtaatcccagcattttgggaggcggaggcaggcggatcacttgctatcaggagtctgagaccagcctgaccaacgtgatgaaaccccatctttataaaaaatacaaaaattag

SEQ ID NO: 160522 - DNA, 343 bp, Homo sapiens
tccgagctggtacccctagttttagaagtttcaatagcagctagctactgcttcaaagtaaaagtgtgggaggcagtccccttaaaacaagaaagatgaggatgcctctagcagatgacagggtaattgggcaggaagaacatttatgtctgttcaggagatggaacagcagaaaggctttgacgattaagaggcacacccagtgagccggcccagcgcagagttgcacaaagaccaccagctttcttgcacaaggatgatggccaagtgggaaatataataagagaatgctattgaaacttctaaaactaggggtacacagctcgattcgtatcatgtctac

SEQ ID NO: 160523 - DNA, 277 bp, Homo sapiens
tccgagctggtacccctagttttagaagtttcaatagcagctagctactgcttcaaagtaaaagtgtgggaggcagtccccttaaaacaagaaagatgaggatgcctctagcagatgacagggtaattgggcaggaagaacatttatgtctgttcaggagatggaacagcagaaaggctttgacgattaagagcattgctgcctgggggttttggtatcgtgtgctattgaaacttctaaaactaggggtacacagctcgattcgtatcatgtctac

SEQ ID NO: 160524 - DNA, 515 bp, Homo sapiens
tcagggataaggtccaggctgcgttcgcggctccgggcagtcacagtcatgcacgcagctcctatttttcgcgttgctaatcgcgtccgttgcagtccaacccatcctgggccgcggcccccacagggtctgtgaggagcgcttccccccgccccgggcgcccgctacgccgcgtccgaaggaggggccgaggccgggctcatctccccgggaggactccttcggcttcgtggggtgtcatgtccattgcggcccgaggctggccgcggggctctgctggagggcgctgagagccgggccccgaggccgcacggccggagactacaactcccaggaggcaccgcggcggcggcgcccacacgtcactcgggccccgccggtggcccggggaagcagcacgggcggggggcaggggctggggccgaccgggaggccggtgccaaggatgggggccgcccggctgccccgcgcgtgaggaggccgaggggcgcgccaccccggcccggggcggccgc

SEQ ID NO: 160525 - DNA, 447 bp, Homo sapiens
tccctctgatgaagagagcaggttttattctccacaaaattaatgaagctctctagtcaccaggagttacaagattatgtcactagtaccaagacaactggtagtggttgatgactcactatttataaaccctgagtatgaacttaaggctgtctttctggagcatgggcctgagaattgccagaatgtgctgtctgcccgtggttacccattctgctgactccggtgggaacacatgttaaatgaattctggaatgtatctcgagtgatcagagccctgggtggtaaaccaaaggctctggggcacaagtgttttttgtgttttttttgtttgtttgtttgtttgttttaatcccttccagttgaaggtcatgtctggaagaggtatgggaaatgaacagatggttttatacatactatcaaataaaagttagtttttctggacca

SEQ ID NO: 160526 - DNA, 675 bp, Homo sapiens
ggaaaaattgtcttccacaaaacccatccctgttgccaaaaacactggggaccactggcttagagtattcaacaaatgttagccaaacagttagcaactgaattttctgaccctgtcagacatgctcctggaatatttggtgtctgaattattggagagtaccaagtgaccttggaaaagtcacttgatctttctgagttccagtaaaatgaagataatacatatacctcccagggttgtttgaggctaaaatgagataatatgaaagcatctatttgataatttgctcaacaaataattatggagtgcattccatgggttataacggtgaacaaaatagacaatggccttgataaaccctgagtatgaacttaaggctgtctttctggagcatgggcctgagaattgccagaatgtgctgtctgcccgtggttacccattctgctgactccggtgggaacacatgttaaatgaattctggaatgtatctcgagtgatcagagccctgggtggtaaaccaaaggctctggggcacaagtgttttttgtgttttttttgtttgtttgtttgtttgttttaatcccttccagttgaaggtcatgtctggaagaggtatgggaaatgaacagatggttttatacatactatcaaataaaagttagtttttctggacca

SEQ ID NO: 160527 - DNA, 279 bp, Homo sapiens
agccacctcaaaacaaaacaaaacaaacaacaaagaccctatatgtgtcctataaagaaaccagcatctgttgatggctagaatggagagcaagacaaccagcctgtgttcaacaagatagaatggagaagtgcctgtgtttcacccctctactattaattctcatgcctactgttctgtccagttttgtaagaaagagaaggaaagagggtgagggaggagatggagagagtgaaaggtcagactacacatccctattgatatagaatgaaaaaaaca

SEQ ID NO: 160528 - DNA, 654 bp, Homo sapiens
acttctagctcggtaccccacaccacctgagtcacaccacctgagtcacaccacctgagtcacaccacctgagtcacaccacctgagtcacaccacctgagtcacaccacctgagtggaccacctgagtcaccatgcccagcttcaagttgttttttgtttttgtttaagttagttttttaaaaagtatgtttttcttgagtgccagctgtttggaaatagtaagtttattttgactatggtatatcatcgtttgaatatatagctgatgtttgttattcaaagtagatgtgccaaaaagttcttgagagcgctgaattagtgaacactgagctagctattgctcctaggggaaatacagtattaggtttctttgagcctctggtaacatttttgttatcccattaacatatacccttgtttcatgtgtgtttctttttaaaggcactgcatttagtatatcattttagtatattcatttatattccatagcactagaacacatgtctgaaccaagctatctaacttgctttttctctgtaagacacatcacagcctccttgtgtttactagccagcacttgagccgtatgcttgggggccattttaaataatgaaatcactaacaaaaatatgaaaaccgtgccactaaatag

SEQ ID NO: 160529 - DNA, 488 bp, Homo sapiens
aaaagttattacctgaaaaaatataatgatgtgacatgccatgttatctaatcatatgacaaatgtgtctttaccatgaaaatgttatatataatatttaaaatattaatagatagagatttcagtgggtatgggattagtctttgctgtggttctaggttggagcagcaatcttaaacgtttccagcggtttcccctaaaattaaaggttctattaaacgcatgtctctctgctttctagcatatcactagatactattttacctaatgttttgccacagcatttgtgagggtcattaactagcttttaagcctcttcgtcattctactgataagccattgctacatgtcatagtattatgtataatctcccactgtaaatttggaatttggtattggttatgatgtaagtttggctgcttataagaaatctcaaaagaacagtgacttaaacaagataaaagattatttttctctcatgtaaaaat

SEQ ID NO: 160530 - DNA, 457 bp, Homo sapiens
ggattcgaggttgcagtgagcgatgatgggcccactgtactccagcctgggcaacagagggagaccccatctcttgcacaattaaacaggtaaatgagaagtatagaatacattcagaatgcacagctcgacgatcctcacaggaaagcatgcctatgcaacccccacccatcaaccaggtcgctacagaaacccccgtgccccctcccatcaccacctcaagggaacccatgtcttgacatcggatacagacgatctgcagggtcttgaactttctatctgttttacttggcctggtttccttccctcagcattttccccataagattcttccaccgtgtcccttcctgcaatagctgtttcttcttcatccttctgtagtattccactgcacgaacaccacacttgacttctccacactgatggaacgttgcattctttccgtttgggggctctc

SEQ ID NO: 160531 - DNA, 489 bp, Homo sapiens
ggattcgaggttgcagtgagcgatgatgggcccactgtactccagcctgggcaacagagggagaccccatctcttgcacaattaaacaggtaaatgagaagtatagaatacattcagaatgcacagctcgacgatcctcacaggaaagcatgcctatgcaacccccacccatcaaccaggtcgctacagaaacccccgtgccccctcccatcaccacctcaagggaacccatgtcttgacatcggatacagacgatctgcagggtcttgaactttctatctgttttacttggcctggtttccttccctcagcattttccccataagattcttccaccgtgtcccttcctgcaatagctgtttcttcttcatccttctgtagtattccactgcacgaacaccacacttgacttctccacactgatggaagcgtcgcgcatatgcgccatgcttccctcaccagtatccccagctccacgtcgtccttttc

SEQ ID NO: 160532 - DNA, 535 bp, Homo sapiens
atggggaatatagagggtagggatatggtgggggaagagcatgaattgtaatagtccaacaatacatcttccctgaaaatgtgctctattacaccagtaatttctaatgaaaaacttcattcttcacacactgtggttaagcatcatcaaatcagtactgaaaagacctttgatcgtatttgcaagatgcactaaaatgaactttcactgaccaagatttcaaagtttgtaattaatactcttgaaaaatccctgactaatctgtcaactctcaacgtctttaaccacacagttcaaaaccatgaggtggcgtacacagcccctaaactttccacatattgtcatatgattattcaagataattttccctttgggtttgcattatgaaactcaaccaactttggtaatatattcaccggtgggggaaatacaatgatttgaatgagtgtaaaatagagtatgggttttatctatctggtgccaaaaacagaacgtagggccagaggtaggaattaaatgaggcagatttcaatat

SEQ ID NO: 160533 - DNA, 572 bp, Homo sapiens
gaaatccacaaatgactaataagcatgtgaaaaatgtttaacttcattcacaattgaagacatgcaaattcaggccgggcctatggctcccacctgtaattccagcactttgggaggccgaggcaggtggatcacctgaggccgggagtttgagaccagcctggtcaacatggtgaaaccccgtctcttctaaaaatacaaaaattagcggggcgtggtggcgcatgcctgtaatcacagcttttcaggaggctgaggcagaagaatcgcttgaatgagggaggcggaggttctggtgagccaagatcacgccactgcactccagactgggcaacacagcaagactccgtaagacatgcaaattcaaacattaataaaataccatttttcatctatcagaaaagcagacatcaaaaaagttgcatccagtgcctacttcgaggtcatgatagaagcagccactcttatttgtgctgataaatacactggtttttttttttccttttttccctctctatcatcttgtaaatatactgttaagagaataaagcaaggtacagaaatatgtgaag

SEQ ID NO: 160534 - DNA, 429 bp, Homo sapiens
cgagtcatgcagcagcggctggtttagtgtgtcctgggtcctaactttgctgttgtttatctttggcatctttatttcaatcttggtgtacttttgctctgaaatttgatatttctttttgaccttccaggctgcaaatttgaatctcaagagtgaatttattccccttcaactaatacaatgacatattttaagttctaaaaatcagtcctttttaaaaattctgcttgattcgagtctccttaagagtttgtattcaagttgtaattgcattctccaggccctctattttgccaatagccttgaatttattttactaggtaatgtatttacaggtttttttaatcaaagcaatattttaaaatctatagtaaaaatctcacatgtaccctgtttccctgctctgttctccatcaactcaaaagtcac

SEQ ID NO: 160535 - DNA, 296 bp, Homo sapiens
aaaaaagaatgaaataggacttctataaatgaaaatatgactgaaatttaaaattcagtgactgaatctgtttaatacagcagattagatacagctggagaaagagtaaacacgaagatagttctagaagacagatgaaaagtaaatatccagaaagtagtccagaaagacatgaattaacaacatgactgagattaacagatacagaagacagagtaaaatactaacgtatgcttaatctgtgttccataagaagtgactagtataaactgtttgaagaaatgatggctgaaaac

SEQ ID NO: 160536 - DNA, 235 bp, Homo sapiens
gatttgctgattttctccttttgggttaattctggtatcactatttagctttttctacattagtctcttttaagactataatagtgttcaaagttagaaaaaaacactttggcaaaaagtagactagctggaactgtataggtagttccagccaacacatgccttcatgtccagaaaaagacaggttccatggaatcagtgctctcgggtctagtaagaatgaagggaagcagtg

SEQ ID NO: 160537 - DNA, 406 bp, Homo sapiens
ttacataattatttatgtagtgatttgtggactaaagagttagaaaagtttatactttacgtagttattgaggtattatgccatgctaactaaaatttgacctgtgctcttctgcagggagtggtattacttaaccatagtaactaaaatgtgcatattggaactatgcaaaatgagggctttctgtgtttttctgtagttaccttagcgtaatgaaagggcgctcaaattgggacggagagataccccactacgctggtgatatgatgaaatagttaatagtacatagttaattcacttagaagtcttagtgatttacagtcctcttttgagtgttagcatctcttattgaagaaacagcaaaattgcattcaatgttcttaagttataaaccgaccagaaagat

SEQ ID NO: 160538 - DNA, 228 bp, Homo sapiens
tcttttccaagaaaccaaggccattcctggtaagaagtatgttaactttagagtaaaactcctcaaatatcgtttttcctaggaaacagtggtagcgctgattgtgatctaaaagatcctctcagttagtgggtgagcagattagatcctcttctcccatgctggccagagagctcttccaaggctgactccttgtatctccttccaacctaggttaccatcaagcag

SEQ ID NO: 160539 - DNA, 182 bp, Homo sapiens
ctcaaatgggaaaggctcatgttgtaaattagcccttcacagttggaggcgggagagacagatcaggatcacctgagggaacttttacaagttaaacctgctgtaacccacagccgtggaggttctgatttacctgctctagtcctgccacaagcctaactttgtgcaaataagaaaaatct

SEQ ID NO: 160540 - DNA, 739 bp, Homo sapiens
acttacaagaagagaaaaacttggacatagagacatgaacacaggggaaaagcctttttgaagatggaggcagagattggagtgatgcatctccaggctaagggacaccaaggattgctggtaacaccagaagctataagaggcaggaaatgatcctcccctagagcattcagagacagtgtggccctgctgacaccctgatttcagatttctagcctccctaaatgtgagataataaaattctgttgttataagtcacaaagtttgtgggtatgcttttttggcagccctggaaaactcatgcacagcttccttcaggaagtgacatctaagccaacctctggagaaggagtatattggaagtggattctgagacagtttagtgggcagaaagtttattagagagaaccatcaggatctacatttgcgaaaggaaggggaagaaacagtattcagcagagggagaagtcaaactgtgatgccagcctcaggggaccccatggggagctctgtagctacaatggtccattcaagttgttcaaagatgctccactcagtaagtcactggatgtgggtctctcccaaaagggcatgctcttgggcaaggtggttggatccctgaagctgaggtagtccttgaaggggcttacaattgaagctgggacatcacatctttcctgagagaggatttgggtgacatctttgtgtcaccatgagccaacaaataagttaagggagt

SEQ ID NO: 160541 - DNA, 372 bp, Homo sapiens
  misc_feature (28)..(28): n is a, c, g, or t
  misc_feature (36)..(37): n is a, c, g, or t
  misc_feature (316)..(316): n is a, c, g, or t
ctatcatcatactatcatcacatcaccntcagcatnnttactatcatcaccatcaccatcatcatcgctatcatcatcatcatcatcgtgagccatagattccatcatctatgcacatttcattatctatggatgattccattcatcatcatgaatgttgagccatagattccatcagagatagtaaagggggccttgaaatattctgaggcttgtaaaagggtaaagtaaatacctaaagtaattgtgatggatagtgcttgaagtatctgctttcaagtaccatctatcaggctgtggtgagcccaagtaagcnattagttgagcagaggacaggctaatttaattataatggattttaggggggaacgg

SEQ ID NO: 160542 - DNA, 257 bp, Homo sapiens
tgctggggattacaggcgtgagccaccgtgcccggccagaatttgaactttaattcttcaaattgtatagcattttcaggtaccatcgagggcttttcttctgtacttctgtgtgttcaaatatggaccttgttccaaaaaggtccaaaaaggttgagttgtggttccctgtaatgtcaagaaatctgttaatgcatgagacccggaagatgtttgaaagtgactagtgagaattgggttggttgctgtaggatatt

SEQ ID NO: 160543 - DNA, 367 bp, Homo sapiens
ttttacaataatgcttgaaatagtgtgattacttgtggatttgtggtctggaaagttgagttgtgatagtcgtgattctattgttactcaggtggtgtcacaatcatcccagaccatatcgaatgctctttgctctgcccagtccctttgcagggcagcaggagaaagagttctgggtgataaccaggaaacaagagctactctgatctggtctaaagtagcaggtgagaggtcgggggtaagaagtttgggaagggtggagccagcatcaggaggagggtgtctggtgatggggaacgtgaagctaagaggaatacttccttttcctttttcctcagccccagctctgccttcaacatgacgccct

SEQ ID NO: 160544 - DNA, 347 bp, Homo sapiens
aggacactatggaggccggatgacagaagtccttgagtgctagatgacagagcctggatttacgaggcaggcatggagagcagaagagaaacatggctcattcattaattaagactttactgcgaacctgctatgtgtcacatccagtgttgggggccttgggattcaaagatgacccctgccagcagagtgtgcatctggtgagagatcttgatatgtaaacacataaacaaaaccaaatggtattggtgcctcaagcagagcctccaagggcacgtattatccaagattcttttacttgaagtgatagacaccaaacaccaactggcttaagtaaaaaggaaaat

SEQ ID NO: 160545 - DNA, 262 bp, Homo sapiens
actttcttaactgcctgaacccagaagtggtaaatcactttcattcacattccattctcaagtaacagtcacacagttctacctggatgcaaagagatagggagagagtctagctgcagtatgcctgggaagaaaataaatgaagtttgcagtagcaatagctagtccctccatagaccattttctgtccttagagaatttcttttggtcctacctttggtcccctggttaactacaactctcttttaaaattcatctttca

SEQ ID NO: 160546 - DNA, 173 bp, Homo sapiens
tcagtgagagactgatataagcaggcaggatgctttgattattccattagttatcattttaagcaccctaccaagatttagttctttctttctggcaactaacgttttgggggttggaggcatcccatttagaggatggtgtgtgcacaaatagattagcctgaaacctgcgt

SEQ ID NO: 160547 - DNA, 394 bp, Homo sapiens
ttctcctctaataatcttactaaatcttctggctccaacagtcccccgtctgtgggaagcatgtaaatcattatgtccatccttgttctcttcccaagtatgtcttggtattttcagctgcccgctcctcatctctaccaggtaacacatcagacgccccaaactcatgtccaaaatgaaactcatcacttacttcccagtcccttctccaaggttctctatttatattaatagccatgcatagtgttcagcacataatcagcacgcaataaatattttttaaattagtgtttgaatagaggaatagccaactgaagaatataaataccttagcctaagcgtgaagagcctaggtgagttgactttaaactcaccttttttttttttttttttt

SEQ ID NO: 160548 - DNA, 262 bp, Homo sapiens
catcaactatcattattttttgagatgcctttataaattcaccatcaaagtatggagcctctgtatctgttttttccactatatctggtaaatataaatttattacagttcttactacactgtattataatcacctgtctcataggactgaaactccctttttttgtcaccagtgcccagcacatctccacagagtaagttttcaatacatatttattagaagaatcgattaaagcagaggtcagcaaactatggcccgtgg

SEQ ID NO: 160549 - DNA, 649 bp, Homo sapiens
gcttttggtgggaaaagtacctctctgaacagaacagggcaatactgttgtcctggaaataggagagtgcatatgtaatggaagaaagaaaaaaaaaaatacctctctcaagatgaggccaccagggcttagagagcatccaaaattgtgatgtcattacagtgcagatcccagggagtttctattaatgcaaaatggctctctaagaattaaaagttgagctctccaaggtagaggtacagtatagtggtctctctcttttcccatggaggaagtcactgtggcttcctccaaaaaaataagaaataaataagaaataataataagaaataaacctcctcaaaagaaattggcttgggttctccatctgcaagccaaatgcccagagattctagggaaaacagagaaagaaagatgatgagagagagtttggaacaatacgtggtgttataatttaagggagatttgtcttccaaacaaaaatttcccaggaagattacagaattctggggcaaaatggaattctggcaaaatggaaggtggtgagatgtttctttggtcttttcaaatcttgctttttgcatactgtgtctagagaagtggtctacaaataaaagcaggaacattttgaattggtctacattagata

SEQ ID NO: 160550 - DNA, 292 bp, Homo sapiens
cttgctgccagtgggggaagggagggatcccaaacaaagactctgtcagggtttccatcacctggttcctgtgactacctggagtcgggtcagcaggaactggagagacagcatcagggattctttgggagcctgtggccccagcacggaggggtgtttgctcctggccaggcagaagcagtgagtgatggcttgtgtctgggcggtgatgaatggccctgggagaagtgagtcctggggagtcattatccgggagggcgaggtctggggtcagagagcccgaccagcagct

SEQ ID NO: 160551 - DNA, 326 bp, Homo sapiens
aaacaattaagtacagaatcacacttataaataaaataattttaataatacaaatatttaaacaatgttatttaaaaatatttcaattttaatattttatactactgttagcagtaaaaatcctataagaaacactgattgtaaagtagtagcttggacattccatggtacattaattccaaaccttggacatagattatgtgctttcagtttgttcataatttattatgaatcaatgacaaatacctacctttatatttagtgttttcactgatttttcaggctaccgttcctttttgcctaatgagttgttaacataagatatg

SEQ ID NO: 160552 - DNA, 354 bp, Homo sapiens
agtcgcctgggaatgatgccactctgcatttatctctacacctggtcctggagtcttcagcagaatctcaccattccttatcagaacataggaattacccttgtgtgcctgaccattcctgtggcctttggtgtctatgtgaattacagatggccaaaacaatccaaaatcattctcaagattggggccgttgttggtggggtcctccttctggtggtcgcagttgctggtgtggtcctggcgaaaggatcttggaattcagacatcacccttctgaccatcagtttcatctttcctttgattggccatgtcacgggttttctgctggcactttttacccaccagtcttggcaa

SEQ ID NO: 160553 - DNA, 276 bp, Homo sapiens
gcataacgttctcaagggtcatccatgatgtagccagaatcatggctgagaaggagccgtgtatttgtgtgcacatgtctgtctcaccctatggtgcctgaggctctcccagggctgcttgagaactgagtccttgtgtttttcaggtttggggtgatccacttggtgttcaccaacctgcttctgtgggccaacggcgtcctcaatgagtcaaagcaccaatgagcacaaggaatggctcatcactctgggctttgggaacataacaacaggtga

SEQ ID NO: 160554 - DNA, 432 bp, Homo sapiens
tcggattgtggccccaagcctgaacgatatttcctattcgcttacacaattctccgatccgtccctaacaaagtaggatgcgtccttgacattcacagtatgcggccaccaagacgccaccctttcctgcagtggctgattctcgaactgaaggtcaggggctctctttccagcctcgcattaacccatgccaaacatgcctgtctgccaccattctgtttttcaacataatcacttttagatgaacaatgaatacaaatccaacaacggacaaaacacagtgtaccccacacgtgaggctcaggaggtaactggtggtctctccctgcagccccccactcgctgaccccccgagaccagcacatggcaaatgacgtggactttcttgtaatgagggtttcttatgagatggtaacagccaccactgctagg

SEQ ID NO: 160555 - DNA, 301 bp, Homo sapiens
aagacgttgatggatagttgagacaaatactccaataatgattcttagcagcaggctggatggcagggccacatcctgagttaagaaacactgacaggttaaaaaaatagtttaggagtaaaatttaagaattgggaatgagatatattgatgttgatatgttcttatatatccaaaatgagatatcatgtagtttacaagtttgaagctcaaagaaacagttgagctggaaatatattcttgaggattcaagattatggaaataatatttacatttatgaggttagattactttactaag

SEQ ID NO: 160556 - DNA, 485 bp, Homo sapiens
tgtgtgtgtgtgtaacagaattttctccaagatcacagtaaattagtttgtttcttagttttcagtaattccacctttaaaataatttattaggctagaagtcccattattagttccaccaaccacataaagaagagaagacaaaactttagagacttttagtcacctattgaatccagacatcttgactgttaacgatcctagctacagaatttgctgaattagaatagattcatagaaaaaagcgaatataaatgcaatgtatgttgggtatacgttctaagctacctgaatatgatgatcacagcatgtaacaacacaaaaccgttcatttagtccttcctttgttcaaatacctaatgaaggattactacatgtccagcactgtgctgagaacttctgatataatggttatccaaaacatgcttggctctgttctcacagagcttagtgtaatggagaaaacaaactaaatgtgccagcag

SEQ ID NO: 160557 - DNA, 278 bp, Homo sapiens
aagggaacttacagacctactgagacttgctcctctgtcagatgtggcaggagggtcggggtcttggagttgttcaagtaatttcatcagttaggggttaatcctgacccaggatccagtcctgctgggccatactttcttaaagtgactatccagtgacactagcaaatgttacctcttcccgggaagaaatgacaggatgtgtttgtattttcttttacaaaggatcatgcgattttatttttactttttttttgttatagaagtggtatatgtct

SEQ ID NO: 160558 - DNA, 456 bp, Homo sapiens
agtgtgtccccaaaaattcacatctacctgaagcttgggagtgtgaccttatttggaaatgggatattggcagacgtaatttgttaagatgaggtcatactagagtagggtgggccctaaattcagtgactgatatccttacaagaagaaaagacacagagacacatacaaggcagaaggcctcatgacaggagaggcagagactggagtgatgcatccacaagccaaggaacaccgtgggctaccagaagccaggagagacaagtaaggactctctccagagccttcagagcgagcacagccctgctgatgcctggattttaggttgtggcctctagaactgtgagaactgtgagagaatcaagtcctgtagttgcaagccactgtttgtgggactcgcttacatctgccccaggacaccgagatgccagcatttgcagcagggaacccagcaag

SEQ ID NO: 160559 - DNA, 198 bp, Homo sapiens
acttttttcagtttctggactacagtgggcttccactgcctctggcctgccccacatctttttcaactcagcctataaagttctctggattcttttccaccaaactcaatcttaatcactctttagatttcaactaaaaatttcactttctagggcagcgtttaacgacctcctgactacatccagtccccctgtttt

SEQ ID NO: 160560 - DNA, 423 bp, Homo sapiens
tgtaggggctcttagaaattatgggcagaggattttgcaaggagctgaagttcggcatcagcaagcaaagacaggagccaatgaaatacggattgcgaaactattcctaattagttcattattaatgtaatcagatagctcatatagagttaatgtaatcaatagctcatatagaatatgagaatgggaggtccatctgctgtttcctcacttggtggtccccatttccgcaaggttcttatttgtgttaccatttcacgaaaatgaaagtattggtagtttttaaaaacagttcagggcttttttttttttaacaacacaacccatatatgcaagtcaaatacaattcttcatctggtgctcaaccaaagaaagagtgatacattccaatactggaggaaaaactggcctgactaaatttat

SEQ ID NO: 160561 - DNA, 727 bp, Homo sapiens
tactttccacagggaatgcgagaggccatgtaaggtgacgtatgaaagaaacttcaaaaagctgtttttgtcttcagatagctcccaaatgcagtcccttcactgtcaaccttggatactctaatgcattaaagagacttaaagtaatgacaaacaaaaattgagaaacaagcattggtgatatgtaggatacggatctagaatctgaacccagattccagcatcatgcttcagtctattcaactgtgaactgttgaacactcttccaataatgaaggcacacatacattacagagctacattagatgaaacactattaccaaaaacttcctcttctccttccactgtgcagtgtatttgcatcacaactctggagttctgtgtgtctctcacattccactctatggtttagacataaattcattagactctttgggtaaccctttccctgtattctcatataaatcactaccttattctttcagaattttcagttcataaaacacattgcgggactgttctgacaggccatgatatacaaactcttccttacagtacaagatactaaataatgcatctaagcaataacagatttttttctaatcaacactgattcaggtaaaagtcacctgtgcatattaaacctactatgtggaagtttgatgaaaaatagaatacctgtatagttccaaattaattatgaaggaatgttaactatagtggaaaa

SEQ ID NO: 160562 - DNA, 307 bp, Homo sapiens
ctgtgcccaaatgcactagcccattctcacctttccctttcccactcccacctgccatatcagaattcagaatcaaaagggggaaagtgatggggaggaaaagcacaaagcttcctattctgaacttgtggaaacagcagctacatttaagcactgcaggccccctgcccatttccatgtgatatcctttattttattttttgtttttttttgttgttgttgttttgttttgttttattttgtttttgtttttttgttttattattattatactttaagttttagggtacatgggcacaatgtgcag

SEQ ID NO: 160563 - DNA, 884 bp, Homo sapiens
actttgggaggccaagatgggcagatcacttgaggtcaggagttcgagaccagcctggccaacatggtaaaaccctgtctctactaaaaatacaaaaattagctgggcgtggtagtgggtgcctgtaatcccagctactcgggaggctgaagcaggagaatggcttgaacctgggaggcagaggctgcagtgagccgagattgtgccattgcactccagcctgggaaacagagtgaggctccatctcaaagaaaaaatcaacaccagaggttaataatctagtaactaactgtcttctatgtgccacatttttgcaagatccaagttttaaagtgagaacaagttgttcggtccccgcccagctgactgtgacaccaaggtggcggcctgcattggagatctggttccatctgacttggaaaatttggggcaccgtgggctggtgtgaaacaaattaaaagaggtgccaaacagccaggcacccagcaaggatgcccagggctcttgttcggggatttcgttaaaaaactttttggaacccacctcaaagaatgaaaagtttcctataggaaggcaggagcgagcgagataattgaactcattgatttccttcacggcttgtttgccctttcattctcttcccgaggtgctatttgttgaggaatgtctccaattgccagaaagacagtggggtgtctcatatttcctcgccacctctcctttcagccagtgctgagttctaaggcaagcctgcaatatgaatttttaatgccgagctttatggcatcactcccgcacagcccgactgcatcactctcctgagccttcagatttaatgctccaatgaacagagcaaagactggggcattcaacatcagtgagaa

SEQ ID NO: 160564 - DNA, 219 bp, Homo sapiens
attaagtacggtgtgtgcaaatagacaagagacagtttagtacagagaatatgtgcttaataaatgtgaccaggctcctctcttccttcactgaataatcagtcgtcatcttggataggatatttacaaaacgtctaattcaatgggatttccttttttttttttttttttttggaaatggagtctcgctgtgttgcccaggctggagtgaagcggtgc

SEQ ID NO: 160565 - DNA, 349 bp, Homo sapiens
cctgggctggatctcttttttatgcttctcatatcttcctccttcttgatttgcaaactgagttctgtgggggatatctaggagcttcttgaaaaatggtatgtaggagttattttttataattagctcaattattatttttagtttttttaaaaaaatttttactttaagttctgggatacatgtgcagaatgtgcaggtttgttacataggtatacatgtgcgtggtggtttgctgcacctatcaacctgtcatctaggttttaagccccgcatgcattaggcatttgtcctaatgctctcccttcccttgccccccaccccctgacaggccccggtgtgtgatgtt

SEQ ID NO: 160566 - DNA, 756 bp, Homo sapiens
tagttactaactgtatgtaatatagttattatcttaataagatagtttcataaccaggactatcttactaagtttttaaatagaagtaatgggtttcctacatgataatgtagatcaaaattgtagtttaaccaacataactgattttttcttgccttgataagaataaggtgcttcctatgaccataatataaatttggaaaatgatttttagctgtgggggtagatttatttctaagttgggaaaccagaaactattaaaaatgaaattcacaccctttaaattgtggactatgaacaggatcctatttaagataagcttctgatatttgagaaaagcatttgtttatatttttttgttttaattattggttttacaggtcaactctggcccccaaaccaccatttattataccgagtttatgaagtattctaatttaaatatagtattttgtagaaatttacacataaagaaatgttaatctttgctttgtctttccttcacttttagagccatatgataattgtaaaatcaatgtcagataataaaaatgaaacagattaagaatacctgctatagagttaacaatctatgttgctttctagatgtgattggattttgctcaggcactaaaagtctgatgagtgccaagtttatttgtcgtaagtgtgaacacccaaataaatggagagaaatatagatatttatccaagtatatatataaaacaccatgggtaaaagtttccattcaaaag

SEQ ID NO: 160567 - DNA, 206 bp, Homo sapiens
tgtaaatggagtgtaggtaatttaaaatgttggaaaattcagcttggggccagattccagagagttttaaatgtctgaataagaagcttgtgttttgtttattaagcaatggaaaatcattgaggtgtttagctgaggagtgatatagtcagagctatgttttagaagaatggatctagaagaagtgtgtatgcatataactgaat

SEQ ID NO: 160568 - DNA, 170 bp, Homo sapiens
cacagatggtaaataaacatatgaaaatatgttcaacattattagtcattaaggcaatgcaagtcaaaatcacaatgtgattctaccatacatctatcagaatgggtgaaattttaaaattgaacaaccaaatgttggagaaaatctggaggaactgaaaggcttgcgca

SEQ ID NO: 160569 - DNA, 300 bp, Homo sapiens
caaaatcttcagagctcaattccggtgctactcactgcttcctccctgccaaagtggcttctgatgctcaaagcaggaccccagctctgtcaccaccttccacgattggtaataatgcagtgatttatgtaccttgtttctcttctacattataaactccttaacaacaggaactaattaataaatatttgttgacctttataaattgaacatttcatctgatttggcccttggtggacctgggggcaatattttggggctgatgtcagaggagggttttctgaataagtaagggtcagc

SEQ ID NO: 160570 - DNA, 297 bp, Homo sapiens
cgtagcgcggcgcctcgaggacccaggattcgtagatctttaattcaacagtgtttatttttctatatcgtatgacggtgaaagctaaattctttcctctcagataaactgcctaaagcatttttaaataaaccactcttttctcaaatagacaaaatgtcctcttcattaataatttctcattcacacttgaatgtgtttctaaacaccattctgttcctgccatgtatttgcctactactttgctaatacccctttataccaaatataaatttacagcaatgcttctttttttgt

SEQ ID NO: 160571 - DNA, 328 bp, Homo sapiens
ctctttgtttgttttgcatgttgatactctattattccagtcctatttgtcaaaaagactattttttctctgttgacttacctttgcacccctgtctaaaatcaactgaccatccatgtatggggctgtttctggattctctattatcttcaattcccctctctgtctattctttcaccagtgctacactgtcttgatttctataggaagcggtgcaatcagatagcatgtgccctccaattttgttattctttttcaaacttggctattctaggtaatttacctttccatatatagtacattttaagatcagcctgtcagttagtac

SEQ ID NO: 160572 - DNA, 216 bp, Homo sapiens
aggctgagggatccgcggagttctgggcaggcgaggaggcagctgacttgctcatgactgtgggtatgcgccaccacactaggctaatttttctattttttgtagatacagggttttgccatgttgcccaggctggtttttgtttgtttgttttgttttgtttttgagacagagttttgctcttgtttcctaggctggagtgcagtggcgcgatct

SEQ ID NO: 160573 - DNA, 238 bp, Homo sapiens
ggtggaggtttgggcgaggaggcagtggggactgcatgtccagccagtcgtggttgacagcggcagcgtggccttggcagacaggttggagctgtctgggctcttacctgtgggccgccccgccgggcctcgcaacctcctggtttctccagggccccagtttctcttggcatctcaggtagagtggtggagggcttcctcttggggctcgggttgaacaggagtgggatgaaggccg

SEQ ID NO: 160574 - DNA, 497 bp, Homo sapiens
agtcgatgtagccacgagtttaaaagaacctccctgggctactgtcaggactcccaggcagggtaagtagcacctaccagccaggccctgtgagcctccagtccataagaagtcagcaatgctgccatggaatgggaaggggccctagagtaatggggacagcactggccaactttaagattagaactactgaccacgagcatactatgtgggagaatcatgatggtgatcaagactcagcccctgccctcagagagctgtcgtctaacacaggagtcccccacccccgggctgtggaccagtacccgtttgtgtccggctaggaagcaggctgcgtggcaggaagtgagggttgggtgagtgagcataaccacctgagttctgcctgttgtcacatcagcggcagtattagattctcataggagtgagaaccctattgtcaactgcgcaggcgagggatctagctcgtgtgctccttatgagaatctgatgcctga

SEQ ID NO: 160575 - DNA, 243 bp, Homo sapiens
cttgctgctagaatagaccctgcagtcactcttggaaaaaggtatgccatgtaagacaggcaagaatttgaaacatgaagggctgttcactgcagctgttcttgttatcaaaatcaaatactgcaaacaagttaactagccatccagcggagttagttcaataaataatgagctgctatgcaagtgttaaaatgccaatgcagtgtttttgtttctttgttgagatggagtcttgctctgtcg

SEQ ID NO: 160576 - DNA, 379 bp, Homo sapiens
acaggaatggtggcggacagttttatatgagaaattaaaaccattttccccccagagagaacaggtttgaccactagaaacctcttcccaattagccaatccatgtgaacatgttcccaaacagcagcttcaatttaaagtcatgagccctatttctaataacgatggaagacaagaaagaccaaattaatatccttccactggaggataaaagctcagccagatgcctactgctagcaactcttactgtgcccatagaggtacactggtctggctgagtcaggaggagggtacttgagggcaggtaggctctaaccagctctggcctatgtaaggtgagggctatcaatccttctcttttaatgactgagagccagac

SEQ ID NO: 160577 - DNA, 555 bp, Homo sapiens
tactgtccccagaaattctcatgtaagctaactcatggatatcattactctggtcaccagtctctaacaatctgagacatggatatgtaaatacatacattgcttctatattattattcccataataaaatgctacatatgtaggctcaaaggctaacaaataattcactgacagacacaaaagactgaataataaaacccaggatatcatctgttacaaaatggcatggaaaaatatctccaaaaactacaaagtagaagagagacgattgtatttaactgacccaacttttgcttctgtctcatcccctgccagtaatacatacataaacaagcacaaatatgcacacgctcccttctcaatgaacagatttaacttgccagccaactagaaagagattcaacagaaggagccaaaaatgtggtgccaactggctgtgtgacatgcacagcaatgtctcctaataaaccaacacctgacgtctagtaagtgggaatacaataagcagaagaggagtgatgtgatgtaggaaatcaacctgaaatgttcccaga

SEQ ID NO: 160578 - DNA, 715 bp, Homo sapiens
gcaggagaaacacttgaacctggaaggcagaggttgtagtgagctgagatcacgcctctggacttcagctggggtgacagagtgagactctgtttcacaataaataaaaattaaaaattaaatgggatgaacaaatggtttgaaggttgaagttagggaaagccagacatcttgctgctgtgaccacaggctgctagatggagaatgcaacctggtatgcccacttttttctgatggttctcatggctggccctctgacagacaagatagcatctcacacttgtttcctgccttattatcccaaatacattcccacagacctgaaaggccatagaattcaaaggggggaagttatgaatccacagtaaggtatttagagaagtcctcctcctccatttacttcccagctgacagcagtgaaatacctaaacagcaatattgaaagatggaccctgcccccaagaagggacaagagcccctcctttctattctgcaggctagagcaaacccaaatactcccagccccacaggcaaagagcacattcaatcacactacttgtcttttaatttccaaaggaaaaatcttaaaacgttttacatgcaatcactattttttggtaaccttccaaaagtgagccttggtgtgtttgtcttttcagctctaaaatcctttaatgagatgaaatttgaatcactaaaagagctagcatggtaa

SEQ ID NO: 160579 - DNA, 1148 bp, Homo sapiens
gttggtcaggcaggtctcgaactcccgacctcaggtgatccacccgcctcagcctcccaaaatgctgggattacaggcgtgagccactgcgcctggcggaaactatgttttaattttaatttaaattaaatttcaatgaccatatgtggctagtggcctaccatattggacggcacagatccagagggttggtcagatccatgtccagtttctttcacaagaatacttaaatgatatagcggccttcctgttacatcgttttaggaggtatagaatgtctttctggcgatatccacattgtcctttcatttaatggttctaacagccattgtcatatgattattgcctaggtctattattttgaggttttttttatgtattgaatttatgatcagttacagtcatcattcttttttgatgttcacattgtgccatctgtagccattaggaattactaagttggttcctgtattttttaattccttcccccatttatctttgatagtttcttgttttctggaatagtaagacgtcccaggctcatgtatacttcctgcgtcatgcctggaatcagccatgtttctaaggaaccgtgatccttttaatagataatactatttggaagcaacaatttggatgctgacatgttcattcctactggttgtcattgtttctgggtcttttcagtaggtagtgctaggtaaatcatgaattaatggtgatatttcaaatttataaatacaggctaattttgggttatgttatacttgtatcatttttatcttatgctgaatatcttggttcttcaaatgatgttgttacttatgtaagtatcacaacatatatgtgtttctaaataatacagtattactactaacaataagactgttaaatgcaatttgggcttttgttttccttgtctttaggacatatcccactagaatgtaatgtcaaaacactgtgcttaaagtcacttgaaagaatttttttgtgtcatacagccaccaacttaatagttaggtttttttgttctctaatgctaggattgctttttcttttattattttttaattgtgttgagagtataatgtagttttatgtaggcaaaataaggtagagtcagaattttggcttctgtccttttccct

SEQ ID NO: 160580 - DNA, 899 bp, Homo sapiens
attgatttagattttgaaagattaatccatctgttataaagatccacattgtcctttcatttaatggttctaacagccattgtcatatgattattgcctaggtctattattttgaggttttttttatgtattgaatttatgatcagttacagtcatcattcttttttgatgttcacattgtgccatctgtagccattaggaattactaagttggttcctgtattttttaattccttcccccatttatctttgatagtttcttgttttctggaatagtaagacgtcccaggctcatgtatacttcctgcgtcatgcctggaatcagccatgtttctaaggaaccgtgatccttttaatagataatactatttggaagcaacaatttggatgctgacatgttcattcctactggttgtcattgtttctgggtcttttcagtaggtagtgctaggtaaatcatgaattaatggtgatatttcaaatttataaatacaggctaattttgggttatgttatacttgtatcatttttatcttatgctgaatatcttggttcttcaaatgatgttgttacttatgtaagtatcacaacatatatgtgtttctaaataatacagtattactactaacaataagactgttaaatgcaatttgggcttttgttttccttgtctttaggacatatcccactagaatgtaatgtcaaaacactgtgcttaaagtcacttgaaagaatttttttgtgtcatacagccaccaacttaatagttaggtttttttgttctctaatgctaggattgctttttcttttattattttttaattgtgttgagagtataatgtagttttatgtaggcaaaataaggtagagtcagaattttggcttctgtccttttccct

SEQ ID NO: 160581 - DNA, 639 bp, Homo sapiens
aatgcattgtctttaaatagcagtttaaccatgttataatgtaggctttttgtcttgttccgggctggtatttgggtgccctgattgaattacttggatttaaacagcaaactgtgggctctcgacttacatagtaagggcctttactgtttctttgtaggaaatgggtttctcgcctttgaaacattttttccccttttgtagtgacagtgccactaaatagttcagcttttgtcagtcccccaggaaagtgctatcctatggcctaactagccaagccttttttctttcatttaaaagaaattagctttaatttttacctttaattacttattcaaataagacagaaatatattttccttgcaataattaaaacattgcatataggccataaatttccttattttctctgaacgatcctgattccagtcatcttgttgaataccctagttctaataattgactcttgcttttctagagaaatatttccaaatgatgctagttttgtctcttcctttcaaagttgtataccacttctttttcttgtcattttgcattgcctgggacctccagaataatgtttcatgaagtagcatgtatccatatctggttcttgactttttcatcataataattgtt

SEQ ID NO: 160582 - DNA, 278 bp, Homo sapiens
tctgactcctgaggatacacgaggtgcgttcctgtagtcccagctactcatgaggctaaggcgggagaatcactttaacctggcaggcggaggttgcagtaagccaagatggcaccactggccactgcactccagcaggggcagtagagcaagactccatctcaaaaaaaaaaaaaaaagagactcagtcataattttggattaatgacaaaaaatggaacaaggttaggattaagcaatcaattcattctgcttggataaaaatgggcttagtggag

SEQ ID NO: 160583 - DNA, 823 bp, Homo sapiens
tagggtttattccattggagggcatcacagatgaactggatttttaagtttgtcaagcagggaatgagggagaaagccattccaggtagaaagaatggtgtagtcaaagagatttgagtgtgctgcatatttcacaattatgacttcctcagcatgtgtaaagtacaaggctctcaacagactttatatattatgttaaggagtttcaacttaccctgcagccagtaaggagccctggatgcttacgttgttttgtttttacgatatctgtactggtttttcccattgcaaaattaatagaaagctcattgcaaacaattcagagaggatatatagagaagaaaatagatgtttcattatcccattatcccgatatagtaataatttacatatagtcttctagattttttttctgtgcatacgcgtacatttatttatttatttattttttgacaaggtctcactctgttccctaggatgaagtgccgtggtgcaatcatagctcattgcagcctttgaatccttgggctcaggcggtactcccgcctcagcctcccaagtagctaggactacagaggcatatcaccacaccgagctcatttattcatattttaaaaaaaatggaattgtttcatgtgtactcttttaatactggatttttaaaattactatatcatggagatacttttatatgaaatagaggctccaaaatttttccccgttaaatggtgataccataattccttaatgtaacctattaatgtttctaattttcataaagatgtaataatgaacattcttaacgtatttctttgtgtacttg

SEQ ID NO: 160584 - DNA, 932 bp, Homo sapiens
ggatggctcacaagcccagcccaccccccaaaaaaaggcaagactgcagtaacagaacaggtccatggtggccagaggttagggcaaggaaaggtatggctaaattcaggttccacacagatactggtgaagaggggcagacaggcactggtcttttttaatttttctgtgaccttgtgctactcttttgtaaagagcttgttcagtagggcacattaaaggctacttcattgctatgctgggatccagagagaaagcttggacgggactgatgatatttgaagtactcaagggaaggaaggatccagtgtgcgggaagctctttggacaaacgggaagactcacagcctcaccggtttcctctattcctagctgttaggtttaggctacttggacaaagcaacatagaaaacagccaagaaactaacccaagtgccaactttttcctctcccctaaatattaatccataccaatcgttccaatgacctacacatttattatccatctgtaatagggtggtcaccagtgggaaagtcatactaccacgtggatgccgagtcaccagtcacctttggaggccctgagagcctaagcagatctggaccctaggcctctagtcttcctctgaaaccctggagtactggaaccttccagaattccagattaggaggggccttggcagcttgagtgccaaaagggtcgacatctagagttctgttgtctaggaaaggaaactgcaaactattgggctagttttgctcacatgtctttttcaatttaatacaaaactgagagggtcgtccttagagatcatctcatctcaaactgcctagatgagaaaaccaaggccgaagaagaagtgctactattatatgatagcatctaaatttctggtctattaaaagtcacataaggccgggcgcggtggctc

SEQ ID NO: 160585 - DNA, 448 bp, Homo sapiens
cggctgttatagaggatcccagaaagatgacatttctatcccagcgtggcttttcagagaagccaaacactcaccaaccaccacacctctgatcactttctttttccttgttgtgttttggtctgtatttttcatcattattggatagagctcagtcaatatgtgtgcttttcagaatgcttatcttaaaatagccagaaggagaaggcatttgtgtctacctcacaatcttaggccttcccatagattgtggggtctctgtccaagtcattgtaccctcgtccccacttttccctctgcaaatagcttccatgtgacaatgtgacaatgtgcatgcttgtgatcctatgttcaatgaaatgttcgtagcatgccctttgcccctagctgtgggtaagactttatgtccacgaccacctgttgttcccaatgctaatattcaaggtca

SEQ ID NO: 160586 - DNA, 144 bp, Homo sapiens
ttaggaaagcaaattggacctgttagaaaactccggggccagcaggaaagcggggagcctgccctgtgtcagccaaatggttaaaggagaagagtagaatccaggggaaatcaagccgtcaagtcgttaattgactttgcctca

SEQ ID NO: 160587 - DNA, 397 bp, Homo sapiens
aagcttcaacagcatgggggtggtgatagtgtcctatttgcccttggtaaaatattaaagcgtatttcttaacccaaagagtgattggttatatgaatatatttgaaaaagttaaagcaaatttgcaaacctttacaaaatcatgtatcaattttatgctatccagtttttacgtacccatgtgtcaacatttcatatatccagttctttgggtgctggttcactttttttcatttattcaaattcagaaaaatacggacggatctaatgttaaattaaccagaaaccctggaacattcatatcttgagagggaatttgctactcttttacttttgggatttcattataaaataggctcattttatacatatgtcctgtggtctgtcttccagagtg

SEQ ID NO: 160588 - DNA, 288 bp, Homo sapiens
acgtggctggagtggcagggactatggcaaacaggagaacacacactctagctagatggggcagccattcctcaggtgtagttgattgttgccaggtgaaaagaaaagcccagttttgtcagatagtctcgttttttgagagaagccaaaaatctagattcattgaagttttccaatttgtaaatgttgtgttcaatttctttaaaacactgaaggccaaagtaaacaatctgtgagttgaatttgatccaaagtctcaactttgcaatctatgctataacatatttg

SEQ ID NO: 160589 - DNA, 371 bp, Homo sapiens
caaacatcccctcctttgtccttccacaatttatcactcttatgttaagatggtatatgagcctctaaatctaagtgtttctttgggattttacatctttttctttgatgcccctgtgcgtgcaacaatattaacatcaatacaagctgtagacctcttcccctgttaatgtcttttgttagtttaattcacagatcccagcaatagagcctaagtgggtggaggaaaagttttcctcccctacattccaaacaagctagccattatgcatttacattaagatgaaaatcaatgcaattaaatcacaaaatatggtacctaacgtaaagtaaatttaaacagttttgtattcactagttctcttgaaaaac

SEQ ID NO: 160590 - DNA, 490 bp, Homo sapiens
ccaaaggcagtatcaactacaattctgttagaaataagtaaacaattagacgttccttattaaatgtaaactctgaaagttgtcactgacgtctaataattgtcaaggctatttttaaaactttgaagaatgacttgaagctacaaaccacacaaccacagaacgatcaatcaatctaaacacaagagattttcctttaaaaatccaaaaatttctattaaaatgtcaaaatatacattagactgtagagaaacagacgctttaaacgagtatctgtgcaataccaaaagcctacttttactagtacaaaaaaaaaatcctaaaacatggtgatagggtttggaaagtcatctagctcattgctactccaagtatagtccacagaccagcaacatggaaattatttgttaaaaatgcagaatcttggccaggtatggtggctcacacctgtgatcccaacatttttgggaagccaaggcaggaggatcac

SEQ ID NO: 160591 - DNA, 380 bp, Homo sapiens
ctgcgaggtaaagtcaatgaggcgctccccagtaccactctgaggggatgctggggaaaactgcccatgagaagagggcacatgctgctggccacttgtgctaaagaacttgaagtctgataggagtgcaccctaacctggcatagaaaccctttcttcctgctgagtccctctagcaccttatactggcaaagctttacattgcaaacctccattatcacagagcaagcaatgaaagatggactcagagctgaggcgataaattgatagctagcatagcctctaaactgacttttatgactacattttatggatagaaagtgttcttatatatattgtttctttacataataggggacttattcatggctgcagatgag

SEQ ID NO: 160592 - DNA, 368 bp, Homo sapiens
aatcatcgagccggtcccttattcgtgttgcctagttgaggatctaacattttcctaatagaagatcaacaaagataaaattcagttttgaaagttatctgtggcagaatacagagggaagattagatagaatggagagaactaggccacagagaaaagttaggaagctatggtgaaaaaagatgagtgctgaactgacgcaactgtatcagtaaaataggaaagcgatgtgctgggttcaagagatatttcaagataaaataaaaatgatttgaaaactggatagatatggaacttgggcaaggagctgagaatgcttgattaatttaggctataaaaggaagacaaagtgtgtgtgtgtgtgtgtg

SEQ ID NO: 160593 - DNA, 457 bp, Homo sapiens
tttaatcacaagggtctggaatcagtactcattactgctaatagcacagttgtataaaagaagacacaatgctaccttacgctagcctgagtcagataggattaggaatagccaaaaccacaatatagttccctttttttgcttgttttcaatgatgcttagttgggatttgtcatctgaagacagcgttttttataggtcataataagaccagtctataatcaaagtctgtaagtccagtctatattttataagtccagtctataatcaaagacaccaaatttaggactatcagtctcagactttagagaaacataactgttttgataatccaggtaattttaattttctccagtggagaaagtgaaacatctccaacagattgattgtcaccaagagttttaattttttgaagaggacaaagaattccattcagcttccagagaatgagtgaatg

SEQ ID NO: 160594 - DNA, 203 bp, Homo sapiens
cctcagaccagcccttttggtaccaaccaggagcttgttagaaacatagaatctcagctctacctcaaacccactacgttagaatctccactttaataagatccttaggtgattggtatgtacactgaagtctgggacaccttgatctctagcaaggaccagcaaactctgtagagggccagagagtaaatatttcaggcttg

SEQ ID NO: 160595 - DNA, 227 bp, Homo sapiens
gagatgtagaagtagttccagaaattcacagtaaggagttgaaggatattccactcactgaagagctatcttttgtcatacttgcaataaaaaacaaaacaaagcaaaacaaaatacttcagattctcatagtaactaatcttgagatgagaagagataaaagacaagtgatagctcatccactgtgaactttctgatacagaatatatttttcctctgtcttaaag

SEQ ID NO: 160596 - DNA, 287 bp, Homo sapiens
atttgggacacactgatgtttcagcccctccctcttaggaattctgatttgaaaatcactgtatctactctgtattcctatgagagagactaaaagattttgttcagatttgctttcttctgattgcaaataggaacatgtatggtttttttgggtgcactttttcagaccagacgccaggtcattctgacccaccccactcctctcctgagaatcactgacttagtgcagttatttgagggcaaaaagcactttttttcccagcacaaagtaggtgctaaacaaag

SEQ ID NO: 160597 - DNA, 439 bp, Homo sapiens
cacatggttccctgctaatcattttacaaataaacaaccaagtagctaacctagagcccacaaaagcagagtaaaaattctaacacttgttgaaataaaaatgttcatatacccatgataaaaagaaaatgcttaagtattcaaacacaagcagcaaattacagctactgagaacatcattgtaagcaaactgaggcacagaaaaaggtgctgatgaggatctgaaccacctaagctgcagaaacccactgggtggtttcctaggttccaagttgggattatctttcagaatcttctagaagagatcacataacactgttacaaaggatctggaaaaagggacccctgctttatcactctggctctccagtcatgcttgacatttggcagtgactatctccattcaactcaattccccacccctcaactagctgacatt

SEQ ID NO: 160598 - DNA, 259 bp, Homo sapiens
gttgctgtcccccaccccaccctcaagaaaaattctccagacagactaatgaggaggattgatggtgctaccacccttttcactagggaggcatctcagaagccgaggagacgagaaaaaacaacatcaacttttaatcgagattgcagattcagaaaagattcataagtgaaatgattccctaaggaaatataaaaagttacttacggcattgctaaattgggcatgcttcaatcaggggctgttgagaaatcattaa

SEQ ID NO: 160599 - DNA, 243 bp, Homo sapiens
ccccaggtctccaggtgtgcagggctgtgctaggctagctgactcttgctgggacctgttgcctgcgcagcccttgccaagccagttccagtaccccgccaactgcatcttgatgctgctctgggtgggctcattgaagagtgagcactgggctgtttcatctaagctccacagcactccaggggatgggatgagctaagcatcagacgggggaggccaagaagctggagctgctctagggaa

SEQ ID NO: 160600 - DNA, 459 bp, Homo sapiens
aaaaggaagccaggagccacgcctcctccgtgactgcggatcctgggccaatgtttcgctgctgcagtgagacccctgactttgtgtgggcagtgggaccaactgggcatgtgcagtgatcagttgctaaatattggcactctcattagccttgggatctggaaacctccatccaccagacacagcccatttccagctcacccgctctccacactaggactctgaacaccctttcttcatgcctcttctccttcctaactgcctgcctgctccagcaggcctcaggccacttcttttttgtgtgccaccacacccagtggtgtatttaaaataacaaaagctggaggaacatggtggcacctacctataatcccaacactttgggagtctgaggcaggaggatcacttaagcccagaagttcaagaccagcctgggaaacatgttgagacctcaactct

SEQ ID NO: 160601 - DNA, 228 bp, Homo sapiens
caagacagtcaaggatacagaaaggttaagtgactcatctgatcagatcatctctgggtgatttgggatgtgaaaaccacagatttcttctcgaactcgcatggtgccagactagcaactaaattatataacatctcttatttcgcttcaagtatcaatctaacgcagttataaaaatgaatttctagaacttggttgaattttctgtgaactagctacaacaaacca

SEQ ID NO: 160602 - DNA, 239 bp, Homo sapiens
ttttgattttccatcagtagagacagagtccctctgtgttgcccaggctgttctcaaactcctggcctcaagcaaccctcccgcctcatactcccaaatgctaggattacaggcgtgagccacggtgcctggcctgtgcctcttgttgtacagaaaatttttatatttgtgtggccaaatctggtttagtgagttactgagttgagttctagataaagtttcaatcacttggcttagcc

SEQ ID NO: 160603 - DNA, 171 bp, Homo sapiens
ctggcctggggagaagcaaccatgtcttgtgcacagccgattaccaccatttagaagtgttgagcacataacaaacaaagctcaatggcagcttaactgaatgaaccaatgagtcaaccagtcagtctatgttctcatttcatagtgaacttcacctccaccctctccttc

SEQ ID NO: 160604 - DNA, 363 bp, Homo sapiens
gcattgaagactaatgtgatctttagcagtgtttgttccggggttgctactgtaacattgtagctattgcttttataaaagatgttcttatgcctatgtcccaacactgccatcagccagcagcaagtttagctacagtcatgtggtcctgtcttataatttcatttatcatctccctaaccacagtaacaaattttgtttttccctcaagagatcatggtgaccttcaggtgaagaggactaattctgagtgtcctcagtagcaagtgctggggtaggacactcagcctttcagttatagcactcacttttttaaccctcttttccagtgctattgaaataaaaccaactccttatgaaggc

SEQ ID NO: 160605 - DNA, 389 bp, Homo sapiens
ttgcaaatcttaagaattctacgtgctcagacaaatagctgctgcaaatacttaatgcaatgaagccactttttacttgactttttttttaaagtcctttcccaaactgtggtattattacctgtaacataatgaacattaaaattgattttcaccagctcatatgatttgcctacacataaggctttaatgcagagtaaagaacagattagaatagcattggcctcaacttttaaaatagcttttctcttcctactgggtgaatgagtacatgaagccacttgattcacacagggaaacttaattccttcctcattctctgccatctatccatctacctgttttgtattatttttaattgctttgatgctgcactcctgctactctac

SEQ ID NO: 160606 - DNA, 293 bp, Homo sapiens
aagctgcctatcgtcaatgatcgcgatgagctggtggccattatcacctgcaccgcgctgaagaaccgagactaccctgtggcctccaaggattcccatgagcagctgctgggcggggcagctgtgggtacccatgaggatgacaaataccacctggacctgctcacccaggtaggcgtcaatgtcataggcttggactcgtcccaagggaactcggtgtatcagatcgccatggtgcattacatcaaacaaaagtaaccccacctccaggtgattggggggaacgtggtgac

SEQ ID NO: 160607 - DNA, 343 bp, Homo sapiens
tgtagctgttctagaggataccggaaggcagattgcaacaggaaggcagtggcagggagatgtgtggcaacaggagcaggcaggtgcagcgggtggtgctggcaatatgtgtgagtcctagagttccattctgatggcttctgctttctaggtgggataggaggtaataggcatcatcggctgagaacgagagtgaggcaagaggaatgggaaattttaggagagggaaaaaaagatgtgaaatcgttatctaggagaatgggagagtcaaagaattagggaaactcaatgactgccagtcagcaccaaggttcaggtaacactacgttttgcagttatgcag

SEQ ID NO: 160608 - DNA, 500 bp, Homo sapiens
  misc_feature (178)..(178): n is a, c, g, or t
  misc_feature (192)..(192): n is a, c, g, or t
  misc_feature (215)..(215): n is a, c, g, or t
  misc_feature (288)..(288): n is a, c, g, or t
ggccttttgaacaacaaaataaaattggaaatgctaatgttttgagccaactaaaggaggaaaataaaaatgtcaccatggtaacaaagctgctttctagatggtttcctaagatatgcctgaactagaagcagatgtctgatttgagaatcttgcctccttcatttaagtatatctnttggaattgttccnagtataaaaatttatattctatngttatatatttcgtgttataaactatacatttcatatcagttacaattgtgcaaggaaaatccacttgtcttnctttttttgaagtgtggctataaccaattgctttatatcatcaaacttccttctgcaaagcagagttgtttcctttaaaaatccatttcttttttaatggtaggtttggagacagtgtttcaccatgtgggccaggatggtctcgaactcctgacctcaagtgatctgcccgcctctgcctcccaaagggcggggatcacaggcatgagcca

SEQ ID NO: 160609 - DNA, 451 bp, Homo sapiens
agtacgggtgtaatcaatgatgacctgcctcttaatttatcaggtggcaaactgaggctgtgggcactgaaagagacctagcattttctagggcaccgctctcctgggtacgctggcgacaaccagcggcctcggcttgggagctgagccactggccggaatctgccgctgagcgaatgcactcgctcagacccgacttctccctctagggcgcggctcccgggcaggtcccttcacgagtcttccatccgagcagagcagggtcccgcggaggcgccgaccgggcgcgaggcctcctgcctgcccaggttccccggcgaccctgagcgaaccctctcggggtcagctccgtctaggctgagaagggaacggcggaaggcggagtgcgcccccgggagcccggagctgggactgcagctcccatggggccaagttcacggggtgcggccgc

SEQ ID NO: 160610 - DNA, 310 bp, Homo sapiens
tagccaccacagcaaaataggaatacaaaggagcttccttaatccgattaaaagctcagtaaacaccatacttaatagtgaaatgtcgaaagggttccctattttaagggtataatttatttatattttgaaacaatctcaaatttatagaaaaattccaagtatttccagaaatctatctttcttgaaccatttgacagtacactgctgatctgatataccaacaaccccaaatactttggtgaacattttctataaacatggacactcacaaatatgaccgtgatacgatcatcaaaaaatggtaact

SEQ ID NO: 160611 - DNA, 290 bp, Homo sapiens
ccctgctctctcaggtcttctccccaggtggcttcagcatcaatcctccatgctgccacagacccagtgtgaacactttcctagcacaccccacatttttccggaaattttctgtgtccactgcacacatgaagggatgcaggctccttcagggcccttattcagccccgcactctgcacaacatctgacacacagtagatgcttaaataaacatgttgaggcactagattgaatggacaaactgagacctgttacaaaggaagaatcaacaagccttgataatgtggaa

SEQ ID NO: 160612 - DNA, 338 bp, Homo sapiens
cagaaaagtaaaaatcaactagggaaaaaaacgtgaatacttgaatatgacggactttttttttaatagaagttcagttttgtctgctttcttaagtttgtgtagcctttcttcttaggaagacattctacaattacctgctctgctcccaaagtgaaattcctattttgctaaagcagaacagaaagaaacctttccaagtttctataatttgtatcacattctgaagtcccagttactgtaatagctgcaaagaagcaatacaaggtggagggtctgagagggagagaaaaatgactaaagtgcaacatagctgaaaaattggctggctggaaatt

SEQ ID NO: 160613 - DNA, 778 bp, Homo sapiens
  misc_feature (725)..(726): n is a, c, g, or t
  misc_feature (745)..(745): n is a, c, g, or t
  misc_feature (752)..(752): n is a, c, g, or t
ctgagaaaacaaatgacttaaacctggagtcatttccatatcattgcacagggaaaccaaacagaacccgaaagtctcagtgagttggaaagaaagtggagtccacagaagatagaagtttcagagaagaatactagggaggaaagaactgaacagacaagaagctccagaaatctgcattgactctttgacttaataccagactgatcatgcttatgataaaactcaacatggtggggctaagatagtaagagctttaagttaaagaattcccaaaactaatacagagctaggaattgttgagaccctactagacacttcggagagaccacagtcttgctacctcctgtcctatgtctgagacttgagagttattcaatagagaccctctaagagacacgcctgaatagtaaaactaaactagccgtagcgtaacagccactctaaaccttactggaaaaaaaacttttaaactagttttgaaggataaagttgatccacaaataacttatctgcctacaaaaccagtctaacaatcttaaaaggaatatgacaaaatccaacactcagcaacataaaatttgctatgtctgatatattgtctaaattcagtagccataagcagcagaaaaatgtgacctacataaaggagcaaatcaatgagtaaaaaactgactagaaaatgacattctagaatgaaaaacaagagcattaagcaggattannccctttaaaaagtttaaanttatgancatagtttaattgttgcgcttaaagc

SEQ ID NO: 160614 - DNA, 264 bp, Homo sapiens
atgaaaataaaactgaggggtcaagaacagatgtgagctggcaaaagaatcaataaacttgtagaccaacaggagattctaatctgaaaaatggacaattttaaaaaataaaagacaagtaatcctcagaaatcttgtgcaacaccatcaaacacatcaatatatgcataatgggagtaaaagtgggtgaagaaaagcagaatgggctagaaagactatttgtagaaataatgtccaaaaaatgttcaaatggtgaggaaaact

SEQ ID NO: 160615 - DNA, 480 bp, Homo sapiens
ggatggagtgcagaaaatcacttgtaagcacaaagagtgtggcaagtgatgtgaggtagctaactggaatccacattgaggaccagctgcgtgcttggaacagcagctccaagtgtcactgcatcatcgttgagagttattgacggtgaaaacacaaacatattaccgaacactaccttgctagctttgtggccctagcgaagtcacttcaattctctgcctcagtgtccatatttgttaatgaggaaaataatagtacccacctcacaggtttgtggtgaagattaaacacttagagaaaacataaaatgcctcttgtgaagtaagtattttttgaatattagccatgattatgttattgaatcaatgttatgtatcaagctgttaccgaattatatcggtgttagccgttgctgtcatcatctccattatccttgtatttcagacatgtgagctttggaaattaaaatctttgaaaat

SEQ ID NO: 160616 - DNA, 370 bp, Homo sapiens
tcagtgtgtgtcatgagtccacatctggttacccagaaagagttaccaggagagggactcccttcccggaaggcacttggcttacatagttcccagagctagaggtcagggcaggtctggaaaagagccacaaaaactctgaaaagcacattcctcgggtgccaaggcctggccaaggtttccagaacagcgttccccaggcccctgacctgcctgccatgcacggacacggccatacatggctctgaggactgagtcatgctgataaatttttctgtttcttggtttccatttgtgctcctgtaactagctcacagggctcttgtaaggattaagttaaaatatataaagcgactagaggccaggcgag

SEQ ID NO: 160617 - DNA, 137 bp, Homo sapiens
cctcaggtgctctgcccacctcggcctcccaaactgctgagattacaggcgtgagcctcattttctacttagtattcagagtgaccattctgagatataaatcatatctatttacttccctgcttaacaatccttca

SEQ ID NO: 160618 - DNA, 264 bp, Homo sapiens
atctttcaacaccataggttggaatgtaattctggctgtctgtccaaaccttattaaagttcaaacctattccttctttctggaatttcagtaacatgtgtagttttaaactgaaaaagtttaggcaagacaacatatttgaaagtacattctaaagtgctatataaatattattatgaacaacaactaaaaataagaacaagagggaaggaattaacaagaaattctagatatttttgctatgggaagacattagactgaaaa

SEQ ID NO: 160619 - DNA, 336 bp, Homo sapiens
ttcattctacattagcatatattcatataatagtgatgttgctaatactgccaactgatttccaaaatggaattctgaaacaaatccaatttaaatcagttccatcttttaatttacattaaatgttaaagagcttgtatatctgattctatcaataattttaattactattaaaaactataaaattcaaatttcattcaattcagtctatcttaagataatacaaaagaatatcaataaacagtaggaatgcggagagattgttaaaagttattcaaaggtttaaagtaatgagcactcagtatatttttttctttaagatatcaagaacataaa

SEQ ID NO: 160620 - DNA, 117 bp, Homo sapiens
gatagaagaatggatccatgaaagaacagagagacaaatgatgcatcatggatagatgaaaagagatgggtggaaggataaagagatggatgtgtgaaaggatggatgtacagatgg

SEQ ID NO: 160621 - DNA, 737 bp, Homo sapiens
taaagctaagtgatgggagttcactaaattattctatttttctgtttgaaatcctccatcatgaaatgtttcattttgtttttaagtaagtttccaaagatctttatcattaatatactctgtagataaaatgacaggctgcccttaagctgtcaaactctggtggctcaaccaggtatgctccacactgagcccaacagtgtagactcactcaatgcaggccccttcacagaaggcacacaaaaggcccctcagaaaacaatcagagccccagttcagaccaccaggcagcagtgcagggagctgtgcggcctagtctctctcacattaggtatccctaatgtgaaaatccaaaatccaaaatgttccaaaatcagaaacttcttgagcagcagcaacatgataccacaagtggaaaactccacacctgacttcatgcaacggggtcacaatcaaaatgcagtcaaatcttagttttgtacacaaacttatttaaaatattatataaaattatcttcaagctatgggtgtaaggtatacacaaaacataaatgaatttcacgtttagacttgggttccatccccaagatatctcattatgcatatgcaaacactgaaaaatccaaaaaagtctactatctaaaagatttctagtcccaagcagttcagacaagggatactcaacctgtatgatatccaagcttccaagttgcctgctcaactcctcactataccag

SEQ ID NO: 160622 - DNA, 782 bp, Homo sapiens
gtaacaagagcaggcctggagagagggaggttgggtttgctgctctttttcttaaattctctgcctggaagggagtgaaggtcctggaggtcacctgatctagttggactccttgcccaggcttgcttccctcctctacttcaacccagaaaggctgatgtggtcggccttccccccagtaacttagaccagtatgaagaggggccctcggaggcttcagagaacaggcatttaacttcatttttgagagttgagaagaaagagcaagggcatcgggcttagctcatcagaagcttctctcttgagctttatgcctggagggctgagcataatgaaaatccaaagccccaaagagcagtgatggtctcctgggtctagaagacttggatgtgatgctttaagaaggggtaagatggttgtctcaaacctggcccttttgacagactgacattagccagggctgacagctctaggcccttttgacagagtgacagcagccagggctgacagctctagtttcccctatgggtgtaactgggtctggtggtgtgcggcaccaagaaggggcactcaggccaggctcttggtgggctggtagtgcgctacgatatgctgttggaacagtcactctctatgtaacctccacgtttccaacagtgacaaggattttgcccatcatatcgtggtcttttcttctctgtctgtatttttcctttccttgtcctggttctctgtccctcactaacttcacggcgattcttatcgcttcgcaagacaggatt

SEQ ID NO: 160623 - DNA, 307 bp, Homo sapiens
agctggatttcacttgaaacgtttctaaatttctagaagaataaaagcagaaacactaaaaaaaaattgctgttaggatatcttcccctcaactgtccaaattaaaaatacttctatcatttcacaaggcttttcttatggtgttaaaggctaggtgttcacttaaaaaatctctcaaatgctaaaattcaaataactagacaaatcacttcagctatcccaggctaagatacatacattggcaatgtacacctgtaactaaggggtatattcatagctccaaaagggaatctaaaggcagcctaag

SEQ ID NO: 160624 - DNA, 718 bp, Homo sapiens
agggcagtgtggaaaggggtgggagtcactttacagccaagaaacctggcaaactgactgcctcggcccagtgatcacggtcagcaccagcagccataagtcacgttgacggcctgtgcccttgacatcgtgtgacgagaagggcgctccagctgtgacagactccagcaaacccaatcgagagtctacgggatgtccgaccagtcctcaaaaccgtcacagtcacgagaaacaagaaactgtcatagtcgagaggagcctgaggggatgtgactgctaaatgtcacgtgggatcctggatgaggtcctggggcaggaaagaacatgagggaaagactaaggaagcggctggggcgtggactagaggtaatgggaacattcatcgtcaccagcatttcatactcacttgcggtggtacccataggggaaactgggagggggccatatgggaacttggtattatccttgtaatttttctgtaaacctaaaactgttctgaaaaataaaattcattttaaaaagaaagtggcaaacctgggttaggctctctgctggatttgtaatcttgctgtcggtgagatggatctggatgtccctggcccagctgccaggaggatctctgcctcagtggggctccaggccacctcctgttcggtgacctgctcgttgtcgcgctctgccggctgggggaatggagcagtgctgggtgaggctcagg

SEQ ID NO: 160625 - DNA, 571 bp, Homo sapiens
ttgtggtggaatacaaagctaatcaatagtgggcagctctttttcatattaattagccagctgtgcaggaataaaaaatacatcaagctcactcgtgctctctggggatgctcactttgctggtgcaatgacagcagctcccgggaaccaccacactctgccagggactgggcttctgcgggctgtcacagtctgtggtcctggaagtgctctgtctgtgaacacacttcggatttgtctcagagctcttaggctccttggactaagaccagtctcagctaacagctcggcagcacttctccttcagtgcccatgtgtcaagggggcctagggtagtgggaggatgcaggttcggagtcaggcgggtatctgtgtttgaattcagccttattaggcaggtggcctgacagctggcacttaatttgtttgagcccctatttctgtagctgcaaaaaaagaaaataccaattttatagcgattttaagaggagaatgaaatgagatagtgtatttgaataggcttatgtaatatctgacctgtaataagtactaaatgataattattaaataa

SEQ ID NO: 160626 - DNA, 495 bp, Homo sapiens
ctggctgttgttgtgtctttaaagtttcacctgggtagtcaaagatggatcatgggtctcagtggagagctgagccaggcaggagctgactaagggtgagaggtgggagttagcagcctctgaacatctgtgtaccatgggaccccctttcctcctgcatggtaccccagacaaggagcctagtaagagatactaatggcttgttgtccagagatgttcaaactgcagagaaagataagacaacaagcattggcctccaatcatgatgacagataggaggaggtgggagctccttagcagtgctggttggccttccatgttctactgtgggccatctctgccatgtactgtaggctactagcttctatattaaagaatgcaagaggggccaggagcggaggctcatgcctgtaatctcagcactttgggaggccaaggtgggcagatcacttgaggtcaggagtttgtgaccagcctggccaacatggtgaaact

SEQ ID NO: 160627 - DNA, 280 bp, Homo sapiens
taaatctccttcaaatttaatctcaaaaacactttccaattttggcatttccttggctattctcactgcctctacttagttcacccacaccccagtataatctctacattgctagaattatctgtcactttccacttcaaaacctctactggttcccaactaccttgaaacacaaactaaattttcttgcatggactggccacagtgcctcacagcaaggccaaactaacctttgtcctggccacttgcagtgcttccctctccatgaacatctcaccat

SEQ ID NO: 160628 - DNA, 545 bp, Homo sapiens
acaagatttggctggggacacagattcaaaccacaactatcagctataaacatctaacacaagccttttaggaactactaaagaataacactataggctgcacgtggtggctcatgcctgtaatcccaacgctttgggaagccgaggccagcctggacaacgtggcaaaaccctgtctctaccaaaaatagaaaaaaattttttaaaacaagaaaaaaaatatagaattggtatcttggccacacctctttccctgtggttgagtttttttttctttttttttttccctgtcctttccctttttttggagacaagatctcttcgtcacctaggctggagtgcagtgacatgatcaaggcttgctgcagtgtcaatctcctgggcttaaaggatcctcctgtctcagtctcccaagtagctgggactggaggtaggtgacactagcctggctcactttaaaaacattttttgtagagataaggtctagccatgttgcccagggtggtctcaaactcctgggctcaagccatcctccctcctcagcc

SEQ ID NO: 160629 - DNA, 399 bp, Homo sapiens
tgcaagggaaaaggagaaaaagagatctatttttgtatctagttcctgaaactaaagctaaaaacagattagtattcaaaaaaaatcacgtagtggaaatcataacttccaacttattagaaaactcctagagtctcagggatttttttcctcccaattttttctctatcaacacggtgtctcatgaaaaggaaacagtcacaagccactgctccttctagtatcaggtattaatttcagtaagacgactttaataattcagaaatatcgactcaaacaaaacaatgtgtgtggtgctgcctaagaaccgacctagcgatgcatggtcgtggtcattactttgggaattgagtacgctagggtttgggaagacaaaacgcagtgtgaggcatcaatgaa

SEQ ID NO: 160630 - DNA, 498 bp, Homo sapiens
ttatagagtacctacagtcaacaaatatttgtagagtatctaccaatggctagatcctgctctgggcattaaaattatagttgtgagtaaatttctgttttcatggagattatattctagtgggatgaagacagataataaagacataaatcagtaagataatatcagaattgttaagaaagaacttggtaatgtaaaaggtctcactgagagggtgaggtgacactggagttgtgacctgagtgttcagaggaaacttccatatgaataccttgggattaaagtgttccaggcagagggtacagccagtgcaaatgtcctgaggcaggaatgagccagataagttggagaaagcccatcagcgaagcctcagctaggtgagggagggtgagaatgttgtgaggtgaagttgaagagtctggcaggcaggggaccaggaagggctcttaggacatgacgaatagggagtctggattcattccaagtaaaatggaaaac

SEQ ID NO: 160631 - DNA, 356 bp, Homo sapiens
aaagtgggcaatggagccccatcccagcactatcctctgcagtgcgaacaagtggccagtcccttggggagccctggattctgaccacagcccctcccctttctccttcatctcattcgccctcaccaaccctcccctggaatggagagatctgcattggcattccacctgtgcctctcccctgcgcttcagaagtacatgtatgttcctaccatgtgggctccagacacatcgaattcatcactttccgcagagctgcagtccccatcacccctgtcaccagcatggctgacatctctgtctgcagatggacaacctctccctcccctctgctccaccacttcctctcctccgtt

SEQ ID NO: 160632 - DNA, 411 bp, Homo sapiens
aattagccatgtatggtggtgtgtccctggagtcctagctatatgggaggctaataaggtgaagaattgcttgtgtccaggaggtcatggctgcagtgggttatgatcacaccaatgcactccagcctgggcaacagagtgagaccctgtctcttaaaaaaatttttttttttcctagcatgactcagaagagaagtcagagagatgtgctctggctaacctggaagaagaaagcaaacaatgtatgttgtaaattgcctatggtgaccccaaggcaaggaacttcaggtgtcttctaggagctgtgagctagaaggaaaatggaggtagaggtcatcatcctgcaacacccacctcccactccctactcaaaatgaattttatcaaaaaccagcaagcttgggtgaggac

SEQ ID NO: 160633 - DNA, 244 bp, Homo sapiens
gggcgggggcagggaggcggacggtccaggcgcagtccgtagggtgaaggtgtggagctggagtgcatgctgagcttggcttcctcaggtcctggcctcaccgggatgcccaggcgacaatgtatggcatcagctgtgagagcatgggcctggggtcagggacctgggctcaagtgtggtcgtgaacaaggcaccttgctttcccaggccttggtcttcacctctgtaaaatgggctgacagcc

SEQ ID NO: 160634 - DNA, 387 bp, Homo sapiens
tgctctgttgcctaggttggagtgcagtggcgcgatctcagctcactgcaacctccgcctcttgagttcaagcaatcctcctgtctcagcctctgagtagttgggattacaggccagcgccaccacgcctggctaatttttgtattattagtagagacggggttttaccatgttggccaggctggtctcaaccttctgagcttgtgatcctcccgcctcagcctcccaaagtgctgggattacaggcgtgagccactgcacccagccggggctcttggttttataagaaatttaatcacaagtcaaaatagactgtatttcctaagtaaccttagtatttttttactttctaaggaaaaagaaaaagacctccctttttaagaggaa

SEQ ID NO: 160635 - DNA, 325 bp, Homo sapiens
tgggcccaagtgtgtgaggcgtgagcacaggctgcgcatctgtccctgccttcataagactttcctgaaaggtaaattcacttaggcagaagcctcgaactccagcccgtggaagaaagtggggtcccattccgatgtgagctcatgatacatggaggaattaggcagttctgcatccgagctgtgctgcccactgggagcggctgaggggatgcaggctgggtcactggagttgtacaaatacagacagacaacatagcaaagctgcaaagagccaggctctgagtggacacacctgggttccaatcctcacctgtactggctg

SEQ ID NO: 160636 - DNA, 803 bp, Homo sapiens
ttactttgtgccaagccctttattgagataggcactattattatccccattttatagaagaaaccaaggcttagaaagcttaccagcagttggccaactgcggtgggctcatgcctgtaatcctaccacgttgggaggccgaggcaggtggatcacaaggtcaggaaatagagaccatcctagccaacatggtgaaaccacatctccactaaaatacaaaaattagccgggcgtggtggtgctgcctgtagccccagctactcaggaggctgaggcaggggaatcgcttgaacttattccaataaaactgctccttattggtaattgtgataataaaattgtaccatacttaaaaaaaaaaaaaaaacacaaaaaccaaaaaaaaaaaaaaacaaagaagcacaaaaacaaaaaaaaaaaaagaaacaagaagcaaaaagaggaggggcgggccacccataaaaccccccgcggcggggcggaacaacgaacgacgcaccccgcctgtgaagaaggggcgccccaacaagagacggaccaaaataaacagcacagggaagcgtggacgcgcgacaccaaccacgccgactgcgcgcggacaacacaaggccacgagcgggatctagtcgagaaaagacacaacaatccacgggggcggacgtcaacaatacgtggacgaccacacacacgacgcaaaaatgaccgaccgagcagcaaagacacaacagacgatgctacgaccggcaacaacaaccaatgcgcggcggcgacaaacaccgcaacgaggagacagagacaatctc

SEQ ID NO: 160637 - DNA, 100 bp, Homo sapiens
ccagaagggattctgcctaagtgtccgcctcacagagctgtactgtcttctcctggccaactttcaagatcaatttgattttcactgtcatcacaggctg

SEQ ID NO: 160638 - DNA, 158 bp, Homo sapiens
tgtgatacaagatgattgaggaaagacagggaaatgcaaagagagaggtaccaggaatagaacattgttaacagctggcatgccctgactcagggaatggaggggtatttagcctgtggatgctaaggatgtatagaatatttaccaattctcagagt

SEQ ID NO: 160639 - DNA, 432 bp, Homo sapiens
caaagacctatgacctatgcagcttattcttaaatacccagcctgtttgagggccagaatcctgagattacagtttatttaaggccaaaaggcaacaaaataagcccagtgaatgtgggtgtgtgactcctccagtcaacacataacctgaatttaaaacttttgtgctacaacaaatacaaggcttgtttgattaatggatttggttcctggaaactgtcttagcagaatttactttaggctttcaattttgtgctacgaaataagaagtttaaccaggatatcagttgttgcatttcctttgctattttcctaagagcaagactggaaagttttatgacactgtgttctcaggctggcagggtttaaacaaacaaggttccctggacatgagggaaggttgcctttgttcttgtcatagctgtgtcttgg

SEQ ID NO: 160640 - DNA, 340 bp, Homo sapiens
ttcccttctattcctactttgaccatttttatgatgaaaacgtgttggattttgtcaggtgattgaagatgctacactgctggcttagaacatggaggaaggagcccatgagccacagaatgcagctctagaagctggaaatagcaaaagaacactttctccacatagagactctagaaggaacacagccctgctggcactttgatttttaaacaagtgaaagtcattttggacttttgacttccagaaatgataacatgataataaatttgtgttgtcttaagccactgagtttgtgataatttgttgttaacagcaataggaaactaatagagtagta

SEQ ID NO: 160641 - DNA, 128 bp, Homo sapiens
aacccagccgtgtcttgttccctgtgagcctccgggtccggcggggtcctcaggggaacaggtgaggccccccagctcctgagtccagccctaggtctgtgcggctccttagggggcggcatggggct

SEQ ID NO: 160642 - DNA, 342 bp, Homo sapiens
tgcccaaaaggaaagtcactggaaacagaagatgtcatttccaagtggctctaaactaataagatctgttaaagggacaaaccagcccaaggaacacatcacgtgcccctccatctgtcagggacaggagccaacgggcatccgatgtgcactggtgcagcacccactgaggcacaggcagtgcccccgcggctcatccacatatccctggagggacacatcaccaaaggccaaataaaaacgcagctggaaacgccagcatccccggcacagctgcttcttattaaaagaaaaatggcacggggcgcctacatgcctgtggagtctgcttactgagaaaac

SEQ ID NO: 160643 - DNA, 327 bp, Homo sapiens
ctcataaacaaattcacacgctgactctttgggcaaaagaaaggcaaagattaaacaggtgcaacccagcaggatacacacgcagaactagactccgctcagcaactccatgccacagaaggccgctttcggaaccgcaaggatcagttttgggttctgcttgactttgatgataaatatggaattaaaaaatcaatctatgaaaatgttatttaatctcagaaatctttcctgccttattcattaatgtgattatttgtttcttagtcaatgccaccttcttctataactttctacgtagagggggaaaagccccagtatttagca

SEQ ID NO: 160644 - DNA, 355 bp, Homo sapiens
aaaataatatgaagctattctaaactgaagccttcacagacaatttcctggcatacaaatgcagttatagaggagatggcgtgtgggtgacattatacacaaccaccctgtgagatttagtatccctattttaagggaggaaagtctgaaaaactgacttgtccaaggtcatctgctgccacagtgtcacaattccaacccctcttctcctccatatcagtgattttaacaccatagggactgcacactcttttatacaaatctcatttttaaaatctatttgaaactccgtctaaattgtacttaaaaataatggcctcaaataatattaacaaataatctgtctattggagat

SEQ ID NO: 160645 - DNA, 537 bp, Homo sapiens
atgaaaagaatgaacttcaagatcaggttcccaggaatacaaggatgttttatcccttaaaaataaatacatgtaatgtatggtgccagccatgattaagtaagccccctagtttatcactcccactggttagagttaaaacttttgaaaaaaaactaataaaaactacttgagaacttttaaaatgaataattgcaaagagattggagaataaagtatagagttgaaaaccaagcaatgcacagagtaagttccctcattttttttctgtctatatctcctgcctttgacctaagggtaagacaaattaggaaattgttagtccaaactgcaccattttggaagccccccaccatttcacaaaacctgatcaaagtgaaacattccacagggggttcgggctgtgagaaacatcctgcctcttatcatattctgctgggagaaagtgcaaggaacaccactttccgcgggaatcgcctcatcctgggaacatgtccccccaggcccctctcacccaggcctataaattgccccagc

SEQ ID NO: 160646 - DNA, 543 bp, Homo sapiens
gcgaatcctgtggcggtcgccaaaggatgcatcagatctatgtcctctttggttaagtctccactgactggggggctacagcccccaaatcctccaaatcttcaccgaatccctgctccgtttcgctttctcgcaccccgttgtctgggcctgtcacatcttggaggccactggaactctcgagggcgaggcctgagttgggctgactgccagagacagacccctctgggtctcggtgaaccagccaggcatttacctcagtggttggcacctggaacctgtccagggccctcacctgactgaggagccgccgggcagtgaagtaattgtccaggtctatgctcttggggtggataccatagccatccaaggtattcctcaggttgtggaactcggtcagaggtgcacctctgaccgagttcctaaagcacccgacacctaaagctttaatgtatcacaaggtggaaagtggtttctgcttattcaactaaagattcttttcctacagagagctatgagactattttaccattttgtctaatt

SEQ ID NO: 160647 - DNA, 169 bp, Homo sapiens
tctcttctacaaccagaagaaggaacagaaattacagtatggtgtttctataagataaatgaaagaaatcagagattttaatgaagaccaatgttacattacttagactgctaacgaatacacatcaaataacataaccaaaatacatcttggccagaagtaatatgta

SEQ ID NO: 160648 - DNA, 501 bp, Homo sapiens
ggctcactgtaacctctgcctcctgggttcaagcgattctcctgcctctgcctcctgggtagctgggattacaggcatgcgccaccatgcccgactaattttttgtatttttagtagaaacggggtttcatcatgttgaccaggctggtcttgaactcctgacctcagttgatccactgccttagcctcccaaactgctgggattacaggcgtgagtcaccgtgcctagccggcactcattcttatgggctcacgcaccaggggtggaattgttggatcagttgccattcatttccccgaagctgccggattcagatcccaccagccacgttggtacttgctctccgcttcctgtgtgtagacaggaggcaccatctctgtattgactctgtagcaatctggagggtgcaacgtgcgatctcattactgcttttcttttatgtccttttgtctccatgggaggttgagcttcttttcctacaagtttacttactgtttgca

SEQ ID NO: 160649 - DNA, 302 bp, Homo sapiens
ggcttaaacaacagaaatttattttctcacagttctgcaggctagaattcccagaacaaggtctgtcagggtcatttctgatgaggactcttttcctggcttgcagattacctcactatgttctcacgtggtagaaaaagactctctctctctctctctctctctcttgcttgcttgatgacctcttaaagatctcacctcttaatactgttacaatggcaattacatttctttttctttttctttttttgaggcagagtagtgctctgtcacctaggctagagtgtaatggtacgatctca

SEQ ID NO: 160650 - DNA, 448 bp, Homo sapiens
caggatgggtacaggggcactggtcttaaaatttagcgttcccaagtcacgtcttttacgaatacacacgcataccctctgttgtggatggtaggcctagcacagtccagtgaaggacggacctggtgtgtgaagcaagtcccatgccctaggattaggaaaccctcacctaaccgtggtgtcccttggtgtctctgcaccttagtctaattttcaatcttccactagccagagatcaagtcttgatgctatccagttgaaacctagtctcccgtgaaacattttcaaggtcggggggtttcaggaggacactgtggcagaaaagccaagtctctggcaaacatgaggtagttcaataggctgggtcctccatatagttgctcttcgtggttagaaaaacaaccagaagtattcctgctatgcaggcctggagcttctgccgacttat

SEQ ID NO: 160651 - DNA, 258 bp, Homo sapiens
cgttccgacggggggagccatacaacgggggaaagtcttcctagggacaacatttacatatgtgcctttgtcagggacatcggatcctcaggacctatcatagattctatccctctggtgggcctctgcaacagttgagatctggttccaccctctacttctcttcagccctctcctgcagcatcccaccaccgaaagctcctcctctgaaacagttccgactctcctctaagcccccacctacttcccagcctccgt

SEQ ID NO: 160652 - DNA, 421 bp, Homo sapiens
gtttcttttatattttccctaagtgtcagccagtctgagaaataaagagaaagagtacaaaagagagaaattttaaagctgggggagacatcacatgtcggcaggttccgtgatgccccctgagcggtaaagccagcaagtttttattagcaattttcaaaggggagggagtgtaggaatagggtgtgggtcacagagatcacatgctttaagggcaacaaaagatcgcaaggcaggaggtcagggcgaggtcacaaggtcagggcgaaactagaatcactaatgaacttccatgtcccgctgtgcatgcattgtcattgataaacatcttaacagggttcaagagcagagaaccggtctgactagaattcgccaggctggaatttcctaatcctagcaagcctaggggcactgcaggaga

SEQ ID NO: 160653 - DNA, 665 bp, Homo sapiens
tggctgtactagtattgatttatttactttcttttttcctgtttacttacaatgctatgaattaaatgttcatattatggtacatgataaagtgtgtggctgtgtgtgtgttcatagaggtggtaagaagtatttaaatggtcttacaggttaacaggtgaattaaaattcagggctggtgttactgttgacagatttgtttctcagagatggtggcttgctttttacaaattatatcattctactatgtcttctttttttactccactcagattcgaaatcagagcaaagcctctgggtctgggctctgtgagggagatgaagtggtttccatcaatggcaacccttgtgcagatctcacctaccctgaagtcatcaagctcatggaaagcataacagactctctccaaatgctcatcaaaagaccatccagtggaataagtgaggctttgatatctgaaaatgaaaacaaaaacctcgagcatctcacacatgggggttatgtggaaagtaccaccctgcagattcgaccggccacaaagacccagtgcacagaattcttcctcgcccctgtcaagactgaagttcccctagctgagaaccaaagaagtggtcccgactgtgcaggcagcttgaaagaagaaacaggcccgagctaccaaagg

SEQ ID NO: 160654 - DNA, 648 bp, Homo sapiens
ctggggcagcggctgcagcagcggcggacgctctgcattacccagtcttgcgtcctcggcaggcgcccgaagctgagtgcgcatcctctaccgcacccaagcttcgtctgtctcgtcaagctcttcatgctgcccaactaaaaggaaaacatgggcacaggggattttatctgcatttccatgactggaggggcgccctgggggttcagattgcaaggtggcaaggagcagaagcagcccttacaagttgcaaagattcgaaatcagagcaaagcctctgggtctgggctctgtgagggagatgaagtggtttccatcaatggcaacccttgtgcagatctcacctaccctgaagtcatcaagctcatggaaagcataacagactctctccaaatgctcatcaaaagaccatccagtggaataagtgaggctttgatatctgaaaatgaaaacaaaaacctcgagcatctcacacatgggggttatgtggaaagtaccaccctgcagattcgaccggccacaaagacccagtgcacagaattcttcctcgcccctgtcaagactgaagttcccctagctgagaaccaaagaagtggtcccgactgtgcaggcagcttgaaagaagaaacaggcccgagctaccaaagg

SEQ ID NO: 160655 - DNA, 453 bp, Homo sapiens
agcattcacagttgccaacttgcatgctccaccgatgtttcagggcatcgtctattgacactcatattgctttcattgatgtaagagaaggtcaaggagttaaaaaatgaagaaaaagaaagcagaagtaaagtaagaggtatgggaggaaagccaggagtcagcactgatctgtaagtttggaaggaaagacagtgaagagaaagcctgggtccatctctccatgagctgtcaatgagggcatgggcagccttccaaaaggttctcagcagggctttgagggtagcagctcttctatgaatggagtggcaggaagatgaataagaggaagtgagtgcctgttactcctctaagaagaggacaggggagtgaaggagagaggagagggggtatcgggtgcctttatatagaaagaaagaaacataagcctgtttttaaactgtaaggatctga

SEQ ID NO: 160656 - DNA, 128 bp, Homo sapiens
cacacatccccgggagctgggcaaacaccaggcagtggccagaaagccgtctgaatatccaagggtctccatgaatgttcaatagtaatatgatactaattctagactgcttctggtaagaacctcgt

SEQ ID NO: 160657 - DNA, 466 bp, Homo sapiens
tagaattcagcggccgcttaattctagaagtccaaatcactcattgtttgtgaaagctgagctcacagcaaaacaagccaccatgaagctgtcggtgtgtctcctgctggtcacgctggccctctgctgctaccaggccaatgccgagttctgcccagctcttgtttctgagctgttagacttcttcttcattagtgaacctctgttcaagttaagtcttgccaaatttgatgcccctccggaagctgttgcagccaagttaggagtgaagagatgcacggatcagatgtcccttcagaaacgaagcctcattgcggaagtcctggtgaaaatattgaagaaatgtagtgtgtgacatgtaaaaactttcatcctggtttccactgtctttcaatgacaccctgatcttcactgcagaatgtaaaggtttcaacgtcttgctttaataaatcacttgctctccacg

SEQ ID NO: 160658 - DNA, 218 bp, Homo sapiens
ggaatactatacagcgatgaaaaagaacacatggctgctacatccaacaacatgcatgaatcccagacatgatgagtaaaagacaaacacaaaagaaaacatgccttatgattccatctatgtaaagttcaagaaaatcaaaacctaatccgtaatgataaaagtcagaatcgttcccttctgtcggggggacattattgatgggaaggggtacgaag

SEQ ID NO: 160659 - DNA, 182 bp, Homo sapiens
cttccatccttccatccttccacttgggtctttgacttacggcaaaaaattccaactaagaataaagctgaaccaaccacttcctgagcctcagaggctagtaggtcttgaggcacccgggaaacaaaaacatcatagttacagctctgctgccctgagagctgggccatcctcttttctac

SEQ ID NO: 160660 - DNA, 325 bp, Homo sapiens
aaagcatttcaaactcaactaaaagacatttctttcttagtaaggctaaggctttcagacacatttcaaaaatgaagctaatgaacaagtgtcaaagtataaaatatttggaaattatcaaaataataatgtatacaaaaactcaacagaaccaccaaataaactgattaaaaagatagtaccacttacggtgttctttaattccataattgtgcacgggacctacaacacataagtatttcacatggccttcaaattcaaacaaatcagtgaactcacaaatgggccctgggtccatattatcacaaatgccagggtatagcat

SEQ ID NO: 160661 - DNA, 444 bp, Homo sapiens
ggtgctgacagacactgtctgtcttatgcccaggcctaccccattgctgtcgatgcaggtggcattgctgaggggacagtcacagcttgggcctgtccaaccaggctcacacacacactggcccatggagcagcgtcctcggtctgcagagagggacaaggaagggagatgagagctacatctgtgcctgtagtccaggctgcccacctggcagggagggcctgtgggagcagagctgtgggagccaggatgccgctagcctggggtagaagtcatctcttcctcactttcctggaatctccttccctccatctctgcctccatcctacctaccttccactctgcagcctgagtaattatctcaaaacaaatccaatcatgtggctcctgctcccctggctaagaacctctaatgggtccctgccaatgcaataaggtcagaaa

SEQ ID NO: 160662 - DNA, 507 bp, Homo sapiens
ctggccgacctttttctttctgttcttctggacattagcttaagaatgggcagaaactagagggataatgaataagggagtgcctctttggtgttctgcctttagcagtctggagactttctcacatttaccaaaagcaaagaaaagagaagggcccatttgtaaaaagtgccaataagggtgttaagagataaaagaattccagctgagggaggtatcttcctctttgctgcagactggatgttttcttggatatgtgacgggagctaattttagaaaaaatgattctcgaaagaaaatgactgctgaaggccattaagatacacgagtatctcaccacagctcacatgctaaatcttctttattatttcaacattaaaataaatacttagacttagcattagtccagacaactctttgacacaaaaaaaggacgtgagtgtgtctcagacccacagaaaacttggccagctggcaattaatagcagacacatcaatcaaaatgtg

SEQ ID NO: 160663 - DNA, 304 bp, Homo sapiens
gctttgtgtattatttctttcttttgaaatctctgtgagtcccagtctacctctcatccactcacttattcattaagcaaatatttgctgattgcatactctatgccaggctcacaggtagcctggaatggaattattaaaactagaaaatcaagatctgaacataaatggcagctttatcaaggggagttgatgatgtttaaaatgtctattttaaacagtgaagaaaagaagctgtatcttgggataacacagaagtggagtaaaaggttatacagaattcagctctccagcaaaaccacct

SEQ ID NO: 160664 - DNA, 186 bp, Homo sapiens
ccacccccaaaaaaggcagtgaggaagaaaagaactgaggtctcttgggttctccatatagagcaggtgtaaggaattttctgaatcctcacgtgcaccccacctgggtccacctcacaaatgaaactaaaccttacaagtttctctactatttagcaacgaattatttttggttaggtttcatgc

SEQ ID NO: 160665 - DNA, 401 bp, Homo sapiens
aagaaaaaaatttataactgttaaattttattcagatatcttgcagtatttacactcaggtagaaaggcctgaactgtttttctcagtcttatattctttaaatgaatcacataatcaatttttacctgtagctttacatgccttgaaaagtaagaatccacagaagactaactttcacttctttttcatggggattctttctccacacctgaagctgctgaattagttgatgaaatgtttttcttttgttttcatattgatcaataattgctcatgaataacttcatttgaaattaaataatatcacagaaattattgaaccagcttaagatagattattttaagtggtttcttggtttccttataattacagaaagtctacctataaacttgacgatat

SEQ ID NO: 160666 - DNA, 637 bp, Homo sapiens
aaaagacctaaacgtgtatgctaagattactgtcttgaatctgaaactttgttttctaatatttgctagatgataacaactccattaagtcagaaaccacattaatctttttcactgctttaatttaggactgagcacttaggtctcacacatagtaggcagtcataaagtatttatttaataaatgaatgttcgtctaacttcttaatttaatatcctatttccttgttcaaatgacttgatttttattttgcctatcagttatctgctaacacaaacattcagatctatagttttaaagacttgagataattagaggcttctaaatgcttacattcaatcatgataatttatattttatttctatcactatctgcatttccgtttcctttggttaaaagttagcactggtatctttcatttactttgtgaccaagtgactattcattcaaccataatttattaagtctctcaactactgggaagtaaaagacatgaacataagtaagaactctgcccactttcagagctcccagtctagtttggatagaaacattcaaataaataattgcagtacaatgtgataatctcttaactgcctatttcagcaggccaaagcaaatagcaatctaacact

SEQ ID NO: 160667 - DNA, 368 bp, Homo sapiens
gcagagaacccgtatataggtgagcctggagatgggactggattgctgcaatcccatgatcaaacttgaacagatgaggagttgcttcttatggatgagcagacaaagtggttcctggagatgggatctactccaggcgaagatgctgtgaacattgttgaaatgacaacaaaagatttagaatattacatcaacttatttgatcaatccgtggccagggttgaaagaattgactctaattttgaaggaagctctattgtgggtaagatgctatcaaacataatgcgtgccacagaaaaatctttcatgaaagaaagagtcaacccatgtcaaaaacttcagttaagaaactgccggccaggtgcagt

SEQ ID NO: 160668 - DNA, 315 bp, Homo sapiens
tgcagtggtttaaattcagtagatgattttggagagcacacagttttaacaaatatatcttgataaggttgagaaactattggagacaatctagtaaactaagaagtacttgcaacgtgatttttcatgcaaataagttgcaagttagccttttcccttcgtgtaaaatatgtactattccagagagatggggtccagactattataggcatagtataatgaacctcactgcagagtgtactcagccaggagctggtgatttggctgtaatggttactgaaatattctgaattggttgataaaagctgctgccct

SEQ ID NO: 160669 - DNA, 546 bp, Homo sapiens
gatggcattcccaagccccactgcagcagcaagcactgtaatttgtcccactaatctcccatcttctaaatttctgagaggtcaagaaaagaggtctcttgattcctttaggaactgctccctaagcatacagggagacatagatctatgtggagcaaagggtggattgtaataagcaaagagatacactgcctgattcactttaagaaaggactgacctcccagttgcaaggaatgaggtcagcagcctccaactgtcagctccttcagagtctgcttcaactgcagaaggacactgtgcttgaggtcatacccttcccatgtctggtgactgaagtccagctgaatgtagctgccaaagttaccttaatgcccatgggaagcaaaaaatcaaagagtttaaacagaattttgagaaatcccaaatcagttttttttcagcatatgacattttggagtagtttgttattcagcaatagataacagaaattggtatcaggagtggggtgttaccataacaaaaggttaaaccttacatggtaaaaa

SEQ ID NO: 160670 - DNA, 243 bp, Homo sapiens
tatgcagtaggtgctcagtaatgctgggctggtgtgcagtaggtgttcagtaatgcagggccggcatgcagtaggtgctcagtaaatgctgggcgggtgcacagtaggtgctcagtaatgctgggccggtgcacggtgggtgcctggtgaacacgtgcctccctggtcatcactgctgctcagttcagggcttagggatggacgtgccatctcagcgagctcgagggtcaaagctctgctatg

SEQ ID NO: 160671 - DNA, 154 bp, Homo sapiens
tccaaaataatccttgaatattcacttaagtggaatgcattagagcagctactaaaagtgaatctcctttttgtcatatgaatcagcacctcataatttatatgcttggtaaatgttttaccagagagtggactttcttagttttttttttttt

SEQ ID NO: 160672 - DNA, 562 bp, Homo sapiens
gcaggcaggcggggcagaaatcaggaagatgggagagaatgacagaatttggagtactactgagacctacactacaggtctcctatagaacatgtggtgggagcagaataaatgcatctttctctttgtgtctgtcctggtacaaggaatgtttggggcattggtataagaagctcccagagaaaaggtgatggtgacttagctttgtgcactgcatcaccctcacaggcaacgctgtctgctctaggcgtgacttgcactaagtgaatgtggacaagatggccactttttctagatccttctggggaagctgttagttgtaatagtgttagaacctaagagctagaagagactttggagatgatttactgcattttatgttagacttagacaatttttttacaaaagggaaaaattaaaaagccccagagagacctggacttactcaaagccacacaagtagttgagcacagtggctgagatgaatcattttgtgtctttccccaaggatctctctttccttgtccctctgtctatcctggtcaatagcatcattgtttga

SEQ ID NO: 160673 - DNA, 437 bp, Homo sapiens
agagaggagaacaatataacagagtaggctataatgtcaaagtcagaggttgtctgccaatgttatccacaaaaacttctcaaagctcacaagtaatatgtccaatgtggtctcatgccccttctgtgctaaaaagaatccggactaccaagctggcagccctatgctacagtaagcagagttgcaatctatagccagatcccttcaacatggatgagctggggggaaagcagaactaggaagccaagaggacagacagataaggaggtaactatgcaaacaactttccagataccacgacagcacttaaaagcagatcctatacaaagtctttcttgccttaagttcagaatacaaattactgccactcataaaacagcatttgcctgtgggcaatacaaagatgtaagagacactgaacacttaccttcaaggcg

SEQ ID NO: 160674 - DNA, 646 bp, Homo sapiens
gctgtgagctcagccttgggggtggggtggggacgggagtgtgccatgaaaaggcttggcagaagtgatgctggagctgagtctaaaaggagaggaggggaggcttagccaggtgagaatgaatactttgagagcgagatagacaaataaactcatagtttattccagaaatctcagattgttcaatctagtggtatggaagttgatatggtgcaagtgaagcagtataggttcatgaaagaatgccatattagcaatttgagatatcatgcccagggcagccgggagcaagtgaaaaggtctgaagcagaggaatgacatgattggttacatattttagaaagatttcactggagtcccagtagaggagggaaggaggaggacaggagcgactgaagggctggagaactcttcggagacaaacctaggcttctgagagaggagagttggtgctggggcgatggatctttgctgaggaagcaccatgtgcaaccagtgccagatggcaagctcctgcattggcctgggcttctctgcctggcgcagaagtgcctggcacatgtgcccctctcttcctgggattgtaggttgcttgagcagctggagagataagactgccctctcagaaggccagttgtaaagggtg

SEQ ID NO: 160675 - DNA, 230 bp, Homo sapiens
tctatgcatgcttgaggtttaatttgctttcttctggcttctgaagatggacattaatgctgttaattttacatcttttcttccacacaaagcatttaaaactaaatttccttccaggcagtaagttagctgcgtcccgtgaattttaatacgtcgtattttcattatcattgagttagaattgttttctaattttctttatggtttctgattttatccatagattattg

SEQ ID NO: 160676 - DNA, 442 bp, Homo sapiens
tgtgcctcagcctctggagtagctgggactacaggcatgagccatcatgcctagctaatttttatatttttagtagagatgaggtttcactatgctggccaggctgactttgaacttctgaccgcaggtgatccacccgcttcagcctcccaaagtgctgggattacaggtgtgagccaccgtgacttgccaggaggattttaaagaccacggtgaatcagccctccacaacacagtctcaagcttgttttctcttccacatttgttatcgagttgacaacaaataaaagagtcataaacgacagagatttgagcggtgtctactagccctacccagcaagtattacacaaatcaggaaacagatccccaaggacagtgagagctaatgcacatgtggaatgagatccagcacacatgtgcagtgggatccagtacacgtgt

SEQ ID NO: 160677 - DNA, 493 bp, Homo sapiens
atataaataaattattcattgcctattatggagatatagtgcttgactcaggagtacacatgaaatgtattcctaaaaggatctgtgtggagttgaaaaggcttccattacactcttttgactcataggagagtgctttttcttttatcgttttcctgcagctatacaactcctgtttctctgaatactattttcatttgttctttccaggctagtacagtattcatgcattcttttttcctttctctggtataaacttttttttaaaaaaaaaataatgctatttagcacttctttgcatgtttttagtgtttactaattatctcagttttattaagccattttattgactccattttaattttcctgaagacagtattatatttttggggaaaagatcctcacctgtccccaacatactcgtgaatatgcacacacaccacactcacacgtgcacatgcacacacacaatctcactctatactttttgaaa

SEQ ID NO: 160678 - DNA, 467 bp, Homo sapiens
aggcacacacaggtatcagaagggtctcacatttacacctttacctcggggtcaacctcaggcacacaatagtaacacctagacctccttcacattgaagcacacacaggatgctggtaaacctttcagacacccttggacagcattcttgagctgcctacacacaggcgatgcacccgggcctcccacccaggtacttacacacggtactactgaggccctctcaggaacactcaactcaggtgagagcctcattctaaaacacacccctgggcctctccaaggtaagtgaaggttgtaaccacagagttctgtccccccagcacaggtggggaaaaaggcagaagcagccaatggggatgcagacactgtcacagaaggccactgcttcatcccccttggccctcccttcagtccagcggctctcccaggggtcaaacaaggtcttgtcttctctttcctcttct

SEQ ID NO: 160679 - DNA, 531 bp, Homo sapiens
aggcacacacaggtatcagaagggtctcacatttacacctttacctcggggtcaacctcaggcacacaatagtaacacctagacctccttcacattgaagcacacacaggatgctggtaaacctttcagacacccttggacagcattcttgagctgcctacacacaggcgatgcacccgggcctcccacccaggtacttacacacggtactactgaggccctctcaggaacactcaactcaggtgagagcctcattctaaaacacacccctgggcctctccaaggtaagtgaaggttgtaaccacagagttctgtcatacaggaggtccaggtcctcctctgcctcggggatgtgctccgcagggtcctgctccgagtccaggtcctcgtcggacactttgaacctccgcagcagcgctaccactttctgcttgaagttctgttgcctggtcatggacgtcgttcttacaatcgatctccgctgcttcttcggcttccccacgtcaaagtcgtcctcgtccaagtccgagt

SEQ ID NO: 160680 - DNA, 430 bp, Homo sapiens
gatataccaagttatttaagttatatattcagcatcttttgagctttaaattaaaggtgcttaatgaagggttggaagatggtagtcatcatgtattttcagtttgattttagttctggaggtaaatgttttgttgtatgttaaatggtttactaagtccatatttgtgttgataaatgtgcagcaaaacaatgtgattgatttttgtctttgaaaatctcgatgtgagaagaaaagttgactgaatcatgaaaagtaatttcattcttggtggccttttaccttaagggcagaggcaagtcctggctttttcacgttgcagatgttggatgcagcctttcttttgcaaaataagaattataatatctggccaggtgtggtgactcacgcctgtaatcccagcattttgggaggccgaggagggtgggtc

SEQ ID NO: 160681 - DNA, 388 bp, Homo sapiens
ctccagcccaattcctccttgaaatgactcagtccctcaatggagtaagtgagacagactcagcggggccagacgagaggaaggaaatactgctgggcacatgcatggccctctcctgggcaccaccatagcagcatgagtgaagctgcagcctgtcatctccaccatctgtgcccttgaaacaagccagatactggctggggaaagcatccttcaaaattcactagttcatcctggttctcaccttcccaacaatactgccatttgaaggaggcaacatgagtaaagagcctagaaattaaaagattagcccactattaatttagcatattagaaaggccttctttggttctcacacctgcaaaacaatggaaagctggtccgctgt

SEQ ID NO: 160682 - DNA, 721 bp, Homo sapiens
atagacttctcacacaatatggcgatagcacagcggtatgctagtagatctttaataaccagctttccagaaaggtggaggaaaccttgatttgtagcttttacctgtgtccatggcatagtactcccaccatggccaatctgaacctaccaacgtgacatcactacataagcagctgggaagagatgtgcactatcaactctcaaatgccagtataaggtgcctcagcacaccagtgtttgcctgcagtatttaagtacttaattactaagagtgaaaagatacagaaaacattaagaccaaaaatacatattgataggatttaaaagtagaaggtaacagccagccgtagtggctcacacctgtaaccttagcactttgggaggccaagatgggtaaatcacctgaggccaggagttctagaccagcctagccagtatggtaaaacctgatctccactaaaaatacaaaaattatccgggcgtggtgacaggcacctgtaatcccaggtactcgagaggctgaggcaggagaatcactttgaacccaggaggtggaggctgcagtgagccaagatcacaccactgcactccagtctgggtgacagtccatctcataaacaaataaattaaattaaattaaaatagaacgtacaacgtcatgaagcaattcatgatctattgctggaacttttcttttttttttttttttctttttgtta

SEQ ID NO: 160683 - DNA, 271 bp, Homo sapiens
tgctgcttgctgtgctatgtgtagtcttatctttgacccaggagtctcatgtcttcggtcagctaccgtgaaacagttaacaggctacaatgtattagtttataaacagtgtaaaattaaatactgacagacacctctctaacactaatctccctttttaaaataataaccatttggctcagagcctacaacaggcaatactgtctgataacattgttttgtttttataatatttatctttacagttaccttaccagtggcaactgtcaca

SEQ ID NO: 160684 - DNA, 417 bp, Homo sapiens
tgctggggccgactcccaaacggggctgtcgaggcccggttggctttcagaggcgtatccatgggagtaggtgtcatgtatcaaataggagattcaaagtcagctgttaccacggctacagaaatgccagtcttttcctaagagtgcgaatggacacacacatgtgcatacgtgcacacatgcaccctcaggctctcacggagccctgggtgcctacagcaggacgtccaggacgggaacaccacagtgcactacgccctcctcagcgcctcctgggctgtgctctgctactacgccgaagacctgcgcctgaagctgcccttgcaggagttacccaaccaggcctccaactggtcggccggcctgctggcatggctgggcatccccaacgtcctgctggaggttgtgccagacgta

SEQ ID NO: 160685 - DNA, 373 bp, Homo sapiens
agttgattttttagcctatttggagtttatgagaaactatagtatttggaacacgaatgtatttttgaagacagatcctttgcataggttacaggggtagagcagagactgtggtataggaggaaagcttaggtcatcgtgggtaagactgttgcacatgcatgagactcatttgcaaaaccaggctctaaaatgctttacaaattttagtaaaggaagtaggtgtggagtacagtggagctgaaatgtaaacttgtgttaatttttaaaatatacaaacattaacttgcaaactagtgagtttgcttgtgatttacaatatcttaacaattatccatgtgggccaaaaacacagatttgtttaaaaaaaaat

SEQ ID NO: 160686 - DNA, 160 bp, Homo sapiens
aactccaactgccgagactcactgtcttcacattatacattctcctagcaaaatctgcaccctaggtaaataaatccctctaacttttccttgcctatactcaggctgcttagcactgcaagatgggaagaagcaagaaaaaaaggtttcactacagatt

SEQ ID NO: 160687 - DNA, 613 bp, Homo sapiens
aatttttatgagggtgagggaataaaacttctacaagtttgactatataagcagtatctttggagaacaggaattaggaactttatgtaaacagagacaaaacataaaagaactatcagatggtaaaattacctcccctcaggagagctaaattttagtgaatactttttacaaaacagttcaaaaaattgattgttttttaaacccaaaccccgagaaatgagatgagaaaatgaatagactgatgaaaaaagtgtatatatataaatcatcctcgattttaaattctttttcctcttggatgccatattaaactataaactgaagtatccaacattgagagtactcaacagtgtttatttgaggttaagatgttctcactgtgttatcagactaacaatgtaacaaagagaaaaagataagaaatgacttcttaaaactaaaaatgttgccagtcgccatggcttatgcctgtaatcccagcactttgggaggccaaagtgggcggagagcttgatcccaagagtttgagaacagcctggacaacataacaaaaccccatctctacaaaatacaaaaaaattagccagacatggtggtgtacgcctatagt

SEQ ID NO: 160688 - DNA, 275 bp, Homo sapiens
gctcatgcactacccagggtcccccagctccaggggtggcaggcacagtgggctctgtgaatggcaccccctggagttatgcaatgtggtagctagagtgggacccctcctgtcacctgctcacctcctgcttctcctgagatcagcaagggcacgacatcctccagggtcggagggcttcctgtgaaccctcctggtgccgcagcgtggacaccctggtgtgttcaaggtgtctctgcacctgtcccatttcataacccacccctcaaggccag

SEQ ID NO: 160689 - DNA, 420 bp, Homo sapiens
aagaaaatgttttttgttctataaaaattataataccattaaacacagatatttaggttatttgacattggttggtcaaggttaatgagagtttttgttaatggctttctatgtttagttttctcataaagcagatttatttctcatgtgagatatattcttttgcttagattcctttgcagtattccttatgtaataactaagtcaagatggattttaagtttgaaagtgaattaaactagacacatttaaaatttaaaaaattggtcaggtgcagtggctcatgcctgtaatcccagcactttttggaggcccaggtaggaggattgtgtgaactcaggcattaaagaccagcctgggcaaaatagtaagacccggtctttactaaaaataaaaaaaattgtttaagtgtggtgctgc

SEQ ID NO: 160690 - DNA, 291 bp, Homo sapiens
gatgcccagtgtctcctttaaggcagcaggaagcaggtgatctttgtcagtcacggcttccaggcagagtgactgaagtctcataaaggggtgggtccccaggatccaggggagcatagccacaggacccctattccacttgcgaggctagtacactggcgaggctaggacactggcgaggctaggacactggcgaggctaggacactggcgaggctaggacactggcgaggctaggaccactggcgaggctaggacactcgcgaggctaggaccactggcgaggctagga

SEQ ID NO: 160691 - DNA, 286 bp, Homo sapiens
gatgcccagtgtctcctttaaggcagcaggaagcaggtgatctttgtcagtcacggcttccaggcagagtgactgaagtctcataaaggggtgggtccccaggatccaggggagcatagccacaggacccctattccacaggcaaggccaaacagccatggcaggactgtagttcattcaaaggctttggtgtagggcctgggctggagctcagagccaggttccaaagggaagggctgcgcagtggttagggcacagctgtggccctgagggatggggctgggat

SEQ ID NO: 160692 - DNA, 309 bp, Homo sapiens
ggagggcatagcaggacacacgtgtgcccgtgtgattggcattcaaggacgctgcccgcaggctggaatgctgcccgtttcttcagtagatttgtctttccctgaccagcctgagaatttccctcagttctttttctgtgctgtacaaaagccctgaaactcccaggaatccttggtaggttccatgcgggaaagaatggtttcttcagtcatcgtattttgaagctggttattgaatgaaaactaagataagcttagaacaagtttaattagtttaaaatgaaaagctagatgggcctagaagaggaa

SEQ ID NO: 160693 - DNA, 180 bp, Homo sapiens
cttgaacccaggaggcagaggctgcaatgagctgagatccatgccactgcactctagcctgggtgacagagtgagactctgtctcaaataaataagtaaataaatcagtgttttataatctcaggaaatgaatcaaatatgactttagctttgtagaaccaacttggatttcagttgtta

SEQ ID NO: 160694 - DNA, 243 bp, Homo sapiens
caagtcctcaaaaatctctagctatcattattccagaaagtcatgcttctccaaagtctcccctaaagatcaaaaagaaccaggctgggcacaatggctcacgcctgtaatcccagcactttgagaggccaacgcgggaggatcacttgagaccagtgtgggcaacatagggagatcccgtttctacaaaaaaattttaaaatattagtcaggcgtagtggtgcacacttgtggtcacagcta

SEQ ID NO: 160695 - DNA, 175 bp, Homo sapiens
cctacgaaaaacaaagctggatctcaatctcactatatatgccaataaattacaaatcaatcagatttaaaccacaaaatactcaaacaataaagctctaaacaaggggaagagctggtgcgttgggccgtcactgccaacgtggtacctgagctctgaattctgtaatctatgg

SEQ ID NO: 160696 - DNA, 512 bp, Homo sapiens
cacaaagaggagtaagtggtagggacaaagctgaaagcaaaagcagtaggttcctggaaatggcaggtatgccatgtccctccctcacacagcccatagagctgatgtccctgccatggctgtccgtcctggcattgctcgcaataccagcaagaagccaggccaggagaaaaccaggggcctggagattccggccaaatacagggacccaaaggtacttagatgctgaacctgattcttgacaggcccaggtgatgctgagaaaccaaagaacaacactgcaggtgcccctgactttaaggacaacccaccccatccagcacacatacatccaaggacttcataggaacaactggataggcctaggttaggagagggtccttggctgctctgaagatggtgagtatctcaactgttcccagtgaattacacgtcagacttcttcttccactctttctccccatctcactactgcactcgactggtcttaaaaataataataataaaggctg

SEQ ID NO: 160697 - DNA, 149 bp, Homo sapiens
aaatgagcagacgctggaacaggaaggatagttctatgtcattggatgggttatgaatttccctgagcctgactcagtttcctcagctataaaatggaagtcattgtaatacgtaagtggccaacatttatccttacattgttctgtca

SEQ ID NO: 160698 - DNA, 177 bp, Homo sapiens
gcttgtgctgcccccagctccctcccaacaaaaccaaaggccattcatgctaaaagggtcacttagtccaaaccttctggtcacaacagaggaaggtgctctgctgccctcagcacaccaaggggggacacccctaaagaaagcactagaaggtggggtgcagtggctcatgcctgt

SEQ ID NO: 160699 - DNA, 357 bp, Homo sapiens
atgcttttggggtctttgcttagtaggagtgtgaatgattacaggctcactggtcagtggtccatagtctagttggtcattttggctcctcccattcctttcttctttcccagcaaggcaagaatgtttttcaccttactaaaggcttctaatggcctaactcactatcgtttttgtcacttttgtttccagtcccatagtgtgtaactcctgtctacctaggtagggcaggggaggagaagggagccttggtttacaagtaaaattataatttagtgtggggggaacagcaatcacattgatcaatatttcaaaatctactcattcatactttgagacccataaagtactatttcc

SEQ ID NO: 160700 - DNA, 669 bp, Homo sapiens
tgcccgtaatcccagcactttgggaggccgaggtgggtggatcatgaggtcaggagtttgagaccagcctggccaacatggcgaaaccctgtctctactaaaaatacaaaaattagccaggcatggtgttgggcgcctgtaatcccagctactctgtagtgaaaactacccatatgtctataaactgaaaaatggataaagaaaatctatatatccatacaatagaatattattcagtcatgaaaaggaatgtagtattgataaatactgcaataatgataaaccttgggaacatcatgctcagtgaaagaaaccagtcttaaagaaccatatacggcatgattccatttatatgaaatgtccagaatgggcaaatctgtggagacagagagttgattagtgactgctagggcggatgggaagaggaggtggtgaccaccagtggtttggggtttctctttgggctgatgaaaatatcctaggattatggtaatggttgcacaaatctgtaactatactaaaaaccattaaaccatacacttttggccaggcacggtggctcacgcctgtaatcccagcactttgggaggctgaggtgggtggatcatgaggtcaggagatggagaccatcctggctaacacggtgaaaccctgtctctactaaaaata

SEQ ID NO: 160701 - DNA, 683 bp, Homo sapiens
ggaagctgtgatcctgatcccttgagggagcatgtattctgctctgggtctgtccttggggaacccccaagggagtgatcaggatggtcagaagtctgcaggccacattctaggggcaacagccaaaagaactgcggctgtttctccagatttcagctgggactgttcacagcttccaggtatcagatgagttctcatagggagatagggtaaggccttcccatggagccctaggctggggaagaactaccaggtagaagtaagaattccacagagttaggtcagtttgggtaggatttgtatggacctagactttctgatgattggattgtaagactgggttttctatcactgggactgttcatgcaggggccagggtgctgtggaggggcagtatgtgaagcaagttgaactctgaagcattccaactttgataacagcattccagatggaaactatgagggaccaagatgaggtgctgtgggctgcgagggaggagcgattgactgaggatcagtataggggagggctgacgctggaggcatctcagggtatagctttgggaaacatggaatgctgagtgaagctcagtgaaagatctgacctcgtgtgcactgctggtggagtggtctctcaggtatatgggccaagggggacacagggataacaagaggtctgagggt

SEQ ID NO: 160702 - DNA, 446 bp, Homo sapiens
atcctaagaagggagacttccagcaaagccactgtcctgaggcttgcagagccttgctggcttctttcaggacttattagaaccacacagaggcagactgctctgcagccgagcaggggcatccatctaagtatggtgaggagagggaggtgaggcctctgagcacagaaacgattctgtggctgatggaccagagcagtatggaaaggaaggggcagtgcctggtcctgtaactgggagaaacttctgacgtactccattaagtcccaacccccaaacacccagacactgcctggtgcagcaggtacagagacaaatgagatacaccaagaggcccagaataaccactcttgagggaaaccttccagagactgggaacacatacgcaaagggaattcaggaggcaaatcctagacagacgtttagtaatgtctcttcagtctgtt

SEQ ID NO: 160703 - DNA, 290 bp, Homo sapiens
gtacagaaccttaacgatactcccagccagggaggaagaggttacataatggagcctaggccagccaaaatgccaggggcataattgaccagggctacaaaggctttggtgggtggggaagaagggaagaggtaggtagcaggcttaatctgagccaggcagacagcttagacatttgatgactgatattcactacagagagagagattttactttcctttcaggacaccgaggagagagagaacagactgcctgcccacgtgaacgcacaatcaagagaggcctcatgt

SEQ ID NO: 160704 - DNA, 325 bp, Homo sapiens
gtggtcataggaactgtgggtatttgaaagcaaaggattttatttaggggactcagttgtttatgggaactaaccactgttcttccttcaccacaccccattgaaatgtactgtagatggccctaatgttactttttgaatgtctaaggtcttatgttgttgagctggcactttttagggctcttggttttcaataatgactataatattattttagttttcagtgactctaataataacattacactgatgttaaattcaaattaatgttcagacattacattgagctagtttccttagcagaatcaatgtgaaactattgttt

SEQ ID NO: 160705 - DNA, 247 bp, Homo sapiens
tggcagagtaaggatagccctgctcaacgctcctctctgaagacagtgagaaaataaagggaaaagaacgccgtgttctgatatgtaggaatgatcttcaaaccaaaccacaaccctgcctcgtggtgagcgtgagtagtaggggtgaggaaggccctagaataagccaccctcgggcagcactgtggcatgctggccatactttgtttgaggttcctgaagatgtacatcttgcttgtggttggct

SEQ ID NO: 160706 - DNA, 360 bp, Homo sapiens
acctcagatatagctagagtagttactgtctatctcagtaccaccctgtttgttttctctatagcatcaacttcaatttgtgattatttgtttacttgtctattgttttcctgcattaaagtgggatccatgaaggcagacatcataccttgcttgtttactactgtgttgccagaagcacatgttaggtccttaataggtatttattaaatgaatcaaactctttctagaagaaaccacagaccctagactgtaatttaccctaagggagaatacaggcatttagacaaaaaaaaggtatcggctgggtttggtggctcatgcctataattccagcactttgggaggctgaggcaggtg

SEQ ID NO: 160707 - DNA, 558 bp, Homo sapiens
agtttgccacacaagtgatggaggttggaaggagggatgaggtgacagaggtgaaggagggtaaattcttttctaagccctacttgcctgacatgcatttaggtttttagaaaggaacctgaccccaccctttattttctatctcccacttccatgactagccttacctgtaaaaatggggcatagaagagcccccatctcctagggcagtgtttttgagcagggggtcactgaacagtagcaccttcatctcttgagaccttgttaggaaattctggacttggggtggttgatcatgcctgtaattccagcactttgggaggccgaggctggcagaacatgaggtcaagagatcaagaccatcctggtcaacatggtgaaatcccgtctctactaaaaatacaaaaattagctgggcacggtggtgtgtgcctgtagtcccagctaatggggggctgaggcaggggaatcacttgaacctgggaggcagaggttgcagtgaaccaagatcatgccattgcactccaacctgggtgacagaggaagactctgtctcaa

SEQ ID NO: 160708 - DNA, 402 bp, Homo sapiens
aatggtcactgcaaccatctatcctataatggatgcaatatgttttagggcaagagaaaatgcaaaagacaaaagtaggctgaatgaacagttggcccagatccctatatcactgatgcctctctctcagcttatacatacagtctcctaggtccttccaaccagctgataccttagtaaacaagccaggcctaatgcaagggcactttggctaggtatattggcacaatatgtcaaccactcagatgtgggacctcaaatataatccatgagggtaaacctactctgataagtagaatacatagattcatcgccatccatagaaagggttcagaaaacaggagctggccctgtgcttttacagagctttatccttcccataagggcaggaccagatattat

SEQ ID NO: 160709 - DNA, 433 bp, Homo sapiens
gggcatagatttcagacccttcaccatcttgctcttctgttttttcctctggataactttgaggcagttgaggttccttttcatatgtggcctccatgtttcagtaattgaggagagacactgctaataatgcaacaaaatgagagccaccattccctagggcttgcccccttccaagtctaatttgggatctcactggcataccctaaggtaggccccctgtaaagtcctgttgtctcttcataggagtttctgactctctttccagctttccatggcttttcagagttgaggtttttttttttttagagagataagataataataggtccccattttctttcgggttttaaatttcctttggttttggttttaaatccccaaaatttttcaaaatttgggatcccttgtaaggttttttgccatagaccta

SEQ ID NO: 160710 - DNA, 732 bp, Homo sapiens
agagagagagagattgatgacaagctgtatctgtttcagaggctaacaatttgtgatttctgaactggggtagtaagtggagaactgaacctatccaaataccctggagccagctcccatgaaagccacagctcaccttggtgtcccaccctagctctgcctagcaccccccaggagctcagtgaattgcctgattaccacactgcacaataatgactaagtacaccaggcaactctgttgtaaattctcttttacttccaacagtaatctgtgcttctgtgtgatttatctttatgaacaagccagcttcctgtgggacagcatgttccaaaagttttttctttgttcctttacatttcttccccctgcatctcaacagagtcaagttctgttctgtgctttttgaaaatctacttttattttttaatacctatttttaaaaaatacttttctgtattatagctccatttcatttgtatagatcatcccttctgagggtcaggaaatctgtattccattcctcattcctcccttgactactgaattactgtgtacctctgggaaaagtcctttcccctctctgggcctgagtttcctctctgaacaatcagaaggttgttgtgtaactttgcactctactctcagaggcactggaaatgcagggccttgtgaaatgcccattttaaaatggaaatctaaactgaaaaaagcatgtaagattaaagaaatca

SEQ ID NO: 160711 - DNA, 300 bp, Homo sapiens
ccatccaccctttcaatcaagatgtgaggggcatatgccatcaacaaatactgtggaagtttctgagaatacagaggtgaaattttttaagggtcaaggaacaaaacccaatcactaggcaagatgttgggttctctaagagctctctatcaactttccctcaggatatcagggatgcctccactgaggagtaaccctgaaagaaaagtaggaattcactaagccacatatttatgtgggaaatttaagtgaggaaggggatgaaaggaatttttagggagagaacacagtgggtgcaaa

SEQ ID NO: 160712 - DNA, 1006 bp, Homo sapiens
tagcacttgggaggctgaggtgggcagatcacttgaggtcaggagtttgagaccagcctaaccaacatggtgaaaccctgtctctactaaaaaaacaaaaaattatccaggcatggtggtgggcacctgtagtctcagctggttgggaggctgaggcaggagaatcatgtgagcctgggaggctgagattgcaccactgcactccaacctgggtaacagaacgagagtctgtctcaaaaaaagaaagttgtctcttcttttccaaacattttactgccttttaaatccagccttatgatcatgctccagggttattgcaatggcacctacctggtgctccctgcttttgatccccactcctgcccccgacaccatcctgcacactccttcgggatcagtggatctgaactttctttaaacacctgagggaggaatatggccacttccaatagtagttatggttcattacatcaatgaactttttcctgaacgagggtggggtgtacattcatgtttagtatgaaaaaggcaaaaatttccctttggttctgattatttacctaccttcctcacatatacacacatagcatctacacacagtatacacagttgtggagaatcatttcactagataaatctttccataacattgcattatgttgcttccttactgagaaacctccattacttcccactatccataaaataacatccagcttcttagccagcctgtcagatctcctatttgatccaacttagtgttcctggctcttttagcattactctgtacttgaccctctgctttggctgaactcatctactcgttgtcctcaagatatgccctgtatttttcccaagtttgtatttgcttttctttctgactctatagttcctttttctctttgcattttgaaatacctatattttccacgagtgttttcttgctcatcttttggaagtaagcccatcctcagaagttctaaagcatttattgtttgagtcaccg

SEQ ID NO: 160713 - DNA, 147 bp, Homo sapiens
tctctctgctcctgttgtcacattgccttccatctctgtctcctgtgtccctcttgtaaggccacttgtgattacaagtcctacctagatgatccaggattctcttcctgcttcgaaatccttaaccagttcttcaaaatccttttg

SEQ ID NO: 160714 - DNA, 750 bp, Homo sapiens
gattcccaccatgaccgatcccccaacaccacactgagtctatttccaggcagccagtgaccaggggtgaggacttgccccagaccactagcctccctgctgagaaagcaagcagaaagcaatcagactctcaggtttttggcatctcagggagcctgcagcggtgattcagttccttcaaagggtccgtggattctcttggctttcctggttgttcctgtggtaattcttggagcaaaagttcacaatactgattcactgcaagctctttagtggggcagaacaaggcagatgactattctacaaagggaaggcagccatggtggcccagagtcagtagttggagctgctggaatgaggatgacatctagacagaagagaacattctccacctaaagcaaccagggctctttgaagaagtgactgaatccaaggctgggacatacagcatttgtgtgtgtgtaccagaaagcataaaagcactcaaataataatggggacatgtcaaaagggcacaaaagccagtgtactacaatataagcatcacataactaatgatagtagcatatttcagcccacttattaaaataggaaactatgattttatatgatgtaatagatagacctaaaattgtttagtaactgaattgtccatattttcaaagtttctgccctaaattattaatttaaagaatagtccctgttaatggggtgtgaaacaatgttctaaataacactgaaaaatataag

SEQ ID NO: 160715 - DNA, 260 bp, Homo sapiens
cactagcctccctgctgagaaagcaagcagaaagcaatcagactctcaggtttttggcatctcagggagcctgcagcggtgattcagttccttcaaagggtccgtggattctcttggctttcctggttgttcctgtggtaattcttggagcaaaagttcacaatgtaagttaccacatgccgctctgcccgtccaagtgggagctgcaagctagtcctgtctcctatatgccatcttaatcctctctccctctttttaaa

SEQ ID NO: 160716 - DNA, 333 bp, Homo sapiens
ctgggcaacaagagtgaaactctgactcaaaaaaacaaaaacaaaaaagaaaacaaaaaaaacagcaacaaaaaaccaccaaccacctacagtattagttggggagacaaattatgcaccttataaaatagctaaaagactatttttagaaaattagatattcattaaaatatcataatatgcactttatttctgaacgcttaaattgaagtagcaaaaatattagagaaccaatcaaaggttttcagcaataaagtggcattattaagcttaggaagatcaatctgctgagaactttttgaagaacttggaggcgagactaggaaacagcag

SEQ ID NO: 160717 - DNA, 220 bp, Homo sapiens
cgattaaatcctatctttttggggtaaatctacaggaagagacattttaatgaaaaccttccatgtgactatagtcgactcccattctataactttgtatgtgtagaaatggttcttttcaaaattcccaatgaaatcagcacttcaaacataatacttgggccatgaaaatacacccaaataaaatacgggtagggtttaaataacttattaaacgttt

SEQ ID NO: 160718 - DNA, 451 bp, Homo sapiens
taattagtttgtcttaaaaattagggaccttaaataaaactgaatttacttactcattgcattttttaacctagaggtggtgggtaagagaaatatagaagaataacatgtgacactgataaatactgaccagatgactaattacatgtcattatatattttcatcattatacatcattcatctatgaaaatgctgtgtttgatagtataatggtaaatatatgtcattatacttttgtccaacccatagaatgtacaacaccaagagtgaatcctaaactaaactgtggattctgggtgatgatgtgtcagtgtaggttcatcagttgtaacaaatgtgctgctctggtgggggatgttgataatgatggaagctatgtatgtgtgcaggcaagagataattgggaagtttctgtacccttcaattatgctatgaacttaaagttgctat

SEQ ID NO: 160719 - DNA, 406 bp, Homo sapiens
agctcggtaccactctgacgagtcaggattcgaatgtggttatcattggaggggagagggtgcatttttcagccttccacaccctgcaatgaaggtatcaatgtctctattttctatgcaagtgctataatgtagtaagaggcaggcaggccagagtttgactcctggctatgcccaatacgtgggtaaattatttaaactcctcatgcttgagtttcattataaaatgcagacaacaatatctcattcaaagggttgccatgaggattcaataagacattgtgtgaagtgccttttccgaagtatccattctcagcaaatgctcacaaagcagtgagtattattactattatttgagacagcatctggctctgtcaaccaggctagagtgcggtggtatgatctc

SEQ ID NO: 160720 - DNA, 199 bp, Homo sapiens
cttattcgcatacaatttaaaaatcatcacagaaggtttgaaagaaggaaggggcagaaaattacctacttttcctctccccagcgatctccttcaaatctgtgccttttcctcaggcccaggcctcaatttactgagcagtcacacctcacagagggaggtctgggcaatccactcttggtcacaggaaagccattga

SEQ ID NO: 160721 - DNA, 314 bp, Homo sapiens
ggaccaccccagtgatccctctgggaagagcttgtcctttaagcaggaccatcggcaggaaacacagcagctccgttctgtgctgtggcggctggcctccaggtatctgcagccccgtgagtggaagaagctggcatattcctgggagttcacggaggcacatgtcgacgccatcgagcaacagtggacaggcaccaggagctatcaggagcacggccaccgaatgctgctcatttggctgcatggcgtggccacggctggtgagaaccccagcaaagcgctgttcgagggcctcgtggccattggcaggaggg

SEQ ID NO: 160722 - DNA, 320 bp, Homo sapiens
agaagaactttttatgatgtctgggatttgctttaaaataattcagaaaaagaaaagtggtgggacatatatagcacaatggtgtcagagtattggtaacgggaagtgggtgatggatgcattgagttatattgttctctctgcttttgtacttatttgaaactttccaaaattagatgtaaaacaaaataaaatgtaaaagcgttataaacaattataccctaatacacttggaggaaaaccagtaaaagctgaggagaaaatattttttaagaaatatgtgggctgggtgcggtggctcatgcctgtaatccctacac

SEQ ID NO: 160723 - DNA, 332 bp, Homo sapiens
cactgtaacacttggatgaatgatctcatctgctgtgggcctagtttccatctctgcttataaccccaaatctcatctgcagtcgtggacttttctgtctacaggtctgtgtatccaagtcatcatctctgtctgggtgtcctgtagccacctcagactcagtatacactgagtgagtgttcctccctgacacacttcactggccttagccccacacctgccttttctccttttccccatgtttataagtggtgccgttatttacacattttctgaagccagaaacagattcttccctcattcatttcccacgtcactaatactaatttcca

SEQ ID NO: 160724 - DNA, 229 bp, Homo sapiens
tacaaagactatctgcttcctgtaacaactcaaatttcccaattttgcagataaggaaaatgatgcatagagagtttaagcaacttcttaccatcacccacctcaaggaactgacagagtagacctggaagtcatgcagtctatctccaaagaccttggacatacatataaccaaagtgagatgctgcccccactcccatccctcttctagtaatatatcctttctacc

SEQ ID NO: 160725 - DNA, 618 bp, Homo sapiens
aagcagcatttggcagacttacaaaggaagatttgatatttttgatgttcctattgtatagaataggtgatacgaaatgtttcttcaaggtagttggtttatttgtatttttagatgggagaaagtttatcccttgttttctttaataattagatatgatcagtatttttgtgaacttgtatcttgttttcatttataaatgttgaagaaagcaggaaccaggtaattattaagcttagtttgggctaaggtacttcaaaaataagacttgctattatgtgtacctttttgtctgcaggtcattattgctgtggtttgagctcagcatggctgtagtcatccgtttactggggcttccttttattgcggggcctgtggatattcgtcacttcttcacgggattgactattcctgatggaggagtgcatataattggaggggaaattggggaggcttttattatttttgcaacagatgaagatgcaagacgtgccataagtcgttcaggagggtttatcaaggattcatctgtagagctctttcttagtagcaaggcagaaatgcagaagactatagaaatgaaaagaactgatcgtgtaggaagagggcgtccaggat

SEQ ID NO: 160726 - DNA, 794 bp, Homo sapiens
actgagggtctacctgttttggggaggctgctgcgacgaagagttccctcagcctccggccttgtgtgtccgactcggcagcagtgttaagttgcttttacagagttaacaggtctccaagaaattttaaaaaaggtcattattgctgtggtttgagctcagcatggctgtagtcatccgtttactggggcttccttttattgcggggcctgtggatattcgtcacttcttcacgggattgactattcctgatggaggagtgcatataattggaggggaaattggggaggcttttattatttttgcaacagatgaagatgcaagacgtgccataagtcgttcaggagggtttatcaaggattcatctgtagagctctttcttagtagcaaggcagaaatgcagaagactatagaaatgaaaagaactgatcgtgtaggaagagggcgtccaggatctgggacatcaggggttgacagcctgtctaattttattgagtctgttaaggaagaagcaagtaattctggatatggctcttcaattaatcaagatgctgggtttcatactaatggtacaggacatggtaatttaaggccaagaaagacaaggccattgaaggccgagaatccttacttgtttctacgaggtttgccttacctagtaaatgaagatgatgtacgtgtctttttctctggtttgtgcgtggatggagtaattttcttaaaacatcatgatggccgaataatggtgatgccatagtaaaatttgcttcatgtgttgatgcttcaggaggtct

SEQ ID NO: 160727 - DNA, 102 bp, Homo sapiens
agcttgattcttaataagttatgcaaatccaccagaaaaactgtttttccagacttttaaatagtgctgagcgagtgctagacactatttgttctatgagtt

SEQ ID NO: 160728 - DNA, 236 bp, Homo sapiens
tagactctgcccaaggctactagaactgataaaaaaaatttagcgaggtttcaggatacaaaataaatgtacaaaaatcagtagcatttgtatatacaaataaagtctaggctgagagtcaaatcaagagcacaatttcaattacaatagccagaaagacagtgaaatacctatgaagacatttaaacaagcaggtgaaagatctctacaaggaggactgcaaaacactgctgaaa

SEQ ID NO: 160729 - DNA, 454 bp, Homo sapiens
ctgaaggtcagagctcggtccacttttccacagggtatccttttctcctagtgaccccggcaccaggtccacttgtccctgacttcagtgtgatatggccgccccacctgaacccatctctccctcccaccagcacactgggctccctcttcggcagcaggcagcattgcttccccagaatacatcccaacatcaaccacgctgtgcatctgctgcttagtctcatacttggtggtggcttccctttccttccataacccacttatctcttggacagatccccaatcacgttacttgtcccattttcacctgtccatacatttttaaaatatatatttgatttccttcttgcggggcctggagcccctcagcccctctgatgctgccccacaaatgacctgaactccttgaagttcacccctgagctgatgcatccacagccctgggctatctt

SEQ ID NO: 160730 - DNA, 171 bp, Homo sapiens
gattttggcagaacttaaagaatagttaaacttcagcatcctgcaatttgggggcaggaagctgttttcctactaccatccttttaggcccagcccagacctctttaggctcttaatctgtgcttccttttatcttaaaagataataacctcccctccctggcttcagttc

SEQ ID NO: 160731 - DNA, 137 bp, Homo sapiens
gagctccggcggcccgcccagctgcggctgcaggtgtaccggctcctcagcacagcagggaccccggagaacggcagcgagcctgagagcaggtccccggacaacaggacccagctggcccccgcgtgcatgccagg

SEQ ID NO: 160732 - DNA, 289 bp, Homo sapiens
ccaggctgtattccggggtcaaagcaacactaactcacctctctgctcatttcagacagcttgcctttttctgagatgtcctgttttgtgttgctttttttgttttgttttctatcttggtttccaccaaggtgttagatttctcctcctcctagccaggtggccctgtgaggccaacgagggcaccagagcacacctgggggagccaccaggctgtccctggctggttgtctttggaacaaactgcttctgtgcagatggaatgaccaacacatttcgtccttaagag

SEQ ID NO: 160733 - DNA, 268 bp, Homo sapiens
agatgacttctgttgggcagcccgcttgaatccttgtgtggggcaaaggtgctttgtatgacctggagaagtgattccaggtgggtggaagcaggggcaggagaggagaatgaggcagcctgtaggacacagccaaggcaagagcaattgcctggggtgggagagtaagaggaagctgtgtcttggcattagtttcaaataaaccagattccagcagaccaaagccagcctgctcgtgcctcacctactgtgcgtcttgcgggggctg

SEQ ID NO: 160734 - DNA, 792 bp, Homo sapiens
tcaattttaaggtaaaatactggcagacaattccttgtataccatctgccttttgaagatactattctcttaagatgtacagcatttgaatacatctcagttgtataactttataaatagaatcaatgatcttgtttcctctggacttctgaaaggagttgcatttggcaatagaaatcgattctgggctggaatacatatcagtattattatctatcagtagtacattaagagctaattatatttgtcctttaaatgtactttattgttctgggatgtgccatatagctttttagaatattatgtgaattgtttataacttaggtgattgtgctgttatctcatttcccttctttagaatatgattttttatcactaatatgtatgttaatatgagaagctttaaaaaaacgattgctagatgatgtattacatttagaaaaaactcagtttttgatcctgcatatcattgtagatttaaattcaagaaaattttatctttaaatatgttgcttatctttgtagcatagaaacaaaggaattgaaggatgtcatacattattgggtgtcgttttaagttcatttcagactgacactttcaaagggcttaaagattgagtggtgacttggttccttatattaagctgcaaacaaagtattatcagtcataatggcttatttaaaactggaaatttttttgcatgttttttgacttatgtgaaaatttcaggtaaaaatgtggcctgagtagtttttctcaactgtaactcattttcctatgatacctatttc

SEQ ID NO: 160735 - DNA, 384 bp, Homo sapiens
agcatcatgttttcaagtcagccacactgcagcacgtatcagaacttcattccttttatggctcggtaacgttctattgtggggatacttcagtttgtccattgatggacagtcagttgtttctacctcttgcctattgtgaacagtgctgcttgtgcacattcgtatccaaggatttgtttgtgtacctattttcaattttggataggtacttacctaagagtgaactttcatgaaatttgaaaatattgtagatctgtttatgtactgtctatacacaccacacaccacacacacacacacagagtgctttgtacataaaaggaatagtaagataagattttttcaccccctaaaaattatttttgccccgttgggggccat

SEQ ID NO: 160736 - DNA, 151 bp, Homo sapiens
acgtaaacgtttatttatccaacactacgcttattaagcatgtatcaggagctgggctaggaggtaactctttggcctacatcgaatgtcatgatacctgccagaattcacaagatctgatctctgtccatctctccaatcacatttcatt

SEQ ID NO: 160737 - DNA, 271 bp, Homo sapiens
aattgccaaaacttggatgcccacaagatgactttcaatcagtgaataggaaacaaagtgtggtactctgacacagtggaatgttatacagtgataacaaggaaatgagccaacaaaccacaaaaaaaattaaaggaccttaaatgtatattgctaagttaaagaaggcaatccaaaaaggctacatactgtgtgcccagttttgcctgttccatgacttcatatgggtagggtcatacagtatgtagcctttttggattgccttctttaa

SEQ ID NO: 160738 - DNA, 234 bp, Homo sapiens
aggcccctcacattcttcccacccccattacctctctaactccattttctaccactctccttctttccacctcaaccacagctacagtgacttctttgccctttctcaaatctgcctcagggcctctgtactggacactctctccccactcccactccctcctccaggccttcactgaaatgtctccctctcagtgaggacttcctttcctaaactgcagtacccccaacctac

SEQ ID NO: 160739 - DNA, 233 bp, Homo sapiens
attgctctctttccaggaaatgttgtgagctgcagtgaaagcttgagatgttgcatttttttcaactcaagcatgtgtttttcaaaaatatcatccttcccccccaccccactaattttagaatcagaccaaagccaagctactgtcctctgtttctgttgggaaaatactatatttattcgagatgcagaagtgtgtctctgcaaacctccgactgcttcaggaaaacaaat

SEQ ID NO: 160740 - DNA, 550 bp, Homo sapiens
aagcagttaaacagactcaagatctggaagtgtggcagccatctgtgatcatgagacaacaagcctgagaagaagggtctacgtgctaagatgatggagcagaaacatggaacagcctgatgcactggcctagactgctcaccccaactttctatttgtataagataaatctactcccatctgtttcagcatcttgtatttagagctgaatgcatttctgacatatacaatacagattctattttccaaagcctctggtttacctgattcgggtccttgttgttgttgttgttgaaccggactcataagaataccttgcgtaatattttctgataacaggccaggcgctgtggctcacgcctgtaatcccagcactttgggagctccaggcaggtggatcacaaggtcaggagtttgagactagcctggccaatatggtgaaaccccgtctctaccaaaaatataaaaattagccgggcatggtggcaggtgcctgtagtcccagctactcaggaggctgaggcaggagaattgcttgaacccgggaggc

SEQ ID NO: 160741 - DNA, 430 bp, Homo sapiens
taaagcgtgtggcagtggtgaaactgaggccctggttcagctaagtgagccagcctcgggaggcctcttccgaatttatcacgtaaactgaggcctgaccgtgtcagttccctgcagatgcagtttcctacattatggtgccataaaaatgcctcttagaagatctaaaaattatgaaaaagaactattctcttagaaagtatcttcatttaatttttccagtgttatgacaacaaattgagataggcacaagttaattaaacttaagtttatttaaccaaggagagaaaagttaatatatagtcaaactgtgtccatcattatctcaggcctattccagcttgtaagaatccagtcccttcagaagcaagaacaagcatttctgtgccccgttgctctgttcatgattctattcatccagaaccactcc

SEQ ID NO: 160742 - DNA, 103 bp, Homo sapiens
atgggggtgtctcatccttgaagacaagcttgtcaaacccattgtccttgggctgcatgtggcccaggatggcttttaatgtggcccaaaacaaattcataaa

SEQ ID NO: 160743 - DNA, 124 bp, Homo sapiens
ggagtgtgcttgtagtctcagctacttgagggctgaggtggaaagactgcttgagcctggaaggcagtcagctgagatctcaccacttcattccagcctgggtgacagaatgggaccccatctc

SEQ ID NO: 160744 - DNA, 243 bp, Homo sapiens
taaggactaagtgacaagaggatgtgtttggattgctttgactgatctgacttccattttaaaaggatgttctttctggccgctgtagagaatagactaaagcagagtcaggatggaaggaaggagtcagcttttgaaaaaggtgagaggaagacttgggtggacgaggtggataacagtagaggtaataagaggtgataagatacacgaacattggatgtacttagggcaacagtatttgct

SEQ ID NO: 160745 - DNA, 282 bp, Homo sapiens
ttggaattgggggaaggagcagtgatatgtaagctgagacttacataatgataggccacaagaaaagtattccaagtagggaacagaaagcacaaagtccctcaaacatcgaagaaacagaaagaagaatcatagatcatggtaaacaaaaggggagatgatacaagatcagaggagtagtcctgtaggatgttacaggtccttgaagaccaagctaaagactggtttttttatttacaagtacaaaaggaagcatttggagggttttaagcagggaagtga

SEQ ID NO: 160746 - DNA, 862 bp, Homo sapiens
tgctggtggtggtggtagggttagggagggggtgcagcaggcagcccggcctgcaatttgaataactaactacatgaatgacaagtgccttgacctcagacctctccttgaagggttctcctcctgggggcgggggacagaggtattgttagagaagtcagggaaagtatggcattatgagagagagggaaaagagagaaaagaaaccagcatctgcttgaggcttgtcatctaacacactacgtgtagttgggtgccagaggcttcacgtggattacctcattttaatctttttatttatgggttaagggttggcatctccggtttccagagacaaggagaaggtaaatcgtttgctccatgtcacaccaggtttctctaacgccaagtctcttgctacactgtgggcatgccacactgcccacactcccactcctactctttagagacatcaggggcttctcttctgccttcaggcttcctgacagtagcagtgaaaagaaaatctcccgatcactgacagcaatgatgccaggccttttttggtaaaagggccaattcagtaaaagaaaacgtgtttatgggctgaatctttttttccattgaaagttaaaataactttaccgaggccctgagggaaagtggatgttcttacaacctaaagagtctgctttgttaattaaagatggttactaagaaaattgttattgtttttagcattaaaatattgctgctgagtatatttgaggaataacaacatggatgaatgtagctttataatttttcctgtgttaatttgtatatcactttaaagtttataatgaatgttctcatgctgctggtatcattaccatccactctt

SEQ ID NO: 160747 - DNA, 262 bp, Homo sapiens
ctcagctgtgacacaggtttttggttggaagtgggggtagggacggagggtggggaggtcatcaggttgatgacagtgggttttaaaaatacagagctggaaccaaatctgaattggtgatgcctaatcttggccttatttttaaagacaacctcagatggtattattggtgggtaagtgatttggtgcaagctttctgcagactgatttgacggtaaacatttaaaaaatcatagaattacatgtatctttggactctcca

SEQ ID NO: 160748 - DNA, 439 bp, Homo sapiens
ctcttagcatattaaaaaaaatatatgttctctgtagacttgtatgaagacctaataagaaagactgcaacaactacagttaagtgttactaaacaccgtgaaggagacttgacccaaagtcctgcttgtactaaggcaattatgtctattaacccaatcccccaaaataccatgatggctgggccctgcattgaagcccttccctcagctgttactccatgctcttggtactcagcctgctggttcctgacccaccgtttgaactgagaagcagccctggaagcagctatcttctctgggcctatggcttttgccagctgctctcagcagtgaattgtgaggccttctctgctccagggaggcacctgcaactgctggggagaagctccctttgtgcctttttttctttttctttttcttttcccttttttttttttt

SEQ ID NO: 160749 - DNA, 204 bp, Homo sapiens
tgtgtttaaacacacgtggtaaaagctgtgggaggccaggaatgtgtctggctcattcaccactagatctgtagttcctagggcagccagcaactagcatctaggaagcactgggtaaatatttgttgaatgaatgaatgaacatcttttgattttcttaaaccagaggcattgatttgcactgagctattcacacttcctcac

SEQ ID NO: 160750 - DNA, 481 bp, Homo sapiens
tgttgcccaggctggagtgcagtggtgcgatcttgcctcactgcaagctctgcctcccgggttcacgccattcttctacctcagcctcccaagtagctgggactacaggcacccgccaccatgcccagctaattttttgtatttttagtagagacagggtttcaccgtgttagccaggatggtctcgatctcctgacctcgtgatccaccctcccaggcctcccaaagtgctgggattacaggcgtgagccaccacgcctggcctaaaatttattttgaatttgctattccttttacccacacaattcaggaaatacttgaccacatttgtggagctctggagcagggagattggaacacacatttctaccagtcttcctttacatcccataatgtagtggttcagaagaggtttttttccttactttctactctgtggcctctccactttatctaaagcttaatggttgggatgtgacag

SEQ ID NO: 160751 - DNA, 396 bp, Homo sapiens
acagggaaatatgagtgcttcatgtcagataaaggaaacaattcaaaacggtacatgtagaatcagcaactgttttgaaaaagtacacagggaaaaatcacggaaaagaaaaacaacaaaatgcttttctagctggtcgttttccctctttctgtttctctctattttctgaagttgacagcatgcatatgctacttttataatcgaggagacaaatttaaaaattttaaacgttgtagagcattttcctattctataggctcaggaaccctgttgcctgcaccactgcttatccaatgtccctgacaacagaccgaacctcgtagaatcaatagcagacgcttgtcactcctataactgttataccctgatgtcaatgggctgctgattactcag

SEQ ID NO: 160752 - DNA, 614 bp, Homo sapiens
gactggatgagtactcgggagtagatttctttatacctacaaactttattaaaagctttttgattgaagacacactttcactttttaaaatttaaatttttgttttatttttaagaacaatctcagaccaaaaaaaggcacagtttcaaatttgcacattcatgatttttctggaaggattgcagaatagttggcacattttgggatcaagtagcttgggattttcttcagatttgcaaccataaatcttgtcgtatgagaaaatactggaaagttactaaggtgcttaacaaagcaaagggtttgacagtcatcagaatggtgggatttgacttcgaatgctattttctgtttatcgctctggcattcttgaatggatttagtgactccctggaggtccagcttggtaaatgtcatatgcttgctgttgacattctagtattggggtatagatacctgttcttactggcgagccaatgttgatcgcagtagtcattacatgggttatgtttttcgcagaggcagggaaggtgagggaaggcagagaaacaaacttagtcataaatgtttttgaatatttgtttattctgccctttggctcccgaaagggagta

SEQ ID NO: 160753 - DNA, 747 bp, Homo sapiens
gactttggtctttacctgatagaaaaaggaagttactgaggaatttaaagcagggtcagggatgtgatgagataggaatggcaatgaggaagttggatgtgggagttgcagggacctgcaggctgcactatgacttggggaggatggagggacagcagaggggcatgagatgggctgacatctggcaagtagtgtctagtatggacaatcactcttacagccctcctcagtcgcttttggcaccctgcctctcccccagccccaccatagaaaataacatgctgtgctgtcacttaaaacccccttttcatggccgggcgcggtggcttacacctggaatcctggcattttgggaggccgaggcgggcggatcacttgaggtcaggagtttgaggccagcctggccaacatggtgaaaccccatctctactaaaaatacaaaaattagccaggtgtggtggtggcacgtgcctgtaatcccagctactcaggaggctgagacaggagaatcacttgaatctaggaggcagaggttgcagtgagctaagattgcgccactgcactccagcctgggtgacagagtgagactccatctctaaagaaaagaagaaagaaagaaaaagaaagaaagaaaccaaccaaccatgttgctggtccctgaagtagtccgttttaggctatatagctctgggtgatgagagagatatggtgtagtctgtgttgaagagtgatagaaactcagtttgg

SEQ ID NO: 160754 - DNA, 402 bp, Homo sapiens
gatttctggatcttgcctttcccagatctctctcctttctacttcctcggcttcttcttgggaacgtaaaggcagaaaaaactaattgtagaaactcctatcccgcggcccgccctccttttcatcagagcttcttcggggtcaacggcgcggcagcgtctttgttactccactgccaacgcccgagggctagaggggcgggatgggaacttctcctgcgggctcgggacccactgtttctgcctctccaacggcttggctgtgtgaaagcgagcgaaggtgtcattcccgggagggagaagcgtcgccgcagggtgactgggaagccctttccttgggcgcgcggagcccagggcgcacggctgtgccgcccgggtttgccctcggagcgccggcgggccg

SEQ ID NO: 160755 - DNA, 329 bp, Homo sapiens
ggagacatgatacgaatcgagctggtacccctagttttagaagtttcaatagcaggagccctccttggcagactgggacaccaacgcctcttccctcttgggctgacacgagctgtaaatgtcagtggacatttaaatactgcgttacacattcgatgtcctgtctgcaatggagccgggttctgtaaacataagctgccatggcgaaatcggatcatcatcgcccatcaagctctttggcagcagtgctgtaatcagtgcaaacatttatttatataaatgctcccatccccaggcagcaatgtgctattgaaacttctaaaactagg

SEQ ID NO: 160756 - DNA, 511 bp, Homo sapiens
tgtccacccccgaagtgccctgagccctgcccaccaccaaagtgtccacagccctgcccacctcagcagtgccagcaaaaatgtcctcctgtgacaccttccccaccctgccagccaaagtgtccacccaagagcaagtaacagcttcagaattcatcaggagcatgaaaggataaggataattggctcaccttgttccacagcttcacctgcatcttctcatcaaagcctaccatggatacacagttagcttctttcctcttagccagtgatctgcccatgatgatccctgatagcaaaaggtttcctttctgaggctgccatattgccactgtccaggtggagactgagaaaggaagtcctcagcagtgtcagttcccagagctttggaagaaggaccagcagctctgtccctgggaaccatcaaaaaatgctgttgatgttttctgtgtctgtctgtcacctgggcatgggcttctaacacctgtgcaattgtcacttttctttcact

SEQ ID NO: 160757 - DNA, 407 bp, Homo sapiens
attgcaattttagataaggcggtcagagaaaagatcaccttaggtggtatttgtgtcaagaagggagagagaatgtttaattctgtgtggccagattggaaactgagaccctgctagggaaagcaccttaaccaaaaatcgtacggtagccttgttcttcctcccagatgctgacaactcacttctgtgtgcacatactcctccccccgccgcacaaccccatcattctgttttgtgccagacactctacactaattaatgatttcacagcccttttataaatctcagcctaaggactgtaataagaagttccattgaacacccctgctgccagtactgcctgagtctgggaagtctggctggcttagaatctgtaccaacccctaagacgatctgatgtttaaata

SEQ ID NO: 160758 - DNA, 181 bp, Homo sapiens
gcactggtgattattacttagtttatgataatataattcagattaataccaacttaattgtaatcatacataaaaactttgtccctacatagcttcattccttctcccttcctttgtgctttgtcataaaaatcacatctttctatgttgtatacccatcaacacatgaatttataattat

SEQ ID NO: 160759 - DNA, 431 bp, Homo sapiens
gagacgggaaaccaggtttcttatcctttcttttggtatgtgaggtagggggctgcccagcagtgcttgaaacaaggcatcgatcaacagtagacacttttagttccgggtttcattctgcaaacacgcctgctgcctcagaatcagaacatcattagggtgaggtcgccagagcacactgacagctctcatgataaaacactcatttgacactttgctcataagagcaaatggtgtcgactgctagagaagcagcagagcagaccgatgcaacctgcagacgcgttgcttcactcaagtttggaaatgtacagatatcaatatatacacgacgacaacagcagatgcctgctgagaaagcactggccctaagtcacacccacggccagcaggtggccaacagggcactgcatgtcatggctgcttcccag

SEQ ID NO: 160760 - DNA, 149 bp, Homo sapiens
ttataggtgaaattgaggtaaaggattttaaaaagtgttgatattaagtgtgtctatagaaccaaatccctcaagaattattctgtatgcacctaaccaattttcatctacaaaatacttgagataaacctatgggaaacaattttaat

SEQ ID NO: 160761 - DNA, 257 bp, Homo sapiens
tatctggtttgctgtacttctccaagacatactgtttagagatctaaaagccacatacactcagtgtagctaatcttcctctctgaaaacttgctggtgacttccatataaagcttccctgggcaaaactacacaagtgccttccttcatttgctccttgaggaatttaaaatctgtttttttttttttttttttttttttaaatttatccttaaggtccaggggaacatggtgccacttcctgcattatgtccccc

SEQ ID NO: 160762 - DNA, 319 bp, Homo sapiens
tcacttctccagccccatctctagcttctctctcactcacaatatattcaagcaataacaaatgcattttatgtcttcaaaaatgccatgtatttgctctcttctttgccttaattacttttcttcttctagcaactggatatgtgtatagcactcaaaacaatgaagtttagagacaagactggcttcgccacttgttaagggttttgtgacagagttccatacatgaagtggccctcatctgcagaaggaaccaagaaaccaaagaaggaggcagacaggtccagcttgtcctcatatggtgattttatttgggaac

SEQ ID NO: 160763 - DNA, 369 bp, Homo sapiens
aagggatgcaaggttcttagaatggggggaaaacgagaagaaagcctgacagaaaaagactttgaaagagtagaatacgatcagtcagtgctaggtgcggtggctcatgcctgtaattccagcactttaggaggctaaggagggcggatcacctgaggtcaggagttcgagaccagcctaggcaacacggtgaaaccccgtctctactaaaaatacaaaattagccgggcgtggcggtgcacacctgcaatcgcagctacccgggaggctaatgcaggagaatcgcttgaaatggggaggcagatgttgcaatgagccaagatggcgccatcgcactccagcctgggtgacagagtgagactctgtctc

SEQ ID NO: 160764 - DNA, 494 bp, Homo sapiens
actatgtactagtacctaagaagaaataccaggcttagtaaagcaaacaaaaaaccattttaaacataagcgtcaaatgactctacacatcagcagagatggaaatagagctgcacttaaaccacagagaaaggcagctggtactggttcccctttctgtggaaaggaaaataaaggaagattccgcaattgctgtgagcacagtataagaaataaaataaatgtaagaagaaaagtcaatggctcataaaacatcactacatgttacctcatctgtgctgatgataagctgggaccaactattccactctggacatttgtctctctcttcaaaggtgacatgctcagagttccagcaacaatgttcatggttaaaccagaatccccctgtgcatataccttcttttaagtctgtcatccaatgagcagagatgtctatcaaaccagctaacgaacctgatttgtggggagggagggaaaggccaaagttaaac

SEQ ID NO: 160765 - DNA, 367 bp, Homo sapiens
tttacctgtccacatgcctgtatttagaggttctgcctactttaagaaacagtgacactgcactccactggaatcatgcactctaatttatttaactgactttttagtgatggacatttaagtatttccagctttccctactataaacaatactgcattgaatattttttatatttacatccttgcacatttgtgccagcatttctagtggaattgctggatcgaaacatatgcacttataacaatgatagatttccgcaaattttccactaaatccccaatagatgttttagcctccttggtagccttggaagcttggaattccagtgttttttttttttttttcttctctacttccataatagtg

SEQ ID NO: 160766 - DNA, 119 bp, Homo sapiens
ccgtgcaaataattcaatgatgaaatccctaagagtgttagaatattggctaagatcctcagcagagaaataagtgacaaggttataacatagatttggtgtttgctttatttctgaga

SEQ ID NO: 160767 - DNA, 550 bp, Homo sapiens
  misc_feature (25)..(25): n is a, c, g, or t
agattactgatgtttcgacgcctcngctcgtagtctcttggctctggggacatcagggaatctccatggtggggcagagtggggacatccacagctggaagccacagtcagcccccacaccaccgtcccgccctccttgtgatcacgtggtttcacgactacactttttgaattcccggcagccaccatccacacccctcaacctgatattttcaaggggattcagcacgatctggcattccacagactccacctgccaacggccagctgactttctcccaaggagcacaggtggtgcaaaatacgcactgactttcccaaaaatgacttgtcttatgtgagaaatttaacaaagtattgtcggattatagaaagaggaccaatttaactaggggtggaagaagacttagaggagctaattttctagctgaatcttgaaggaatagcttagatttctgtttgtgagggaaagtcagtgaaaaagagggtgttccaacttaaagaccactgagatgaggactctagaaggaattagtgttctcatgtgact

SEQ ID NO: 160768 - DNA, 381 bp, Homo sapiens
ggtagccatcattctactctctatctccatgaattcaattgtgtgaatttgtagttcccacatacaagtgagaacatgagaattgtgtctttctgtgcctggcttattcccttcacataacgtcctccagttccatccatgctgttgcacacgtcagttctgttcacaaccatatcctgcagttcacacttgtcttcagttgggttctcagctattccttaggcataaagtacagtctgaggcattgtgtactcaagagaaatttgggaaatggggttacttgggggggtctgagcactgtggtcaccctcttaattcagctgaggaacaagaagggctcaatcccatatgcacatatctcagaccatctcagagacaggt

SEQ ID NO: 160769 - DNA, 639 bp, Homo sapiens
catgagtcaacataggacttaaagcagtccccagtcctgcccccaccgtgcttcactgttttgcctctgggcctctgctcacctgctttcctcagcccctcggattctttccatcatcaccagctgcaaaacactgccagtctcccaaggctcagctcagatggagcctttcatgacactgtagccagtcactgctcccactcctgcatctccgtgatatttggacacttacagcatttcccacattttgctccaagagatagccatgtttggctccaagaggtaaccatcactatacacacctcatcagccctattacaccacacattcctaaacgacagggtgatttcttcattcattcagcatgaatgaatccacctgcatttacctagtacctactgaatggtaggcattgacttagatgctggggacatgggaaatgaaacataaggggttgcctgtgttacaaaactgacattcagtgggaaaaagcggcagcagaccagtaagcacatacataaatgaaggacggattgtgaaaggtgctagggcaaaaataaacaggaggttctgacggagaccactctagcagaagtggcattggaggtatatgctgaaagccacaggaataatggtctg

SEQ ID NO: 160770 - DNA, 227 bp, Homo sapiens
aaaagtgcataaacttttcactccacttaacttcaaaagccaaagactcatgcaatcctcagtacttaggatcttggaggaagtttcagagtttgaaattaaatttccttttattttattttattttgagatggagtctcactctttttgcccaggctggagtgcagtggtgcgattttcagctcactgcaacctccgcctcccgggttcaagcgattctcctgcct

SEQ ID NO: 160771 - DNA, 296 bp, Homo sapiens
gggggagcctgactgagggcggcaggaagtgacgggcactcccaggccactgctgtccccagggtgactaggccacaatggcctccttaaggagggagaataatgagctcgttagggccagagtcaggccagctgcacacaattaggatgttaattaagtcctctgaggtcacagctcagcctaggacaaaacagctggtggggggaggggagaccccccactccttcctctccctctgaaatcctctcgtcctcccgctctgactcccaaacctcccagccctgttcagcccagg

SEQ ID NO: 160772 - DNA, 368 bp, Homo sapiens
aaatcatggacattatgtcatgcatacctattaaaatgacagcctgtgtgccatggtgctaagtgtgaaatgggctggaggtacaagagcctgcttccttagaagaaatctggtcaaccagacaccagctaaaagagacgaaaatatgagctcatggggcttcgtctcccatatcttgtaatttaaacttcagtaatggaatgaacagattgtggaggagacttacaccgcatgggtgctggacagtcattgtaatagtagcatattccacgttgtgaaaaacagagatgataacagcggagcatcctgctctccctttaataaaattcccccgtgctgctatgggcaggcatttaagtaggttaacg

SEQ ID NO: 160773 - DNA, 146 bp, Homo sapiens
attgatgcccagaggcccacagcatcatcatgaccccctcacattggggattacggagaccacgaaataaacctggacacatcacggctcaccatggggtcactgagtccacagacccagccctggttatctccccattctcctag

SEQ ID NO: 160774 - DNA, 586 bp, Homo sapiens
ccccactacctcagattaatataacctccttctgtcaacatagttgacaaggtttcagctttcttaattcacattccaatcctgtctcccagaaactataacctactcacttttgaccagacttgggtatccccggcccttttcagtcacacattttcttggaattacttacagtgatggctaaattccatcactctatttgattcaggctggtgttactcccagaggatgacttaattttcaaattatgaggacatttattttgccctttgtatgactatagggcatcactaagtattgaataatttctccagatatgagccaactagtacagtgtagagtatggcattcaccttccttgtgcatgactttatttatatgtgtgtgtcaactcagcccaagattaagattgtataaattttagggacagccatttcacactttaatttatgtcaagcttttttttttttttttaagtggagtcttgctgtgttgtccaggctggagtgcagtggcacagtcttagctcactgcaacttctgcctcccgggttcaagtgattctcctgcctcagcctcccaagttg

SEQ ID NO: 160775 - DNA, 408 bp, Homo sapiens
tcaccatcttggtcaggctggtcttgaactcccaacctcatgacccacctgcctcggcctcccaaagtgttgggattacaggcgtgagccactgcacctggcctagcctttcttaatcgtgtccctcatcaatgaaatggtagaaagccaatctgttttacaggtgtggtagaagggaaaaatgaagagacctctgtacaagcctttgcagaggtcttgggactcagtggtgagctccctgccaccacctcctgtgcccttgcaggagtaggagatctatagtcttggagaataagggtgataccccaataccccaagcctggttagggaaattgatgacccttattggagcctgtggggaggtagttgggaaattgttagtagcttcatgttggcattttctttttt

SEQ ID NO: 160776 - DNA, 131 bp, Homo sapiens
gagcagcctcaggtctggagagggggcgaggacagagaaagagctggttttggtgcatatttgcaggaaaagttgtagagcctgctgatagattggaagctgaagatgaggaagaaagagaaggcaagggt

SEQ ID NO: 160777 - DNA, 188 bp, Homo sapiens
acacaaggccagtgtcgatcccgctcacagccatctccccagagcctagcacggtgcctggcacacagcaggtgctccatgaatatttgctgaatggaagaacgacaggatgaattcccctggctgtgagcagggaggcctggttggtcatccccaattttccacctctccctgctgggcaaacacta

SEQ ID NO: 160778 - DNA, 244 bp, Homo sapiens
atgttgagttccgcagagcaccaagaaaaggaaaggaaagaatttgtatctttgatgtattagttaatttgactaggtgcctacccaggcagggcaaatctgatcaacaatccaatgtgtctcttgctatgccaattgcaaaaggagatggggtttcgctttggacggtcctcagggtcagccactttctagctctgagtccactctaaatgttctcaagtttgttcgatttgaatttcaaaaa

SEQ ID NO: 160779 - DNA, 224 bp, Homo sapiens
atttctaggctattgattagtcacatcagcactgatccatttatttcacttaacctcctttttcactaaaacttgtaagcagaggcaaatagagagccttcaagaggtgacagaaatagctaaaacatttagaaggtttttaaaaatggtaccatcagaactgtgaaaagatgtccccagagtaaaagaacagtgtgggtggcactactcagtcttagtgggaa

SEQ ID NO: 160780 - DNA, 246 bp, Homo sapiens
ccaggtagacctaacaacttactcctgcgccttattaacagtcacactcctttctagttggacaaaagagtgatgtttcagggcttttcttttgactgccccctgtggaatggccaggtctctgcttcatgactcttcatgctccttagacatcactcaaatcaaaaggccagttgattacagttctggaattagagtgcagcacatattcctaatgactcttctttcctggttaggtctacctgg

SEQ ID NO: 160781 - DNA, 251 bp, Homo sapiens
cagcccaggcccttcctctccccactcttctgcaggccctctaggactctggtaagtgagcagtatccttgttctcagctgaacattggggcatgaacactgaggtgggcactgagtttgcctactttcttggaagctctccgactcttgaagggccctggatctgctttggagatggatgggcacggagcatttgtgacccccagtgctctccctggcatgttgggcttattgtgttgggagcagcttct

SEQ ID NO: 160782 - DNA, 270 bp, Homo sapiens
ttctttcaagaataaggataattcgtttgcttatgcattacttttgttttctgctatgttccacaagtggcataaaataactatgaacctatactatgtatcacaaatcatacaaagagtgaacaatacaacaaagatgaacaacacaccaccaccacagttcttgcccttaatgaacttttaatgacacttaaatttctaaaatgtctaaccagctggttttcctacctccgatgtcaccccactttaatgtcttaaatatggttcctg

SEQ ID NO: 160783 - DNA, 533 bp, Homo sapiens
tgtcattaccacaggaaggcatagtttatggtgctatgccttactttagaactgtaataaggtgagtgctcttctttctttgtacttctcatttcgatctgctaccgtcagtctgtcctagccatcattcttcaagctgttgaattgtgggcttggcatatattggttgtcttagacttccctggagttctgtgttaaaacagtaatgtcttcagaagcattcatgaaagtgatcggaaacgatagaatgttgagtgagaagggattttagaaatcacataatcttttaattttctgaatagttttagccatgaaaatcttagttcatgtaaagccttacttgaaaacccaacagataaatttggaactgggagttttgaaaatcactgaggattctgaccccttttattttgcaagtgaagattcttaaatccagaagggttaaacgatgatgatctacagctctttccaccttactcctcttggcctgctgtcctcagacttctgaattggattatggttctgctttgttg

SEQ ID NO: 160784 - DNA, 399 bp, Homo sapiens
cattcagtaaatgtcacttttctccctgctggcccttgtctgacattactcagcatttcagaagtggcatatactatggacttacaacaagccttgaacattcttggaaaacttgcccaagctggaatcccatttttatctttataaccatcttagagatgagtagggcaggtagagtcgttgtgattgtggagataaagagcactgagtaaccgatggatgggaacttggccttccccacattagttaaccagtcagtggcagcccttggatgggccccgattcttgcagcaaagccctattgtagccactgatgtggttctcggttagctggtgaggtcagtatggggtcattccttgcttgccaaatcccttgtccactcccagctggaaaaaatt

SEQ ID NO: 160785 - DNA, 369 bp, Homo sapiens
ccaggcgggtcaggcacctcctcccatctcctccagtcccctcctgcaccacagcctttgtccctctgcccccggtggcctattcaggggtctcactcgccctgcaggagctgctaccgtttccccagtgccaggcgccggcgtgctatgcagtcaggagtgctcaggttgctacttaagtgcggaagttgctgggtgacccgtgcaagtcatctttgtggaattaggttccaaagtggcttgagaagtcgggggaggtgggcccagcttcagaattgtctggaaccttccccagcctctggctatgtctgccagtcacccccaggtggaggacaaggacaggttccaatcctcgtcttgcgggggctg

SEQ ID NO: 160786 - DNA, 367 bp, Homo sapiens
  misc_feature (217)..(217): n is a, c, g, or t
agcgttctcgaggatcaccggaaggcagacggcacagaatccttgtcataatgtagagaaaggattgtgttggagtgaggcaaagataatatttattttgattaccgaattttttgatacttgcttaaatttagtgcttgagatgagtgcttcactcagtttaccctaatctggccctggttgaattaacaaaccttagaatggttagatatgttanagttagggagaagataagccaaggtttaatgtagtgttctgaaccttgaacaactgggtaggtagtggggttattaactgagctagtgaggaaaagccagtttggggcaatgttgataaatttagttttgaacatgttgcattttatatg

SEQ ID NO: 160787 - DNA, 245 bp, Homo sapiens
gaacactctgtcgtctttctttttggccctcctccagtttatagtaatttctccgtagtaatcccttgaatctcatctgtcgttcccagaacacatccccttcccttgtaactttggatgcatagttgtaattttcagtaacctatgcagtcagaattaagaacatcagaatagcaacatcggttgaagtttatgattcattgagagttccatagtcttcttattgaggtgattaattcaaagtg

SEQ ID NO: 160788 - DNA, 546 bp, Homo sapiens
gaagcagttagtacagactcatggaaatattcaacaggaagatgatgatagcagctctggaatttaggggacaggtcaacacttgaaatatatacttgagaatcattaatgtattcattcaacgaaggtttgaaaagagcataaaatgttctaggactgtgctaagatctgagaatcccaaaacagtgagacaaagatcttgttatcaagaagctcacagtctggagaagaagatgaacgaacagaagccatcacaaagcaatgtggaagacaacaatagagatgtgtcaaggggatatcatggaaaccccaaggagactgacaggtaatcgataatgatctgcctcaggaatattaaaatataatagccataagaggaagttacttttttaagtctgtatttgaatacttaatacaatgtcacaaaaacacacagaagtcattcaacaactatttcctcaaaatgagatgaactaagacagtccatgaaaaaaggttgttacatatgtatttgtgtgtgtgtgtgtgagtctgtattaactgtgt

SEQ ID NO: 160789 - DNA, 280 bp, Homo sapiens
tggtgataaatgaggtagttatatcttggcttggtgtgaggagtgaaagagttaatatctggcacttaataatatgcaggacatgtgttgaaggagggctcaataaacgccagggatgatgatgatgatgacgatgaatgattatgatgaagaaaaccatctccatagtctcgtaagttccatttttactttccagtaactgcctccctttccaccctagttccataattgccggtcccgagatatatggaaccatggttataatcgccggtcacgagat

SEQ ID NO: 160790 - DNA, 323 bp, Homo sapiens
tgcctacctctcaggacaatgtccttttggctccacagtccctgaagccagagctggtgggggcagggaggcagccaccagcctctatatgtagtggaggagggggtgtccagggaggggctgcagggttccccttggcctgcaaacaggaacacagggtgtttctcagtggctgcgagaatgctgatgaaaaccccaggatgttgtgtcaccgtggtggccagctgatagtgccaatcatcccactttgccctgagcactcctgcaggggtagaagactccagaaccttctctcaggcccatggcccaagcagcccatggaa

SEQ ID NO: 160791 - DNA, 149 bp, Homo sapiens
caatcctaaatcttcagaggacagagagcccacatgccaccattccagtactgaatagcagcttgggtcctgagaatttccggtacccacattttagagactttttgtctaccaaaagtaacagtttcattcaggacaagaggttattc

SEQ ID NO: 160792 - DNA, 305 bp, Homo sapiens
caacaaaggattttaaatgttacataaatttaattgataaaacattggaagggtttccaattttgaaaaaaagttccgtggataaagtgctgtcaaatagcatcagatgctacagaaaaatcttttatgaaaggaagcatcaatggctgcagcaaatttcattgttgtcttattttaagaaattgccacagccaacccccactttaagcaaccatcaccctgatcagccagcagtcattaatatctaggcaagatcctccacctgtaaaaagatgatgactcactgaaggctgagatgattgtta

SEQ ID NO: 160793 - DNA, 893 bp, Homo sapiens
gggatggtcattgcagaaagttgggaagaaagtctcatcacctcactgttagattttacatatgtttatgtaattttgtgaattaccagtcttctgacttcaacacaaatagcaaattgcaaagtgttacttggggttcttgggatgggttgggaagacattctgacaatctcagaagttctaaagaactagttttatcttaactatcactaatttgcaaagtacatgttcctttttcctctggctctaattcctctctaacaaaagtatttctaaatttgacattaatctctggtgcttcttcaatttgtgcatctgcaaactgatttttttattaaatgagataacatgaaaatatttgcaaatataagatgatataatttctctttttttcctctgtcgttttacaaagtgatctgatgtgaaacaaaggtacagaaatctagtcttcctcagactttcagatttataatcatttttttgtttgtttttttaactactaggacccttgaatagtagcatatcagaataccatgttgaaaggaagctcagtcatatagtcctattcctattcactcacccaactccagacttttaaagttaactaacagtcacctttaaggaagaatttacacagaactttcaaagcaagtaataagccaaaataaatatacttcaggcaagtaatgaactatcctttgtgtctgcaattgtctttagcttaattgatgccaggactgtgcttagactatgtggacagggatgggagattgctttttatctgatctcaggtccctgcattcataggcatcttccagattgcagagaggacctgtctttatcagttgctgtgagctgtagcttcagcgtgtctctttactccctaaacattg

SEQ ID NO: 160794 - DNA, 703 bp, Homo sapiens
gcgttctctaaagcttccaaaaggatccagtcccagatacgtattacatttagtcatcatggctccttcgtctcctctgcacaaggggaagcagcctgtggccctcaccagatgcagatatccaatcttccagcaaacagaatcggtctgcctatcctcacataagccaatccattctccatctcctttaagcagacatatactgcctcgtaagtataggatgccttgtagtaagatcaactttaaacattcgcctggtagcagaaccataacagaaccctgcactcatgatgccttctgaggactctgcccatcttccttgattaactccagaatacagaagcaaccctaaaaatgcaagcaaacatcctgaagaagtcaggaatggatttttctaagactctgtataggcatacctcgaagatattgtgggttggatccagactactacaataaagagagtataataataagttaagtcacataaattttttatttacttatatatacactatattgtagtctattaagtatgcaatagcattatgtcttaaaatttgtgtatatcttaatttaaagatattttattgtgaaaaatgctaacaatcatcttgagccttcagtgagttataatcttttggctgatggagcatcttacctcaattgtggtgactgttggcagagtggtggttgctgaaggatg

SEQ ID NO: 160795 - DNA, 261 bp, Homo sapiens
gtaccaccatgcctggctttttaaattttttgttgagatggggtcccactgtgttgcccaggcagatcttcaactcctgggctccagcagtccttccacctcggtctcccaaaatgttggtattacaggcatgagccactgcctgtcattattttaaagagtactcctacttaaccaaaaaataaagttaattgtgaaacagcttccggcaggtctttcaggaggtattcctgaagaaaacattgttatcacatgttattg

SEQ ID NO: 160796 - DNA, 494 bp, Homo sapiens
aatctgaaagcatttaaaactaggtttgaaattcagtgaaagaggagtgttgtgtgtgtttaagactatctcctgggctatttagtcagcaacctgtaatttaactgataattaaacacgtttgagtactattgtctgaaaatatttattttatttaaatcatttatttatccacataataataaagaatttttagtcatttttcaatttctcttggaagaaggagagaataacctggtaactatattctatatttagaaaaattaagataccaaaaaataatctgctttaattgttaacaagccagagacaaatcaaacagctccatgtttcctctcaataaatatctgcacttattcttgcattcaagggaaaaagaaatccaaaatatgtatagtgataacagatgtgatcttaaattttatagaaatattcctatctattcatatggtagtagaatatttaaatttcctattagcataactggaaaaaaa

SEQ ID NO: 160797 - DNA, 447 bp, Homo sapiens
ctaacagctttgacactatcccactgatttttgtccctgccctgatgggtagccttgagtagtgtctgttgtctggagtctaatgtcacagcaattaaattcccacaggaagcagcagctttagaagatgtgattagattggagacactgatgcttgttttgattttgaaaatgcatcatcgatcatggctactgatttcagcagcagctctagctgaggggagctgtgggctaagcatctggctttatatttaactttggggaaaatgaagtcttcccttgcctatcaagtctactctgatatgtggccaatgcctttagcagataatcccaaagatgtcaaataacctttatttcccagaggtcatgttgatctttttcttctcattctgacctcagaacagacctattcattttacatctgacatcagactgtgagaagagtaa

SEQ ID NO: 160798 - DNA, 414 bp, Homo sapiens
caagagttcaaggctgcagtgagttatgattaggccactgcactccagcctgggtgacagtgaaaccctgtctctaaaaaatcaaaacagaacaaaaaccaaatgtgttcccttcagacatggaaaacacaaagtggggtatactgcctgccttctgtgcttcctctgatccacctagactgtggcttccacccactctcaaaagacatcagggaggggaaaagatgaaaagaaaaacccactagaaagctagtgacagacatcactcagccccacacctttgggggggaaactttaaaaaacataaaacaaaccacaaagtcttctttattcctgcctgaagctgaagacacaaatgctattgtattgctggtgttctagcatcccattcaatcattgcaacaccatccacga

SEQ ID NO: 160799 - DNA, 320 bp, Homo sapiens
tttgtatttttagtagagacagggtttcaccatgttggccaggctggtctcaaactcctgacctcaggtgatccacctgtctcggactcccaaagtgctgggattacaggtatgagccaccatgcctagcctcaacaaggtatcttgccatctttggcacatatcaggaggtgctgactgatccctaatgtaaatatgggctaacatatatttagttatgagctccatgcctcactgaagattgcatttgccccaacatgacttcttcagagacccaccctgagcttggcaggtcataccaggtctgcataaaatgagtg

SEQ ID NO: 160800 - DNA, 278 bp, Homo sapiens
tgagccattattgtaccttattttttctatatgctgggtctttcctgggtaagaggtgaaatgccccctgaattaaaatgtgggacactttcctgtcttaatgaaaacattcacctcatagagacttgtaattattttcctggaaaatttgcttaacttgattgtctagagaatggtttcatttttagtgcactaataatcggttttacctaatgagttaattggtcctcagtgaatcctatgttaaatgtaagaatgtcttagataattcttcaaaa

SEQ ID NO: 160801 - DNA, 639 bp, Homo sapiens
tatcatccagccttgtcattgtgtcctgcccgcgatgtcttgatcctctgtatgccagccattctacttagtggctgctctatgcaacaggctttctttcatccatgggtttttgcctagtctttctgtctggaacaccattctctgacgtgtccttctccaaagtgattcctcctttaggcctcaacttctctgacattctctggcaagcctcctagagttctaggggttggatgtgttttctcttacatgtgatccatgttattctatacaaccttaatagagcacttgcaacggtgtgtgagaatcgcctgctgacatttttgttctgtccatgagactgtgaattcctacgggatagcaaccatgccctgttggtggttttatctccatactacttagcacacgtgagccctagatcaatatttgttgaatacaaggatgagtgcacattgtcctaagaaacgggtaaaacaaccaatgcatggaggaaaatcctcacttatgaagaaaaatatgtggcaaatggagacgttcaacaaaataagccatgattctatagaagcattaaagcaaggagaggggtggaataaaatctagtgacagccatgagacttaaggaatggaaaatacaggata

SEQ ID NO: 160802 - DNA, 205 bp, Homo sapiens
atcagatttgagttggccctgaagaatcagtggtgggctctggaagcaggagatactacgtgagcaaggacacagagactggggtaagcctctgggatctgtaggacacggtaccgtgttttaggagttcacggggaatggtaggacacagggaatggctagaagccagctctcctaaccattactgtaaaggggcttccttgcc

SEQ ID NO: 160803 - DNA, 577 bp, Homo sapiens
gaagcaggcatggctcctctcattattatacccacataagcacttgcaaaatttctgtttctagtcctggcactttgagctctgatggtttggagatcttagtccttaaaggagaaatgcttccaaaggggacacaacaatgtttccgattaattggaagatgagactcccatatggcgattttgtacttcttatgtcactgaaaccaacatgccaaaaacattggttaatctactagttggaaaaatgaatccgaattaccaagggcaaaaaagtgtgctattttgcaatggaggcaaagtagggtaagtggaacccagaagattgcctagggcatgtcatactacttccatgctcaatacaaggttaatgaaacgttacagcaaccaaaaaacagagcaaataagacacagtcccttcaagaaggaaagtttatgagtcactcaatcaggttaaaaaaaaaaaaagccagagtaactgaaattctggcagaaggcaagagagctatagaacagggagtagatgaaggaagccacatatttcagctaccacctcagaccagttacagacacaagct

SEQ ID NO: 160804 - DNA, 323 bp, Homo sapiens
tgggaaacaacgaaggcgaagtgccctcccgggattaaacaccaggaaactccatttctaaccaattgcgggagtgacgcagagcctggattaggcgctttttcctgccccgcgagcccggcacacgcgcaggaacacacaccacacgcacacgcacaccccagtgtgcatgccccgatcaggtctggggacattcccagcggtgatgtagagtgcaaggaaagacgcggagatgtgaaaagcgggacagagctcgctccctaagactaggggatggcagtgtgcaaaaaacaggcgaagctcccagatccctatcccaccag

SEQ ID NO: 160805 - DNA, 342 bp, Homo sapiens
ctttggggcatggtgtcaccatctttgaaatgggcatgaataaacatccctataagaggataaaatcagaagatgcatgtgtctgtacctaataaggggcttctcaaagcacacagtatgaatggggtacaccttctttgtcaagtggggcacatagagacttcactttgagtaggtgagttagggcccctctgcttgtctaccttctggtccctctcaggagccagtgcccaaggtgagagcatcaggagactggcagtcatcgagtcacgtgagggatcttgtttccatttttaaatctagccaacaaccatacatgaaaataaaaacaaactaataaag

SEQ ID NO: 160806 - DNA, 277 bp, Homo sapiens
tacatctacatctatagctatatcaacatccaatttgttctttttctctgagaacacctactgataaataagtttctaagttttgtctatcagttgatgctaaaacattaaaaaaagagaacaactaatactctttttacactaattagaacaatgtaagcctttttgttttattaccaaataatttgtatttcctatgtaattgctgcagttttattttgcatatagattttttttccgtaacatctttgtctgttagtggttttatttatgaata

SEQ ID NO: 160807 - DNA, 245 bp, Homo sapiens
taatgccttcctagaatctcccactaggttgaagagaactggctccaagataatcttctgccaaccccaaatgtgtaaggcactagtccttctgcccccagggaaggtggaggcacaggagccagggtgaccatggatgggtcaggctcaagggcgatgggcaatgtcctccacttctttccccactgcaggaatcagataactaggaacaatgcccaagccccctgcccagtactccctttggg

SEQ ID NO: 160808 - DNA, 575 bp, Homo sapiens
cccacctgccgatgccatttaaaagtaaaaccttcttggctgtggctactggggtcaggtgctcccgcaacagagccagaagcactgcaggcatggagcagtataaacccttgcggtgacctggaagaggtgatcccagtatcatgtctcatcctactgcatcacatcaaatctgctcagcaattgctcttgacagtactttgtcttttcctttcctgcagtaccagggaaaagggcacaaaaagcccagaaacatgacaagtgagtgcatataattcagtcaaccctcacagtccttaaaaccacaaaacccccatgaagcctgtgcggctcccgaggccacatgaccggatcagtgaggctgccagtactcagcatgctgccgttagagggagtcccccctgcatgttaactcccagtaacaacaacgggtgctgtgctgatgacctcagaacgtggcaggctcctgggccatcgcagtgactcacagcagtcctaacagacaggcctgctgcttcctattgtgcatgaggaacaaggtctctcaggcagagctgcaaacacccacatggtga

SEQ ID NO: 160809 - DNA, 291 bp, Homo sapiens
tgcttaccctactacatacttccgctatatatactcatttacagaatacatccactgccattctgatcccccatgccaagctcactgtaacaccctaaggtcaataaccacatcttataatcaatccaatcagcaccgccctatgaactctgagattttaggcaaaacagtgacaagaaacctaatcatatattgtcagggaaataatctgacgacctctccagtcagatcaactctatattattatttttctgaagcaatcctcctacggaagtatgtagtgggtaccga

SEQ ID NO: 160810 - DNA, 897 bp, Homo sapiens
tagtggctcacgcctataatcccagcacttggggaggctgaggctggtggttcacctgaggtcaggagtttgagaccagcctggccaacatggtgaaaccccatctctactaaaaatacaaaaattagccggatgtggtggcacacgctgtaatcccagctactctggaggctgaggcaggagaatgaatcacttgaacccagtaggtggaggttgaagtgtgccgagatggctccactgcactccagcctgggcgacaaaagcaaaactctgtctcaaaaaacaaaacaaacaaacaaaaaaccaaccatgtaactggcagagtgttgtgagagttagaaaagacattttgaagctttgccttggtcttggcaggggatttgggggtgatagcatatatatgtacaccaagttgttcccccatctaagtaccaattactactggcactcccctttctcccctcactggctcattgctagaatagtagaagctagggatgagctggcaaagttaacttccacacaggcctctgtgaagaagaggaagagccagagaagatttggaagattatggtgacatggcagaggaggcgaggacagtggatctgggggcctggggcagctctgtggacccaatcttagcaactgttgagacaaaggatgtacaaatgggatcagaatgaaccatcagaggattagggctcaggacctgaggttcatgttgtgtgcagcatctgaacgtgccgctgctgcgtgggtcagctagttagagccacatttctgtgtgatgctctgttctcctgcagccagtccttccccccacctcccacattcctgatgagctctgtgactcagctgcttctcgggacgtctgagcagctgtttttttctagggat

SEQ ID NO: 160811 - DNA, 550 bp, Homo sapiens
  misc_feature (39)..(40): n is a, c, g, or t
  misc_feature (46)..(46): n is a, c, g, or t
  misc_feature (52)..(52): n is a, c, g, or t
  misc_feature (54)..(54): n is a, c, g, or t
  misc_feature (62)..(62): n is a, c, g, or t
  misc_feature (68)..(69): n is a, c, g, or t
  misc_feature (72)..(72): n is a, c, g, or t
  misc_feature (86)..(87): n is a, c, g, or t
  misc_feature (102)..(103): n is a, c, g, or t
  misc_feature (107)..(107): n is a, c, g, or t
tcaaaacgcctgagggtgagacactcgataagcaccctnnagttanaacagntncgctacancagctnnagntacaacagctccanntacaacagctccagnnacancagctgcagtagataactgatgcatatgtattgtatcatattaattaaaatcgtaaaaagatggttagcttaatatgaaggtttggtgcaagtattgcctcaacaggtaatgagtcttttccatgtagctgatttaaatttattcaacaaacatttaaggtgcgcacactgtgctaggcttggggtttatggaacatatgcagtaatggggagaaacataggatatacatagtaagcaaatctcaagtactgtggataaagaaaatgtgtaagaggataccaagtttgggagtgccagcactgtgaatgtctgcgagtttgtggtggaatgggatgaaatttagaaagactttgaagacagaaccttgctcatgctggatgagatggtttgggatggggtggaagcagggagccgtgtcaggtctcaggtaatttaaagctca

SEQ ID NO: 160812 - DNA, 421 bp, Homo sapiens
cacaaaaatttaaagtatctgtacaggcaaaacaacaaaccacatcaaacaacaaactggaaagataaaattataatacctgttacaaaggaccaaattcctccctatatagattataaataatagcatatacaaattagtaaattaataagacaactcaatcaaaaaatggcaatggatagaaataagtagctcttaagaaaatgggctttaatttttcacccagaagactggcaaagagtaaaattatgatagcatccagtgtcattcagagagtggaaaaatgtcaattatgagagtataaattaattcaataatgcaaactcattggaggtcagctttaatgttcatattttttgacccaacatttccatttctaggtaatttttcatacccttgcagatgcatacttaactggacg

SEQ ID NO: 160813 - DNA, 803 bp, Homo sapiens
tggtggcgactgacggaactgggtgaagatggagtctctgtcacccaggctggagtgcaatggcgcaatctcggctccctgcaacttctgcctcccggattcaagcaattctcccgcctcagcctcgcaagtagctgggattacaggcacacaccaccatgcctggctagtttttgtatttttgtagagacagggtttcgctgtgttggccaggctggtcttgaactcttgacctcaggtgatctgcccacctcggcctcccaaagtgctgggattccaggagtgagccactgctcgtggcctgtattttttatggaaacagaaaagcccatcctaaagtttacagaaaatctctctctctctctctgtcactctctctctttttataagacatggtgtcactatgttgcccaggctggacttgaactccttggctcaaataatcatctcacctcagcctactgaatagctgggattacaggtgtgtactactccacctgtctgtcatatggaatattaaggaaccctgaatagctaaaataatcttgaaaaagaagactatagttggaggactcacagttcctgatttcaaaacttactacaaagccatggtaattaaacagtgtgatcttggcttaaagatagacagagaaaccaatggtatagagaagacagccaagaaataagccactgcatatatcatcagttgatttttgacaagggctccaaaaaaccctctccagggaaagggtagtcttattaatggtgctgagaaaactggatatccacatgcaaaagaatga

SEQ ID NO: 160814 - DNA, 399 bp, Homo sapiens
cagcgagccatgtgtggtgaagagcagcgctctggtggtgtagagtggcattgcataggcaatcaagggatacttaggaagatgggtctctcgtaagacccgggggtcggttgggtgtggaaaacgagtgagcccgtgataatctagattgggggctctaagaagtttgtgggtggggggaaggtactgaatttaacttaaaaagagtttttagactgggcgcggtggctcatgcctgtaatcccagcactttgggaggccgaggcgggtggatcacttgagatcaggagttcgagaccagcctggccagcatggtgaaaccctgtctctactaaaaatacaaaaattagccaggtgtggtggcacgtgcctgtaatcccagctactcggaacgctgag

SEQ ID NO: 160815 - DNA, 446 bp, Homo sapiens
atatgcagaggaaacagcctgagaaaacatataaaggatgatataggtaagcaacagcaaacagtctagcttgtagaagtagagtttacaggggttggggatgataggctgtaacattatgtgactccagtacctagctgaggaacttggatttgtcaatggggcacctaggtagattttgagtagggtgatgacaggtttggggcctcaacttgagaaaattcatcttgtagctatctgtggtataaattggcatgggggctgataaggtttggctctgtgtccccacccaaatctcatgttgaattgtaatctccaatgttagatgagggacctggtgggaggtgattagatcatgggggcagatttcccccttgctgctctcatgatggtggttgagttctcacaagatctggttgcttttgtttgagacggagtctcgctgt

SEQ ID NO: 160816 - DNA, 150 bp, Homo sapiens
tcagttattcttgacctgagtcacatcagaaagccaacagagggtgtaggctctcagggtgttgccagccttgcaggatgaaggctgtggcgccgggagatttgtgcagtgggaccaccagctttggcaggtttaacagaaatgaacggt

SEQ ID NO: 160817 - DNA, 260 bp, Homo sapiens
aagctgaaatgatcacaggctgatcctcagacactgagatgaaacagcattggacaaacttggtccccctcccatagtgcaggcagtagatgctcccagcccaagggacctgttggcaccagccatcctcagctctttgctgtcttcagtggggtggtactgcctggcgaagctggcagaggggccacatcagagacaagcatccctacaacagacaagcagctccaaagcgctaggtttaaaacctcaaccaagataag

SEQ ID NO: 160818 - DNA, 274 bp, Homo sapiens
gtctttggttaatgcattcactgcccccgcacaacgccccccacccgcccttactgagaaaatgtagcatcctgtgtggcttgttctcgtcagggttgtatgctgagataatactgctagagcctttgaatggatagaataaggaaggcctcagcctacatgccgaaggaaaaaattaaaggcaaaggaatcatttgtttccagaaatcctctgggagacagaaacgtgtttaaggcacttacagcattcaagtaagataaattgtggcaaaaa

SEQ ID NO: 160819 - DNA, 438 bp, Homo sapiens
acatcccagagtacattagttcccttccatatgcttaaatgatcctccatcttaagaaaaactcaagtccgtgatcttaaaaatgagactaacttttcacgtcattcatgcaacatgttaatagctgcccgaaatagctgttttcagcagtagcccaaaaggctctctctaattctaagtcaatctccaaaaaggaatcgcaaagcatcctaaaaggttgatttcaagggaaagccaatatagcttactcataaacatctctgcaaacggaagaatgaataaacgaaatccaaagataaccctccaacctaattttagtttttagtttctgactcctcttcccagcaaacctctttcaagatttggcaagcaggccacagagtaagaaaagtaaagatttctggtgttccccaagctattacttcctgctgctttcct

SEQ ID NO: 160820 - DNA, 352 bp, Homo sapiens
gctcctttgacatactgggaaggctcaacactgagaaccaccagcctctacagaagatggagtgagctgggggttaaaatagaggggaagtggctgaaagactcctaataaagcagtaataagaaccaccccctaccctgcccccacgcacatattctacacagctggatgactttcccttcctgcccaaaccgcaggagacaagtttattttctctgaaatttgaaccagagaatttcaacctcagggatacttggcacaaaagtggacaagacgagggtcctaagtggaaacagcggggtagagtaaaactctgcctactacagcacaagactctctagccccctaactc

SEQ ID NO: 160821 - DNA, 516 bp, Homo sapiens
agtttgtccattgatgttgcctctggcaaatcctggccagaaggaaagaatgtaaaccaaaaataaaattctaagctccccaaccacctgaatggacccctcctcttggccaagggcattccaaagttaacctgaaaaactagttcaggacatgatgaggaagggggagtcggacatgcctcattaccatcaacatgaacactgtccttaagactgatacaatagactctttaagtctaataagaaacatttacaatctattctctctgaagcctgctacctggaggtttcatctgcatgataaaactgtggtctccacaactccttatcgtaaaccagacattcccttctaatgattccaggtctttagataataactcaaccaattattaataccagtcagaaaatttctgaacctgcctatgacctggaagtcctccaacttccatttgtcctgcttttccagaccaaacgaatgtacatctcacatgtatcagttgatgtcttatatctccc

SEQ ID NO: 160822 - DNA, 284 bp, Homo sapiens
atcaaacttgcccccaaaggcaatcacttgccaattgtgacactgtcaattctacctcctacaatatcacatacatctgcccttgcctctctgtccacgctgccacttccccagttttggtcaccatctcctttcacttagaccactgcatcagcctcctattctatctccatttctaggcttaccctactctaatctagttagcaaactgcaaccagaataatctttgcagtacattccagacagaagtgcaaaggcctgaagcaagaaagattgtggccttg

SEQ ID NO: 160823 - DNA, 271 bp, Homo sapiens
cagcactatgacagtgttaaactatttgcagttgcctaatacactatattttcttagttttatgtttttgaatctgcgattctagtttcctttatctcctcttctccccatcctcccagctttcccttaccaacctctgtatatcctttaattagctcaggtatcactactttttctgattctccgagtggtttgatgtgtctcttcatggcccgctatatcacactgaatacctcttttaaagcacttttcacactgttataatcatctt

SEQ ID NO: 160824 - DNA, 619 bp, Homo sapiens
aatgataaggtagagtaaaatgtaagaaaaatccagtttgaaagtgactatgcctgttttcaggcgataagtttttgcactgttggaatttgccatttgatattggaatacattcttaaataaatgtggttatgttatacatcattttaatgcacattctttcactttttttgctaatgacttattacttgctgtttattttattttagagtatggaaatgatgttagacaaaaagcaaattcaagcgattttcttattcgagttcaaaatgtgtggtaaagcagcggagacaactctcaacatcaacaacgcatttgcccccaggaatggctaaagaatgcacagtgcagtagtggttcaagaagtttttcaaaggagacgagagccttgaagatgaagctagtgcccagccattgaaagttgacaacgaccaactgagaacaaccatcaaagtttaccctctgacaggcacagtggctcacgcctgtaatccccagcttcctctctgttctatcttctgcccggggctggcttgccctccattcatctgcccagaagcacagccgtgtttgtgcgcagccagcagactctccagactccggttccacagccttaccc

SEQ ID NO: 160825 - DNA, 528 bp, Homo sapiens
ctacttttccacagggcttcgttatatacagcacagcatttttttacagcattttattttatgtgcacatttatttttgccactttttaaaggaaatatgtgcaagaatataatgagacggtatatgaataaagattgcagcattaaaaatacatataaaggccaccatgactgcaatttttcatgagtgagaatttggtgagaatagtttacatgctctcctcaatgtttctaaagacacaacactgaatggaagtaatatggacccacagatcagcactcaatgtagcatatcttagaacagctttttccttactcccaggatacacagctgctgcccatattcccctctggggtacagttatgtcagacttgaaagaaaaacccaattcctgctctgccctggtccttttatatccagacgtatagagcattggggaaaaaaagtatgctttcagtatacaggcttcttattaacaaggaatatttataaacactgtgacctcctgattcctccctgtggcaaac

SEQ ID NO: 160826 - DNA, 455 bp, Homo sapiens
gattttgctcatgccattgcctctgcttggaatgttctttctctttcccatttaccaaatctaatgcatctttggtgctcaaatgtcacctctcctctgcttaaacagctcaaggtgacagctccaacctgtcaattctcacttagcctttaacagagtgcctcacattacaattatatgggtatgtcttctttgtcccttgacaaattgtaagctctcggcggacaggtttcacgtctgaatcatttctgtgtacccaatgtaaaagggagaatatagttcctgatttgcaaatgtctgttgaacgaatgaccataaaaattgtgctccaaagggctcacagtcataaagcattcaaaatggggtagattgcagcaatagcagtaacaagctcttagtgaatgccatctaaacatcaagcagtcctcacaggccacagccagtatgcggctaag

SEQ ID NO: 160827 - DNA, 218 bp, Homo sapiens
gacagagtgagcaatcctataatttgggctaatatatacctccaatctagcccaacacacatacacacacacccttaataggaggctaatgtaaagataatgtttagtgctgaggacaaggtggactgaagatatttctatggcaacaaaaaggcccctccagacatctgtgttctaaagttgatgctgatgattagagactgcctgttctacagact

SEQ ID NO: 160828 - DNA, 538 bp, Homo sapiens
tctaaccaaccttctaagttgtcttttaaatattcaacataggcgcacctttgcaatacatttatagatactttttaattttctgtcccacagtctatattttcatgtagatagaattttagcaatccattttaattctgcctttgtcacctcattgcaatgtggttacagatcatgtacgcttttggacttcgttgattttgtctttcatatctattacatgaccattttctcattaatggtgtttgaaaaaatattaattaatttgaggaacataatgtcctgtttagagctattatatctgttagtcattgcagaattcaaatactgtgcttttacaaattatttttcaagaagacttactagtgttttaaaaagtactctaaaatatcccattttgttgtagatgccactgttcccatagtatgctgaagctgtgttgagcagcacgtgaaggttcaccttgctgctatattatcttagtggtttttaacatttaacatgctttgtcttgaattacatctctgtattatttcta

SEQ ID NO: 160829 - DNA, 291 bp, Homo sapiens
gatgaagggggcaggagccctgaaggaaggatttggggccggccattcattcattcagaaacacttatcatcccttatcagaagccctgacctattgagagtcaggcacgtgctattgagagtcaggcacgtgctcatataaagatgagtttaacatggatctccctctcgaggaactttagatggcctgttacaggagattggactttcaacacaggagggaagggccaagggaataagagggaataaatgttgtttagaacctgtcacattccaagctagatgcttcaa

SEQ ID NO: 160830 - DNA, 550 bp, Homo sapiens
tggaaatgggttcaaatctcacttctgcagttcctggatttgagatcttaagcaagtcatttgacttctctgtgcctaatttcctcatcagtaactgggacaatgacagtcccacttccaataagtagatatgtaataaaacaaacaaacaacaagaaaaaacaaaaaaacaaaggaaaagaaaagaaaataagtaaatatgcatgtctcagacatttcatctatggagcttttttacctggaagtcccaggcctgaaatataagcagtaaaccaatttttggtatagtttttcatccattatttgctctatattaaataaaagtacaattctaactcccagtgaccaaagatgaggaatgtaagtgattcccagaggtcactttgtcagggattggtagaacctggatcagaacctgggcttctggaatgttctttcagtgcatgttatggtttcccacgtgcactgcagacacttctctaaatgccaaaggatggagggccaggggaggggggaaattgttatcaggtattaattcaagagtgttaga

SEQ ID NO: 160831 - DNA, 413 bp, Homo sapiens
aatgagaggctttgactaaagacatgagtgttgcgttttagaattagcaatactgacagttaagtgttcgtagtggttgtcctaatttcttcagcgtttcacaaaaggctttttgtaaaaagtccactatctatgtgataggccctctactggtttagtcacctttctcctgatctggttccttgtctaaccatccagagtaactagatctttgcatagacgcattagttatgtgctgacaataggagcctgaaagttcccctatctagcttgtgattatagctcttaaagcaagatctctgtgagagctaccaaaataaaggcatactctttataaggctgttccatctaaccatgcctctaggtatgttctcaaaagtgttagacgcaaggtttttatgccatttttgttt

SEQ ID NO: 160832 - DNA, 335 bp, Homo sapiens
agagatgagattcaaacccaggcctctctcatgctgcataccattacctttcttatacacatacttctaatatacatggatgcatgaataaaaaaatatattttaatctacattttgaaattgaaaatctgagactatttatgtaactgatagaagcctgtatcctacagaacgggagtgggattgggaagcaattggctacagctccttatcctagctactaacatttttacaagtgaatattgttatatagtcagatttataacattcatattatataacatgatataaatgtgtacatgtgtatgtgtgtactttgtatgcttcttagaaat

SEQ ID NO: 160833 - DNA, 273 bp, Homo sapiens
aagtattttgtctcatttaatcctctctgtgtgataggttttactttttaaatgtagaaagcaatgctctgggataaagtaattgggctaaagttacaaagctaagcagtggaacccacacatgaaacccagttatgtctgattccaagtcaaagttttaaacctcttccctgttctatttcacatgtaccaccaccattaatgggtctctggtatctgtgctacaattctgccccacttggtcacctctgcaccagtcagatcttagtaaca

SEQ ID NO: 160834 - DNA, 284 bp, Homo sapiens
tatgatggtggagttttggtttcgggttttttttaggtttttgcagggagctacttcctgtgatagtgaataactggtatttcatagagcagacagcctgtactactccatgtcataatgtttcccatttctgttgttaggcctttccgaaagatgaatgagaaaggtgtcttactctgggataaaatccataagttgcagaaaggccagatatacaagcagggtaatttatatgaatttttgaagcttactggatggagaggatccagagtgttgtattttgg

SEQ ID NO: 160835 - DNA, 262 bp, Homo sapiens
gatgttccttcactaatctatctatctatcaatcatctattatctatctatccatccatccatcttcagagttgaggctgtgagttacttgacattgtatttctaatacctaatccagggtttgatacaggatagactctcagtgtttacaggaggaatagctgcccattctgagtttttatgtggatgctctattttcaaggacagttcttttttactttacacttttgtaatgagtgtgtgaagagagattattgcatag

SEQ ID NO: 160836 - DNA, 590 bp, Homo sapiens
cacagaaatttgactcggttctggatactggaagttcaaagtcaaggcatagggagagccactcttctctgatggctccagggaatgatccttcctcacctcttcctagcctcaggtggtagctttcaatccctagtgttacttagctttcagctacatcaccccaatgtctgtttctatcatcacatgacattctccctctgtgttcttggtgtctcttctcttcttctaacaaggacaccaatcacattaaattagagctcactttaattgaatatcatctcatcttaatttgatttcatctacaaagaccctatttgctaataagatcacactcagaagtactgcagttatgacatatctacttgggggaaacaattgagcccataacagtgtgaatcttgttgaatacatggagagccagttgtaggactaatattctctaagcagttaaaatcagaatgcatgaagcttccagattgatccacatcctaggtagacattaaaagtctcctgggaatgtctgcaaggtaaaagtcagaatgagttgtgcctggcatgagacttggaagttaactgtgacctcaatt

SEQ ID NO: 160837 - DNA, 790 bp, Homo sapiens
cacacacacacacacacacacacacacacacacacacgtcccatagcaccctgtacttcattcttactggccctcaccatgccgggtggcatgtgcatccttgctcatctctttggtgtccatgatggtgaggacctgtgtctgtttcattcgccagcccctgccacagaactggcacattctaggattcagtgaacacttggtgaaggagtgagtgaatggaagtgcctgttgcgtgtaggacctagtagccagcctaaatgagaagatttagccttgaggttattttagtacaatagggaagaccatcagtattcttggccatggaaataattcagggggaaaaaaagaaggttctgaagtgtataggaaaaggtataaattcaatacaagttgggaaattagcacctagataagactagagggtctggccctcagttttgtaggctcaaaaatgtttttttaatatacatagctgtcagttggaagcggattgacttaaattcacaagagctactttatgaataatcaaatggtgggatttggctgggcgccgtggctcatgctataatcccagcattttgggaggccaaggcaggaggatcacttgagtctaggagtttgagaccagcctgggcaacagtgagacctcatctctatgaaaaataaaattagccaggcgtagtggcgcatgcctatagtcccaaccactcgagaggctgagatgggaggatcgtttgggcctaggaggtcgaggctgtagtgaaccaaggttacgccactgcattcc

SEQ ID NO: 160838 - DNA, 536 bp, Homo sapiens
aagccactggaacaaacagaatgtcttaacaaaacagaaactggggccttggttctccacaatataggatattcggcacagcatttggacaatttgcttcaggcacttattactttgaagaaaaacaaagaaagccaatattgtgtcctcagagattttcaggaataccttgctgcagttgaatcttcaatgaaagccttgttgacagacaaggaaagtcttaaagtaggaccactggacagtgtaacgtatctggacaaaattaaaaaattcatagcatccatagaaaaagagaaagattctttaggcaacttgaaaatcaaatgggagaatttatcaaaccacgtgactgacatggataagaaattgttggaaagccagattaagcaacttgaacatggttgggaacaagtggaacagcagattcaaaagaagtattctcagcaggtagtggaatatgatgaatttacaaccctcatgaataaggtacaggacactgagatttctctgcaacagcagcagcaacatctacagtt

SEQ ID NO: 160839 - DNA, 398 bp, Homo sapiens
cccagagctgtcaagcactgaggcagggatataaacctaagtagtctagtcctgcacagttttaactattccctgaggacctgaccatttttctgaacatatgtactggggacgttgagtgatgtaaccacgcaaaagactgcagcataggtgtctgcattttggggattgaggcaaggcttctacacacaaaattataaatgtaataaacatacagcattgtccattcctgcgtgcttgcttatgaattggcgatggatttcagaaggagaagaaatctcctacagaagggactggtgtcagctgtgcctttacaatgggttaaagataatttgaattcattgccaacattcaaaaatgaagagattcctcattgaaattttgatagatggtttctt

SEQ ID NO: 160840 - DNA, 671 bp, Homo sapiens
taagcaagcagggagttgatacagttcatctttcaaaatgtcatgttgagatacttcttaaatactcttctgtttctagtccctaagttgagatgataggaatggaaactctcaatagtaacatgtcaaaacaactagaacactgcagtatctgttctcgttgtttaaaacgtttctttatagacaccatactcatcagtatgctgttagaaggtgtatattgcactctgcctgggagttcaggcccccgtgccttggacacacaggtagctttctcagccatgtgtggagcaagcatggctgatttgggcctttagggtatcctggtgatgctgtgtcatctgtagcattggggaccactaggagcatgctgtcccgtcttctctccagttcacatgttccttcctcagtctcactctccctgagtgttttgcttatacctctaaaagttaagctccagaatgatttgtttaagactcgttctagttctgtcttcattttaaacttgttataatggagaatttcactatatgcaaggtaaacagaaaggtgtgaggaaccttattatacccattacccagcttcttcaagtatcagctaccattctttttcatctctacctccatctattcactgctcccacttgattttgttaaggtaaaaaattttaa

SEQ ID NO: 160841 - DNA, 155 bp, Homo sapiens
aagcaatctgtaaatatctggaattacatatactggtttgtaatatcccactaaacttccttatgtatataaattatataatattaaacctagctataatggaaattagctatataaaaataagtaactttttttaggaggttgttcactggttt

SEQ ID NO: 160842 - DNA, 777 bp, Homo sapiens
ggaggctgaggagggaggatcacttgaggctatgaattcaagactagcccaaccaacatagtgagaccttgtctcttaaaagaaagaaagaaaatttatgtaaaaaaagaagctcataagtgtaatcattccttggtatccatgaaggatagattccaggaccctcgcagacaccagcatccacagatgctcaagtcccttaaataaaatggcataatatttgcatgtaacctgcacacattctgctatgtatgataaatcatacttagattacttataatatctaatacaatgaaaatgctatgtaaatagttgttatactgtattgtttagggaataatgacaataaaggtctgtacatgttcattacaggtgcaaaaccatccattttttttccctcatatttttgatctgcagttggttgaatcctcaatgaggaaccgatggatataggggccaactgtattcggttactctgaggtatagaaaaggcaaaataaatgatcagttatttttctttaccagtttttaatgacttggtttcataccaatttccaatggtgactaattttgtttttagtaccattatgaattcatggaatgaaatattgttgatgtgtgtcagttgaagcttgttgtcctattgttgaagttctagttgtcctaatctgtgaacctttccatttggcctctgtgtccttttgatacaggcttgatagtctttgcttcattgctttctggtatgacaagaggattcatacatttttcctgcaccag

SEQ ID NO: 160843 - DNA, 286 bp, Homo sapiens
ttgggttgattccatatcttggctattgtgatgtagtgatgcagtaaacacgagggtgcagatatctcttggatatactgattttttttcctttggataaataaatggctagtagtgggattgctggatcatatggtagtcctatttttagttttctgagaaacctccatactgttgtccacagtggttgtactggtttacagtgctgctaacaggactcacatttgcttctgagttaagtggagacaggaatgggaattcttttgtgtttgtttttctttccaac

SEQ ID NO: 160844 - DNA, 643 bp, Homo sapiens
tgaggatctgccagctcggcggctgccgtcttccagcctccccatcagcgtttggatgccttcctctaggtcctttaggaggtgatagtcatcgctgtccgaggtgtcatacaccaggttgttggcgaacatactcctgaggaaccgcacgggctccagccacgactcgatgggcagcagggagatgcggagcagctctagattggatttctgttgcgtttcctccatgttggagggtgtcggaatagagtctgagcagaaaagcagaggtgctgggacaagcaggggcagggactcagtctgaggtctcccagcggtctcaatgtagtagctccctcctgtcctcatagatatgccgatattagccagactttgggttctgcctttaaccctctacacttgaggaaagtgcatgaatttaagggtgggagattgtccacttttgagggaatgaagactcttacagaaggattgggacaggctggtaatcatggttttcaaatttaatgcttacaaggaacctgggaaataaactagcccgacctctttgcattccagataagaagagtccagagaagtcttaggacttgctcaaggccacatcattagtggcaaagtgggaacagaacccactgtcctaggc

SEQ ID NO: 160845 - DNA, 620 bp, Homo sapiens
cctctgaggccctgaggaactctacagggggctaggaaaattgcccagagcccctgcagggctgggttggggtgagaagaaagacattcgtgagaatccagaggggaggcctaggaattgttcccagcatgactttgcttgtttggtttcctcacctataaccaaagaaggttttgctcaatggtggctgtttccttccggctctaaggtgtagtactttattttcttttgagcagaaaagcagaggtgctgggacaagcaggggcagggactcagtctgaggtctcccagcggtctcaatgtagtagctccctcctgtcctcatagatatgccgatattagccagactttgggttctgcctttaaccctctacacttgaggaaagtgcatgaatttaagggtgggagattgtccacttttgagggaatgaagactcttacagaaggattgggacaggctggtaatcatggttttcaaatttaatgcttacaaggaacctgggaaataaactagcccgacctctttgcattccagataagaagagtccagagaagtcttaggacttgctcaaggccacatcattagtggcaaagtgggaacagaacccactgtcctaggc

SEQ ID NO: 160846 - DNA, 283 bp, Homo sapiens
aagcctgggccatcggtttagaaaaggaaggaaagtcaattcaattttattataatctaactttctctgagtcctccacgtgttcagtaagcagatggacatatgggtctgaagcttgagggaaaacaaggatggaaccctggggaatatctatatgtgtgatctgggcggaataaatgtaacaaacaacctgaaccatgaggaaacagttggagaggtagcaagaggaccaagagtaagtgagagagagcatctaaatcatgggagaagggaatttcaataa

SEQ ID NO: 160847 - DNA, 384 bp, Homo sapiens
aagtgtcattgttgaacaaattgacatacaacacgaaccaaaaaatcagtgaactaaagctaccatttttcatatggatagagtcattaacctaatattgaggaagaaatgaaaagacaggttgcggaaagatatatatgacataccataaataaaagtttaataattacaaaaaagtaagatcaaactaaaaattgtataaggaaatgatagataccaaattcagaatactggttgcttccagagatgaacagaagggaatgtaacaagaagggttcatttgtatctataacgtttgttttctaccagaaatatcttgaaaatgtggcaaaacattaagctaagtagagggcacatgggtgttcacttgtaattatttccttt

SEQ ID NO: 160848 - DNA, 239 bp, Homo sapiens
catgagccactgcgcctggcctcaattgcattttgtatataaataaaataaaaatctcaatggaatggttaaaatgcactaaataaaataataccaaaaatcgtataaatattttgcaaagaaagaaaaaaataccaaaaatatctttaaaagatccaatagaaaatatcacatatggcaaactggaaggttgcaaagtagaccccaggggctgctggatgtacaagtgaagctaggta

SEQ ID NO: 160849 - DNA, 410 bp, Homo sapiens
aagcaaaacagactttctgcctcgggggcagagtgaggccaagcccacagatttatatggctttatttgtttctgattttagaaattttccatcaatgaatgcatttcccttcaccgacaactccccgagatgcacgttggcaccatcacacccatcttacagatgaggagaacaagactcaggaaatccatggattgagacaggggaatgatcagaagccaagcctccctgctttcagtatcacccgctttcccctacacagcactgttcctcactctcaaacacttccaagatggtagaagggaggggatcagggttggacctatccctttgctaccagaaatgtgtgatgtcttgaccacagctagcagccaagaggcaatggaatcgggtttttgtttttggggtt

SEQ ID NO: 160850 - DNA, 414 bp, Homo sapiens
ggccaacgtatggtcctcagctggtggcttgtcctcagccatttgcctgccagaacctcacaggctgctgggctggcagagagctcagcagaaaatctggccagcagagaactttgttgagcccctggaatccaagcattctgcccaagatggtagtagcaaaaggtgctcagtgaagaaaacaaatgttgacaagcatattttaaaaatagctctgtgaacagggtggggcctccaggggacatcgttctacttcctgagttgggtgctaattttattattggttaaatcttctttcttttcacatacatgttatatactttttttttttttttaaagagacagaacctcactgtcacccaggctggagtgcagtggcacaaaccatggctcactgcagcctcaaccccctga

SEQ ID NO: 160851 - DNA, 249 bp, Homo sapiens
caattctgagctaacctggtaccaagctcacaggctcagcacaaaccactttgcaaaggagtgatcattcccatttcacagttgggaaaactaactctggaagacttgtgaaatttccacatcccacaagggattcagccagatttggaccctgcgccttgaacaccttcccaagaatttcaaggcaggaaacctaggctggggggtgtgcggggaggtcctcaatcacatgctggctcagggagggtg

SEQ ID NO: 160852 - DNA, 392 bp, Homo sapiens
gagccgagatcgtgctactgcactccagcctgggcgacagagcaagattccgtctcaaaaaaaaagaaaaaaaaccaaaagactgacttaattactatctcagaatttgaacctgtttccaaagctaaacataacataaactttgttatcctgtatgattaggaacattaattttggaaataataacctaaaagttaataaaatattctagtcaacatttactattcatatatacattaacaaacataaacaaatttttatacatatgtgattatatacacatcacatactaacattgtccagtaagtaatctaaaattctttttgtgattcagacgttactctaaaatcactgtgcttcaacatctttactgtcattcactcactcaccaa

SEQ ID NO: 160853 - DNA, 239 bp, Homo sapiens
tcgcgcacacatccttcgcgcacacatcctcgcgcacactcctggttttgtcatgggcacttggaattgctttccactatccatctcctccacaccctgggctgagatggagtagggcctactggctttgttcttaaatatgatcaggacggtgttgcccacctcagcatgaatcattgggcccaggagttctaagtgctcctctcgaggtgatcgggctttgatctccaggatgtgtg

SEQ ID NO: 160854 - DNA, 510 bp, Homo sapiens
gattgcgagctcggtaccccacaccacctgagtcatactatgagtcaaataaaccatctattctcaagtgtcaaatttagagacagccgaaacaaaaatcaagaaaagcttgaataagaagtggctatttttctattgtgttctctccaatgcagcaaagtagttgcattatgggagtagcatttttttatacatcagtcaaagcagcaagtataaaaattatctcacctcaccgggcgcagtggctcacacctgtaatcccagcactttaggaggacgaggtgcgtggatcacaaggtcaggagttcgagaccagcctggccaatacggtgaaaccccacctctactaaaaatacaaaaattagccaggcgtggtggcgcgcgcctgtagacccagctactcaggaggctgaagcagaatcacttgaacccgggaggcaggggttgcagtgagccaagattgtgccactgcactccagcctgggcgacagagggagaattccatctcgg

SEQ ID NO: 160855 - DNA, 295 bp, Homo sapiens
tccacatccctggttcaagggattctcatgcctcagcatccagagtagctgagattacaggtgtgcaccaccatgcccagttaattttttgttgtatttttagtaaagatggggtttcttcatgttgcccaggctggtttcaaactcctgggctcatgcaatgcaccttggccttccagaatgctgggattacaggtgtgagccaccacacctggcctttaaaaaaaaattcattatttttaatcacatggattaagctggagaacattaattgagataaggttaatagttcatg

SEQ ID NO: 160856 - DNA, 472 bp, Homo sapiens
tgacatttgttttataaaatgcaaattaaaaatactaaccctatgtactttgctaagttttggtaacataatgagttaatatgcaagctctgtggaatatgaaagcactctgtcaaaaaaagaaaaacgttattattctactacttcatgtatatgtgattggacctttatgtttatgatataccactgaggcaggaaaaatgcacaagagattaagagacgatgatttctgaaaggaataacataatcatattgtaaaggaaggatataaagtgaatgaagtttaggaaaaatgaggttcctttcttgaccagactacaaggaaatggaaagcaagtcaacataaagtaacagttgccttcaaaccagtgaatcgaatttggggtagtcccagaatcctacggtatttagcacattgtgtcataatctatttagcatataatcttctaaatataacaacacactggagaag

SEQ ID NO: 160857 - DNA, 140 bp, Homo sapiens
gtgaggcccaactcgcatgagttttgaagataaaacaagagatttcaaagaaacccccagcttgcagcgggccactggaggatgcatccccagacgccaggagagctgggattctgaggaggagtcgggaattatggatg

SEQ ID NO: 160858 - DNA, 424 bp, Homo sapiens
ttgtcttgaaccccagtgatagacatcttacgctggttttaggtatacacatataacagcaaatacagattgttctcagataaagttgttaaccaaacatgcttcattttatgttaaccataaaatgaagatcattcagtgacttgaacatatgttttaagacacatgagagaaaattgagatcaagtttcaaatactattgatatgggaaggggacagggaagtgctgggtagagaagggcagagtccctgtcaagggctccacctttgacctgtacctatggacctaagtgagaacaggcatgcctgtttttgcatccaaatgcttcattttccaagaccactctggcctgcaacacccccaatcctgtgcccaaataaacccgagaccacagcaggcacagacacaagtgattgaacatca

SEQ ID NO: 160859 - DNA, 569 bp, Homo sapiens
aaaacatgagagtgactgggcgcagtggctcatgcttataatcccagtactttgggagactgaggtaggtggatcacttgaggccagcggttcaagaccagcctggacaaaatggcaaaaccccatctctactaaaattacaagaattagccaggcattgtggcagctacctgtaatcccagctaatcggggggctgaggcaggacaatcacaatcgcttgaacccgggaggcagaggttgcagtgaactgagatcgcgccactgcactccagccagcgtgacagagtgagactccatgtcaataaaaaagaaaacatgagagtggacacccctttgccgagtcacaatatttattacacgttccacatggcagcatctacccattccttctgcgggccacgtactgacaacaagtttctcaggcagccaagagaggtgaaatttcaacctgagttcgagggcaacatcctggggtgcttgctttgcttcaaaatgagtcatcaaaaccctataagccttttggccaggaagttccagagattttaaacaagcaaatgtgccccagcta

SEQ ID NO: 160860 - DNA, 608 bp, Homo sapiens
ctagattaaatgttggagttatgagtggagagaagtggatttgagatgtttaggatatacgagttaagattttaggactgaccaaatctgagaagagggatttgacgcaggtttctgattttgatgactggatggggaacaatgccaagaattgtgaggatcaacatggtagctgaaaagatgacagcatctggacatagctttaaaataaaaaccgaagaaaaacattctgccaggattaagctaacacagcttaggaagtgatcaagttttctagtgatcttactgacataaggacagaatttcgaatacctggaggagtagttgatggacttcagtcagacttttgatgaaagttgaagtagttgacgttaaatggtggaacattgttctgtgttgccgttatcctggcacagtcctgatatgtggaccagacttgagtctacctgtggagtcatctgttctttcagggttttgttatccttcagcttccctgtggctcttacacctcctcttgatatgaaaagtctgtgccattgaaatatatccttagttaataggccttcattagtaagacctctcatccagttctacttctttcttggtgg

SEQ ID NO: 160861 - DNA, 345 bp, Homo sapiens
tgatcagcttagtgggcctcagacacagtttatgtttcatggtactggggataaaaaatatcttgatgaagcccttacaaagagccctgagtggaggtgctgaataaacctaaactaatagggaggaagggaaaaggagttacaggtgctaacacttttaatttttttattttttatttataaatagagacaggatctcactatgttgcccaggctgttttcgaactcctggcctcaagcaatcctcctgcctcagcccctcaaagtactgggattataggcatgagtcactgtaccgggccaggtgctaacactttttaaacactttgcatgtatcatttcatt

SEQ ID NO: 160862 - DNA, 1865 bp, Homo sapiens
  misc_feature (1600)..(1601): n is a, c, g, or t
  misc_feature (1676)..(1676): n is a, c, g, or t
  misc_feature (1861)..(1861): n is a, c, g, or t
gggaagtaacaaattagctcctaagcagaagactgcactatattcattccagatggcctcctgggccggtcatggttgcaggtgctggggacactccctcatcagctccagtgaggtgatgctcctgcagcggccttccagcaggaggacaggtagtgcacacatactgaactcgcctaactgacggtaaatgctttgcagagtattacagcagaatcccatgagaaaggatgatcaaaaaagcctactgaggaggtagcattgaccctgagatctggataatgagaaggaggtaggtggtggacagtggcggagaaagcatcctcgcagaggagatggctgttgccaccctaaaggctggatgagcggaaggagagtttgaagccaaaaacaagaaagaggacccaagagagcccagcagcgcgacctgtggaggtcaagccaccagaagaggttgcagaggtgttgccagggagatgggagaaaaatcaggaaggcgtagtatcaggaatgaagggaagagatttgcagagggtgtgagtgccatgtgaggtcaaggaggatgagagctgtgggggagcgctggattttgcagtagacactctagaatgtgccgtctcagggagtggtggggatagaagcccgagtagggtgggccgaggccgaggcagggaggggacagtgaggccgtggggctggactgcaggccgcgctgcagagtttcagtgtgtgctgcagagtctcagtgcatgtggggaagagcagacagatggcaggtaggtgagcaggaacgcgggctcaagggaaggttttgtttaatgtaaagattttgttgaaatataagtctagaaaagtacacagttttttattctaataaagatagattctagcacatgctagctggtgcgcagagaaggcctggagggtcccagaaggcctggtgccagccacccagtgggaaggccacctccgctgagcgagtgcggtgaggacagggtgctgatgtgggagctgagggaatacctgcctgaggggctctcttttcccagggaagcgtgaggcatcagctggagtcaggatggtggaggggaagcctagggggaaagaggagggaaaggagtagtcctttttggagacaagaatccaaagttcattccaaggcagaatgggcgtgggagccagtgttgagtgctgctttgagatcagtggtcctgaatttgaagggagatccggcagcattcatgtcgggttccctccggtgtgggtatggcagagagtcggtgagaggacagtggtcacaggagggaacataatggcggacttcggaatctgattcaatagcaatgttcatgttgctttcctctaggctaccttgaggagtatgttcttcttatagtttagtctagtgccatacttaggaagtgggaacaaaggtctcttcagtttcactcctttcagttagtctattccatcctaagccttctcctctcctgtatacactaagctaactctggaaaaattacctcactaggagtgaaccattacagtgtaatattttgtcaaaataaaaatagatttttaggccgggcgaggtggctcnngcctgtaatcccagcactttgggaggccgagaccggcagatcacaaggtcaggagatcgagagcatcctggctancacggtgaaaccctgtctctactaaaaatacaaaaacaaaattagctgggcgcggtggggggcacctgtagtaccagctactcgggaggctgaggcaggagaatggcatgaacctgggaggcagagcttgcagtgagctgagatcgcgccactgcactccagcctgggtgacagagcgagactcngtct

SEQ ID NO: 160863 - DNA, 518 bp, Homo sapiens
gtgtctactaatgagataaattgacacaaatggttgggttatttgctgaattatcaaatacctactattacctgacttttctttttgatcataaatcttctgtattaaaaaatgtttcaaaactccattcttctaatcagatccagtgtaaagatgtgaagagttcaagatctcagcataacgtgagatcttcaacactaccatcaaccaaaaaaagggaagggggaaattaacgttattgagaaaagacagaggagacacagaggtcagcaaggatgcaagaaaccaaggatgaagaggtcaaagaattagattttaagatacgaactgaataacaagagctacctcttaaccatttctacgttggtgactttggtagtagacacccagtacgtgctattgagtgaacagtggtaactgtctaccaaccacttgcactagcagactccagtgcctccacctccctcacccctcacgtcctgtaagttgcacttgactctacacctgaaccatgtcat

SEQ ID NO: 160864 - DNA, 192 bp, Homo sapiens
gcctggcatgaaacaccctcagatgggaaactggccagagcaggttcactccctttctccaacttacttctcacctctcactgtgactggaagtctgaggtgtggtcctggggaagtgagaaatgtccgccagtctcagttactgacggctaagggagctgggattcgtgtgcacctcccagaggtgccgac

SEQ ID NO: 160865 - DNA, 847 bp, Homo sapiens
ctcccaggttcaagtgattctcctatcccagctactctggaggctgagggagtatggggcaggagaattgctcgagcctgggagacaggttgcactgagctgatattgcgccactgcgctagagcccaggcaacatgagtgaaaccctgtctcaataaaaagtattgggctttggttttatatgaggtcttcagagaaaccaccgtccaagttttgcactatgtctctcttaaaaacaattaaaataatagtatatgatttttttcctcacatggaaaaagctgattttacagttagacaaatgtatttactaaacatattttgcaaacaggacataacacatacctcaattatttgaaaaaaatcacaaaagtatcatttcagtccatataagtataattgcttttaataaagttaaactcctagagaatcattaaagaagaaaagccaggggccatgagctaattaatcagcaccagtaattaggttttaaaattggctttgttaagggctagctttaagcaaataacttgttcttaattgcctttgttccttatatataaaatagaaataataataatacttatccatactttgtcacagaattaacgtgatgataatgaggtaatagatgggaaagaactccaaatagttaacagtaccataaggtagagttttagtgtcagatatagtattttacaatgacatatatggaaaattccttcttttataatgatggaaatatcctaacagttttaaacataacccaagaagtagcagagaagaaagtatactgaagtatactgaacttttatgttcaaattacaatagctctactagatatgtg

SEQ ID NO: 160866 - DNA, 334 bp, Homo sapiens
gatgcctatccctcaaggttggccatactcctctaggagactttaagcttcaggtgactgtcagacctggacaaagcagtgtagttttgcccattagccagggccacatggttctgagggccatctgtctgcttgcctctcctggggctgcaacctgaccatgtctgcttgcaatacagtcttagatgcctaaacagactgtctcctcagagctatcatcatagctccttcactggtagaccatgccagaccacaaaagaactccagcagattggttcccactgacaggcaacagccaacccacaacctcaccccagagccttcccacaatgct

SEQ ID NO: 160867 - DNA, 331 bp, Homo sapiens
cagctcgtacccctcataatgtgtgcccattggcttgtaacttttcttgtgttttccatgtcattttttggtaataatgtgctggctgggaaagtgttacattccacccaatttttctttcactgaaagtttatgtaagattggtgtgatttctgtcttcccttttttaaagacagggtcttatttatgtcacctagcacagtagtataatcatagcacacttttacttcgaacatctgggctcaagtgatcttcctgcctcagcctcccaagtaactgagactataggtgtatgccccatgcccagcaccatgctgggctacttttgtaa

SEQ ID NO: 160868 - DNA, 552 bp, Homo sapiens
aacgcgctgatagcctcctctcaaaatctcctctctcagttcacacccaacagctaagtcacactcacgggaacacctgcatgatcatggtgtagtgggaagcggttctgccaattatcagcattagatctgggccaagttgagccagtttcctgcaaagggaagctctttccttcctcatggacataatgcatgaaggcacccaacaatggcaggatcctcggaaatgttccttggctctgggtttggctgtagattgactgtttttgttttgtttgagacagagtcttgctctgtcacccagagtgcagtggcgcaatctcagctcactgctacctcagcctcccgggttcaagcaatcttcctgcctcagcctccccagtagctgggaccacagtcacgcaccaccatgcctggctaatttttgtattttggtagagaggggtttcaccatgtaggccaggctggtttcaaacttctgacctcaaatgatgcaccccactcaggcctcccaaagtgccgggattacaggcgtatcagccgctgcgccca

SEQ ID NO: 160869 - DNA, 659 bp, Homo sapiens
cgacactctgagtgaggatattttcttttgtttttttgtttttcgagacaaagtctcgctcttgtcgcccaggctggagcgcaacagcacgatgtctgctcactgcaacctccgcctcccgggttcaagtgattctcctctctcagttcacacccaacagctaagtcacactcacgggaacacctgcatgatcatggtgtagtgggaagcggttctgccaattatcagcattagatctgggccaagttgagccagtttcctgcaaagggaagctctttccttcctcatggacataatgcatgaaggcacccaacaatggcaggatcctcggaaatgttccttggctctgggtttggctgtagattgactgtttttgttttgtttgagacagagtcttgctctgtcacccagagtgcagtggcgcaatctcagctcactgctacctcagcctcccgggttcaagcaatcttcctgcctcagcctccccagtagctgggaccacagtcacgcaccaccatgcctggctaatttttgtattttggtagagaggggtttcaccatgtaggccaggctggtttcaaacttctgacctcaaatgatgcaccccactcaggcctcccaaagtgccgggattacaggcgtatcagccgctgcgccca

SEQ ID NO: 160870 - DNA, 186 bp, Homo sapiens
taggagttggaaactttccatctaatatgggtttctattgttgaaaaaaattattctgatacttgttaaaatggtaaggaaaactttactcaagactattgcacctagtgcaatagcggagggctcaactctaactacaacaaggagaagggggtggatttatgggtgaggggaatcagtggatgg

SEQ ID NO: 160871 - DNA, 328 bp, Homo sapiens
aggaagggttttaaatgacgcatgactttatcagaattattgagaaagatcactgaatagaaataaagaatggctgtgggcaggaaattgggctactgcacttatttggatgagtattatggttgcctggatttgaatggcaacagtttttattgttgttgctgttgtttgtttgtttgtttgttttgagacagggtctcactctgtcacccaggctggagttcaatggcacaatcacagctcactgtagcctcaacttccccagactcaggcgatcctcccacctcagcctcctgagtagctgggattacaggcatgcaccaccaca

SEQ ID NO: 160872 - DNA, 200 bp, Homo sapiens
tggcatagagtaagtgattgtgttagaaatggtgaggtattctgctccatctcaagcacagtgctctcttgttcgcagtggttgcaattagatatttgggtgttaatttgttttctgggccagcagatggtgcccttatataggaaccagctaatatgatggaatattttgagtgatcaggcatttaggcccatcatcag

SEQ ID NO: 160873 - DNA, 468 bp, Homo sapiens
caaagcttttcttagatatttccccagtcaaatattcatcttcacctctgaaaagctctaccttccccaaaacactaaaacaaaaacacaatccagccaagttttttgccactttataacagggatggcctttcctccattgcctaataacatgttcttcatttccacctgaggcctcatcagaatggtctttactgtctgtgtttctaccaacattctgtctatgtttacgtaggtaatctctaaaaggaagttttctgtacaactctcctcctctccttctgagctttcaccagaatagcccttaatagtctgctcttggtaatgcagggtttttctagcatgcacctcaaaactctttcagcatctactcattacacagttccaaaaccacttttacattttaaggtatttgctgcaacagcactccattctcagtaccaattttctgtcttagcctttccagga

SEQ ID NO: 160874 - DNA, 356 bp, Homo sapiens
aaaacaagtagcagaggtcagttctgcaaaggatagaaagtaagtaatcaagactgaaaggccgcaactcagcagcaaacacttctatgttaatttgagaaataatttcaactggctctccaaaagatgttggtttaaagcagtaacatgggagttgagctgtgtgctataatcacccgaaagctttaagtcacactgttgcctaggtctcactccagagattctgacttaattaccccattgcaacttgggtttgaagactttaaacactcctctacaaggttattgaaatatgcagccaagggtgagaagcattgattcagggtgaggaatacattggctgtatgtgattttca

SEQ ID NO: 160875 - DNA, 180 bp, Homo sapiens
ccctggtagttctgtggcactctatatacttctgtcaaaagacttaaaaccacagtgtaattgttttcgtctgtctttaactcttcaaaaagaggaaaatggctctaaaaccattgagaattagcactatcttttatcttcctttatcaagagaaggcaacccgggcacgggtaccgagc

SEQ ID NO: 160876 - DNA, 152 bp, Homo sapiens
atagctggatcctgtactctgtcataaccagcaactgctcctcccgttcaatcttcaattccactatccagtcttgaacaccaaccacttcatgtcccagcagccaccttctggtttcatttgttccctattcagcctagactcaatggccc

SEQ ID NO: 160877 - DNA, 401 bp, Homo sapiens
gaagtgagatgtgggggtattgggggatgtcagtcttctaggcaggggaagcagccagggaatggttacactgtctgacatgaaatatcagctgtgcaacgaggaaagtgaagacctgagggggcagaggaaagacaaaaggagaggtatcatgagtcaaggtcccagtgagactgacgactgttagattagagatgtgaaggggaacaagcaggcagaactgtagattgtactctgagagcaggatctataacatggctgttaaggaggtattgcagatattgtcattacatggactcagaaggaccaaggagagcagaagaccagacaggttgagaacaaggacccaggagggtgttggcaggtcgcttgtctgggcattgatatgaccaagaataaca

SEQ ID NO: 160878 - DNA, 240 bp, Homo sapiens
aaagctgaggctcacgggagttggtacttgaaatcacatagcattgaacctatgctctgaccctaaatcctggacttcctccccttgcttgaggaaggcctctggcttggccccactggatctcggaaattgccttctaccttctagtctttgttgagggtactgaactttgatgaaatctcttctacagttctagccctaccttctctattataatcatctgggtgatctgggactcag

SEQ ID NO: 160879 - DNA, 311 bp, Homo sapiens
agctggagcctcgaggggcttgggtcatctgggcaagagaacataaggcccccagctaagaggcctggccaaggtctggcagtgagaaagggggcagccaggactctgctccaggacctctggttccaagctggcgctctgaggcacgggcctcttcagccttttggcagatgaggaaacaggtttgccaagcttgcctacaccacagttggtacttaggggtacaacaggtggaagccagggctttgttttggattctgaatcccagaaccttttagcttcactgcttaaaaagtggacgatggagcagg

SEQ ID NO: 160880 - DNA, 279 bp, Homo sapiens
aaggttttttttgtttccttctccttccaaattatttttatagttagtgaaaaaggatatgctttcctgttcttccaatttccaaatgatatttaggtaagtccaaaagaagagaacattctttctacatctggtaaagacatgactgctgttaaacacagattgccagtgctctgagatgaatccagatgttgaagagagccccagtttgctattatgactttaaaacataagcaaatgtctgtttttttcagatgattgtcgtcttagcagtgaaat

SEQ ID NO: 160881 - DNA, 577 bp, Homo sapiens
aggtcgtgaaaatagaatataatggctgtttgtattaaaggaaaaaaaaagagaaaatgatgtaatcctaatgcttagaaatgtttggaatgccacatgggttacaaagagtgaaaatctagtttaaactggttggattctttctctctcagaatgattaaagttgagcccagaagctcacccaaacacacatatttgcctaaatataaatccctgtggaatgttggagctataatgtgaaaaacagtttctgtgtttttgtattttctctaagactgacctacagctttcttatcacaagttttgaagcaatacttataacatagatgataatttagagttattttttactttgctttttgtgggcaatggggatggggactgcagtgaagatgggagagaatgaggtgtggccctcagacatagtgctgtgcaggaagcctactacttcagaggctgcccacagcctcacatacaacaggtaataatagaattacatgtttgaaaactagaaaatgagaagtagaagccagatgaaattgttaaaacaagtttttcttttttccctagggccagt

SEQ ID NO: 160882 - DNA, 133 bp, Homo sapiens
tcccctagaagccaaccctgacacaaagattcatgtacatgtgattcattaagtgttcccaggaagacccattaagagcatggggaaaacaggcatggaagaggctgaagaaagcaaaggtgcagttttgggt

SEQ ID NO: 160883 - DNA, 314 bp, Homo sapiens
tcacgccattgcactccagcctgggcaacaagagcaaaactccatctcaaaaaaacaaacaaacaaacaaaaaaaaacaaataaataaatagtgcatagaagaccattcacccactgaaaatctatcagcagttttaacatttcattcaggagaaaatccaaacttgttataaggcacttcctgttctggcgccaacttttctctccacatgttgtctactctctccccatcttattgtctactctctccccatcttcctgtgctttgtcatactgtgctgtctgctcttcaggcacaaagctgggtcccacat

SEQ ID NO: 160884 - DNA, 240 bp, Homo sapiens
taatttggtatttttagtagagacagggtttctccatgttggccaggctggtcttgaactcccgacctcaggtgatcttcctgcctcggcctcccaaagtgctgggattacaggcgtgagccaccgcgcccgtatgcattatcctttttttacttcctgtattgtttcgatttgtttttaccgccatatttttcttcgactgttacttcttcttttccattcggtccttttttttttttt

SEQ ID NO: 160885 - DNA, 571 bp, Homo sapiens
ggtttccctgcacccaatctgacatagaagagaagcaagagaggtggggctaacagaaaaagcgtatgacaactccatatttgtaggaagcagcctgttattgaggcagaatcagagaatagaaatgcattgtgagtagccctaaagctgctaatctctggtggcaagggagagttaaggccaaaataattcactcaaatacataatcctgtgtcataaacaacgtatgtctctgtgaacaataagaattcctgccagcctagaatatggacagatgtagcatttattccacacaaacctcttgccagtacctggtccagaaaaaaacttatttcattaaaaaatgagcatctatgcaaaactactccaagaaaataagaaagaaaataaataagggggaaaatagaagacaaagaatactcaccaagaaaaatgtttccataaagtagataaaaatgtgggccaaacatattgccaaagtcttaaaaacaaacaactgaaacaaagctactatatctataaaacaagtgttcacatcaaatatacaagagctcaggaacaataataccag

SEQ ID NO: 160886 - DNA, 351 bp, Homo sapiens
caaattagtaaactatttctgttgacacctttattctctacccagtaattcaaccggcagctactattttcactaagtactgttaaataagcttgacaaaatgagatactcttacatgaattcctggtcctaaagaatttagtcctttcttcagcatacaaattaatgcatgaattcatttgctttataaaactataaaaatacagaagtatacaaaaagcaaatgtctccttttatcttctctgttcccacatccctcggggacataactactgtctccttatttagggtatttttccagtcttactctgcctttacagggacctatgtacaaaacaatgtattttttcc

SEQ ID NO: 160887 - DNA, 535 bp, Homo sapiens
ctttgaataccccacatatatagccagtgttttttggcgtttgtcattttggggcaacttcacacatcaaaggcgagcaccgttttcttttcagctccctggttccagccacccagtgaagcagatacaatttctataaattggccttcttctccaggtttcgattgatcatcaccatatgagattactgaaagtctaatgtcttatttcactttctccaaggagtgaggaggggaacagtttattgaaagtcaggccacgtgaagactctggtgttgtgcaatagtaatttccattagcctggatttatcagcctcctgatactgccacgtgtctcctgcaggttccttgtaccaccttccctcttcccctccaggtctcagcatctgtccccatgaacaggtagagttcaaaccggagccttcctattggtaaggagaaaatggctgatgaccaaaaattaggaaacaaaagatttgttgttgtttctcaggacggagtcttgctcttttgcccaggctggagtgcaatggcc

SEQ ID NO: 160888 - DNA, 129 bp, Homo sapiens
caaactggtacatcagctccccggccctcaaactggaacatgagctccccgcggtgtctccagctgcacggccctgaaactggaacatcagctccctcctgggtctccagctgcatggacctcaaactg

SEQ ID NO: 160889 - DNA, 264 bp, Homo sapiens
aaactcatggttatataaaggattggtgtcaaagtcagacattttgtatacaatttttgcatgaatatggttctaatgaaaacagagatggctttctatggttacttttagcctttagattttgaactaaatttattttacttgtgattaaagagttcttgaattgtgtgctcagataatactccatattgtatcattagcctaataaagtaacactttgtgtttcctatacaataaaatgaaaattatctatatggtattaag

SEQ ID NO: 160890 - DNA, 215 bp, Homo sapiens
ttaagtcctatgaatagaatcacagagtatatacccttgagtctggcttcttttgctcaatattatgtttgtgagattcatttatgccattgtcccagctttatttatttattttttctcaagacccagtctggctctgttgcccagggtagagtgcagtggtgtgatctcagctcactgcaacctccgcctcccaggttcaagcaattctcctg

SEQ ID NO: 160891 - DNA, 354 bp, Homo sapiens
gtgctatttgcccaaaagatacagaaatttcatagaaaataaaaaatgaaacaaagaaaatccagaatattcataaagattcagatatttataccacatgtgaagaaatcaaatggcttcacttactcttccctgcaaagagaagtccactgataacatcgcacattttagtcaactaattttcccaccaattatccagttgtcctgctttgagcccagacagttgatgactgtttcagagtcaaattcacaaaagcatcacttgtgtatctcacattgtttgctacacatttcttcaaatggattcactaatgagacacactggaaaaagttatgtaactgcggatcaggcaa

SEQ ID NO: 160892 - DNA, 297 bp, Homo sapiens
gttgttgttgataacatcagaggattgtggttttactgttctagttttccttttattgagagatttggggaaactaaaaaataaaatataggcagtgttacaagcaaacaaatgagcttactatatttcaaatgaataaaataactacacttgaggaaggaagctggctgaggctggtggatcacccaggatcaggagttcgacaccagcctgggcaacatggtgaaaccccatctccacaaaaaatgcaaaaaattaactgggtggtggcacacacctgtcatcccagctactgag

SEQ ID NO: 160893 - DNA, 463 bp, Homo sapiens
ggcctgctgccggcgtgggaaacgggggatcacagccctcagtcctaaggctctcttttctcttttaattttctttttttcccagtctttgattatgtcacttatgtcattttcctgtgaatcttatctcagttcctttgtgtgaacaggcagagcacaagaatagataaatcaataattttcaggaatggatcataacattgttatttctgagaaacattcaaagtgactaattttcatgggcagatctccaggcacttttttggattggaccagagtttctcaacccactgttgatacttgggaccagaacattctctcttgtggggggaccatcctgtgtgttgtgggatcctgtcctctacccactaggtgccagtagtgacctccagaaaaatgcctccagacatcttccaatgtctcctgttgagagaacttgctccgcaatgagaaccactgggtt

SEQ ID NO: 160894 - DNA, 395 bp, Homo sapiens
cagctgggaacactatcaacctaggactgtatttctacttatttcttgaattggggtttatcagactctgagtatggtgtacattcaaatgctggaactgcatgagactagggctatgattataaatgattagggaaaatgattaatgttattagtcctttccaccccattttgccatttttgtctatttctcaaatgtttctctcctccctattcttactattaccagggacagactggttttcttgttggttcacgttaccagtatgcagatttttctcttcacctcatcaacaggtgatatagcccttttgggtgcttggctttaagtacagttcttagattcagctcctctactttgtcaagtctaaatactattcctcagtgatgctgat

SEQ ID NO: 160895 - DNA, 378 bp, Homo sapiens
acctatgttcccacactcagtgaatggcactgcccagttgcccaaagtagaaacctcatccttgaatcttgcctcttcatcatattgcacatctcatcaccaaagaccttcgtctacgtttccactgccactgactcaagctcaagctcccaccatctcctgcaccattctcctaactgatctccctgatgttaccccctccaccactgataaacagcaatcttcccatcatgtcactcccctgcctaaaagatttcaacaacattcctgttacccctagattctaagcatggcacacaaggcccttcatgatccaacaaaactccaacccactttcctactctcttctccacccatcccttaactactagtgctcta

SEQ ID NO: 160896 - DNA, 187 bp, Homo sapiens
aacacaaagcaggacacagaagggtggacttgagaaacaattggtggaaccatcacagtccttgcctttgacgaatcagcttccatatatatctactacacacttttaaacttcccttcacaacaaggcaactctgtgtttccacctaaggagatgcagttatcccttgtacacataaggaagttcc

SEQ ID NO: 160897 - DNA, 545 bp, Homo sapiens
taacagcaccgagaagaaatggacatgaagccacgggtggtggcccacacccataattccagctatttaggaggccgaggcaggaggatggctttggctcaggagttcaagacaagcctggacaacatagtgataccctgtctatacaaaaagaaaaaaaatagcaggtgtggtggcatgcacctgtagtcttagctactagaggaactgaggcaagacgattgcttgacctaggagtttgaggtctcagtgtgttgtgatcatgccatggcaccccagcctgagtgacacagtgagattttgtctaaaaaaaaaaaaaagaaaaagaaaaattagggcgtacctgggtcttaaaggggagagtaggaatggcttgaaaattctgtcagaaacctgtgggttgggtgatcctgcagtcctcttgggtcactgccaggtgtgaccatggtttactatgggtcagaggcacagtgttttttttagaagaatagagtgacgcatggtaggtagaaatctttcgggatggggcctaatcgcagaaattc

SEQ ID NO: 160898 - DNA, 557 bp, Homo sapiens
ttacaaattaagagagttgtgaataaacaattgatgaaagtaagaggtagttttctccagggattcttattagggggaaggtgccaaaaagtaatgtagcaaatctactcaagagaatagttactttagaaaggtctttagctaaggcccttgtttccttaattgattttactacttaaagtttgaaaacattgattttatttttttggaatattctggtctcctccagccaattgcccttgatctgtgtttatatctactctgctggtcttttcacattaaaaaaggaacccatgtactgaagtatcaggagaaaccagagttggaaaaaaaaataacacaactgttttatcttctttttcagtggttctactacaagcagtaaacaaagagatctgcccagatcaagcgtactatagttaggcttttccatatgtgctggtttgattatagttactttttaatgtgtcagtgaaatatactggcataagacactaagtatttactttttttctttgtgaataagagaagctagctctataaccctgtaggagagt

SEQ ID NO: 160899 - DNA, 262 bp, Homo sapiens
gtctcctcgctatcccttcactgtctcctcgccgtcccctctgtctcctcgctgtcccctcaacgtccccaggcctgtgcgctgtcaggtcccgatgggccttgaggccaccgacccgagggtgtgtgctctgaggctgtcgaaggccctggccctgggagcggccatctgaaagtgtccaggcactccctccccttctcccagagccccgcaggggctgggggattccctggacacatgaccagcagctgaactctgctgt

SEQ ID NO: 160900 - DNA, 227 bp, Homo sapiens
ctatggacagcacatcataggtccgcaggatgaaatattaatgtacaatttgtttatctgtgggctcacatctttccagcactgagctgttaattttctatcagcacagacaacggatcagtcagtcatgaactcttcacagccattacccagagacattttgattaagtatgcctaatgtagtggatagggaagaatgaaaacactctgcctgcgactagtgattg

SEQ ID NO: 160901 - DNA, 265 bp, Homo sapiens
gaccttgagtaaaatagaaattttaaagtattcagtgattgtctagagagggctactaagattgtaccttctaaactgtattgtctttccttattcgtatgagttggcatggcttcttttatcactaattccttttctggaaaggggtaaaaatagttatgacagttttgggaaggtgcgttttcagattagctgtttccagagctgaaggtaatcatttattcaaggcctgatgagctggagtttgcagcaggagtaggagtta

SEQ ID NO: 160902 - DNA, 423 bp, Homo sapiens
ttttgagggctttggtatagaaagggaaaaaagcaggcaggagggaaagaggaaagaaaaaaaaaagaaggagagtagataaaagaggcaaatgattacattcttgtgagtctttgattggcactctctgaatacacattttacatggcaaagtgcgggtagaggaacagtcaatcacgcgttcatttcatgcacagtaaatccacttttgcataagacaaagtcaacatacagaagaggaagatgtcaaacatgcatttgtctcagggtgggcggagagatcatttctagtcttatctttgtcccacacttgtgaagacaagttgttaatttacattgtcagggagaaattcaacagaactctgttttaggggaaagattttggagcccacaagaaatttccttatgagcaatttgtgagag

SEQ ID NO: 160903 - DNA, 405 bp, Homo sapiens
gtaggtcggtggagcaaagtaattggtgttgctgccccagtgcagaatggacaagggtgaaccttgggttggaggctggactatataatgtaaggatccattacacttctatggggctcttccttccgtccttcatggtaccctcctgaacaattccgtgctaaggccatcaggtgtgtcaagcaaagtgggcgtttgtgtagtatgttccacagtggcccaagcagggtgctggactggagcaggttgaggagggtggcagcacagtggggctgcccagcacaatgtcagacacaaatgggtgctggtgcagcccggcccagggtcacagcccaagcaatttgaagatgtggcacatcccggtattggagtggcccagtgtgtggtgtccagggagggcagggt

SEQ ID NO: 160904 - DNA, 313 bp, Homo sapiens
ggtcagagtctagagcatacaactccatattgtgtggccaaacaaaacacatctgtgggttagatccggcctgcagactaccatttttgacttgtgcttctatgggtcatgaattactttagtatttccagctgctgattcagtactttaagtccatgcatggattccccctttcttatgtggcagttcctgggatgtggtcctgtgctcagggttcagcgactttggagagtattttcaccactcttcaggggattgtgtgagacttggacaagaactctgaagctccaaaagctggggactccttgtgggg

SEQ ID NO: 160905 - DNA, 282 bp, Homo sapiens
gcattccagagacctgtcttctatgaatatccaaacatttaaatgtaggtttaatctcccttccattattcacaagggatgaattttgaaatattttaaataaggaatgaaaacaaaatgaaaaacacactaaaaaacagggctcagacaagtggttttgtttttattttcatttttattgcagaattttctcaaacatacacaagaatagagagactggtacaatgaacatctacatacccatcactcagcacactaacagtcatccactcttgcccatct

SEQ ID NO: 160906 - DNA, 297 bp, Homo sapiens
cagcttaaggagaacaaagacaacggggaatctcacagagaaaaaaataaggctaacaagtgacttctcgatcgccagagcagtaggtcttcaccttcattgcctggctctggaccaatggccactgtgagtttcccagtcttccactttctaaatgagagtcttttgatagtttagatacacaggacagtggattcagatatctttgagccttttggttcttaggttgctgtacaaaaggaactataaaatgatatgatggagaggactgcaagtcagctggagatcctgtatttt

SEQ ID NO: 160907 - DNA, 343 bp, Homo sapiens
atcactataacaaaatttagggaggacagtaaagagctacagtgacagaccgcatggggacttggtgcaatggcagggctatagcagctcatgaccagacaacaacccgattcatataactggtaggcagaattcacttttctcaggtttctccattgtttacaaaataggcttgctgggcactttaccaaaatgacttttttgttttcattttttttttttgccttttaacatcattttttttagctattattaattttttacttattttaacctttgtggtttttgtatgaaaacatcattgaaaattccattcgattccatgtatagatgtagatctctc

SEQ ID NO: 160908 - DNA, 165 bp, Homo sapiens
ggaggaaagcagtaatgtagcaagcctgctatcggtgcccactaagtggatgccccttcctggttattctccatctgtcccatctgtctgtcctcccctgcccccaatcgcattcttcactctcctacacactgcaccaccctgggtggctccctgcaggtggtt

SEQ ID NO: 160909 - DNA, 615 bp, Homo sapiens
taatgtaggtttgctgtctactagctaggtaaacatagatgccttacatagctgttaatttttagtttccttctatgtaaatgggtgcaataaacttataactttagaagatttttgtgagggagcttgtacaaaagtccctaaagagtagataggtataaatttgccaaataattatgaaaaagattttttaaaacgtctgtgacccgaagagtgttaaatcagtctgctggaagaacgtaccgtttagaaatagatacaaaacttgtcataaatataacctcagtataagattatttttgtgttatgtacaattatgcaaactcttttggggcatccagagggatggaatagtttttaatgctttcatggaagcatttgagttggaaattcttgaagagtgttcccaaaatatttagctgacattactttacgctggacctccatctcctgctccagatacccttcttgtggcacctatatgagtctaatgtaatggtgaattttcttatctgcttccctcataagtttgtagctcctattacttccattggaatagagttcctacatggttctactttgtatgtcttgcactgaagtgtgactcattataaa

SEQ ID NO: 160910 - DNA, 420 bp, Homo sapiens
caaaaggtttgagtcaaatctgtaagacaagtattaaaagctgaagagacaaaattatgcagggcggggggagctcaagcttactggtaataaagaaatagagatttagaaatatacaattttatgttgccaattacattagaaaatattttaaagacatgcccccaatttctctgaataacatgggacaaagtgtaaccttataaatttatctaaatcctcacacttaaaccatttttataacttccagaacattcacctcatatgtataaaatcaggaggaggaggcagattataaactttgcttattgttaccattttccatggaaggtttaagggagagacaaatgccactcctgagatgatgtcatgcaacattagatggatatttaggtggatagttaaatttcaggatagtca

SEQ ID NO: 160911 - DNA, 471 bp, Homo sapiens
cagtgtgcatctggccgtccttgtgtacctgcatgtttaaatgcagaggcttaatttgggctagaaatcttagccaggttaagattttgctactagaactgactctaggctttcatatttgtattattggcagataaggagttgtattttagttaagctcatttcctcatcgtagtggctgctaaaaagattgtgataggattctcccagtttttactgaactacttatcctattatctgtgcacttcttttctgatacagctggcactttttctgggaacttcttgaggggggataaaaaccaccaagaacaattataaaataagaatgatcacactaaagagcaataataaagtctaataggcgcaatcatgagttagagtaagctaaaggagggaaattgcaccaaagttctccaggtcttggctccagtagtatttctttggggatgttgttgcttagaaaactggg

SEQ ID NO: 160912 - DNA, 318 bp, Homo sapiens
ggctcatggaggcctcaggaagaagtcccaggctgacgtcagtggcataaagctagaaaaagctgtggacgatggaccaggtcttccttcttcactgagtttgttcatgggctttttattcatttcacaaaagcactctgattcctggatttacagcaaaaaaagctcaagggtgagtgatacagttttcttgtcaggctctggatccataaagctacctggcagacagtgaacatcccactcactcccccctctacagagtgcaaaacccctgagttgggaagtcagaagatgccacatcaagatccgccagggctc

SEQ ID NO: 160913 - DNA, 267 bp, Homo sapiens
ctgtaactcgagaggcagtgacaccccaccttctgggggcttcgttcaagtcccagccctgctagatggcctcagtgtagccttgggcacattattcggcctctctgtgtttgcatttcctcctctgtaagcttcagctgactttgttgggtcagtgtgtgtgaagtggacagcaggcccgggctcaagggtaagagtgtgcacttgcttgcacgcaggcttttcctttttttctctcgttcctctctctcccccacccctttcttg

SEQ ID NO: 160914 - DNA, 441 bp, Homo sapiens
aggtatgggtctttgctaccgttggacatatgtgatgcaggcacagtctcacattggcagataccacagtttccttctcaatatataaaataatacttgtgttaggatcatagaatagcaacaacacccattgtctgtatccattccaggaaggttaaatagttcctgaatattttttgaactgcaaaatataagctgccacttgctcctagggttgaaatcagtaatgaacacacttccgtctactaaaaaaaatgattctccgctaggctctttcttgtattctctccttcccagtaacaatttctttttttctagaatcaatttctctcactttcttgtctttggaaaatggggatctggctgctatgctgattctagctcacattgttaactacatctgaatgcataccattcaagtttataaatgacttccctgtt

SEQ ID NO: 160915 - DNA, 480 bp, Homo sapiens
tggcctcctaaagtgctgggattgtaggcaggagccgctgtgcccgtctgatgataagttttgtttctaattatttgagttcaggatattcttgggacatctaggtggagatatatgttcagcagccagttgcatactggagattaatgctggaggagaaatgaaagctgaagtcatgagagtacatcagatcatctagaagaatgaatagagtaagaagattaaatcccaggaacagcaaacatttgaagggctgatgcggaagtaaaatccttaaagaagttcggattctcagtagggaggaagcaatgaatagtgtcaaatgtaacgagaggccaaacaagtttaaaaggacagcattgtttttttgaggtttagcattctggaagtgaagagcaattatagtagattcatggtcctaattctgaaaacctgattttaattataatagttctattatgattttcactttgtttcact

SEQ ID NO: 160916 - DNA, 422 bp, Homo sapiens
aaacatcaaggctccggagtcctccatctgggttgctgcagtgtttgaaaacataccaccctcttgactttgctaaattttcttcttggggtaaaagtgaactgacctattagaagctgttgtaatcaagttcaacttcttttggccacttcaagaaagtaaataggcttactattccccattgcaaaattgaagggtccaagaagcaatcttttccctatgaaattgtagtaacataactcatctctgccctcttaacatgggaggtgacaagtgtgttgagaactctcttcaagccagttgcagtgggtgtacctgtagttctagctactctggatgctgaggtgggaggatcacctgtccagcctgggcaacatagcaagacccccccaactcaaaaataaataattgagaaagctttc

SEQ ID NO: 160917 - DNA, 436 bp, Homo sapiens
tatgtttctcttcttgtacacttttccttttttttttctctacaattaccacttgatttcagttttgtgtttatctggatgtccagtttagcttttgaatttgatcatttttgttacttcttttccagatgctcaaacatataatctataattttattatttttcctgaacacatccatcccagagccttcagctctgccctccattctagacagattgctttctcactttgctcccccatgatcatcctaggacttccttttacctcctttttgtgttgtataccctctatccatgatcccagatcttccgttttctttcctttctccttttgttggagcattctcggtagctttctggtatctctgagtcctgcacacacaggggttttgtaaagtgaatcacctctttctcatcatgagctccctctacatgg

SEQ ID NO: 160918 - DNA, 277 bp, Homo sapiens
tctgtttttaataggatgagaagagcatgaaggacaagaagcttaccataaaaaatatgagagaaggacatttcagactaaaggaacaagccagttcaactgcttagcatatttgaggaggggaaagtataaaactgtcacttaatgagcatagatagggatcaagttggacaggaaggctagatgagaatataaaaagtttttgaggtgatggcaagaatttagccccctgtttttcatattgggatcctatgcctatcaacaagactgtgggtac

SEQ ID NO: 160919 - DNA, 134 bp, Homo sapiens
gctgacgtgctgctggtcatggtgttggtgattgaagtattgctggccatggatgtatttatggtaatggtgtcagcagttgaagcattgatggtcaggaatgtatttataataacggtgttggtggttgagct

SEQ ID NO: 160920 - DNA, 316 bp, Homo sapiens
tgcattcaaaaaataaaaggagaacatgactagtgtgggttgtgagccagtgcaatgggtcaaactggggaaaggaagccacagagcacagagataaacaatcttaccaacctctgatgaagggaaaagtagttgctccccaaaagaataagtagggtactttatcagacagtggggatggctgctagatgatgagtaacgttagttattgtaacaagcaaatcccaacatttctatgtctgaacacattaaaatgctatttcctgctcacataatttttcttttttgagacagggtcttgctgtgtcacccaggc

SEQ ID NO: 160921 - DNA, 220 bp, Homo sapiens
atgcttaaaagtggaattttggaagtattccgttacaaattagcgtggttgtgttccaataacgttttacttaaaaataaaacaggtggcagaccagatttagaacatgggccatagcttgcagactcctatattaatgggtgacatggaactctactagtctaaagtagtgttcagaagatactgctttatagttccaagttcaggccacaggtctaga

SEQ ID NO: 160922 - DNA, 530 bp, Homo sapiens
catgaaatgtgtagttcacttgcctcttaaaattaagtatattatgggctgtcagaatactaacgttacctggtgtttttgtaatgtgtctctgtccgactagacgttttttgcttgtttttacccttgttttttggagtgtgcactaaaagctgtcagtgtgatattctggctctgtcatcagttggtttaaactggctgtttccatgaatgcatgttcacagttgtggttccttcaaggaagggatgggagaagagcttttaaaacttttttgagaatgtgtcttataaagactactctgggaataatctgctcatggaaatgttcatcttctaaagtttggcctgttgatgtgggaggactctgctgaaagcgtacctgtgcgcagcaccgtggtggtgggcggtgagggctgtaggagaccaaggcctgggtctgccttgcgtgcatcacagtgtgcggacagggaaggtgagggctgtcagtcagccagtgaacaacgttgggtgaataaatgctgcccatcact

SEQ ID NO: 160923 - DNA, 386 bp, Homo sapiens
aaagactcttgcttggcacaaggaccttactttctgacactgatcacatagatgtgaactttggcatgaaattcaggcagtgtcggaaaccccaggccccactatcagagctggaattagacaacgctctccaggggagaatgagtttccagaagccttggctgtgcccccttcagtcagggaaataaagacccttctatttccctgtggccagccagggaggatgggtgagtatcacagtgaagaaccaggaattttgccccttgaggggcccagagagctctgctcatctatctgtctccagtgataggcatagtgaaggatttttctgaggcagagccagaagtctggcttagggcccagtgagtcatcttccaagagtctag

SEQ ID NO: 160924 - DNA, 258 bp, Homo sapiens
ggtgaaaacaagaatatgttagaaacgatgatgtaggaatggaaaaacgacaacgcctacctgcagaaaagtcaactagtaaaaatgtgatttttttttttgtattgatattaatgaggtgttttgtcaaacaaaaccctttatgtttttgtatggacataaatcactgttgacctgtttcatgttcctggagatatcctacttgagaaggaatattgattgatgattagttgactgactgatttacttgagatggag

SEQ ID NO: 160925 - DNA, 359 bp, Homo sapiens
gcaaatcacatgacctctttgtgtcttttgcaaaacagaaacaataatccttaagaatgttaagttggtgttgtgtagactaataaaaatgattggaaggcaggcacttggcatataaaatgaagtgtgtgatgtaattcccaaataacaacaacagaattggtatgtgacctactgttgagttacaaggtgcagtagactttttatgcagttgatattctttgctgtcattgaaacacaaaacttaaggtgcaaagtactgtttgagttggggataagagatttttggagcagttatcaaatttgaccagtaaggagggattaatttacttcaggaatccccattgctttccagaaag

SEQ ID NO: 160926 - DNA, 386 bp, Homo sapiens
ccccaggccactgcacaccctgcaacagtgggctgtgccctggagctgcgccccatggagtgtgacctgccaagtcacactgggcgcacagcagcccctgagcaggcccagcgcaaacacaggggcctcctgcagggaccttgtgtcacggccacacggagctactgactgctgacacctgcgtcttcgccgccacaccggccctgcaaatcattaatgcttattctttcaaaggcaaaaaaacggagaatgatccgccagacgccccacaggccctcccctccctgctgaggttttgggatcatcaaagagatgggaaaacaggaagtgtagggttgtgtgtgtgtgtgtgtgtgtgtgtgtgtaattgtgtgtgtgtgtctctg

SEQ ID NO: 160927 - DNA, 705 bp, Homo sapiens
catcaaatgaaagaactcatggggttcttccaagtaatgcccaccctgcactgtaaaagtcacaaataactaaatgctctggccccaagcccaggatactttaacttcatgaaagactatttttaagagtccactcctctctatacttcaagctaaacgggaagctcagagatagcagaggtctgtggaatccccatcacagaggactatcttggaggaggtactccagaagaatttgttaagatgaaagaacacacacacactcttggcatgtggaacatatagatcggtggttctcacactggaatgtgcatatgataacaaagattgctggaccccatatgtccagggtttctggtttaacccaggtgatgctgataatgctggtgtccagggaccaaagtttgagaaccactgacttagaggattagaattacagcctcaacaagtcttttctagccaagatatatttgagcaaacatagtaaatggaacagtgaagaatgtataactcatgatattaaaaatatatacaatatcttgcttcttatgtaacctaaatgttcccattctaagtcagaaactggtctgagcattacaaaataaaagtaaaaataacataataacaaaagctgttactatcatagttattaatacttaaagctagatcatcttttcagtaaaatcttcattaaaaatctaaatt

SEQ ID NO: 160928 - DNA, 265 bp, Homo sapiens
cagggcagcagtgatcagcgatgcccgcaggagaccaagacttccagggccaggggacctgctacttatttatcacacacttaatgacacgccagacactgttctaagtgcttgggagacattaacagagggaggccccgaggggcccacaggtggcctgctagggaatggctgggcgggatttgaccccaggcagtctgggcccacaggctgcccttcagaggtgaagacggtagccctagctgggtaaccatgtcttcatgcc

SEQ ID NO: 160929 - DNA, 181 bp, Homo sapiens
ctttgcaatctggactgagctgagtgtgtgaaagagggtgcctctatttgtatttttggtttgtatcctatttttctatttctattgttctatagaaatggcttcaaactgctatcattcctttcactttaaaaatagaaaaaatagggccaggtgcggtggctcatgctcataaacccag

SEQ ID NO: 160930 - DNA, 180 bp, Homo sapiens
ttctgtgtgccaaattatattttcttggatgaaataaatagcccttaaccctgagaaaaacacaatggccagagagcattataatttgttgacactcctcattccctcatccttgtcctctgaaaacttaaataaatgagtactcagattgaagctaaccagcaaatctctcagattcca

SEQ ID NO: 160931 - DNA, 203 bp, Homo sapiens
tggctccagggctttcttgtccacccctgtccacagagccaggctgcaccttgttcatgcccatggggttgccactcaactttcagaggatttgacggccccatcctggcatctcccgatgctgagtgccggcaggttctggttaatgttcagtcttatacctgctactccatttgaagtctctttgcttgacatcactagag

SEQ ID NO: 160932 - DNA, 707 bp, Homo sapiens
ttatgtgatttacatgttaaagtgcccctgtggtttgatttgcatagcaaagactttgggggcatggaaacaaagcatcagtgtgcatgatgagagtactattagcatagtgcgttcagattttcagacagcctggctaggcaaacaatcctgcaccttcaccacaagcgtagagtttatacgatttgacaatttctcatccacaatcaggaaagaggttagggagttggtgtatggaatgaggtttactagaaaggctgtcttcttaagtacaataatctttccttaaaagacttccctcctcccatcacttttcttttacttcttcttatattcatttcaaggcagaaatattctacctgataattctggaagagcccagccacagccatttctgaatgctggaaactcaggcagtagctccatcattgtcagcccaccctctgtctaaccacacacacagatgcacacacacaccactgtaaccttactaaaacctcctgggacgcattaagatctcccaactagaacactttgggctcaaactattgggctggcctctggcaaaattacaaaattacttgaacccagccagacgtggtggctcacgcctgtaatcccagcactttgggaagccgaggcaggtggatcacaaggtcatgagatcgagaccatcctggctaacacagtgaaaccccatctctact

SEQ ID NO: 160933 - DNA, 279 bp, Homo sapiens
gcacaagtccacacagctagtaagagggcatacctgagattcaaactcaggtctcactctaagcaaattgttcttttcatttcaacatgctccttgtcaagatgtttgctctcgctggagaaggaatgggatggagatctccttaccatccactagaggaacagagtttttttttgttgtcgctatcatacccgttaattatgatgtagcaatagaaaacttttggaagctcttcttcttggacatcctttcttttcttttttttttttttttttgaga

SEQ ID NO: 160934 - DNA, 320 bp, Homo sapiens
ctttctgagtgtggatttgaactttgaattatttgattccagagcccaggttctcagaagtgcaaaaaacatggtattgcttcattcttcctgtaagaagctggattttgcaaaaacactttgatttgtacagcggtggttctcaaacttcagcatgtatcagactcacttggaagacctgatgaaacacaagttagggatgccctagctacagtatttctgattcagtaggtaagaagggcccacccttgagaaccactgatttagaacattatcctgtcttgattccttccccttctgcggagtgtgatagcttctga

SEQ ID NO: 160935 - DNA, 174 bp, Homo sapiens
tacatatatgttcccaagataaacaataactagtcctcaaatcaaaggacttcacagcaccactgtgacatatgtgacaacacatagttcatcctggattcttggtcattgggctggccatctgtgtttcctttggctttatccaaaggaaaaacaaacttctcatatctttat

SEQ ID NO: 160936 - DNA, 421 bp, Homo sapiens
ctccatttgcatttaaaatccttcagtcagtcaacaaatgttatttaatacctactatgtgctggaagtacatatatcaataatatataactcttgacttagaggaatctgaaattattcaagtctaggtcaacctactaattcctctatgaaaccttcccagagttctccaattgggaatgatcttttccattactgattttggatagtattttatcaacatctttattggaaagttataaccctctactttatgatttagttgtttataaacatgtcttgtctccagcactaaacaataatcttcttgtgggcaggatctatgtacaagtaaccttcctgacccctagatcaccctgtatatgaccacaataaattttagtttagtgaataaactttttaaaaaaatcaaatttaggaa

SEQ ID NO: 160937 - DNA, 314 bp, Homo sapiens
cctttctgcagagcagtgcctgggccccctcctgtatcatcagtggctctgtccaccttcctgcccgaggtcctggggtcaatgcagtgccaacacgccatccatgaccaatgcgagcaacctcactgctgtccacaaatgctcctgtgccaagccctgggcacaacgttgtccaaactctgctggctctgacatgcctgtggttccatggcatcaccaaaaacatcctgacttccttcctcctgagcatgggatggaggcaaaggcctgagcagcctcccgtgggtcacccaccacgcctgctgcgcccaccg

SEQ ID NO: 160938 - DNA, 530 bp, Homo sapiens
  misc_feature (12)..(12): n is a, c, g, or t
tatacatatacnactcgagtctcggtacctgtggtgtagcacaacacatatgaaatgtccatcagggaagctcattagagattcaatgctcagggttttgttgggtgctggtaggcaccctctgcctagtgggtgccaatgctatgcagtcccagaaggaaagcataaaccaaattgactgcacacattgcaaggcacagtgagctaccctgattgtttagggaaagtttcatgtggctgtagggaacagcttaccagtcaatgcccaaccttgcaggcctaccttctaaagatagtcatctctggcctgccatgtttactgttttctgcacagtcagccaccaaccttatgatgactgactatgcagaaaagaataagcagcatcatagctgatgccacaaaactctattcttttaaaggcaggtggttcagtgaatattgtggcaccgaggcatctgagaggaaggtgtgctcaggatatgaccattcatttctctggagcattaattctccctttgtgctacccaca

SEQ ID NO: 160939 - DNA, 333 bp, Homo sapiens
agaacgcgcaaatgtgaaattggcaagtcatattatacaattaatattttctgaaaggacttcaaagaccaagcaatgagcaaggtactaattagtatttgctttaaaccatctcccctcttcctagaaggcaaaatgcaaattctatgcatttttgtatccctaaccacgaaaattatttgcagaaattaaatacataaaatccactacagtcctttctctaatctttcaaaaataatttggccatacattccattcttcccttgtgtttttcaatctgttctggaagtcagataatttgacaaatgtaattcaaatgacagtttcctatgc

SEQ ID NO: 160940 - DNA, 339 bp, Homo sapiens
acctgagagaccgtgttgcaatggaaaggcatttcatgttcatgttgaagacatgatagtgttaagatggcagtattccccaaagcgatctatggatttaatgcaatccctatcagaattttaatgtcttttcttcagaaatggaaaagctgactcctctaattcatagggaactgtaagagggcctgaacagccaaaagaatcttgaaaaagcaaaacaaaactggaggactcaaacattcctaatttccaaatgtattgcaaagctatagtaatcgaaacagtgtggtattgctgtagagtagtaaacatatagaccactagtatagaatcaagagt

SEQ ID NO: 160941 - DNA, 480 bp, Homo sapiens
acctgagagaccgtgttgcaatggaaaggcatttcatgttcatgttgaagacatgatagtgttaagatggcagtattccccaaagcgatctatggatttaatgcaatccctatcagaattttaatgtcttttcttcagaaatggaaaagctgactcctctaattcatagggaactgtaagagggcctgaacagccaaaagaatcttgaaaaagcaaaacaaaactggaggactcaaacattcctaatttccaaatgtattgcaatggaacagaacagagacctcagaaataacaccacacatctacaaccatctgatcttcgacaaacctgacaaaaacaagcaatggggaaaggatactctatttaatggagctgggacgactggctagccatatacagagaacagaaactggaccccttccttaccaccttataaaaaattaactcaagatggattaaagacttaactgtccaatcca

SEQ ID NO: 160942 - DNA, 470 bp, Homo sapiens
ctagccacccacccatccacctgcccgtcatccatccatttacccatccatccactctatcagggcctgtaatggcatgtgccgaggggaaggaatgcatcatctcatccaggtcaacctcctgcctgagcaatgtccgcagctcctgaccggcctcccttaccctctcaggccctcctagcctgctccctctggcttcctgggtgacacttctgaacacacctgatccctgccaccctgcaccccagctcaaccctgcctatcatatatccatccacctgctcctctccccatcccattcatccatccttccacccactcaccctgttatctatccatccatccatcataaaccaatgtttggggggttctcttgtggacagttgtaggcagtgggacttacagttcagtttgggggatccaaaaaaccccagtgtggtttacacctaggctcttgggaaatgtttctg

SEQ ID NO: 160943 - DNA, 354 bp, Homo sapiens
catggaaacagcgatgacagcaaataaaaatcatgaagatttcaaaagatacaagaacaggtggttaagtagtaacttacgttgccaagaacactgaaatctaacagtatgcaatgaggcagaccccaataagcaggaagcgcactctagtcacagaatcttggaagactcagagactaagggcaccaggtgtccctaaaggctaaagtgctgatgggactaaaatagaatatattaatttctaagaagttaggcccctccaaaagttcacagatggaatttctaagtgtgagtagaacagcctgggttttacagccataaggcactgaaccagagacagagtcagagacagca

SEQ ID NO: 160944 - DNA, 573 bp, Homo sapiens
cccgggcacagtttggtgtttccatcccataggctgggagggttggggtgagcccaggcccgctgcatccctgatgttgagcgctgctgccaccttctgggcagggccggtattgccttgccttgccttgtacctgtgtggatggttggcacgaagacagtcaccacctgtcctccagaacctctggggctggtaggaaaggcgcagtgacagtgacaggacaacgatgaggaggcccaggggctgctggggtctggaggaggaagaggaggaagcttttgtaggattcaggaacagacttgttcctggagcatggttgtgggggctggggaatgggaagggcggctgacccaggctgcatggctgtgtgtgtatgtgtatgtgtgtgtatctgtgtgtctgtgaatctgtgtgtgtgtctgtgaatctgtgtgtgtctgtgtctgtgtatctgtatgtctgtgtgtctgtgtatctgtgtatgtctgtgtgtgtatgtgtgtgtgtctgtgtatctgtgtgtctgtgtgtgttctgtttgtgtatctgtgtgtgtctgtgtgtctgtgcatg

SEQ ID NO: 160945 - DNA, 255 bp, Homo sapiens
agccagccagcctttctcatcccttatttcctcagagaatatttctttacaaggttctgtacaagcatcctaagactgggaaatgcctccagcaactcaacaggaggcaatgagactaggcctgcttttctgaacaccatgactgaaattccacaaaagttaactaagcagttgcttttcccatgtgtgactcacaatcagataggtcaatcatttgtttctgataaattacgaccctgtgcaatcaggtcagac

SEQ ID NO: 160946 - DNA, 247 bp, Homo sapiens
caacagaagcctcagattcatggcaggctggtaccccaaggctcagaaaagctgcccaggaactaccagtcatactggattagaaaaagaggaaaaaaagaaaaaagaaaagctgcccagggcagatggagtctcagttacatgtgccccacttgcatctcagctgagggactccaaaaagcatcctaaggctgggcatggtggctcacgcctgtaatcccagcactttaagaaactgaggcaggag

SEQ ID NO: 160947 - DNA, 225 bp, Homo sapiens
cttttttgcccaagctggtttcaaactcctgggttcaagccatgcttccacctcggcctcccaaagtgctgggattacaggtgtgagccagtgcgcccagccatcaattaaatttcttctgagacataaaggcaacactcttcttgcttgggttggtactgtgttctgtccctgaccaggggtgtaaccctgggccatttcttaatctcattatgcttcctctcc

SEQ ID NO: 160948 - DNA, 382 bp, Homo sapiens
attcagttcaaaatcctgtcctgctcaagtgaatcctgcattccccatccacacgcactcaacaacaacaaaaggactagaaggatatgtgtcactggcaacactgatttctctgaatggtgcccttattagtggttttagctttcctttaattactttgcagttttggaattttctgcagtgtaggtattcattttataattaattcaaagttaaaaattactttatgaccaaagccagttacttttagctatggtatgcctcgctgtgtagtcttttcagtgaattcatctcaaggcaactagactgaactagactgaactaatcatagataaactgcagggattaaagtttacacaaaattgcacattgcttgtggaag

SEQ ID NO: 160949 - DNA, 468 bp, Homo sapiens
tgacagccttgcggcttcggtgatgtttatcgctgagttcattctcttcatcttacatttttgcctttgtcatgggaaatgtataatttgaaatgatacaaagtttgaaataaaaactgtgttccagtatgacttttccaaatgcttagaatgatgaaaaagagtactgtaatagtacataattactcattagtcacttattaattatgtgctgtatacctactctgtgcttggcattttgtttggttcttgtgatacaaagatttataagagaattactgctaatgagattcccctttggggatgaatagcaatgtttaaaactagctccagatgtgattagtgatataattgatgtatctggtgtgctgagattctaatcgattctgcttgggagagtgatttgaggaagactttactgagaaagtgatatttgaattaggtctaagaggatgaataaaagtttgt

SEQ ID NO: 160950 - DNA, 107 bp, Homo sapiens
atggtgaaagtcagtcaaggaaaggaagctcagcaaagaggatacaaaggatattttatttagcggagagcttctcctcctctcaagggccgtagacataaaaaagc

SEQ ID NO: 160951 - DNA, 587 bp, Homo sapiens
caaactgaggaacaaggagtttatgtaagttgcctaatgtcacatagctaggaaggagtcgagccaggactggaacccaacagtctggctttcatgtgcattcttaaccactgtgctatctggccaggtattctgaaggaagattaaaatgtatttaatagccagcagtaacagtaaccactagcagaccttctaccacgtgctgggcactgcgctgggcattttatataggtagactcatttaatcctgatgacaagtccagaaggcagatattagcctggaaaggaaactaaagttcagaaacttgcccaaggtcatacagtgagtaaggaggtacaccggcatactctaactcatgtcttcctgattcagaagaccatttgttcccactacataccactataatccaaatgtttcctatatctaaattacacagctttatagagtcttatttcattatgagcctatcagacaaatgaataaattaaaattctacatcttttgggggtttatatgcattataggaggatgttactgtgtactgttcaatagaaaagcaagaattgaaattataaagtatcatctc

SEQ ID NO: 160952 - DNA, 292 bp, Homo sapiens
gcaaaaacaacgacaacaacaaaatttaaaaaagaaaaaaagaaagacatgtgaatgaggctaaggcagatgctcctagtggaggtccacagagaaggcagcctactggagagtctgcccatgaaggagaaaagtgggcttgccctgcctgaggctgctgatggccaaagtcaaatatgcctgagcactcacctctcccttcccaagaaactgcctggtaacttcagagagcttgagatctttggaaggcagttttctcatgtgccagaaacttgtctaagcattctacagt

SEQ ID NO: 160953 - DNA, 292 bp, Homo sapiens
ctgtcttgctgattaatacatctctgatttttaataatcacattttttccttttatttctaataatcacatttttatcttttaaaagctgggatcaaggataatacaaatagaatttaattctgaacacatctcatactccaatacttgctctaaacatgactagaatagaaatcccccaaattgggtttctttgtattcttttattcctgacagccatcacaaaacttactttaaggtctcagaagggttggtcaacctcagctctaatgacattttgaggtacatattct

SEQ ID NO: 160954 - DNA, 165 bp, Homo sapiens
agaacattctacaactagcccggactccaaaaatgtcaatgtcatgaaagaaaaaaaggcaaaggagctattctggataaaaggacatcaaagagacatgccaagtgaatgaatgtggactgaatattagataatatgtttgtactgacattaaatttcgtgggt

SEQ ID NO: 160955 - DNA, 110 bp, Homo sapiens
ccaagcgctagcatgccttttgcctctgcatatctgtgcacactgtatgttgttcatgatagcttgtctacaacttgactaggttggagttctggtaatagtggcaatct

SEQ ID NO: 160956 - DNA, 152 bp, Homo sapiens
cagttaaatctgcctgagaaacgaaaccattttctcaagcagaattaaagtgtccttattagacatcatctgaaaagaaatcggagactacatcttagacaacttcccctacataaacacacacatacataatcatattggaaaacaaaata

SEQ ID NO: 160957 - DNA, 506 bp, Homo sapiens
ttggcgtgaggccaaccctacttttaactcatattgtacattgtttcctcctagaaaccaaccacaaacaaaaagggactgatcctaaatctgagactggtgaatacaccaattggcaggaaaaatacaggtgagatttttgggttttttgttggtagaaaaattactccaaccaccaagtcagatctgttaggcatgacagaagatgaaggccctattatgagatttacataccaaatcattattctacaacggcaaacaggtcatctaaatgcaactttcttagttatgagagttcccaataaccacaaacaaaataaagacaccagcaaaaatcacccagaagaactgatcctctcaatcactatatccaaagagaaataaaggtaaccagggactacattagagacagatgagatgccagatgtttggactcttctattttaacctttataataatccaaatactctgcccctcccccagatgtcatgaacctccctcctat

SEQ ID NO: 160958 - DNA, 308 bp, Homo sapiens
cctaattgccacacagaaaccgagcatcaatatgccaaccattcagccccaaaagcctagaaacaggatttatagcaaagtataaaaggctggtccacggatacctcataaatgagtctttaaccacagagcgcaactcacattgcaattgataccattagcaactgactgatcattatcgtatgctgagtactgtgcagagtagaaacaaaatataaagcgtgatcactgctattaagaacttactggccactagctgggtgtggtggtatgcacctgtagtctcagctactcgggtggctgaggcg

SEQ ID NO: 160959 - DNA, 248 bp, Homo sapiens
acttacatctttttatcaatgtgattctatctgctcagtatcttggaattcaaggacaaggtcctgtttgttttcccccgatacctatcatagtgcatcatccttaaacgtgaaacacgttttttggcgacgcacaaatctcaagagactgcagcagctcatgacagtgtccttggagcactacatcctcatgccttattgaaaaaagttttgaggtctgttaagtttagaaaaggcagcatatatta

SEQ ID NO: 160960 - DNA, 859 bp, Homo sapiens
gcctaatttggtttagatcgagtgccctttgggtcttgtgctgatcagctaacccataagggacctttctgagaccttctcccttcctctattgtcccagcctttgcctccaagggcagagctctgaaatagaagctacttaatgaccagacaataacatttgggcaggtttgagagcagagatgtttatcacatctctttccctcttctgcagctcttgtgtcttgggaaccagtaatgtctttagggtggtaatcctagcactaaataaggttagaatcaggaaaacaagcattttaaacccaatcagtcccccttggaaaaacttcctttttcaaaaacaaaagatctgaagggggctgttaaaattgtaccacatcttacctttcatgctaatgtcgaattaggccattagagggagaaagggagaactgagcatttggccctgagataaagttaaattcaattttcatcgtagaactgcattactgcattccgataaatactgaggtttatgcagcaaagtgatgggaaagccatttctcactaactctgcaatgtgtcattgaaaaaaaaccagtcccaaaagaataaaggctgctcatgttgtaaaggcttttcagaaggcttgctgcttaatctgaagggaaccagcctaaaccacaagtggccacttttctaaataccaaggaaatcacagccattaaactaatcttagggcaagaactatgtcttaattagctttgtatcttggtacctggccctgaccctcacatgtagtaaggtgttagtacctgtttggaagaataagtggatggaactgccaaccctggaaagatgaagaacggatatgactttc

SEQ ID NO: 160961 - DNA, 285 bp, Homo sapiens
gtcaagtaaatgtataccccagggtgcttgcagcctcataggtcagagactctcaaaacttcttcccccatttatttatttatttgtttgtttgtttgagacagagtctcgctctatcacccaggctggagtgcagtggtgcaatctcggctcactgcaacttccacctcctgggttcaagggattctcctgcttcagcctcccaagtagctgagattacaggtgtctgccaccaagcccggcaaatttttgtatttttagtagagacggagtttcaccatgttg

SEQ ID NO: 160962 - DNA, 289 bp, Homo sapiens
gaaaggcgggacatcttgaagcaagggcaggaagactccaagcgggagggagcatccaggccacagataggtgagacacaaatggttacatccttttgagtctctgattagcctttccaaaggaggcaatcagatatgcatctatctcagtgagcggaggggtgactttgaatagaatgggaggcaggtttgccctaagcagtttccagcttgagttttccttagtgatttggggggcccaaaatattttcccttcacattcaaaatgagaaacctcccagaggtattg

SEQ ID NO: 160963 - DNA, 409 bp, Homo sapiens
gcagaaaaaggcacaagatgataataaggaaattgttatgacatgttaataatgtggctactggccactgtggtttacagagggcatcagttaatttggtgtggtgactaagtggagatcagttaagagagtttccactttattttgaaagcttatcttccccataaaaatataaggcagttgaaccaaaaaataaaaataaaaagtcagtcctcagaaggaacactagtgaaaagctagcattgccaacaagggttaagccttctttagagtacagacatcatcacctaatcagatgatgtctttagatctaattcagtccctataagactgtctataagaacaagtaaaacaaaaatgaggatccagtaacaattaagccttgcctcacaaagtttattgatagctt

SEQ ID NO: 160964 - DNA, 272 bp, Homo sapiens
ctaattttttttctcctcttggggtttttctaaatgactggcaaatggaaaacctgaaagttacctgagacttctctgcatcgggcttgttggggtatactgttcttcttataatcaaccccagggactgacagatggacagttgttagagacaaagtcctcaatccaaggaggtcactcagggccaactttccttagtatatatcgttcattacattagttggttatattacctgtagtacaactcaagtacaatagctgcaggaggagac

SEQ ID NO: 160965 - DNA, 436 bp, Homo sapiens
atggtcttcagctttggaactttctagcaagatacctaggcccttcattgtgccatcaaaacccacgtcctttttcagctgctagaagaggagctgattctttctgctagactctttcctattctatgtcaggtccattcgcagccctggtaattgcacacactgcttcctccacccacaatactctcccctgctcttcctggtgagccactcctctttcaggaaccacttcaaatatcgcctcctctgtaaaggcagtcctattcagccttctgcaaaattcactcaacactgttgtgaatttctcagaggtcccttggcactatagttcatctctctagctagcatgccaccttgtgtagtagttttctacttctcagtgcttttcaggctcctctaaggagttcccccagcaacagggaagagttaactcaac

SEQ ID NO: 160966 - DNA, 138 bp, Homo sapiens
tctctcctgaagacaatgtatggttttttgctgtgaagatttaagccagaagcttcagttgtgcagaagccattttgtttatttcctagtcctcaaatctcttctcaggttgagattagaaaggcagaaacttctatg

SEQ ID NO: 160967 - DNA, 403 bp, Homo sapiens
ggaagcggagcttgcagtgagccgagatcgcgccactgcactccagcctgggtgacagagcgagattccatctcaaaaacgaagggcggttggggtggatgtttcccacagccacagaagaaagatacatcagttaatttctgtgtctcaaaatgctacaccaactgttcagcaatagaattttccctgtagtcaatattttacttcttccaacaacagtttacttggaaatatatccatattcatcaaaatataatggtatttttaaaaaaccattattttatatgccagagattctcaaagtgtggttcctccctttcttttcattttcattctcttaccagtgtacattggaacttcccagaggatacatgatgtgtgatgtcattatctctccgacagc

SEQ ID NO: 160968 - DNA, 219 bp, Homo sapiens
agaattagaggtctccacttccagttatttgagctacttaagattgcaaagacccaagacacattcagactcaggtggtctcagctaatggggcctttctgtaaggacacaaagagaagtgtgggagaaacaaaaagggtttcagcagcaacaatattcaggccttgagctggtaggttggttagctgggatactgcggtgattctgatggcacaattt

SEQ ID NO: 160969 - DNA, 327 bp, Homo sapiens
gaaaatttgaaagatggaaagatagccagtagagcagaagcaggcacagttatgctgcttgcatatggggataaggaaaagaaggaaccaatttggcaccaggctcagaaatgcttagtaccttggaagatgggagtgagatgtgaagagaaagcaatgaaactaatggccatttgtatatggaacatacctcctcattacataaacacacactgctccccaactcctgtacgtggctgaccagaggtttaacgtccagcaagaaatgggaagtttcttctctgcagaagttgaatggccccaagggaaagacctctgtattatggg

SEQ ID NO: 160970 - DNA, 171 bp, Homo sapiens
cctgcctcattctcccaaagtgttggggttacaggcataagccactgtgccctgccccaattttggccccagtttttaaaaagagatgaaattcatatgaactttaatgttggcaggaactatgctcatttcttgataatgttttaaactaaagtgttaagttagttctga

SEQ ID NO: 160971 - DNA, 234 bp, Homo sapiens
tagatttctaaaactaccaatttaaggaaatgaaataatattttagaaaatgttttgacatcttccacagagtatgaacaaacatggcctgcaagagcaaaacatctgtaaagaaaaacaggatataaggaaaatgcatgagatgaaaagggaagatgagtagaataagaaagtgttgatagaaaattgaaaatttaatagtggaaattaacgtttccattggagacaatagta

SEQ ID NO: 160972 - DNA, 393 bp, Homo sapiens
cccaagtatctgggattacaggcgccagccaccacacccagctaattttttgtatttttagtagagacggggtttcatcatgttggccaggctggtctctaactcctgacctcaggtgatccacccacctcggcctcccaaagtgcctggcttataggcatgagccaccgcgcctggccccaactctctttctcaatgtactcatattggccttactatttctcgactatgctctggttattttgcacttaatattctctgcctgaagctcttcctccaaatatacttacggatcatttctttcacatttgtgtccatctccttcttagttcttcgtagaccatccaaaataaagttactagaagagcactcttagtaactctctatgcccct

SEQ ID NO: 160973 - DNA, 420 bp, Homo sapiens
aggataacagctagagggaggtccccttcctagatctaagaaacggggacttaagagaatcatcaagacaatcacgtttgcaagatggataaactagcacctcagaccccagggaactctcagctttggctacagtcctgaaccgctgctccgctcgcctgtgctaggacagtcgccatgctaccttttgacctggcagagacccatgagcttcctgcaagttaagtgggccccacagggtggctaggcttgagctctctctgggatctcacccaggggaactggccaccatgcaaggttactctagcaaccagaggctgtgcagcagggatcagagtggctgaaccagagccacaaatccctattgggacctgtgaggtggagaggtctccacagaatttcagcaggaatctgcacgta

SEQ ID NO: 160974 - DNA, 242 bp, Homo sapiens
ataaatgggggcggaatagaggcaaatctactttaggtagataagagtggtcagggaagaactttctggggagacgacatttaaattaagaactgaagtacaagagccaaccacgaaaagacaaagatagaggatgggaatgcggggaaatccatccaggcagtgggaagggcaaaaggcctaaaagcaatgaaagagaaagtaaaggcagatctggaagagcataataaaaaaggggaatg

SEQ ID NO: 160975 - DNA, 142 bp, Homo sapiens
tatgagccactgcgcccggcctgaatctaataatttctaaaacttgacttgtatttatatattgtttgtttattttactttcctagtaattcatttttacggaatttttttcaaacatcaggttgtgacagatttaaacttt

SEQ ID NO: 160976 - DNA, 459 bp, Homo sapiens
gaattcatcacgcctatacatacgcaagggtgcatcaaggacctgtagcccgcgtacgtgtctttctgcagctccaccatcctgaggaagtggtggtcttcctgggccagtgtggttgagagcacagttcagttgacctgtgttcctcagctctaggctctgcaattctctcctgtgcggtccatcctgctttggtccattctatcagtgcaaggaggtctgatttcttttggctaagtcttggtttctttctacacacttgtccagagctcaagctttgaggtctgactcttcatcagttcgtatatatgaaagattcacaaattccagtttgtcttagtggaccaaaccacagggcagatcatcttgtgcttctaactggaagccctgtatctgcagcatctcacaccctcgtctccctggggggaaggaggagcctttctgtggaaggtttccatt

SEQ ID NO: 160977 - DNA, 125 bp, Homo sapiens
acatggcactggaggaggatggtagtgcccatggagtgctcctgctaaatagcaatgccatggatgtgacattacagcccactcctgctctgacataccgcaccacaggagggattttggacttc

SEQ ID NO: 160978 - DNA, 433 bp, Homo sapiens
atgaaaaattcatttacttgattgtggtgatggtttcaagggtgtataaacatgtcaaaacttatcacattaggtacacttgaaatatgtgcagtttatcataagtcaagtatacctcaataaagctgttaaaaaataactgattgcttttgtaaggcagaaatatgagactaaggatattgtattacatcatgcattgtaatatttcattactgtgtggccctgcttaattattcatatactagttagaaaattttgtgatgtacagattatgggtgtacccttgatagctgcctgagtttgattttgtggtcagttctataaaattttgtatatcagttccatggccaggaacataatcctttattaatatattgtttctgtgggaaatcagaattggcttatgtgatatttacatagttccctccttctg

SEQ ID NO: 160979 - DNA, 691 bp, Homo sapiens
catctgaccatgacaaggtagcttgtaccaactaactgtcactaaaaatgattataaggctggtttgagatatataaaaacaactgcttgaaggcattgaagggcaactaaaacagtccttaaaagaacagaagggcacagccaaaccatatcaagtacatatttgcattcagagagactctctcaggaaaaagagaacagaacaaaagggtaaaaagaaaaagggtatagctctcctactgaagcctcataggcttaagataactgaaattaagagagaggcatagaagcaagaaagcaaagaaatatagaaaatttaagaagtatctagaaaagaactccatgttgtagctattgctacttgtagctgattgaaatcaaacagattagaaaccaactaagttcttgaaagaactcaacatcaagagaaatctcagtctggattaaaagagactgttgctgcttaagacttaaaacaacccttgggccctcaactatctacaggcaggaagtgggtgagaaagttttaaaattgctaaggatggcttgtgcctgtaatcctagctgctcacgaggttgaggcaggaggaccgctcacttgaggccaggagttcaagaccagcctgggcaacatggcaagatcccatctcttaaaaaattgctgaggaaaatataatctctaatatccact

SEQ ID NO: 160980 - DNA, 356 bp, Homo sapiens
agaagaggcatttcttgtgggttgtattctcttggtggggctactctattcaaggtcaaaaactagatttcgtcagaacattcaagcctctgtagcaggccaaaaagtgtcctcccaaaattcacgttcacccagaatctcagaacaagaccttgtttggaaacagggtctttgcaggctctcagaaacagactcgtatggactgaattcagaagagattgcaggtggcagacactggcaggacatgagacccacttcctgcttctttactaacagacccagtttttttcaacatggtcataagtcaagcacaaacaatggctcacgattggtttaggtcattcatgatcattctg

SEQ ID NO: 160981 - DNA, 682 bp, Homo sapiens
ggtatgttgccattgtgggaggggtgttctgcggtgtagatgagattttctcagctttccctgacctttcgtgggtcagtaaaatcagctaccatttgtccatttgttttgcggtttccacatttctgttgctgttgactcttttacccttgtcaatttctttgttcttgtccattgatatttcttttttatttatttattttttgagacggagtctcgctctgttgcccaggctggagggcaatggcaagatctcgcctcactgcaacttctgcctcccaggttgaagcgattctcccacctcagcctcctgagtacctgggattacaggtgctcaccactacgcccacctaatttttgtgtttttgtagaaatgggtttcatcatgttagctaggctggtcttgaactcctgacctcaagtgatccacccacctcagcctcccagcgtgctgggattacaggcatgagccgccacgcccagctcattgatatcttttaagaaaacacaaacctttctgtgacttgaggtgcggtttcgggagagcgtggtggtaaatgtgtgtctgctatctgtgcccaaaacagatgagcagaggaaaataaagtgtccttttgtaaaattaggtcatgacacaggacagccagactcagtcacccttagtgtccctctcaccattcta

SEQ ID NO: 160982 - DNA, 228 bp, Homo sapiens
aagttaattgttgctcaagatctgattccacagcaacatctttggtagctttgccctccttgccatccctgatcccattgctatggttgaggaactcatcatgccttacacctacattcactccagagactttcagatgctctttcaacaccaatttttcctgacaccacataattatgcttattactactaaatctgtcctaaaaaactgatataatcatgagtcga

SEQ ID NO: 160983 - DNA, 558 bp, Homo sapiens
ctagctgactctagaggatacaactccataatgtgagcccagcagagtgattaaagctgagtcacaggggcagctgtgagggagacagaacgatgctcatgctttggattggcaggaaagagaactatggcgcaaaccagcattatctttgaccattggcttaattttcagtgttttatagtgataacaaccatgatttagttcagaaaacagaaaccacactacatacttcaagaggaaggaagttaagtataagaattaggtatttgtgaaatcattgtcagggctgaagaagcaagctggaggttgggctttaaggactgactctggggtcactgcagaactgacccatctgaggagttactgtgtctgcctctatctggaagaggtgcaagcaggggggagtccactgcacaacagttgcgctctgtagttggtgctgaagtgctaagtttggccatcattacaatagctctagatacctacgagggagaagcatggatacggttgttaccatgactttgcttatcattagaaaatagtactaggaggaggatg

SEQ ID NO: 160984 - DNA, 277 bp, Homo sapiens
gcatctctctatcattatctctctatccttattctctctatccttatctctctattcttaatctaatagtactagaagacaaattttttgcttcaaatgcttctcagttaactggtcctttataggttcagtttacctacagacatgaaactgtggtctcaaaaacgaagtctcaaaatacaaattaaaaagcaaaaccaaaaacctgcaaaaccattcctaactattgaaattgggtaatggatgcatggaagcttgttaaaatatttcattacat

SEQ ID NO: 160985 - DNA, 289 bp, Homo sapiens
gccaacttacacctagcttggctgaagtagtaggacttgtttacaactactctggaggttgggctccatactctggagtttaccatagacagagaaactcaggctcacgagataacaaccgtgttataagggcagcccaagctccgttcctctacctttgggtcctctaccttctccagcttctccaggatgtgacagctgtctcagtcctttaccaaccatcttgctctctaaggaggcaccatggcccagtgttccccctcattctttctcccttcacaagagatgg

SEQ ID NO: 160986 - DNA, 255 bp, Homo sapiens
agtgagaccctgtctctaaacaaaaacgaagcatgtccatagaaagaaactgaaaaatgttagcattaagaacccagatggagacctttcttttggtcaagattataatttagaaattttgagatggggtgtggtgaggaaagtgaggaagcttaactgcttggttctttcatctctgaaatttaggcagtgacattatttatttagagtgagataaattgtgatggctcaaagagaatgaaaaatccctataat

SEQ ID NO: 160987 - DNA, 429 bp, Homo sapiens
ggcgttcagaggtccccttatgtcgacccaccagattgaagttgttttagattatacagtagttaggctatactactacttaataaatttgttttccccaacttggcttcttgcctgttcttaaagcagccttcttttctttgaacttaggaagaaaactgaataaaataaaattattattaaccaacattatatattaagctcataagtttaacattctagtttacagttcctaaaatgatagaatatgaatcatatgggccttaaataagttatctggtctacttaagttttgtaaatatttatttctgcataaaataggatagtatgttgtcatgtctgaatttatcctaagtttcttgatagtagagcagactctatccagtgaagggaggaggggcagaacataaggggtagcgaggacgaata

SEQ ID NO: 160988 - DNA, 659 bp, Homo sapiens
ttctgcacggtgcctcagcactccccaaaacatcccattttgcaggtgtggaaacccacgtcccgcagaggctgggtgtttgctccactcagttctggggacttagcttgaggctctctgatctgttctcctgctgagcaccccaggaagggctccaggtctcccagccacttagtgagagtggcaagtcctgtctcacttgatctttgggagcataagacgagatcacagaaaatgtcatcaatgtgaaagtgttttgtaaacgaaggcgctgctcaaacgtagtgttatcttcagcctggctactggcttcctacaaagtgtgaagggatgaaggtaaaagctctttcttgaataatgttatccatcaagacagatgaaaccacactggtcagctcctcctgccctccccccaacgccccacctccccttcattcccacatgtttaaagacattcgtaggctgagaaatgattcctgctgctcctctgacacccggaatgtgccttgtgattggcagagtgtccctccagaatagcttaattttttccccatttcttgactaatgtcctctactccttggccctgtaattgagaattgggcttgcaatggccagcacacgagcatcttccctgaaagctcagaaatgatggctctcc

SEQ ID NO: 160989 - DNA, 422 bp, Homo sapiens
cgccttcgtttacaaaacactttcacattgggcgctgctcaaacgtagtgttatcttcagcctggctactggcttcctacaaagtgtgaagggatgaaggtaaaagctctttcttgaataatgttatccatcaagacagatgaaaccacactggtcagctcctcctgccctccccccaacgccccacctccccttcattcccacatgtttaaagacattcgtaggctgagaaatgattcctgctgctcctctgacacccggaatgtgccttgtgattggcagagtgtccctccagaatagcttaattttttccccatttcttgactaatgtcctctactccttggccctgtaattgagaattgggcttgcaatggccagcacacgagcatcttccctgaaagctcagaaatgatggctctcc

SEQ ID NO: 160990 - DNA, 633 bp, Homo sapiens
tgcttctcttaccatactcctgtggcctaccgctcacaagaagtaaaaacttgtcacctagccaaggtgttcttaaattataaaggcaaacatttttaagctttacaaattgaggcaatacaactcttctgagttcttcttaaaaacgaacaaacagaactgctatacaataaaagccagccattctagagacggaagaaacagaaagggttgaaaaacaaacatgcaaaagaaggattaaagaaatttggactattgtgcgccaaataaaagaaaacacttctactgtaaaagatttccacatactacactgatattgatgcaacacactgcctatgtataaagtctacagtaaaatattacatgaaaagagatgcttggtgataattaaatcaaataaatgtggttaacacgatactcttatcactaacatgtcataatactatgtaaatgtctactctatatagttatcatacaccttcactgcctgaggatttggcaacaacctaactgaaaatcccagagttggtgtttgaaccaccagccagctctgtcctgagaccactggattaatgtttatgcagatgttaggcccaggaacatcacaatgatgactagagcaaggaggagaaa

SEQ ID NO: 160991 - DNA, 534 bp, Homo sapiens
atgggggtgagaagaactaggtggggcgtcttggagctggaatttggttaaagatgagggtgtggtctatgcttagtatgtgaataagggattttccttctttttcaggagtgtaaagatagtatgtgttctaagcacgagcgtggtggctcacgcctataatcccagcactttggaaggcagaggtgggtggatcacttgaggctacgagttggagatcagcttggccaacatggtgaaaccccatctctactaaaaatactaaaattagccagacatggtggtgcagacctggaatcccagctactcgggaggccaaggcatgagaatcgcttgaacctgggaggtggaggttgcagtgagccaagatcgcaccactgcactctagcctggggcgacagagtgagactctgtcaaaaaaaaaaaaaagatagtatctgttctaagttggaatttgaatgtggaatgtctattttagatttgtatttcaatgagggatgctggctctaaatttggatccaatcttatgtgggt

SEQ ID NO: 160992 - DNA, 279 bp, Homo sapiens
tctggtgacattttcttttcacttaccaattcctcccaaattttcttttcattcttagccaattttgtcttttggagccactaattggtctctgtgctacattttccaagatgattttctatttatttacctgttctttctacataaagctcaattatttctgataattcctattttaatatttgctgagtacaaacagagctcaagacaccaataacttggctgtctcctaagtctccattttatttaaaaatgagttcctgtgtggcccttatccca

SEQ ID NO: 160993 - DNA, 772 bp, Homo sapiens
aatcccagcactttgggaggtcaaggcgggtggatcacttgaagcctggagttcgagaccagcctggccaacatggtgaaaccctgtctctagtaaaaatacaaatattagccaggtgtgggggtgggtgcctgtaatccccactacttgggaggctgaggcaggagaattgcttgaacatagcaggcagaggttgcagtgagtcgacattctgccactgcactccagcctgagcgacaaagcaatattccatctcaaaaagcaaaacaaaacaaaaataatacaccacaataaagtgagatttatcccacttatgcaaggatggttcaacatacagaaatcaataaatgtgatacatcacattaatagaatgaaggacaaaaaccatatgatcagatataagcaattagtaaactgatgcagaaaaagcatttgataaaacacgacattccttcctgaaaaaaaactgtcaacaaaccagacagaagggacatacctcaacataatcaagaccatatatgacaaacccacagctgacatcatcctgaatggggaaaagctgaaagcctttcctctaagaactggaacaagacaaggatgcccacttttaccactcctatgcaacataatattggaagtcctggccagagcaatcaggcaagagaaagaaataaaaagcatcccaactggcaaagaggaactcaaattgtccctttttgctgatgatatgatcctgtatctagaaagactccatcaaaaaactattagatct

SEQ ID NO: 160994 - DNA, 203 bp, Homo sapiens
taaaaagcccatctccttccttcactggtctgtaggcctttaggagagaaccatgctgtgtttttgccaaacatcaattagggacccagcacaaggtcccttgtgaccaggagaagaggtgacttttggaggctgccctcagaacatctttacacttggtagaatgtactcatcaaatgcccccggagggtgccattcaggct

SEQ ID NO: 160995 - DNA, 643 bp, Homo sapiens
gctgcctgggttactttccagcatcactaccaatataaggattgggaatcagggtgtggagagagatcttctctattcactcacctaacaagtatttactaaacaactataggttggcacaaaagtaattgaggcttttgtcattgcttttaatggcaaaagctgcaattatttttgcaccaacataatactattgtgttaggtcctgtgctaggtactagatacacctatgatctctgctcacataaagctttcagtccagtgggacaacagagatcaaatcaatgacaacaaacaaataaattcaagttgtgatcaatattttacagaaaaagaaaaaaggatatgagagagccctgaactctccagtatttccttctttaatgttatatgataataaacttttcacattgctctttatattaatatacagtcaattgtttacgatgctaaaactctttgaaaagtagagatttcaggggaagtcataaaaacaagtaagttaaggcacacagtgtcatttactcactttactctcacttgcttggatgctctagagttcatgtactagttggtcagcacatatacttacctcacatccatgccttattcagttcttccttagctccttgtcccaacctct

SEQ ID NO: 160996 - DNA, 152 bp, Homo sapiens
tttcagtcattcaagtgcgacaaagacttttaactctattttttcttttgtgggcctgtctttctataatgctcttcagtccaatccctacaactttatggcaaaattctgttcaccatccaatatatttcagttaagattcttagcttgta

SEQ ID NO: 160997 - DNA, 556 bp, Homo sapiens
agaatcccggtcaaacacgtcaaacatgtgattatagttcagcaggcatcagccccaaaggcctaagacctgtgacatatcaggaaagtgagttaaacaaaaatgttcctcaagtacaaaatacaaggagaggcactcgggaggttaggtgcacccggaggtagaagactctcaggcctgggatgagaatccgccaaggaaggaggtgagatgtatgatgctagcctccagccagtgctcaagacatcctcagcatctccatcactaccacttaccactatttcctcagaccagcgatatcagctccaccaagcactcctttctcaaatgtttttttcctggagtacctctcatatgccaggtattgaatcaagcacagagggcacaatgacaaacaagagtggttggttcttgctatcaagtgggaggcagagcagtgaacacttaaacattgtatgcagcaggcagtctgtggtgagggccagattcacgggtgtgtgaactctttagtcacccagagccctgcactcagagggcccgtgtttggtttgatggg

SEQ ID NO: 160998 - DNA, 678 bp, Homo sapiens
gcctcagcctctgaatagctgggattataggtgcccaccaccaggctgggctaatttttgtatttttagctgaaacccagtctctactaaaatacgaaaattagctgggtgtggtggtgtgtgcctgtagtcccagctacttgggaggcagaggtgagagaatcgcttgaacctggaggcagaggttgcagtgagcagagattgcaccattgcactccagcctgggcaacagagcgagactccgtcttaaaaaacaaaacaaaaactttcccatcttaaaataaatgagattgtgtttactttgcagtaattcatcaagctctactcttaggatggtcacttttctgtgttacttggattttaaaatgctttaaagaattgaatggtttgggcaaaatagtttaggctctatctttaactctgaatctatttatctttctaattttgaactccttttaatgtttttcttctgggacttaccacgattaaaagttagcatttttgttttgttttactttttggtttttcagctaggcttctgacagtattgcacatttacataaaagtgtaattatgcctttgcttaagatttgtttttatttcagttaattcgtcagtgaagaaaaatacattttatgctctactcccaactaagatgaactgtcttacagatggctt

SEQ ID NO: 160999 - DNA, 371 bp, Homo sapiens
atataccctaaagtatcccatggttatgaggtaccaagataggaactgactcttaaatgcctcaggaaaagaagaattctttgtacttgtaacttttctataagtttgagattgtttacaaaaaggaaggatgagaatagctgaaggttctagaatcctaatccctgggttaaaatcatggctctaccacttattacttccttgtgtctcagtttccccatctgtaaaattaggataacagtagtactgtacaagcttgtgtgaagtttaagtaagttaaaaaaaaatgctaagagcactgcctgcaatagatattcgctattatgtcatttgagtttgatacttttacctttctgggataaagtggccaa

SEQ ID NO: 161000 - DNA, 240 bp, Homo sapiens
gacctccccaccaccaggactggaggaaggggtggctctaggggactatgggagtaggccagtgtcccagcaaaggggacaaagatgggagaggggctaggggcacaaggctggaacccagtcatctgttcatagctgtgtgggctgatgagggaggccccagtcagcaggaggggaggggagaccttggggccacaggacggggcctggcccatcccagcttccagacctcagcaatct

SEQ ID NO: 161001 - DNA, 422 bp, Homo sapiens
taattccagcactttgggagaccaaggcgggtggatcaacttgaggccaggagctcaagccagcctggccaacatggcgaaaccccgtctctacaaaaattagccaggtgtggtggcgcacacctgtaatcacttgaatctaggatgtgaaggctgcagtgacctgagattgtgccactgcactccagcctgagcgacacagtgagtctcaaaaaaataaaataaaaaataaaaaataaaaagattatctaatacgtagaagacttcagctttgcagcaatacagtaggaaccctttaaagtaaacaggtgtttttttgatattatgaatattatttctcttttctacggttttactattttttaaattgagcattttaaaggcaagtaaaaccattttatttttttaaaggagagactctg

SEQ ID NO: 161002 - DNA, 3533 bp, Homo sapiens
  misc_feature (167)..(167): n is a, c, g, or t
  misc_feature (190)..(190): n is a, c, g, or t
  misc_feature (264)..(264): n is a, c, g, or t
  misc_feature (903)..(903): n is a, c, g, or t
  misc_feature (919)..(919): n is a, c, g, or t
  misc_feature (991)..(991): n is a, c, g, or t
  misc_feature (994)..(994): n is a, c, g, or t
  misc_feature (1336)..(1336): n is a, c, g, or t
  misc_feature (1582)..(1582): n is a, c, g, or t
  misc_feature (1595)..(1595): n is a, c, g, or t
  misc_feature (1633)..(1633): n is a, c, g, or t
  misc_feature (1650)..(1650): n is a, c, g, or t
  misc_feature (1843)..(1843): n is a, c, g, or t
  misc_feature (1939)..(1939): n is a, c, g, or t
  misc_feature (2121)..(2121): n is a, c, g, or t
  misc_feature (2168)..(2168): n is a, c, g, or t
  misc_feature (2188)..(2188): n is a, c, g, or t
  misc_feature (2419)..(2419): n is a, c, g, or t
  misc_feature (2536)..(2536): n is a, c, g, or t
  misc_feature (2679)..(2679): n is a, c, g, or t
  misc_feature (3173)..(3173): n is a, c, g, or t
  misc_feature (3221)..(3221): n is a, c, g, or t
  misc_feature (3228)..(3228): n is a, c, g, or t
  misc_feature (3243)..(3243): n is a, c, g, or t
  misc_feature (3273)..(3273): n is a, c, g, or t
  misc_feature (3374)..(3374): n is a, c, g, or t
  misc_feature (3391)..(3391): n is a, c, g, or t
gacagagtctggctctgtcacccaggctggatttcggtggcacgatctcggctcactgcaagctccgcctcccgggttcacgccattctcctgcctcagcctctacgagtggctgggactacaggcgcccgccactacgccccgctaattttttgtatttttggtanagaggggtttcatcgtggtctanatcgcctgacctcgtgatccacccacctcggcctcccaaagtgctgggattacaagcgttagccaccgcacctngcctctggacagtgtttttcacaggtcagattaatttttatataaatcatttattttatttttattatgtaaaattttataatttttaattttatttttaatttcctttttaaaagttaaataaaattttaagtgtaatgatgcaaaattttgtttaaaagtaaatgtatataaaaatgttgatatagactaaaaaattgaataagtaagaaggtagttagttgtcacagtaggagtgaagtgaaaagcttcccctttcaccctctgaagattaccggaaatgaactgaccatacacagattaataaaagaaagggtatacaaacttacataacctgcaaaaacatgagagctatacacaaagtataagacttgaagatggctcagatcttaaacgctctcctcataggcaatagatatatagacccaggatgcagacattattttgtaaataatttcctttggaagctggatgggacagacaaattacaggaaggtgagagatggaactgcacaggaaaaaagtttgtctttgtcactttaatcttatcattactagagaatatttatgaatattttagaataatatatttttaagcccaaatctcaccaaatgttttttctaaaacaaatacttttngttgttgtttgttttngttactgtgtctcactctgtcacccaggtatggagtgcagtggtgcaaccatggctcactgcagccttcacntcntgggctcaagtgattctcctacctcagccttccaagtagctgggctacaggcatgcaccctcatgccctggtaattaaagaaaaaaatttcgttagagaccaagtctcattatgtcaccctggctagtcttgaactcctggaatcaactgatcctcatgccttggcttcccaaattattgggattataggtgtgagccacagtgactgaccacatatttctatacttcactgaggaaaggaaggtgctaggaaaattggttaagaactattttttaaaaagctattagtagtgttttattttattttttaatgattgatttttgagattgggatctcactangttgcccaggctggtttcacattcccaagtttaagcaatacccctgcctcagtctcccaagtagctgggatgacaggtgtgtgtcaccatacccagctccattagtagcgtttttaacaattgtgggccactgagtaagaataattttttttaaattaaaggttattttttaaaaagcacatttgtagaaaattactagcataatctgcctaaaataaatatacatattgaaaaaatctttgctcngaacaaaaagaantatattcaccacacatacatacatacacacacacacangcacacacgcacacacncacacacacacacacattatggaagatttcaagaccaggcaataatttccactcaatccaaaaacaatgcaatcccagagctgaatatttaggtgaaaatatatcaggaatgggaggcattcaggtttaattttcatgttttggtagagttaggatgtgagttttcatttaaaaatattctttattttttttntactattgtggtttctgtattgttactatacaatctgtaaactaaatagtaaaggagagaaaagtgattttcaaagaagctggcttgggaacaggnactattctgggaagatgaaaggtttcacttaatgactggtacctgtgccactctggttattttaactgttaaccttttagcaagaggtttttcttttaaaagacatcctttaatatttgggaagctagtgcaatagtacacattgaggcccacataccacatgccaaatatttaaaaggcanatttctagctaaccactgtacatacatatattttttcttattttctnattttagtttttttccttgncaacaatttatgtccacacatatcttctatcatcccactttgacaagtaatattataccttcaaaatgatgtggaagactagattggaatttagaaccgtagaaccttgtaattgtacaggcaagtttcttcctgggaaaaaataaaacaggaagaaaaggctgggcagcctctggttcaggaaggaaattcaggagtcccttatagcagcatctctagtacttgggaacngaacagacttctcggcctgtgaggctggaatgggcccttctggagaacacgacagagaagttatctactgcctttgcccccagggcccaggcaacacttttaccctccattgtttcngaagttaaggggaggagacaatgttttgtttagtgacctcgacagaaaaagtgtcctcctgcaaccactcatttgttactttccttcttcctgaattgcctggacccactcctcctccatttgactggctctgtgcactgatnttatagtcaggagatttttgggaattgtggcttctaaaaatgtacacccgactctacccatagctggccctgtgaacctacacacctgctccactgtgtatccttctcaaagagacactcttcctgctgagtctctgccctctgctcctagatccaaatggcatctcctaccctatccctgtatggtttaacctagggaaactctttcccagaggagtcaggtaaggagacagtggctgagcttcttacagacttaaaggagacatcctggaatttaggagtcagtccttcctttctgtaatccctggcagctcctgctgctgctcaaagtttagctttgtctctcatccagctcagacttttgctggtcctgatggcctctgcttagctgtattagtacgctcttgcattcctataaagaaatacatgagaaatacctttagttggctcacagttccataggctatacaggaagcatggtggtttctgcttcnggggaggcctcaggaaacttttactcaaggtgcagggcaaaaaaaaanaaaaaanaacaaaaaaaaaaanctaccagcactgcactgtgaggccctgatncctgagctaacttcatattattacctctacagcaagtgtccgtgagaacatagatatatttcttatgtgagtacacaatttacagaagaggaactaccctnccaaaccaaaacaaaangtcaaaaattagcttggtgtagtggtgtgcacctgcggtcctagctactcgggaggctgagggaggaggatcgattaagcccaggaacttgaggttgaagtgagctctgattgtgccactgcactcagccaaggtgacaaaa

SEQ ID NO: 161003 - DNA, 212 bp, Homo sapiens
gcaagcggcctaacacctctcaggagaccacagtggaccaaagttgggaagcagaccagactagatggagacgaacaaccactccgaccttttcaatctccaactatattgacctgacgcctcacctcctcacatgcagactcaccaaacatctattaggctatggtttactgtcacctgtgcaacccccacccttcccaggctgtgtcctt

SEQ ID NO: 161004 - DNA, 623 bp, Homo sapiens
tccacaggggataatgaaaacatacatcactcgtaaccttttaggccaactgggctattgaacttaacaggagcataatggctttcctggtgtcagaaattctccacccctgcctacaggtagttcatcaaattgctccgtgcttattgcttcaatctgcattgagctttaatacgccctaaaagcctgaatcccttccctcagaactttcaagcctcagaaaattgttgtgcctgtctgctgtactcactaaatgacaaagaccctgaaagttgaaaataaagcctgttacactatagaaggaaaaaaaaaaaaaagacagaagggaaggcatgttaaaaataaacagtttcaaagatttcatgaaaaaaaagtcaatgcaatttgcaacttcatttgttccagtgacaagctgataaaatgttggtggtacaaatgcatcagaaaatttgacacaaattgaaagtgactacacattctattatccccaattcccttggtcatggaaaatgattgttaaagacagtttctaatatgtcttagaagcatgaggctgtctatgggaaataataccctcgattatcaggaaagataagcattctaaaggaagcaagggctacagt

SEQ ID NO: 161005 - DNA, 642 bp, Homo sapiens
ctacctggataaagtgaggatctcatttaacttgcagcataattacagtatacctttaaatttctcttttcacatactttcacataatatgtaataaatgtgaacaagtgaacaaataactgttttctatacagttaatggcatcaaaatctacccagtcactcagtaaaaaaccagtaactacacagaaaaatgttgcaagatctcatttatagagatagagatgggaggagatgtagatcaaaggatacaaagtagcaaatatacaggcagaacaagtcaaaagatccaatgtactctacatacactatgaggactatagttaataacaatgtgttgtattcagagtttttgctaaactagtaaattatagctgttcttgccatgaggagtaaaaacgtaaaaatgggtaactacatgagataaagaatatgttaattttttccacaatagtaaccattttactatatatatttatatcttataacatcatgttatataccttaaatacacataaaatatattaaaacaaaacaaaaggaaatccaagagttatctttcattccttcttcctccataataacgtaccacactcttgattgtacttctaaaatttctgtcatatttgtcctttttcatccc

SEQ ID NO: 161006 - DNA, 592 bp, Homo sapiens
gttcaagcgattctctcctgcctcagcctcctgagtagctgggattatgggcgtgtgccagtacccctggctaatttttgtatttttagtagagatggtgtttctccatgttggacaggctggtcttgaactgctgacctcaggtgatccgcccacctcggcctcccaaagtgttaggattacaggcgtgagccaccgcacccagcctcatcctcttactgatggatgtttgggttatttctactatgtggcttttgtaagcagtgttgctatcttatacatgtttttaactacacatgtacacaccatttctcttggatatacagttggcccttcatatgtgtgggtttcacctccatggattcaacctattttggatcaaaaatattgggaaaaaaatgaaaggttgcatctgtactgagcatgtacattttttgtcattattccctaaacaatacagtataacaactatttacatagcttttacattgcattagatattataagtaatctagagaggattcaaagtatataggagaatgtgtgtagattacatgctaatactacactattttatgtaaatgacttgagc

SEQ ID NO: 161007 - DNA, 695 bp, Homo sapiens
cggttagtagagtgtctgacacaataaatgtttgttgaactaagatgaacggccacagaaaaattattcccccaggtgaaaaccagaaggtgtgcccaatttaccagtgatcccttttgttgaaatcatttgatttattaaataagattcttctttatcccattatacttttcctcatctctctgctatcttttccctacacagtgggtgaacagtaggtattcattcagtaattcttgaataaaccagcaacaaactaaaagcaaatagaaaactactagtagaacacataggtatagttcagtttttggttttgggttttttttctgtgtgtagtacatgtctggactttcaatcctctatccccactccatcattcgattagaataaaatcactcctctagaactgtatagttctttctggctgggtctcttatcaaggtgggaaatttgtggtgaaaatgctctttccaacactctaagcctatttcctgactccccttagttttatatgcaaaataatctgaaattctctttgttagatctttaattttggtcagctatacaggattcaaatcctagctgttcatatgaatcacctctaaaactttgcaaaagtacaaatccaaagcctcaccccaacttcactcagttatctgaggagatggagactaagaatccgtatttttcataag

SEQ ID NO: 161008 - DNA, 538 bp, Homo sapiens
gaggccacggcagccatggagaagtgcgggcctggctccaggtggcacagaggcactggagaggccccggggaagcctggcgcgatctggctggtcctgcgctctgcttccaggttctggccctgtaacctgggggacagggccggccaaaacagggccactgggtgctagccagcacctgggccaggcgccaggtggaagggctctggcggatcagcctcgcacccccaacagccccacaggggggcccatccagggccacacacttgcccccaggagcaggatatccctgaggctagagtccagctggaccggtggaagggtctcaccctttgccctttgactcctcttgtaggcaccctctccgcttctgacccttagtttcgtctgtgcacaactcactcaaaatgggcaactcgctaagcgtattttgttcctggttctgccgcaggtcctggccatgccatcggcaacctgctcgtcttgtccgtgaggccttcccagctggccgggctcaccctgcagctcctgcacctgt

SEQ ID NO: 161009 - DNA, 540 bp, Homo sapiens
tgagactaatcctgagttcggcagccccaggcacttgccctcagacaggctctgagtatgtttgtagcaaagtgaccctcgggtcaccatcacctttttcattcttccttatgctcggagatagtcatctgactttgcatgtgcctaaaatcagtttagcctgatgcatttcatttcaagaaggcacaaagataggaaacctgaagccatagtattttgcttctttcctggcttagagaatgcgtcaagggaaggggccttctggtctaccaattctgcccttgttctttttttctaaaacatttcctttctcacagtgggagacagtctttgaaaacccaggtttccagacatggaagagagaaaccaagtattggaaatcatttcctactgcccagtttccccaattctcctccttcatgtttttttattcagagtcaagactgctggacttcctggtgctgttttgatctggtggaagagagagttgcaatatgactgtttgcttgttaaggagttggcagtagtcataccactcag

SEQ ID NO: 161010 - DNA, 481 bp, Homo sapiens
gtagaatctcagggcttaaagtctttaggtcaatcctcttatttaaagattaagcccagagaggtcagctggcttggagaaggtcacccagagagttggtgccagagccaggaacagcatctcgtgtcctgaggccccgtccccttctttccagtgcctccctcgcggttgttctccagtcattttgtggaggtcaatcttctgagtctcgtaggaccagttagcggagcatttgaatccccacacagtactcagcagagcattagagacataggcattattaagaaatatgtgaagtgatgggtgaccgagtgagtgattgattggttgacttacgaccttggcacccatctttccacctaagtggttactggttgaatggtgagttctttgggattgtgtgtactttataggatatcttttggagaggagaggattataacaagaacaatagctaacattaaattggacaagatatttt

SEQ ID NO: 161011 - DNA, 221 bp, Homo sapiens
aatgcagcgggcatctgagtcttgggcagtcattgagggtaagcccttggggctagctagtgaggacctggcttgttgtagtaactcgtatcaagagcagtatttgtgtgtgtgtgtgtgtctatatgtatctagctgttctccccaaatactcccgacccttcctcccactggggccttcggtaaggggcctctacttacaggaagagctgaccagggca

SEQ ID NO: 161012 - DNA, 372 bp, Homo sapiens
ccgttcccctccccagcctcaaaaaagactgccaggaaattatgccagtaagctatcagggactggattaaggtagtggaattatgaaggatttttttcctatttaccaaatttggtaataggattacatttcttcaacaatgggggtaggaggaataagccattattaagtcagggaccagacccctggtctctcagaacctgggatacggcctagtacatgctgtctccctgactcatttatggcgaaattcacatcacactccttttatctgaatcagtgagggttgtgtcagcagctgagtccctggcatggatgtgctggaatccaggcctcccatcccccatccccggctcgcaggggcctcccct

SEQ ID NO: 161013 - DNA, 252 bp, Homo sapiens
cctgttccccctaaaaatccctgttcctcccaaagtgctaggattataggcatgagccactgcacctggcctattttgcctttgaaataactaattatcaaaccataagccaacctttcctgcttgaatgcaggttactcctttctgtttatatgaagccttttttcagcttaacacgtgttaaaagattttgctgccatgagaattgacagatttacaggagacaaaggttagatttgtactgggggaagg

SEQ ID NO: 161014 - DNA, 297 bp, Homo sapiens
cagtgattatatatgaagctgctttgtaaaccacagaatcctaatgtatcaagcacaaagccaaaaataattctggagtaagcagggcaggatgggaatgactgacagacactatcctaacaactctctgtacactggaaaagacatcagaagtttgatgttaaagaagtggactacatctgtagcagctaaaagaaataattccaagttgcaatttggagtcccaaggagcattagggtggtcagtaaaaagtctaaaaacaaactgttatatacaaatacaagttttggaaggtt

SEQ ID NO: 161015 - DNA, 504 bp, Homo sapiens
tatgtagtggaggattgtgagacctcacaagattgataaagtatcaaacaatgcctgtattttttaaaaggagctgtttttcaacatatagagaaataatgtcaattcctggattaatactcttttagaaaaggccaattttcattgatttcaagtagctcatgttattcagtaacaatctcagccttcaaaagtagccaaaagaaaagcagaataaatggtctcctaaataaaatgacctgtggggcccatcattgactaagtagcctttttactcatctcatacagcctcttcctaataaaaatgaagcagcatcgtgagaacggtagggagaaagggtgaacagacagaggtttacgggtcaggacagagtaccagggttaggacagataccaggaaagaggaaaagaacacactgtggaagaaacagggcaccagcttcacacttgtgcctcaggccagctttgtcaaagtgttctgagtacataacgtatcctctaaac

SEQ ID NO: 161016 - DNA, 424 bp, Homo sapiens
atacgcctagactgtggctatagaatcccctgaaaataacccacaagcaaacatgcttttgtctatgtgtgaactctctgtgtgagcaaagtactgtgcatgttctgcacagagatatgaattcttgcttcattctttcagcctgtgctgtatctgattttcctcacttcactgggcacccagcagtccagttacactgcacttgcactctacaatttgtctctaagagattccccaaatcacaaaatgtcttgtctgctgtccaacgtgctccctatatgcagaaaagatggtctgaaaaattgggttgtgcttagagccctgtggcttggcccacctctgccattgtgcaggagtggttttaaagataaatggctgcatgttaaccagatttgacatgctgtacaaaggcaggcacctttgg

SEQ ID NO: 161017 - DNA, 489 bp, Homo sapiens
ttcagaatattacaatggtgctgtttctgcgaatactgctttttcaagacgccttattcctaacatcatgttttatatccatccttttaaacaaatatttaatagcttgggaatgctggcgagagcagcggctcctgtcagcaaggactgagctcacaatttgaaagatgaaaggagatgcgttctacccacaaagaaaacggtctccagcatcataaactccacatccatcaaaccgggcaggggctgggaatagaaagcctttctggaaagaaaacaccagctaccctttgcaccctggggaacattaaaaatcaaaacaaaacatgccacatcaaccaaaacataaaccagttctcaaaccaatctaaggttccaccccaccaaggccggccgcgcagtggcctgtggagaggagggcccggctcacgtcggaacccgaaccacgcggggtcgcaggaacctgaaaagcgccagagtagcccggcg

SEQ ID NO: 161018 - DNA, 440 bp, Homo sapiens
aaatacacttctctgtgacactcgcaacattttcatccttgaatttctgatttcctttcctttttttctcctattctctcataccttgatggagtcactgaaagccaagatactcctcaatcctgcttaaagacgctaagatctatagagattactgatctccaatgaggcattttttcctagataatatgtaactgctggacagtaaaaattaacatcatattcaacagggaagaaacctgcaaaaataatttcctattaaaggcaggataaagcaaaaagaaaccgacctctctcctacagaagtacggtaaaatctaaactggtcacactaacaaatacagcatttatactctgaatgatataaatttggctttacgatgaaatttatctttccaaaaatctacatttttaaataggttttacacaggtaatataaa

SEQ ID NO: 161019 - DNA, 121 bp, Homo sapiens
ccattctccttcctaaggttggagtggggtggtgaggagccagccacctgctctgctggacaggtccacacttttagaggacctgcttgatgcagtgggtttaatatttatggtcattaag

SEQ ID NO: 161020 - DNA, 195 bp, Homo sapiens
cataaccaatcccaaagataatttcaaagaacaatgacagcaaaggttaggtgggagtagtatttgacaatgcttatttgatattgtctctcagagctgcaaactagattatacaagtcattagcgtcagatagctttaaagttgtgaccttcctttacatgaattttctagccagtttcctatcctttgcaaga

SEQ ID NO: 161021 - DNA, 765 bp, Homo sapiens
gtgtggccacagcagccactaggatggctcaaccttggaaggtaaacagtagtagagagggtgacgcagtgtagaaacttcccacacacttcccagatggggtggggggagcaagaggccctgtcgtccaggttttcctggtttccaccgttgctgtagggctgcaggatccactgagtgcacctgcctttgtgctggaagccagggctcctctctgaccctgagggtccctggctctggggagggagctcgcagggctcctctctgaccctgagggtccctggctctggggagggagctcgcagggctcctctctgacactgagggtccctggctctggggagggagcactgtgttttcagtgcccacatgttgccaaaccgcgctccagaaagctgcccagtttctgtccctgccgaacgcaggagaatgcagggaaggatgttgtactttttctccagagctgcttcccttgaggggggcccctgcctacaggtcagaaggaagctgaggttccaagtcaccccccaggcgggcctggcctgtgtaacacgcaggcgtgcaaggcagaggagatactgatgcccagggcacagtgccgtgccctggaagaccactccgtgcctcggactctgcagcagcttctgatgccgcggaggtggctgttctgttgcagacgggaaactgaggcttagcggcttgccccaggccaccgagcagctggttggcagagcaggcacacgccaggagagctgcctccctgag

SEQ ID NO: 161022 - DNA, 351 bp, Homo sapiens
tattcctaggcttactacttttaaaggatactgattgattcttcttttcataaagaaatcttctgcactgtatgggtatttgttttgtcagaaacattagcagtcatttatctactacctttccacttaggaaaacttcaaatgtcagttgctttagtttttcataatattgatgacaaaattcagtgattttatgtttaagtactgtagtttgtattctatgctgggctgttatcaaaggctatttctttgaatatttcagttaagaaatgttcttataaagttacaagcatgtattattttgtaataaggtgcaatgcgcagtgtgctccggggtccgacacgatcgtc

SEQ ID NO: 161023 - DNA, 624 bp, Homo sapiens
tcgtgaatggctgcatgagtcgactcctagaggtatcccgcgatggatcactacgcccaggactggtaagtgaccagggcgtagtgaatgaatcgacattgtcctcaggccttatgtgtgaccacaggcaagttgcttatcttttttaagcctcagtttcatcgtctgtaaaatagggctattgtcacagtggcctcatcagtttgtggaccacatgaaatgttcagtgcaggagtagagggcccaggccacgcctgcggcagccccttcctcatcccacgttggcgtgggtttggtgatgaacatttgctgggggcataaagttgattgaacaaggctcagtgctggccaatggtgaactgcagccagcttggactggctcataccagctcttgagagctgatagttacattttcagggccagcgtagtggctcacacctgtaatcccaacacttttggaggctgaggtgggaggatcacttaagctcgggagttcgagggtggcctgggcaacatagtgaaaccccttttctactataaatacaaaattagctgtgcctggtgttgcacacctgtagtcccagcaacttgggaggctgaggtagtgaggttcaatcgcagcc

SEQ ID NO: 161024 - DNA, 478 bp, Homo sapiens
ggcggcccccagtcgccctaacaattgtcggggagcctgcaggccctgccagaaagagagaggattggcacgttacctttgggcgtctggcaccccggcgtgtggctgagggcggcaaagtctaaacgaagttgacagatggagtcagtatcggccctggggagggcggccagggaggctccgagcagccgcacccgcagcagcaccactcggcccggcgggccaggaggaggaagggggcgcggaggggcggggctgggtcctgggatgggacgcggggcttgctgcggggggcaaacagaaagaatatttcatgaagtcagaggtggtcgagttttgcgaggggtgggggtcgtccccctggcagaaccggagtgagtctgtgatccctcaattggaaagagggtgagtgagggaaaggggaggaggccgcgagaggaatgaagagcgaggagaccctggagagcggggagcgaga

SEQ ID NO: 161025 - DNA, 296 bp, Homo sapiens
ggctgagccccagtttgggggttcacctgcatcaatactataataaaatggtgaaacttcaggcctgtgagtttccttaagactagaacccattgttttgctccagagcatttttcagtctgctaacttatctctctgactttgatcctatccttatcacttcccaaataatcatgtatactaccctcagggtaagatgtgtggaatggaggtgggggcagagagagagaaagaaaaagagaaaatgggcaaggatgctagataatgttgaaaataactgtaaaagcctataattt

SEQ ID NO: 161026 - DNA, 364 bp, Homo sapiens
ttatttgtaaatgtcaaaaagtccctcttacatataattgaaagctgactacatggtagacaatatgatcacaaacttttaaacaattttttaagctgaagaaatactttttctttttataagtatcaaatcaaaatgtaattcagcatccacccataaagcgcaactaaaaacttttcacaatgccattaacaacttgtggttaccatcataagcctacagacctacacactaattatctttaaaacccttattaggctgggcgtggcggctcacgcctgtaatcacagcactttggggggccaaggcgggcagatcacttgaggtcaggagtttgagcccatcttgtccaacatagtgaaac

SEQ ID NO: 161027 - DNA, 544 bp, Homo sapiens
tagcgtgtacaggagcatcttcagttcccagtgtctgtgtgtccttccaggagtagcttaggaacacacaagcagaaatgcacagatagaaatacatattcctcaaaagatcagcgggaggggccttcatgggtctcctgcacccacttggcttgaaaaattctctcaaaccgtcaccccagtctcatcatgagaaaaacatcagaccaatcccaatgcaggcgcatcctgcagctccgtgaccagcaagcctcgaaactgtcaagggtcacctgcctcgaaactgtcaagggtcatcaaatcaaaaccaaggtgagtctgagaaactatccagcccagaggctcggaggagcctcgagaaggccaaagacagatgccacctggggtcctgggattgggctgatagcccagtcccaggaggcaagtaagaaaaaaggagacttaaattgtacacagcaagtctgcttacacctttgcccagaatttaatctcagtactatatgtagctgcaggggaacctgggaaatgtagttttatttcccat

SEQ ID NO: 161028 - DNA, 496 bp, Homo sapiens
tctgggtcaaactaagtgaagagcagaatattgttaaatgatgctgcagaggaagactaggtgttaaagggccccttgggagccactgtgatatgtatggactttatcctcagtcacaggtaacaccagtgggaggttttgagcagggttttgtctatgatcttaggtccaggctggaggtttttcctctgtctcatcagctttctgattagaacaattatgtttctatgggtctagctgcttttagatggttgccatcccatggccatcactcttgaagggatgattccagaagcatctacatgactgggcggggtggtttatgcatataatcccagcactttgggaggctgaggcagaggatctcgaggccaggagtttgagaccaacctggtcaacagagggagaccctgtctctatatttttaaaaaaagaagcatcttcatatattatgggctaatgttaatagataagattttcttctgaggtaggtgga

SEQ ID NO: 161029 - DNA, 447 bp, Homo sapiens
tcattcatgtgtcaatggagtagcacttttaattttcttcaagaacttttcctttgcattcacaatttggctaacttagctaacttaacttggctaatttggcatatgcttaatcatttcttcctttccttgaaagtacgattctttcacttggacactttgaggccactgtggggttactaattggcctaatttcaatattgtcttatgtcagggaataggaaggcccaaggagaaagagatggggaatggctggtcagtggagtagtcagaacacacatgtttatgggttaagtttgctgtcttatatggatgtggttcatgtcaatataacagataaaataataatgaaaaagcttgaaatattgcaagaattaccaaaatgtgacacagacacacaaagtgagcacatttaatgtatccagtaaaaaccaaagtgtttcttac

SEQ ID NO: 161030 - DNA, 325 bp, Homo sapiens
ctagccactagagtccttccacttcagcctcccgggtagctgaaactataggtgcatgcaccatgcatggcggcatgcacctgtagtcccagctacttgggaggctgaggcatgagaatcgcttgagccctgaggcagacattgcagtgagccgagattgtgtcactgcactccagcctggggcacagagtgagactctgtctcaaacactaataataataataaatttttttaaaaaaagaaaccagacacaaaatacacattgtatgatcctatttacatgcaatgcccagaatggataaatccatagacacagaaagcagat

SEQ ID NO: 161031 - DNA, 145 bp, Homo sapiens
gtatgtaacaatgaggcccagagcctgagctttggtgtctagcagacctgggtttgaatgttagctctttgtcttcctgtgtgaccttgttggttactcgtctctctgtgtctcctccactcctataaaccaggaggtacaaatg

SEQ ID NO: 161032 - DNA, 242 bp, Homo sapiens
cctccaacccaaaagaacctccaatattagaatctgccccccaccaactcctcaaccaggatcccatttttcttctttgttgtctgtctccccgactagggcagatgtctaaggagcagggctttcatctgccttgtagaccctggtgatctcagggtcaggcccagatgaccaacaaatattcattgaatgaaacttggatagcagtgaggtgttcacatcatctctacagaaacaaacag

SEQ ID NO: 161033 - DNA, 230 bp, Homo sapiens
  misc_feature (36)..(36): n is a, c, g, or t
aatactatgactttgcttgcctcagatgaagtaaanaatgagagataacataacattatgtaataatattctccaatgcccataaggactagaccactccccttcctttggagaatattattacataatgatctgtacctctcatgttgtacctagtgaggtgaccctcattttagaatactttctaactaggcaatatcgatatctttactgtagcccttgccattctt

SEQ ID NO: 161034 - DNA, 261 bp, Homo sapiens
aaggtggtgatgaatgcagtcaccatattcactggatacagataggatatgtggtctgaccaaggattttcctacttatactttcaggaaacaaactgaatacctaatttggtatgaaaatatttgaatttctggaatatgtgtgtaatttatgaagacaacatatggactttttgaaactggaaaaattccagaaaatttcatctatctcgtcatatctttacctcaaatatctgataaccagtattccatcaccaaagg

SEQ ID NO: 161035 - DNA, 1083 bp, Homo sapiens
agttgaacagcaactgaggggagcccactgtgtgagcaaatgctgagaagcagaaatggacaagctaggtttgggggagaagaaataactggtttggctatagtgggaggtttccataggggtagaggaacaaggtggcagacgagaccatgtagagagaccgtggagagcctcagatccagagccaaggactgtgggctgtgcactctagggcagccatccccaacctttttggcaccagggaccaggttcacagaagacaatttttccacggcctggaggggaagggggagatggttttcgggatgaaactgtttcatctcagatcatcgggcattagagtctcataagaagcacacaacctacatccctcggatgtgcagttcacaatagggtttgcgctcctatatctaatgctgccactgatctgacaggaggcggagctcaggtggtaatgctcgctcaaccaccgctcacctgctgctgtgcggcccagttcctaaaaggccacagaccggtaccagtcctggcccaggggttggggacccctgctccagagccaggttggagctctccaaggtttacactaacaagggcctggcaagataagagtagtgtttcaggatgatccagtggggggcccttcagagaatggtgacagagaaaatgcaaagggagagccctaagcgtgcaagacatgctatggcctgaggggcagtaggcactggaggaggagaaagagctccacataggaaaggaattgtccagccagagctacgggaagaacagtggtgccaaacacaaataccggtgtgggctggcttcttgtctgggtttcaagtgtgtgtggcgcgtgtgtttatgatagtggggtgaggggttgcaaatgatgaatttggtttaaactttttgagtgccaggaaatgacagggagatcaagagacagatgtgcagataaaagtgcaaatggccgggcgcggtggctcacgcctgtaatcccagcactttgggacacctgaggtgggcagagcatgaggtcaggagttcaagactagcctgaccaatatggtgaaaccccgtctg

SEQ ID NO: 161036 - DNA, 154 bp, Homo sapiens
cagatctggttgagatctttaaacagaatttaagaatctttgtcagaatcttaaacctttcctgctggactcttcagagacccctgagaagactgctccagtgtcttgcctgtctggatgctggaggctgagccatggaggatctgggagctga

SEQ ID NO: 161037 - DNA, 377 bp, Homo sapiens
gccctgctttcagcatggcaccgtttacaactctgcttggtgctctatggccagaaaacctctgtgtttcttgtttgtttttgttttttgagacagagtcttgctccgtcacccaggctggagaatgcagtggcgtgatctcggctctctgcaacctccggctcctgggttcaagtgattctcttgcctcagcctctaaagtagctgagattacaggcacctgccaccatgcctggctaatttttgtatttttagtagagacagggttttgccaagttggccaggctgctcttgaactcctgacctcaaatgatccacccacctcaacctcctaaagtgcttgaattacaggcgtgagccaccgcacctggccaaaa

SEQ ID NO: 161038 - DNA, 392 bp, Homo sapiens
taatgtaagtgacccatcatcagcaatgcttttgattgtttttctggggtggtgatgaacttgtgatccatccacccctcactgatatcctttgtacatcattcacagatggccagccagagttcagtgtttaagaggccacatccagaaaaactaaaactctctaatctactctgatttccaacttattcatttaatcaagcacttaatgagtacttcccatgtgggaggcactgtgtctgtcactgtgtgatggggatacaaaagtgagactcagtccttgttgttcgttgacaaatgcttaaacaaataaggcaatgcagtgtaatgcatgctctagtagagttacaaccaagtttctgctctgcgtaggtgaggtacaggaagtttca

SEQ ID NO: 161039 - DNA, 748 bp, Homo sapiens
gcattgcttgtgagaatgtaaaatggtgctgtcgctgttcggcatagaattaccttgtgacccagcaattccgctcccaactgttcgtccaaaagaattgaaagcagggactcgaacagatatttgtacacccaggctcatcacagcattattcacaagagctaaaaggtggaaacagctccgtgtccatcagtggatgaatggaggaacaaaagatggtatacatgatggaatattattcagccataaaaaggaatggaattttgggtagaaagctatcatgtggatggtcttgaaaacattatgcttagtgaaatcagccagacacagaaggagaaatcctctatgattccacttgtacgaaggacctagagtaggcaaatacaaagagacagaaagcatgcatggagtcccagctattcgggggcaggaggatcacctgagcctaagaggttgagttcagcctggacaacatagtgagacccggtctcttttaaaatatatgtatataggccaggcgcggtggctcacgcctgtaatcccagcactttgggaggccgaggctggcagatcaagaggtcaggagatcgagaccatcctggctaacacgatgaaaccctgtctctactaaaaatataaaaaattagctgggcgtggtggtgggcgcctgtagtcccagctacatggaaggctgaggcatgagaatggctagaacccgggaggcggaggttgcagtgagctgagattg

SEQ ID NO: 161040 - DNA, 307 bp, Homo sapiens
cggaaagaagagtatactcagcatttacaaggattacagccaatgtcaatgcagaagagaggctgggtaaacttagatggtgcctaaatggaagtatttcctataccctctagcttgtctgacacctgacttgacacatcaaaagctatgcaaccagggttcatttacagggaggaagaatcaaagttgcttggttttatagaacgtatttagtgtgaaagatgggagcttttcttctggtcctaacttctcattcttaaggaagatggaagtcaaattgtagaaaaaaaaaatctacccaaatgcc

SEQ ID NO: 161041 - DNA, 728 bp, Homo sapiens
atttattaaagttaaaattattaaaaattgagaaaattattttagtaaaacttgtttcagctgggtgtggtggctcatgcctgtaatcccagcactttgggaggctaaggctggaggatcacttgaggtcatgagttcgagaccagcctggccaacatggtgaaatcccgtctctaccaaaaatattaaaaattagctgggtgtagtggcatgcacctgtaatccgagctactcgggaggctgaggcaggagaattgcttgaacccaggaggtggaggttgcagttagccaagatcgcgccactgcactctagcctgggcgacagagtaagactctgtctcaaaacaaaaacaaaaacaaaaacaaaacaaaaacaaaaacaaaacttgtttcagtttatctacttatttcgcttaaagtgttcactttgtaggaaagtgagaacatacttacatagtgcagtcctggaaaacatacttacacagtgcagtcctggaaaacagctctaactttttacaggaagctaacaatatacttgggggttagaattctgattaaagacattatataaaaataaatcatggtatatttatgatcatggtaaataaatagtatattataaaattagagagacaaacactatgaattcatataatcatataaaatgtaaaattatgttctgtgcattctataaaattgagagaaatatgagtatgatgattatttat

SEQ ID NO: 161042 - DNA, 364 bp, Homo sapiens
aagaggccgcttccctgtgctcccatacataataacaccgagtccagtgggactttagctctgggcacaaacgctacagaactgcaagaactgcagacagctggggcccacaaaacatgggcaagtgattgtgtcctgaccccaggacctctgagttcaggtaagcattttacaggggacatgagctgtgcccagtgccttctgaatacccacggcagggcagcatcgctctgcattcacttctgtgtctcctgcatcaggcgcccattccacaagaaatgcggtcacgtctctgtctctctatccactgtacctagcatggtgcttggttctgtacaagtattcaataaagtgttttttgaat

SEQ ID NO: 161043 - DNA, 493 bp, Homo sapiens
tccgcgctccgcactgcccgccccgggtccaccgcatccaccgacaacgcaggcagcgatggcttcaaatgcatgccgccgttccgagtgtgctgtccaggccgtgaggtccggggagaaacccggcagcggggtcgccagcagcctgcaaggcgccgaacccggtgcgtccgcgcagggagcggcccgtctggggtgggtggcgcgatcgcctctgcaaggctgggatgctgcagccctgggccgggcaatcgggggacgtgtgacccggggatggagcgaccctccggactgggcgacccctgggacaggcaactctggggccgtgtgacctccaggacggttcgacccccgagaccctgcacggcccgcgctcctgccggggagggtcggctgggcggggagggggcgggcggcgccggccaatccggaccccgggccgcgtcaccctccggggtcaccgctgcctccccacgtggtcccacccggaggg

SEQ ID NO: 161044 - DNA, 718 bp, Homo sapiens
  misc_feature (671)..(671): n is a, c, g, or t
  misc_feature (673)..(673): n is a, c, g, or t
  misc_feature (694)..(694): n is a, c, g, or t
aaaatgaaaactcaaaatctctggtgtgtagtaggtgcttcataaatgttgtttccttatcgtcaatattttcatagtagtttaaaagaactttaatttgagactattaaagtgatgttcccaacattattcctggagctatttagctttgcttttgaaatctaaagtttccacattttcatcaatatctttgttattaggaatattaaatctttaataaaatatattggttctttatagttaacactgaggaattaaaaacttttgtctatattgtgaatactttttaaatattttcattatcctatttatttttctttattcaaggcatttagaaaagcacatttttctttttgcaattaaaataacctaaattcagttttggggagaaaatttgatccttttgctattggattattaaggactttatcagagttaagcaaatatttggtaaacagctacatttagcactgtgaaatcatgtagtttattttaatcattttttggagatatttaagggatacaaattataagtgtacatcctagtgtaattatttgcattaataattacttagtgcattttattttattttattttattttgtttgtttttgagacagaatttcgctcttgttgcctactgcacctcatcctgggcaacagaacagggncntgtcccccacccccacccagnacagcctgagataagaggagatat

SEQ ID NO: 161045 - DNA, 516 bp, Homo sapiens
tggaggactccttaaaaatgcaaattattgggccctaccctggacctactgaataaaaagctcagaaacccttggtgtggggcacggcgctttgtgttttttggttttgggttttttgtttgtttgtttttttgagacggagtttccctcttgttgcccaggctggcgtgcaatggcatgatctcagctcactgcaatcttcgcctcccaggttcaagcgattctcctgcctcagcctcccaagtagctgagattataggcgtgtgccaccatgcccggctaatttttaatagagatggggtgtctccatgttggttaggctggtctcaaactcccgacctcaggtgatctgcccgtctcggccttccaaagtgctgggattataggtggtgatctgtgttttaacatattctccaggtgactctgatgcccctgaagcttgaaggccactgctctggagcaaactttccccaagcatgagccacaaatgcatatgggctcctcttagcccctgtg

SEQ ID NO: 161046 - DNA, 350 bp, Homo sapiens
gccaacctggcaaaaaggcctgaggggatttctcagcacagaagtttcagatattcaacattcacattactgtgatgtcagctccatcttcccaaaaacttgagtgcaggctgaaccaaaaaccgtgagagggagggagggggtgtgtgtgtgcgcgcccatgtgcgtgcatgtgtgtgtgtgtgtctgtgcctgagtgtgtatgtgtgtgcctgtatgtgtgagtgcgtgtatatgtgtgaacgtatgtgtgtgaatacatgtgtgcgtgcgtgtacacgtgtgcctgtgagtacatgtgtgcgtgtatgagtgtccatgtgtaggtgtgtgcctgtgtgagaccatgt

SEQ ID NO: 161047 - DNA, 364 bp, Homo sapiens
actgaacatttaggatttctactgcaagcccttgaagagttagcctcggacacagggtggagaatagcagacactgcatccaatctatttggaaaatgtgggggaaaccagtccccaaggcgagtgctaaaaaatttaaataggccgggcgcggtgtctcacgcctgtaatcccagcactttgggaggccgaggtggttggatcacttgaggtcaggagttcttgaccagcctggggtgacagagcgagactgcatctaaaaaaacaaaaaagaaagttatatatctccacaggaaactgtgtatctcaaagtaaactgttgatttactgggtgagacacaaatacctaactgactattctctt

SEQ ID NO: 161048 - DNA, 374 bp, Homo sapiens
tggagcctcaggtacatgtgaagcctgagttttcaggggccagcttagggcctggagctactggggctgacctggctctgggatcggtctggggtgtgaagctctgggtccagcttggtgctggggcagcccagaagactgagtctatggggcaagctcagtgttgaggcagtgttggtttgcaggtggtggcctggactctagggctgcaaattccagcctagtgctgaggtgggcctgaaggctgggatcactggagcttgcctggaagtggagcaagactagaggctgaatctgtgggagctggactggtgccagaatgggcctgaaggctccatctgtagggtcagcctggagaggccttcaggggcagg

SEQ ID NO: 161049 - DNA, 149 bp, Homo sapiens
tccactgccgcgaccaagaggagacccttcccaaggcaaaagaacagcttccctcttctccagcatctctggctcctcatcaccttgcaatcaactcgttcctgtgaggggacaaggccctgcgcacccaccctgaccccctgcccatc

SEQ ID NO: 161050 - DNA, 402 bp, Homo sapiens
taaacaacatccagggaccattcatggctatgtaaattgagtgagtccaaactccccaatttgacagtaaggcattttacgtaaggtctctatctgactttcttaatgtatccctacagcagagctcacaaactggcaatctgtaagttgtatccagtcctcataagtgtttttgtgtagtgaatacagtgtttttactaaaatttgaattatctgtcagtatttactaaatgactctccacttcatattggcacatgctttctgctttaccaaaaaccccccaccactctctattgccttgctctggtctacttcacttgcctgcatgacttgctgtagtcattgagacattgacttgattgactcaccaagtttacaaatgaccccctacatattccaac

SEQ ID NO: 161051 - DNA, 907 bp, Homo sapiens
gggctgggaatttagcgaaacaggatggtaggaaacactggcaatgcaggggccagtgccaaagtgggaggattttgagctagattctcgtctagtaacacatatttgtaggacaactttgctgttctgttttggtgcctggccaccccttggtagctgtaagattaagctttttgaacctataataggaccaagaatggatatgtctttgtgtctgtgtgcatatttctatcagccagtgaatcttagaaaagaatacatgtgtcatagtattaactgtagtgctagtctgtacaggaccaagaagtggaagaaaggattatttctctctgagggaattgaacacttctcagaggaggtgccctttaaacagaactttgagcaggagtttgccaagtaggaaagtggggaggaacttttattctgtgtgcacaggaacagggtggcatagaaacgttaagtgctcagaccatgtgaaggaatagtggtgatttggagggtggccggagtcattaaggtagaaatatagaggaaaatgaaatgtacaattaaatgcttgattagtgctttgcaatgttgacatgaggggttattcatcaagtactgattgtgtacagtgctctgctagacctacaaaatgtctggcactgttggggaaataaataccttatttctgttccaaacagaaatgggaacattttaagataatcttgctgccttggtgctaggtcatcagactgaaatgcaagtccttattttactctagtaattttatcttttgctttcttttctttccaatatttgtagtcaccttcctttttaagcacatatttctaaggggtttgcttctgctttcaagctaatccattatttcagctgttgattatatgattacatgatttgtcca

SEQ ID NO: 161052 - DNA, 300 bp, Homo sapiens
ccagacaccccgggctggggctccgtgtcacaaagatttggaacaaggagcacatcttataaaacagcagcggagacaggggaacggtgagggcctccatcgctactggcagacaaagcgccccccaggggagggtcagaggcccgtgcttgaatattctggctctcgcctgtggggagattgccagtgaaccctgcaggccgggggcccgcgtggaatgcgccatcttagtcaggggtgtgcaccgtggatgtgtgtatgcttctctgaaacccaggattctcccccttggcttgcaat

SEQ ID NO: 161053 - DNA, 327 bp, Homo sapiens
tgctgggattataggtgtgagccacctcgcccagcctccatcttgtttttattatttatagggtggccatgactgatcgtaaagccctactggtttttccattataagtaacacgtttgtattagtcctttctcacactgctataaaaacacacttaagactgggtaatttataaagaaaagaggtttaattggctcatggttctgcaggctgtataggcttctgcttctagggaggcctcaggaaacttacaatcatggtggaaagtgaaggggaagcctgcatgtcttacatggtggaaggagaactaagagagaaccaaggaga

SEQ ID NO: 161054 - DNA, 211 bp, Homo sapiens
acgctctccacccaccccacactgcttctaaggaggcatagagtttttaagcagaggaatggtgtagtccatttcatctcttagaaagctaactctagaagcagtgtggggatggattggagagggcgcagcagagtcaggactcagcacaaaatgagaaatgaggatctgaacagaggccatgaggggtgggtgagaagaggagcaggat

SEQ ID NO: 161055 - DNA, 524 bp, Homo sapiens
tctccctactgtatcctagtcactacatgagccactgcgcccagcctataatcagaaatattttatagtaagagaattagcacgatgactgaaagctcaggtagtgactaggagaacatgtttattcattcgaaaaacatttagggagcccttggagaagcagtaatagttaaggcaagacatagtccttaacagtttagttgttctaagcagaagcagtaagctcgacgtcatgaagaaaaatgatttggagaatggcacgttgtgagtgtggctgcagctggagtgtggagggccttgcatacaatttgaggtttgtactttatttcgaggtaggcttctaaggaggcatagagtttttaagcagaggaatggtgtagtccatttcatctcttagaaagctaactctagaagcagtgtggggatggattggagagggcgcagcagagtcaggactcagcacaaaatgagaaatgaggatctgaacagaggccatgaggggtgggtgagaagaggagcaggat

SEQ ID NO: 161056 - DNA, 206 bp, Homo sapiens
tgtgtgaaccatcagtaacataacacagtaaggatatgacatagaagagaggtgaaaggagataagtactggctgtttgggaacagcggaacagtgataaagcttgggaagttgcattcagggagggcttcctgaaagaggaacatttatactgaatggtatctacagtgaaaaagcccatgtgacttgaggaaattatttaaact

SEQ ID NO: 161057 - DNA, 559 bp, Homo sapiens
gatttttatatttaaagcttatcccaaggcatttttacaaaatatttttcctatcctttataagtacattacatgcagcatcactcaccactgataattctccattttgaagatcaatactcaatcacgaggacagcttattcttacaaatacattgagaaaattcacataatttttaacatgttctagaagcaactcaaatccaataagcagctcccttttgacttttaggattcattcaacaaatatgtatggaaactgcgacaaaaaattataaaatattatggtctctattttctaggagtctaacaagggagacttctcagcggacaaatttcttcctagttaattataatttctttcattcttccctaatttgcaatgtggaccaggaatataatctcaaaagtccacctaaagacatgtccagttcactgatttattctgatgctgaaatgattatttactataaacaaagcaaagagcaccaagctggggcagaaatttggagagttgggactgacagaggcctccattaaatccagtcattttagaaagt

SEQ ID NO: 161058 - DNA, 434 bp, Homo sapiens
cgtaccataaaggttagttgaggagataaaagttaaggaggtagaccgggcgtggtggcttatgcctgtaatcccagcactttgggaggctgaggcagatagatcacaaggtcaagagattgagaccatcctggccaacaaggtgaaaaccccatctctactaaaaatataaaattagctgggcgtggtggcgtgtgcctgtagtcccagatacttgggaggctgaggcaggagaatcgcttgaacctgagaggcggaggttgcagtgaagccaagattgcaccactgcactccagcctggtgaaggagtgagattctgtaaaaaaaaaaaaaagttgaggaggtaaaagtcttatggttgtaagacttctacaatttacataaaatggtagcataggaactctgtctagaatatgatatatgatatatatacc

SEQ ID NO: 161059 - DNA, 457 bp, Homo sapiens
acaaggtgcattctttctccctcatcgtactcacccaggcacaagaaaaatgactacctttgttcagccacttcatagagcttttgaaaaaagagttcctggaataatgacagtcagtcccacgttctcctttaggtgtctatttttaagttgcttttcaaaagaactcatttaggagagctaggggcaaggttggaaggcataaggacaaacatctgagcgtgaatttaaaaacgtgacgcccttgccctgtttagggtgcgggttggagacgttccaggtcacgtaatcaaatgacagctattaattggacttgagacccctttgggaaaagcctcttcgtaaccccgagtttcacggtcatgggctgggcttttttcttgctttggcgtggatgggaaagtgcaactcagtacaagggctgtggctctttctttcgtctagacattggccgcag

SEQ ID NO: 161060 - DNA, 148 bp, Homo sapiens
caattttgaaagaagttctatggcaggtaaaatgctatcaaacagcatcacatgctacagagaaagcttttgtgagaggccaagtcaatcagtatgacaaactttattgtcgtggtctcatccagcccaaccttcagcaaccaccacc

SEQ ID NO: 161061 - DNA, 354 bp, Homo sapiens
actgatggatcaccggagagaaattcgccacgtggtgccatgtgactctgatgaagtctcggggaggggctataaattgtaaagcccagctcctcttcaaaagttcatttggggccaggtgcagtggctcatacccataatcccagcatgaaccactgagcccaggaggctgaggtgggaggattgcctgaggtcaggagttcaagaccagcctggccaacatgacaaaaccctgcctcgcctaaaaatacaaaaaaaaaaaattagccaagtatggaggcacatgcctgcaatcccagctactcaggaggctgaggcaggagaattgtttgaaccttggaggcggaagttgct

SEQ ID NO: 161062 - DNA, 328 bp, Homo sapiens
tcattctgggtccaagcattcatcctgtatttattttccaagttcctgtatttagaattagagaagaccttactcagcaagtggcagaattcctacattggctccctgactgtactgtgtcataacctagtattcagggaccttgatcatttcaccatttcacaggacatagaccatggccatgtaattgatggcaaccagtcaatgaatctgctgagcataaattagcaaatacacaaaatgccttggcaagacatatatgtgactaaggataagagaaaaattccataaaagttcagagatctactaactcattgatgtttctggg

SEQ ID NO: 161063 - DNA, 309 bp, Homo sapiens
agaggcaacttcccacccaaagagaggggagtggttcccacccagaaaggaggggctgagctgaaggaccgcgaggcttcagcatttcttcacatggaggtgatcattcccctgccagcctcccctggtcattctgaggacctggcagctctggaggaagcttctccaagcccaacctcccatgggtcaggggagccttcggagctcagggagccctttcttagacatgtccatctttcgaaagccagcccagagcccaaggaccaagtagggtttgtggtgtcccctgccacaggaggtgagcgcagg

SEQ ID NO: 161064 - DNA, 369 bp, Homo sapiens
cagatatctacactgctgcatgctaagtgtgtcatcctgggattcaaacgtgagtaatagaaaacctgactaagcagcgacttgaactgaataggaggctcgctctcctcatttaacaaaatgtccagaacagggcagtccaaagctgatacagcagctccatgtttctgtgcgggacccggcctcctccagcgtttagtttagctgtcttgtcttgtaggcttctttctttcattctcatctttgttacccggtaggtgtgagatgcctgcttcattagcatcctacccgtgctccaagcaggaggtgagccaaaggtgaactcaaatcacagatgcttgttaaggccgttcccattcaaagaactcc

SEQ ID NO: 161065 - DNA, 352 bp, Homo sapiens
atctcctatttccctgcctcctgtctcatttcttctcaaatactcacttcgctctcaatccttcttttatatactgcaacccagaataattcacaactttgaatggcaagtcatttcatcagaggataatggtccaattcttcatgctaagttttagcacatatatgctatagatacacacacacccatacatatatgataaacttattttacaattttaatttcattttcacattttagataaggtcccaattaagccttctttttctccatttgattccctcttttaagtagtcactgcacattaccactctccaatttcaatttgtcctcacctaacaaagacttcttg

SEQ ID NO: 161066 - DNA, 342 bp, Homo sapiens
cggaaatcaccagcgaaaaataaaatccctccaagttagcacaatccacaaaggaagagatgaaggtagaattttctggaggcttttgaacattagcaagtgggaataaatactgagccagaagagagcagagagggggcttaccaggcttgacaaatgacaccgtgattcacacccactgctgggctgtctctaataagccacagaggaagcagccaatctcagctaattaccagataaaaaatgtatggtaaggactctaattaggagacgcggatggaggtgatctaatgattaaatgctgcattcgactgaccccaccatcaatcgctgtgtattccg

SEQ ID NO: 161067 - DNA, 414 bp, Homo sapiens
atgatctagaggatccctttctaatctatcagcataatagataaggtagataggatggtttctatatgtagctttggctaatggagacttctacttaatgtgaagatgagctgactgatagtgatgtgctgcaggttagatagttgggggtgcttacaaacctggtactgattgataagagttagaacaatactcagcttgacgtttctcaattcatattaaaggctaaaggtacgggcttatccatttttttccctagccagcatatatcccgtgttcttggcactgtcctcatagtattgggaatgacatctattcttcagttctaaggaaagagttgtgccagtaagatgtgtcttactttatatttgcatttcagtctttcttttttttttttgcacactcttccctcag

SEQ ID NO: 161068 - DNA, 445 bp, Homo sapiens
aagaaagaagcagtaaacttgaagaggacaatggaaattatcaagcctgaggaacagaaagaaaaaagattgaagaaaagtgaagaatcctcagggatctgtgggacgccatcaaacagaccaacatatacattgtgtgagttccagagggaggaaagagagagagaagggggcagaaagaatatttgaggaagcaatggctaataacttcctgaatatgttgatgttaatataaacatccaagaagctcaatgatgaactcaaagaaactcacaccaagacacactataaacaaacttacaaaggacaatgagagagttttgaaagtgacagagaaaggtggctagtcacaaaaaggggatcatgaataagattttcagaaaatttctcatcagaaactctggaggctagaagatagtgggtcatatagtcaaagtgctaaaag

SEQ ID NO: 161069 - DNA, 222 bp, Homo sapiens
tgcatattttaacatctctgaactttaaaggtgtctcatgattgaagatgtgttagagtttagatggcatcagttttttttctttgttagtggtatataaaataatggtgcttcttacaacgggatcttagattttatgaggtatcatatgggtgttatccctgccctctgagataataaagttgttcatactgccaagggcagcttccaggattactttct

SEQ ID NO: 161070 - DNA, 498 bp, Homo sapiens
tagcattatgcaaaagtaatggcaaaaactgcaattacttttgcatcaaccaaataatatagagtgagatgaatcacaattgtttttttggatgctttttgaataaattgacagctctatttccatttccatgaccgtgttggaaacctccttgttctcagagagaatcaattttaagtcctctctgcactttatatgcctgttgctacatagaccggctgactctgaagtatagatagagctctatgtctgaggatttttttttttttttgagacggagtctcactctgtcacccaggctggagtgcagtagcgcaatctcggctcactgcaacctccacctcccggcttcatgtgattctcctgcttcagcctcccaagtagctgggactacaggcgcccgccaccatgcctggctaatttttgtatttttcgtagagaaaagatttcacactggccaggctggtctcaagctcctgacctcaagtgatccgcccg

SEQ ID NO: 161071 - DNA, 306 bp, Homo sapiens
tgtcaagatcttttttttctcaaaaaaattatgacagcaagttgcttacatgatagtctgtaccccaaaatgtattaatacatatttcctactatcaggacattcagctacatcatcatcactcttgaagtcaagaaatgaatactaatacattaccaccatataatcctcagagtccattcaagatgttgcccattgtcacaataatgttctttatggcagagggatacaatgcagaatcatacatttcatttaattatcatgctttttaattgtccttcaatctgggctacttcttcattcatt

SEQ ID NO: 161072 - DNA, 323 bp, Homo sapiens
gtctgagaccaaccagcttgcaattcattggcctgcctactccctgtgaattcaccaagtgggtcaggattcctccaactacccgcgtagttcaggggagagccctgtgaggtcagggactgcagaaacagagcctgaggtgagggtcacgtgctagtgattcactcaggacactgtcccagggcagggcaggccagtgaggcagtggaggaagcaggacagacaagaggaagaagccaagcacaggtgccatttcaggcaaagtcttggcttcagtctgaccctctgggggagctctggggtataaattatgcttctgagtt

SEQ ID NO: 161073 - DNA, 658 bp, Homo sapiens
attcttcttcaggggttcagtcctacctggcccatattttgcttgtttagcaattcagacatataaatattgcttggattactatggatctgataaagctttacttgaacagtgaattcaataattttgactcttcacgtactgcagattttatttaatggcagcttgttaatggttggtaggaggggacagatggttggatgtgttggcataagtcatacataatatagcatagtcaaattcagataagtatcacacaaattaataaaagcttttattgttgtgttgtttattttgctttttttccccatagatagattctgtttgtaagcagtttttgtaggtaaaaaaaagaaacatatactacagacacagactcaaaagaaaaatataatgtaacttgatacatgctcattctgaaatgtaaaatattatggaaattcaaaggtttacttgcaggaaatgtacaaaatttattaagtccatcaaacataaaataattttatagctaaagaattcttagttttgtgaatgaatgagtgtattcaatgcagcaaattattaggtagaaattgctttatccagattcatccagacagtcctctctcccagttaactgcaatacagccaaaagagtttgctcattgtccctgaagtg

SEQ ID NO: 161074 - DNA, 364 bp, Homo sapiens
agtggcaggcacagacaatggcactccggtctcttgacacatgctggagggcaagatggtctcccctagcttagtgtctaacgtggccaggccttccctgtgtaaacgatttatttctatcctaggcctgatctgaggcccaagggacttagagggtcaaggaaaggggccactctttggtatttctgtatttatttatgtgattgcactaacttcagacaagaaactgacaaaagaggagttttttaaaaactccttgagtcacttgcagtttcaggttatttatttaggagaaatgtttttctgataaaaattgtctcacctaggaaacataaagtccagagtgtaatcagcacagatctgt

SEQ ID NO: 161075 - DNA, 242 bp, Homo sapiens
ccccagccatcttttctcccacccttcaaaccctccagaaaaacccacctcaaaatacttcctccctgtccagtaagatgacccatttgcacttctgtttgcaacagatattcaaggaaagagaaaagtgaaagcaatcagaaaatgtcttgaaaatccacttaggtcagaaccttagcagtggcttctggcacagaagacagatctctgatctcaaggagagttctctacaaaatataatg

SEQ ID NO: 161076 - DNA, 285 bp, Homo sapiens
cacacccacacacacacagagaaacagagatagagaaaatatccatattggcttattaaagacacttagcatccttagagaaaataagcctaaaatattttttaaaccccatgtttccaaattttgctggactttatgtccctgtcctctcacccagatatgttagtttaccctcccaaagtcttgggtaaagttggtttagtgaattctaaataaagaaatgtctctagagtagataagaacatttcttccagctgtagtagtttgaaataaacttttcattag

SEQ ID NO: 161077 - DNA, 267 bp, Homo sapiens
cagatacttaggcccttaggtgatgcaaccatgtctaatggctctgtatgtttctaaatgccttctcaccatttttgtacttacctcatgggcaactggtaataaacagttggcagactagcacccacctagaccacacattgagtagtcttgtgctcaggtagagtctcctactagttatgagctgctagcgtgctcaaacatcagtcatgttctgatgtaggatgcgccggttaatttggcagggtggttaagcagagatgagtt

SEQ ID NO: 161078 - DNA, 309 bp, Homo sapiens
ttctccatcttcatccttgatgagaggagagcttgttatgtatgtaccattgctgggtacaggaggcagaagagctagcgccagaacaaggagctcagctttttctggtctctgcttttacgtggctcgttataaaccaggacccaattagttctttaggcatgcctgcctgttctctttccatgtaattactttgtggagcttgggttcatgcacatagttacctcgattaaaaaataagtttttggagctataaattttcaaacactgctttgagagggtctgtcaggcattaacattcaaggtttc

SEQ ID NO: 161079 - DNA, 393 bp, Homo sapiens
agtaggtaatgtggtaagtgttatggaaggggtatgagtgaagcactgggggacaatgacaaaggcaactagtaatgctgcagtgggaagataaggtcagtttatcctaatgatcagtgcatataattcaataagtagaacaaatacactaccttaaggcaatgctgcttaattcaggactcttaacagggacacaaaatacagaaggtatagaaattcagacaacatatatttcatccaacatttttctcttaatccaattacttttgacaagttactgacctgcttggatgggttccaagaaaaggcctctttacgatggatgttactctattacaaaccatgttccagtctattttatcataaaacatattttctctgctagatactact

SEQ ID NO: 161080 - DNA, 342 bp, Homo sapiens
ccggtctggttatggttgagtgggcttagggaaaaaataatacatcgtgagtgaaagtaaagtgtcacttcctagaggaatctgccactgtgagaattttcagatctctaagttactatttgaaattgtgactgctccttctacctgggtccttgagtaactatgatgagagaaacacaacactggtttgtatacctgtgataaataggcctttttcattttaaatccctgtgctttggagtttgtcattccaacctgtatagcttatcctgatacatacaagtaaaaatacatatgaataaaagatattttatgcccatgaaattaaatgatgtttgactc

SEQ ID NO: 161081 - DNA, 369 bp, Homo sapiens
tattgcttctaaaaaagtaaacattcaaaatattcaacaattagagaatggataagcaatgatacatatattgcaataatgtggcattttcagagacataataataattgaaaacgagatatgcagctattatttcaactatataaaaatttggtttaaaagttagtgtgatacttcagaatattaactgggtttcctagatagtagaactatagatggctttttcttcttttttacaaatttgtttccaaattttcagtaatgagatttcttacttttattattagagaaaaacttgtttgaaactgttaattgttgttgcggtagacagcctctaaggtggcatccagtgaatccattgatacacat

SEQ ID NO: 161082 - DNA, 921 bp, Homo sapiens
  misc_feature (327)..(327): n is a, c, g, or t
  misc_feature (337)..(337): n is a, c, g, or t
  misc_feature (341)..(341): n is a, c, g, or t
  misc_feature (346)..(346): n is a, c, g, or t
  misc_feature (352)..(354): n is a, c, g, or t
  misc_feature (357)..(357): n is a, c, g, or t
  misc_feature (364)..(364): n is a, c, g, or t
  misc_feature (756)..(756): n is a, c, g, or t
  misc_feature (862)..(862): n is a, c, g, or t
cttgaaacacagtgggcacatgagcaatggctcaaacgaaaagtggatctaatgtgggtttctcaaccgatgaaccacaaaagcttccagctactattacaatgtgaaaattccaatgatccgtttaccagagcaattagactatgttaaaaattcatatcatttgtaacttcttttaattactgaattgatattaaaaacaaaatatggctagggcatgtcctattcttctgggcaaatgtggatgaaaaggtcacttgctacctttgacaactatgaacatgatggttaatcttctttcttttttttttttttttttttgagaangggagttttnactntgggntcgccnnnggngtggaanttacagggtgggccacaactcttgggcttccaccgtggcaaacctctcgcgccttcccccttcgcgacctctccccgagaaatgtcaagagcactgtatccatcgccgtgggccatcaaggccttccccagagttgaggcgtggagaaattttattgagggcgtgtgtatacccaccacagacgcgtgcggctaaaatcttgtgaggtactcttatgagtctgagaagaagagcggtgtttccaccaagtgttgtgagaccaagaggctgtggggcgtccaacaagaaacctctcggtgtaaacccactccagaaatggtgtagttccacgaacacgcccgagatatgcgaaggtcctctccccccgaaaagagatggtggtcagtcggggnagaatatataattatgaggagcccatttgttagtgcgacaagattgtggtgcaacctgttgtggggcacgaagggggtataacaatctcctgttttccgctattantcacaaaagaagaagaaaggtttctagtggggacatctattgtgtgtgtatgaaactcg

SEQ ID NO: 161083 - DNA, 665 bp, Homo sapiens
gttaactctttctctaccaaggtgtttttaaatttcaagtctaaatgctttgtatacttaagaattttctacaagtcataggctaattcataatatctgcatacgtatctcctccaacaaagctgtcaattatatcaactccaaatatgctactaaaatgtatattcaaagactctggttcaattccaagtgaaacagctgttctagaataacagaagtatgaaactattatttatattcatgaatctgatttcagtcaaaattcagaagatattgaaatctacagaacttcaattgttatgtaaaaattcattcaaaataattgtgctttcacttaggactcagtaatacacagaatttagaaactggagaaatcatagcaacattttgtaaagcctataacaaagttccaaaatttagaaatttatcagaaccatgaagagtatttgaaattagtgaaaaaatcaagaaatgtaagtcatggttctatttttatctcctcctggaactgtcaattatatcaaattccaaatatgctactaaaatgtatactcaaagactctggttcaattacaagtgaaatacagaagtattaaactaatattaaatgagtattaaactaatattagaaatattattttcatcagtattgaaaataaagacct

SEQ ID NO: 161084 - DNA, 299 bp, Homo sapiens
gttctatctcagaggtttaaaaacaaaaacttgagatagaacttaaaggacatagaacaatctgttgaaagaacgatcttcgggaaagttatttatggaatacgaactcaaatcaaattcattggtcattcatccccttgaaatcagattctgcagccacctggctttcctccaaaagtcttccattgtttcataagccatcctcgtttccaattcatttttctttatccactgtgtaaattaggtggacctgaatatttagaaaagattgaaagcatttggttgttattagagtaaag

SEQ ID NO: 161085 - DNA, 308 bp, Homo sapiens
gctacttggaggctgaggcaagaggattccttaagcctgagagtatgaggctgcagtgaactataatctcaccactacactccagcttaggagatagaatgaggcctcatctctaaaaaaataaataaataaaaaatgaaagaaacaacatattttgcaggttgccaccctggggtgaccccttttcactaattaggtgccatgatgtgccatcccaaacttacccctctctctggcaaaactatgagtgttgctaacctgggcgggggcaggggctgcagcctcccagacgctgacctttgcaggat

SEQ ID NO: 161086 - DNA, 628 bp, Homo sapiens
cgcagtccttttgtttggaactgacagcctctgcttcctgtggtggctgctcttctcctccccagcgtaggcagctctcaaggggtcgtctctcatctcctattacaccctctccccagatgctcactcctgggcttccaaccaccatgctcaggtaatttttaaatttttttgtagagatggagtcttaccatgttgcccaggctggtctcaaactcctaggctcaagtgatccccctgccttggcctccagaagtgctgagattacagatgtgagccaccgcgcccggcctcccgcctggagttttttaacagcacttagcacccatactgggtactttctggcatttgctcctctttccagctctttgtaggcagagtacagagaggccacaaaccccgggggcctggcatctggggtgtgcacctggccatgactcattagaaaaggcggagagagaattagaactggagaccttagcttctccaagaggagggttaagtcaagatgatgccacatgagggcagacagggttttttctcattgaggcttctttgattttgaaggcaagtgtgtggccacaggccatcctttcgctcagcaatccttgagtgttgattccatgtc

SEQ ID NO: 161087 - DNA, 282 bp, Homo sapiens
caaacatagactgaaaataaagggataaaaaagatttcaatgccaatgagaaccaaaaaagtgcaggagtagctataccaatattagacaaaatatatttcaagacaaaattataagaggcagagtgtcagttcaccaagaagacataacaattttaaatatatatgcacccaacatttgagcatccagatatgtaaagaaaacattattagagctaaagagagagcccccaatacaatagctgtaaactttaatgcccaactttcagcattagacagattt

SEQ ID NO: 161088 - DNA, 315 bp, Homo sapiens
cacactaccaaacagatgggagcattccaacttcgcattgctgataagccctctatcattattgacaaactaaaaaacattggcagtcactattgtttaggaagacacctaccctgcatctcactccatccttggctaccctccgcttgctcatctgactctcctcctgactcctcctcttgcttgcttatacccagccccatcaatagcagtgaaaggttactcatagatactatgctctttctcatataccatgagaaccaaacctttcatctacacaattgcaccatcaatccccattacaacctctaacag

SEQ ID NO: 161089 - DNA, 284 bp, Homo sapiens
ggttcattgtacacttctgtatgtttaaatactttaggtatttcataattttaaaaatcaaaactatttaaactatttcacaaactaaaaaatttaaaacatactgacaagagactttgaaaggaggagtcaaaacaataaaattatgtctggcattcatgtgcaaaaatgaaatttttaggttgggtgtggtggctcacacctgtaatcccagcactttgggaggccgaggcacgtggatcacctgagctcaggagttcgagaccagcctagccaacacggcg

SEQ ID NO: 161090 - DNA, 220 bp, Homo sapiens
tagaacaaatgaacagctccatcaccaaaaatatacataaatattttgcatttgaagagtgtgaatgttgtacctcactgcaaatgtactgtccttaaaaacctccatgcacacctcactgagggaatgtgtgttttctctgtgccagctatctaaatgaccccatgctgcaaacgcttttggaaaataaacactctcacccacccacctagtttctctt

SEQ ID NO: 161091 - DNA, 152 bp, Homo sapiens
caagctggaaatgaagtccagatctgtgtcctccacagagctctttccattggccatggaggtgtcaagaataaggctaacctagtaatagtgacaaaatagctgacctctctgccacatcatctggtatttccattctgaactgattgctg

SEQ ID NO: 161092 - DNA, 212 bp, Homo sapiens
tatgatcgtgccactgcacttcagcctgggcagcaaagtgagaccctgtctcaaaaaataaataaaaaaagtaacaaccctagtggttgtttagggatatagatacttagggtctatctctacaccccagatgatggttaaaccctggagaaagatttaatccagacgaattttagagttgtcactgagaacagtcccacccccttgcccca

SEQ ID NO: 161093 - DNA, 115 bp, Homo sapiens
atataccccttttgatatattaattctactctaaaattcttttttattttatcaagtctaatgctattatttatcaagaattagtaaaggaagataaatattaaaaaattaaaat

SEQ ID NO: 161094 - DNA, 567 bp, Homo sapiens
gagtacatcaagaggaagaggttgcttgattcttggtcctttagatttttaagactctttggccagagttttggaaaagggattgtgtcaacaagcaaagttgtggtttcaggactgccttagaaactttttcaagagaagaaacaattctctactaggcgtaaatggcacccaccttaatttttagcctttgctttttggtgcctgtagggggagcccttgatagcagattttattcccatttcactggcttggaggaaaacaccaggagttcaagctgtttaggtaattttggcgtttggcccacctgccccagctttaaagaacagtaacttgtacaagcaatgctgactgatgattgtcagtcacatgtgagaagagattagaaagatgagtggcatttattaattttttcttaaattgtaagcttggcttcaggggtgggattgattattccagcatgtggatctgtgcacaaccaggtgactcattaagcccatgagcacacacggacaaggcattgactttgtttctgtgtttgtgactttttttcttggagagaagaaa

SEQ ID NO: 161095 - DNA, 207 bp, Homo sapiens
taggctgtgcaaagatgtgctggagttcaggaaggggggtgaggacccgttacaaattttcattctggaacaggaggatccatgcccaactgggacccttcaggctcccagttgccctgccctgtctctggctgcctggacttcacagagggagaacaacacgcgggcggcagctgcagacaccggatcccggagctgctgggttca

SEQ ID NO: 161096 - DNA, 478 bp, Homo sapiens
  misc_feature (20)..(20): n is a, c, g, or t
ttacatgatacaatcgagtnggtacctgtgggtagcaacaaatcaatttctaacactgtttcaccaaagtgttatttcaaggttggagttcagggaaagaagtaacagcatttaagtctagctttgctttcacccattggtattgtatagataccaaaacaaatcctaagcctatatatttttataaaagcaaattatctcgagataatttttttgaaatttccttgctatacctagttttcaaacacaattaggtcagaatttaaacaaattttgtccttttattctctgggacagaccccaaaacagaaatgtatacagaacccctgcaatacttgatgagtaagtgataaattcaaaagaaccagtgggaagagtggaagagagaagcatgagtggcagacaacatgcaggttaattttcagctttcaaaaacaaattgtaaaaggttaaaatatttttagggttgttgcttcca

SEQ ID NO: 161097 - DNA, 405 bp, Homo sapiens
aaaatcattgagacctactgctcaggaaaaaagaatcctttcaaaatattattgctcattgacaatgcaccttgtgacccaagagctctgacggagatgtatgtaaagatgaatgttgttttcatgcctgctaatgtaacacccattctgcagcccatggagaagggataaatttgattttcaagtcttattatttaagaaatatattttataaagcagtatctgccatagttagtgattcctctaatggatctgggcaaagtaaattgaaaaccttctggaaaggattccccattctagatgccattaagaacacttgtgattcacaagaagaggttgaaatatcaacattaacaggagtttggaagaagttgattccaaccctcatggatgagcggtttaaga

SEQ ID NO: 161098 - DNA, 111 bp, Homo sapiens
tccaagcctcattgtgcaaacacacctgcttcaaggtcccaggcacagaaggctcagatccgtgcactgccttcagctctgggttgaacttacagctggactagaggatgg

SEQ ID NO: 161099 - DNA, 176 bp, Homo sapiens
tatcctggccatccatactgagacctaagaattaatcttggaagcagagatcacagactttttatgttagaaaggacttttaaatctcattcagcactgaatgtgagatacaaatgtcctccacagctttcattgacagacatttcactaagctctgccctctgtgctagtcgggg

SEQ ID NO: 161100 - DNA, 507 bp, Homo sapiens
ctgcctcctgtttgctcagaacatgttctcaggcctaggggagcctccttcttgaaccccagaatgggtgccacagtcccaggcttgccgcatcctggaagttcaccctacttcagtatgcagtcagatccaggtacgcagggacgcagtgtgcggtcagacccagttatgcagggatgcagtgtgcggtcagacccagttatgcagggatgcggtgtgcggtcagacccagttatgcagggatgcggtgtgcggtcagacccagttatgcagggatgcggtgtgcggtcagacccaggtatgcagggatgcggtgtgcggtcagacccagttagatggtccttaaacatgccatgctgatttgcccctgggggcttcacttgtgttcttccattgttcctcttttcctcacttccttcaggtttctgtacaaatgtcgcctcctcagagaggcctcatctgaccccattcaaaattagcagccacacagaggtataatatgctgag

SEQ ID NO: 161101 - DNA, 706 bp, Homo sapiens
gcaataaactctcggtcactaaagctgtctctctgagatagagaactaatcaaacctacaacacaatatactggccactgtattgctcgtcaaaggtgatagtaaatgctttctaagtagatgagaaagaacatttcagaattttcccagatttgaaagaaaagacagtccttaaattatttcatgaaaaaatcaagaaaagtcacaacaatttctgactccaggccatacacaggccttcttcagcttcaggaaaatcacaaaggatcactttctctcagaaacactagcttagcttaagtactcagtgtaatgcttcagagctgtgctatctaatacagaaagcaatagacacatgtggctatttaaattaactacaattaaataaaatggaaaatgcagttcctaagtcacactagccacacctgaagtgttcaataaccacatgtagctaccatgttggatagcacagatagagaacatttctatcattacaaaaagttgcatcagacagtgctactccacagtaaccaagtttagagaaagacagtagctttttaacaactctttagttcttcagaaactttcataagtggtgttgtaacagttttatgaatccatgctttttaaagtttaggtactgaggccacccaccaatgaaatgaaatttgcttcaaatactatcaacctagaatggagcatagaa

SEQ ID NO: 161102 - DNA, 338 bp, Homo sapiens
aaagcagttaatacagactcatagttctgcacgccaaggtggcctcaggaaatgtacaatcatgctggagggtgaaggaaaagcaaggcacgccttccatggtggcaggagagaaagagagcgagccgggaacttctacacacttttaaaccatcagatctcctgagaactcccccactatcaggagaacagcatggaaaaaactgcccccatgatccaatcacctaccagatccttcccctgacacatggggattacaatgtgagatgagatttgtgtggcaagacagagccaaattatataagaatgcaccatcctgagtctgtattaactgcttg

SEQ ID NO: 161103 - DNA, 560 bp, Homo sapiens
ctaaaggatcccccacaccacctgagtcgaaattccactgcattacacatttatgcatttatgctggagcaccataccagccccaggaaagactgtagacacttgaagatggtccaacattatcatataggcaataagaaagctctgtcaagcttatagaacaaagagacaagtattcagcactaagcaatcctctaatttgttcaagctaaaaatgagcagttaactctggatatgagtaggaaaaatttaataactgaattgagagtttctctaattacccatgcatctctaagaaatatctatttgaaggactgactggtgatgaaaattatagccatgacaaagctcatagaggtgactagcccacggctatcttctctgatgtaacctagggattctccaacagaatagctgactcaagctcagctcacacaatactacttcaatctttctcaatccacttctctgaagaacttgtttcttaagttctaatgtttaatgtgacaatgaaatctgctctacagatggaattgaattgcaggcaacgtccatctaat

SEQ ID NO: 161104 - DNA, 338 bp, Homo sapiens
gtacaccaccacgcccagctaatttttgtatttttagtagagacggggtttcaccatgttggtcaggtcggtctggaactcctgacctcgtgatccgccctcccaggcatcccgaagtgctgggattacaggcatgagccactgttacaggctctccaattctcttcttccaaaatagcaccacaatctggtttaacaagttaggttacagtttcataatacagtccctacccttgtgagtaagctctctgcctggaggtctaattcatgtctaattcatcttggattgatgtctgaagaattaacatcacctaggaaggtttatagagactattaca

SEQ ID NO: 161105 - DNA, 659 bp, Homo sapiens
aggcatccttagagatggagtccagttagaggctgctgtggcggccccagcaagagacagtaaagatggctttgtgctgcacacaatcttcagggctgtttgagtgtggggcaggggagcccacgcccaggattagaatgaggcgccctgggcccttctctcactcctctttcctttatgccttgcggatactcccagaaggagaaatgcaaagcacagcaaactatttatgttaaatagactgcaaggtttgatggcatctggttgtcgaccaccaatgctgaggttcctctttgaggggtaggttgaggccagagaaggggcaggaagggcagggggtaaagagagtttggggtcctgctctccattttgaaagcacattgtatgccaagtggaaagctaagcagttttctgtgaaaatatgtgaataaatgagcaggtacacacatacatacacacatgcacactgatgcagacatgcgcacacatacacacaggcacacgtgctcacatgcacacttccgcacacgctcaaatacacatgcacatgcacacattcacactcacatgcacacacatgctcatacatgcacacatgagcacacatgctcatatgcacacatgcgcatacacgcacactcacatgcactcatatatgc

SEQ ID NO: 161106 - DNA, 315 bp, Homo sapiens
tctcaagtctttattcatggtccgtttattaaactctccttggttgcccagattcagtgtgttatccatttcttctgggacttgattgatatttccaagccttgaaatgcctcctcgtcacccacaggagacaaataaagcctgtgcttctttgaagagcacctgaagccacttatgatctgtttcctgcttgctctttccacttcatctcccacctctccttctcttgcgctttatagtcctataatgccagattgcttatgatgcccggaaggggccctattgttttccacctccatgcctatgcctgccaaa

SEQ ID NO: 161107 - DNA, 169 bp, Homo sapiens
taagaaaactactcagctataaaaatcagccatttcttagggaaaagggtaactcagaagacaaaacaaaattctcagcagaaaccagagcctgaaacaatcattcccaggcaccagaactgagaccaaatcaaggaattggtaacgtgtgccctgctgaatttcagaa

SEQ ID NO: 161108 - DNA, 281 bp, Homo sapiens
gaagaggaaatcacggtggagagctgtagaaatcgtattagaatttcatctgtgtagttccttagaaagcttttcattgaaccacctgtttcaatttccattttttaaaaaaataaaatatacctctgtctgtaatcacgctacgatgagcagctgacattcttactcaggacttagaataataatgctttagagtcctgcacgaagcctccaaaagagtggaaaaaatacacaacccttcgaaacaggtttactcaagcacggtgagagaggctgggcgg

SEQ ID NO: 161109 - DNA, 653 bp, Homo sapiens
caggttggttcctaacccacaaaatctgtgagataataaatgttgttttaagtcaaatttgggatgtactttcttatacagcaatagctatctaataaaggcaggaggaaaagcttatttgtaataaattatttactgaaaacttggtcacataaatggaaaaaagcattcttgatgccatgcctttgcatttttatcatcaccccaacctaaaagaagggttctttatcacatgtgtttacaatgtgtcacataggagttgggtattgtcctggttctctttgcccttatcctgcattttttcaagttcctccaagaaggggtgacacagcgaacctctccaattgatcttatagattaggggcttctacttttcacgatagccactttttaaattctatcatttttagctttgccatacaatttgattacattccttagtgaaacatcaatgctcttattttgaatatatcacaaattcgttaaaatatatttacaaatacctctatgtttcctaaagttataataatccctagcagaaaacactggaaatagaaaaaaagagaaaaaaaaccttcctctatagttcaagaaaattagcgttcaaacttagatgataaaacatgaaatgaaaattcttgatgaaaataatt

SEQ ID NO: 161110 - DNA, 596 bp, Homo sapiens
aacagcctgtgcggcagtggcacatcctcactaagctggttatgaatataccagtgacttcaactttggcatttcattcatacttctgtagagaacggaaaactattgtccattaacatgatatgctaaacattctataaacattcttgtatttatgtgagacttgccgtagatggaaatggtagagacagataaagatgggagattggagataggtgggagttgggagagggaaagggagaaacagagagaaagaagacacagggaagaagataagtaaggaaagaataatcttaaagcctgtgtattacttttttgtttaaggtatacagatggtttggaaccagatcattcttaaaaaacagagtatagtggataacagtgtagttgttggagtcagaactaatgactagaattagaatgttggctccaacatgggagagggagaaagagagaagggaagaagagaaggaaggaacgaagaaccttaatacatgcgcactacttttcttaaaagtacacagccactgcactccagcctgggcaacagagtgagactctgtctcagaaaaaaaaaaaagaaaagaaaagaaaaa

SEQ ID NO: 161111 - DNA, 504 bp, Homo sapiens
attccatctaggacagctgagaaatgatagatgggagcaaactgagaagagagacatcaaattattacagtccttaacttttaaaagtttagactctagacactatataaataatatcaaaagagcatacatacacacataataggaggcagatctcaaataagtgctatatttgtactgagaagaatttagttttgcataggaagattgggaaatgattcttacaggtgactaaactttactaagccctggagtcttgacagaggaaattaatgaggcaaaaattggaggcagtagctctttagaaaatatgggaaagtggcaactacagaatatttttgagaaagttaattaatgtatttaatcattaattaaacaaataattcctgaccatccattaagaggttctggggctacattgtgggatatagcagtgaacaagaaagatgccatccctcctcattgatggcagtgctaagagatgtacttggggaaatgggggca

SEQ ID NO: 161112 - DNA, 656 bp, Homo sapiens
aggatatctgcatattctgaaaatatctctccataaaatacttattaattagtaagtaccgcctacttattgatgaattttacaatggagaaacctaatagaccccatgttaaccaagtggcaaaagttgacatcaccaacattgggacaaatgaatggggtgtgtctcctgggatgtacagagaagaacatagcgttggtcctgaggcattcctaccaaaaatgcagaaataataaggaagctcagataatcccaccttaagagacatttagcaaggtagctggactctacttctcaaaaatatcatggttgtgaaagacaagaggagactgaaggagactagagagacgcgacaaatgtatgcaacgtgatattcgatgcagacagcagaggtggaatctgaatggagtctattgattagttgtaatatcaggtcaatggtaattcctaattttgatggttgtactggggttatgtcagagagtgtccttatacttagaatatgtacagtagagtattatggggatgatgagacattattttgcaacttattctcaaatgatttagaaaagtcaacaatcagaattggagtgaaacgtttatgggagctctgtgaactgtaactacttttatttaagcttaaagtatattaaaa

SEQ ID NO: 161113 - DNA, 159 bp, Homo sapiens
acatacacagatacacactaaaatgtattaatagagtgtaaatataatctatctctcctaatagggtgatactttaaagagcaaaaatgaggacaattcttggttacaccggaatacaagagtaaactaggactactcaagataggctggatatatata

SEQ ID NO: 161114 - DNA, 270 bp, Homo sapiens
cacagcttctgtacatgtgtagtcgtctttgcagatggcatatgtggtttccagatttgccaccttatcatagtgaatgcaaagcatgagtgaacatggaggactgaatatgtcgtttaatatgtgttagaaggcaagtggctagtctcttgaggtgagagatattaattgccttttaagaaagggaatggttagagaagaaataacagtgtaaaaaaaaaagtgactacctaagttttataagtgagatgagctgttacaaaataaaat

SEQ ID NO: 161115 - DNA, 393 bp, Homo sapiens
atatgggggctcagctagaggaaagaggacagagccatttcattacaaaattccattctcagaactcaaagctatggcagacagagaagctctgaaagcagcttttcaaagtggacagagctgtaggggcgtagagtatctgaaaatccaatttcaaaaagcatctcgaaccaaaaggcaaatggcaatgattagaaaaattctggttaggaaaaactcatgaacactggtggaaaaaaaacaaagcaatataagtcatcagtcaggggtctgagacccacacagggaggtctgtgggctcaaagtggggtggagacagcaggaggcgtgcaggtgggctccaggagcctcaggacacgcctaagcttcggcccatgtggaacagagtatgcc

SEQ ID NO: 161116 - DNA, 362 bp, Homo sapiens
agtgatcaaggtcacagcacattcacttttctatgtcatactcactccaaggataaccttactgaaaggaatgatgaatagaatccctcaaacacattgaaatgtttttctttttcttttttaggtacagttcatatgactgaatgatttacataaattagtgttcaaattatgagaatctactatgtcatataagacagtcctaaagattttacaatgtagtgactaaagtgaaacaaaaatgctaaagctgttgatgaaactgagataaatactgatcccagaatatattttaagccactaaataaatggacactgatttaattaggaaaaacaattattttgtttaaaaaaaatgtaaa

SEQ ID NO: 161117 - DNA, 526 bp, Homo sapiens
tccagtcctcacctgtcaaatgaacaaattcaaagcactttgctcatggagtgaggattacattagagaacgcagataacgtgctcacttattagcacactgtctggtgcaaagaaaccgcttgggacatgacagctgtcattaacaatcccccaggctcccatgaggccccagctcagatttctcagtttctcacctttgactgccccttacagtcacctggggagcttcacctggtctgacgtcatcagtctggctgtggtctgggcctccctgccccgttaattttgcactgtgcagccaggattaggaatatggccatggactgggcgcggtggctcacgtctataatcccagcactttgggaggccgaggcgggcagatcacaaggtcaagagatcgagaccatccctggcaaacgtggtgaaaccccatttctactaaaaatacaaaaattagcggggcttggtggtgcgcgcttgtagtcccagctactcaggaggctgaggcaggagaatcgcttgaa

SEQ ID NO: 161118 - DNA, 292 bp, Homo sapiens
tagaggattagtagaaactgactcttctagtggctaatgggaacctggcctgccacagaaggccacgggttttgagaggctatagatctattcagattatatgaccagtctgggctgagcacagtgggtcacaggaggaggggaacaaaaggagaaggtgtagtccagcctttgagcagcatcagggtatagttggagtgatccaaggcacaccctaaaaacagtgagggaagtaacccttgctgaggaagctaggactgtgggaaggacactagatggcagttaacagact

SEQ ID NO: 161119 - DNA, 560 bp, Homo sapiens
aggtgatgctgggctaaactaagaaatggtggcaggtctggagaggatggaatagagatgccaagagcaagcaggattcggtaatcgattggatgtagacatgaggaagagggtagtatcgagaactgccaggtttctgccttgattcactgtatgaaatagaagagggccacagagaggtagtgggctttggaggaaaggaagaaaatgccatatttcaagtctggagcccaacagagaaagatctaggctggagattaaaattttagccaggtgcaatggcttatgcctgtaatccaagcactttgggaggctgaggcaggaggattgctcaaactcaaaagtttgagaccagcctgggcaacatagggagacctctgtctctacaaaatatcagaaaattaaccaggtgtggtggtgtgtgcctctagtcccagttacttgggatgctgaggcattgcttgagcccaggaggtcaaggctgcagtgagccgagcactgcactctgagcactgtactccgagcactgtacaacacagcaacaccctgtctcaaaaata

SEQ ID NO: 161120 - DNA, 481 bp, Homo sapiens
ttccctaaggacttagtggagggggaaagttgtttttggtactacttggtgggaagtaaggggaaggttggatcttgggtttggtctacccacccaagagaaaagactgttaactggaagaaaaaatatatatataaaattttaaaaaaaaaaaaaaaaaaaaaaaaaagatttgcggccgcaaatctttttttttttttttttaataaagcataacaaatttatttaattttaaaaatcaaagtcttgcgtgacactggaaccttcagaaatgacacagatacccaggggaaaactgctgtttttttatgcttaggtttgatgaagaatgggctgtaaaccaaaaataaaatttgaagcccttcagccatctgaatgggcacctcctctcggccaagggcattctaaagttaacctgaaaaactagttcaggtcatgatcggaaggggggagtcagacacgccttgttaccattcacgtc

SEQ ID NO: 161121 - DNA, 219 bp, Homo sapiens
gaataataaaaacattaatcccctcaaatggttcaccttagtataacttactttgcttcagtagaacaagttcctcaccagtgcaaataagataggtaggtttaggatacagaagtgcctcaaggtactctttccctgttttggtgaaccttttctagagaatgaactaccatacaaagggccattctgacaaccagttaaatcactcattattgcttt

SEQ ID NO: 161122 - DNA, 142 bp, Homo sapiens
ttccatggcaaagtgctcttagctgcagtttgaaagggatctttgaaagccttttccccaacacttccagccattggaagctgaaaccagcctcctggacgccccttgccggaatgggcagcatcactcagccagaacaacg

SEQ ID NO: 161123 - DNA, 617 bp, Homo sapiens
agtgaacttcggtgttaattcttaatataactcatgttttaatttgtttctgctcaagttaattgttctgttgactgacaggcctttcccattagagccaccaccataagggaaacttcagtaaagtgggttataggactgaacctggaaactgcagtggacacctggaattcttgtgcaattcattgaagccatcgttttatgtacttagtgaaacacacttagatttgactggcctttatccattgacttgatcatttgcttcagtttgatatagtaatggttgcagagggcaacaaaaggaaacagtcttgctaaattttgtaaaattgtttatgtatcttactatgattcattctgaattttaagaggcaaaggaattctccacttgtatttatctgtttgtttcttaatcatcacaccatatagtcttatactgtacacattgaaaacacttatataatatacctcctctaactatattttttgcttaacataaaggttattttatattagaccgtgaaatttacttttctattgattcactttgtaggcaatactttcttgttacttttctaatcattaaatgccagagcttgcctctgggaatttccata

SEQ ID NO: 161124 - DNA, 411 bp, Homo sapiens
acatatatctttaaaacataaaacagtggctggttttcttttatggttgttggtttattgatatttgctaatttttctacaatgttcacatattatttgttaatacatgaaactcttaagcatctctctaggtatcctgggaacatataaacaaatataaatgtagcttttatttttattttaaaaaataaagttaggccagccacagtagctcatgcctgtaattccatcactttgggagactgaggcgggtggatcacctggggtcaggcgttcgaaaccagcctggccaacgtggtgaaaccctgtctctaccaaaaatacaaaattagctgggcgtagtggcaggcacctgtaatctcagctatttgggaggctgaggcaggagaatcacttgaacctgggaggcag

SEQ ID NO: 161125 - DNA, 215 bp, Homo sapiens
ctttctaatctcttatgtcctgtgagtgtcacccattgagtaaacccaagtggaagtcagcaggaaagtagctgggatgatgcagtctttacaggtaagccttttggaagcacagaacaatggacagaagggcaactaatagatctacaggggtgccctgaaagtgatcagcagagagacttagctattgatttcaatctctcccgtcctctcat

SEQ ID NO: 161126 - DNA, 472 bp, Homo sapiens
tgtctcagtttcgggacgcgagtcccgggcagtagtggagctggatttgaatcccagcagctggactccagtgttctttcatttaatcactacatcgcaccgagatatagaaatgacacccggaaaaagtgaaaagtttatgcttctgtctttattgttttcctgtcaagggaggcagtgccttgtagtcgaatgaaagtgtgtttttggaatcagatacattcagcttcaactctcagccctttaccagcttatccgctgtttgcgttaagtttcctcatgtggaacatcgtgatatgaatacctacgacgcagagttgttgtgatactagatactaaagtgtttggattgtattgttacacacttgtccctaaactgaggctgaatataaactgaaaaaatggaaaatgaagtatcagggatgtatgcgtgtgtaggtatgcatttacctttttacaaaaattacggggg

SEQ ID NO: 161127 - DNA, 534 bp, Homo sapiens
cacaggagggattgtgtgtttgagatcatctctggtccagttctttgcctctccctgcatccatgccctttgccacctgagcctgcagcttcatctacttcaggactggctggactcccccacccctgcccactgagtttggctgtttctgtggctccagctagtggcctgttggggaaagaatggtgtgtcagttctgacctaggcctcaaaaggcctgcgtgtttcttttggctctcttgccattgtcataagactatgtctgcctatcccagtagctggaggacaatgaaggacacacggaacagggctgctccagccaaggccgggctagagaaggccacccaagccaacttgcagatgtaggggagcccagctgagattggtggagccggccaaacaaacgtgtattgttcagaaatgcagttttatttatttttgagatggaggtgtctcactttgtcacccagactagagtgcagtggtgtgattgtagctcactacagccttgaactcctgggctcaagtgatcct

SEQ ID NO: 161128 - DNA, 651 bp, Homo sapiens
aatatacatatatcaaaacatattgtagaccataaatacatacaatttgtatttctcaattaaaagtatttaaaaaataatctggctgggcgtggtggctcacacctgtaatcccagcactttgggaggccaaggcgggaggatcacctgaggtcaggagttcaagaccagcctggccaacatggtgaaaccccatctctactaaaaatacaaaaattagccagatgcggtggttcacgcctgtaatcccagctattcaggaggctgaggcaggagaaccgcttgaacctgggaagtggaggttgcagtgagccaagatcgcaccattgcactccagcccgggggacagagcgagactccatctcaaaacaaaacaaaaaaccaatatccattttcaagtataagaaatacatattctctgctgggattacaggcatgtgccaccgtgcctggccagaaattttatagttttacatttttcatttaagttcgtggttcattttgtgttaatttttgtaaagttgtgaaatttagatcaaggttcttttttttctatggatgcccatagcatttatttaaaagttatcccttctcaagtgaatagctttttcacctttgtcaaaacttagttgtgcaaatttgtgtggctct

SEQ ID NO: 161129 - DNA, 151 bp, Homo sapiens
gaagtctcagcaaatttaatagagaagtatgttctctatttaaaagaaaataaattagaaatcagtgtttaccagataggagaataaagtaatcctataatgctgactttatccgtgactagttgtaatcctgcttgaggtgggaccagat

SEQ ID NO: 161130 - DNA, 353 bp, Homo sapiens
cccgggctgggtgttgggatgcgctcctgccttggtgcctccacgagggctgggcattaggggcccacaggccgcagcttcagtccctctggccctctgggttagtcctggccccgcccaccaaccctctgggttagtcctgggtcctccctgctctcctgggtcagtcctgggtcctccctgccctctgggtcagccctgggtctccccactctgccctcctttcttaggtgaaggctctgctcccttagacttggggggaaacaggaaggtctggctggaacagatgactttttctaaaccctgagtccagagcggcgtggatgcctgtgggcactggcagctgacagctt

SEQ ID NO: 161131 - DNA, 333 bp, Homo sapiens
agcaggcttggtgccccagattagatgtcattcctcaggtctaacgagggtctcttattttggaatgtcatgactcccataagctcctgcgccttggttgtacggattagttatcttgctgaacttgaatataggcctcactttatctttcacttaatgacctgacatcttaatctggggcccaagcctgcagcaggcttgctgccccacattaagatgtcaattcagcaacccaactttgtagcttagggagctgtatgtagctggtcaggcaggaatatgggtagcctgggcatcagatttatggttgatatctgaagtggggcagtcctg

SEQ ID NO: 161132 - DNA, 540 bp, Homo sapiens
tctattgcactaacaagagtcccccttccaggcttgacctctcaccttaacagaactaatgaatgtatttgcctttatccctcctattttctgactctctattgcactaacaagagtcccccttccaggcttgacctctcaccttaacagaactaatgaataatttcaaaatttaaatagaaatagtcagttgtataacctatgtttaatttttcattttaagcaccgtaaaatcttaaccattgacatattaggcagtttacagttaaaatatattttgaataaatgcatgtatacttgcctaatgcaatagatacaagcttgaatatttgttccagagaattgagacttggtctattcctgggagctcatttttagacttgcctctgtgctttggtggtgcagggagacatgagcatggctgaggattctgtcaagattgctgaaatcagacactacttgaagatattaagggactttatattgtaaaaccctggaatccttcccagtccaccctcaactgactggagtgcacccatg

SEQ ID NO: 161133 - DNA, 156 bp, Homo sapiens
gaagctttttggttgtatgcaatctcatttgtctatttctatttttgttatctgcttttggtgtcatatccaaaaaatcatttcccagtccaatgccaggaagcttttcccctatgttttcttctagtagttttatggtttgaggtcttacattca

SEQ ID NO: 161134 - DNA, 314 bp, Homo sapiens
atttgctcggaccagcggaacaagcaaggaagtggatgagctgggatgcaaccccaggttgtctggctggagagaaaaacacagagaaagatgccagaaatgaaaggtgggggctattttctcacagaacttaaaatgaattgaggagaggaggccaggggttcccaggtggccgcctgcccacagtgccacgggctggtaggcggttttcttcactagtccacaaataaacgagaaggaagactaggaaatatttaccaagtgaactgtgctggtagaggaaggacagtcttggtagctgttttgcttttgct

SEQ ID NO: 161135 - DNA, 385 bp, Homo sapiens
tttttatttgcccactgtggattattcaaccacaaaaaaatgacacataaattgctgcatgattctactgtccaggaaacccagatagcgtattacagacgccaataaccgagggcccccagatgggagcgttctgagaatgcactgcttgacagacagcatccatcagagcccacttaggatgccgggtgatcgaatgcagcctagtcgccctctcatcttctcctgaagcatccaaacccaggaagttagcttcctcccatcactgccaactcctagtgaatttcagagccggccacacagcaatcaaagctttcagaaacagaaaatagagaccaagcgcagggcaaaacgtcccctagtttgaaattaagagcagaaattc

SEQ ID NO: 161136 - DNA, 281 bp, Homo sapiens
aaaattcttcctgatatctgttgaagtatgcattaagaaaataggggcattgcctggaatttaaactggctgcctagatctttgtgtagataccactctgtactgtctgcttagacatttggctttttactataccccaagtgattaagctctaggtattcaatggacatatcagaacatcatcaatttatagtagggaagaatgtctttcatactgaccaattcctatactaatggtcagttatgtgtgaaatctagttataatcaaaggctatttggtg

SEQ ID NO: 161137 - DNA, 560 bp, Homo sapiens
ataatgagcagttcttttctccaggggaataacgtttataatttcacccaatttttttggcaaagatagaagttctatttttaaaatgattttaaagcatagtcccttttttaagattaaaatgtatttgaaggtactgtcaatctctcaatctttattctaagcttgatttcttaatttgatcttgttgacttttttactagtgactcagaccttattgcattatatttattgtgttataaagcaattatatacttaaaattataataagatttgttcttgtctaaggataattcagcttctaaattaattattttcacaacagcacagcaagttagttgttattcgccattattctcattatgaggattcagaattaataaactggtaatgactggtagctcaggtcttcagaggtaaatggtttgcccgaagtcaaatatccaggaagtaataaatcaggaggaagcctggttctttcttcatcttctgccccttttccgttttgccatgggtccacaagtgttataaaataattgtgtctgtggttattttggagg

SEQ ID NO: 161138 - DNA, 418 bp, Homo sapiens
ccacacaagagtcatttttatgtgcaatattttatttctcaaacttggtaaattttaagtgtgtactatattgtcagttcattttggatgcttgaaagatttcatcattttctttaattgttcaggaatgcaactttcataccatatccaagcttttggccttgagaatcttctgctcagtcatttcttccctccttctacatattctccacagtctccctcactccacatcactaatctggaccccatgctttctttcaatcaaaagatgtcatttatttaaaatttaaaatccaaacgaccctgaaatggtttgcattttaaaagaagatttaagtagaaagggctttcaagacctaaagaagtgacattataagggtggaacaattctcatggggtcctatgtgacatctgctca

SEQ ID NO: 161139 - DNA, 354 bp, Homo sapiens
accatctcaatatatcccacgaggagcaggccacaatcgccctgcaggtaaccatttcctcagaagcagagattagaaccaatacaacatccctgagttggggctggacattcacttagtccaaacagctccccaacaaaagttttgacccttgcagtcactccctggccacagtggtaccagtgggagggcagttactgctaatcagtcagtcctaaagtgctgagggaatcagaatgtgggtatgtacttagagaatcactaaaatgagaatgaaaacttaattcacgtttggtttgcttattctagaaataatctctctctctttctttctctctctctcttttgtaaagc

SEQ ID NO: 161140 - DNA, 326 bp, Homo sapiens
tactaccagaggtcacagtcaaagaatcgtacaccgttttggagcctactccagtatagatcaaagcaaaggcaagggcaataaggctacaccaagctggggcagtttgggtggagatagaaagacagtatgagagaaacttagtaaaatattttgtctccttcctctcccagactccccaaactctgtctgtttatctcttgctaccattattctaaccttaagtgtatcacatcctgtgaaataggactactagaatggactactagggtgacaaagaattccagtttaattccagtttatgctatgtatttccatacaccaac

SEQ ID NO: 161141 - DNA, 397 bp, Homo sapiens
agggtgactgcccccatgtggtctagtggagaggatgtttggtcaggcagctgggaaggacggccttgctgtgtgacaggcatcgatgggcgtccacgccctccagggacgtcctgctccaggtggttggcactcacgttctcctcgctccccatgcagtgactagaaagcctgtgtgggattctggcaacggcatccgcccgccagcccctcccagggggtgccccagggcctctgccctctgcccgcagctcctcccccacagccacgcttccacccacccgttcggctgggctttgggtgggcaggcagacgtagaccctgcttggaggcggtggccctagagggatccacagatggggaaaaggccgagacacacgagaccactcctgccggg

SEQ ID NO: 161142 - DNA, 522 bp, Homo sapiens
gcttccttttctgttccactgggggtagagaagtggttatttgtgcccaggcagtgatgcagaagcatggaaaaccactgagaccccttttgctggggtcccgctcgtccccatgagaaggaggtgggccattctacctggcagtgctgtgcactggtttataggtagcttgtggcttccaagagtctgcactgtgtgaagaagaaactattgcagaagaaaaatgcctctacttttctcttggtgcctagctcagaaggaatggagtccattgtcattccaaatggcatttcctagaatctgggtcaccctgcaactccctgagcatgtgtggctctgagccctgcgctcgtttgccagctgctgaggctgcgattgtgatgtggttctaggcaggttcggggtgagcaaagcccagggtgcgacagggtgatgcaagccacaggaggagtcaggacctaaggccgggctaaatcttgatgccagcattgtcttggttgcttcctttgcagccctgaagac

SEQ ID NO: 161143 - DNA, 279 bp, Homo sapiens
ggtcttcctgtgttgcccgggctggccttaagtgatcctgctcagcctctcaagtacgtgggactataggtgtgtgtgcacaactgtgttcagctaacgtttttttcttacagcgtccctacccagtttgggtataaagattatgctgacctcatgaacaaactggagagtatttcctctttctattttctagaaaagtttgtataaggtaataatttctaactgagtacaatggctcacatctgtaatctcagcactttgagagaccaaagcaggagg

SEQ ID NO: 161144 - DNA, 451 bp, Homo sapiens
tgtacttctaacagagatataagagaacatgatctaacaggataattttgtctttttcaggaaccttctggttgtaatagaaaaccagaaaaccactgatactaacttaaaggaaaatttagtgtaatgttggggtagaggcggggatctcaatgccaatggtagaaaatgcaattggatctcctcatgagtaggaaagctctcaggaactaagtgagccatcactacttctctaagaatcgactttattctttgacatttctctgtatattggcatttccgctgagttgtacacacagcccatcaaaggctttcccagtgtggctttccttacttcctagttcaaatgcccagccccaccctctggactccagttctaaattcctaggaggaaacaaatcttactggctcatgagctaggcaccgtgtgccaatgaccacatcaacgatc

SEQ ID NO: 161145 - DNA, 174 bp, Homo sapiens
atcaccaggcacccagcttatcttctgaaatgccatttacacttagaatgttcttgacgaagcagtaaaagtttcttttgttaagttttaacccttgagtacactaagtgataaaatggaaatttttaatgataaaatggaaaatttccacaaagcacttctgctgtattccaa

SEQ ID NO: 161146 - DNA, 357 bp, Homo sapiens
aatctctctgggcctccctccaggggacgtagattctaaaatcgtgggcacttgggagagtggcttccgccatacccaaccagcacaaggctgagatctgagctgccaacctcaaaccaagccagcctgtgaatcacggccaagtctgggttccaatcctggctctgccacctcatcactgcatgcccctggacaggtagcttgctgtttctgagcctcagtttcctcacctgtaaaatgggctcacctgtaaaatgggctgcacttctggtttttcggcaagattgagaggtgttatacaaaataatgaaaagcttccagggtggggtctggccacagtcggtacacaaccagtga

SEQ ID NO: 161147 - DNA, 282 bp, Homo sapiens
aagttctagagatctgctgtacaacattgtacctatagtcaacaatactgtattgtacacttaaacatttgctaagagggtagatctcacttaaatgttcttactacaataaaatataattgataaagcaatagaaaaggattcctatacataggattcctatacataaaaaggtcaatacctaatttccatttaattaaaagcaatgaatagtcaatttacacacaagacaatttctgttattgaggcagctataggatatagaagagatttcccaactca

SEQ ID NO: 161148 - DNA, 431 bp, Homo sapiens
ttgttcattcattgttagatgctgggctcagagataagcaagacccacctctgttcttaagatgctctcaggctagttggaaagaaagacatcaataaacatccccacacaaaccagggacacatggagggaggaaggatgtcttgctttggttggaatgagggtaggtttgagtaagagagcgtgaaagaggcaaggaatttgaggtgtgccttgaaggatgtgtaagaggcaacgctgtggacagtgtgggaagaacattgcagatgatgagaaaagagcaaggcatttgaagtctgtccctggtaactgagtgtggctggggtaatggggatgatgggagaagctggggtcagatttcgaaagcccttttgaagcagggtttatttgatctttccctgtaagaagccactacaggattttaggtgagt

SEQ ID NO: 161149 - DNA, 311 bp, Homo sapiens
tgagatcttgaagccttcaatcatgagcctcaaacaatttacataataaatccagaacttggagatccaaaagatattgccatgtttttggttatgttgctagggaactatgcctccgttttcaaatgatacattgctgtgtgtgtgcgtgtacatgtgcatgcatgtgtgtgtatgtatggaatgaggaaaattaggtgtttcatgcttatgcattgtagtgaaggctacagtgttgttaggcttttctgatggatatcataactcaaactacagaatttgtttacagcagtgttcatgtgaccaagaaa

SEQ ID NO: 161150 - DNA, 225 bp, Homo sapiens
tcttgccagttgtatgacttgagcaaattacttaacctccatgaacctcacttttctcttctgtgaaatagaaatgataatgtctaccttacagggttgtagaaaaaactggagaaaatggtagttaagtgcttagtacctaatgagaactccacaagtagcagctatttttgttgtcattgtctgctaacagcatggcagccttggacagcctttccgtctaac

SEQ ID NO: 161151 - DNA, 496 bp, Homo sapiens
ctctagaaatgtaaccaaagtcttgcagcaacccaaggagcatttattcaagaaaaatttctgtaagaacagtgagatttgtgttaacttgccttagaccattcctcaccctctagctcagtagtcgccttggaaaacagcccacatccccaaccagagggagcagaatggagctggagctccttcaaagccttattctcagttaactgtcatgatgtcatctgtctggtggttccctggaagacctcatttgaaaggtttgtctttatttgaccagaatgaaagctgtctagtgctaaagcctctccacagagggtgtttttggaaaacaattacagacaagtgttttaacatggcaactgtattcggcaatgaataacagtttgggggaaaaaagcctaatcaaaaagcttaataggaaaagctgaggaataagatgtccacaggaatttgaaacactctgatatatgcttgggaaactagaagtccataagac

SEQ ID NO: 161152 - DNA, 269 bp, Homo sapiens
cctcagtttccccaacagcagaatgtgactgaggcccaggaaattaaggattccaagagcaacgcagacccagccccagccttatccctgtgtccaggcccagtctctgcctgtccaggctctgccccagggagtccaagtcccacccctgcattctcggacccaaaactctgcaaacaccgacctcactaaaagctgccggcggcacacctcgacacccctcgacacccctcctacagaggacaccctccctgccggcccgggcccag

SEQ ID NO: 161153 - DNA, 523 bp, Homo sapiens
ttcgctcttgtcgcccaggctggagtgcaatggcgcagtctcggctcactgcaacctccacctcctgggttcaagcgattctcctgcctcagcctcccgagtagctgggattacaggcatcaccaccacgcccttctaatttttgtatttttagtaaagacagggtttcaccatgttagccagactggtctcgaactcctgacctcagatgatccccctgccttggcctcccaaagggctgggattacaggcatgagccaccgcgcctggcctgaagctttgttgaggtatagaatgtgtgagaaaaaaatgtatagtccatgtgccaatgattctgataacacaaaatatgcttagcaacaattctataataaaatcatcattgtcatctggtcttaacttaaaaagtgttatagcattaataagctgtctttaatagttcacctgaaaataagaccaatgaagccaatggaaaagtaaatgtattttataaaagattctaattgaactattcctaactaga

SEQ ID NO: 161154 - DNA, 513 bp, Homo sapiens
  misc_feature (433)..(433): n is a, c, g, or t
ggtctgttccctgagccaggctggtaggatagaagctgtctttctatggcgctgaaaagcagtaggatgtaagcctggagttgccgcaagcaggaagaacccctcagaggaggaggccaacacagcagacggcagagccaagagaggtaaagagagaatccttgtcatcgtttgatccccttgatccagctatgcctgaaactccgaacttttcagttacatgacccactcaagtcctttttgtgcttaagtcagttggactttggtctctgtcacatacaaccccccagaaataaagggtttaaaaatgtgggagtatggtcgggcgcggtggctcatacttgtaatcccagcattttgggaggccgaggcgggtggatcacgaggtctagagatcaagaccatcctggccaacatggtgaaaccctgaaangggggcaatgcagtttagtacattttctttgtggctgaagcagcataaacttaactactgatatattcgtttacttatca

SEQ ID NO: 161155 - DNA, 167 bp, Homo sapiens
accctgggcagagacccagtgactttgcaacagtctagagcagaagttccaacatgccggctgcttttccagccaggccatcctgagacctctgcgcccatcaggaaccggcactgtctttgcagctcccagccctgcctgggccagagtctaggagggtagggagg

SEQ ID NO: 161156 - DNA, 760 bp, Homo sapiens
agtcaggccaaccacagcagcagtgacgacacacatacagcgatggcacgcagggatcccgagaggagatgcactggggagacccaggcatgccacgtgtgcacgtgaagggagacaaactgaaacggaaagggcagggagtggtttcagggcccaacatcctgattatcagaagcacgatacacctgctgtgacaacctggccctgcctctacaacacggaaacgcccactccacccagcgacacgcgggcgcccctcccagagggccatggcacacatggacatgtggacacgcacgcaccacatacacacacacacacacacgagaggacacgtgctcacacgggcaggcagggggaaggaaaggagcccgaaacagctggagaggtaaagtcaggttagaaacagagtggaagagcagggagagtgtgagattgactgctgaagatatgagaacgttagagttatttggccacgctgcagcgtcggcacagctgccaagcagcctgggaaagatagtcagcgccactgaagctgtcggaggtcacaggacagagagacagaggtgagaggcacagagagaggcagagggagaggccgaggggcccatcaccggcccagggcagccctgtgaggagcagatgggagaaaggagacagaaggagagagaggccaagaaagttagtcagagacgggcgaaggctgccgggtggacgaggggacagggaggagcgtgcggccaacaggagaggcagagag

SEQ ID NO: 161157 - DNA, 362 bp, Homo sapiens
taatctatgctgttagaaggcaagagagtggcctcttatgaagtggatgactgaaaggaagcatcaggggttgacggggttctggtaatgttctgtttcttgaattgggtggtagttacacaggtgtgtacacatatgcatactttttgtatatatgttcttcactgcaaagttaaatagaagttgatactatttttaaacatatggtctataatttttaatgattttgataaatttaacacaaagggaaacgattacattatcatcatcatctaatatttgagtcctaacaatgtggcaggtacactagtattttaaaagcttaggccgggcgtaaatggctcacgcctgtaatcccagca

SEQ ID NO: 161158 - DNA, 359 bp, Homo sapiens
gcctggcacaatgtctttatgtgttgtaggcactcagtaaattttgttttgtatgatccttaagcataatagacagggaattgttccccgaaccctttatacttctattttctattcacttatgggtcctttctgtctggtttaaaatcttccttgcttttgatataatgacttatcttttatcatattatcttaatagctaaataattcattcatgggatataggcaatatttcctcacattcaattttttcaattcaaaaattgaattcaaaaattaattcaaaattaatagaacacagaaaaaaatattttggttgcccatgacatgttttgaagtttttaaggatatgtcatgtt

SEQ ID NO: 161159 - DNA, 227 bp, Homo sapiens
tcaaaagaaggcattgtaaatggattgaattgaattagcacttttccttgatggcttttgtatccctaatgatgttgctcagcattatgagggcatgtcttaacagtaatatacttatgatcagtaaaatctttctgcttagtattttaaagttgagaagataattaattgatttttcatcctaatagtaatgactactttttatttaaagaggtgaaaataataat

SEQ ID NO: 161160 - DNA, 598 bp, Homo sapiens
ttccaccttctggacttaagcaatccttccacctcagcctctcaagtagctgggactacagctgcacacgactgcaccctgctcttttgcctatttttaaattgggttgtatgtctttttgttgttcagttttgagagtttttttgtgtgttctggatactggaaccttatcagatatataatttgcaaacattttcccattctgccatttgtcttttcactttcttgatagtcctttgatgcacaaaaatttttattttgatggtttatctgtttttttcctttcgttgctcatatttttggtgtcgtatctaagaattcattgcccaaatctaaggatgtaaagatttacccttgtgttttcttctaagagttttataattttagcacttaaatttaggtctttgattcattttgagttaatttttgtatatggtgtaaggtagggttctaacttcattttttggaggggctattcagttgtcccagcatgatttgttgaagggactatgtccctttgaatggtcttggtacctttatccaaaatcaactgatcatagatacaaggatttctctggactctcaattctatttcatt

SEQ ID NO: 161161 - DNA, 287 bp, Homo sapiens
ccgagatcacaccaccgcactccaggctgggtgaaagtgcgagactccatctcaaaataaaataaaataaaataaaaaaataaaaacaatgagagaagttaaaaatcatagttcagatagatcaattaagtattaactgtctctttatgtttattcatagattggaaaagaaatctggggtttttcttgccatatgattttgtgatttagaacttaaagatataaaagaaactaacaatctttctaagcataccgaaataaaagcaattctgcttaaagatgaatct

SEQ ID NO: 161162 - DNA, 212 bp, Homo sapiens
ccacctcagagattacttaagacaccttctggtgcagcggttacaactcagttatcatccaagataccgcctggtgcagtgttccctcctcagggttatccaaaaaatctcctggtgcagtagtcccttccgggggatgaatgaagacacctccttgtgcagtgctcccacctcagagattatttaacacacctccttgtgcagtgctcaca

SEQ ID NO: 161163 - DNA, 442 bp, Homo sapiens
atgacagagtaagaccctgtctcaaaaacaaaaaacatgattctttttatcaactttaatgttagtgtattctggcaataggaccttttaagaattttgcttatttcattgagaatttgccttaatgtatttttaaaatttatcattggtcgcaataaacattaatataaaaaagtacctatgaggtattctgaacagttttaggagcgtcttggtttttcctggggcagaggcaatgaacctatgctaaatttcataggcatttcttatacagcccttcaatttgccccttaaagtgttaggtcaggatgaaaagctatttcaagtcagtagtaacaactggtttattttattgcttgcatttggcccaccaggttggtggctgatgaaatgtgtatgaagtaacaggagtctttgctgagtgatcatctgtttattcttt

SEQ ID NO: 161164 - DNA, 430 bp, Homo sapiens
ctgtagacttggtaacaataaagaactccccaccagatagggttctattgtctccgttaagtaggagttgtaaagacatatactgagtgaggcagagggggtagggctgaaggtttacagagagtacctagctgtgttggatgcttctgttgaaattggtatctaagtcagattaaaaatctggtatgtttggccactgcagccttaaatgagcaggtgatatcatatgaaactgtccaccaaaaattcatatattcttaacaacttaaacaaaaatcagtgtttgaattttagaagaataaaaagcagcagccaaatgcagtggctcactcctgtaatgccagcactttgggaggccaaagtgggaggactgcttgaagccaggagttcaaaatcagcatgggcaacacagcaagaccatctctacaaa

SEQ ID NO: 161165 - DNA, 216 bp, Homo sapiens
tgggaaccccaaatctcccacccagaagattctccctctcactgcctccacaaccttggagtctgagagcttgggcagaaaagctgagtccttaggaagaacgggcactcacactccacctcggctgtgactgcaaatccattttcttcttaatctaacactttgcactaacactccatcttcaaaaaattagggctagggtgagtaaagccaggg

SEQ ID NO: 161166 - DNA, 538 bp, Homo sapiens
gtatttttaaaaaacatgttatgagaaaagtggcattgttttcctgctttttagaaaatctctgttcaataaaacacagctggattctcatatatgatctacattcattctgttacaacatgtactggctgaactatatatagaaaatccagtatcacacatatcattggaagaaggaggaccttgtgaaacccctgagaaagtctcaggcgcctttggagttcttggacaacacttcaagtaactgccttagtccttaaatgctcagtctttgtactatatcagataaccagatggtaccagatattttagactgagcacttagcggatacctgacaaaaatgacactgttctacagttttagaaatttcattaacctctctaacatcacagacgtcaacaagtccaacagtcaaggaagaaagctttaattttttttaatgttggaataatattttatgaatacagctaaatatttttgaaatgggatataaacttgtatgaaggtagtcatagctgcatatcttgcttgggttca

SEQ ID NO: 161167 - DNA, 294 bp, Homo sapiens
tctccccacccccaccatcagaaaaaaaagtaaatcagtagtgcatccagtccagagtccatagaacctttggcctggttgaggtaaacatacagccaataagtaaacaaaaccaaaatcgtccaggttgtgagtgtttaaaacataatcctgagtacacgagggaaagcagcaacaaaaactgaagagagacaaactaaaaaccgagggtgagatggaaagcagcagctcctcatttccaatagacctctctcctcttttggactaatgacgatgaacttgcctggcacaaat

SEQ ID NO: 161168 - DNA, 561 bp, Homo sapiens
ttgtgaagagtttatgtaagattgatatagttttattcttaagtatttgctggtgaagccatctggatcaggaattttctttgtaggattcagttttttaaattattcagattttctttttcttttgtatgtcagttttggtaagttgtatttacctatgatttttcagttttatttagattttcaaatttattagcacaaaattgtgtaaaacaccttatcttttaatatctataatacatgtatagtgatttcttcttcagttttgatattatttatgccttccctctttcttcattcatctcaccaagagtttatcaattttgtaggtctttttactgccctaaaagtcttctgtactctgcctgtttttaactctggctacccctgcttagttgttactgttatcttttctacttttaaatgttggagtgcccagggctcttctagtcttaagatttctgatgccatttaaatgccatttttgtatgctgatgacattcaactttgtattttttgcctgtacctcttccctgatctctacttccctaacccctcaat

SEQ ID NO: 161169 - DNA, 449 bp, Homo sapiens
cattggtgtggccagaggagctgggagacaggggcgggaggaagacatatttttcagtgcataccctctgcgtccactaaaattctgtggtgtgtacacactttacccttgtaaaataataggtatttggatattcactgattgcctactatgtgccaggtaccatgatatgcactataaacacaaagatgaactaaaaatattatatgtgttgcagtggttcaaaactaagtccttggagttctcctttcaatccacattcatcttggatgatctccagtcctataaatggatgactttcatgtttacatctgtagcccagacctcttccctgaactgcagactcaggaagtccaactgtctgctcgacaattccacttggttgtccatgacagcatctcaaactggatagtaccaaaactaattctaatcttcctcccttgggccga

SEQ ID NO: 161170 - DNA, 183 bp, Homo sapiens
gaattggttgtagcactgaatgtgtttgatgcattgtttgagcatgagtttggtgaaatttatattaggaaaagcattgtaaggtgagattgcgttacctggcaggtggagagatagaggagagaggagcaaaaagaaaatgagttgctacaagacattgaatcagtacgtttgagaggattt

SEQ ID NO: 161171 - DNA, 445 bp, Homo sapiens
agtgatagagaagaaaaaaaaatggcttcacaaccagatagtccggtttcaaatcctagctcttcttgtccttagctctgtggccttgagcaaatcacttggcttctctgtgcctcatctataaaatgcgaatagtgctacgtaccgctaccacaactgtaatgattgcagaaaatgttcacaaggaacctaacagtgcctagcacctggaaggcattcagtaagaggtgaaaatgcaacaggagcttgaagagaaggtagcagtaggagccatcagtggatatggagggaagagctctgcatgtggagtctagggacctagattctcatctgactatcactgagaagctgggtgcccttgggcatgtcatgtctggcattctctggagtctcccatcagtgcagagaggcccatccatgaatcaggtaatttttaagtgagaga

SEQ ID NO: 161172 - DNA, 117 bp, Homo sapiens
cctgttggtgagggtgtctgcccaggtgatgccggcacctcccgactctcccctgtgtcccacttttggagtcatcctgcctctggcagccctgttcttttcccttcattgtgtctc

SEQ ID NO: 161173 - DNA, 337 bp, Homo sapiens
taggcatcctaattggtgtgaagtggtatcttatttaggttttgatttttatctcagtgattgctggtgatgttgaattgctcttcaagaatttattggccatttgtatatcttatttgaaaaaagtttctattcagatcatttgattaatttttgttgggttatttatcttgtgttactgagttataagagttctttttggatcctagataaaagttttaaaaaaaatcagttacatgatttgcaaatgttttcttccactctttgggttgtcttttagatttattgatagtgccctttgaagtacaaaagtttttaattttgatgaaatcaaatg

SEQ ID NO: 161174 - DNA, 232 bp, Homo sapiens
atttgtcggaacgtattagtggttgccctagatctgttttgatctgcaagctctcttttcctgaatcagtacccctgaatcactgcccagaagcttagcttatagtagcatagtttcctggaagagcttagtgtcttttggtgacaaagcttacttagtatttattctgtgtggcgttgtgttagttagaggtcacattactactgccccatttactgtacgtgtccggcca

SEQ ID NO: 161175 - DNA, 249 bp, Homo sapiens
accctaagcaccaaataagcaaatcattaatcaccttccacaatcattaatcccaaatcttcctctggtgtcctcagaggggccctccatggcagcattccacagcctctcctagccagggcctttagcttctatcttccactgtccttttagccatgtgaatccatcattaaaaggatgcaaaggtatttaaataaaatgccctcctaaattgtttagctatgaaattcaattgcattcaacatagcc

SEQ ID NO: 161176 - DNA, 471 bp, Homo sapiens
aactcctaacctcaagtgatccacctgcctcagcctcccaagtagctgagactacagccacaagccatcacggccagctaagttttgaattttttatagagacaggtctcactatgttgcccaggctggtctcaaactctagtctcaagtgatcctcctgtctcagcctcccaaagtgctgggattacaggtgtaagccaccacacctggccctttgctaatttcttacttggttatttttttctaatattgagttgtaagagttctccataaattttgaatattaatcctttgtcagatatgtggtttgcaaatattgtttcccagtccataggttgactttttgttatgtcgattgtttcctttgctgtgcagaagctttttagttcgatgtagtcccgtttatttatttttgcttttgtagcctgagcttttggtgtgatgtctaaaaaatcattgccaaagccaatg

SEQ ID NO: 161177 - DNA, 196 bp, Homo sapiens
agggatggagacacactccttcccgtagcatcttgttccagtgttcagtggctttgctattagagccttttccccttacttcagactagcatctgtcttctagaaacttctacaacactgtttaccatttgtcatatggagttatagttactccaaacataaccagcccttagaagttgctattttgggtcttgtt

SEQ ID NO: 161178 - DNA, 215 bp, Homo sapiens
ctccttgcctcccacctccccaacgtttccaaaactcttctcaccaaaggtgccaatttgccaggtccacaccctcatgccagtcctcattagatcattctcacagtcagtcagtccccactcaccatcaccttcttgaaactcctttttcccttgacttcagagacacggtatcacttcctagttctgcacccacctctctggctgtgccgtcg

SEQ ID NO: 161179 - DNA, 405 bp, Homo sapiens
tcaaaatgagcccacagggaggttaaaacaggagccaacctgaaagtgttctcaatggccaaagctggaaacatttgagcaacaaaacaaatatgataatattggattataacctcccaaaataagtatacattaatccatactgatataaatacatgattgaataaataagtaaatggaggagaaaggacaaatatttctttcagaaggattccaattttttatatatgaagtgaatacaaagactctctggactttctttgtaactcttccgtaaatgcaaaattatttcaataataagccaggcatagtggctcatgcctataatcccagcaattcaggaggttgaggcaggaggatcccttgaggccaggagttcaagactagtgtgggcaacattgtgag

SEQ ID NO: 161180 - DNA, 600 bp, Homo sapiens
attggtcatcacaccacctgagtccaggtagtcactgtgtcattcatgttggtggttgatcctcaggtagttagggaggaaaataaacaagaagttatatatttaaaatcacgtttcaattttagacctgattaattgacttaataaagggcattagcacttctacttcctacagtccctctctttacctctggaaactagttatttctaggttgttttatgttgttaaggttgaccaccttctctttctgttctgcaatcatagtcctatcactagccttttgtcatggtcattcaattcacaagttgcttattttttaatttcttggctgactaaattttattatgaagacttttttttttaaagagctcagaaatactgtattctttaagttcttcagcatgtgtcttttgcctattttgattgggcaataatttagctggctataaaattcttggattatactctatttcccttagaaattataggcacccatccactgacatttcattgtgctttattttattttattttattttattttttgagatggagtcttgctctgtcacccaggcttgagtgctgtggtgcaatctcgg

SEQ ID NO: 161181 - DNA, 231 bp, Homo sapiens
tgcacctggctacatcctttaaaatttctgaatatgatatgcacataaactttgcttggaaaaagcatattctacgcagaatttaatgagaaattactcctcagaatgacctgggagagccacacaacactggtggctgaacttgaaccttaagtgagggcattataacttagtttgaaatgttttaaatacattaaaaaaagaaagtgaattgtgaattttttctgtggc

SEQ ID NO: 161182 - DNA, 337 bp, Homo sapiens
cagaaatagtgttggaaacttggttggatgtcagtttgtggtgcgttgaatgccaagtttaggactttagatttcattctgtaggtatccaggagttatagtaaaaagtttcaagtagaaaggctgtattacaggaagattaacctgacaggtagcactgcaatgatgttgaggtcctgccgatctaggaatttaggaaactcctgccactcaaagtagaaaaaacctaaactgtttacaatgcactttctcatatattatcttggactgaccttcacaattagaactaagagctatgccacttctccagccatatgcaggacaaagaaccaaagct

SEQ ID NO: 161183 - DNA, 554 bp, Homo sapiens
gatcgccggggattgcagccctctcctcagtgatggagcctcatagacagtcagcgagagcacggagcccgatgaccccacccgtgggttggattgaaatgacacatgcactgcagcctcaacagcagaacacccatcttttcaacttcacaaagattagccaccaagatggagcatacctgtcacaaaagagcccttaacaaattttaaaaaatcaaaaccatacgaagtaagttttctgaccatggtggggttaaattagaaatcagtaacagagaacaggaaagtctccaaacacttgcagactaatacaattctgagtagtccatgggtccgagaggatgcctcaacaaaaaaactttaacaaactgtacacaggaaaatacagcatgtcagaatttgtgagacataactcaagcagtgcctagaggggatttataggattaatgctttcttagaaaaagaagatgactttcagtaatctacgtttccaacttaaactagaaaaagagcaaaataagtcaaaatcaaggacaagaaagtaaataagaaca

SEQ ID NO: 161184 - DNA, 541 bp, Homo sapiens
cgttgggaagtgggaaagcagcaggaaatgagattggagagggccatgtgtgtaatgctgaatgactggcctttgccccattggctgtagggaaccactggaagttttaaaatcaggggaatggcggagattcacattttagaaaaatgcctggcagcagtgtggaagatggactggaaggggaagactaaagagaatggacgagttaggagactgctgcaaagtccaggtgagcacggggaagggcctggattaggccttgacagcggcgatgtggcagagaagactaagttgcatgtgattttgggaggcggaatttgcgtgacataccagagctgcagataacagttgtgggagggatggaagaatagagaaggaagctttttttaacctatagccattgaatgggagagtagaaaggaaacattgagtttggttctggacattttagaatggggcacccaaatggagagaaccagcagacggaaacatattcacatgtgtgtgaatgggtgagattatataaggagagcttgctgag

SEQ ID NO: 161185 - DNA, 151 bp, Homo sapiens
ctgtataaaaagcgtattataatcctccatttgttcacattctcctaaaagagtatagaaaaagaaaccagccgagctgctgacctagtttagaataacatgtgaactcactgagaatggggatgcttgcatgtacgctggaatggaattg

SEQ ID NO: 161186 - DNA, 380 bp, Homo sapiens
ttctctcactgatacctcttctgcatccatgccggtcaacgggcctgagaacttacttcaggcctcctctcaaaagaagtttctggttctggcttggtggccttttgcagacactgtctcatgtacgatacccgctcttccattataatgcggctaaacaccttagactccacattctgtggtcttgggacataagactgcaatgatgccgtgcgtgcagcaaggactcaaggtgtcagaactggccagaactgttcactttctcttggccacatattaggtagctgttccctccggccgtcaaacttccttattctcatcctttaacattaaagtcaaatcctacctcttccacacaacttcccaacaagcaaaaggaa

SEQ ID NO: 161187 - DNA, 500 bp, Homo sapiens
tgccgtgagccttggaattggtcatgctattgaatatattccctattgcttgtattccctattgagttctacagtggcacgaatcttataggctgtgcccaaaggaagcctaatgattagcaaagagtccctgaacagagttgctcttctgcttcacagccctaaaggcttagagactgagagatcctaattaagttaccacagacctttatttgcttgtaggaggtggccctgactgctctcagctttccaacctgggcaacagcccttctagtgaaagtcttacttccttggtcatcaactgtcaagtctgagtaacaacatttaagaaccaaacgaagtgtgtgtgttgtttacctctccctaatatacaaaggtatcttgcacacactgaaaacttcttagaccaaaagcctgatggctctagtttgccttgaaggtagttctattgtctataagggtatgtgagcctgtgtctgccaataaaatgttcaaatgtt

SEQ ID NO: 161188 - DNA, 467 bp, Homo sapiens
cccaaaaaatcactaagcaaagagcaggagtaacaataaacagcaacaataaatcctgcagaaaaggagattctgatttttagagttgacacataatattatttaagacactcagttttcaacaaaaaattatgaggcatgcaaagaaacaagaaaatatagctcacactttggggggaaaagcaatccatagaaactgttcctgagcaaacccagatgttggacttactagaaaaagagttaccaaatggaaagtatcaataatgagatagaaactataaaaaacaaaaagagaaaatcaaatcaaaattctggaattgaaaaatacagtaactaaagaggctcagcagcagatatgagcaggcagaataaagaatcggaaccagaagacatgaagataggttcattataattatctggtcttcagaactgaaagataaaagaatgagcaaaatgagcagagcctc

SEQ ID NO: 161189 - DNA, 105 bp, Homo sapiens
atgaactatcatgaattgagcactacctctgtttcttatcaacaaaggagactacggaaaagaagagtgactaagatctctgaagaagggaaaagctagatgact

SEQ ID NO: 161190 - DNA, 298 bp, Homo sapiens
aatacacagcgggaaaatggctgcattggattagatgtcactccaggcattaaaaccaaggttttggaatgagttaaccaacgcaaacccttaactcagatgggcagttatttaagtgctaacaaactacatacaaatttaggatccagggcgtccatcaaattctcttttattaaactaaaaagtccatctttattgctatagatcgacctctattctcacacattacatagcctcttatataaatgctcaacatttcttctttccatccgttcaccttaacctatctctcgctggt

SEQ ID NO: 161191 - DNA, 689 bp, Homo sapiens
taagtcacttagaacttggcttttattctgtttttcaacttaaaattcctcttgatgtccctcaactttttagcctgattttcatggcatttgagaaaatatggaggtgagtgttgattttagatttttagactgaaataaacttttcctttaaaaagggagagggcaccctaaatttggaacacaggtcaaggatgcttggagtactctgtactgcgggtatgggctctctccagcagtgacaactcagcatctctctagtggccactgcttttgcttcctaaacatgctgttttgagtagcctcaccttacaaatagatttgcagaacaggaagaagattcttgaaagggaagattgtgatgaaaccgataaaaatctctgtattaaaatcttgtacagccttctgttttaatatcttttcttctggatgagacattagtctttaacttttgaggaactctgtaactgaagacaaacaataaaataccaacagagaggaaattattaaaggattatatgtatttaaattacttttatcagtaacccactctagcctcagaaggtataaagctaacggagaaggggacatttaaaaccaatgtatttttattctgtaaatctttaacttaaaatagtattttgaattcaaggttgtctgatatttaaatcagttattatctcgatgac

SEQ ID NO: 161192 - DNA, 195 bp, Homo sapiens
agcagagttagcacaacacgtgagttatgaccaccttgagcagctcagcagggggtggtgccatttacagaacagagatggcacagacagagcccatggagaaggaggaaaaagagagtttggctttgggttttttttaagacagggtctctggctctgtcacccaggctggagtgcattggtgtgatcatagct

SEQ ID NO: 161193 - DNA, 250 bp, Homo sapiens
attgcagttgaactgtaactggtacaacaaagagtactggtatcattcctacttaacaagaacggatttgcattatagacaaaccttataaatgaggaattttaaactataagagatctttgctagtgctttaaataaaatgcaaaaagaaaaagtcttcagctctaaactaacattttccaagtaacacaaagaccacggatttaagggcaagactatttaaaattgaaggacacctgtgaaacagtat

SEQ ID NO: 161194 - DNA, 573 bp, Homo sapiens
ccatcagtagttacactttcaaaatagcagtttccacaacatgagtagagtatagcagtttagaagagaaagggaataagtaatgtctgtttatgaatcatgcaatgatacaaataccaacagaaatttagctaaaatagggattacacagtgatatctggacatcagtccccaagaaatgtttctaatgcacaaatctttaggatctttactctgaaaataacagttaactgttgattaccaaactaaaaaaatgaaaaggctgctggccaggcacaagtcaaatgtaaccatgtttcaggtttaaagcttatggaccatggagggttgttggtttttttggtttgcttcatttgctaagtgaagagcgtgggaactttcattattttgtttaactttcattattttatctgcaagcatttacatatacacacaatgtaaggcatttataaagacagtattttctaacaagtacaactaaatctgtccccttgaaacttagtttacacaatttacttgttaacctaggtaaaaacagcatcttttaaatggagttgtgggcttctaaaatct

SEQ ID NO: 161195 - DNA, 223 bp, Homo sapiens
acacacacacacacgcacaggatcacactttaaatggtattgaactatttgttttattgcttattatatcttagatcttttcatatctctacaaccagattttcttaattctttttaataactagatagtatacattttattggtatgccataataaattgaactagttatgattggtgaacatttagaaatttaccagaatctgaattcatgttttctaatt

SEQ ID NO: 161196 - DNA, 404 bp, Homo sapiens
aaatttttttaagctagcctcacttgttggtatgtgcctgtagtccctgctactcaggaggctgaggcaggaggatcacttaagtccagaaattcaagggtgcagtaagctgtgatcacactgctacactccaattggggtgacagaatgagacacaatctctaaaacatgaaaataaggacagatgtggtggctcatgcctataatcccagcactttgagatccacccacctcagcttccctaagcgctaggattacaggtgtgagccgccgtgcccggcctatttggtatctgttatacttggtgagccctttaatttttcacattttgccggatgtgaactcattacttggttgcattcttttctttttttctctttatgtagatttagaggggggcacag

SEQ ID NO: 161197 - DNA, 214 bp, Homo sapiens
gagaatcatgggggtgctttcccctgtactgttctcatggtagtgaataagtttcacaagatctgatagttttatcagggatttccgcttttgtgtcgtcattctctctttgcctgctgccatccatgtaagaggagacttgctcctttttgccttctgccatgattgtgaggcttccccagccatgtggaactgtaagtccaattaaacctct

SEQ ID NO: 161198 - DNA, 369 bp, Homo sapiens
aaccaactagaaagcaggaggacctggggtgtgaggctggggaggtaagcataactcggcacatccattgcaacattttctgctgatggggcaggctcatttatcctaagagaatcacctcatgaaaacaatgcagaatgcactctgggcccagacccacagctagaatgtcagtgctgattattctctcccagtccatgtgtttgtcagcaacacaaacattcacatgctactttcgggaaaatgcagcctccgcaggaggggctagaacagatgcagagagctaatttctctgtgtctgggtggatggtttcatttgcaatgtcaaagacaaaaatggggattctactagcctgctgaacctatgca

SEQ ID NO: 161199 - DNA, 370 bp, Homo sapiens
acaacaagcctccaacccccttcccttgctttatttttccatagaatttatcaccatctaataagacgcatttgtttaatgtcaatatccatgaaaatagtgactttgtttgtttcctgctctatccccataccaaataaaatggtactgaccaggcacttgataaatatgaattgacttgataaatgagcacgcagccaggttagagaaccagtggattttaatattgcgatgttggtgactattctcatgtggttctgaagtcaaacgaccacactgtttagaatggcatcatgaaccggctgagtggttgtgagcttttctgcactccatcccactggtttgtcctcaaatgagaaggggatacttt

SEQ ID NO: 161200 - DNA, 329 bp, Homo sapiens
aggaccacaatgtcaggagagatggggatgttaattataattatcgttcaaattggatgaaaactgtcattttatttcacttgaggagagatgctttacttacccagtgccctttgatttggtctgtattggcaccttaatatgtcagcacataactttcccataaaagcttttccttttaaatttcccttgcaaacatttaaatatgtactatgtatgttaatatagatcctaggttttggccaaggtaattaaacctgataacatttattctatacttttatgctttgagaaatggtctatcatcttttcatatgcttaattatgtg

SEQ ID NO: 161201 - DNA, 345 bp, Homo sapiens
aagattctaaaacccaaatctaatgacatttgttcagttcccattcttcctgaccccttcatagaactcatcattgagtcttcttctctcttaagtcctttgagccatattactctcattttccttttgcccattttaatttgttcttctctcttctttgctagctcttcaaagtcttctttctaggcctcaactaccctttactctgaataccctttcatgacctcaactggtcttttgtgtggttaattttcaagtcttcttctagctcttgccctcactaaaccttccctttaccatgtctaaagctgaagtcagaaatatggtatgtactggacagagcag

SEQ ID NO: 161202 - DNA, 588 bp, Homo sapiens
gtctcccaaagtggatgtaccactttgcattcccatcggcagtgaatgggagttcctcttgctccacatcctcggcagcatttggtggtgtcattgtttgtgatttttgctgtgctgacaggtatgcagtgacatctcattgatgtcttaatttgcattccctatgacatatgatgtgaagcgtttttccatatgatttctcagttgattgttactggcaaggggtcgtttccaccaaccatgaggatattaaattgctctgtgtgcttgcttaacagagcccacctgcccataggcgatccagggcaggcttgtcacctatttcgtcccatctcctcccgccttttttatgacttaacttttatccatttgcactgagctctttagtttctcattttgtcttttttcactcgatttttggacagaaatgtacatgcctttgtaagaacctatgtgacaagaatatagttagcaagttattgcattcattgtagctcttaagaggatgaaaatgtcataaataggtccgcaggagcaaagttctcatcttactttttttttaaattaagttgaatggacgaatgaatt

SEQ ID NO: 161203 - DNA, 485 bp, Homo sapiens
actctgaagtctttttggttatgattaggagtttcaggtttagttattccttttcggacagaccttgcaaacgctgctgccccactgggatgatttctcagttgattgttactggcaaggggtcgtttccaccaaccatgaggatattaaattgctctgtgtgcttgcttaacagagcccacctgcccataggcgatccagggcaggcttgtcacctatttcgtcccatctcctcccgccttttttatgacttaacttttatccatttgcactgagctctttagtttctcattttgtcttttttcactcgatttttggacagaaatgtacatgcctttgtaagaacctatgtgacaagaatatagttagcaagttattgcattcattgtagctcttaagaggatgaaaatgtcataaataggtccgcaggagcaaagttctcatcttactttttttttaaattaagttgaatggacgaatgaatt

SEQ ID NO: 161204 - DNA, 286 bp, Homo sapiens
atgggtgagcggatgggagagcagatgggtgagcggatgggagagcggatgggagagcggatgggagagcgcaggggagagcggaggagagagcggaggagagtggttgagggagtggatggttgagcagaagggagagcggatgggagagcggatgggtgagcagatgggtgagcggatgggagagcgcatgggagagcgcatgggagagcggatgggagagcgcatgggagagcgcatggatgagcgcatgggagagcgcatgggtgagcggatgcaagagtgg

SEQ ID NO: 161205 - DNA, 341 bp, Homo sapiens
tcccaacaatatatttgcttcttccagtgtatcttctgccaatttcaaatctttccatttggaaagatggcacttccctacagaaggcagtcctaggcttccaatcccagaaagaacttaaatcttatcaccttcttgaagccaccttactcttaaaactctcacccatacacacaccccaatgcctgattcagcagagccctagggaaccaccagatttccatcgtcgacatgcaacttcagctactctgactcctccagccattgactcacacactttgtggacaaacatctgtcctgtctgcccacaatgcacttcttggtcatgccctttctcttcc

SEQ ID NO: 161206 - DNA, 125 bp, Homo sapiens
tgagattagtagtcatcaatgggaaaatgtcatccacaactttttattcagtttgagccatcaatgttagttattatctgcggacactgctgtttgaaatgaatcatggtgctctagcaattcag

SEQ ID NO: 161207 - DNA, 482 bp, Homo sapiens
aaggagcatttattcaaaaaaaatttctgtaagaacagtgagatttgtgttaacttgccttagaccattcctcaccctctagctcagtagtcgccttggaaaacagcccacatccccaaccagagggagcagaatggagctggagctccttcaaagccttattctcagttaactgtcatgatgtcatctgtctggtggttccctggaagacctcatttgaaaggtttgtctttatttgaccagaatgaaagctgtctagtgctaaagcctctccacagagggtgtttttggaaaacaattacagacaagtgttttaacatggcaactgtattcggcaatgaataacagtttgggggaaaaaagcctaatcaaaaagcttaataggaaaagctgaggaataagatgtccacaggaatttgaaacactctgatatatgcttgggaaactagaagtccataagacatattcctggcaatttggaa

SEQ ID NO: 161208 - DNA, 131 bp, Homo sapiens
ggtgttggtagtattattataggctcaagactgttttatgcctgtcccctaggggtagaggtttttcttttacgcttagtgcaactgcagtgagtcttaacctgtactttgagggtgacatgctttgctgc

SEQ ID NO: 161209 - DNA, 427 bp, Homo sapiens
tcgggacgcagcggtgctgttctgggtcgtggccagggccggggtcggggccggtgctggggcaggagatgggacttggcgcctgggtcgcctccgtccctgcccacttgcggctctcgggccagcagcgtgagcctgatcgagtgcggccctgtggacaccgccttcatgcagaaggtgttgggcggtcccgaccaggtgatggaccgcacgaacacccggaccttccgcctcttgcactaatacctccaccacagcaaggagatctaccgcgaggaggcgcagcaccctgaggaggtggtgaaggtcttcctcaccgctatgcgcgccccgaagccgaccctgcgctacttcacaaccaggcgcttcctgcaccagctgctgatgcgcctggacgacccctttggcttcgactacgccgccgcca

SEQ ID NO: 161210 - DNA, 240 bp, Homo sapiens
  misc_feature (55)..(55): n is a, c, g, or t
cgcatcactcatatacatcagtcagcatcttgtggccctaacatgaggatgtggntgtcgtgagaaacagcaaaacactaagcctgacctctcccaaatgggaagacagaggagaaagcgcaccactgagggccaatgctaaatttgcagtgaaagaaatcagtggagccctcaactgcttttattcagctcttagcaggaactgacaaaaatcacaatttagcatgacgttacaacgca

SEQ ID NO: 161211 - DNA, 464 bp, Homo sapiens
actgagcctccaaggagcactgagttggtgagggctgtttatagacaacgaattcaccatcgaaaattagttcaaacggcaggttcaaaagctggaactccaaactctaaaataaatggagaggatctcaatctccccaaactctacaagctgtgactagtctccaaagtgacacttccaggcaactctcagcttaaagccccagctaagcacatgcacaatggccactgtcaaaccagtcagcctgggctgctggcggcggcagtgaccaaaaggcagagctcacatgcggggtccgagtcacagtgctgctggataacagccacaatgggaggcttagtgcctgctcacacgctcccacccacttttcttctccaagaagtctgtgtgattaagacctttacaatttgaaaaaggaagggactaggtgacttggggattgatctctgaccaacaaaggttaa

SEQ ID NO: 161212 - DNA, 338 bp, Homo sapiens
atctgtatctgtctatgtttgtgttgctgaggtttatagataaatattcaaatagaaatactaatgcaattttgaagcctaacttgcatgtaaatgagtgcattttcctaaaactattgaattctgtacgtctgattttttaaaaatcaaccatcagcaatcatggatagtcttttctgaacagtagctccataataaagagaagtcaatcactattagagaagcactgtaggtgaaaggcactatagttcacacttgattttgtagcggggagagggtacttagctgtgaatcaggaatgatgcaaaagatggatgagatagagttcaaggagcagt

SEQ ID NO: 161213 - DNA, 261 bp, Homo sapiens
gccctgcctagaaaagacattttaataaccttggctgctaaggacaacattgatagaagccgtctctggctatagataagtagatctaatactagtttggatatctttagggtttagaatctaacctcaagaataagaaatacaagtacgaattggtgatgaagatgtattcgtattgtttgggattgggaggctttgcttattttttaaaaactattgaggtaaagggttaagctgtaacatacttaattgatttcttac

SEQ ID NO: 161214 - DNA, 509 bp, Homo sapiens
tcaccgtttttctatttctttatacaagtcatagtgagttattaatacacaaagagtaatagaaagcagagagttagttgaatcatcttaataattagactcaaagctatgatagcctgatggattaatcaccacatctggaatgaacttgcttatgagacagttttatcagctgaccagagaatggagagagaaaaagagttatcaagaagtgcagaagttctggattaattttagcccaagctaaaatcacctatcattgaatttgattcctgaggtacaaaatcaaatgcattaatatcagccactattctggcgtatcattcttctatttattaaaaagaatttattagcaaccttagaggttttcagtgttcaacatggtgaaatgctgctgggtactttggaaggcattgagcgtatttagactttggtagacctgagagctgccttaaaatagcatgacttctttcctttgatgctagacttgacaagaggtttgattagga

SEQ ID NO: 161215 - DNA, 1047 bp, Homo sapiens
  misc_feature (26)..(26): n is a, c, g, or t
tgcaggctggtacgcccccggagtantgggatatcgtcgaccgagcgtgcaatgggatgtccaaccgcttctggggctggggccgcgaggacgacgagttctaccggcgcattaagggagctgggctccagcttttccgcccctcgggaatcacaactgggtacaagacatttcgccacctgcacgacccagcctggcggaagagggaccagaagcgcatcgcagctcaaaaacaggagcagttcaaggtggacagggagggaggcctgaacactgtgaagtaccatgtggcttcccgcactgccctgtctgtgggcggggccccctgcactgtcctcaacatcatgttggactgtgacaagaccgccacaccctggtgcacattcagctgagctggatggacagtgaggaagcctgtacctacaggccatattgctcaggctcaggacaaggcctcaggtcgtgggcccagctctgacaggatgtggagtggccaggaccaagacagcaagctacgcaattgcagccacccggccgccaaggcaggcttgggctgggccaggacacgtggggtgcctgggacgctgcttgccatgcacagtgatcagagagaggctggggtgtgtcctgtccgggaccccccctgccttcctgctcaccctactctgacctccttcacgtgcccaggcctgtgggtagtggggagggctgaacaggacaacctctcatcacccccacttttgttccttcctgctgggctgcctcgtgcagagacacagtgtaggggccatgcagctggcgtaggtggcagttgggcctggtgagggttaggacttcagaaaccagagcacaagccccacagagggggaacagccagcaccgctctagctggttgttgccatgccggaatgtgggcctagtgttgccagatcttctgatttttcgaaagaaactagaatgctggattcttaagtgatatcttctgattttttaaatgatagcacctaaatgaaactttcaaaaagtatggcaggccagacaaaaaaa

SEQ ID NO: 161216 - DNA, 918 bp, Homo sapiens
  misc_feature (5)..(5): n is a, c, g, or t
ggccngggcggagcgggaggcggaggcgccgcgtaggcccgggaggccgggccggccgggctgcgagcgcctgccccatgcgccgccgcctctccgcacgatgttcccctcgcggaggaaagcggcgcagctgccctgggaggacggcaggtccgggttgctctccggcggcctccctcggaagtgttccgtcttccacctgttcgtggcctgcctctcgctgggcttcttctccctactctggctgcagctcagctgctctggggacgtggcccgggcagtcaggggacaagggcaggagacctcgggccctccccgcgcctgccccccagagccgccccctgagcactgggaagaagacgcatcctggggcccccaccgcctggcagtgctggtgcccttccgcgaacgcttcgaggagctcctggtcttcgtgccccacatgcgccgcttcctgagcaggaagaagatccggcaccacatctacgtgctcaaccaggtggaccacttcaggttcaaccgggcagcgctcatcaacgtgggcttcctggagagcagcaacagcacggactacattgccatgcacgacgttgacctgctccctctcaacgaggagctggactatggctttcctgaggctgggcccttccacgtggcctccccggagctccaccctctctaccagggcctggtgagggttaggacttcagaaaccagagcacaagccccacagagggggaacagccagcaccgctctagctggttgttgccatgccggaatgtgggcctagtgttgccagatcttctgatttttcgaaagaaactagaatgctggattcttaagtgatatcttctgattttttaaatgatagcacctaaatgaaactttcaaaaagtatggcaggccagacaaaaaaa

SEQ ID NO: 161217 - DNA, 714 bp, Homo sapiens
  misc_feature (5)..(5): n is a, c, g, or t
ggccngggcggagcgggaggcggaggcgccgcgtaggcccgggaggccgggccggccgggctgcgagcgcctgccccatgcgccgccgcctctccgcacgatgttcccctcgcggaggaaagcggcgcagctgccctgggaggacggcaggtccgggttgctctccggcggcctccctcggaagtgttccgtcttccacctgttcgtggcctgcctctcgctgggcttcttctccctactctggctgcagctcagctgctctggggacgtggcccgggcagtcaggggacaagggcaggagacctcgggccctccccgcgcctgccccccagagccgccccctgagcactgggaagaagacgcatcctggggcccccaccgcctggcagtgctggtgcccttccgcgaacgcttcgaggagctcctggtcttcgtgccccacatgcgccgcttcctgagcaggaagaagatccggcaccagggcctggtgagggttaggacttcagaaaccagagcacaagccccacagagggggaacagccagcaccgctctagctggttgttgccatgccggaatgtgggcctagtgttgccagatcttctgatttttcgaaagaaactagaatgctggattcttaagtgatatcttctgattttttaaatgatagcacctaaatgaaactttcaaaaagtatggcaggccagacaaaaaaa

SEQ ID NO: 161218 - DNA, 228 bp, Homo sapiens
tggcccggggattagggaaagggagggtcaaggccacggctttaaagttgcccacagtctggcgttgtcctaaaatccccgcccttaccaaaaagtgctcccttccatgaccacagcctgagatctcacccaccagcccccacctcctttccctctaggtaactcccactggaagatggattctcagccccaccagcctgatcttcccaccttttcaagtccccttga

SEQ ID NO: 161219 - DNA, 1739 bp, Homo sapiens
  misc_feature (5)..(5): n is a, c, g, or t
ggccngggcggagcgggaggcggaggcgccgcgtaggcccgggaggccgggccggccgggctgcgagcgcctgccccatgcgccgccgcctctccgcacgatgttcccctcgcggaggaaagcggcgcagctgccctgggaggacggcaggtccgggttgctctccggcggcctccctcggaagtgttccgtcttccacctgttcgtggcctgcctctcgctgggcttcttctccctactctggctgcagctcagctgctctggggacgtggcccgggcagtcaggggacaagggcaggagacctcgggccctccccgcgcctgccccccagagccgccccctgagcactgggaagaagacgcatcctggggcccccaccgcctggcagtgctggtgcccttccgcgaacgcttcgaggagctcctggtcttcgtgccccacatgcgccgcttcctgagcaggaagaagatccggcaccacatctacgtgctcaaccaggtggaccacttcaggttcaaccgggcagcgctcatcaacgtgggcttcctggagagcagcaacagcacggactacattgccatgcacgacgttgacctgctccctctcaacgaggagctggactatggctttcctgaggctgggcccttccacgtggcctccccggagctccaccctctctaccactacaagacctatgtcggcggcatcctgctgctctccaagcagcactaccggctgtgcaatgggatgtccaaccgcttctggggctggggccgcgaggacgacgagttctaccggcgcattaagggagctgggctccagcttttccgcccctcgggaatcacaactgggtacaagacatttcgccacctgcacgacccagcctggcggaagagggaccagaagcgcatcgcagctcaaaaacaggagcagttcaaggtggacagggagggaggcctgaacactgtgaagtaccatgtggcttcccgcactgccctgtctgtgggcggggccccctgcactgtcctcaacatcatgttggactgtgacaagaccgccacaccctggtgcacattcagctgagctggatggacagtgaggaagcctgtacctacaggccatattgctcaggctcaggacaaggcctcaggtcgtgggcccagctctgacaggatgtggagtggccaggaccaagacagcaagctacgcaattgcagccacccggccgccaaggcaggcttgggctgggccaggacacgtggggtgcctgggacgctgcttgccatgcacagtgatcagagagaggctggggtgtgtcctgtccgggaccccccctgccttcctgctcaccctactctgacctccttcacgtgcccaggcctgtgggtagtggggagggctgaacaggacaacctctcatcacccccacttttgttccttcctgctgggctgcctcgtgcagagacacagtgtaggggccatgcagctggcgtaggtggcagttgggcctggtgagggttaggacttcagaaaccagagcacaagccccacagagggggaacagccagcaccgctctagctggttgttgccatgccggaatgtgggcctagtgttgccagatcttctgatttttcgaaagaaactagaatgctggattcttaagtgatatcttctgattttttaaatgatagcacctaaatgaaactttcaaaaagtatggcaggccagacaaaaaaa

SEQ ID NO: 161220 - DNA, 2739 bp, Homo sapiens
cgttctctgctttctggcagacctccttccctttctctcccctcgtctctcttgaaccccttccgctcagactcctgcacccaccatggcacagagcagctctcactgaggtcaccagccacctcctccactctgttggtccagaggccatgctgggccctcatcctgtggacctgccagcagcatcttctttcgtaaaatgcccctgcttggggcagcaccctctggtcctccctctgcactggctgggcctctgtgtctgtgggttctgctcatctccccgagctctcaccatcggggcttctctgggctcggtgcttcggcagccccccttttttaactccaggtgttccttggggcatctcatgtcatctccagcattaaaccacgtctctgatgattcctgaggctgtttcctggagttctctcctaaactccaggctcaacagcccagccatctacacagtccctccacgtggtggcctcagagctactgcaagcttccatgatcacagctgaattgctggtggcctgccctgccccaaacctgtagctctgtcctcttctccatgggaatggaagctctttgctctcattgctcaagcccaaaagcccgggggtcatcctcagctgctccttctctgtcatacactgcgtcctattcgtcagcaaaatccatctagaatctgcccgcttctcgctgttgccaccgccacctcctgagctagggcaccttcatcttttggtctctcacctaaatcattgccatagtctcccagctggtctccctgctttcacccctgctctgacagtctcttccagcacaacagctagggcggtcctgtccaggcataagtcacagcacgcctctaccctgctcagagcctccatggcacccatcttacccgagtcaaagccccgtccttcagtggcccttgggccttgtgcagtcactgtgtcacccccaacatccccacctctgccctcgccctgcccagctgcccgttggtctgctcctgcctcctgccgtggcagtgccatctctcctatgcagagccctaggcacccactgccctgtgggtcatctcttcaggccttcaggtttctgtcactcagttcccctggccctccctgacggccccaccgaggacaagagccacctccacccccagcaagatcgccctccttgcctgctttgcttttccccccagcacgaaccactgctggccacgctttgtgtttgcttgtttctgtttccttctattggaatctcagttccttgagaacagggcctggtttttcactgctgtacctcccgtgctttgaatggtttctggcacatagtgggtgcttagtaaatatgcgatgagtggagggactgccccacaggctgagtgaagtcagtgctgggccagagggcagcataggcaccatggggacccccgggtgggtgctgagccccaggcagtgagcccgtgtgctgcccctgcccagccttgcccaccctgcacaggttcaaccgggcagcgctcatcaacgtgggcttcctggagagcagcaacagcacggactacattgccatgcacgacgttgacctgctccctctcaacgaggagctggactatggctttcctgaggctgggcccttccacgtggcctccccggagctccaccctctctaccactacaagacctatgtcggcggcatcctgctgctctccaagcagcactaccggctgtgcaatgggatgtccaaccgcttctggggctggggccgcgaggacgacgagttctaccggcgcattaagggagctgggctccagcttttccgcccctcgggaatcacaactgggtacaagacatttcgccacctgcacgacccagcctggcggaagagggaccagaagcgcatcgcagctcaaaaacaggagcagttcaaggtggacagggagggaggcctgaacactgtgaagtaccatgtggcttcccgcactgccctgtctgtgggcggggccccctgcactgtcctcaacatcatgttggactgtgacaagaccgccacaccctggtgcacattcagctgagctggatggacagtgaggaagcctgtacctacaggccatattgctcaggctcaggacaaggcctcaggtcgtgggcccagctctgacaggatgtggagtggccaggaccaagacagcaagctacgcaattgcagccacccggccgccaaggcaggcttgggctgggccaggacacgtggggtgcctgggacgctgcttgccatgcacagtgatcagagagaggctggggtgtgtcctgtccgggaccccccctgccttcctgctcaccctactctgacctccttcacgtgcccaggcctgtgggtagtggggagggctgaacaggacaacctctcatcacccccacttttgttccttcctgctgggctgcctcgtgcagagacacagtgtaggggccatgcagctggcgtaggtggcagttgggcctggtgagggttaggacttcagaaaccagagcacaagccccacagagggggaacagccagcaccgctctagctggttgttgccatgccggaatgtgggcctagtgttgccagatcttctgatttttcgaaagaaactagaatgctggattcttaagtgatatcttctgattttttaaatgatagcacctaaatgaaactttcaaaaagtatggcaggccagacaaaaaaa

SEQ ID NO: 161221 - DNA, 1758 bp, Homo sapiens
  misc_feature (5)..(5): n is a, c, g, or t
ggccngggcggagcgggaggcggaggcgccgcgtaggcccgggaggccgggccggccgggctgcgagcgcctgccccatgcgccgccgcctctccgcacgatgttcccctcgcggaggaaagcggcgcagctgccctgggaggacggcaggtccgggttgctctccggcggcctccctcggaagtgttccgtcttccacctgttcgtggcctgcctctcgctgggcttcttctccctactctggctgcagctcagctgctctggggacgtggcccgggcagtcaggggacaagggcaggagacctcgggccctccccgcgcctgccccccagagccgccccctgagcactgggaagaagacgcatcctggggcccccaccgcctggcagtgctggtgcccttccgcgaacgcttcgaggagctcctggtcttcgtgccccacatgcgccgcttcctgagcaggaagaagatccggcaccacatctacgtgctcaaccaggtggaccacttcagccttgcccaccctgcacaggttcaaccgggcagcgctcatcaacgtgggcttcctggagagcagcaacagcacggactacattgccatgcacgacgttgacctgctccctctcaacgaggagctggactatggctttcctgaggctgggcccttccacgtggcctccccggagctccaccctctctaccactacaagacctatgtcggcggcatcctgctgctctccaagcagcactaccggctgtgcaatgggatgtccaaccgcttctggggctggggccgcgaggacgacgagttctaccggcgcattaagggagctgggctccagcttttccgcccctcgggaatcacaactgggtacaagacatttcgccacctgcacgacccagcctggcggaagagggaccagaagcgcatcgcagctcaaaaacaggagcagttcaaggtggacagggagggaggcctgaacactgtgaagtaccatgtggcttcccgcactgccctgtctgtgggcggggccccctgcactgtcctcaacatcatgttggactgtgacaagaccgccacaccctggtgcacattcagctgagctggatggacagtgaggaagcctgtacctacaggccatattgctcaggctcaggacaaggcctcaggtcgtgggcccagctctgacaggatgtggagtggccaggaccaagacagcaagctacgcaattgcagccacccggccgccaaggcaggcttgggctgggccaggacacgtggggtgcctgggacgctgcttgccatgcacagtgatcagagagaggctggggtgtgtcctgtccgggaccccccctgccttcctgctcaccctactctgacctccttcacgtgcccaggcctgtgggtagtggggagggctgaacaggacaacctctcatcacccccacttttgttccttcctgctgggctgcctcgtgcagagacacagtgtaggggccatgcagctggcgtaggtggcagttgggcctggtgagggttaggacttcagaaaccagagcacaagccccacagagggggaacagccagcaccgctctagctggttgttgccatgccggaatgtgggcctagtgttgccagatcttctgatttttcgaaagaaactagaatgctggattcttaagtgatatcttctgattttttaaatgatagcacctaaatgaaactttcaaaaagtatggcaggccagacaaaaaaa

SEQ ID NO: 161222 - DNA, 1453 bp, Homo sapiens
accggtttatgcggggactgtcgttcactgtcgcgctgccccccagagccgccccctgagcactgggaagaagacgcatcctggggcccccaccgcctggcagtgctggtgcccttccgcgaacgcttcgaggagctcctggtcttcgtgccccacatgcgccgcttcctgagcaggaagaagatccggcaccacatctacgtgctcaaccaggtggaccacttcaggttcaaccgggcagcgctcatcaacgtgggcttcctggagagcagcaacagcacggactacattgccatgcacgacgttgacctgctccctctcaacgaggagctggactatggctttcctgaggctgggcccttccacgtggcctccccggagctccaccctctctaccactacaagacctatgtcggcggcatcctgctgctctccaagcagcactaccggctgtgcaatgggatgtccaaccgcttctggggctggggccgcgaggacgacgagttctaccggcgcattaagggagctgggctccagcttttccgcccctcgggaatcacaactgggtacaagacatttcgccacctgcacgacccagcctggcggaagagggaccagaagcgcatcgcagctcaaaaacaggagcagttcaaggtggacagggagggaggcctgaacactgtgaagtaccatgtggcttcccgcactgccctgtctgtgggcggggccccctgcactgtcctcaacatcatgttggactgtgacaagaccgccacaccctggtgcacattcagctgagctggatggacagtgaggaagcctgtacctacaggccatattgctcaggctcaggacaaggcctcaggtcgtgggcccagctctgacaggatgtggagtggccaggaccaagacagcaagctacgcaattgcagccacccggccgccaaggcaggcttgggctgggccaggacacgtggggtgcctgggacgctgcttgccatgcacagtgatcagagagaggctggggtgtgtcctgtccgggaccccccctgccttcctgctcaccctactctgacctccttcacgtgcccaggcctgtgggtagtggggagggctgaacaggacaacctctcatcacccccacttttgttccttcctgctgggctgcctcgtgcagagacacagtgtaggggccatgcagctggcgtaggtggcagttgggcctggtgagggttaggacttcagaaaccagagcacaagccccacagagggggaacagccagcaccgctctagctggttgttgccatgccggaatgtgggcctagtgttgccagatcttctgatttttcgaaagaaactagaatgctggattcttaagtgatatcttctgattttttaaatgatagcacctaaatgaaactttcaaaaagtatggcaggccagacaaaaaaa

SEQ ID NO: 161223 - DNA, 1063 bp, Homo sapiens
  misc_feature (5)..(5): n is a, c, g, or t
ggccngggcggagcgggaggcggaggcgccgcgtaggcccgggaggccgggccggccgggctgcgagcgcctgccccatgcgccgccgcctctccgcacgatgttcccctcgcggaggaaagcggcgcagctgccctgggaggacggcaggtccgggttgctctccggcggcctccctcggaagtgttccgtcttccacctgttcgtggcctgcctctcgctgggcttcttctccctactctggctgcagctcagctgctctggggacgtggcccgggcagtcaggggacaagggcaggagacctcgggccctccccgcgcctgccccccagagccgccccctgagcactgggaagaagacgcatcctggggcccccaccgcctggcagtgctggtgcccttccgcgaacgcttcgaggagctcctggtcttcgtgccccacatgcgccgcttcctgagcaggaagaagatccggcaccagggcccagctctgacaggatgtggagtggccaggaccaagacagcaagctacgcaattgcagccacccggccgccaaggcaggcttgggctgggccaggacacgtggggtgcctgggacgctgcttgccatgcacagtgatcagagagaggctggggtgtgtcctgtccgggaccccccctgccttcctgctcaccctactctgacctccttcacgtgcccaggcctgtgggtagtggggagggctgaacaggacaacctctcatcacccccacttttgttccttcctgctgggctgcctcgtgcagagacacagtgtaggggccatgcagctggcgtaggtggcagttgggcctggtgagggttaggacttcagaaaccagagcacaagccccacagagggggaacagccagcaccgctctagctggttgttgccatgccggaatgtgggcctagtgttgccagatcttctgatttttcgaaagaaactagaatgctggattcttaagtgatatcttctgattttttaaatgatagcacctaaatgaaactttcaaaaagtatggcaggccagacaaaaaaa

SEQ ID NO: 161224 - DNA, 698 bp, Homo sapiens
  misc_feature (5)..(5): n is a, c, g, or t
ggccngggcggagcgggaggcggaggcgccgcgtaggcccgggaggccgggccggccgggctgcgagcgcctgccccatgcgccgccgcctctccgcacgatgttcccctcgcggaggaaagcggcgcagctgccctgggaggacggcaggtccgggttgctctccggcggcctccctcggaagtgttccgtcttccacctgttcgtggcctgcctctcgctgggcttcttctccctactctggctgcagctcagctgctctggggacgtggcccgggcagtcaggggacaagggcaggagacctcgggccctccccgcgcctgccccccagagccgccccctgagcactgggaagaagacgcatcctggggcccccaccgcctggcagtgctggtgcccttccgcgaacgcttcgaggagctcctggtcttcgtgccccacatgcgccgcttcctgagcaggaagaagatccggcaccacatctacgtgctcaaccaggtggaccacttcaggtaactcccactggaagatggattctcagccccaccagcctgatcttcccaccttttcaagtccccttgatccagatccccagaccccccccttttccctgccacccttcttgtctttacttcctccttacccaacctggagtccaaggtccatcattaaaaccctccctggcatactccctcaa

SEQ ID NO: 161225 - DNA, 439 bp, Homo sapiens
  misc_feature (5)..(5): n is a, c, g, or t
ggccngggcggagcgggaggcggaggcgccgcgtaggcccgggaggccgggccggccgggctgcgagcgcctgccccatgcgccgccgcctctccgcacgatgttcccctcgcggaggaaagcggcgcagctgccctgggaggacggcaggtccgggttgctctccggcggcctccctcggaagtgttccgtcttccacctgttcgggcctggtgagggttaggacttcagaaaccagagcacaagccccacagagggggaacagccagcaccgctctagctggttgttgccatgccggaatgtgggcctagtgttgccagatcttctgatttttcgaaagaaactagaatgctggattcttaagtgatatcttctgattttttaaatgatagcacctaaatgaaactttcaaaaagtatggcaggccagacaaaaaaa

SEQ ID NO: 161226 - DNA, 1217 bp, Homo sapiens
ctcggctcactgccagctccgcttcctgggttcacgccattctcctgcctcagcctcccgagtagccaggactacaagcacccgccaccacacctggctaatttttttgtatttttattagagacagtgttttaccgtgttagccaggatggtctcgatctcctgacttcgtgatctactcacctcggcctcccaaagtgctgggattacgggcaagtttttattagagatggggtttcatcatgttggtcaggctggtcttcaactcctgacctcaggtgatccacccgcctcagcctcccaaagtgctgggattacaggcatgagccaccgcgcccggcctgaactctcagttctaacgcagggattcaggaattgggctttcagactccttctgcagtgtcacagtccagactttttttaaatgaaggacaccccgcagtggctcacagtgggtcccagggctagcaggagcgtgctggggagccggctctgtctttgttcgcagtgggtcccggtgctggcaggagtgtgctggtgagccggctctgtctttgtaaatccttcaggggtcctacggctgactccaccggacagcccgtcctgggccgtgttaagcaccttttgtagaaatcgtatttttattaaaacatcaaatctgtgttcctgtaaaaaacaaaaaaaaaaaaaaaaaaaaaagaaaaaaaaaaaaaaaaaaacaaaaaagaaaaaaaaagagagagcatatacaaccgacaaaaacaacagaaaaagagagaacacacaaaaagcaagacgcaccgcacgaaaaccggtacactaaaagggagaccaacaacaaacacgcgacaccgaagagacgaagaagacccgcaggcgagcgaacgacacaacacccagagcgagcacgaggtagaggcaagtcaacgccgccgcggccgccacgcgaacacaggggtagcaagagaacaccccgagccaccagcagcaaccagagaaggcccaccagacagccggagcagagaaagcacgacgaagaggcagaaaaagggccatacaacccaggcgaactaaaagaccagcaatacagcagcgcagggaaaacacagcacacaccaagagaggccacccaccgccgaaacaaaaggtcaaaagcagaagagaccaacagacaagagctcgcaaacacagcaaaaccaaaagagaagaacccccaa

SEQ ID NO: 161227 - DNA, 998 bp, Homo sapiens
ggctcatctaatattttggctggaataaatcagagacttccataatcaagtaaattttaattttcatcattccatggagattcagtctgtctggaatcccggaacccctccacagaatcgtgtctggatccacactgtggtgtggctgccacggcctcctggctccagaggcagctgggccgggccaaggcaggaaggcgcccccatgtgtgtggcctcagtctcagcatctgactgtgctgccctgtccccagggaagagaatgaggaccacgtggacttgttcgcagtgggtcccggtgctggcaggagtgtgctggtgagccggctctgtctttgtaaatccttcaggggtcctacggctgactccaccggacagcccgtcctgggccgtgttaagcaccttttgtagaaatcgtatttttattaaaacatcaaatctgtgttcctgtaaaaaacaaaaaaaaaaaaaaaaaaaaaagaaaaaaaaaaaaaaaaaaacaaaaaagaaaaaaaaagagagagcatatacaaccgacaaaaacaacagaaaaagagagaacacacaaaaagcaagacgcaccgcacgaaaaccggtacactaaaagggagaccaacaacaaacacgcgacaccgaagagacgaagaagacccgcaggcgagcgaacgacacaacacccagagcgagcacgaggtagaggcaagtcaacgccgccgcggccgccacgcgaacacaggggtagcaagagaacaccccgagccaccagcagcaaccagagaaggcccaccagacagccggagcagagaaagcacgacgaagaggcagaaaaagggccatacaacccaggcgaactaaaagaccagcaatacagcagcgcagggaaaacacagcacacaccaagagaggccacccaccgccgaaacaaaaggtcaaaagcagaagagaccaacagacaagagctcgcaaacacagcaaaaccaaaagagaagaacccccaa

SEQ ID NO: 161228 - DNA, 951 bp, Homo sapiens
caaggatggcaaggtcaacatcgacgacctcgtcaaggtgattgagctggtggacaaagaagatgttcacatctccaccagccaggtggctgagattgtagcaacactggaaaaagaggagaaggtggaggagaaggagaaggccaaagagaaggcagagaaggaggtcgcagaggtgaagagctagaaccactggcctgggcacctgtcctcctgctgtgccgtcaccctggcaagggccgtgagggcgattgctttgtggtgattctcagtggctcatctaatattttgtaaatccttcaggggtcctacggctgactccaccggacagcccgtcctgggccgtgttaagcaccttttgtagaaatcgtatttttattaaaacatcaaatctgtgttcctgtaaaaaacaaaaaaaaaaaaaaaaaaaaaagaaaaaaaaaaaaaaaaaaacaaaaaagaaaaaaaaagagagagcatatacaaccgacaaaaacaacagaaaaagagagaacacacaaaaagcaagacgcaccgcacgaaaaccggtacactaaaagggagaccaacaacaaacacgcgacaccgaagagacgaagaagacccgcaggcgagcgaacgacacaacacccagagcgagcacgaggtagaggcaagtcaacgccgccgcggccgccacgcgaacacaggggtagcaagagaacaccccgagccaccagcagcaaccagagaaggcccaccagacagccggagcagagaaagcacgacgaagaggcagaaaaagggccatacaacccaggcgaactaaaagaccagcaatacagcagcgcagggaaaacacagcacacaccaagagaggccacccaccgccgaaacaaaaggtcaaaagcagaagagaccaacagacaagagctcgcaaacacagcaaaaccaaaagagaagaacccccaa

SEQ ID NO: 161229 - DNA, 322 bp, Homo sapiens
tacacccgtctgcgattagccacaaaacccctgcattttcaggcagctgtactgttcccaccgcgtgtctgcgtgcactgtgcacacacgagacttcacagcagtaaggagctggccccggggctcaaccaggtaagcatctgggcagtgaggcgtggactattctgtcatcagcttaagccaacgttattaaggaagtggtctgactgctgaaaagaccccacatccctacaatttcccatctatggaaattataaccctgttactcatgccactgctcctgctcacacctggttaacagtggcactcaggtcactgagct

SEQ ID NO: 161230 - DNA, 176 bp, Homo sapiens
tcaggtctagcagtgttctgaagtggaaccaactagttatatctaatatagttcctgacacagagcaggcatttaaggaaagtgtgcccttctctttcacagctcctctgcccctaatgcaagaagaactattaagttatcctatcattcagcaactgtacatatctccccttcct

SEQ ID NO: 161231 - DNA, 325 bp, Homo sapiens
ttctaagctcgattcctatttaaatgcttctgttggaactcccaaagtttccatagatttctaatatggtcttttatcccattgtccatgccacctggcatgaaggaaccagaaagatggccagaagaaggctgaggcaaggggaggcccttgggtggaaacttttaagaaccactcactcagggtcatgcatgactgcagcgttggactcatccctaaatcatgcatgctggcacctgcttccttaccctcgtccctgcccccatcagatcccggaagcttgagcaagactctctaagacaagaggccccatctgtagactcca

SEQ ID NO: 161232 - DNA, 200 bp, Homo sapiens
ctttcactcagttacagtgagattgttaaatagctaacaaagttttcaagagaagctatagcacaaaccatatggtttctcactgggaaaaaatatgaagggaacataaatggaaagtattataagggccaaagctattttcattttgttgtattttttctttgacaagttggttactttccgtgtgtgtgtgtgtgtgt

SEQ ID NO: 161233 - DNA, 223 bp, Homo sapiens
acctgtccctctactgcagacaggggccaaagcctgtgaagaaaatcttagttggctctgcttctgatagccaaatactgacttcctttgcacattctagaacaccaaggaagtaaaatggttatggtttcctttcttcagagaaactcgcagggatgaaagccaagagcaggaaagtaagattttcctgggcaaacatctatgtttactgagtagctaccta

SEQ ID NO: 161234 - DNA, 301 bp, Homo sapiens
tttagctaacagaaataggaagagaatctcagaatctgttttgtcattttttcaatgggttgagttatagtgattatgctaactcggtggaaaagcagtgtagtgagtaaaccccacatacggcatatcatgaacattttgttgcttttttggcttctgaccatcttcatacctttttttgtgttaaaagtctccccattgtgtatatcttagtaagaggcaggtggaccctagtttctacctaagaaaacctgaagatggggttgggggcctgtggtgtacttccttctcatgctgtcca

SEQ ID NO: 161235 - DNA, 157 bp, Homo sapiens
cactggaatcagtctgtaactactcaagtcacaatgacttcagtgcaggagttttttactggacacagaagtctgattccaagcccactcttcaacagctgagattttgtgtgcgtgtatgtatgtgtgtgtgtgtagacgttgtcctgaggttcat

SEQ ID NO: 161236 - DNA, 442 bp, Homo sapiens
cctcagcaaagagtatagaggatttctttgtactttccttgcaaccttttttgagttcaacattaaattgtagtaaatccttaccttccccaaaaaagcccattccagaggaaaaataccacctctcttctttatctcccccgtccctggcccctctcacctatgtagaagttttgagagaacacaagatatatggagaacagccatgggtttaggaaaggataaaggattcaaggtgtgaaaacatttagcgagctgggttgaattttggtcccatcactttttcagtgacctttgccaaagtatttaacctttctgcacctcagtttcttctcttgaggataatagtacctgccttctattaataagagtttgctgtgtagggttaatatacataaagcacctccaacagtgcctgagacatagctcgtattcctttcac

SEQ ID NO: 161237 - DNA, 309 bp, Homo sapiens
agaaccaagagacttctcagaatgagaagtggcagagctggattcaaatcccagtctgtcttactctagacttcagagtctagaccttaaggagtgatgatggttgaaccagtttatgtgccaccagctgacaccactttggcctcaccagcatcaggtgtttgcaccggtgacttgggatagttctcagtcttcatcgccattttccgctggtttgatgagcggctcttgtcagtttattaatgtgcccagagctgtgtctcacctggaccctgctgtgggcacacattatggagggggatcctctag

SEQ ID NO: 161238 - DNA, 440 bp, Homo sapiens
tgaaagatggttgtaagctatgaaaagtgatagacagggttgctactgaggtaagtgagcaaggaaggatgataggcaaatctgagcattcaagagtagatgcatggagatacaacatcaacaccaggattgataaaagaaaaaaaataaattgataaagttttatcaattggtaaactgataaaattttcaacaaaatcaaaaacttttgctttttgaaggataccattaaataaatgaaaaggtaatccacagactagaaaaatgcatttgtgggccaagtgtcaccggtggctcatgcctgtgatcccagcactttgggaggccaaggcaggcggatcacttgaagtcaggagcctggccaacatggtgaaaccctgtctctactaaaaatacaaaaattagctgggcatggtggctcatgcctgcaatcccagcta

SEQ ID NO: 161239 - DNA, 367 bp, Homo sapiens
gggttgccatttccactctggtttggttttgtttgttagtccttatctgtcctggctaaataaataaaatggattttcactcatattttggccaaaaacaatagaaggtcagagcgccattaagaggcagagagggcaacagcgtcagccagaccagagctctccagatcccccataaaacctccggaccagagccaagcagaatgtgggcagccaggagggccaggccagccagtggggtgcgccccctcttcacctacacaggccctcccaggtagagcatggactctttgaaaggacgatgcagtcactgtcagctacactagagcatttcatcttatttggaggcatgttcctaagtattaga

SEQ ID NO: 161240 - DNA, 175 bp, Homo sapiens
ctggtgaaaggtgacactgttaactaagaacgctggagtagaaacaggtttatggagaaatgacaaaattttgttttggatttattaactccaagatgcctttttggaacagttaagaaccaggttgtttttagagaaagggagtgggactgagggtagacagttgccttactcc

SEQ ID NO: 161241 - DNA, 184 bp, Homo sapiens
cagatgcccacattctggaatgtcagtgtcacagattgaaggtggccacggtttttacattgctcccatcaggaaggggtggtctttgggagcaccaagggagaatcaacagctgtggggtcgggtcccagctcgtctcataagctgctggtgagaccctgggtcagtcccttttcctttctgg

SEQ ID NO: 161242 - DNA, 283 bp, Homo sapiens
tttttttctaacttgaattgacctacatatgcctcttttgtggtctagggctgccttctgtgagacagctagactttgctccctatttctctccttgtttttatatcctactctcataaactcacactgtgctgttaaaagaacagacttattcatgaatatgcctaccataatgatagccatatagcaatgccctgaaaggaataaaggattagaaaaagattctattgttactgtaaagaataagctagtcttacagtattgctgtgaatgactaacccag

SEQ ID NO: 161243 - DNA, 199 bp, Homo sapiens
ttaaaacatcaagtgttttaagtttatacatgttaatgttaacatgtaaatgaaaatgttaaggtaatttaattaagtttataaatgtaactgattatttaaagcagaatttagtgttttcaacttgggttagtcaggttttattcagagtctcctgaaagataactgtcctacttttacataaaaagtggaaattttt

SEQ ID NO: 161244 - DNA, 310 bp, Homo sapiens
ctcaccagtgtctcctcttctctatctgcacattctctgtagatgatttcatctaacccatgtctttaatgatgactccaaaatttttatctcaatgtcatctctctcctgagcactaaaccagtccgtgtaaatgcccactatgggcccttatcctgccaaaatcttaacctctgaaactgggcacatcccctgcctacatctcctggccccccaacaccagcttctcttcctgggtcccatttcacgatccatggcacagcgttccattctgtcaccaacacgacaacctgggagtcatcttcaacca

SEQ ID NO: 161245 - DNA, 141 bp, Homo sapiens
cacttttcaaacaaatcacctggaacataaaaggttcagtttttatttctgtgtcttttaatttgaacataagacaaaaccattggtgcaatatttttgctactacccaataactatgccactttgggtaattattgggag

SEQ ID NO: 161246 - DNA, 366 bp, Homo sapiens
gggtcacaaaagcaatgactacggtaatgtagataactgaggcaggccatgtaatgcatattctagaagaggggcactggagcacgcatgacccatctatagcatatggtgacagctgctacttagctccagctgatgactgctttgaagaaagaggacaagggtggctgtgtcttccaatttttcaagggaagctgaaatctagattatgaaaaaatcagttcctaaatgttgactcataaacacctgcaggggacaaataaacttagctacagactaaatatggctccaagactcctagtcaagacctctgtttcatgagaagtttatttctaatgggcagatatttccattggaaagatgtca

SEQ ID NO: 161247 - DNA, 333 bp, Homo sapiens
acaacccgttgattttgattgagttacatgttgtaacagattcaacaatatattttcgaatgggtcagctccgtgctgcactcattggagtatggttttacaatgactgaaacacccagcttatatttcatgcagatctttattaataaagatgtgtttcttgcacaaaatttatttatcccatattgccagctgcgttctttacttgtgaagttacaaaatccagctgcttgattttttttaaaaaaaattcatattcgctgaaagatgagcaaggcaagtgaaattgcaaacatctgattggataccatattccaaatttacttcctcaat

SEQ ID NO: 161248 - DNA, 299 bp, Homo sapiens
agctgggactacaggctcacaccaccaagaccagctaattttttttatattttttatagagacgaggtttcaccatgttgcccaggctagttctttaaatcgtatatattctggatactagaaccttaccagatacatgatttacaaatattttctcccattctgttcactcttttgatggtattgttggcagcataaaagcttctaattttgatgtagttcaatatatctagtttttgtcacttgtgcttttggtgtggtatctaagtacccattacctaatccaaggtcacgaagat

SEQ ID NO: 161249 - DNA, 714 bp, Homo sapiens
atgttgtagaggttagactcacttgatgacttacatggcttgttttcaagacctcttgaacaaaatatttaattggaacaatttatttgctatcagttcttttagtggatagtagatattcctggtaatatttacatttttcaagtcatataacaagtattgagctcttgctcttgttacatataacaagtattgtagctcttgttacaggtaacaagtgttgcagctcttgctaccgctgtacttgttggtatgtattaaggataacatttgttaaaaaggcccttgccctctgatttaaagtcaggcaggaaagtaatgcatgcaaagcacgtgagcaatgtggtctggctgtagagtatgtgagaggcaaacacggatatgaactaattatattaccattagatcacaaaatcaggtggtaaacactctagaagggcagagatggtgaaaattaatggaggctggagttataagaaactaataaaacaatgtttcatagaaaagacccaagtactgttagaccttaaggaatgggtagaactgaagtttggttttcaaaatcatagagacagcataagccactgattcccccttccactagaaaaagcagcccacagaatgagagaagatatttgcaacacatacatctgacaaagtacttcatatggtttggctctgtgtccccacccaaatctcatgttgaattgtaat

SEQ ID NO: 161250 - DNA, 337 bp, Homo sapiens
ccaactaaattagacttcgttattccttctcgtaacatcacagtcttttccttcatagtgcttatcacaatttgtaattatgtatttgtttatgttaattaactaattaatttattattatttattcctctgttccactaggcaagaactgtgtctattctgttcaccatatcttcagagcctaacacaggtccgacatatcttatactcaataaataatttttgaaagaatgagtaaattaagaccaaagccaatataagattagtgagtcttcacaaaataaaaatcatagctacatatgcttttaatccccttcacattctactcctcttctag

SEQ ID NO: 161251 - DNA, 462 bp, Homo sapiens
gtgatgctttaggtcaaagatcagcaaacttttcttttgtaaagggccagaaggttaatattataggcttcatgagccacatggtctctattgcaactatgtgactctgctgtatgctctgctgtggcatgaaaacagccatggatgatacaataaatgaatggtgggctgtgtcccaataaaactttatttacaaaaacagacagtgggccggatttggcctatgggccatagtttgctgacccctgctttaggtaattgtttcctgaacttcaatccttttagtacgactcattatattgtttaatctgagtagcatctgcaatattgtttacttaatttttccccttaaactgacttacgttattttttttttaaccaacaacttaagtttaatttataaggagctctctatcactaccatggaaaagcagtattatatgtccttaataaggaatcacc

SEQ ID NO: 161252 - DNA, 175 bp, Homo sapiens
ataaacacaaaaagatcaagggaacaaaattcctgacggagagtatactgaatccatgtgaaattctttccacccttcattctatttcccaatatcctgccaatcatttctctgcaataatcagaattggttcagtgtatttttctgtgctcaacaaattaggctattagctgat

SEQ ID NO: 161253 - DNA, 271 bp, Homo sapiens
taaataactcacctcagttcataaagctaagattatcacctagacttgaacccagaccctttcctacaataagtgagttccccaaagatggagggatgagtgttcaaggacaccacagccagaatgctaccagtttactgaactgttccttactattccatgactgacatgactgacatgccttcaccaggacacagcatgagttgcacaggggcccagggacacgtcttgtgcccagctccccggcctggccagccttcttgaggagccc

SEQ ID NO: 161254 - DNA, 489 bp, Homo sapiens
tttaaaaaactagatgttaaagtataaaacttataccagaaaagtcttactaagaggagggactagaaaaaaaaaagtcaagccatcatctgaattttactacaataagtaattattggaatttctacatgaaaggcaattagaatgtatagttggttaatgtagaaatttaagagatacggagaagacactgcccatttaaaatgtatccttttaaaaccactgaacagagaaattcttaatacaattgagagttagttttaaagtagcatacatgtattacaggcaaattagaaatgttggcactacaaaggacctgtagaaatcatctatttactgagactttcattttagaaatgagagctttgagtactgaaattgtcagaacagaataagctattttaaattactgtatatttggttttaagtgaaacacaaatgtcttttacattcttttaagagttggaagggaggttaaattttttagaa

SEQ ID NO: 161255 - DNA, 825 bp, Homo sapiens
caggtgcgacccaccacacccggctgcaatgtttgttttaattacttttggcaagtatttcctgagtaccccgagcgtgccaggtgaagagagacggataataacagcgctagccagcacgtattaagccttgcaaagctgcacgggcatgaacttgtggcttcaacacaaccttatgaggcccaccacagctgccaaacatgaggtgatgggacagccctcgtggcctccacccaccgccctggtggagaagtgaaacatgaacccaccagtgcaagacagaggaagaggcaccagcgaaggcaagaaaactgaagctggacgctggcctccagtcctgtctttgccattagcagccctgggatcttagtgccttcaccacctggccaatacagtaaaaccccgtctctactgaaaatacaaaaaattacctgggtatggtggtgggcaactgtaatcccagcgacttgggaggctgaggcaggagaatcactttaacctgggaggcagaggttgcagtgagctgagatcgcaccactgcactccagcctgggcaacagagtgagattctgtctcaaaaaaacccaaaaaacaaaacaaacaaaaacatttgtttccctataatgaataggattgcttgtgttttaaaagggagtaacccaatcacagcacttgcagataacattatatgttgcctggaatctgatttaaactattccacggggtggggggtggtgcagaaataaagccaaattatcggaatctaaaaaaaaaaaggggggcgcgctttttgtttacacaaccacggtattaaaaccttcttgg

SEQ ID NO: 161256 - DNA, 135 bp, Homo sapiens
aatccacgctggggagaagccagccctacgaatgcaaccagtgtggcagagccttcagccagcttgctcccctcattcagcatcagaggatccacacaggagagaaaccctatgaatgtaaccagtgtggcagag

SEQ ID NO: 161257 - DNA, 438 bp, Homo sapiens
gatcccactctcggccatgctctcgtgcctgtctgccgtggaccggctccaggggggggtccctctgccaccctgtcgactcatctgggtggtgcagagggcagtcagcccgcccagggtgaggagtaagaggaggggtgggggttacgggtaattcagccagcagccctgatagcactgcctacagtaagtgctcaacaaataagctgttttgatcaggggatgggagagttggggggattcctgggatgaaggacatgtggctgctggcaaggaaacgcattttcttacatttcttggtgggtgtggggttatcagtctccaaagctccaggagagggaccaagttgacttcaactagagctactccaacctgcccctccctgacgacgtcttgcgtggttcacgcctctggctcctgccggaaggaggcggccgc

SEQ ID NO: 161258 - DNA, 322 bp, Homo sapiens
ccagaactggcatcgctaggggctattatgtgggcacagaaggccgtttcaggagaaggggcccaggcaggctccggtggccgcaggagagggggttgggaagtgtagctcccaagtgtcactcctgacgcacacagattttaactttgggtaacaggcacatcctaaaacactctgggcctctgggctgggcattctccattctctctaagccatgcacccctttaatacaacactgcagttttgatgacattctagggtaggccctgggtagagaacctctgctatatgcttcaagagcctggttctgcaagaacccacg

SEQ ID NO: 161259 - DNA, 319 bp, Homo sapiens
aaaatagtgctctctagtattttataggtacataaaacatggacaaccactgacattatatctaccttttggaataatttcatctgggttgcctgccatcccaactgcgtatcaagtgacaagaaaagagtaataactacaaagtccttgaaaacagccagaccaccaggattgaaggggtagtcatcaaaacacaattttgctaactgatcaggtatgaggaagagacaatagcaggatactcaacaagctggagtatagtgttctgaaatgtgacatttccaaatagggaggacagagaagtgctttagattactat

SEQ ID NO: 161260 - DNA, 254 bp, Homo sapiens
taacatatgtgcaggttcacccacagcagaattgtttcaaaagctcaaggttgggaaccacttacatatccatcaacagaagtctgcaaaataacatttgatatttccataaattgacatattctgcagctggtaaacaatggagcaggtctctatgtccttatatggaatctcaataagaaattatatggcttgcatttgggagaggttttccaatcaccaacagagcacagagaatgaaggagagaggcgtt

SEQ ID NO: 161261 - DNA, 236 bp, Homo sapiens
  misc_feature (12)..(12): n is a, c, g, or t
aagatttgtcantttacaaatctatttacaatactagagtttttagtcacctgatactcaggactcaacgtctgtactcagacgagccacgagtgcactccagcttgggcgacagaatgagaccctgtctcaaataataaaaaaataaataaagctctgcattttggcagttgtgggtcgtctgagtacagacgttgagtcctgagtatcaggtgactaaaaactctagtattgta

SEQ ID NO: 161262 - DNA, 467 bp, Homo sapiens
gtctggaagtgaactctaggaaactgcactggaattcaagtgtaatatgatgataaacatcaaatgactgtttgtagccgaggtgcaaggccaggctcttcaggaaagaatgaataggagaccttaaaataaacatctgtttttttattcagctaacagtggactttgaagaagattggggccatgttcagattttctttttcttccttgagaattgaagaaaaatgtcagctgaggatttttttatgctatttaacatgtcatttgtagtgtttcatgaaaagcagacagatatgtaaagctttttattccacttcaaattagaataataagttagatccagttttgaatttaaaagagaactttaacagatatgttttatgagtgagtttcatgattttgaataaaattttcacacacttaaactacagtggtttggccaggtacggtggccacaactgtactcc

SEQ ID NO: 161263 - DNA, 699 bp, Homo sapiens
agcgagaccctgttgatttttattttaaaatttaaaaaatattaaaaagagaaaagagttaataaagaaataatagtggctaatacttattgagtgctctctgtgcgtcaggcagtgtcatgaggacttgcatgtgtagtgactcatttagtattcctgacagagctacgaagcaggtgctattattagtctcctttttagatgtggaaactgaggcatgagagatgaagtaacttgctctcagctagaaagcggtaaaacttgtgcttgaatccaggcagtttgcccttaggagcctgaccttaaccacagctcttactgcctttggtcacagttgatcccccgtatgtcctgataatctcttctaattagcccaggtctttgatgatgcccataattgaattagaaaatactgcagaaacaggtttggggcactcattcattcatctagcaaatgtttgctgagtgacaaccatgagatagtgttgagtgctgggattacaaagacaagaggtgtaaaggtaatgggtccaatgacgtctagtggagaagagataagtaagagaccatcacaggatagtttgatagaagaggcaagcacagaatgctttgaaaaacatggagggtggcacaatccagattaggggtatccagaaaggccctgtggtgggaattgccccttctgagcatgaaagaatg

SEQ ID NO: 161264 - DNA, 177 bp, Homo sapiens
cgagttgattttatcaatataatgagagataggggtctagtttcattttttttggcatacggatatccagtttttcaggcaccattgactgaagagactgtccattcaccagtaaatgttcttggtgcctttgttgaaaatcacttggttgtaaacagctggatgtgtttctgagtt

SEQ ID NO: 161265 - DNA, 275 bp, Homo sapiens
gtggcacgatctcgacttactgcaacctctgcctcccgggttctatcagttctcctgccttagcctcctgagtagctgggactacaggcacatgccaccacacccagctaatttttgtatttttagtagagatggggttttgccatgttggccaggctggaagatttcagtttctaaaaattcgttgaaacttatttagtggccttatatagtctgtcatggagaatgttctatgtgttgataagaatgtataaccagcctggcaacatagcaag

SEQ ID NO: 161266 - DNA, 243 bp, Homo sapiens
gaatcttggaagtacttgcatccacattacctgaatatgttttggggaaggatatgatgtttgaccagggaaaacttcagctactatactgcagaaagcttgttagttttcccttcagtcagaacaggctaaatgagaatctgtgcaacttccccagctcacataggttgttaatttgaaacagtatcatggtggaccaaaagagatttagcacatgaattaatgacatattcgacactggag

SEQ ID NO: 161267 - DNA, 138 bp, Homo sapiens
cagactccaaaagaaaaccccatcgtggggtgtcccaggccgttgggtcgtttatacccagagtggcctaaccagagaaatccgttcttttccctcaaaacttgtaaagcagctggcgcctcagcttaaggagcgtgg

SEQ ID NO: 161268 - DNA, 600 bp, Homo sapiens
cagtgtgtcagaaagttagcccctctcaaaagtaatatgaatcaatggattaggaagaacttaagcttgtgaagaaagatgtgaattaagaatgagaaaaacgagttaattctaaccctggttctagctgctatgttttaaaacatcatagagactcaattttgtcacctgtaaaatggaagttaaatacaacaggcaatcttctgagtaacagtgaatgttaaaaatctaaagagtaacaattcaaggcagacaaagaagctccatcatggatgctagggcgtaaggtgctgtgtaaatggtgaagagaggtgactcatccccctgaatgagaaatgcgttggagggaacagaaagagagccaagttctgtagatgatcagaccaagagaaaggccaaatcccagtgggtgagagtcaccaggagtggctgcaaagaaagccagcatttagacaaaactgaaagagggttgggggaccaggcagacattatgtcacccacggccaagaagagaggcgagtcctgtactggagtgagttttagtaagtggatgaagggcatgtccaggagcatggctgggcctagacactttggatcctc

SEQ ID NO: 161269 - DNA, 660 bp, Homo sapiens
ttggataatagtctggcagttcctcaaaagtttaaatatagaattcccatgtgacccagcaattgcaagagagctgaaaatatatgttcacacaagaacttgcacacgaatgttcatagcagcattattcataatagcccaaagatggaaacaacctaaatgtctatcaactgatgaacggatacacaaaatgtggcttctctttaagagtggaaattattgaaccataaaagtggatgaagtactgatacatgctacaacatggataaaccttgaaaacattatgcccaatgaaagaagccaagcacaagaggccacatagtgtctgattccatttatgtgaagtactgcatagtttcttataaaatagttgtacaactttgtgaatatacagataatcactgaattacacactttaaagtcatgaatattatggtatctgaattatatctcaataaaaaacaaaaaagtctatgtgcatttataatactacagccattatatttaccctaattacattttttaaaatatacctaattttcccttatacctttttgaataatgcaagaatcatttaaatgtatttttatgaactttttaatataatccttaattttagttttccaaattaggtggggatagaggattagttgatattaa

SEQ ID NO: 161270 - DNA, 380 bp, Homo sapiens
taccttctggaatgccaactccatggtaaaatacactgaactttctctccacctccttgtggaaacctgactgacgttcctgaagacgttgtctcccctgcagtcttctgaagaggaagctgctcttaacccccaatgctgggatgcagatcacttataaattactcatctccatcctcatgtaccaacaccagcaggcagtgccttccaggaggttaccgtttcactgccatctactgactccatgactgttactcattcatgaaacagtcctggcacctatgttagtctctctctacttacaagtcctgctatcatgaatactcattatttatgtgaaaaaccacctcaaaactgtgcctactcactaagaagcaaga

SEQ ID NO: 161271 - DNA, 452 bp, Homo sapiens
gaactgagcttattatagtggacaaatggtaagagtagataaattaagaaccttaaaaccaacaataatgctttcatgtaaaaattaacatatttaattgtgaaatatagatatcttatatggaactaagttgaacactctggaaatatcccaagggaaaacagtgtctcaacagccagaactggtcactataattatcatagagtgggatctcaggtatggcagacagatgctatcaaatcaggtttcactaaagtacagaagatatgggagcgggtacggggaagtgctgggtagagaaaggcaggtcctggctggggctccactcctacagacctaggtgaggacaggcactcctgcttttgtgcctaactgttgcattttccaagaccactgtggtctgccatgcccccatcctgggctgggcatggtggctcacacctgtaatccca

SEQ ID NO: 161272 - DNA, 419 bp, Homo sapiens
cattttgctgagggaaacatctgtcacttcttcaagatgaataacacaccaacaccattattaatgtattcttaagtggtgtttagaatccacttcattctaaccattatgacatacatctttgctgacttgttcggaccccagagacctggcactgcatggctgctgcgcaaactgggtgacccctgatccccaagcatgtagcagagggtcaagttcacagcagcctgacaaacagcaggagaatacaccccccaaccccagtgagagagacctgacgccagtgagggccagtgaggtgagtgatgcctgctactgctggtgggcgtgtcaggccattattttggaaagtcatcagcagggtacttttttttttttttttttttgaggcagagttttgctcttgttttccaggctgg

SEQ ID NO: 161273 - DNA, 276 bp, Homo sapiens
tggcgaatgtagtatacaatgaaaaaatatagaaaggagaaaattgttctgggtgggagaaacagccagaggttaggccctatggaaggagcgggtcttggctctttcaggcacagccagagcctgtgtgactggacagaggggaatggggagtgacagccaaggggggtcgagtgacaggaagtgaggcacatcactttgtggggaactcatcagccacagtaaggactttggctctgagtgactcctccaggcctttgcacagagcagtgatct

SEQ ID NO: 161274 - DNA, 351 bp, Homo sapiens
attatttgttattgttttaaaaatgagaaaacagattttagagaggtaaagtaatatattttaaagtccagcttggaagtgaccgggttaggatttaaatccatattcgtttcattctaacactgggagagtgagctcctggtagagttctctttccagaacagtgcttgtttgcattctcttgcaaatttaagaaatgactcaatcagtctgaaaagtgcctaggtagagagagacccttgtttaagcactcacacccactacatgtctttgaaaattcctttgtgagtgccttcaagttagtgatcatactgtaccttccccttgagaaaataattcatgatatgcttt

SEQ ID NO: 161275 - DNA, 478 bp, Homo sapiens
ggcaactgcagtataatggggagagaatgacagaagctgaggtcctcaggagatgaaattggcaagacttggtaatgtgtggatgaggggagggagatggaagaagggctcccatgtggccactcttgggcttggctggggtggcccactgggcactgtggccactaccggggttagggggctggaagcctcaatgtgtggagacagatgggctctgggagtgctacgtctgcagcatgaatggcagccaggcagatggatacagagctggacgggtttggggctgggaggacagagagagtaacaggagcgctgggaatggcctaggagcaccatgaaggggagaagggagtccaggatgccagggaaaagcacagaggatgaaggggtggctcaaacagcctgagaatgtcccagtctgcaccgggaggggcaggcagggatgagggctgacattagatggaagaggctgggacag

SEQ ID NO: 161276 - DNA, 412 bp, Homo sapiens
agacacattcagggggaggatggtggcatcacgttgaagaaggcggcagcaggaggcttccaaaagaacctcccagcttcaagattctctgactcgagatgagacgccatgccaaccaccagattttatgctttctctctctcagatgctccaactgaggtagtttagtaaataaactgtgtttatgttctctagcattcctgaagcagatgtaatataactgaaggcaaacaattttagtaatgcaattcatgcattgccatctaaacaccacgtcatcatgaaactgaaatgtttaccaaataatcaaagcccaagacaaagaaaccgaaaggcattctgtaaggcaaagtaccagccagtacttccaataaaataatttattgagagttatcctggagtggcttgtcag

SEQ ID NO: 161277 - DNA, 308 bp, Homo sapiens
cgagaccagcctggccaacatggcaaaactccgtctctactaaaaatacaaaaattagctgggcatggtggcaggtgcctgtaatcccagctacttgggaggctaaggcagaagaatcatttgaacccgggaggcagaggttgcagtgaaccgagattacaccactgtactccagcctgggcaacaggagcaagaccctgtctcaaaacaaaaagttggtttccttccgtttatccatatcagaggccctcccttcccttcccagctgtaccagaattaataataatgccaaatacttaccagcatcc

SEQ ID NO: 161278 - DNA, 382 bp, Homo sapiens
cagaatgttctaagcttggggtgagcggagggaacgctgctgggtggggagtgggagaccaggctcggagacaccgcggatctcctctgatgagggcgtgatgaggttctcatctcaggtcctctgaatggcggctgcttctgaggagaccctttcccctggatctgcccctccagaaacctccacttaggtccaggtcccaaggtggatggtaagaggcggctgtccctgccacacttgatgggtgagtgtgtgaacggggctgggagcaggacacttgtcacttctgtggacagattccagaggctcatgaatctgctgctggggaaggtgcctgatctagcctgaccctccacccccgcctcccccttcccgcccccct

SEQ ID NO: 161279 - DNA, 404 bp, Homo sapiens
aggggatctgcagggcattcagcagggtaatgggtcagttcacgcaagtaaagaaactactcaaggctggagaaagaatcaccggaaaggattaggagaaacaatacaaaatgctcacacagggctgggaataatgcctgtccccacctgccagactagaaaacctaatcactcatggggcactgagtaaagtactcagagggtcttgcctcagtagtagataattaatcacagcctaaaggatgctctggtcctgccagaggaaagcacaaagaaatcaaattatttctaagtaacttaactacatcccagaacaaagactgagaatatttataggaatatggaagtgtccaggactcaaatagtaaaattcacagtgtctggcatctaatcaaagattacca

SEQ ID NO: 161280 - DNA, 530 bp, Homo sapiens
ctgcatcgccgctcgcaccccgcggccccgtgccactcggtcccggcgcccgcctggagcctgcagcaggggccagaggacgccgcgcggctgccaagcgcggcgaggtggcgggaagggaggctgggtgcagcacagccggcctctccgctgaggaagagctccggctcccttttgttagcaaaagcaaacactgccctcttctttcccgaccgcgccaacgcgcccggcacacgggcagccacacatcgggctccagccgagtgctcggtgtcttcagggaaggcaccgggcgtgcagagccgcccctgggcaaattcccaagactgctcttcacgcagggagcgcgcggaggcccgcagggtgcccgcctggccgcagaggccgcgacgccccctccgccaccctcgggccgccgaaagaacgggcagccgggaaatcccgtgtccccactcgtggcagaggacgctgtggggcgggcgggctgcgggctcccggcgccttcccgcagaggcggcgacagcggccgc

SEQ ID NO: 161281 - DNA, 630 bp, Homo sapiens
cacttctgtcctctttggatgttgtcctgtaaggggagcatgcttggacctgcggcagctacttgcaactgcaggagggaaggcaatgaagtcagagagaagccaaaatagagccctggtgtctctacactgctagtctcatcctggagtcacccacctccagccttgtgcagaatcaaaagacaaatgtctatgattgatgccctggctactgaaagtgtggtctgtgggcccctagcatcagcctcttgggagtctgccagaaatgcagactcttaggctccaccccagacctactgagtcagaatctgaacattaactaggtccccaggtgatccatctgtgagttaaagtatcgtttgtcccttctaacagggtattccactaactgcacccaaaagcgttctgagacacagatggaatgcttgtaaggttagtctttgccacagctaagtgttcaatcaatcaataaatggtgcacagggctggacacagttgctcacgtctgtaatcccagtgttttgggaggtcaaggtagaaggacagcctgacctcaagggttcaagaccagcgtgggtaacatagcaaaatcctgtctcttatttaaaaatttaaaataccagcctgggc

SEQ ID NO: 161282 - DNA, 376 bp, Homo sapiens
tgagaccagtgacctgattcctgtagacttcaaagcctaatgtgtgtagagaaagagtctacctctcttagtcacttaggactgctataccagattgccatacactgcatgccttagacaacaaacattcatttctcaaaggtgtagaggctgaaagtccaatatcaagcagatgaggcctctggtaagggcctgctacctggtttgaagatggcagtctaacccttatgtcctcacatggtggagatatgtctgtaatgtctgtctagttttggtgttagggcaatgttggccttataaaatggaatagaaggtgtttcctctgcttctgttttctggaagagattgtagagaattggtatcatttcttccataa

SEQ ID NO: 161283 - DNA, 367 bp, Homo sapiens
acgaagtgttgtccctgcataacccttggacgccgatccaaggaggtgtcacgctagtcgaggcatgcactctgtctgggagcttcctgagccaccagtggcgcctttttcgtctaaaaacttaaacactctggactgcccgcctttccacgactccgcccaaataccacgccctaggctaggggcacgcccacccggtcccttccatcctccaagatctttctccaaccccactaaccagcctcttccctttcccaaaacctcacccaaagggacacctcataccctactcctactcttccctggaggctggccaccctccagaccttgaaccagatagaaatgcaccctgcgcaggacccactcg

SEQ ID NO: 161284 - DNA, 386 bp, Homo sapiens
ttgaactctgtgagttgaatgcaaacatcacaacttagtttctgagaacgcttctgtctagtatttatgtaagatatttccttttctaccataggcctcaaagccctctaaatacaccctggcaaattctacaaagagagtgttccataagtgctctaatgaaagaaaggtgaaactctgtgagttgaatgcagagatcgcaacgtgctttctgagaaaggttctgtctagtttttacatgaagatattaagttgtctaccgtaggcttcaaagcactctaagtatgcacttggaagttctacaaaaagagtgtctgagaactgctctttggaaagtaaggttcaaccctgtgagttgaatgcacacatcacaaagaagtttctca

SEQ ID NO: 161285 - DNA, 146 bp, Homo sapiens
tatgtccactgtattctagttagaaaattaaggagatggaaagaaaaaggttaaggagagatcccagttaaatatcacaaattaaacacctaaagttttctccatatcctccactaaaatgacaataatggaaagaggaagaaaag

SEQ ID NO: 161286 - DNA, 567 bp, Homo sapiens
gccatggcagcgtgtttgttatgccactgtttccttctggcctctcacagctcagttgctagtctctgtttcaggatagggtattaactatctgggcagcagcagctagtagacttcttcctccatccaagagactaagccatttagttccctagtctcccagctactgtagatgcttacctctgcctctgatattcgatccttggaagtcttatttttccaagagtttggtcttctcaactatttcctatagaagcaaatttcctttcaccaggaatgtgaggtatagtcaggttctcctctttagtttccctccattcatctcctttgatacagctagaaagctctcagctctttccccaagaatcatcaaaagaggggaaatcacataaagactgggcagatggtgggtgcagatttagctgaagagttcagatctttgagaaggaggtgcattcatgacaaccaaggttagatgatgtattgagatgggcctatcctttgggcctctttcagcataagctttcaagcattgcttttaggggaggggccactatgagtcttaag

SEQ ID NO: 161287 - DNA, 915 bp, Homo sapiens
ggtggctggcagtgggagaatgtccagcaaaagggagcccctgctaggactggaggcccaggctgtgctgtccaagtgtaagagccgggctgaggccggctgcctagaggtgagctccttgagctgggttcagttctcagctatgagtagcaggctgcttcccgctgggctgggctggactgggcctcacgcccatctcacgccccacactgggccccagctgagggttctgcacaaaggaaggaggtgttacccacagcagggatggacagcaaatatgattcatctcgggagccatgtcaatcgactggtacaagatacctgaagcactgtggtgagaattctgggcgtggcaggaaacggtgctaggatcaattagtgttgcctgtcacaggccaaggataggagaaagggtaagtggaacagaagagcctcatcaatttatctggaggacaagaggcagcatctaggaaagaggctcctgattgactagtcatgcctgccatgcatagagaagagggtatcatatagggagaaaaacaataccttaatcacttagccacatctgctatagaacaggagtgctggcaagcttatttggaaagaatgctaggattgcttagcaatgtctgccatgggcgtgtgctagaggagcggcacaaggcaaagagtgctagatcaactagccatgtctgccatgggcacaagagggcaagatttctgccatgtggaaaaatatgctctgatccatgagtgacatctgcataggagatagaaggaggaggggcagtgccaagaatgaattctggtctggcttaagcgagatcttccacagccagggatgtgaggggaggcaggggcggtgtgtaagtatttgccatccctgacctacaggaaaccaggaaaacctgccag

SEQ ID NO: 161288 - DNA, 507 bp, Homo sapiens
cctccccctggatccatctgtgttcctgttcatactagacaacagccctatgtcctctctgaagaggagacccccaaggacaaacactggctccctgagcatcagaactggagggatcctctcagaggagcaggagtctgggcccagccccacaagacccttataatttgtccaaagacaaagagaagcagtgacagaaccaggaccagaagcctgtccttataaaccctgatcatgagttctctgcaccaccacacaactgtgtctttccatgccaggacctgcacatcagttcacctttcctggtctccaatctctgcctggaacaaggacactgtcccagaactcagatgaaatctgggaagcatcctcatttcctcattctcccccccacaatccaactggtccgagtcctgtccattcaaccttgtatctctcagtatttattctactcatccccacaatgtcctaatttaggcacttttctctttcacatgggcttccgct

SEQ ID NO: 161289 - DNA, 1909 bp, Homo sapiens
cccaacatctgtgctgatcctgctaggtaatgacgccccttccttatcgttctagagtcaagcctagatcccctacaaatacccatgcacacttagagctcactctggttaaatgttccaagaaggatgttggatggtcacttggtatcatcccatggagttcaggatacccccgccctctgagcagccattcctctcctgagcacattcccctagagaagctctgcacgtgtgcacaggcaccagctgcaggagtgccatccacagcacagctgtttatgaaaaaccgtaatcaacccaaacatctgtatgaagaaaaacgaagaaatgcagagtggcatgttcacatgatggaatactatgcagctgagaacatgaacaattggagccatggcatgaatgaagctgagagatttgaagcgtcaaccaagtaagctgtaggagattacatgtggtggaagactagtttataaatctcacagacaagccttaaagaaaatgtatctcttgaaataaatgtatacacacaattatacacatatatatgataaacccttttaaaaggcaagggaatgatcaataaaaacataaactgttccctctgggccaaggcggagggcaggccatcagatcagcaggaagttgatctggttttgaattgggttgtgtgtgcactggagtcaaacattattttacagaatatatttcatatatattttacacatatttgcttttttgtttcagatatttcacaagtttttaaaaatgtaagcaggtcatgaggccgctgtccaggacagcagcatgcccgtttctggtgatacttggtgcagagggtaactccagcagctgtgcgtgctgacccctccagccagctctgggcaaggggttgtttcctcccagctcagtggctgagcagagctccagctggcgaaggacccaggctctgccaacattgtggacatcccctccacaggccctggggtgccctgtgcagaggcagagggtgaccgggagcagtgggcagagcccggaccctcctatcccgggaggagcctcaggtcctctttggcaaagagcaggatccggtagcttgagaagctgtgcagctgccgctgggtgcaccctgtcactcagcaaggcagctgctccggaacaggcactgcttctagaatccacttccttctcgcaggaccagatgtgtcagcaggtgacaagaacaagtccaacgccacctcacaagggctttggctttgggatcccctacctgcagggcctgggttttggagaataaggcttggccccaagagtattcagatctgcagcagagcaagatgggatgcaacatatctagatagataacctcaccccaatcacaggcttcgtgcatggacccggtgcaaagggcaaaggttatgaagtatcacttacccaatgccccaaagagcccttcaggcctgggaggaaattctcaggagagcctgtggaagaagaggttcagtggagggacgctgctgcctgggaaggagcctccagcccttccaaaggccacactttcagcaaacttcacattaaaagacccgccagtgcctgatggttactgagactggtgtttgctagaccctttctcaaaaatgagtcaaggcagggcacagtggctcatacctgtaatcccagcagtttgggaggccaaggcaggcagatcacctgaggtcagagctcgagaccagcctggccaacatggtgaaaccctgtctctactaaaaatacaaaaattagccgggcgtggtggtgtatgcctgtaatcccagctactcgggaggctgaggcaggagaatcacttgaacctgggaggcggaggttgtggtgagccgagattgcaccactgcactccagcgagactctgtct

SEQ ID NO: 161290 - DNA, 136 bp, Homo sapiens
gaaaagactaaaaaacaacacagatgttgatccagagccctaccatcttttggctgcctagctctagacttcttatcacttgaaaaaaagacattcctctttgtgctagactgatacaacagatggtcccagttct

SEQ ID NO: 161291 - DNA, 172 bp, Homo sapiens
tcagctcggtactcccctgcagactcaaatcaagcccatcctctttgctcatgccctgtgtttcagacatctcagttggctgacaatgcctgcgctgttcaccctttctcctggcttgtacatgccatcctctcagcccagcgtgctgtgccctcacttgctggtgaaatgg

SEQ ID NO: 161292 - DNA, 163 bp, Homo sapiens
gtgagagtgtttgctgctctcatgttcccatgcatacagagagggcctgtcagctgctctaggtataatcgagggggctgtcagacagtgcagaaatctagtcacaaagcagctgaggcagggcttagaggcagagctagggtggagggagaatcagagacca

SEQ ID NO: 161293 - DNA, 768 bp, Homo sapiens
ttaccatgtacatgattataaggataatgagaaaacaaatatgaaagtacttagcagagtacctgatatacaggaagcattcaatatatcttaacctataaaaagtaataagaagtgaatgtgcacatgaaggctgccagtctcgtgtctgccagcatccctctgacaccagtgctggtgcacacacacacatggatgccagtgaccctaccccctcaccctgtgccaccattgtgaacattcacatggaggccatcagccctgcaccctccagtccccagccacatctaacaagtatgcaccctgccacactgctgttgctactagtacgtgcaaatgaacacagatcccactgccaccgcccaacgaaggactttggttggcatcacccattggagtgttgtggccagtggtctgggaacaccttggctcctccagtgcagcaggttcataaccttgtggggccagagaacaaagctgagggcccaatacccaacccctcagaattagagcacacagctcaggagggctgaggtgagccttggccccctaaaatcttccagattgaaggaacatcaggccacacaggtgagaaagaactagtgtaagaactatggcaactcaaaaagccagagttgtcttcttacctccaaacaactgcactagttccccagcaatggttcttaactaggcttaaatgacagaaatataattcagaatacggataggaatgacgatcattgagattcagaaggaaattgaaaccca

SEQ ID NO: 161294 - DNA, 444 bp, Homo sapiens
aacgtttcagggcctctccataaggcctctcctgcagggtggttggacttcttacatttcaaagtgtcccaagcgtgagtgtcccaagagataggacagcaaagctaccaggcctgggtttggaagctggaagagtgtcacttctgggttgaagcaggcacagagcccactcaggttcaagtggagaaagagtggatcccacttctcaatgagaggagtgtcagagagtttacagacattttaaatctgccacactaaggatcaacctaaatgggtttccattttcctgggttgggggtggtaagtgtaagtacctatttggatttgaaaatcctgctgaacttattttctctattttgtggcatttgaactttagggacttctctttcttttttttttttttttttgagacggagtcttgttctatcgcccaggctggagtcc

SEQ ID NO: 161295 - DNA, 333 bp, Homo sapiens
agttgccctttttttctcttcagctcctgaagaacaccattttacttactctttctataattttataattcttctcagtgtaattatataatgtctgtttctgtttgactctcattttatttaaggtaatgttctcaggctttgttttgtaagatgtgtcagaatatccttctgttttaaaatgaaataatatgtaattgtatgtatatgtcacatttttaaaatctgatactgatctctaaagggacatttgtgctgtttccaggaattgtcttttgtaaataacaatgaatgaacatgcatgtgtaaatatctatttgaagtcctgcttta

SEQ ID NO: 161296 - DNA, 759 bp, Homo sapiens
gaattggatattgcagacttagggaaaggcaattacagactttgggagaatgtaacatgcaattgtgtattaatggatatggcatagaataaatatggctcatcataaagaactagcgatattggtgtggtacaaaatcaagatacttttgtgacctgctaaatagtgggtttcttttctgaaggcaatggagagctaatgattgatgtggttagaagagtgaggagaatttttcttttcattgaacccttttgcattattgtagaagatggattcaaactaactctatatacagagaaattggcaaaaagtttctggcagtgatctataaaagaaatcagggattaaacagtcacagtgggatggaattgacagattaaaaataggatttgtaagactcgagagactgatttgtatgtagggagtgagatggaagagtataggatgacatattttttcacttctgtgatttagaaagtcctgtcatttactgtggtaggaatttaaggggagaagtttgtgaaggtgaaacgtattgactttgagatatctatgtggaaagtcaagtagaaatgcccagtaggcagtgggaactcagatttaggtgagaagatttagtttaggaatcattcagcttggaaaatggaatacattatcttgtatgtatctaatgtaagaaggctgaaacttcagcttttaaaaaagcagacaaaagaagagtcaataattgagacagagaagctgcctgagaggctaggg

SEQ ID NO: 161297 - DNA, 584 bp, Homo sapiens
cttgcaacaaaccagaaagtgaggtataactattctaattttacaaacaaggtaactgaggcacagaggagttcagcctgtgttcggagtcacacagctggtaacatgaagttgaaacacaaatgtaacttttttctacaccttgtctttttaaaaccaacaacatctttcagacacttgcacactttttttcagataattggtgtatgtaaaggatttcacttcacatggactatttggtagatatataacatcttagatatagccaatatcttgtataggaacaatgtttgtatgaagtaaagaaaaacaataggataatcaatgcaaggtagaaagtgatagcacacttctgtgattaatactaggataactggtaaagagtatatgctattttgtattactatttccataacaatcacatcatgtgtgattgttctgatgtgattgttatcattaaccagtcttttactactaaacttaaatggccaattgaaacaaacagttctgagaccgttcttccaccactgattaagagtggggtggcaggtattagggataatattcatttagccttctgagct

SEQ ID NO: 161298 - DNA, 237 bp, Homo sapiens
ggaacacaagtcacaagtgataaaggtgcaagtggagccaggtgttcaccttggtcgttctgatgttttacctcagacctcagaatccacctttggaggaaatcagtgagggctcactattactgaccacagtttctcacctgtagttggaaagactttgcatatgctaactacaagtataaccttggaaaaacttgaatgtacagagtcagagttcacccattaagcgcaaagcct

SEQ ID NO: 161299 - DNA, 184 bp, Homo sapiens
gtagtatggcccagcttcctctttggtaagttatcatattaaataatgtacacacacccagaaagagaagagaatgaatgacctgtagtcattatttgcattaactcagtttggggaattcactccagaccatagcactcaaggctataaaaggagcaatggttttagaaacaggattttgcta

SEQ ID NO: 161300 - DNA, 392 bp, Homo sapiens
cagagtgagaccctgtctctctgtctttttttttgtttttaagtgtatttctttattagttgatgtttacaaagtatcttttcatacccaccaaattatgttttacttcagaaatttgttatgcctgcctacagtgtagaaatatttccagaagtagttacatagcaatttggtagggtgaccacctttactttaacaaatagcatttgaatgcattttattcacagtagtagaagggagtgactgtaaatagtttactgtttgttctttctggctctattgtcaatttcaagattcatgtggttgaagcttagaggataagaatgttagggtccatagtatgggtattatttttgtaagtcatttatttatttcagcaagggccaaacagg

SEQ ID NO: 161301 - DNA, 975 bp, Homo sapiens
ttctcccctggccgataggaatctgtctagttatctctgaagaaatctccgtatttggttccttcatcctttgcctgagaatattgcctgggtccaggagaatttagctgctgttacagtgtaacacaccctgaaaaaatcagtttgggtatttcaggcccccatttttatgttaactaacttatgattttaaatggtaatccttctgtgaacagggactacttaggatagctgcgatttagcttgcttttattagttcatacctgagataaaagcgagtttttcatgttttttaagcaaatgaaattttagctacagttgaactttgttcccatggaagttattagtagagtctttggtgttggagaaagagtctgaatttccttgtagtggtaataaccagaattttgaaagagaagatgacagcgaggctgcagagggaagtgaaaatgtactaatgatgagtatagatttatttcagagtaaaaaaagtgtagtgtgttaattttagaagcatttcctttcttgatgttttaccttgcaacttgaagtttttcaatatcctaaaatgagctgatttgacagtcaaaaagtatccttgaaaaaaatgacagcttggcatcttttgcctggctgacttttcccccttccatcaggtggaaagaaaaagcagtggtaaatttcaggcatagtcagagggaagccatttttacataattttagtagctcttacttgagtgcttactgtgtccatactatttcaagcatatggatttcatttcaagctgaggatgtgggcagagcccactcccattgcgtgaagtgcaaagtactgtaccaggcattggcgtatgagagtttgtaaaccacacttagttcctgccctctggatgctcctaatctagtgggcggagaccaagagcctaacaaatcatcatttgaaatggtggtagtttctatgaagagtaattatag

SEQ ID NO: 161302 - DNA, 556 bp, Homo sapiens
ccaaggcaaccccacaccatttcataacacggggctaggcacagctgtgccttggtggtccagtcctgtgcccacgtcagagctaagcacttgctacgctcctttttggcctgaaatcccacagacctggttctgagttccttcctccccactcctatgaccttggtcacgtctctgagcctcatgtcacaggtttccacaggaagaatgtgcagatccttcctgaatcggccccatgagccaaatggattgaagaacggctatcattcagtcaactacgcgtgggaaccgccgggatctcctgggggatgggcagtgtacgagtacccaagcattccatttgttcactgtggccaatcacgccctaataaaatgagacccttgtgtgaatgggctctgaaagcagcttacgataaaatctgctcatccccatcatctttacctaagaagaattttattctgtgaacttactcttaaccacattcctaaatgttctcaacatagtgtctactctgtaggaagaaaaggctgctttcaaaagagtcacacctaaggg

SEQ ID NO: 161303 - DNA, 525 bp, Homo sapiens
gcaattcaatgaagaaagatagtcttttcaacaaatggtgctggaatgactggatatccatatgtcaaaaaaagttaattctttccataccttgtaccatatgcaaaaatttaactcaaaatggatgctagactcaaatgtaaaaacctaaaactatcaaaacttctaggcagctttatttgtagtcaccaaaagcagaaataacccaaatgtccttcaactggtggtaaatggataagcaaattatgttatactcatacaatggaatactactcagtaataaaaaggaacaaatttctgctaacacaacaccccggatgaatctcaaatgcattatgctaagtgaaagaagccagactcaactggctacttactatatgactccatgtatatgacagtctggaaagagcaaaaaaaacatataaatgagaaagaaatcagtggttgccaggggctatggttggggaggaaagaaggactaccaaggaatattggagggatgtggaaatagaggtactggaactg

SEQ ID NO: 161304 - DNA, 447 bp, Homo sapiens
tcaatgttgatgattgctggctgatcaggagggtggttgctaaaggctcttatggcaacttcttaaaataagacaatgaagtttgcggcatggattataaagggggaatcagtacttaagtaaggtcaatataagttttcaagttaggtggacctgaatatgaaccctccaggcctttccaccaactagctatagagccttggacacatcttggccatagctggccccgacagacactctcccagcgggtgagtgctcaatgaacccatctgagccagttgcctcacccaaccagtgatataattccttccttgcagaagaataagtgaaaaaaggcacagtgccaagagaatcagacacacgaccggcggaaggctgtgccagtgctctaaagcaagttctgcctaaagcggcagaaacatttttcacattaggaacaggagttgt

SEQ ID NO: 161305 - DNA, 152 bp, Homo sapiens
ctcttcctcccactccttcctcagcaccttggcagctatgggaagctggaggaggaggaaaaagggaagacgccatgctccattagctctgggttcacactctcacagctctgatggacacaacttagtcattcattctctcaataaatata

SEQ ID NO: 161306 - DNA, 120 bp, Homo sapiens
aattcttatgccaactctaattgatcagtagtggctgcctagagaactgtgttgagaaacaacattttgagatttctttttctgagaagagtaccctaatggattaactgtgtctcgggg

SEQ ID NO: 161307 - DNA, 209 bp, Homo sapiens
aggaaattcaaatttaattggcaggtgtaggaagacaaggagatgacaaaaggaactggaaatgagtaatcagagacagaaaagtaaaagtaagagtagaatgtcatggaaggcaaataattggaatgtttcaagatcagggaaatgggcaataaagagaagaaaaaaatagtgaccagagggtatagtaatgtgtagaaattcatcct

SEQ ID NO: 161308 - DNA, 413 bp, Homo sapiens
ctcggcctcccaaagtgctgggattacaggcgtgagcccccgcgcccggccttttgttgtatttttaatatagccacatagcctgatctcttccacccagccccagtgaaagagaatggggttaagccatctaaactcccagccagaacgcactctctggtaacaccgatgtgcctaataccacgtggttttttcctcacccattttatacggggaataactttttaaaaatctctttgccatagcataatagtcatcactggttaaggaaagacacataaagagatgttaagcaggatacaatcgcaaggcatctcaccataaaatgagacgtgcttattaatgacacaggcaaacagcactaggaatggacaagtccacattaggtgcctcctgagatggtgtactgagaa

SEQ ID NO: 161309 - DNA, 901 bp, Homo sapiens
ttatagggccacaagcatgattcatacaagaaggggaagggtccattttaggtggtgatagcagtagtagacatactgtggtgggagcaaattggcagcacaaacctgaattctgtcattttagtgggtgagtgagtagtgatttaatcaaacttttcgcaaatgagtgcgaatgcaatagacagctgcacagtactaaatcctgcagcattaaataaacggtttgaattttgtatgaacataactttgaatgaaaaagtaaaatgtacaccctttccatgtagaggtgccacttcggagtcacgaacaaatctgtgtcatatggaaatgtgcacagtttcctacccagcctctctggtgccaactaacttgtatttgtgagagcctgaggaaaggaagtcagggtcattcagttcactctgtgtcttacaactttactctcgcttttgttattgaaagcagaaggaggcattatgtcagcgtatcttgataacagtttttgcctgactatgctttttccttttagtgttacagttttaatgtaagacaaatctttgaccattttttatgtatcctttcaaatttataattggtagaaatacttttaaatatttttgtaggggccaggcgcgatggctgacacctgtaatcccagcactttgggaggctgaggcgggcagatcacttgaggtcaggggttcgagaccagcctggcagacatggcaaaccccatctctactaaagatataaaacttagcctggcttggtggcacatgcctataatcccagccacttgggaagctgaggcaggagaatcacttggacccaggaggcagaggttgccgtgagctgagattgctccactgcactccagcctgggagacagcaagactccgtttca

SEQ ID NO: 161310 - DNA, 466 bp, Homo sapiens
agttattccaagcaggcagtattataattttacatgcattttctcatttaatcctctcaatgaccactatgaaatcgtatattattcccatttcacagatgaggaaaatgagacataaattggtaaataacttgtccaaggtcaatagctagagaatggtggagttaggactctaatccaagcaatctgatgttagaaaatcatactcctgaaaaacagggaaaccaaggttcaaaaaggtgaaatcacttgaatgtctcacagtgagttggaatttggactcaggtgcactagtgcatattcttctacatcatgctatagaagagagtcggggccgggcacggtggctcgcgcctgtaattccagcactggggaagccaagatgggcagatcacttgagctcaggagttcgagaccagcgtaagcaacatggcgaaaccccatctctaccaaaaatacaaaatta

SEQ ID NO: 161311 - DNA, 220 bp, Homo sapiens
attccccacctcagcctcccaaagtgctgggattacaggaatgagccaccatgcccagcctatttttaaattggattgtttggtttgttgttgttgttgttgagttttctgtgtgttctgaaatcaatcccttatcagatatatgatttacatatattttctcccattctgtgggttgcctttttactctgctgatagcgtcctttcagacacaaaattt

SEQ ID NO: 161312 - DNA, 481 bp, Homo sapiens
aaggatgcttaaggattctttccctcaaaaataagatcccttttgaatcttcatttctttgaaggaatcaagcattcttaaggattcttttcctcaaagataagatcccttttgaaccttcattactgtggtattatttaacatgttaggtattcagtagttactgtgttaattgcttatggagctatgtaagggagatatcttttcatccattcagaaagcatatactagcaagttccttttagatgtacctactcatgctgtgtccctacagattgtgcttgaagtggttgcattctgccagacaccacctaactatgagtatgcagtgatcatgtaaaatttttttttttaagatggagtcttgttctgtcgtccaggctggagtgcagtggcacgatctcagctcactgtaaactccgccttccgggttcaagtaatgctcctgactcagcctctggagtagctgggagtacaggtg

SEQ ID NO: 161313 - DNA, 294 bp, Homo sapiens
agtagtggactcagtaaatggagttacttccctttttcattttcttagagccaaagaatgacagaagtatggttttagctcacggccctgtgtgataataatgatcacttgaatgtgaatgatagtgtcccacacgtgaggccccgctcccacacatgaccaggtagaggggagtttggtgctagcagattctccctcctcctgtgtctgtcatcctccaactccaagtacagaggcctcagcttccagggagcagaggcaattttatttttaatcctccccgtggcctcaagc

SEQ ID NO: 161314 - DNA, 343 bp, Homo sapiens
  misc_feature (3)..(3): n is a, c, g, or t
  misc_feature (21)..(21): n is a, c, g, or t
agntcctatttcacctgctcnaggggaaatgtggagaattaaaaagggtagtgaggctggcatttatagaatctggctttcttgtattgggtggaaagctagatgaaaccagtttctctcagccttttctctcctcaggtcttgctgcccaccttgtgtgttagcccagattctgcaaggaaagaaagggtcgagggagggagctaacacttactgagatccttctttgttccacatcctgcatctggcgcttgacaggctttattgcatttgatcagttatgtgggcagtcagtattcccatttgagtggagagaaaaccaaggcaggtgaaatggaaacgt

SEQ ID NO: 161315 - DNA, 445 bp, Homo sapiens
agtcccaatcactcccacacaaaaaagaaatataatcccacacctgtaaatgcctaagtggactgtgccatccctaatataacaggtagcttgtagtcaaagaaaagaagttaagaagctggagcgtttccaaggtgattacagagcaaagacagacctgtcaacatactaactccaggtttacaaaaaccagccttcttgaagctcacaaatagggttaaactacatagtgatttagccaaataacctttctttgaacttcataaatctacaatgaaatgagaagagtgaaatgaaaaagggctgtaagggtcttccagctaggcagggggattgaacctctctcctcttgaatcctccctaaaatgacagtgaaagaataagaatagaagaaagccttggcatagacaggactggagagaaaatttagacttatttgtagact

SEQ ID NO: 161316 - DNA, 260 bp, Homo sapiens
tgagtggcatttgctgtcctagttaatcagagggtaggagaaatgaaaaactctcgtcttcccactcccatgaagtttcaatgggcactggaaatgtaggtcaaattgcatcaccatagaaaggagcgaacaggaaggtatttatgaagtgctgccaatgtctctttagattcagagtcatgacgaactggtattgagcccgttaggtgtgagatacagggaatcagggggcatgtttgtgatgtagtgccagaatgtta

SEQ ID NO: 161317 - DNA, 493 bp, Homo sapiens
tactggctcggctggctgtggattagaccacacctgctacaaatcaacaaataatgaacttcggatgctgagaacctgaaacactacataaaagagggcataaacaaactcttctttttcaacatatgatgggcgattgaagcggtcagtggaagatagctgtgcacaagaatgtgggcctcctcccttgagccaaggtctgagttttatgattcctaacttagagttaaaagaagcaagccatacaggtaaatgattatcaggcagagaggcttagaatgcattacagttatgcaaaacctgggtttttcataggtgttttcaatgttggcatgaacagtggagccaaatagcatcttgtagcccctacgtgggcacgattctttcctgggcgacaccgtctgcataccccatggtgacattcctgtgcgcttgctacagttggctagtaatcctggctttgaagaaggttttccagttccaatcaccatgt

SEQ ID NO: 161318 - DNA, 620 bp, Homo sapiens
ctcagagtgcggagcagcgggggaactgagttcttcacgcggtcggcaaccaagttcaagggtgccctggcccagaagttcatgtttgtggatggagaccgggctgtgtgcggctcctacagcttcacgtggtcggccgcgcggacggaccggaatgtgatctctgtgctgtctggccaggtggtggagatgtttgaccggcagttccaggagctgtacctcatgtcacacagtgtgagcctcaagggcatccctatggagaaggaaccggagccggagcctattgtgctgccctctgtggtccccctggtgcccgcgggcactgtggccaagaagctcgtcaaccccaagtacgcacttgtcaaggccaagagcgtcgacgagattgccaagatctcctctgagaagcaggaggccaagaagcccctggggctgaaaggcccagcgctggctgagcatccaggggaactccccgagctgctgccacccatccacccaggactgcttcacctggagagggccaacatgtttgagtacctgcccacgtgggtggagccagacccggagcctggcagcgacatcctgggctacatcaatatcatcgaccccaacatctggaa

SEQ ID NO: 161319 - DNA, 442 bp, Homo sapiens
cagttaaaatctctggtttaactgtcctcctataaagtttttcctgagttcctcttatgctgaattagccactgcactttttgcaaataatacctatcatagaaacctcctggggtagagattgtaccttattcacctattatctccctcacctgccaaaatatctgccacataaaaggtactccattaatgtgtcaaataactaaatgttgttaagaatcctttcttatatacataattacctcatagaaaaaagtaatttttggtctttctggtgcaaaaggttgcattattttataagatttataaaatattttttaaaagctatgtttcctttgtttttggaataccatagtgattttcaaagaaaacacattatcaggatcatctgagaaattcttttcagcctgaaaatgggcagcgcttcccctaacttgctccc

SEQ ID NO: 161320 - DNA, 232 bp, Homo sapiens
tctaacatatcaaattgacagcagtgtaaatagattaataatactccttaatcctgaaggaagacttcagctactaaagatttcttaatcaagaaaagaaatgcttttcttctttgtcttcgactactatcacaaaagaaaaagaaaataaaacaaaagagagtccttcattgttgaagtaatcccctagaaatagaattcaactacatttacagggtaaaaaattaccagg

SEQ ID NO: 161321 - DNA, 781 bp, Homo sapiens
tacattctaagttcttgcacagtcattcttatccttactctgatcatttgagttcctcacatgccatatagttctctatttgcttgcaccttgaaattcttttgcccctactttgattttgtcttttcttagctcatcagtttctttttgttttgttttgttttgtattactttgtttactcctgtcacagttcgtcttcaaagctcagggcttctgctttcttgtgactgtcttttcatctattttcctcatgtcttgctgtactgcttctcatctctgagcctatgatggtatccgtctttatcacacccactgcctcctccacatttttaatctaattgttacatctccacctccaatatcagtccctaaaaatagtgagacctaagcatcctctatcaggccacatcttgttcactttcttccataatgttttcattagacccaacggtaacctgcaggccattagcccacgctcactgggtcagaccattgacctctgctctcagtactcatttctaacttgaacatagtcattccctctcttaaatttcctagttgattctccagtttctcacctgcttttgccagcctctcatcacagtgaagaccctcagcctgagtttctcccacattcgtgcttgtatgtcagtgttgggagaaaagctaagtgcttgataagctttaggtcttctctgtcttcttaactctggttctacctcaactcccggactcgtccgtccgtgggggacctctagatcgaccagcagcagcagctgc

SEQ ID NO: 161322 - DNA, 381 bp, Homo sapiens
aaacaggttttggaggagtagtgggaacattgggtgatttctagtggggttagagaaagcagtacctggttctttggccacatctaccaaagcaaagacctagacttgtagaggagagtattgtttgcttgtttgaggattgtatttcccaggtttgttcatttgcatgagtggctgaataatgtaacagagacttcagaagtaaggaaaatggttgtcaccaaaatatcttgttttacctttatttggactaaatggaaaacacatgtttaatagctaaggctattgagtgcttatcatttgccaggaactgtttctgagcctttcacatataacacctcattttatccaccctctacccctaacaaatggtgtggtttg

SEQ ID NO: 161323 - DNA, 363 bp, Homo sapiens
gtccctttcctgcaatggagactctgggggaaggcagtgagctctgggggaagctggtgggctccatagactggagacatcaggaggctgtaatgtccgtaattctgtcaggagagaaggcctgtccaaagatgacaatttgtgaatcatggttataggagagtaactgaaagatgccacaggtgaaagatgcggatcagagcaagcacagagcctgaggagaacagaggctgtggagaaatgggcccacgccaggccaaggggtgaccctgctacctcccggaagggaaaccaaggctgagctggcagagccactggtgggggcaggggcacagagagagggccatgccacaggcgatggag

SEQ ID NO: 161324 - DNA, 736 bp, Homo sapiens
ttagctgtcatggcctcttccgcacagccctccctgccatctgagcctccctcccttctgagcctccccaagtccatctcaccatctcaaataaaataaataaaataaaataaatcaggtgcagtggctcatgcctgtagtctcaggtactcgggaggcagaggtaggaggatggcttgagcccaggagttcaaggtaacagtgagcctcaatcacaccactggactccagcctgggcaacagagcaagaccctgtatcaaaaaaaaaaaaaaaaaagtgccccaccctggctggcccagttcagacctcctgcaggagcctgggagctgagccccgcccaggccaggcctccaaggaagcgccaggatcggaaaggaaccgagattagggtttccccaggaaagcagcctagcccccgcccctgggaccagataacccgggggctcccactcctcccagtggggaccgggccttccccaactagtgccctgaaggtgcagaggccactccaccacttgaggtccagtcctggctctgccctgccctggctgggtgagccaggggtcagggcctcactagagacttagtttcgtcatctgtaaaatgggcggctgctgggagcagatcagagcgcctggcatgaccctggcactgtggtttctgggaggagccgggggctgaaggcagcacatgaggtgcccgcctgggctgccagggacaaacaggaagcagatg

SEQ ID NO: 161325 - DNA, 221 bp, Homo sapiens
atccgtttgtctactaaaaatacaaaaattagcttggtgtgtgacgtgtgccgtaatcccagctactctagaggctgagacaggaggactgcttgagcctaagaagtcaaggttgcagtaagccatgatcatgctactgcattccagcttaaacaactgagatgctatctcttaaaaacagaagtagaagcaaacaactataggggaaaatgagggataca

SEQ ID NO: 161326 - DNA, 213 bp, Homo sapiens
ttcctattggaaaacatcatcccttgaataagcagtgaggcaaacacctgggcacttactttatgaacaggtggggtggggccctgagtcaccgacattgagaggcctctcctggtaaggtttttcaatatcaggttgaatcagcggtgacatcaccctctatagtgacaggtactctaggtgccggctcttactcataagtcccaggagata

SEQ ID NO: 161327 - DNA, 164 bp, Homo sapiens
cgctgggattacaggtgtgagccaccacgccaggcctttttagatattttttttattgtaaaataagacacagaaaaccacacagaacaattgtacaacttggtgaattatcatgaagcaagcactcttgtaatcaccttacttgttaagaaatagaactttgt

SEQ ID NO: 161328 - DNA, 205 bp, Homo sapiens
ccaaatatggaaacaagagtctcctagcatgtttatttacaagggttttattttaggagctctgtgtcaggaatcaggggcagaggagagaagaaaaatatgtggaactctctgcttaattttctgtagacctaaaactgctcttaaaaagtctattttaaaaatccatcattagaaacacagactttctccataataagaagtg

SEQ ID NO: 161329 - DNA, 336 bp, Homo sapiens
  misc_feature (313)..(314): n is a, c, g, or t
  misc_feature (317)..(317): n is a, c, g, or t
  misc_feature (319)..(319): n is a, c, g, or t
  misc_feature (325)..(325): n is a, c, g, or t
tctactactactaaattcgcggccgcgtcgaccagaaggtgaggcgtcccagggactgagggtgtggtgtggcattggatgacggggtttggagtatgactttggggtccaggggacactgttagccttaagtgctgggatgaggagcttggatagctgtgattagattgtgggggctgtggttcctgaagaggagagcatggagcacagtgttagggactttcttgggagatatgtgtaggatagggcaaggctgtgcacagacagaaagaacaggaaagagaagggaggtcagggcagaggaccaacgtcnncgngnccgcgnatttagtagta

SEQ ID NO: 161330 - DNA, 121 bp, Homo sapiens
ctgccggaatggctgtgagaagcagatgaaaattgctaacagtgagccgaaacggggagcgtgaggcttaacgctgtggtacatactggatagaatcaaacggctctatggcgcagagata

SEQ ID NO: 161331 - DNA, 165 bp, Homo sapiens
tctagcacattaaaagtgatggggtgaagatcagaagtggggaatattagcacaatggaatatagaaaaaaattattagaacttcatgtttagcatttggaatgatactggtatcctcgtcacttttactatgacacattatcaatcattatagtttatatatac

SEQ ID NO: 161332 - DNA, 471 bp, Homo sapiens
ctcacgtttgtgatgagaacatggaaaatcctctcttctagctatttggaagtatacatacattattgttacctatagtcatcttactgtgtactagaacacaagagcttattcctgactgactaactttgtaccttctgaccaacctctcctcctgccactgaaggttttcacgggcccagtcttcttctcactcttcatcctctcccagaacacatttattaatgtccccaacttgaaaccaccgcctgtgtaactataactttcaaatccttatctgctgcccagcctctgtcctgaacagactggacattagcaccgggatattccttaagctcttgaaatatcaccatatccaaattcagtttgcctttctgcccaaaagtgcctgctctgtatgccctattaatggtattggtcaatcatcgtggaagtcgttcttgtcctgtttttgctcttgccacatccgtt

SEQ ID NO: 161333 - DNA, 490 bp, Homo sapiens
gagctctattaggttatccgtgatgatcaatcaggaagtgcagcagcttaagagaaatcaaggtggacatttgaatgcatcatgcgtggtcaaaccctttccaaacttaaaacaaccttaaagttcccgtttctgcctgtcattagggtgctttcttgatgcagttaccactctacagcaagcatatactccatgcagcgtatatttatagatttcctgagtgcttactaggtgccaggcactgcttttggtgcttgaaacacattgagcagggaaagggaaataaatgaaaacgttagaatgtgattactgctctgcgtcaagggaaacacaactgtgtatgagaaagtctggagggagtagggtttaatggtcaggttgtaattttaagcagattacccagggcagttttcattgggaagttaacatctggatgaagatttggaggagaagagggaattcgctgggtggatatgggggcaggtgagga

SEQ ID NO: 161334 - DNA, 1268 bp, Homo sapiens
ctaagagctggtggaaggaaagcaattaatataaggaagatttcagaaatgcttcagggagctgacaagagcccaagttagttttataagagactctgtgaagtattctgcctttatacctcatttaacactgaggttgctgaaaatcagcctgtggtgaatacagcatttgtaagccaagcccagggtgacatcaaggggaagctgcaggcatgaataccacccagtctataaaagtggccaaggtgtatgttaactgtgaccagggaacaatatgcaaaagcaacaagtgtggcagctaggcattccaagggttaactccctctccccagcccggctctattggagactggcactgggagaagagcgaaggagaaggtaaggagaaagagtgtgagaagggaaagaagaaagtaaaacggaaatcagaaagaaacaggagagacagacagcaagcgtgtcagtagggtccgtactcttgcccagacccaccgctggctgcagaagcaggagaactcaggaaggaaaaaggaaagtaaattgaaagtttaagaaaaaggccagtctgttggcaacagctcttatggaaagagagattagcaatgtgagaggacttggacgtggacgcagacatggaagaagtcaagttaggcagaaattcaagagccggacaaggctggaaagagattaatgtatgagaagcaaaaagaaaggaccctggaaagatgaatgttcagaaggcaatgacggaaatggctaaggcagcgagacaaagaggccatcggtcaagggctgccgcacctttgaggaaccaaatactgatctgattgggctgccaggagctgaaggatgtaaagactaagacagatcgggcaccttctcactaggcttccaggagcccatggtcacattagaagttaaaggcattatcctcaggtttggactgtctctaactttaaagtcagacaatggactggcatttctagctgaaatagtgcaagatttaacaagactgttaaaaataaaatggaagttacatacagcctattagctgcaaatttcaggaaaaggtggaatgcatgaaccagacactcaaatagctactgaagaaatattgccaggaaattcatttgagatagaatcaggtgtttgcatatgatcctcctccaagtcaggtgcacccccaccaaacaaattgggtatttgcccagtaagattttgttcagtcaggcacccccaaatcaaaagtcaaattaaaggtgccctcc

SEQ ID NO: 161335 - DNA, 319 bp, Homo sapiens
accaaaacaactcccacaaggcccatctccaaaattgggaatcatatttcaacatgtgatttggaggggacaaacatccaaactatatcacctggtaacgttatttgctttgaatctacttggattgatattaacgtagccactccattttcctttgacgggtgttatggtacatctttccatcctttgactttttttttttttttcttttggcagggtctccccattctccaaaattggggatctcttttttcaacatgtgtgatttttatagggggaacaggcggggactcctctagagttcgaccgtgcgaggctt

SEQ ID NO: 161336 - DNA, 336 bp, Homo sapiens
gtggtaggttaaaataattgctatgccatgtatattatgaccctgtttgtgtaaaactacgtccaactaaccacgtctacagtgagaggcctggaatgattctgccaaaatgcaaaagtcattgcctcggggtggtgggattgcttccatgtcatccaaatcttgttttacaaatatgttttaaacagaagagcttttttaaaaacaacaaagttttatgaagaatttaatgatggatatgcttatgatatgttaggtctttaaagataatccaaattataaatacattatgggtttaaatttaagaaaagtaagaaaatcacagactccaagcaa

SEQ ID NO: 161337 - DNA, 416 bp, Homo sapiens
acttctctcccctaaaaagcagcactgctttatgtgaaacaatgttacaacttgttttgtatccttctgcttacttcaaaacacacaaagcaaatgagaagattgttgacagtgacagtaaaaaagtttagacgactctatataggattagaaaagataagactttatttaatttcattttcactaagaccagccgctaatgagaaaggcagctttgcataagaaacgggttggtgctgggcgcggtggctcatgcctgtaatcccagcaattaaaatttcaggatttaaaaattatggcctactgcccccagacaaaaggccataatttttaaatcctgaaattttaattgcgggggaccaaatttcagaagctaccttatttataggttactttggacttatttcactatagct

SEQ ID NO: 161338 - DNA, 352 bp, Homo sapiens
tgacctcattatgcaccatgcaagtgtctgatttttttagtttgcttgctggtttgtttccgagacacagtcttgctctgttgcccaggctggaatgcagtggcgccatctcagctcactgcaacctgggcaacaagagcaaaactccgtctcaaaaggaaaaaaagatttgtattagaaggaggggccttctctaaagtaatgaatccttttttttccctccccaagcaaaaaatccttctctaaaattaatcatctttctaagcctggtttaatgtttttttggaagactgcttatttcttttcctttcgaaagttatgcaagctcattaaaaaaaaaaaaaaaaaaaaa

SEQ ID NO: 161339 - DNA, 268 bp, Homo sapiens
agttttgtataaagtttaagcagttatacagactcaggtgcaaaaagttattccaactaaattaagaaatactgtttttgtaagacagctttttaaaatgacaaagacaatagagttttagatataaattatggctctcagttactcatgaattctcagaatagtatcattctgtggtttttaactattataaaaaaattctagaaaaaacttcagagataatgttatgacaaaccccatattaatttgagtctgtattaactgcttg

SEQ ID NO: 161340 - DNA, 182 bp, Homo sapiens
caccaggacacatagctgctatcatcatcccttctgggaccaccttacacattctgcctctgtgtgaggcacaatccctggcctcttccactcattcctttctcccccttcaggggctcatttctgtcatactcctccacatcctcatgagcctccccttcacagattgctcagcgctccta

SEQ ID NO: 161341 - DNA, 143 bp, Homo sapiens
cattgtccccccacctccatcatcccactttgtctgcaccttgccagggagggggatccctgttagagcttcccagtgaaggcaactcctaggaatggctgaggaaaaggagcacttgctggtcaccctggctggactgggat

SEQ ID NO: 161342 - DNA, 561 bp, Homo sapiens
gttctggttcttggataacagtgttgacatttgccattggacaaagcatggttagctacttgcagaggccagatgtgtatatgacctggctgtaggatgcctagacaggtgacctggctataggatgcgtagataggcagcaggatgggagccacaggacagagctgtttgtgagagcatcatttggagtcacaaaaatacaggaaaaacctggatggaaacagcctttttttttggagacagagtcttgctgtgtcacccatgctggagttcagtggcatgatctcagctcactgcaaccttcgcctccctggttcaagcaattcttgtgcctcagcctcccaagtagcttggattacaggcatgtgccaccatgctcggctaatttttgtatttttagtagagtcggggtttcaccgtgttagccaggatggtttcaatctcctgacctcgtgatctgccctccttggcctcccaaagtgctgtgattacaggcgtgagccactgcgctcggccagaaacagtcttctttaggggagtggttgataaatcatgacaatg

SEQ ID NO: 161343 - DNA, 342 bp, Homo sapiens
cctcctgaatcccagggctgcccagctgctaaggcaccagggactttcacacccctcacagccactcccgctggacagatgggaaaaccaaggctcaggcaggtctagtgacctgtagtcactcagccctcaggctgtggctggaggtggcacccgggtttgtccagcccagagctcgggccacatcttcgtaaggactttcacacacacattttgtcagagtcccagggcataatttaggaccagggagaagaaccaggccctttatctcggaaacaaactcagaaatataaaccacctcattccaaagacaagagaggcccctgcctggaattctcaccc

SEQ ID NO: 161344 - DNA, 474 bp, Homo sapiens
tgatattaatattttatatccacatttgcaattatttagaagcacgcatgtatttgttgcttaggtttccataacaaaataccataaactgagcagctttaaacagccgacatttatgttttcacattctgaaggctagaaatctgagatcaggttccagcatagttggattctgaggagggctgtcttccttactaagccaccttctatctgtgccctcacatagtggagagagatctctttctcttcctcttctcataaggccacagccccattggattagggccccacccttaacaacctcatttaactttaatttcctactaaggaccctgtctccagacacagtcacactgtggtttagggcttcaacatataaacttattctgtctgtagcaatgtgtaatttttccactgttaacaatatgtatctcctgtgttactcttatatgctggcattttagtgcacaactc

SEQ ID NO: 161345 - DNA, 386 bp, Homo sapiens
tgtgtggatgtgggaacgtccatgcagttgtgtgtcaccacacacctgtgtgtgtctctgtatacaccggcttacctgagcatacaagcctggccaaccggcttacctgagcatgcaagcctgtctaagcacactctgtcgacccagggcccgagacatacatgtggctctgcgagctccccttgcagtgtgtgtggccactgctcacagggtccagcactggggtcagtggagatggggaggctgagactggagagggccagctctccccaggggtcactcaggggctatggctggccctgggctaccagagggtacggggtcgtggagggccatggtcctgctgatgaggcagccttggtgaggggccatggagctgaaccccg

SEQ ID NO: 161346 - DNA, 185 bp, Homo sapiens
atgatttttttctttttaaagcaaaaagtttagtttattgccgtttcatttgctttcttgctgacaagataacaaactccatatgaagagttcaggtttgttgtggcaacttttcagtgtggcatttgagattctaatcttcctctattttggcacacaaatacgtaggtggggcctcacgccaa

SEQ ID NO: 161347 - DNA, 568 bp, Homo sapiens
cagaccacctgagttcagagccagctctgtcacttactacctgtaagacctctttgttgcttaaattctttcctcagtttcccaatctgtaaaatggagcaatacatgcctcacaaagtacatacctcataaataatatataccttataaagttagtattaggatataagagaaggaatataaacagctagaataataatacctggcccatggtatgttctcagtatattatccattgttattattgttgttgttgttgttgagtataattatgaatcttaccattatatgacttggcctcacacataaatgtggcatgattgtaagggagtatggtttaaaaacaaaacaaaacaaaaacctcctctcagaatttctttcacactgaggtataaatatctgatgacatattacacatttctcattcttacattcaataaaccttactgagcacatattacctgccaggtgtcaggctgggagatagaatacaaagatatagttcccactcccaagaaacccaaagccaggtaagagcaacagacgatgagtaaatcatgacagagta

SEQ ID NO: 161348 - DNA, 442 bp, Homo sapiens
aagttcttccaaaattctatacaactttgtatttttgcaatttgaacgcagagaaaagcatgaagagatggtttggaacaggttctttcttgtctggaagctgattctgggacagtttttctttctttcacagtaatttccagttaaatggagatgaactgcatgctttgaagacagtttgccttgcagtgtttctactagtgttactggtttttcacactttgtatctaattattttatctccatgacaaatgcaggataaagttctccattttctgaggaaagtcatgtttttccataagaaacatcacgattgtccatgctggacttttctatctggggccacgcagccttttccatctcctctcccaggtttctcttgttctggccctgcggtcctgcagctttcctgcctttccgttttctacacaatcattcttcc

SEQ ID NO: 161349 - DNA, 272 bp, Homo sapiens
ctggggcaaatagtaatatatactcactagtggggtttcaaagagtaaacgagataacacaggcaaagcccagtgcctggcacacagccgtgatgaacaactgtaatgggcattttaccattgtcatctagattaggaggtgaagggtggaaaattgggaagcagctgggctctaggtagcccagtgaatacttgagacttaacctctttacacctcagattcattgtctgaaatgggggctaacaatacctacctcttatgcttgctagag

SEQ ID NO: 161350 - DNA, 274 bp, Homo sapiens
gtggtgaagaataactgtgtccgagactgactccagcccacagtgtctgacacagtggggcaggtactgaacacttggtaagtatttcactttgacttttaaatggaaaataaattatatttcctgagtaattccaaccataacaatcaacatttctaagagccaattattttaagacggtgagttccaaatcataaaatgcaatttttaaaaaattgccacaagaggcattccttcacataactaacttttcttgatgacttctctaattctg

SEQ ID NO: 161351 - DNA, 462 bp, Homo sapiens
aggcttatagtcccagctactcaggtggctgaggtgggaggatctcttgagcctgggaggtcaagactacagtgagccgtgatcgtgccactgcactctagactgggcgacagagcaagacctgtcaaataaataaggtgcagtagccatttctgttaccataggaagggccaaactgaggtcaaaaccaaggaagcccagcaagccacagagaaataaagtcctgattatgttataaacccaatgattaaaagtaaagcacacctgaatatacacctagacggcctacttatagcttttaaagaaaaactctgtttctgccaaagaaacggttttttctggtccttgagacagaatcctacctagtttaaaaagaataataattctcaaccttaaatttaacccacaggtactaatatcacgaactagtaaagtgttgtgtgtggtgcctcacgcctgtaa

SEQ ID NO: 161352 - DNA, 178 bp, Homo sapiens
ggtggtaaaaaggttgatgggtaggggtggcggtatgtgccttcaggagagctaggcaggaggattaggcatcagagaggggctacagggcagggggcagggggctgaggttgagctgaccccggtggtgcgttggtgcggggaggggcctccctgactcaacccctgtgccctccct

SEQ ID NO: 161353 - DNA, 186 bp, Homo sapiens
tgtacaaaaatggtgcacacattacacatacccctatctcactaatgaatttcttacaaaagggccctcaaagtatcactgagaatcgtgccccatcttagagcctttcactggtacgtccctctccacaagtgcttttctcccatatattacgttagactcccatattacactcagattattgct

SEQ ID NO: 161354 - DNA, 534 bp, Homo sapiens
agagaagaaagcatgttaacacatgaaaagctgtcagaaaaactatcaagaaagcaagttaatgcatgaaaatctatcacggtacaagacaaaaataacccacacagccctgagtgcttctgatacagtggtaaaagcaaacgccatattactacagatcaaagtgtcaaatggtcaggaagaaaaagagcactgacaaatacatatactggtaaatccaaagattcctttcccctagtaccttagcactatcattaagtataaaagtaattatttttattcccttttaaaaccaagttttctatggaaaattaaagatatagataaatcactactcctatgttccagacacttatctcaaagtgagtacaaatgactggatcctagaaaatgaagtgtattatagaaatcttatcaaccttctttacttactagaccaaaccagagcaatgcaattggattcacttgtctgtctcttcccctcttcccccaagtttgtgagcatgtaataaataaatgttaattcttatttgc

SEQ ID NO: 161355 - DNA, 242 bp, Homo sapiens
ttggggtactctatagctgacccacattagcactcactggaccttcttcatgctgctctgaatgctattaacataaagtgaaccttacagatagatctctaaccagtgttacccacactcaggccccttcacagctacgaccatccttaacacacattccagtccttccactgtcctgtcccctctcccaccgtgtccctcccgaaacatgtgggaagttatgggagtacaattcaaaacga

SEQ ID NO: 161356 - DNA, 603 bp, Homo sapiens
catcacataatttgtagactcatgtaaacttatattcattcccttattaaacactgtgtactgtatataaggtactacgaaagaggcaaagtcccttctctcttagagggcttgtatatttattttacttaatcaaggccttatcatgtccttcattttcccattgctcaaaagattgactgctgtaaattaagccatgtgtactcctacagccaggtcttaaaggaaataaaagctataaaataagatttcaaaatgatgtctgccttccctgacatcaactaattgcatgatttacctccatttatacctcctttcttctacatgcaataaagaatctcgttttgaaaccttttccttatctttaatatttaaagggaatttaaacatttctcccaaaggacgttttgttcatgggcaaagtacctcttgaaaatatacagtgggtaggagaagcacaagaacttcgatgtggtacagaaaggacgacaggtaatatgagtatatcagtatatacatgtggacatcaccataaagtttctaagtcctccattttaaaatatatttttatgtatatagttaaattattttcagctattaaga

SEQ ID NO: 161357 - DNA, 594 bp, Homo sapiens
gaagatcaaactatgtgctttttcttcaacagcggaatgaactgcagatggagtaagggaaagaagaatcaaaaaaagcataagcgttttaagagcagaataatcgcattaactgatccaaatgcaaatgcttcctcatatctacaccctttggttatgccctcgcacaccaacactgggcttggccacgtggcttttttattgttttttaaatgggacagtaacaacttaactcaatcaaacttaatcacaaccttgaaaaagtttgtgagtttcctcttcctcttaagccggcccacagaaaacccaccatctggccacagatgcatggaaaagacccactgatatcaaccaagcctggcacaaatcagcagaaacattcagctgacccacgggcgcagatcattttaagccactatgctttgggaagatttacaaactgcaatcgctgatacaattgtcttcaatgtttaaagagctaaactatgcaagagaaagtttaaatccttcctgttccagttccactaaaagagaaaaaaaaaaaaacattgtactgataggaagacagatttcattttaagaaagtattttcta

SEQ ID NO: 161358 - DNA, 140 bp, Homo sapiens
acctgccagaggaccaaccttttcttatagctatgcaaggcctcagtcatctctggaacttttcatatcttttccatcattatatgttagctttggacatgaggttttacttttatgttgtaggagaaaacactagtata

SEQ ID NO: 161359 - DNA, 326 bp, Homo sapiens
ataaggaccctagtcactggagccacagaggttattcctggaactggaagctagatgctaagctctcacttgaaaataaggtttctctttcctctggaatggaggtctcaactggaagcaaagctggaagcaagaaaaacttggcttggaaaaggggtttagagttgcctgataaaatggttcacagcacccccatgggccttagagatttccttgtagcctggggtcaggagtcatccatttttgttctttgttctttttcagtttcaattctgatttcagaccatatttccttcccgccacgtcctcaatttctcactttgaga

SEQ ID NO: 161360 - DNA, 237 bp, Homo sapiens
gggagattaggacagacaaagaccaagagagaaggggggaagagtgctgatgggagcccccaggcccaggcaccaggatcatgacagaaggagcccagtgctccccttcacctcttttcagagtctccacaacccctcagctgctgggggtcagggagctaaggggagtggggtctcctgggcttgggaaggtggttgacggggctgccttgtgagccctgtctggggtgggctggg

SEQ ID NO: 161361 - DNA, 171 bp, Homo sapiens
gggattacttaccctacacaatgcatttaacagcacatagttcatagtagataacccctgagtatactgtattccattgatttatacagttacaaatcctgctctctcaaatacaaatctctctcaattggccagtcatcttagatctaaaggtgtttttcaacctgaagt

SEQ ID NO: 161362 - DNA, 407 bp, Homo sapiens
tgggaaatgaagaaaaagataaacatctttaaaaaaatcaatcagaattctggaattgaaaaattcacttaaagaatttcagaatacaatggaaaaatttatcaatagagtagaccaagctgaagaaagaatttcagggtctgaagaccactcttttgaactaacccagtcagatagaaataaagaattaaaaaaatgaagaaagggtttgattaatatgtgattatgtctagcaaccaaacctatgaattattggcattcctgtgagagaagataaagtaaacaacatggaaaatgtatttaagggaatacttcaaaaactttttcaagaaaaaagagcaacaaagtctggatgacagcacatctgtttgcatcataatttactgaatatctgaggaccacttttg

SEQ ID NO: 161363 - DNA, 183 bp, Homo sapiens
attgcaggcatgagccacaacaccaaccttcagggtttcttgacctctactcagggagccttctccactctgtcagccacccatattcacacccatgctctggagtctagagcctagacatcgtcattgtcatgaactgtaccatatctgaacttttaaggcccttgagcccctgtcctcatt

SEQ ID NO: 161364 - DNA, 297 bp, Homo sapiens
cttaatttccaatcattatttcagtctcattaagtatatcttacaaatttttgatgccgttattacttttttaatctccatgatctttgaaggcttggaaattgtgttaaaggctcacacagcagtcttgcaaccaatttacctttgttctaagaacttttggttgatgtatttagtttaggtagatagctcttaaaagaccattttcctagttcattgcatcttttataaaaataaaaaatcctctttggtttaatgattgcgccttaatttctattttgtctgatgttaattctg

SEQ ID NO: 161365 - DNA, 349 bp, Homo sapiens
gctaattcattgccaccatcactgccgtccttaccatctcatgtagggagcccttactaggccaaatggctgcaattctaatggctggtgctgatgtcattcccattttaccactaaggaagcaggttttgaactcaggctatcaggtaccactgtacacacttgtgaggagactacctatgacctaaaaattttgaagattatcaacagattactaataactaagtatgataatggaactcaagatgaagctcaagaaacaacttatttaggaaagctgaaaatcatcaatggcaagactaatttttcaaaggctttggcagtcccccagtgctctaacagaaggctg

SEQ ID NO: 161366 - DNA, 286 bp, Homo sapiens
taaataaaatcagattcgagaaaagaggactaaagacatagaaagagaatagaaaccagagaatttcatttccaaggttgttcaggtaggctagtttatgctgtggcaacaaacgtcagtgtgtctcttccatgctgcatgtccagcgtgggttttgaaaaaggacattttctttctcgctaacactcagggacccaggctgatggaggctctgcctttctgttgctgcatagctccgctgttatggccacagaggaagaagataataaagtcaatttttatccat

SEQ ID NO: 161367 - DNA, 253 bp, Homo sapiens
taatggattcatgcttgtgctcttgatagcgggagaggtatgagtgagaagaacctacaagaaccacatcagctgacatggtggctcatacctgtaatcccaactctttgggaggctgtggcaggcggatcacctgaagtcaggagttcaagaccagcctggccaacatggtgaaaccctgtctctactaaaaacacaaaaattagccaggtgtggtggcaggcacctgtaatcccagctattaggaaggctg

SEQ ID NO: 161368 - DNA, 202 bp, Homo sapiens
tagtcctagtccacaatgccttcatcagacaatcttcagcacccactgctgcggtgtgtgggtgagacccagacacctctccctgaggtctttcaatggcttcgattgccctgcgaatcagtactaaattcctatactacagtgctgcagggaagtctctcttgattgccctcagggctcctccacctaggaaacgtgctca

SEQ ID NO: 161369 - DNA, 567 bp, Homo sapiens
gtctttgctgtactctccccaaccgtgcaagttgacagtgaccataatgacctagcaggcctgggactgcgctctgaccgccaagggggtgtcgcggagggcacaacatagtggagggaacaaagatgccaacaggccaggacacaggaagtggagtctggagcagcccatcagctgggttgccaggacctgacaccaccagcgcagacttgcagtgcagagcctaagttcaagagaaagggctgggcttgaagtttcacacttttgtttcatgcttttgcaggaagaaggagttgttatgatgacttcggtttaaacagattgggaacattaaggataggagtttgggggagatacgagaaataagaatacagacgtaggagttagtagcaaataaggttgctgtgggcctgaactagacccagaggatgccaggatcaaacccctgagaacaggctatattgagggggtaggaagaaaaagaataagcaactgaggcagcatggaagggaaagctcaggaccctaatgacgccttcggccaaggtccaggataacctgaagtgtc

SEQ ID NO: 161370 - DNA, 338 bp, Homo sapiens
agggggaggactgtggggctgagcagaggcaagcctgggtctctgcttcccaggggacagaggcctcctgctcctgcagttcctatgtcttttgttggactccacgtctaaatcctcatcccttgttgcccgactttttgatgatggcctctgtctcctagacagagattctggtcaagctgcctggtttcctggacgtggacatggtcaggacctcacccacgccctaccgcttcctatccttgtggttgaagacgccctccgtttccatgttacttctgacccacacctgctgtctgttgctgcgcagctcctaacactgcaagggaacaaacaat

SEQ ID NO: 161371 - DNA, 329 bp, Homo sapiens
ttgttcttagggggtaaaaaaacaatcttactcattttgagtataaagtagagatacacatacagtacctagaaaaatacacggtggtatagacatgtctgtggtatgaaattttatggagggagggatggtgattaggaaaaaaactgcctagaaaaggccccttaagggggcgattaatgacaaaggttgaaaaacgctggttttaaatgaaacattaatgttaatacagtaacacaatataggtacttattagggatccttgaaatctgtagatatcattttctgttggaccctttctctaattcctgagtatttggtactacttc

SEQ ID NO: 161372 - DNA, 323 bp, Homo sapiens
cctctcacaaagcggcgagtgttcccagttattactcggagggccgggcctgctcaggagggttggtgagatcaggctgtcccctaacacacaccatggcagggctcatcctcctgagtacatgcaaggtgcactgagccggctccccatggaactccaaaaatagcccagctgggaagaaatggaacgttctgggggacactgattttcacattgaaatttcctatctttttaaatttattttggttgagacagtcgcccaggctattgcccagcctggagtgcagtggcatgatcgtagcttatggcagcctcagcctcct

SEQ ID NO: 161373 - DNA, 107 bp, Homo sapiens
ggcccagtcaagctgtattttctgtttctccagcctactatattctaggaggcccagcccattgtttcccagtcagcgaggcactgcagcttgactcaccacaaaaa

SEQ ID NO: 161374 - DNA, 531 bp, Homo sapiens
tcgatcgagctcggtcctactttccacaggttataagcactatagttcctattagtttagttttgtaaattaaaaaaataaacagccaatacaatagtatcagatatagcatgaaagtaactttagaacaaaatcccacatttccatttatctccctaaatgaattttaccactttaaatactgacaatttgtttaaataaaatattaatttgaggatgttggaaacacagaaattattgctgaaaacatcacattaagtaactgagtttgtaataagtcccatataaaagccagctaacccaattttgcaaattgcttgaaattgcagatgaagatattaacaattcttttattaaaggataaagtgaccataatacccaaggcactacgctgattaaagcaggtgcaatggaagataacccataagcttcataattccttggataatagatcagtgattcactgtaatgtgcttattaagcaaaatggaaaattgggtcaaattagacagtgagatggagttgtccata

SEQ ID NO: 161375 - DNA, 568 bp, Homo sapiens
tcccaacactttgggaggccgaagcaggaggatcacttaaggtcaggaatttgagaccagcctggctaacatggcaaaaccactgtaatcccagctacttgggaggctggggcacaagaattgcttgagcccaggaggcagaggttgcagtgacttgagatcgcatcattatactccagcctgggtgacagagggagacccttgtctcaaaaaaaaataaaaataaaagtagaattaccctatgttccaccaatgccattctaggtatttatccaaaagaaatgaacatcactgggtgcagttgctcatgcctgtaatcccagcactttgggaggccgaagcaggcagaccacctgaggtcaggagttcgacaccagcctggccaacatggtgaaaccccatctctactaaaaatacaaagttagctaggcgtggtggtatatgcctgtaatcccagctacttgaaaggctgaggcagaattgcttgagcccaggaggcagaggttacagtgaactgagattgtgccattgcactccggcctgggcaacaagagcgaaactccatctc

SEQ ID NO: 161376 - DNA, 272 bp, Homo sapiens
aggttcagtttcctactcctcacactcctgaaccaaactgctctgctctcatgagccctaaattttataatttccatgaatcagccatcctttttcacatccttgcatttatgcatcctgttctatatgcctgaagaaattctccctccttccctgctttcatcaaaatccagctcaaatatgatctttgtcaaagaaaaaattattcattacacccattaaagaatggtaaggcagactattcaaagagtactattacaatagttacacag

SEQ ID NO: 161377 - DNA, 293 bp, Homo sapiens
tttgggtctaggaggcctcccctctctcatccactggcagcggaggctggagccctgtgcagagcagaaatctgagggtgagtctggctcagaagggaagtgggtatcacagaactgtcttccctggacttgagagtggggcatagatgcacgaatgtcaccattttactactgtttgtgtagggagataaaaacagaaaagattaactctttgattttcaaagctctgagtgtttaaaagagcacacagaaaaagcaagcttagaattctaagtggagcaaagactctagag

SEQ ID NO: 161378 - DNA, 495 bp, Homo sapiens
tctgtgatgcaggtatttcagcccctgctgtaccaggcaacaggattagacaggttagtggagcatcagatttccgactgttaactttttcacttttcttctctgcacgtaggcttgagaactgacaccaagacaggaagagggaaagtgatagaggcaaaacggaagattaaaagctgatagacaactcagagagctagagggggagtcagaaagtatgaaggcagagacctcaagggatctgatgcagttaatcaaatagtatgaccttgtagctatgtcagtgtctgacctgggggaatctgaaggagggaggggaggagagatttagatagaaaccacacatgaggagagtaaaaggaaagtaagtcttattaaaggtgggagagtcagtactagctgttgaaacttatgcatcccatttcttggatgagaaatagatagcatttattgagctaatgaccatgtaattaagctccaatgagttaagcttaa

SEQ ID NO: 161379 - DNA, 506 bp, Homo sapiens
cactggggatcttgagcaggaaagtaaaatgattccatttaaatagcatgagctcaagtggaatgagtctagaggcagagagatttggaagggaggtcattgtaataatctagacaagaaataatgagaatccaaagaagtgacgagagtaatgattgctggaagggagaggacagaacagttttgaaaacaatcaggaagcaatctgtgactgattgggttttagtggtgaatgaaaagcagaaatgtcaaatgcattccaggttttggttgggagaactggctggacagagaacaaaggaagtcaaacctatattttattgtcaagtttaaaatatttgtgatatctctatatgcagaaatccagtaggccagtcatataaaggtgtgaaacagagtaggacattctgggctagagatgactataccagtatgtaagggtttttggtgctaccgttagccacctacactgtcaaaagaggttataaaatgtatcgtttaactaa

SEQ ID NO: 161380 - DNA, 167 bp, Homo sapiens
ccaagttccactccagaactttactttgagcctcttccaactggaaggtcttttctcccaacctctgccctccacaatcccacaccatccttcccggttcatttcctctgtgtgacaccaagatttaagggtcagaattaatttctccttctgggttctggctccgg

SEQ ID NO: 161381 - DNA, 265 bp, Homo sapiens
ggactttcaattgttctgttgttttagtttttctcatcaactggggaactgtttgtgactaagctttgttaaaagtagagaagagcttttcatagttccaacattagttgttacctggtgcagtggtgtctgtctgtaatcccaactactcgggaggctgaggcaggagaatcacttgaacccgggaggtggaggttactgtgagccgagatcgcgccattgcaccgcagcctgggcaacagagtaagactctgtctcaaaaaaa

SEQ ID NO: 161382 - DNA, 547 bp, Homo sapiens
tgtctacccaggagagataaaatataaagaaagttaaagtttccaaaggggtgatgaaattaattcttgggcttagaaaataatgacaatatctcacattcttatagttcttatctaccaacacgctttggagtttcctagcaaaaaaattacccgagtcagagcttttgtcccgagattaaacatgccctgtgactatactgttacagctacagataactcacaccttttggttgtaaatgtactagtctcaaattcatctgtttgcttgcaaaacagatgggctctattgagtgacaaaactaagccgatgcagctgaggcaatactccaacagggtgaaagcactcaatctggttcccatgtttctcctgcaaaagaaccttccccttgcttagccaactctacttcccctccttgaggaagacgggaggattctctgtgatctccagggtgaaaccatattagatacacatgtggatccagttttaccaggtatgccacttattctgttgcatatgaagggaaaactatatagaaggagcttt

SEQ ID NO: 161383 - DNA, 653 bp, Homo sapiens
taaatttcccaaggtcattcagctcgcaaagagcagagcccttcctctagactgactctcctaaaaatctcacagctcaatgcatggatggttattatttcaccaacatcactgtgtgtcctgctaaggggctgctgtcctaagcaggttgctacatctaagaccacatcttccaacctcccagcctcaagttggaatctcttctgagaactgggcctgggccagcagacagagcccagcacttcccactgcaggatggaggtgaggcttcccccagtaaacttccaagtgtgttccagccctactgtcctcattttacccctatgagtgccgcttcacctcacctgcattctccgccctgagtaggtgtgactgtcacccatccaggagcaggtcacagctctgcttttagtggcttccttaaaatcactgcacttacttacttttgtaggctgattgtacaaaatgtgcactagctgacataattccagttatttatttgtagattcaggaaatgagtgagaaagcaagattatttcaggttcaaagtaatttgctgaaagcataggttctcctggttctcccacttagcagcatcttacctaggtaaattacttaagctctgagtcctaatgcttacatctgtaaaaagg

SEQ ID NO: 161384 - DNA, 731 bp, Homo sapiens
tatttgtctagtatcttatttgtggaaacaaaaccaatctatacacaatagtcacagaacaattgttacactttgtgatactaactgtaagtgcaacagggaatcagaagagagatgagtataggctggaatacttaaagagatgattggaggacttggagtgggccttgagcttggcctttagattaacaggggccagaagaaggacattttacatggaaaattgggaatagcacaatgaaaacagagtaggcatggtttaaatataaggaacagtgtagttctgcctggtttgaagaaataagatgtaaggtcgagtggagatttgtggttcaacaataggcttagatttgagtcaagtggaagctcttgcacatttcggaaagacaagtgattttatgaaagcagtgtttaaagattagttttgtactagaattaagggtagattcctagagaaaagaggattgcaggtaccagtgggtaccagtggtaataggaaaaggcaaatctaggatgctttggaaggaaaaatgagaattagagtttaggagaaagcagatcactgaagttttaaaaataatgtggaatagttggtaagaacaacttattttatgaaagctgacatcggagtctcactggaacattgtagaggagaggttttctaggcatgtggaaatgcagtaagaggcatgggtaaaagcaccttttagtttttaaggaattaggttaaa

SEQ ID NO: 161385 - DNA, 346 bp, Homo sapiens
aaaagcctgcatgcttctttattttggctgacttgtttaatgcatactaataggtagatgaccctccaaccaataggtggctttctgttgcatgtcatagtgcagttgaaactccttagggtaatcaccctctttaaaggcaaaagacaaatagcatgagtgaagtggtccaaatgccattctttaataacctcagtggtctgatttactttgagcatgctgtgtttcactctgaagtaaaatctgattatagtttggtgtatctggccaagatacaaaagctgaaatatttataacagcagaaccccacaataaaatacgatagaacttcttggcaacagtttat

SEQ ID NO: 161386 - DNA, 625 bp, Homo sapiens
ttcatcttgttgcctgttttagaggcaaaatcttaaaaaaaagtgctacaaaaataataacagatgacagcaatttatttaaaatgcaattaggtttcttaaataagtaaaaaatttcagtaaacttatttatattacttgtctgattattttacatcttatcctacatcttaaaaaattttagctaggcatgcaattcaaaaattgacagattttttaaataggcaacttaaaaacattttattggatatgttgggtaacataatactcaaatactttatattagaaatcaacacacttgacaatattcatagtatctatgaaagtgacattatgaacatgcttttatagttgcaaaaaatttaggtgaaaaaaatttattctggtcttcagtagtaaaacttaaagattacaagaatgagattaaatttactgactaaattacccacaagaactgaaacagattcatttacttgttctttatctttcagtatctgataacaaagagactttacgacattcagaatgggcttcagtatagaaataaggccaaacagctcttgtaaaataatcattaaaatatacagaacaaacctatcatgtatatgatttttaaaaatcaccc

SEQ ID NO: 161387 - DNA, 236 bp, Homo sapiens
agacagtgctggtccatggctgccttcaaaatgctactaaatttctgtctgccataaagtggagagaaaaagagtgcaaaactaaaacgggaaggtaatagttacatttgccaacttaaaatacattagtcttagtcttgacatcatcaaaatgaggtgagagaggataaggctcagatgtctggctagggttaagagcatggacaacgtcaccatgcttagagagaggggataga

SEQ ID NO: 161388 - DNA, 511 bp, Homo sapiens
taaattttaggatgtatttaatttcagtggcgcctatattggtggtacccagattattccatttgtaataaaaaacaaaggtataacacgtgccagagtggagtttaatctaaaagactttccggatttttcaatggatcttaaagacaaatcaggtatatattttgtatataatggtattactgtaaaaggaaaacagttttaaattgccctgtggtataatttctaaaactaattcaatcaagggaagttcttcttaaatgtttttaatgaccactgcatgtttttcttacactctgtaactcatcatggttttatttgtagaaatacatcattattaatatcaaaacactttggtaatacatgaaacgtaaccgttcttattagtgtgttaaatatgctaagttaagtatgttatatataagtatatgccttaaatgaacataaaattatgaatcgcttgttttaattgctcaataattttagataaatgtctttggggagctatctc

SEQ ID NO: 161389 - DNA, 164 bp, Homo sapiens
ttgaggctgtggggaagatgccttttggaggggctgtagctcagggcgtgcactgtgaggctagacctgttgactatgcagtgggcatccatttagctttaggtcgtcttgtttctgtatatagtgacatagcattctgctgccttcttagttgtggacaaagc

SEQ ID NO: 161390 - DNA, 587 bp, Homo sapiens
agattggtttgaccaggcgtgtcattcacatagcccgtgaaaaacctggcactcctaccttactcctttaatatgcaaatgcaggtcaccatgatatccatgttatctggaggcaatcatgacacttggcacatgtagtgatgaggaggagagggtggcactcttcctgttggccatgttgggtggacccagtttctaatcgccagcatttgcatatcaaagcttgccggcctggtttttcaagctgcctttctgttagaaaagaaatggtttgggggttgcttcttattacaggaaaatttccactgagaacctttaccctttctagcggcctaaaagttatttcttaataattcctgtattatttggaggtgtttgggtcatgtgggtagatccctcctgaagtaatgagttctcactgttcgttcacacaagagcttgttgtttaagagtctggcatctcgcttgctcctactctcaccatgtggcacactgtcgcccctttgccttccaccatgattgtaagcttcctgaagccctcatcagaagcagatgctggcactatgcttcatgcacagcctgtagaa

SEQ ID NO: 161391 - DNA, 464 bp, Homo sapiens
aaaggtcgtgctttgccttgttctgatttcactctttgaaactgttccttttcacgcacccttgatagagtaggaagagttaccaaagaaaaacacaaacaacaataaggaatcataccaatgccaatgatggggcaattcagaaatagcaggggcctgatctgtagggtgcttaaacttccatgcatgattttcatgaaatgcagcacctctaaagcataggactggtggtcagggtctgatagcttcgtctagaatgagcatctagtgccagtccttgcagtcacttacaaggaaggagggcacggaatagaacatgttgtagatggttgaccccttgcagtagggactgagggatcatgacggatacatcatggatggaaatccacaaagtggaaaccgtttttgcttgcctttaaaagcaaatctaaaaatatgttttctagcagctgtgtaactgcaag

SEQ ID NO: 161392 - DNA, 288 bp, Homo sapiens
acactgtacctttcaggggaggattatggaatctagcctcagactatgaatactaaagagatgtgaggaaggacaaaaaagtacatggctggtataggccagcataaggcagaacagccctttacctttagaaatacaactatggagtctctttcctgatcctcagtagtgtagtaaatagggaatgggagcctgctgaagatctctagagttaatatatataatcagccatttttaaaaaaactttaacacttatagttaaaaattaaaaacagtatcttaaaaatg

SEQ ID NO: 161393 - DNA, 302 bp, Homo sapiens
cgtaatttttttctttgtggttaccatggggcttacattttaaaaactgtgtagttataataggcaatttaagttgataataacttaactttggctacatgcaagtattctagacttaccttctacctcccaaatttgtttattttttattaaaaacattttttttttgagactgagtcttgctttgttgcctgggctagagtacaatggtgcaatcttggctcactgcaacctcgtctcccgggttcaagcaattctcctgcctcagcctcctgagtacctgggactgcaggcacacacca

SEQ ID NO: 161394 - DNA, 426 bp, Homo sapiens
tgtttacatggcggcaaataagttgagatagaaaactgatctgccctctccccaggagctgaatgcctccctcctctagctggatcatagctgcaggggccactcgtgtgcccctcacctgtggaggtcctggaaaacagccaacaactggtcatctacatcagatcaataccacacgttatgcagaagcgtaagtccctctccagactagcttgaaagcttaaaaccaggccgggtgcagtgactcacacctgtaatcccagtacttgggaaggctgaggtgggcagatcgctttgagctcaagagttggagaccagcctgggcaatatggtgaaaccccctttccacaaaaaaaatgtacaaaagtaaaataaaataaaacagcggggcatggtgggtcagaacataaggggtaccgagctact

SEQ ID NO: 161395 - DNA, 331 bp, Homo sapiens
tatgttcttcagactcagaaacatttacactttcatatcatgtggggttgtatgatttacaaattaggtattggctggttttttatctcctcttgaaatttcacatgaatcttggtttgattctaaaagtagatgttattgcgttatcacaaataagtaaatttggaattttgtcaagtttttatatacttctttggcctcaaagcatatcttaaagccattttatagtaagactagcaactcttacagtggcagatttggatggctaaatattaaaaaacatagaagacttgacattgttgtaaaaatgtgagatcatacattatgtctt

SEQ ID NO: 161396 - DNA, 174 bp, Homo sapiens
aaataaatcaaaataaattttaatctaagttaaattcaaattaagcatagacattcagcattactgcacagaatagtaaaacttaataaatattgtgagaggtgatatgctctccaatagtaagggttctggagacagcccaacttcattttctacttccctcaattaatagat

SEQ ID NO: 161397 - DNA, 478 bp, Homo sapiens
ctggtgttggggtgccccctcctgccaccgggggtggcgatggcccgttcgcctgcccactctgctggaaggttttcaagaagcccagtcacctccaccagcaccagatcatccacacgggcgagaagcccttctcctgctccgtgtgcagcaaaagcttcaaccgcagggagagtctgaagcgccacgtgaagacgcactcggccgacctcctgcgcctgccctgcggcatctgcgggaaggccttccgcgacgcctcctacctcctcaagcaccaggcggcccacgcgggggcgggcgccggggggcctcggcccgtgtacccctgcgacctgtgcggcaagtcctactcggctccgcagagcctgctccgccacaaggccgcccacgccccgcccgctgccgctgcggaggcgcccaaggacggggcggcctcggccccgcagcccccgcccaccttccccccgggcccgtacct

SEQ ID NO: 161398 - DNA, 323 bp, Homo sapiens
agaatcgagccggtacccctagttttagaagtttcaatagcaggttaaggaactgctcagggaaaaagggttctcttttcaagtcattttcttcagtggccatttaaatcctttagaaacacacaatttttactgagattcattgttcccttaatatgccacattcctgaagtcagatgtgcccctccttcattgtggcttgacttgtcattcatgatctacctcaggtctccagtaaaaaaaactttctccgtctaccttcctattatgatcctgttttgctattgaaacttctaaaactaggcgaccggctcgacttcgat

SEQ ID NO: 161399 - DNA, 389 bp, Homo sapiens
tccataaggtgtgcccactatattccttctaattttccattccggcaatgggtctactcttatgcagttttctggcttggttcacaccatccccctgatccgggacacaccctctccaccttcccatgaagcctatgctaacttaagtatgacctttctttcaaagcccagctggctggcttttttaaaaaattcaagccaactcttctgtgatgcctttctccaatgaccaacgcaggcattgccaaatacctcctgggggcagggagagggacacaattgtccccagttgagaaccacttctttaatacaactccttctctggacttttagaaatcatgccaagaattcttaaacattccaagcatagtggctgggacagtaatgat

SEQ ID NO: 161400 - DNA, 247 bp, Homo sapiens
atgagcggacctccaggctgattgcaggcactgaattatagagttggaaggggtattagaggtgattgagtccaacttgtcactcagcacaggaataccctttatagtggcacacatgactggcagcatagcctctgccagcatacttttttttttttcccaagacggagtcttgctctgtctccaggctgcagtgcagtggcgctatctcggcttactgcaacctccgcctcctgggttcaagcaa

SEQ ID NO: 161401 - DNA, 404 bp, Homo sapiens
aatagaattataaaatctctttgttcttttttgctgagtactaaagaccataaatttattacagatgatatttactgataataaagtacttttatttttactggtacccaaagaaggattcaaaaatcttggcagataccatattaccaaatctaactataggagctggaccaagagagaagactctgtaaatcacctgtctacagacccaagaccaaccatcttaaaagaggattcaggaaatcatttaaatgtttcttcctgctttcatgccttgaacatgctgtttctgagcaatacactacagagattgccctaattgacactaaatatgagttttaagcatttattctgaaaactagacccatgtaaacaagttagcatccaactatcaattcttagaa

SEQ ID NO: 161402 - DNA, 247 bp, Homo sapiens
tttcctttttactgctgttgtttagagtgtgtagttctgttgatgatttacttatgtacttgaagtactcatttctgtcaaacagatgcccaactattttccttttaaaaaactgtattctttactgcaatagatagcggaatagtaatagacactttgttaaaaaaataagtttcatgtttaaaataaatatttttttaaaatataaagccaaaatgaattcaccaatattaaggatttaatgtag

SEQ ID NO: 161403 - DNA, 423 bp, Homo sapiens
tttactagttctgtgaagaatgacagtgctattttgatgggaattccaataaatttgcagattgcttgtggcagtatgttcattttcacaatattgattctacccattcatgagcaggagatgtgtttccatttgtttgtgtcatctatgattttttcagcagtgttttgtagttttccttgtagaagtatttcacctcctttgttaggaatattctaaagtatttaaattttttttgcagctattgtaaaaggggttgagttcttgatttgattctcagcttggtcactgttggtatatagcagggctactgatttgtgtacatcctgaaactttgctgaattcatttaccagttctaggagctttatggatgagtctttagggttttctatgtatacgatcatgtcatcagcaaacagtag

SEQ ID NO: 161404 - DNA, 457 bp, Homo sapiens
  misc_feature (457)..(457): n is a, c, g, or t
gatcccctgaaatgggcacagaaattcagttatccaaatgaatgaattctggagatgtattctacaacgatgtgactacaattagcaacactatattatatacttgaaatttgctaagagggtggatcttaagtgttctcaccaccaaaaaataaaaaagaagggaaagaaaggaaggaagaaagagagagagaacaaaagaaaatggtaactatgtgaggtgatggatatgtatatgatatatatgcatattatatatatatgatttgatatggatatacgcatatatatgcataattgaaatatgtacaatttccaattgtcaattatatctcaatatgggaaaaagtcttgtcatgaaggagatgcttaataaatagtagttaatgttattatctttgattgatttgtctttgaataaatttctgtgcccttcaggtaccggctcgatgtatcn

SEQ ID NO: 161405 - DNA, 544 bp, Homo sapiens
gatcccctgaaatgggcacagaaattcagttatccaaatgaatgaattctggagatgtattctacaacgatgtgactacaattagcaacactatattatatacttgaaatttgctaagagggtggatcttaagtgttctcaccaccaaaaaataaaaaagaagggaaagaaaggaaggaagaaagagagagagaacaaaagaaaatggtaactatgtgaggtgatggatatgtatatgatatatatgcatattatatatatatgatttgatatggatatacgcatatatatgcataattgaaatatgtacatatttaaagtgtacgacatgatttgatatgcatatatatgcatatatatccatatatatgcatggatatggatatggatatatatgcatggatatatatgcatatcaaatcatcatgttgtacactttaaatatgtacaatttccaattgtcaattatatctcaatatgggaaaaagtcttgtcatgaaggagatgctccctatctcgtcgttgttattcgtcgcccgttcct

SEQ ID NO: 161406 - DNA, 601 bp, Homo sapiens
gtcgatcgagctcggtcctgaatgggcacagaaattcagttatccaaatgaatgaattctggagatgtattctacaacgatgtgactacaattagcaacactatattatatacttgaaatttgctaagagggtggatcttaagtgttctcaccaccaaaaaataaaaaagaagggaaagaaaggaaggaagaaagagagagagaacaaaagaaaatggtaactatgtgaggtgatggatatgtatatgatatatatgcatattatatatatatgatttgatatggatatacgcatatatatgcataattgaaatatgtacatatttaaagtgtacgacatgatttgatatgcatatatatgcatatatatccatatatatgcatggatatggatatggatatatatgcatggatatatatgcatatcaaatcatcatgttgtacactttaaatatgtacaatttccaattgtcaattatatctcaatatgggaaaaagtcttgtcatgaaggagatgcttaataaatagtagttaatgttattatctttgattgatttgtctttgaataaatttctgtgcccatttcaggaagcatattca

SEQ ID NO: 161407 - DNA, 502 bp, Homo sapiens
gtcgatcgagctcggtcctgaatgggcacagaaattcagttatccaaatgaatgaattctggagatgtattctacaacgatgtgactacaattagcaacactatattatatacttgaaatttgctaagagggtggatcttaagtgttctcaccaccaaaaaataaaaaagaagggaaagaaaggaaggaagaaagagagagagaacaaaagaaaatggtaactatgtgaggtgatggatatgtatatgatatatatgcatattatatatatatgatttgatatggatatacgcatatatatgcataattgaaatatgtacatatttaaagtgtacgacatgatttgatatgcatatatatgcatatatatccatatatatgcatggatatggatatggatatatatgcatggatatatatgcatatcaaatcatcatgttgtacactttaaatatgtacattctgattatatctctatatggttttctccttcatgacgtat

SEQ ID NO: 161408 - DNA, 273 bp, Homo sapiens
gtggggtaggtagctgtttaataacacacaccatatacctcccacaaacctggaggctccacaggacctgaaaagcttttcattttattgatcatgaatctgagggcaaaagacctttgttttcattacaatactgagcactagacttctattcttctgccacagaagtgcatccctaggatttctggagcttcctacctgacctaatttctgtccaccctcctctattccttcctttgctttcttctcccttcctcctcgcactacctctgt

SEQ ID NO: 161409 - DNA, 252 bp, Homo sapiens
gaagaatgcatcttcaatcatttcactgcttttgctctggattgtggttccccccaccaccatttctcactaatacatctttcttaaaagaacgacattaaacggtaagtctttatatgaaagtgacttgtcaaggggactggcttagatcctgattctatggattttacttcttttaattatattgaatatgtgtagtatgtgctttactgtttcaaaggagtcagcatctctattttgaaagatttatca

SEQ ID NO: 161410 - DNA, 296 bp, Homo sapiens
agtgttatattcaataaatattagttggatgaattagtgactggtaagtgggaaaaaatgtatttattttgtattcctttgattatcagtgaaggtaagtatcatttcatatattttttggcagtatgttatacaatatggcaatatgtgttacttctcttgtgacctttttactcatgtgcactaaccattttgtgtagggctttgggttgagtttggcttcagtaggtagatttcagggtgattgtgggacagccatttaggtatcagccatttaggtaacagccatttaggta

SEQ ID NO: 161411 - DNA, 248 bp, Homo sapiens
cacattttcctgatgtttgtgttatgatcagtaactcatagtaggcttttcaggacctaacagccatgtataaaattggctctccaggaaagcctaatctgagccctgcatacacatttatatatttgtgatttaaaaaaaaatagccagttcattaacatgatttgaaaatccaaaatcataaaaggatagtgaaatttctttgccaccctgttccccttccatctacttcccctctctgtggacag

SEQ ID NO: 161412 - DNA, 499 bp, Homo sapiens
cctcacaacagctgcttgcagtaggttataatattctactttacagatgtggttaagagggtcatgcacaaagccctttcaagtcagcgttggtccttctcacaccactctctccctctgccactaacacataatacataatagcataatgtagtagagttggctgtgtagtgactgcctctgttcctagaatatgagctctccacaggtaggaacagtgtttattcatctttgcctatcaagcttctagtgtagtgtgtggcacagagtagatatcttattaatgatggatggatggacaggctgacagttgaatacacttatgtgtgagtaaaatcatttcttgagtgaggggacccacaaacctttccatctataatctgctcctgcaggtctctgcagtcttgggttccacacctactaaaacttgattttaccaagattacttggggtctccttgaagacaagtaggtaaaaactcttctcagtccttgttttg

SEQ ID NO: 161413 - DNA, 374 bp, Homo sapiens
tatgtcctctgaggggaaaaaccttttctagtaatcctttgaacccaccaagactgcttttcataccaattagttcataaaatgtgttagagatacttttcatgcagttttaaatgtttttattaacattttctcaagttggtgaaaatgtggtagatgtagcttggatttttttttccaggcaagttagtcatgatgactgagatcctgaaaactataaaataatctattgtagacctactgagctcaatgaaaacaagtagcacagcacatagtccttacccttgaggagtttacattccactatgagaattgggccacagaatgaaaagatttggtaaaaattcaaggtatcagggagaaagagattataa

SEQ ID NO: 161414 - DNA, 676 bp, Homo sapiens
gcccgtgatatatagtgaggagttgatgtgcagcacacacaagtgtctgttacacaggatgtgcattaaataacgcgactcttaaatgctgtaaagtattgaaagcatgcacgtaggatttcaaggaaagcagagaacacagcctttcacaaagtagtcaataggcatctgtggattgaatgggatgtggttctaacagtgagttgagtttctggcttctgtaagacaattctgattccaaatacactgttccatcatctatataaacagactcaggcgtgtcgaaccctgggtcttccttcttcagacatatgggcttttatctacacccttccctgtaagatcagtgattttttaaagtgtgggaagttgaggaggttgagagattcagggaaagcccaggaagaaaaccatgagctaggtcagtcctgttcattcaaaatgccatgtggccacaaatatgagccagagatgttattttaaattttttagcagacatattttaaaaaggaaaaagaagcagatgaaattaattttaataatatattttatttaaccccacatattcaaaacattataattttgacatacactcaatatagacattattagagatttttcattcttttcttctaagtcctcaaaatcctgtttacagcccatctcaatttggacc

SEQ ID NO: 161415 - DNA, 601 bp, Homo sapiens
tttgtttcaacaccaccaatgcccactttatttatgatatctcttaataactatttttaaatttctatccattctctctcccttttctctttccttagtctcttggaataagtctgctctctgttgttttagcataacttttccctttggaggtggccctgaactagcagctatggctcaatggctagaattccagcttggcccagcatcaggttctgccccaacactatccctataatttagtgattacagataataacaatcaagagattccatgttcagctttctgacgttgttgttcctttgcatttattttggcctccagtgagccaattctctatgaatgagaccccatgatatctaaattccattggtaaatttacttcaagtaagataagtaaaccctatgactacctgggatttatttcaaggatgcaagactgtttcaatatttcaaattcaatcagtataatctatcatattaacaggtgaaagaaggaaaatcacatgatcatacatcaatcaatgtagaaaaggcatttgacaaaatttgacacccattcataattaaaattctcagaaatataagaatatagaggaa

SEQ ID NO: 161416 - DNA, 377 bp, Homo sapiens
gaggattactgaaataatgtctagttcctaacatgtaagtgtcaaaaatattaatcatgtatattactaatttgaaagtttctgaagggctcaaagatattcagaccataaaaagaggatgatcagacttggccctatggaaaggcacagagtaaggtctgaaataaaagactctaagaggctctccccacccgaaatcccctatctccattcctcctatccttcctgtccaattttgcttcccttcaacctctctcagaggttaatcactcctgatattcccaacattaatatcttttatgcctggagatattttaggtgagttaagtcattttctcccaaagaaacactattcggcaagtacattatgttaatct

SEQ ID NO: 161417 - DNA, 566 bp, Homo sapiens
catctcattttgaccttcagtcatttgacattattattttgttgccccttgtctcaatttttctatttgtattagcttagattccatggtttctcatgttcacttcattgcacatcttcaagtcctttgcccccttcttcttcgcagcagattgcagaattcaaagaaggctcttttttttttcctccatccattccttttcttcctgcttggtacactgtagagtgtgatgttcaaagcaatgacagtcaacttgtaatcatgactaaaaggtggtccactgagaatagcaaagagcaaagaaagggtctggatccttggccttgcacggtggctcacacctgtaatcccaccactttgggacacccaggcgggtagatcacttgaggccaagggtttgagaccagtgtggccaccatggtgaaaccccatctctacttaaaaacacaaaaattagcctggtgcagtggcacatgccacctagtagtcccagctactagggagtctgaggcttgagaatcacttgggcctggaaggtggaggttgcagtgagccgagatcacatc

SEQ ID NO: 161418 - DNA, 373 bp, Homo sapiens
tccacccaaatgtgccctgggtgaaacatacccacatcctaaaggcatcttctttcttctatgaaatgggcaccattctcctcccagctgcttgggttcctcaaagagagctgcactccctttgccacaatctggggaacaggaagacactggagccacaccagaaaaatggaagcctcacttgtgacccactctctcccactcgaatcagttcttgattctaatctccaatgtagcttcaattacctcgggaatcctagttgcaagagcaactgacattgtttttgatgtgctagtctctgcaatccaggaaaacagaaccacaaggacactggaacaaatggaagagctaatctactccatctgctacatt

SEQ ID NO: 161419 - DNA, 466 bp, Homo sapiens
gctaacctcgataatgaactcttttttcagcaaaaatacctcaaaatgttatttcaattctgtgttccttcaaggagatatttacagagcgtgatccacaccaaagtccctggaaaagtgttcagtgttgcccaacttgaaggtcatggctaagtgataaatgtagtctaaaaaacacaggtggttggatcacactgtttccactgcccctgctgccaggactagctataaaccagtgtgtaacatgagcagcatgtattgcagctatcctccctcctttcttttccgtaacctcagtaagcagtgccctcaggctgcctgcagctgtgcgggtgccccctctatggtgtcatccatgccttctccatcagtgctgtcctttgaccccacctttcttctcctaatctgcaatgtgtcctgctggacacaggactcagctagaaccatgttagaaagaccatgtgat

SEQ ID NO: 161420 - DNA, 275 bp, Homo sapiens
gttgctcccagctcccatccaaaaaggctgcctcacttccctgtccttccttgcctcagaagttccctgtcacttttctcttaaattccagtgttctctcttggatgatatgttcaagatgcacttatctattcattacttttgttcttcttagtggaggaggtaaagaacagatgcgtctagtcagccatgttgaagcccatccctttgaataattcttaggaaaggtttaaacaattttctgagaaaaaaatcttgcttcaagaatccttttg

SEQ ID NO: 161421 - DNA, 256 bp, Homo sapiens
gggttctccctcaacctcctcactttgggcatttacaatatcttaagttatccacagataatattctgtttctaatggcccatgctaccaaccattagttgctaaatagtctgcttttcagaagaaaattacaatccatgtattattttgaacttcctatgctattttagaacttggcgattttaaattgtcccttacacaacctaccccaccctctgatgtacatgtttttctgttcagactcatcatttcttta

SEQ ID NO: 161422 - DNA, 660 bp, Homo sapiens
gttatccgactattccaagtacaatctacatttgattcaagacacttcaagatttttggtttcttgaaagttacagaagatggtcagagagggccattccctttttgtcttatccccagagtgtcaggaacgggtgtatctaggtccagagtttgcctcacaccaaggatctgagtcaagctcttggtggtgaggccaggacaggctttttcccttcaaggcttcccacaagaacagtatctctgtgctttaggttgatatatttggggggttggggggagcctggagacagacaaggacaaaagagacagctttgtgaggttgagaatgcaagtctggaaggcacacaactctacatggctaccaaattacaaaagcattccatctgagaggctggccgacaagctgaggagttagttacatcaacatctcaggcaaatatactcgcagtccctgaaagtcagggtgacagaaatgcaaactggtcatcatcgacaccggtaggaaggggactgagttacttagagggccaaaaagaaggcaagcatctttgaagcacagcccagaaaatatttacctaactccaaagttaggaatagaaatgagcaaaatcctattgaacccagaaatcacacagcagcatttcaggagacatggatg

SEQ ID NO: 161423 - DNA, 681 bp, Homo sapiens
tccattggtggatctaaccctggattcacaggaggccaattctaaatgcatttgagatactaggaatttcttgctataatgtagaaagaatccatacgcttcagggggtaggtaagttagagtggatttatcacgtgtgacttaacctggcttgaaaaatacgtaggtgtgtggagcttctacattcgtaaaaagagttctggtagctgttgtctgtggacagagatgctggtgggagggatgatagtggaaagggagcccctgatttcagtggggctgggaggattctagggtgtcagaggccaagcactgtgatattttaacccaaagtgaagtttgggtgttattccgtggtctgtgccacacaggtcttggctgtgactcatcagtggtaaggattttcggcctgagaatggggagcccatcgtggtcccctagacgtgtagacctgaactaccaccatagctggcacaatggaggttcctgacctctgacccattccccaggtctgaatctgctcaaagaacctgcctcccttgatgatagggaagccaagcttgagaaaaggactctgccaaaatatccagtcacggacagtgaatccttctgcccgatttcccatattaggcccttcagctatttgcctgcgaaactatgatggaggagtgggaaatatccaca

SEQ ID NO: 161424 - DNA, 381 bp, Homo sapiens
ctgctatgtagcccaggctggcctcgaactcctgaactcaagcgatctgcctgcctcagcctcctgagtagcttaggactaaggagcatgccccagattgctcgtcattagctgcctgtctcccactaagacaggaaggagctcaccagggcagagatcgctgtctgtctgctcacccatgggcacctagggcagagcccagctcacagtaggatctcaataactgtgtttcaaatgcatggattaaaacattcctgttacacaagaccagcattccaatggtggaatctttaaaaacttttcccctgtgggagtttcaattctttttttcccctgagcccacacagagaagaaatgtgtgcttcccggctcccagggcag

SEQ ID NO: 161425 - DNA, 739 bp, Homo sapiens
aaatgtagaagaaataaagtaacatcgttcttggatcatagttttctacaatatttttctcatttagaagaccaaaagtaaagccatgtccctcctcattattgctaacagttacatatattctgaatgatatatattctaaatcaattattcactacaatgcacacacaaacgttccattattttgtattacccaaggtatcaggcttgttcactgagaatatgtgctaacgaaaatggtttattttccctgaggagtccagacaaaggagaatgagaggtcagtagcagtttaaagacaacgctgaatttgcctaccaactttttaaaaaatcaagctattttgaggaacctatggtattttgtcatagcaagtagatacttttaccaaagctatttatttgggacttattaaagaaagtctccttgcccattttgccattgtctttgtacaaggcacttgctttagtcaatagctatgaagtctaaattaacactgtcagataatcaggctaaaaggtgacaataaagctataaagcagctgtctgaaaacttaactctgtataaaggagaaagaacaaaaagaatctattctgtgtcatgtacccagagatatttgtgttctgggtagaaaagatttgaactttcttaaaacgttagtgagtataaggggaggtgccctacttagaaaataaaccactagttttcctcaggtggcttgaaaattgggcagatgtt

SEQ ID NO: 161426 - DNA, 444 bp, Homo sapiens
gtactttatttctcacagatgaaccttcctatttaccctgactcttctcttatcaaaaaacttatcatatctgggttaaactacatactataatgttcttaccgggttcccttcctgaaactttgcttctctggaggcaattagaaatgattccattaagctcatattcatgtgctggtcagctctaaactcatcatgaaattctcaattccttacaaagggaatctcccatttgggggaagtaactcattttctagctgcagtatgttattaagcttgctcacttcttagtgctgattcttccctgatttgcttctgtgcctccacgctacatggctgtcactacctgatgcaggaaaacaggttacaacacatttttgtcccatccttgaacacacacaccagcagccgtttgctcccacaagccttccccattcagaatac

SEQ ID NO: 161427 - DNA, 443 bp, Homo sapiens
actattggtatatatgtctcctccttaagggcagtgactataactcatattgcctaaatattatcagggtgatacagcattttccacattacaggcactcattaaatatttgttaatgaataaatgaatcaaggctgggcacagtggctcatgcctgtaatcccagcactttgggaggccgaggtgggtggatcacctaaggaaaggagttcaagaccagcctgaccaacatggtgaaaccccgtctctactaaaaatacaaaaactatccgggcgtggtggtgagcacctgtagtcccagctactcgggaggctggggcaggagaatggcgtgaacccaggaggcagagcttgcagtgagctgagatcgcgccactgcactccagcctgggcaaaagagtgagactccgtctcaaaaaaaagaatcaccatgcacggtggct

SEQ ID NO: 161428 - DNA, 258 bp, Homo sapiens
aactgcttccaaaaagtcaattgttggaattatttccccaatggagcacagaagaaagtgcagagatgcctcacgctgaagttagcatgtgagaagatacaacaaaaggacaggttcagtcccaaacacttactgtctatgtctaccaggtacctacatttaacacaaggaataaaaatcacacatggtgagagataagaagtcactccacaggtgaccacaggtggcttacaaaagaatgccatggcccagaccatc

SEQ ID NO: 161429 - DNA, 430 bp, Homo sapiens
aatgtgcagcccatgtcttacagtaaccactataagcaaaaacaaaacaaaaagaagaggtatagctaaaaagaggagataatatataaaatggaataccaaaaaagattaatccaaaagaaggcaggaaaagagaaacaaagaaacaaaaatagatgatccaaataaaaaacaaatagcaagatggtagttttaaatccaatcagatgaataattacattaaatgtaagtggattaactctccatttaaaaggcagagactataaaactggattaacaaacaaagccagctatataaagacacagattaaaagtaaaagaatcgggaaaatataccatgtatatagtatacataaaaacactgttgtggctatattcatatcagataaagtagactttcagagggtaacagcagagataaagagaaata

SEQ ID NO: 161430 - DNA, 394 bp, Homo sapiens
aactcagtagaaaaatgggcacgggatagctacagacagtttcaggagaagacacccaaacggccaatacgtgtaggaagagacagggctcagcttctctagtaaccagggaaatgcaaattagaacaacaatgagatcccatttcacacccgtcagattggcaacaattaaaaaggctgacaataccaagtgtgatcaaagctgtggggaatcggggactccagccctgctggtgggagtgtaaattggtagaggctctttggagagcgaaacggcaggatattgtaaaactctgtttatctcccgtggcccagccttctacttggggtatacacccaagagagaaactccagcttgtagacacatgcatgtaagaagcactggaatagccaa

SEQ ID NO: 161431 - DNA, 776 bp, Homo sapiens
cttagtctcctgagtagctgggatttcagccacccgccaccatgcccagctaatttctgtacttttagtagagacggggtttcgccatgttggccaggctggtcttgaactcctgacctcaggtgatccacctgcctcggcttcctaaagtgctgggagtagagtgcatttcttttaaaatttacttactaaatttttttttccttttagagacaggatctcgctctgttgcccaggctagagtgcagtggcaccaccgtggctcactgcagcctcaacccccctgggctcaagcaaaccgcctgcttcagtccaccaaattgttgggattacaggcatgcaccaccacacctggcctggatttcattttattcctttaaggataccagactttattctggcatatacatatggttaagttacttgtagtcatttggacccttcccatgttttcttttaaataccgttggggctcatctagtgcagtctttgcctagtttaatttcatctcactactaaggtgaaatccttctgagtactctacctgttgccttatgtattatgaagtctctccactgtggctaatgggaacatgagctcttcagaaaatatttggcctactgcttctctctagttttctccagtctctggaatttcaccttacaaatttacagatgatgttttcagagatttaagggtaccctgtgcagatctcaaggctgcccccttctctcccatattctgttgtgtaaatcctacccactttagtttctgca

SEQ ID NO: 161432 - DNA, 256 bp, Homo sapiens
ctcgcacgcctcaccagcactgcctctcccgctggctgctctgagccaggcactctttcccctctgggtcttggcacttttcacacctgctggtccactccaggtaattccctgtgcttcagccaggcatcttcccagaaaccacatatcactccatccctcccctgctgagccccttggccttcaggtaaagtcttcccatgtctacctaaagcctcctctccctaccagctccctggctgcctgaccctcctaa

SEQ ID NO: 161433 - DNA, 185 bp, Homo sapiens
gcaatttctaacattcagtgcaacctaacatttgttgtgagctcacaatacgttggatactaagccgactttgcaagggattgaaagataaacaagacatggaagttcacagactggtagagaagacatcatgccagcaacaatgtgacaaatgctatcactgagatatgtacaaggtttgtatg

SEQ ID NO: 161434 - DNA, 879 bp, Homo sapiens
gcctttcatgtgtttacaccttacagtccagcagaagaaagagctcctcttctgaaaaccttgaaagctcttgaatcttatgtctaatcccccaacaaatcactatgatggcatgccataccacactgagtctgggtctgtgctacttatccttgaaccaatcactttggtgaggggatcggtattatgataaatggttagtttatgtaaattaaggctgaagcctaaaattgaagcttgagattcattcccactcaagttaatgtgctattattcgaaggaacagagtaagtactataaatattggaaagaagttagcacatttctcactgctggaaaaccatacaattccatatcttcaaaagccaaatggatcaactcataaagtatatcagaaataatcagaaataagtaagattatttttacaagattaataatggaaaaaattcaatcatttttatataaaaataaccaattagaaaatataattaaaggaactatttcatttattagatataaaatatactgaaataaatttattaagaaacatgcactatttatatgaaaatacatgcagtttcactgagagatctaagatgtttctagctaaaagagctcaacattataaagatatgtgttctccttaaatttgtttctaaaattattgcaatcctaatcaaaatcacaatgattttcttttttggggaggtagatctggctgggggaggtagatctggctgtcaagacaaaggttttaaagtctatatgataaaactaattatgctaggctagccccgaaaaaccaaacagacaagcccaggcatcatgggcctgtgtgaaagaaagaagcttttgctgactgtatatataaaacataa

SEQ ID NO: 161435 - DNA, 409 bp, Homo sapiens
tctcatcatgcttggtatctgcagagggaggctttgattttgaagcaaatttccttgattcttggaagctctacttgtagcacaacttggttaacttctcttgtgaatttcatgttttccctggaacttgggctaggtcccatggcccctggtgtgtgtgtctttttttctgttaatattttcttattttgttcaacttgcggagagattttctctacttttatcttctaaccccttctgttttcttgaattttaaaattttctgctgtcatttaaaaaaattctccaccagcggcagtggcttacatctgtagtcccagcaatttgggagcctgatgcgggcagatcacttgaacccaggagttcgaaaccagcctgggcaacatagcaagaccatgtctctacaaaa

SEQ ID NO: 161436 - DNA, 406 bp, Homo sapiens
taatgaaatatcagccaggggaattcagcaatatataaaaagaattacatgccatggccaaggccgagtagggtttattccattgttgtaagacttgttcaatatttgaaaaatctgtaaatataatccaccaaataaacaggctaaagaagaaaaatcatgtgattatatcaatggatgcagaaaaagcatttgacaaaattcaatactcattcatgataagaactatcaggaaactaagaatagaagggaacttcctgaagataaagaacatctacaaagaacctacagctaacatacagtcattccttgccatatgtgggggattggttccaggacccccacatacactaaaattcactcataatcaagtcccacagtaggtaggccctgcagaacctgtgta

SEQ ID NO: 161437 - DNA, 835 bp, Homo sapiens
acgtacccacctgaggtcaagagttcgagaccatcctggccaacatggtgaactccaactctacttaaaattaaaaaattagctgggcatggtggtggacgcctgtaatcccagctacttgggaggctgaggcaggagaatagctggaactgggagggagatggttgcagtgagctgagatcactgtactccagcctgggcaagagagtgagaccctgtctcaaaaaacaaaagaaaaaaaaaaagaaatacctgagactgggtaatatataaagaaaagagctgtaattggctcacggttccacagctgtctaggaagcatagcagcatctgcttccggggaggcctcaggaagtttccaatagtggcagaaggcagagtgggagcaggcatgccacatggcaacagagagagtggctggggggtggtgccacatgcttttaaatgaccagatttctcaagaagtcactgtcacgaagatggcacgaagccatgagggatgatcctgccccgtgatccaagcacctcccaccaggccccacctccagcactggggatcacagttcagcatgagattttcgtggggacaaatgtccagactatatcagttagcatatatttacagttataaataacactacagggtcctcatacttttatgtcctgttttcaagatgaattcctagaagagttttatggtcaaaaggtatgaatgttttaaagactgatgatgtaaattaccaaattgttttccagaaggagcaccagttacactcccggtagtggctgagtgtgggagtatccatttcctgtatcttgccaacacatggtgtta

SEQ ID NO: 161438 - DNA, 425 bp, Homo sapiens
gccaggcgtggtgacacgcacctgtagtcccagctacttgggaggctgaggcaggagaatcgcttgaacttgggaggtggaggttgcaatgggccaagatagccccactgcactccagcctgggtgacagggcaaaactctgtctcaaaaaaaaaaaagtggaaccagaagatgattaaaaggatgcaacaggtaacaatgaacctgagaatacacaggaagacctaagattcagataaagctaagcaattttataacctgaaccagaaatagtgaaaagtaaaggtccctgcagagcatggtggctcctgcctgtaatcccaacactataggaggccaaagtgggtgatcccttgaggtcaggagtttgagaccatcctggccaacatggtgaaaccccatttctactaaaaatacaaaaaata

SEQ ID NO: 161439 - DNA, 305 bp, Homo sapiens
acgctcctctcttcaacagtccaaccccattcaaaccacatccagcccagagagaactgaccccagctcttcaccttccctgtcctcccagaagtggccttggtccaggaaagaggggactcctctcttgctgacaacatccaaaacctgctctatacctccagatcaccacctagagctgctcttcagggatagcaccagcgcctcagtctctggtgtcaacttgcctgctgagatgctaaggcctggacacagcctgcactgccttttcagccccacggtggccctggggctatataccacac

SEQ ID NO: 161440 - DNA, 535 bp, Homo sapiens
tcatgccaacaatagccacggcactgttcaagctgcagcaaacataattgtacaagctcctccacaatttacagtaacccccaaggatcaagtggtgctggaagaacatgctgtagagtggctctgtgaagctgacggcaacccacctcctgttattgtctggacaaaaacaggagggcagctccctgtggaaggccagcatacagttctctcctctggcactttgagaattgaccgtgcagcacagcacgatcaaggccaatatgaatgtcaagcagtcagttcgttgggggtgaaaaaggtgtctgtgcagctgactgtaaaacccaaagctcttgcagtgtttactcaacttcctcaggatacaagtgtcgaggttggaaagaatataaacatttcatgtcatgctcaaggagaaccacagcccataattacttggaataaggaaggtgtgcagattactgagagtggtaaattccatgtggatgatgaaggcacgctgactatctacgacgcagggttccctgaccaggga

SEQ ID NO: 161441 - DNA, 248 bp, Homo sapiens
tcttgtgttgattttcatattaacaacatactataatcaggttattcttttgttcagagtaaagctaattagacaaaatgcttaagtagttgcaaggttaataaacataagagaaagtaagcagtttctattaaatggggaagttagtcatataatttttaaatgaagctgttagaacaatgtgcaaagttgatctggatttttgccaattcctatgaaaaataatccccagaaataaactactaagg

SEQ ID NO: 161442 - DNA, 167 bp, Homo sapiens
attatcagtactgcatgtagccctctccagcacaagcaccatcctataaaatccccaggaagcctttgtctctttgtagtcagctaggccctgccaccactgtgcttggctgagttcacaaatctgttgtaacctgtagcttccctgtcacttctctggctctcctc

SEQ ID NO: 161443 - DNA, 551 bp, Homo sapiens
cctaagtgatcatcaagctcctccatcctccctgccctgcctccccacaaatctcacccaagcaggatcttcaaagaactatttaaagttctgctagaaaaggcaaacctaatgtgaagcatgtaagtttttgttctgggaagagttcaacaatttatatgcctttttagggcaataatttattttaaagagtgggagtgcagctgtggcctgttaacatctgcccttgatatttaaaatatttggcacagtttgtgaatctgttttttacctattcaaaatcatctaacaaatgctagcctggaattaaactttggagtatataggacacaacactgtcactgtttaagctttgtatatagaaaatatgtgggtgtcgagaaggtatattttattttatttatttatgttgagactgtctcgctctgccacccaagctagagtgcagtggtgcaatcatggctcactgcagccttaacctgggctcaagtgagccttccaccttacctcccaagtaactgggactacaggtgcatgtcaccatgcctggc

SEQ ID NO: 161444 - DNA, 230 bp, Homo sapiens
aatccatctactctctagggagaggcaaaggtgaacacaacccagttgattctaaactcctatacataccactttaaacaccacttcaacctccaaggcaaaacctggaagaatggtgggatggtggtcggaggtttgtaggaagtgaaaaaataagatattttctagattattttatttctaaagccctaagctaccaagatcataagaagaatacctagcaccaaact

SEQ ID NO: 161445 - DNA, 388 bp, Homo sapiens
tgtgtgtgcatctgtctccatgtacatctgtgtgtgcacatcagtgtgtacactgatgcctgcctgcatgcgtctgcgtgtgtgtgcacctggcacatatgtggctcagcaccagctgtgaacacagtagggccacagagagcagctgctgtgaccgtcatcactaccacaccaggaagcagcatcctcatcgcagcccacctcgctgtttccatgggtccctgatgtgcttgctcttccactgacatggctaatggtgggtggttcacttctaagaggcgagcctctctgcagggccccacttggtcagagcagcccacgttcttgccccaggaaccaggcatgtggctcttgtaggtgtctgttcccagagtggcagctgacctgg

SEQ ID NO: 161446 - DNA, 167 bp, Homo sapiens
agtaacaacaacaacaacaacaacaaactaagaaatgttataatggagttttggcttaaggaattacaagaattacaattataacacttgtttgtttttctggttgtttttttttttttttttttttttttttttggaaacgaattaccgctcttgtggcaccccaa

SEQ ID NO: 161447 - DNA, 240 bp, Homo sapiens
actaaacataggaaatgagggatatgctctcttacaagactctcaagaagtgttaaatgtttaagactggctgccaatgctaattggttctgctgtcatgatatgtgtaatagcctgaagtgctttctctactaaataaccagtaggaagacatatcttaacacttaaaattcaaagtaaaccccaaatatttccaaccattgtaagttccaattccattttcctactacatgcatcact

SEQ ID NO: 161448 - DNA, 294 bp, Homo sapiens
acttgcaacaagtatttcctgagtgcctactgagcatcaggtactattatagacaccaggcaacaacagtgaacaagaactaggcagcaaacaaaaagagacaaaaatctctgcttttgtgaaatttacattagggttgaagaaacagttaaagaattttaacaagtaaatatataataggccacataatgataagtgctctgaagaaaaattaaacaagataaaaagtcagagaatgagaagggacactattgtaatagtgatgagaaaagcccatttgatgaggtgacattt

SEQ ID NO: 161449 - DNA, 353 bp, Homo sapiens
acgtattaactgcaacactgcatgtaacagtaaagactggaaacaacctgaatttctatcaatagcaatctgttaaatcattaaataaggtatagcctcaaaaccactatgtagcaatttagaaaaattaaaaagaaggggaagatcacagaagacccttcaagatcctttgttaagtggtgggtgggtccagagtcagaaaggtcagaacagtgaagacagctgaactaatatgtacatgatagactctagacattaagggtctctattttcccaccgggaaaaaatcatttaattttgctcctgacagaggagactgtctagttatgagcttttgttgcaagaggcggcct

SEQ ID NO: 161450 - DNA, 448 bp, Homo sapiens
ctcgagggaggacggaggcagggaaggaacagccctggcctcatccagctcacccgcagataccccacccatatatagatctgaagtcacgtaacacacctcgattctgacatacaccccaacaaaccagacgcaccagttcacggtcaccccaactcgcagacactacccattcagatggacacttcaaaacttagaatctttagctcacaaagatacaccccctactcagaggcatatggcatacctcagacacggccaattcgaagatgtaaaccccaccacacataaacatccagcctacaccccaactcaaacacacactctgaatcgtaagccctaaagcacaaacacaccaagccatacaaacccttgattcacgacgcccgggcacacagatgcaactcaactcaagcaacaccccagctcaccatggacgttccctctc

SEQ ID NO: 161451 - DNA, 197 bp, Homo sapiens
tgggttggtggggtggggtgggtaagggattcagataagccagaagcagggtgatttttagttggaattgtaaactttagtcagcccccacacgctgctggggaatgtggaatgttctagctctgagatgttaactgagaaaagagaagtcaaacaaagccgatacgtgcagccctgtctatagaatccttcattat

SEQ ID NO: 161452 - DNA, 333 bp, Homo sapiens
acacatgctgaagacaaaaaaaaattcaatactgcaatacaaactttctttttcttgatgcctacaatcaactgaatattagaaatgtttgagcctgggggccaggcgcagtggcgcacacctctaatcccagcacattaggaggctgaggcagacagatcatctgaggtcaggagttcaagaccagcctggccaacatggcgaaaccccatctctactaaaaatacaaaaattagccaagtgtggtggcaagtgcctgtaatcccagctactcgggaggctgaggcaggagaactgcttgaacttgggaggcggaggttgcagtgagctgag

SEQ ID NO: 161453 - DNA, 468 bp, Homo sapiens
ctgatatgtcaacgctcaatatcacctgaatttaagctatggctcaagttaaatgcccttaggcaattttaccttagttacttttaccaaataccgtatccacaagtgggtggacgtcagttttgtccttcgagatatgcagatgcattactcatccctccaatgttacgctcttgcaacatcaatgataagcaaattagcagactgttatctttttaatggaagaatttactcatcaatagcaaaagctttatcagaaattgacattattgaatcctctggagttgcagaaaagaaaataaaaagaaattgatattgggaaaacctgactggtttctttcagctgtgtattgtattgctaggttaggtgtgacacttaacacctgtgaatgtggctgaatctccaagaatgatcaaatacacaacgctctggggtgatgctcaaagatctttggggtaccgagctcg

SEQ ID NO: 161454 - DNA, 115 bp, Homo sapiens
taggacagttcacagtaagacagttcagagtacacagtaggacagtacacagtaggacagtacacagtagaacagttcacagtacacagtaggacagtacacaggacagtttaca

SEQ ID NO: 161455 - DNA, 240 bp, Homo sapiens
aggacctgcatggtggggtgggccctctcctggctctgtggaggagggaaaaggcttatggagctggaggccccgtctcccagccccactcagcccacagaggcaggagaaacccacttgcccctgatagctgctgctgctgctgtgagccaccgcactactgccttgttcccagcctgtgtgtgcagattcttttctggcacaatgccttacatgttttatttgtaacagaagtggggg

SEQ ID NO: 161456 - DNA, 313 bp, Homo sapiens
attgtagccatgtagctgaggcctgatgagaaagcagtcccagcctctgcctgaggctagttaaaccaggcaatttcttaaattagagcatgaattattaatagtcataattccatagcaggcttcattttttgagcccttactatatactagcagtgcagatgatcacatttaatccctccaaccaccctaaagacatctcacagtttgtaagtggtaatcaggaagggaatcagtttgactctaaaactagtacccctaatcctaaagctgcacattctaggtccagactcaggtggtgtgagaacagagc

SEQ ID NO: 161457 - DNA, 266 bp, Homo sapiens
ttgcttttgttttaacaggatctgtctggctgcttgatggaagggacgaggtagaagcagggaaaccagttaggaggctgttggaatccaggcaggattctcctatcactgaacactgtgcctcataggaggtccttcatacgtatttgtaaagtgaaagaaggaagagagagaaatgatcaggttctctggaccacctggggaggccgctaggtctgttgcggggctctggccccagcccgtgggacgtatctgcacacccacag

SEQ ID NO: 161458 - DNA, 560 bp, Homo sapiens
gaattttagatgagcagttattttctttcagcccattgaaaatatcattcccttgtcttttggcttacatttgtatctcttattgctactcctttgaaagtattgtgttttcttcctctagcttcttttaaggtttttttttgtaagttttggaatgttcccagttatctcttagatattgcttctattccattctgcctcttctctttagtctttttttttactgtatcttgtaggtctcttaatctcctttgtgctttacattatgtgtttggggagtggtgactgtgcttcattctggatattttcttattcagcattctctcttcagccatttctactatgcttttatgtctacccattagttcttacttttaaataccgtatttttctattctagggttttcattttgttattttatgtagtttccaattatctgtcaaaaattttcaacctcataatttttctttgaatatattaaacatgtattttaaataatgctgataacttcattatttagattccctgaggattgatctctgtaggctgtttcagattt

SEQ ID NO: 161459 - DNA, 315 bp, Homo sapiens
actggtggtggtggtcataagtccagcctgcaggactttgctcgcaccacttcctcatgtgctaactctgctttgtctaaatggtagtcactagctagctatggctgtttgaatttaaactaagtggaaataagaaaaggtgcaactgtgacctctcagtagcaccagccatatctccgtgtgctcagcaggcacacagggctcatggcgactgctgggcactacacaacagaggtatttgtcattgcagaaagttctgtggacagtgctgccaaggtggtggtgtagtattttggtgatatcttctagcaatta

SEQ ID NO: 161460 - DNA, 386 bp, Homo sapiens
ctttcaggattattccccttgtatcactgcaaactccccatgacattcactgaggacttggtcgccttgctcctccctgacattcactaagatgtcccaattcttgctgtcctcccggtcctaccattaacttgggatgcctgtgttcatgtttccaagccttcttgacttcctttaattctatgtatttttatttcttcaagctgggtacttgagtgacccactgcatggccacactctgcacttcacataacccagagctgcctctcctcagacactgtaaacgccaacagcatttcctgcatgaatttatagaaaaataactgctctccctctctccagctgcttgcgtcctccccggccttccacacagtgtcgtctactta

SEQ ID NO: 161461 - DNA, 236 bp, Homo sapiens
ctccctaagtattgggattacaggcattagccaccatgctcggtcaagatgttattaattggaaaaaaagttgcaaaaaagtatagcatatatatgagtaaatacacatgaaactagaaacaactgtggctgcaaatggtttacagaatatataccaccaactatgtataaagcaaactgggaagacacatacactcatataaaccaaactgtgggttgagtgggttactggggac

SEQ ID NO: 161462 - DNA, 319 bp, Homo sapiens
gcgtcagtcaaattgtccaagaacctgacatcacatcctagaaatatcaaatataatctaaatgcagcactgtagccttgcttatggaggttaggaaacaaagttgttaaatatctcactgaggtcccaaaggcaaagcagggacttagtttgtcttcttagcactatgatacgctgcccctctttaaaaaaaaaatcactaaattctgaggttctagaatgtagagcatgtagaccttacaccttgtgtttctgcttattagtcaaacagtagctactgtacatttccttcctcttcctaaatctaaaccttatcatt

SEQ ID NO: 161463 - DNA, 282 bp, Homo sapiens
gaggctaaagggggtgggctttggactggattggggctgacctcagcctacacctgcaggaggaggtggagacagaggtggcctgggaggaatgtgggcacgtcctactgtcactgtgctacagctctcagcagggtggcttgctggtaggtgtgctgcgctgcgcccacctggcccccatggatgccaatggttactcggaccccttcgtgcgcctgtgagtgaactggggtaggcaggcgggaggtgaggataaggcggtgactcctcacctctccaggg

SEQ ID NO: 161464 - DNA, 183 bp, Homo sapiens
cattttaggagaaacttctgttgtcctcatggaacctcaagaacttcaggcagacaggtctctcaaactctaaggctctcctctgttttgctttgcgttatctgaccttttaagtttgggtgggaatcagaaatcagtcagggagagagatctagagaaagttgtggatatgaagatgtattt

SEQ ID NO: 161465 - DNA, 721 bp, Homo sapiens
aaaaacgaaataagtgaatgctagatgctaaaattcaactgaaaatatcaatttaatttcacaagttgattcattgctcatttttcactgaaatgactgagaaaaaaatgtcatccaagtagtaatgaacacctgtaacaaccatacaggcctcttggaaaacggcttattcaaggttcagggcaggaagttgagcatgggacatcttattgtattaaaaacaaagaaagctttcaaagatgaatgtgtgtctttttaaaaggacacagcagctagcaggaaggggttataacttgtcaaagttgtggtaagttgagcaccaagaaacataataattgtgtttatgaaaacacattaaatccatagaaatccataattccaaaatgacactaaaaaatgagaaagccagagaaaaattaacttgtcatctttagaggtagctgttaaaaccatttcttactttgaaaattagaaattacagggaaggaatgtagcatttatcctgtctttacagtaagaactgtatttcatgataacctagttgcccagcttgggagagaaagccctcttacggaagaatgccagctaataagagaagagaattcaaaagaattagaaaaacatcatttctcagactctaatgaaattattgattcaggaaaggattatcagttggcgataaagtcattaaatgaatgattaatggaaagctggatgcttg

SEQ ID NO: 161466 - DNA, 169 bp, Homo sapiens
gtgactctagcggatcctctcctacgagcgcagctaataagagaagagaattcaaaagaattagaaaaacatcatttctcagactctaatgaaattattgattcaggaaaggattatcagttggcgataaagtcattaaatgaatgattaatggaaagctggatgcttg

SEQ ID NO: 161467 - DNA, 568 bp, Homo sapiens
gtttattcaattcagttgtacttttcaactccagaatttctatttggttcttattatgatttctatatatttatttatattgtttatttattgagacattgccatcatgacttcctttatgttcttaaggatgtgatttagttctttgaaaatatttatgattactactttgaaagttttttgtctgctaaatccaacatctggtccctctcacagtttctattgcctgctttgtttatttcctttctttcatatggtttctactttcttgtctcttgcataaatcatcattttttgttgttgaaatttagatattttccgtaatatattgtagcaacactctatactcttttcacccttccccacagcttgttactgttgttcacttgtgtatttgtttagtgactgacagaactattttaatgatggtacaaccttgggtgtgtacactgtcaccttgagataacagtggtttgacagggttctctttgtctctttcctaattacatagagctattaagctccattaattacatgctgattgctctattgttttcaacaatgatct

SEQ ID NO: 161468 - DNA, 185 bp, Homo sapiens
acttcccacatcctaagtgtgggctgtgcatagtgactctcttccaaagagtacagtgtgaaaagagaggagagagtaactttacagtggagaacacggacagacactacctcagccaggtgatcaaagtcaacatcaatagcggcaagtcatcttgagagaatgcgtgcctgatacagagtgct

SEQ ID NO: 161469 - DNA, 154 bp, Homo sapiens
tacgagatcactcagctacaaagtgtgaaacgtggagtaggacccacagtgtgtgtttactgattgtttaagaagagtaggttgtagagtcagtaatgtgggggacccgttcccttttccctggcctgcagcagcagagctgggtagtgaattt

SEQ ID NO: 161470 - DNA, 471 bp, Homo sapiens
ccttaaatgcccttcccttcatttcttgctctacctcacccccaacacacacgtacactgcctggttagcttccacttatccttcaaggtgccaatcaaatacaacctcctctgatgagtcttcccactgattacttgattcccttcttcactgtaatatacaaagtgtgtattgtattcagagcaccatggtgttctggttattggttaactctctgtcttctctactagagtgggaactccttaatgataggaatcttattttatacatctctttatttccagagcctcaaaaactgtcaggcaatgaaatgtggatttcggtaatgtctgaaagatgtgttgaaaatgcaagtgatcacattaagcatcagttggatggtaacataagtactaccttcagagttcaaagagatcacttagattggcatggttaaagaagacagaatgaaggagttaaagaaatgagtt

SEQ ID NO: 161471 - DNA, 112 bp, Homo sapiens
ctataaatagcctgtgtcagcacaggtcatgttttactgccagatgagtccaagtcaggtcagcttttgccaccaaaagatttacatcttttgttacaacatcacatcactt

SEQ ID NO: 161472 - DNA, 698 bp, Homo sapiens
ggcatttgtctccccgctgctacgctccagctattctggcttccttgctgtccttcaaacatgccaagctctttatcaatcagagcccgactgactcagaacacttcactatatcattccagcccctcaataaatgtctggcattttctttctttctttctttttgagatggagtctcgctctgtcacccaggctagagtgcggtggtgcgatctcggctcacagcaacctctacctcccaggttcaagcgattctcctgcctcaagtctcctgagtagctgggagtacaggcatgcgccaccaggcccagctaatttttgtattttaggagcgataccatgttggtcaggctggtctcaaacacctgaccttgtgatccaccagccttggcatcccaaagtgctgggattacagacgtgagccaccacggccagccatgtctggcgttttctaacccttcaggtatggccttacatattttctcaacagcagacctttccttagtgctcccggtgaaccatcatctctcttaccacaccattagtgcctctcattgcatcaccacctaggacgttttattgtttgtaattttatttagtggtagacagtgggggcaaaagatacctaaattacttctctcaatatttccattggtttttctctgagatttggctaacatacatcttaaattcctttt

SEQ ID NO: 161473 - DNA, 193 bp, Homo sapiens
cagagttcactgaataataattcattaaactatgtgattacaacatcaagtgccataacagtgtgttgggtacaaacacaaatgtttcttggtaagtctacagtaactggggggaataaaagttcaagataaaactaaagaatagtctactgtcattcaatgtagcatgagcatcagtcagcaaattctacag

SEQ ID NO: 161474 - DNA, 148 bp, Homo sapiens
agggatggggcttaggtagctcagaggggggccataaaagatgctgagggactcagaggctggggtctaacgggactgacagaggcagtccagaggaatccctggggccttggagctgggcgagcggtcctcagagccatggctggag

SEQ ID NO: 161475 - DNA, 274 bp, Homo sapiens
cttaaggtaataggaaaagcgcagggtcctagtggctcgccagctatggccacagcatgtagaattttttgtactggggtctctatttctgctactggaggggacagtacaggccagttctcatcctccctctcctgtttatcattttcaatgggcgctgctggtgagacaaaagattctttcaatttttgagattcagaacatagcacctgctgtctggcagaataagaagaggacaatggcaggaggacagtacagaccaaaccccaagcag

SEQ ID NO: 161476 - DNA, 291 bp, Homo sapiens
tgatccgccggcgttggcctcccaaagtgttgggattacaggcatgagccactgtgcccggccactttctaagctttgtgaagagtggactgactaagcagccaggtagatgtgggttcagatctctgcttctgtcctgctgtgccaagtgctggggcagacacaggcagagagtggacagcagcatggtgcctgctgctagccatttctatgcaaaaccagatttctggtcccatcctggaggccaattctaggtacctgggtgggcctgggaacctgtgaacaaagtat

SEQ ID NO: 161477 - DNA, 350 bp, Homo sapiens
caggaatctttgccaacagaagagagtgaaaacagaagacaatgtgcaaactcattggactgggcagtacaacaaggagcctggaaaaggtgcagctgtcaagtgagctgaaagactgggaaggaggggcaatttgcctacaaacccaagggctctgagagcaaggcacggacaggcaaggggggaactcctagaacttgtttgctcaggcttccaatgattgctcactgccttcatctgggtgtggtgatgccaacagactaattgggtctcccggcagaggttaaaaacaagagaggatgagatctgtccttcagaccctggatatttttaagagatgattttcctgg

SEQ ID NO: 161478 - DNA, 197 bp, Homo sapiens
cctgcctcagcctcccaaactgctgggattacaggcatgagccaccgcacctggcctatacatcagccaatctgaactactttcaattccctcaagtccataatctcctacctctccactttcagccttcacacatgcctctctaatacaacaagctagtgcctgcctgcattctctgctcatctgtgccatacatg

SEQ ID NO: 161479 - DNA, 607 bp, Homo sapiens
ctgggggtattggagctagagaggcccactcaggccctggagaaaagggcaggggcttttctaggatgctcttggccttgcctgggggcagaggtgaggaagacagtcaacgcagggagctctgtgtcagaaatacgtctgccttcaaagaaagcagccatcctggaggagaaggcacctgggagggccttagggataggggaaagagagaaaggcactggccaaccaacaccattggccagccagacagccgggctgggtgacacctggagatagcccccagccatgcacagggaccagtgggcgtgggagaaccagtatctgtttagttacaagcagaacatccaacacactcgccttgccacgctgatactgtcatcccccagaaggcggaaaaaaccattgctgtgaagcattcgagccagtaatgaccaacagagaccaataggctggccaagtggaaatagaaactcagggggagtgcccatgtcccctaggtaccccggaaggtggtcctgggtgatggtcacgtgcacagactctggtcaaatggagctaagggtcgatgccaactccacccttaacaccctcggtgaccccaggcaag

SEQ ID NO: 161480 - DNA, 177 bp, Homo sapiens
taaatgagtcaacacttgggttattttagccagtttgaatttggctcatcaaaatatttaaactggtataccaaactacttcagtatatttaaactattgccgttgttgtgtgcctcttttctttctcgggacagatatcagggttaccgtgtattttatctaagagctggtttatg

SEQ ID NO: 161481 - DNA, 552 bp, Homo sapiens
tcaccttcccctagcattgccacagctgctagtgggctgacctatgtccttaagcgaatgccactgccttggcacaagcaaagagttaggtgcatgtggtggacaggtggcctgcgctctgtttgccagccctcctgctgggatctagacccagatgtaaacagtagagggagtgccccttccacttctgccttccagaggcccagtctagagtggacgaggattgtgatttatgactttgattaccctgcattgaggaattatctagggctgtaggattccaaaggatcctgagcaggaacaggattctttcttccagaccagagctcccagggtcaggtctgttctgttactgttgaatggggcctggagcaagtagatttgtcatgtgctttctcacaggaatagataaagtgggccaaatggtgagaaaagcacagcagagctggctgagttatgatgtgggtgggtttgtcccctaggatgatgtgattttttcattcttagaaggttttcacctgcatagtatagaaccaagtccccagctggaga

SEQ ID NO: 161482 - DNA, 347 bp, Homo sapiens
tgaccactccaggttggtgattggtgattaaggaacagacagcattttcctccctccctctaccatttctctttctcgtttttgttttgttttgttttgttgattaaaggtagaacagcaatggtatctccacataggaaacaccaagcctttgtgaccacatgagccgcagcgtcttcatcatggatgaggaggggaaccagttctggaattctggctcagggtagatgcatcttaacggaagaagaattagtcaattctgtttccgtggtttactcttcctgtctcctgcagatgaattcattagtttaattaatgagagccctttgccttcctctgcagtgttg

SEQ ID NO: 161483 - DNA, 396 bp, Homo sapiens
acccgtgtcacctcctgcctggtctgtatagggtcaacactaagggggaatgtatgtgtctccttggaaaagatagccctagaggccgcctatgattttatgaaatccaagttttgtaaaggctttgtgataaagctagctacagatagtatgctttactacaatatgggcattctcttagggtctaggatgcctttgtgactaaatgaaagagctgaattctgtagtcaataagagtcaacaccttagtaagatacttaatccctcagaaaggactgatgctgaaagtccctcagagaaaaatagagaattaaagcatgaaccaagatacccgccttgtttcacccctttgtttcacatgactaggatatgggtgctcattggaaccatcggttg

SEQ ID NO: 161484 - DNA, 486 bp, Homo sapiens
tgtgtgtgtgtgtgtaccataaattcttaaaaagatagttgctttcttcatggctaacttgaatactgtatggtataatgagggtggtatatagagtgtacaggatgatttaggtgtgatctaggcttatttttatcaactcacatatttatatatgttgataaaactagacaatctggctcatttattcagcatatctttcctgagtattgggtctgggttaccctctgacacaaaacagactcggtctttgaccctacagaactgccagggtcttattcaacaattcaagcatatattgagaaatatatgattaggttataatatttcataaaacaaagttcaggctggattttattacagtgacatcgaggtgtttatcgatgccacaaaatacagtatttttccatcacttttagttgtaatgtacactatgtacagaaagataatactacctattttaaactaaatatagatgaacaaaca

SEQ ID NO: 161485 - DNA, 197 bp, Homo sapiens
gaaaggaatgcaaatgctgagtcatcactcttcattggaaaggaaggaaaccagaattaagtggttggaagatggaattcattcattagattgagcttcaggtaaaaagcaacagcaagacaggagaaaaagcgttcagaagacacacatcaaatagcggatgaagacataattttagccaactctgaagctttcga

SEQ ID NO: 161486 - DNA, 496 bp, Homo sapiens
ctgtgtgacattgggaaagtctccatcctttctgagcctcagtctccaccctggggaagtggaaatatcaatctctgtgacacagaagcaaatgagcgaatgtgcacaaagtaccttgcacaagagagacgctcaaacacttgcctccaggtttcaccgagaactacagagtaagatagatttgttcccagtggaggaagcctgggaataatttgcccctagactatgaattcctggggctcaagatcgagcacagggccaggcacacagaagggaccctggaaatgtggcaggaggccagagatagacaggcccttagagctcatacccatgccctctgacctcaagaagaaagaaacctgctcaaaatctcacaaagagcttgttccaaccctgaatcgagtctgaggactccttcctgagtccagcactttttctgcaagaagtatatgcctccaaagctgatgggcgcaaatcttgaaccccgtcacataaa

SEQ ID NO: 161487 - DNA, 325 bp, Homo sapiens
aataagtagtacgttatgtaaccactattatgtctttatgtaaccatatcattttcaaaaagggtaataaggacatatttataataatgatattaacactgatatactttgctgaaataaacagtaatgagaaattttaccttattcaaacctactgcaagactaaagttatttaagcagccacttaggcagtcccacctttttaatggatggaaggaaaattcatttcacattatcagtttcccccaaattaatctctaacttcacagagttctaaaaatgttgtgtcttagtcaggagtgacagtactcaaataaggatactc

SEQ ID NO: 161488 - DNA, 606 bp, Homo sapiens
tgggttctagtgtttcaatctattgaaatgtctactttttccttattggcaaaatgaggataatttgcctcccacagaagggttcatgtagttattataatcatgtcagttaatcaacatatttgataaaactatctcctgttattggaagtgtttcataagattttacttctaaataatctccttagacctaggaataatttttttgcatacacttaacctggtatgtcaccaatgccaaattagtggtaagttagtgaagggttaatacatgaaattaatgttcagtggtttcacttgtccccttcccggcattgacgtcagtgccctttgtgatgaggacacgtctaatggctacactttgctgaggatattctcccgataaggactgtgagtatgctagggagattgttataagagaaatcttattcccaactatttctgaacattctctaatagtttaatggaagtacattcaaagactaagttggcagataaagaatggtactattcattcatctttgttctttgaaagaaaggaaatacagaatcctaaaatatttacctacaaatgctttaaaggaacacagtatagaagaaagaagc

SEQ ID NO: 161489 - DNA, 641 bp, Homo sapiens
agataggaagataacttgcaaataatgtttaaaatgcatatgttttaatgttaaatatttagagcaggtgtaaaccaatgctactttaaactccaatattttattaaaataaaccattcccatacattgagggagttggcataggtttttttgtgacacaatgttgaagatttattagaaaggacaaacatagctgcatggtagacaagaatttacagcttctcataatgaaaattttaaaaaatgggattttagactaagtctacaactcaggcacagctaaaatgataaattttagttattttgaaatatttgagctatatttaatattatttccaatagcttcatttatacttaaataattgacagagtcataaacaatagtttggcagaagcttttggtttgcttatacttaatgacaatgtaataattatagccaatggtaatgcatgtgaaaacttaacaaatacaattctgaagttgacataagaacacatgttgttcagttttgcagtaactatcatctttaaaagtaaatattgtgattgtttaggaatatagtatttaacagactagaaaaatataagtaaaattttcaagtgcatgaaatacatactaattctttaagagactaatgaag

SEQ ID NO: 161490 - DNA, 341 bp, Homo sapiens
  misc_feature (149)..(149): n is a, c, g, or t
  misc_feature (160)..(160): n is a, c, g, or t
  misc_feature (168)..(168): n is a, c, g, or t
  misc_feature (226)..(227): n is a, c, g, or t
  misc_feature (232)..(232): n is a, c, g, or t
  misc_feature (257)..(257): n is a, c, g, or t
  misc_feature (301)..(301): n is a, c, g, or t
tgcaccttaagttttgcagcacagccaaaccatgaatataaagcctttggtgagaacaaagaagccacacactctttatagtaacttcgggagtctcctactcctgggaacactaagaagtgattaaataggctaatttaaatatatcngaactttgtgnaaatggtnactcatgttctttttgttatgatatacctgtggttaatttttctatcatgctgcagtnnagcangatgtaaatactgagtaatatcacnacatgtttgaatcctaaaagaatttatgtgacatgagccagtanccacagaaaaaacagcacaggtcataggtggttcttagaa

SEQ ID NO: 161491 - DNA, 204 bp, Homo sapiens
tcaaaataagttaagctatgctgctatgataaacacagcagcttaaagaaaaggtttgtttctcacttgcactacacagacattgcaggctgtctgaggtcattgttctacatcatcctaactccaggacctaagctaacagagcatttccagttgccatggcagaaggaaaatggggcaaaggcaaataattcaatagctctc

SEQ ID NO: 161492 - DNA, 437 bp, Homo sapiens
attgacctctgctttctccactcggcccacactgaccccgcaaggagagctggcagatcaaaacgcgaatatacagatgaggagactgaggtagacggaggcagagcccaggcgccagagctgtggcacgggacaaggacaagcagacaccctggccggcttttctggcacctctgtaagtagagcctggatcagggaggtgccacatgttggtggttcattggtagattaggcagagggagctgtgagcctggagaagctcaaccatacgtccctcccctccccagaggaccctggtccagcccagcccaacacagccagcggcctcatattggggctgtgatctgagcacctcccaaagcctggggctgtgatcttagctccactgcatccaggggtgctgagggaggccaggggcagcagctgactctctgggg

SEQ ID NO: 161493 - DNA, 478 bp, Homo sapiens
gactgaattcaaatccaaccaaacctctagatctaaccagcagattaatgtaactaacagaagaacatgttggtctagaataagagaatgcaatcaaccaagttcagaaaatgtgaagttctccaaaataaccaacctgcttctttgaaaaagaaaacggtatgatcagagacagggagaagagggcctggagccatgttgtttggggaaagagactagaagcatatgtcaagcaatgccaatacgcagaacatgctcaggtcttaattcaaaattaccacctaaaaaaggcatttttgagatagtccaggaaaatgtaacatggactgcatgttagattaaggaatcactgttaatcttatagacaggataatgatattgtagggtttttttaaaatccttatcattaagaggtaaaataccttaaaatgttttaaagacagagttatgctttaaaataatccaatcagccgggcgc

SEQ ID NO: 161494 - DNA, 152 bp, Homo sapiens
aacccagagaaaagaagactggaacaaacaatgaagcagtgcagcgatgacctgtttacctgacatctgcacagtagagaagggaagcacatgatccgaaatcaaagcggactggggtttttagataatggacattacacctgtatggttag

SEQ ID NO: 161495 - DNA, 413 bp, Homo sapiens
taccctaatgatcactccccgagccccattcacttatatgcatttagtaaatgcacttgcttttagcaagtttctggatggccccttaacacctcactcctgtgagcatttgggtggttgagcgtgaactgcagctatgaaagtgcattcaggctgggcatggtggctcatgcctgtgattccagcactttgggaggccaaggtgggcggattacttgaggtcaggagtttgagaccagcctggccaacatggtcaatcccatctctactaaaaatacaaaaattagccagatgtggtggtgtgcacctgtaatcccagctactcgggaggctgaggcgggagaatcgcttgaacctgggaggcggaggttgcagtgagtgcagattgcgccattgcactccagcctgggtga

SEQ ID NO: 161496 - DNA, 410 bp, Homo sapiens
gccggggctcatgccaactgaaaattgggacccggcccagtctgccggtttagttgctgagatgatgtggggagcgggacagagcacgtggatgcagagaggcagagctgccagatgggcatgtccccaagacaacagcttccttgggatcagagcgcccgggacagcacaccagccaagggaagcgtgtcagctccaaaagcgggcctcgggcgttttgggcgactggctgccaggcttaggtcaggagctgggtacatgcacagacaagggacgaaggaacagcagccaggaaggggtccaaatccatacaggaatgtactttgtgagaaaggtgggatttcacagctgtaagcaaaagacaggtgctctcgacaggtggggctgagaagaaaactgagccaagatct

SEQ ID NO: 161497 - DNA, 522 bp, Homo sapiens
tacaggcatgtgccactatgtctagctgcccccactttaacatgagaggagaaggaggccaagcagtgaatgtcagaatcaggactggcccagtcagtgactccggggcctgtaccctcacatctggcatagcttgctggggataccctacagtgggagttctctatagcaggctgcagcctgttactaagccatgaaatcatttagtacattatgaacagtattgaaataataagatagaaaacaggattttgtaaacagtaagtgtaagtattatatcaggaaagacatgttcctttcatacacacacaagtgctggagcacaatgtaaaaaaaatctatgggcaaaaaggtatggaaaaccctttggttctagtgcacacacatatacaggaagcaagcatttatggcaaattacattattcagtcataactaatttgttcccagggaaggtgattgttaatgtggcggttttacatgtttcagaaacaaaaattgtaaatgctatgtgatcatttgcc

SEQ ID NO: 161498 - DNA, 242 bp, Homo sapiens
attacatgcaaaaggtagcatacgatatagacaatatgttctgtactgtgccttttggacttaacaatacatctgggagatcctgctgtatcagtacataaggagcagctgggcaccgtggcttggcacctgtaatctcagctacttgggaggctgaggtgggaggatcgcttgagcccaggagtttgaggctactatgtaggacatggactgagatcgtgtcctttaaaaagaaagaaaca

SEQ ID NO: 161499 - DNA, 533 bp, Homo sapiens
tgataatactatttgcactttgactgaatcttaaattgccaatttatattatttcttgatatttccttctgattatagcagactagcctatgtagaccaactacctcactgagaacaaccaaacaagctagacaaataagaatcagttctgaagatatagtataaatattctcatagagaatgcaaatttacagaagtaagacatttggcaccattttccccctcaaggtctttgcagatgtataagccgaatctagagcttaagaagctaaactgaacttctagccattttcagtgctgcagggacaaaaactggagctcagaacccactaaggaggagaggccctggtaaaaatttaggctttcagaaggacctctaaaggaccacttcagaggagtaaaggtaaaggtaaactagaagtagaccagtcctcgtaagatgaatttggctataaactatgaatataacataaaagttatatatccacgttggattgattcattccaggaaagtaaggtctgtttcatgtttg

SEQ ID NO: 161500 - DNA, 338 bp, Homo sapiens
  misc_feature (267)..(267): n is a, c, g, or t
cctgagtagctgggactacaggtgcctgccaccacgcctaatacggctaatttttgtatttttagtagagacggggtttctccatgttggccaggctggtctcgaactcctgacctcatgatctgcccgcttcagtctcccaaagtgctggcattacaggcgtgagccaccgcgcccggcccgttgctgacatttctaaacagcgaaacaaatgcagaacaaccacctcagactggttaccgtgtgagagggttaagggctcccggngggttaagggctcccggagggttaagggctcccggagggttaagggctcccggagggttaagggctcccgg

SEQ ID NO: 161501 - DNA, 170 bp, Homo sapiens
gggtgtgtgcaatatttgctgacgattctttgggaaaaggttaagcaattaactttcaaatacaagtcttggggacacaagctttcttcttggtaactctgccatgtgaatgtcaccgcagagaggtcctgcctggacagctggctctgtgtggctccttcagcttgggg

SEQ ID NO: 161502 - DNA, 717 bp, Homo sapiens
caaagtccattcagtttacacaaaaaaagggactgtcagaaagcatttgcataagtgccaacctgagatctaaatccggaggatggacccctactggagtgacctagggcagagcactaaccctgtgatgattggatcttgttttcaagggaccaacagaaatacatggaaggcacagagtacaaggagaaacatacaagtgtaaaatgtgctggcaaaaaaatccaggcattgagcttctgaaatgaaatggggtttctctaagcacaaatataaatgttcttagcttttggtgtaattttattccaaacataaagccaacatctgttctctctttctctttccttctgccccttctccctgcctgccacctccaagactcatggaaaatccatttaccattgagtgaaagaagcactgataattgaagaactagccaagaaggatgaaataaaatgctttagaattgagtgtaggtttctggctgggcacggtggctccaaaactttcaaagaacattgctttcatcaccaaatcttcaaatcatgtgccagaattgtaaaaaggcttaaaggctggtttcacttcctgtgtggaggcagcctgccgttaattggaccaagtgaaaaaactggcctccaggcacacacaacacttgggaagtccatgaatatttatcaccgcactgagaattccttagcggccagtgacgaaaca

SEQ ID NO: 161503 - DNA, 145 bp, Homo sapiens
actctgtctccaaaaataaataaataaataaataaataaacaaataaataaaaattaaaaagaaaagttagtcggtgtggtggtgcatgtctgtagacctaactacttggtaagctaaaatgggaggattgcttgggtccaggag

SEQ ID NO: 161504 - DNA, 171 bp, Homo sapiens
cagagtgagaccctgtctcaaaaaaaacaaacaaacaaaaaacaaacccccaaaaccaaagtacacatattaaagtgtacaattcaatcaaaattaaaaaataaaaacaatttcaaggaagagtgacctcttcaggtttcaatcaagggaacagagggagactttttttgt

SEQ ID NO: 161505 - DNA, 290 bp, Homo sapiens
caaaataaaactttttttttattataaataacttaacttcaggtattcctttatagcaatgcacaatggattaatacatcctctctccacatccttcccccttcctccacggaagaggagtattgtcactgactggtcaagttcaaggatgctgacttgggccatatattcaaaaactagggtgttagaagaaagagcatcacccttctatcttttctctccatgtgaccaggatgataataaggctggatcactcccttcagattcttccttcaaggaggctagagaag

SEQ ID NO: 161506 - DNA, 136 bp, Homo sapiens
gtgagctgagagaggtacattatagaaaaaatatgacagaaggtatttggtacaagattagaaacgaaagctcattattaaaattatattcttcaaatgagggtagtgccttccttatcctgtttctctttcctat

SEQ ID NO: 161507 - DNA, 283 bp, Homo sapiens
gaggcagactcagtgcacatgggccgttttccacacctctatgatttcatccccaacgaatcagcagcacctactctctagccccctgcccactaaattatccataaaaaacctagcatctgagttcttgaggagactgatttgagtaataaactctgtcttccatgcagctaacctaggtttaaactctttctttaccacaatatcatggtctcagtgtgttggttttgtctgtgcagtgggcaggaagaactgaaagggcaactacagttttacccccaaa

SEQ ID NO: 161508 - DNA, 382 bp, Homo sapiens
cgacctgagtagctcttgccagtaggccgggactagctgtctcggggccttccatccgcttggccccacaggtccaagggtggggaaggacttctccagctgcctgcatctggccgaggaagataccaaaaaaggcgagggtaggggaaggtgcctgcagcgactgcttggtgtgtgttaacctctcccactggagcctccagaccaagcctcctactgaggggggcccagagaaggatcagagcagcccctcccagactcaggcagccccccagggccccagcactgcttccagggcaattagcgacatctgctttcccacctactttcgagcagagaaaaaaagtctgcaaatcaaggagtttatttggtgcaacaaaga

SEQ ID NO: 161509 - DNA, 384 bp, Homo sapiens
actcccaggcccatcggggctggcagagtgggctgttttgtgtggggctgaggtgaggtgtgtgcaggagatgcaatggcttggccgcctgcatgctgtgtcctcgggatgctccctaacctcggtttcttcctctgaagaatggggctgaaaccagctcttaccactcagaagtgcctagtgctctctcccagcagagccaaccctcactaatgggaaccccgggctcatctgtgagcagggccaccttactgtgcaagcggctggtgaccctcccctcctctgcaggccgctgtcccgaggttagtccagcagaaactctacctcttcctgcggcattgctttggccactggcccttggacgcattgttcagagctaggagt

SEQ ID NO: 161510 - DNA, 303 bp, Homo sapiens
  misc_feature (2)..(2): n is a, c, g, or t
antgtccagaataaatatctggtaaagtacaaggacatagaatgtacttattcccttatatctaacatccacataggatagggcttaacaaagagttatcagcaaaaagcaagaaggctttgaaggaagtcagtctttaaaagaaactattatttctaacatttattatttattatttaacaagaagggaaactttgaagaggaactttttactttccacaatttccccctcttgattttatagtttttcctcttcaaactttcttaatatgtcttggcttagttgttctgcctgagtctctt

SEQ ID NO: 161511 - DNA, 472 bp, Homo sapiens
gacactcttggttggaatgcaaataacgttttggttttcctacattatgaacaggttttatgtggagaagtgagtttgacaggttttcatcctatcctgtcttgtgtgttaactgttggttaatccctttgtgatactggttactgccatgtttttttcttggccctcttgtattttttttgtacctcaaaagtttgagtatgaacttgacattttctatcttgtgtagttttaatcagacttggtatagattgatggcagtagaaaacttgtgttttggatgctgggtaataggcaatatttgtgatttttagaataatttgtttcgtggcacagaaattgtattttattgctctgagctggtgttatgtattttaacaattctagctagttggctagccggtggttattttgcagtttttgatcattctcatcactgtcaccttcatctaccagtcaaccaagagtgtcg

SEQ ID NO: 161512 - DNA, 171 bp, Homo sapiens
agactgaggattggacagggtaagggacaaagcaaagttcacctgtaaaactgccaagaaaagccaggactaaaacatctgtcctgaccccagggaagggtggactgcatggggtgttagggtgagcactggatttcatgtcagaggacttcatcttcatgagtatgcaga

SEQ ID NO: 161513 - DNA, 557 bp, Homo sapiens
cctgggaacaggcctgtcttgtgcagaagcctgagggactgggagccaatctcatcactccctcacttgattatggaaagatgaaaacagagagtggagaaatgaagggtaagaccagggaagagattctctctggggtcccaaaacatggccctggctatggacatacttgggggtggggggatccacttgcctgctggcctcttttgggcagttggtattggttgcccgggtatccccggggcagtagctgcagcagtggcctgatgggtgtgcaagcagctagctggtgtgtccagcacggtcttggcacacctggttgttttggaaaggtcttttcttgaacaggaacttgcatactcaaaaacaacagcaaaacacaaggccacactcaccccccaagggtaagtccgtggctcctcctgcacacccaggaaagatcccgtggaaacacagcaccggaggatatgggataagagacaacagagaggagtggtgcttcctgaatttaggaaacatagctgctactttgggccctctagatacttgaaagaaaa

SEQ ID NO: 161514 - DNA, 152 bp, Homo sapiens
tgtcttagaggaaagatcttgctcatttctgaagttgtgctttggaagtgtctgagctgcagttgttcttccttcccaggtcggtgtagactctgctcttcctaagccagggcgctgcagccatattcagtctcttgttctttggctcccgt

SEQ ID NO: 161515 - DNA, 525 bp, Homo sapiens
cccattctctccttaattcctgaagacagtattctaccttgccctctgttcctactgatattgaccaaaaccaagcctgcactcatacttctaagtaattacctacatcctgatgtactttttggtaactatactagtgtattacatagtggttaagagcacagactcaaatcagactgcctcgtttaaatatcagctccagcactattcacacaatagaggtgtaaattttggtaggttactaacttttatacctcagttcctcatctataaaacaagaataaaagtagtatctaactcataaggttgcaaagagatttaaaataatttatatttaaaacatttatgtgcctagcacataattaacaccataaaaagattagcaataattattatattattgtcatctgtcctaaaatttgcccctacttgcacttgggcaaccccacacacacatggtctcatttccatttcctcgtcactttttaatttcactggattgtctcattttcctttgagtgtatt

SEQ ID NO: 161516 - DNA, 112 bp, Homo sapiens
agtaaaagcaaattaagagatccactatcagcatgattggcagccaatactggagtaatgactaatatggatttatatccttaggacatttcatgtacatccactataagca

SEQ ID NO: 161517 - DNA, 369 bp, Homo sapiens
cttgagcccagggagttggagactgcagtgagccgtgatcagaccactgcactccagcctgggtgacagagtgagactctgtctcaaaaaaaaaaaaaaaaagtgtgagaagtccaggtgtacatcctccaggtaaggaaactggaagtgagaaaaccagagaatctccttagtgttaggggttctgcaaagtacccacaaagcatttcaagagaaagtgcccttaaaacatctcagagcccagagagtggcaatgcacaatatcaatcaaagaagacattccctgcccacttgccacctcctttctcccaccctcgtccctacccattttgactctggaagtattagcaatggtattagcaagtgggt

SEQ ID NO: 161518 - DNA, 264 bp, Homo sapiens
cactgcaagcctgcaccccagcacaggccccatgctgcaggcaggaggcgaggagggccctgcactcgggtcagaaggcgccgccccttggtaactttgcacccaagacacaaggtccctcaggccataaacatctcaactatgaaacagaaaagcaagcctcagctctcagcgaggatgccgggaagaccaagacggccgagaaggagtctgaaacgccacaggtcactgcccagatgagaactggctcggtactactgtttg

SEQ ID NO: 161519 - DNA, 318 bp, Homo sapiens
atggatgaatgcatggaggaaagaatgaatgaatgaatgaatgaatgaatgaatgaatgcatgggtgaatggatggatgggtgcatggatgcatggaggaatggatggatggatggatgcatgcatggagaaatggatggatgggtgcatggaggaatggatggagggatgcacggaagaatgggcagatggatggatggatggatggaagaatcaatggagggagtgatggatagatggattgatggatggatggatggatggatggatggacgagtggatggatgggtaaatggatggatggatgagtggatggat

SEQ ID NO: 161520 - DNA, 288 bp, Homo sapiens
caaactcccgggctcaagtgattgcccaccttagcctccctagtagccaggaatccaggcgcacaccaccacgcctggctctgattgacagacgcacaccaccacacctggctctgattgacaggcacacaccaccacacctggctctgattgacaggcatacaccaccacacctggctctgattgacaggcacacaccaccacgcctggctctgattgacaggcgcacaccaccacgcctggctctgattgacaggcacacaccaccacacctggctctgattgaca

SEQ ID NO: 161521 - DNA, 325 bp, Homo sapiens
taaatagcaaatatgacaggctattgtagagcttgacttcagacaccagacagccagaggcactctgtagatacctggcagtagatgagagacacctgtgaaactgagggcaggtcaggagctagtgaattttagaagtaacatgggattgaaaggactatttggtgggaactttggaaagggtcaaaggttctgtgtaagcaaattaggacgatggtaactacagttttaaattattgttaatgtaactttatttgtaactgctagttgtgcaaattcagattgcatcatcatttcaccccaattttccttacttttgtattta

SEQ ID NO: 161522 - DNA, 279 bp, Homo sapiens
gagttaagaatatatgaaataaaaactgacaccccaaaggaattaaagattatagaacccaatttacattacacataatgtctattattttcgcccaatgttttgctgtaatttttggctaagtactaaattgggcagctctggaaaatgctgtgattattattgtaaaaattaatgatgccttataaactaaaacactattaaggaataggtgtgctatctatttatgagtggagaaattatatataaataagaaacactagcttgattcaatattat

SEQ ID NO: 161523 - DNA, 352 bp, Homo sapiens
  misc_feature (25)..(25): n is a, c, g, or t
ggcctagctccctctgcatcacagnatgattacaagactacatttccacaaattcccattaggaggcacttcggttgacctatgagggctgtgggggatttcactggccctgtcttgtctgctcatttacctgcttatgtcttgcccacacttttaggagaacttaagagactttcctaaggaagtcaatggaaaagaaagagagtttcagattacctgaggagagaagatgatcaaaatggaatggaaaggatcaaataaagaagagagatatttaatctatatatttaattatatatacttatttatgatattgttcattgttttattttaccacttcactattctgcaa

SEQ ID NO: 161524 - DNA, 386 bp, Homo sapiens
acagagctggccctgggtggggaagcgctttggtgcagcaaaggggggcggcatgtgtgggttggctgtagtgcagggtgatgcagactccgcttggccgttccctgccccgctctagccttttgggtgcttgtcagatggaacctgccacacctgtgggagttgccactggtgggtgggactcatggtgcagagaggggacaagcaagcgtcagcagaggccgctggggcagggcctccccagtgcctgagggattccttttccatgcactagacctggcctagtgtccagtgctgctgctcagcctgggggcagctctgtaccaagccttccaccctctcttggccgaggaccctctccccatgcttgctgactggagacccac

SEQ ID NO: 161525 - DNA, 599 bp, Homo sapiens
agcctatcaaatactggggcctgagcacctctcctgcctcgtctccctccactacaccctgagactctgctccacactgacttcccacagtctgcgacgacacatgttccctggcatccaggcctttgcatatgccgttgtttctgtctagaacacctttcctttgctctctgccttccctaactcctactcattcttcaggtgtcagctctaatttcacctcctctaggaagcccttcctgatccaccaggctcccacacacccctgtactcccccatcccactctgggtggtcactgtctggtgacaggtatgtctcctctactggactgtgagcccccaggagggcagggccaggggctgtcttgatcactactgtgtcccaacaccacctggcacatggccagggacagataagatattcaatgcatatttgttaaatgaatgaatgaatgagcaattacttaaaacccttctattgttccctgtggtagcctgtctccaaaatggcccccaataatctctgctccctggtattcatgcccttaaagaatagggctggctgggtgcagcagctcatgcctgtaatcccagcattt

SEQ ID NO: 161526 - DNA, 244 bp, Homo sapiens
actctccaagcaagaggaagcagagaggctggggagcagaaaagctataaatcccaatacccattatctcctgaggacagacagtctccggtgcaggcagatgcttcaggagttccccataatctgtaggatggaagctgagtgccttaatatggcagaggccctctggatgtggcttctgccttctctgttgatcgctttcttctcactcgcctgtcaccgagccttgcttgttccgctggta

SEQ ID NO: 161527 - DNA, 373 bp, Homo sapiens
ttgctggctgtggaggtgcggccgggaagacaggagctccttgaagtgacagaaacctggctccagcccacagcctcaggaacagctggtcactgcccgggtgggcggacacgctgtcctggcacaggggcctggcggggcagtggccagagcggggtccggctgtctgtgttccctggctggcatgttgggaggaaaagacttggctgacgggccggaggcccctgcggccccaggcccctgaaaggaaggttcagaaaggcccctgtgttccggcctggtccagagctggctttttccagaccagggcctcaggagtctttggaaagaacaccgagtacctgacgcccactgctgactcgctgtgtgacct

SEQ ID NO: 161528 - DNA, 297 bp, Homo sapiens
gctttactgggttgtatttcagtctgatgcgaggagtaaaaagggagcctttctgttgctgattttattggaaacaaagaaaattagaagataatgaagcaacatctttaaagtactggaagataaacattgtcagctgggaattgtagactcagagaaactatctttcaagatgtaggtgaaataaagattttgttcaggcacttagaacctgaaagaaatcatcaccagtaaaacaacactataaaaaatgttaaagaaaatgtttcaggcagaagtaaaataatatcaaaagga

SEQ ID NO: 161529 - DNA, 635 bp, Homo sapiens
tctcctctcccatcctttctcagtagatgacttcgattcccattgcactaaaagactagaagctatcggaggaaagtttctgctgagctactccttgccacatttcagctccctgtgtctgtgcctgtggctgctccataccccctcgctatggaagagctaccccagatcttacctcgggtcacctctcgacctgcagaacggacccacccacgtgcttcctcagggtcaaaaccccaataattcttccctcttgttctgaatattcaaaccttccctgttgaccacatgatccccatcaccccatggtgaggccagcattccctccatctttcagaggaatatgcttaccttcagctacagacttaaaaggtccttgtcatttcctcataagcacacatgataagtgagcagagagaacctcctgcctatttctttcttctttccggagacagctcagctgaatgcccggtccattccctgaaccacagaggttgaacgcagaaaccctggtctagacttccctgcaatgtccagtctgctgcctaagggctgtttggcttttggcaattcaccaaaattctctgcatcttagcttcctgtggaaagtggggatctctaagcgactgagggtg

SEQ ID NO: 161530 - DNA, 555 bp, Homo sapiens
gctccatcacatcataaaaggacttgttagatatgcaaattttcagaccccatctcagacctactgagtcagaaatacaagtaatgggtgtcctgcaagctgtgttcacaagacctccaggcattttgatgcacccaaagttatagaacactgtctcgggaaatacttcatatttcatttctttcattgaaaagacttaagttctcaaggacaatgatataagaaatatcatgatgtattattcagttaggtacctttgtattcatggataaaaaaaatctgtgtatttgttactgatttttcttttctttttttttttttttttgagactgagtttcgctctcgttgcccaggctggagtgcaatggcgcgatcttggctcactgcaacctctgcctcctgggttcaagcgattctcctgcctcagcctcccgagtactgggactacaggcacgtgccaccacatccggctaatttttgtactttcagtagagacagggtttcaccatgctggccaggctggtctctaacccctgacctcaggtgatctgccca

SEQ ID NO: 161531 - DNA, 518 bp, Homo sapiens
aatgtgcgcaggcacttaagtaaaatattccaagcacagttgaagtcccttccccattttcttccctccctagatacaatcattatcttggtttggagactttccatgcatgcttttgtatcttcggtatacttgggtatacaccttgtagaaaaccttatataacatatgcatcatctacaacttgttttttggatcaacattgcttttgaggtttatccacattgatacatgttgctacagttcattaactttaattgatttaaagcatttccattgtatgattagaacaacgtatcctttctcctgttgatgaacatgtgggtcatttctgattttttgctattacaaacaattcttcagtgagcatccttgtgtgtggtttctcacttatgtgtggagcagctttctaagatgcataaataatgaggagaggagttgctgggttgtagagtacgtgcatcctaccttcactaagagttcacagtttttgccaattgggggagtgaactgatatg

SEQ ID NO: 161532 - DNA, 136 bp, Homo sapiens
agtttagagggggttgtggagcccagggacagtcattgagtcagaaccaacaaatgttcgagcaaccctcatgtcccaggcctttttaaagatattatttcatgaaattcaacaactgtgtgaaatagatgttgca

SEQ ID NO: 161533 - DNA, 137 bp, Homo sapiens
gtgttgtgattacattttacctctgcatttcagtcaacttccctgagactttgcccctctacccattatccctgcagacctagttatgttctctgtctccctgatctggcccctgcctgcctgaccatctgctacat

SEQ ID NO: 161534 - DNA, 635 bp, Homo sapiens
tgtatttgtagggatggagtttcgccatgttgtccaggctggtctcaaactcctgagttcaagcgagatgcctgcctcagtctcccaaagtgctgggattaaaggtgtgcgccactgtgcctggctactttttttttttatttaattttattttgaaatatgtaaaaatttacataattctatactatgaaaatctcacttctgtcctttcctcttccatcttttaccatcttctgccttgagataaccatttctattgctttttgttttttccatccagtgttttcctttctttaaacttagtaagcattgttttataatctgtatttgataattccaatgtctgaagtttttgaatgtctgtttctgttgcctgcttttgtgtgtgtgtgtgtgtgtgcttcttcctcatactgcttagtttctttgtgtgcctggttatctttgacgatgtgctggatacttggaatattattttatagaaataatttgaacactgaaatgatatatttctgcacagaggacttttctttgcttctcactggtacccagtggtgttctttgtctggtactaccctaatccaagttctgtgtctgagattccctgaactataggaggttagactgcaagcttg

SEQ ID NO: 161535 - DNA, 193 bp, Homo sapiens
atctcctgggttcatgccattctcttgcctcagcctcctgagtagctgggactacaggtgcctgccaccacacccagctaattttttgtatttttaacagagacgtttctctaacacataaatttatgtttgtttttaatctacctctagggttagataaagagaaaactagttgacttacttccagcaagag

SEQ ID NO: 161536 - DNA, 323 bp, Homo sapiens
ctgagtcctcgttttcttggtaaaaacggggttagtaaaactccctgccctgcttccttacagagcttttgtgaggctcagggaagattatgtgtgggaaagccctctgtgggtccaaagccctggacacgagaattctgattttcctttatttaattgcaaaaacagtatcagtggaacatggaagataatttaaaagaagacgaaaaaaacctcttcatacaattcacccaagtatggaaatcctaccctacccaagtatacaccagctgaatgggtttggatgtattttcagataaattcctcacttggcgaactcttgc

SEQ ID NO: 161537 - DNA, 206 bp, Homo sapiens
taaaagagtggattctaggtgctcttgccacaaaaaagaagtgaccacgtgagatgatggatatattaattttcttgactctagtaaccattttaccacgcatatgtataccaaaacatcacgttgcacaccttaaatacatataatttttaaagcggagaaagtgttaagcctaaggtcaacaatggttctataattccgggcca

SEQ ID NO: 161538 - DNA, 325 bp, Homo sapiens
gggtggcagaggggccctaggcccccagggcttccacccccacggtcacttggggcgatggccatggaggacacacacgctcagacacgcgggctgtccctagtgctgcaattccctgtttcaggcagcacagtgagggcacgtgcatgtgtgcatgtgtgccaaggctgggtgatcaggcctggggggctcatccaaaggcagggagcgcgactgtcctgcccttggacgcttgcctgcaagtgtgaggtctaaggcagagggtgggtgggtcacagtcccctgctggtgggatggcgatgtgcaaggacagagggatacaggt

SEQ ID NO: 161539 - DNA, 577 bp, Homo sapiens
agcgacagcaggaaagaagaggcccttcgtgtacacccagggccaggctggtcctaaaccggggccttcttcccttgcttcgacacgcttgctgtaaatacaagtatccagctcttatggaggtaaggagactaaggttaggtgcacctgcccttgggatgaagaaatgatttcagatctatcaatcaggtcacgtttcaggggtaaattattatatccattcaggggtacttctgaaaaatggcttactcttaaattctggcacctacggaagtggtatgtagccttcctctaaatcccatcagttgagcacagatttagtttctggaaaccttggtgtcctccaagatagactccaggccattatcatcacacacaggtggccggtcatgctcttattcaaactattcaaaaggaaactctctccaccaatcaacatagtggcctggtgggtgacatcctcaggagcacacctggcctcccgtggggatggcagcccctggtggggcctgagaccagcccagtcaatggagtgacttggctcaaactggtatggcagagtgactaaaatctagag

SEQ ID NO: 161540 - DNA, 317 bp, Homo sapiens
tagaggatctccggatacaccagcgcatgtcttcagggtataacaagagtcacaggtgaaattatgttagaggcagggtctgagctgcttggttgctttccctcattcacctaacttcatatggcagggctaagggaatccaacatcattttacccattcttgggatcttgaaaggtctttctacagtttaacatcgttattcaattaatgaaagatttcgatgacactgtagacttggaaaattcactgaacaattctattccagttatttctgaaaatgttacataaaatcaacttctggtcgctgtgtattccg

SEQ ID NO: 161541 - DNA, 372 bp, Homo sapiens
attagccaggcgtggtggctcacacctgtaatcccagctactcgggaggtttaggcacgggaatcgcttgaacccgggaggcaggggttgcggtgagccgagattgtgccactgggcgacagagtgagactgtgtctcaaaagagtaaaaacctctgtaaatccttttgatgcccaatgactttgatttcaaagctagtatcatctaggtagatttatgttgatcacttgagaaacagaatttgaaaagttaatttatttctcaaaggagatgttgtactatcctgcaaaagtaccagagctttgttctcttccctttgctttgctaaaaatttctgggtcttttggtttattttacggtgcgttggcccaa

SEQ ID NO: 161542 - DNA, 485 bp, Homo sapiens
ccatctctactaaaaaaaatacaaaaattagccgggcgtggtggcatacacctgtaatcccagctactcaggaggctgaggcaggagaattgcttgagcccgggggcacagaggttgcagtgagccaagatcatgccactgcactccagcctgggtgacagagcaagactctgtcaaaaaacaaaaacaaaaacaaaactctaataaaggcaatgtatcattttaatatttcctctctaaatttgcaaagcaggtaaataatgtcttattcataaccatggattaacataaatttaaggcttctgggatattagtaatggctaggtaagaaacaggaccccaaggcagggtgtggtggctcacgcctgtaatcccagcacttttgggaggccaacacaagcggatcatgaggtcaagagatcgagaccagtctgatcaacatggtgaaaccccatctctactaaaactatcaaattaactgggtg

SEQ ID NO: 161543 - DNA, 553 bp, Homo sapiens
gaggcgtctcttcctggcagaggatcgtgagattcgctgacagcgaagaagcacggcaaggggcatgttcgaagacccagagttgggtgtgcgggggccaggacagaggctgcataaagggggtgtcccacggagtatcttgagaggattgtcatgtggtgtctgtgatgagggatcacgtgggtacctatggaagaccaaaggaaagctgggtgggaatctcaccatgtccgaggtagggaggagatgatctcgaaggagggttcggaggcatccccaggcattcccctagggaaatgtatattcagtaggacaggtgggcaagcatgtacatatattcacgttcatgtggtagatagctcccaggatgcagatgcaatagggagaacagaaggaatggaggatgttggtctctattccctgtttccagctgagaaatggggacccatgggtgtcttgtcaggagttgtagaagatgatttgatttgaaaagatctgattattataaaagtttggttcttattcagcaggtctagggtgcaccctgaaattc

SEQ ID NO: 161544 - DNA, 330 bp, Homo sapiens
tttcattagcatcaaactcatgcggccaacagctctgtaactcatgattcagtgaatcttatctaacacacatattttctccataaagcacatcacagccttcttgtgcttagaaacactagacagcacttcagcactacatttgggggtcctttgaaacagcaaaatcaccacaattttgcattttgtatataaaaatgcaaaaaaacatggtgctaaatctaccacaataaggatacttctttacattctgagaggtgaaacaagaaggtagagcatcaccttgttcaacctcagcttgcaacaacttgaattctgcgctgctctgtg

SEQ ID NO: 161545 - DNA, 547 bp, Homo sapiens
tctggaccctccataagtacgcaggataagtatttcattttcgtttagaaaaagggcctctcttacctcaacatcattgtgttcgttatggataggaagacataagccatatctgatctatgagctgttattagaaaatagtacagtaaattggctggaataaaccttggttttaaaacagtgccaaaagtgtcataaagttctttgtctctgacccagaattcttgggtcttctgtcagcatccattgactgtatcagatgattttattgacttataagtagggtaaagtcaatcccttcatgctttttatgagacagatgggatactgatagagatatgaccgtctggaatagagccaattaatgagatttaagggaagtccttgagattcagtggtagacacattgaacaaattatatagtcttttgtccaacaaatagttctccactatgcagccctttttttttcttttttgagatgtagtttcactcttgttgcccaggctagagtacaacggtgtaatcttggctccctgcaacctgcgc

SEQ ID NO: 161546 - DNA, 374 bp, Homo sapiens
gtagagatggagcttcaccatgttggccaggctggtctcaaactccttacctcaggcgatctgcctgccttggcctcccaaaatgctgggattacaggcaggagccaccatgcccagcctggttatacacttttaataagcatctaggtgttatagtgtggcaggactctaacattgaaaataaagaacatagagtaatttagagtcacatttaaaaatcaacacctaatttacaataaaggtatgcaaaatcatctgaagaagatattatttgtaggcaagcaaacccatactgtaacctcttcagtgtcttaatcactagtaaaattaaatcaaattaaagcagaaggagaatgacataggttcatattggt

SEQ ID NO: 161547 - DNA, 237 bp, Homo sapiens
tatgagatgtggtcatggaacagagggacctggtgacgcagacccagcctttcctaggtggcaggcactgcgtgatggttggggtcaggggacaggccaaaggttgctaagaagacctgagcatttgctggttcagaagacagcatcacttcaggatccctgaagaaaaactctaaaaaaaacaggtgacttactctcaccagcgaggttaggtctacctgggttaggtctacctgg

SEQ ID NO: 161548 - DNA, 339 bp, Homo sapiens
gacatcctgagaaggatccgctgctgatcgcatcctgggctgccaaagcttggtgctccccacttgctaagcagctgccacactgagtcccttagcagtgactagtctccctgcacatcctgaccaaattgccctggccttccctctccattcctctacaagggtccacactatcaggacagtggctggtgggagtctgccctctcctgggtctggtgctcctccctggggcaggaggatggaggggccagcgtgctcactcggccctgaggagcattgttgtgggtttgtgatgaaggcctgggaggcttaggagacctcaggagctggcaacatgga

SEQ ID NO: 161549 - DNA, 460 bp, Homo sapiens
acttataaatggggaaacagaggcctagagaacagtaaggagagcaaagccacatggaaaatggatgggaatcagtcccagggccttagcacctgcctgcctgccccctccttggagggtcaccactaccagtgtggggcaggaggctggcagagggtttggctttggaaaaggtgttgagctgtccaagtacaggctccacacaagctgctcaggaaaagtactgagaggccagaaccacccagaagattagtctttgaagaagactcatatctgaccctttgggatatttgacaaagcactctcaaacatatgcttcctctggttcctcgttgggaggaggctggacagacaggggttactctccaagagagggaaatccatggagggttgctgggtaaaatggtggctaagtaggggctcaaactgaggactttggtctcccagaaagaaagctaca

SEQ ID NO: 161550 - DNA, 258 bp, Homo sapiens
gtacgctacacaccatctgtccatccatctctcccttcagccgggtttttgtcctcacattctccaggtttcttgcctctccattactttcaactctagtgaccctgtcttactggcacttcctttactagtaccttcccttataccagctagtaccttcccttatgccagatcccatgatgaactacttaagttactccatttattatcttcacttctcctctcacttttttttttttttttttttgggagacggga

SEQ ID NO: 161551 - DNA, 526 bp, Homo sapiens
gccacgaagacaaacgtcgggggtagggagaaaggggggggcgcttatagaccatcaagcttcagaagatcatgtgacaaatgttccagccagttccagttgaagacaccacccctggccatcaagaagctactctgcctccactagacagagcagggtgacagttccgtgatccccaataggtagggactttgcttcaagccagcatgaggcagttacagaagaaagaccattagtcactccacctcccataaagatttatggggatgacatctctcagggaggaaatgaggcaggaaaataggatctggaggcatagaacataaggcctattcacacttcagctatgccgggaaatattatctccatttacatagggcatacacaaagtaaccaatggaaacctctagagggtatttaaatcccccaaaattctgtaacaggacccttgagcccctatgcttgggcccactcccacactgtggagtgtacttccattttcaataaatatctgcttttgttgctt

SEQ ID NO: 161552 - DNA, 385 bp, Homo sapiens
gtctaccatcatcaggtcctaggcaactaacgaagtctctccaattttactctccacaatcactgttccttatagattatccaagtatctacatgtatttaaaacctaccgctggccattttttggtcaaacttgtggtaaaatacacataacttaaaatgtgccaccaatggcattgaatacattcggtgaactgtgcaaccatcaccactctacagttccagaacattttcatcgtcccaaaaggaaacccggtcccatgggtcccttttacaatcccattcatgacagcaaagcaaaacagtggaccatgtatagttaataatagttttctctcaaatgtctctacaaagaagcaagaaagctatctgggaagctgaatccc

SEQ ID NO: 161553 - DNA, 335 bp, Homo sapiens
cctgtgatgaacgggacgctcgctggcatggctaccgtgtccccactgccaagtgtcagtggtgcacctgacctgcctgtctagaagaagctgccaaatatgatgacatcaagaaggtggtgaagcaggcgtcggaggtgcccctcaagggcatcctgggctacactgagcaccaggtggtctcctctgactgcagcctcgctgtccctgggattacaggcgcctggtaccatgcctcgctaaatttccgtagaggcacggggtttcaccatgttggccgggctggtcttgaactcctgacctcaggtgatccacccgccttggcctcccaagaa

SEQ ID NO: 161554 - DNA, 476 bp, Homo sapiens
actatcgaaaatcagttgattcaacaaaagcttggggttaggagactcaaattccaatcctagattttcattcatgtgacaacgagctttgcattcatcaatctaagccttgagtttccacatgtaaaacaggaaagtgaaataattcctcaggtcccttccagttctgataacctatgaatatgcccaactattaatacaaaatgttgaattcaaacagtcatctataagggtagacacagtcccctggcagaaagctaaagcaattctttacatcacactgaaaactctctcattgaattgagagaaaggtgtgcctgtaattcagtgtggacagagtaatacaggacattttaagacaaggcatgtttgacacaaaaggcagttcaaaaaacatttcaaaaagcttcaatcgaggggggaaaaaaatcaatggaacgacactaaacattttttgtgatccttcactaaaaact

SEQ ID NO: 161555 - DNA, 499 bp, Homo sapiens
gctttccggataggcgagaaagtgctgtgggattaaagtagatttacgcagatgaatatgatagtgaaatggatttcggcgtaggttggtctagggtagtgatggttgggatagaagatgagggaaaaatctgtaatgcctccctggtccctggcctggttgtagagtacaatggtggtatcattaaccaggacagggacaagtggaggaggctcatggcttttgagagagagagagagagagagagagtgtgtgtgtgtgtgtgtgtgtgtgtgtgtgtgtgtgtgtgtgtatgtttatgggtgtgagatggaacgctgggacatgagagggagatgacaagtccagtgaggacattttgaatatgaaagattaagcactcatgggatacctaagtagggaagttcagtaaggagctcaatatatacgactgaggcttaggagaaaggcctgggctggaaatggatatcactaaataggtggtagttcagattatgag

SEQ ID NO: 161556 - DNA, 496 bp, Homo sapiens
ctaaatcacagatgacagagaaataaacacattttcagacaaagtctgagcgcatttaccactaatagacatgactggaaaaactattaaaagacgtatttcaggaagaaggaaattacataagaaggaaaaagaaaagagatatgagaaatggtgagccaaaatactagtaaatgtgtaagaaatcaaaataatcattgactgtataaaacaacaataatactaagttggcaggtataaatacaaggtgaagttaaaacacaaaaatgtaataacatgaaagacataagagaatcattagagataaatcatcctccttgcattgatcagcagaaggaagagatattgatcaaaggcaaacaggtatgttaaaaatggaaaggtaaccactcaaagaacagacatagactacataatttcccaaccagtagagggcaataaaagaaacaaagaaacttgatcagtgcgacagaagtccctgtgtcagcagaacaaa

SEQ ID NO: 161557 - DNA, 300 bp, Homo sapiens
gcatggaatagaagtcacacatctatgacaaactacaagagaggatgggaaaacatattaatagcttctactgtggagtggacaatttcccctcaaagacagtgttcaaaaggggctggtacccaaaatgcatactaaacatccacaagtgatatcacactagctgcttaggtcctaaggcccctgtgtactttttttctcagtttattccctaaattgctccctaagttcagtgttatggcactctcgtagtttatgactagtaaatactattcatagctgaatcctgttgcattctgt

SEQ ID NO: 161558 - DNA, 432 bp, Homo sapiens
ggccccaacaaaaaaaaaaaaccaaagaaaaggaaagaaaaaaaaagccaaaaaactacctgagtctagcacaaagtctggtgcacactgagcacctaattgatatcagttgaaaacacagatgaacaaatgaacagggattgctgggagaatcaaatgggctgacataaaatgaaagtagctcgatctctggcatgtggcaagaggtaagttacttgataattgcactagcagagtcttcaccatgtgtgaattcctaaatataccttttctcatctcaacatttcttaaatcaggactcatcttcacaactgatttgtacacattgtaaataaagttttattggaacacagccatgctcattcatgtatgcattgcctacagctgcctttatgctacaacagcagagttaagcagttacaacagggagca

SEQ ID NO: 161559 - DNA, 901 bp, Homo sapiens
tcttagccttccagggtcaaggggtgctctggaggggatttagggacatgggtcagtgatgtaggaattttatgagggggctgtggacagcccagctgggggaatcgtgccatttaactggaccccaaatgtgttcaatgttaaagtcatcctaccccaaactttgtgcttcaggctccttcttccctggatccctggctgcgggagcccctctgcccagcctgctgtccggaatcttggatgtttgatcgtctccctagtgcagcacaaaccaacctccagagaaaagtctagaaaagatgcctgtggctcagtgggcatttggtgcctggcatttgtagactatgtgacacactctattatagatagggacattctcactatcttgtggggaaactgaggcccagagaggataacttgcccaaagttacccagatacatggtggagccaggatgagaacctccatgctctgactctggccttggagtgtgagtcctccaaggccctgcaacacacactcagtttcccctgtctcccctgggtcccaggaggagtgactgtgacatctgtggagggcacaccctccttgactctggctggtgggacttctgagggggttcgcccacccaagatccttggatcccttttctgttgggtccacaccatgccaggaaacctggcaagatggtcactgtgggtggtcttcgtcctttgctctctcatcccccgctctgcgcctctggcacaggccagtcttgggggtgatctgcatttggcatttgggtctttcgggtctcttagaaaccccttcagccatggacgccctgagcggaacccccttcctcgggcttcctttccgggactttctcctgagcctggctcaggatggattgccccctg

SEQ ID NO: 161560 - DNA, 378 bp, Homo sapiens
agccagtgaggggtgggacccccccagaacagaaaaagcagctgagcagaggcgtgcggtacaggacaatggtcagaagtggcagccccagagccaggactaggaggaaggggaacgggcttgggaagagcttggctgaagcagcaggcctgggtcctagaagggcttgaatgcaggcttaggaagcttagcctgtgtcctggaggcgtgcggaactggcagagggtctggagagcacaggcagaatcgccttttggaagggtcacatggtgacaaaacccaggatggattggagccagaggaactggaggccaggacctgataaggaggaagctggcgtggtctgagcttagaggaagcagctctcgggctgctggc

SEQ ID NO: 161561 - DNA, 402 bp, Homo sapiens
gtggataatactgtctcaaagcatgagttattctctgggttgtgcctcctaattggtgaaggtggccacttggtttatttgagacaattctaaggaataaggagctctccacactagtgtgagggccccagggcaaaagatgtttttctgctcctcagaaagttctcagagaacttggcaaggtttttataaaccctgcaaagctcccgttatgatggggatgaggtagttctgcattaaaaatagtcataacagttaccagtcctcataataatttttattggaactatcagaagtctgagtgcctatttgagaaagagtttccttggatgaatcactgcaggaacatgagaaagaaacatggcactgtgagatcaaatgtgtagataaataatcccccgc

SEQ ID NO: 161562 - DNA, 191 bp, Homo sapiens
cagaaagcctaacttaaacaataaggatatgtactagctcaccctgttgtttggcaaacccagcagctcctacctacattctcttccctggccacctaccattatagagccacatacttatgtttttctagattcctatttctgactagtgaaatgtagagaagtctacttgggggctttgggaaagtttt

SEQ ID NO: 161563 - DNA, 336 bp, Homo sapiens
ctagccttcagacacttggtgcctccctgaggatacaccaacacttcaagaacacagagtgcacctggagtcggctgagtagtcctgtgtcctgaaataactgctcgacgttcccagagccagtaaatgggatttgggacatttttgtcatgaagtcacaatgtgggactataaatgtcttgcctttaagggtagggtcttcccatgacccatccataacatttgtgaaaatgttgtgtgttgtgcgttttggagagaagaattttcattatcttcacaaagggatctgttaccctaaaagatttagaatcactcagcttattggtaagatgtgcc

SEQ ID NO: 161564 - DNA, 487 bp, Homo sapiens
ggagtctcactctgttgcccaggctggagtgcagtggtgcgatcttggctcactgcaagctctgcatcccgggttcacgccattctcctgcctcagcctcccgagtagctgggactacaggcacctgtcaccatacccggctagttttttgtatttttagtaaagatggggtttcaccatgttagccaggatggtctcgatctcctgacctcgtgatccgcccaccttggccttccaaagtgctgggattacaggtgtgagccactgcgcccggccaatttttgtacttttaagtgtagttaattggtacttttgaaaccccaaaactttacaatatatatacagataggatccaaaatgaatttgactgcttattgctgatgcatatttgtgacatacatgcatacattttatctatccttctgtgcttttttaaaatttaattatttttttagagatggagtcttattctgtcacataggctgga

SEQ ID NO: 161565 - DNA, 778 bp, Homo sapiens
attccagctatttatctcctctatactatatgtgcaagaaacagcttgcagactggatctgtagaaaagcatacagtttcagagaaaggtaccattctcgctggtctgtgacttgaatcaagcccttaaaccatgctccctggtaagcattctaattgtctctggtcatttctctcttccattctctataggagctgccatatacctttgcatctttattaagctcctccccataagctccttctccacctcccttggcagttaaatttacattcttcttcacaaagaaaacaaaacctcaggtaagaactctcttgactttcccccactaattgaccagcatctatccaacactttcctttctctccttctcctgttacaatggaaggggtattccctctcttgtgacttcttagaggctttgtctaatcctggaccatgtctaaatctggcccctcaagatcatttcatccacaagggagaaatatattttgttgtctaattccaggccacttgcaggagacatatttaattgccatatgttcccatataaccttgtgcctgaaagcacttatcacactattttacttttcaaaaccacgactacattctcaaatccatgactcacaggtccagcctgtttactgtagtatctcctgtagcacaatacctgagacaggggtcggtcaatggtttctgaatgaaaaaacacaacagctcaggtacccacaaatatacgctcaggataacttgtgataggtgttaaagcaaaaggtca

SEQ ID NO: 161566 - DNA, 182 bp, Homo sapiens
ttaaaaaagaaaaataaaatgtgatgactgaaactgcaagtggtttctatttacccttgtggagagttgccacatctattcacagccactatttgctacacaattatttcagagcttgagtttcggcttaaaaaatgatttgccatgaaagcgaataggagaaaaacaattcctttcagagg

SEQ ID NO: 161567 - DNA, 455 bp, Homo sapiens
ttcagctaatttttgtattttttgtagagagggggtttcgccatgttgcccaggctggtctcgaactcctgggcttaagtgatctgcctgcctcatcctcccaaagtgctgggattacaggtgtgagccaccgcgctgggctgagtgtctcataattattgtgctttctttgcattttgtacataacaacaaatggaggcaggaatgttgtcttttatattttatgatttggaacacagcatgcattaatagaaaattgaaaataatgaaacatgactataagccaacactgtgtttcctgtcccaagtacattttcctgagaaaatttcactgcactctaataaagctcaaaaatccttcaccataagaacttgtaccacagaataaaatctcccaaagccgatatagttattaaccctttttttactcacatctgaagtgccagcaccattta

SEQ ID NO: 161568 - DNA, 356 bp, Homo sapiens
caagggctcaggtaggcagcatggccgggctcgggcacaggggagctttaaatgccccctcagaccaccacgtcagaatctccaggtggggcctgggtgagtcccacgggcgccaggggtgcacctgccagccctggggcagggccagccaaggtgcgagtgtagcggtggccgctgcgcagtctgccccagctgagggctgatttaattagaaagcacccatttctgttaatttgttctggaagatcaccacgcactcctggagagaacagatgttccctctcccccgatgagcatttggggcttggtaaatggctccactcagccttgtttaggagagaaaagaggattttatg

SEQ ID NO: 161569 - DNA, 283 bp, Homo sapiens
aaacaagtgccaagtggacctttggggatgtcatagtcagatggtgtgctcatcttccagttgtttctggcaaagatcaacctctgctggtcagggagaaggccatccttgtcttgaatctttgccttgacattctcaatggtgtcactgggcttgacctcaagggtaatggtcttacctgtcaaggtgttcacaaagttctgcattgtcaatggcaatggcagcagtgcacaagaacaacggctcaactcccagcttcgatggaactctggtaattttcaat

SEQ ID NO: 161570 - DNA, 376 bp, Homo sapiens
gggaggctgcggcagtgacccagtgaccgagggacctagttaggatgtgttttaggccaggatggttgccagggagatagggagatggggtaggattctggatgtatcttcaggaccattagcattccctggtaggttgaagatgggccagtaagggaaacagaggggtcaaaggtgatgccaagatttttgcccaaagcacctgaaagatggagttgcccatgactaagatggggaagcacggggtcagcaccgatttggggggaagatcaggatttcattcttggatgtgctgagtttgaaacatctgagtcatatccaagtgaagagtttgaataggccgttggatatatttaggataaaagcctgggctata

SEQ ID NO: 161571 - DNA, 430 bp, Homo sapiens
gggctcgtcgacttgagttgaaatacttcataagagcacagtttaattttttttggaaagtaggtttttaaaaattattttccaccgtgcttattttcagaggtaacaattaagagggatacatttttttttttaattttgagtgttggaccttttaaaaactccctgttaaaagaatatgaaggaagtagggggaaatgttctctttgtgaacgaattctaaatggagtgcattgtgtgaagctaaaggaaaacttcatttgagtaatattctaattgtattcttccgtatcgtgcaggagaagatgacaacctgtattttactgctcaaaaaagaaaatacaaggctcaacttgtttctgatgcagaactcaggagctcctaaaagagcaagtggaatgaaatgtttcctttttgattttcttctctt

SEQ ID NO: 161572 - DNA, 155 bp, Homo sapiens
ttaaccttcctagaagctacagtgaaaaacaagacagatgcctggagtatgatttggtgggttcaataaagccttaatcctccaaaatttctacctcatgcgcttgctggttaacaacacatttaatgccttctctctttgtaacctaccagaca

SEQ ID NO: 161573 - DNA, 269 bp, Homo sapiens
gacatgcataagtgcccggaatataggaggtgctctgaagatgctgccaactcccccttggatttctttgttcctaaagtcaagctcagtgatcgcacatagtagataagtttggcagttgattgattttctaaatcagaagtgtaaatgcccagtggactttgcaccaaaggacccagagatctggctatgcattctctaagtgtcttttcacaaggcaagactctcccagtccctcttggagaatcacttttgagacacatttacta

SEQ ID NO: 161574 - DNA, 417 bp, Homo sapiens
tcttggactcctgatctcaagtgatctgcccgcagtggcctcccaaactgctgagattacaggtgtgagccagagtgctgggccccatttcaagatgacagcctaagccatacattaaacgtgtttttgttgttgttgttgttattgagactgaatctcgctttcttgccccagccgcagtgcagtagcgccatctcactgcaacctccacctcctgggttcaaacgattctcctgcttcagcctcctaagtagctggcattacaggtgctcaccaagcctggctaatttttgtatttttagtagaaatggggtttcgccatgttggccaggctggtctcaaactcctgtaattaaactaccctttaatagtctggtgtttggctgggtgcggtggctcatgcctgtaatcccagca

SEQ ID NO: 161575 - DNA, 662 bp, Homo sapiens
agtcaccatgctttacattagattcccagaacttactcataactgaaagtttgtgccctttgaccagtatctccccttacaccctggtccctgtcaaccactgttctgttctctgcttctgtgagttctacttttagattccatgtataattgagatcatacactttttgtctttctgtgtctggctgatttcacttagcataatgtccttcaggctcatctatgttgtcatgactagcaagatttctttttttttttttttttggagacagagtctcgcactggttgcccaggctgggagtgcaggggcgccatctcggctcactgcagcccccgcctcccaggttcaagcaattctccgactgggcaggatttcttatttatgggctgaataatatttcattggtgtgatatatgccatattttctctaggacatttaagtggtttccatatatgggctatggtgaataactgcaatgagtgtggaagtgcagatgatctctttgagatactgatttaatttcctttggattgatacccaatactaggcaacagagataatttaatataggaagttgatcaaatagatgttggactaaaaaatcaaagaaggcacaatatgagaacacagagatactgctgcagaaacagtaaccaccct

SEQ ID NO: 161576 - DNA, 220 bp, Homo sapiens
aagttaggaggtagacacatcctatctcctgtcactttcatgctgtattcacctcaggcagctctggcaatgacgacctgctgcagtaacaggcggttgttgtcgtagaaaggaagtaccgtaactgtcctttcactctccactctgcctttcattacttttcatttgagaggacgaatccagtcccgtggcctcaacctatttcttttttctttctttt

SEQ ID NO: 161577 - DNA, 712 bp, Homo sapiens
caagtgatctgcccacctcggcctcctaaagcactgggattacaagcgtgagccactgcatccatccaaaacttaagtagttgtagcatgcagaacattaaaaagacttttaggttcacccccatatgtcctaatatgttgtatttcaaaatgttgttttatttgagattaggcctatcttgtttgccatcatttttagatctatgcattctctgatataatcagaaagcaaaatgacagtcacacattttcttccaactgagctttaaaaaaaaaaaccgaaaaagcattgacataggctgagtttcctacagctacaggctttcagagaggaatcttatactttaaaaaacagaaattaaactaacagctctacagagatcttttcaatgaaaaataactcacaggagttcttttcaaagcatttaaaaattctcataatctactcatccacatcaacacttttaattagagcctctgtttacttaaaaggaagtataaccaaaaaagaaatcgaaagaaaaataagatcaagccaagcatatacgtcaactccatctctcattgacaactgtgtcaattgaaaaaataggccgggggcggtggctcatgcctgtaatcccaacactttgggaggccgaggtgggtggatcacgaggtcaggagttggagaccagcccgacaaacatggtgaaaccctgtctgtactaaa

SEQ ID NO: 161578 - DNA, 385 bp, Homo sapiens
aagagatggagaggtttgtcagagtttatcaattatagaacagcctcctctagaggaatataaagcactgccaaatcctctgagatttaggctgttgctggtagtagtactctggcaaataactttattcagttatttaagtttatggctaagcatagtagggtatctaatcccagtttgggtcttagctattttaaattcagaacataataaagtcactttcatagtttattttcattttagctattgccttttatggcttacagtttagctttagttagacataatcataaacgtgttgggtactattgatttgggttaatcatatgacctcagtggctggcacgaaatttaccaaccctatgggaaattactatagcttgct

SEQ ID NO: 161579 - DNA, 367 bp, Homo sapiens
cgactaatactttccaataattttcttttgataattcctctgacagtgtgaagaaaagtgcctgaacatggattaaatatcacatgacaacattttcccaaatctacgtggcaaactgctacttttctttttctacaaagataataggaggaaaaaagcaatttttcagagcagaaagcagcagacaaggttcagagaactagagttcttctcctggctctgctacccactatccagatgtgtggcctggggcgggggaattcacctctctgggtttctgtttccacattgggaaatgagatgcttagactgtgtgattcccaaagtccctcccagctctgaaatttccagagtctctggtacaaca

SEQ ID NO: 161580 - DNA, 210 bp, Homo sapiens
gagcacaagccatttgtgcaatgaggatgttatctaatacactggacttgtggtcctgttccatggccctcaggccagaatgacagagatcagaacccaggacccacctgcctggtgggtatcacatggaagacgctgcccatattggtttggggcagcacgacaaatacaaaaatacaagccagattttcacacacacacacacacaca

SEQ ID NO: 161581 - DNA, 318 bp, Homo sapiens
ttccctgagtctcactgggacaacacactgagcaatagctttaccagaatgttttgtgaatatggtatgatatcaagagtaataaagttattttggaaaaaaataactttagaataatcacttaaaagtctgctgtttttgaccataattgcacatggatatattgccttatataaactacaaagaattgtctatttcacatcacattttacaacttacattgcaaacctcacttcagccttgaggtacaactatcaataaaagaaacaggtcttatttttaaaactttttattattcatatccttggtgactttcag

SEQ ID NO: 161582 - DNA, 308 bp, Homo sapiens
atggggaccacttcacaattcctctaaataccagggaaaggaggtatctaatggtaaagaaaaatcacatctctaactggctattccagcactcccatttcatggttgggaaattgtattttaccacccatgaaattatgttttaggctgaacctaagttggaatttctttgtgtaaaattttaaaaaacatttacttggccatttccaaaaaatcaattttaaatatcccagtgctctcatatattttgaaccacagaagtcactcagtctggaactttaagtcgggccctgaattatgaattgagg

SEQ ID NO: 161583 - DNA, 408 bp, Homo sapiens
cttccaacagttgactttcccataaaagaaggggagctggagggctctggttcctgttgaacctctcctctcaaggcctctcccgtgcacacctggatccagcccttcattctgttgctcattcagcagtgctgaaggaaagaggagatgggggaacagcacggagttccggagggtccagttgcagtcatacaataagtccctaacaccttggggtgtacgttcagggttctctggctagaaagggtagtttgaggccaaaaccaaagagatcaggaggcatgaagggaaggaagtcgttatctgtctggtggttcagaacttggcttctgaagttcagctccctggcttccatttttggccctccctctttcttgccctgttgccctggaaagtcattcagtctct

SEQ ID NO: 161584 - DNA, 563 bp, Homo sapiens
ttttcctccatccccctacccgtgaatcacagtgtgaatttatcccctgcgtccaacccccgttctgtctccctgaccctgtgttcccgctggagcactggtctggcagcctcttacctgcagttttccctggcacccctgtcctctccctggcaacctcgggcatatcctctggttcccgggtgctttgtccatatcttacccagcgctgacaagaacgctggaggaatcgataacactgacaatgttatttggtccctgcagcttctcacatgtgggtcggagatggtttcggatttatctttggagccgggtgccgccacatcagggtgcagtcggtgttagacaccctttgttgaaagggatctgcttcatggttggagtgagtgcttgttctagaattgagaggcactgtagaggcagtgtctccttaaaagtggatgtgttggttggccggatgctgtggctaaaagccaggctcacaacccaggaactcccaggaaagttccctgttgaaaattagggaagatgggtgactggtgatctcgtggccaatggccact

SEQ ID NO: 161585 - DNA, 445 bp, Homo sapiens
taaatcttggtggtctctccctagggtcttaattggaggagcatcaggaattgggaagctttgaaccatgtttgggtacatttgtacccaaacgtcctttaagcccttggtagaaactgcattcgcgtatcatctcccttccccccaaccttccttccctgagggttttaaaaaacacttcccattgcttttacctttccagcaaatctggctgcagcttggatggatagcttatcttcctttgcaggtttctaggggagagtttaaccaggtatcaggtgtgagcatggctctgattttgtataaacctgaggatcgaggaagagaagcaaaatctattctcacacctctgggtggttaaggttttgccttgtttagagcagggaggatggatttctcaaagactcttctgttcccttctactttggctttggttcagagctgc

SEQ ID NO: 161586 - DNA, 447 bp, Homo sapiens
gatgccagggctcggatggaactatttctctgaaatcgatttactacaacatggaaaatcatatgaaagtcatcaatcataggaaaaaaatgtcaattgagtcaaagcagaagaaagaacggaaaggataaaaatgaaaactgcaacagactaaagtcattgttggagaaacggctatttttaaaaagacttaatagttaaaaaaattaaatccctgaaataggagacaatgaagcaaaacagcgagctttggaggggaatacagaaaggaagagagctttcactaaaaacagccacatgccagacacggcccaggtgctttactccccctaacagcatgcgatggcacaggttcccctttccagattaagaaactgaggctgaactgaggaaccgctctttccagtgcacaggtaggagtcccaagccttgggttcgcttcaaggt

SEQ ID NO: 161587 - DNA, 714 bp, Homo sapiens
  misc_feature (603)..(603): n is a, c, g, or t
  misc_feature (606)..(606): n is a, c, g, or t
  misc_feature (664)..(664): n is a, c, g, or t
  misc_feature (679)..(679): n is a, c, g, or t
  misc_feature (705)..(705): n is a, c, g, or t
tatgtaaagaaatttttgcacagctctctcgggaagctgttcaaattaaatcacaagtccctcacattgtggtgaaaaaccagattatctctcagccctttccgagcttgcagttatctatttctttgtgccattcctcaaatgataagaaatcccaaaaatttgctactgagaagcaatgtccggaggaccacctttatgtcctagagcataatttgcatctactgattagagagtttcataaacagaccttgagttccatcatgatgcctcatccagcaagtgcaccttttggccacaagagaatgagactttcgggtcctcaagcttttgataaaaatgaaattaattcattacagtccagtgaagggcttctggaaaaaataattaaacaagcaaagcatatttttctaaggagtagagctgctgcaaccattgacagcttagcaagccgaattgaggatcctcagatacaggctcatggtcaaatatcaatgatgtttatgaatctagtgtgaaagttttaatcacatcacaaggctatgaacaaatatgcaagtccattcaatgcaattgaatattggagttgagcagattcgagtngtncatagagatggaagagtaattaccctgtcttatcaggagcaggagctacagggatttncttctgtctcagatntccagcaccaggttcatgcagttcancaactcccc

SEQ ID NO: 161588 - DNA, 347 bp, Homo sapiens
gacttgtgaggtaattggctgggtacatggaccagtactcaataccatatacaggtgagagcagtggctgggggattggatattgattgggaactccctgggcaagtgaggcaggtaagggcagatgaggcaggtaagactaggtgagggcaggtgaggacagatgaggctaggtgagaccaggtgaggacaggtgagacaggtgagggcagatgaggttaggtgagactaggtgggggcaggtgacggcaatgagactgggtgagggcaggtgagagcagatgaggctaggtgagggcagctgagggcatatgaggctaggtgagactgggtgagggcaggtgagg

SEQ ID NO: 161589 - DNA, 281 bp, Homo sapiens
cagataggatataaataatattttgaaattccctcaaatactgataactaagtatacactaaatctagtaactataaaaaaactcaataaacctaggtaatgctgtaactgtattacagaggctaaaaatcggaaggtaaacactgtatataacaaccaagaactggtcaacatggtgttaacagattacaaacagactaaatacactggcattatgtgaaagactagtaaagcagtgctaagtatttagtggctaggagggaagggcaataatttctgtt

SEQ ID NO: 161590 - DNA, 151 bp, Homo sapiens
gttgcagcacgaggtgaggtctagaggagtccctggagagtcactggaataactttaaaaaagaattacaatacatggctttttagaatttcgttacgtatgttaagatttgtgtacaaattgaaatgtctgtactgatcctcaaccaata

SEQ ID NO: 161591 - DNA, 287 bp, Homo sapiens
aacaccatgttgatttctcactcatatccatgtcctccatgggaccactctgttctatgctatcttcattctagagccctgtctgaaggaaaagtctcaagctggaactttccgtctccagacaccgaagagaggaaaggtggcagaccccatgacggcttttaaagcttcctcgtggaagtggcacatgtcatttccactcaaagtccatggtctaaagcaagccacatagccatacctgatgtcagtgaactggggacaaaaaaccattctatgtagcaggtccc

SEQ ID NO: 161592 - DNA, 386 bp, Homo sapiens
  misc_feature (45)..(45): n is a, c, g, or t
aagcttttattgtttggttgtttttgtgtttttttctggtgagtnttcttatagatcttacagagaattatgaaagatttacttaagcaaaatctaactgtatgaaaacacaaaaacaaccaaacaataaaagcttgcttatcaaattcagaggtcagtgattcatgcattgtaataactgagataccttgcttgggcttaaatttacctttacataatttgtggaaaatacatgggtagacaaagtaataggaaaaatgaaatggactgtaaatgaatgaatctcaaaaacatgctgagtgaaagaagccagacacagaagagcacataacctatgaactcatttatacaaagttatagcacaagcaaaactaatgttagagtga

SEQ ID NO: 161593 - DNA, 391 bp, Homo sapiens
ctttcaagaacataaaaaacattaaaaaaaatttgtaccattatcatttccagacccttcacagcacatattttatcggggttttatagtaattcatcctttccactagtgcacttagcaaccaagacagctcatacccccacatacagacaaacttgctattaaaagggtcaaagtcttagtttcctcaagtgtactatgaatacccagggaaagactccaataccaagcatgagataaataatgcccatatgagaattttcaacttttaaagaaaagtaagtcaaactgtctcacggtaggaaactagggttcccgcaacccgttctctctctcttcaatttcataatttgctaggagagctcacagggaatcacttttaattccacag

SEQ ID NO: 161594 - DNA, 182 bp, Homo sapiens
agtcccccgtaggcagcgagcactcaagaactggtttgtccagtaaaaaacataagcatactcttcttttgggaagggggagtccttcatctcaaggagaagaattgctgtttcaccaaactaaatagtcataaatactgaactctaaaatatcagacttctgtggtctaggaaaggtcaaa

SEQ ID NO: 161595 - DNA, 242 bp, Homo sapiens
gtctgcatatgtgtatcactgtatgtatgtgggagggggacaaggaaaggggatatagtcacagcaagagatccttattgaaagacattttgctgaccaagaagttttcaatctaactcagaatcccaacagtagtactgctttgtggagataattactgaactttgatctacttcattgttcattcacttgacatgaatcattaaataaactttgacatcaccccaattccaacatgacag

SEQ ID NO: 161596 - DNA, 224 bp, Homo sapiens
aactctcttcagagttggacgtaaaacactgaggtagctagaaatacattctaagttgaggtaatttggggcatggtggcatgcctgcaatctcagtgctttgggaggctgcacagggagcattgcttgagcccaggagttcaaggctacggtgcactgtaactgtccctgtgaacagccgctggagtgagtagccactggaatgagtagccgctggtttgagg

SEQ ID NO: 161597 - DNA, 328 bp, Homo sapiens
gcctctgctctcacctcctgaccctgacctgtgtccacaagggaggggtcaggcagcggatggtggacacgggagtagggaggcttcaccaccctcactgtgtggacttgatgaaatcactcttcctccctggacctcggtttcataatttgtttaaaaacaaacaacagaaaaggatgtgggactttagcaattttcagcccagagtgtgtgtctcttatttgccgcagcaagccactgctatccaggggcacgtgtctaatccctgtaggaggatggggtggaaataaagattgagaaccctggaccggaaggccgggatgtcctg

SEQ ID NO: 161598 - DNA, 193 bp, Homo sapiens
taaattctgtcatgagtagcctgagctccttttttgagagggtgggtcagtgttatgggtcctgtaggacttcagctacacctgggagaaattttggaagcttcagtaggaaagtgtagcttaaaattagcctatatttcccaggaagttgatacagcttatctccctctaccctgttgttgagcttgatctg

SEQ ID NO: 161599 - DNA, 411 bp, Homo sapiens
tattcacccaaacattcaaggggtccctcatgatgatttttgaatatcttcttctgcacaacttcttctccaggacattgctctgaaaattctagctactccctagaaattagatttctcttgtctcttttcagagacagttgggctctatttgcatttcctctctgtctgtgtagtctggaaattgcctttaggcagaaatgtagggcagttgtacttcgtgtatttccctctgtcagagatcacagtcctgtgctgccagttgtttaatgtctgaaaacagttatttcaaataacttgtaaacttttctagctgtttatggtaggagagcgtgtcctgtaacagttatcctctcatgtatagaagcagaattctattgttttgtttgaatcacttttaaactttttctt

SEQ ID NO: 161600 - DNA, 759 bp, Homo sapiens
aaagttaccttcttaaaagtatcatatggactgcctaaaaacagccagaaagttttacagggatatttttgatatccctcaatatcaagactaatggtaaatctaaaaatctaaaaagcagttccaactctcaatactaactgtttttgtgcaaatattttttctctggtctttttctctctctaaaccccagaatacatttggaaacgtgtgtgcaattgatcaatgcctcggccattttgaaaaataaatgttcaaactggataacagttcatcatacataatctataaaatgtgggttatttatccataatcataaacatttagtttcaaaaatccatctttctacactgtaactgaacataattttagaaagctttggtcactacttggtttttactttactatcactgtttgtccatcagtatgaaagtcatttccccttaaataatagccaaactctttaatcctaatcctgaactcactcactcactcactcaatcctttgttcatttaaacatttacaatggtggggttgcagagataatgggatcagcaggctccctgccctctcaatctctgaccacagccagtaacagtccctgttactcaggtctggaatctcaaaaggcatcagtggcattagacttccatctctccccatggcactgccaaggggggcaaggtggggaaggaagtggccacagtcaccattaggtacccccatccctacagccgcaaaccacaccaaataaacgc

SEQ ID NO: 161601 - DNA, 311 bp, Homo sapiens
acgcacataactagatacgcacataactagtacgcacataactagatacgcacataactagtacgcacataactagtacgcacataactagtacgcaataactagtaaagtaattggcaatcacagtagatgaaggaggttacctgcccctttccagaacacagagccaaggaggactctacctggtggtcacgctgcctcctttcaatcacacaagaaaggctgaggggaccacagtgtgcaacaaaatgcagtgcacgttgaaactcggttaacgcctatcagttgactccctctcatccatcactgtg

SEQ ID NO: 161602 - DNA, 122 bp, Homo sapiens
ctatacagttttccacagcagctaaatcattgttacaagattgccaacagtgcacaggtgttccaatctccccgcatccttggttacactggttattttgcttttttgattgtagccatact

SEQ ID NO: 161603 - DNA, 269 bp, Homo sapiens
aaactttgtgggggagaaatatttgagctggactttgacagggggtagagtgttaagaagtggagatagagaagaaggccactggagcaaaagcaccaaagtgggacagtacaggtgtggccagatgacagcctggtttgctggggcaggggagaggcagtgaggagtattgggccagagcgatgagaacctggcatgccagaaagggagcttatactttatcttttgggcagtgggaatcagtgagaatttttgagtaaggaaatagt

SEQ ID NO: 161604 - DNA, 403 bp, Homo sapiens
attgggcgtggtggtgcgtgcctgtaatcccagctactcgggaggctgaggcaggagaattgcttgaactcgggaggcaaaggctgcgatgagccaagattgcaccattgcactccagcctgggcaacatgagcaaaactccacctctaaattagtaaatagaaaaaagcagtttgctggtccaaaaatgtacctaaaatactttgaatatcatggcttttcttattcaactggcaaggacaagcaattactttttaaaagataaaaattacatcctactagttttctgagccgactatcctacctaccatcttcaacatgctttatttaaaaagacagaggttgggcgcggtggctacttgggagactgaggtaggagaatctcttggactcaggtggtgtg

SEQ ID NO: 161605 - DNA, 221 bp, Homo sapiens
cagagactagagcatttagaagatagcgtccttggacgaaaaggagagactgtcaaggcttgctcctcccatgactcaggcaaagaaaagaaggagaagcaagacccagacaaaagatagggtagagattaggagtggtagaacatacccacaagcaaaaaaaaactcacatcaattcggcttccaccttcccccctctcattttcctttgactcctctct

SEQ ID NO: 161606 - DNA, 317 bp, Homo sapiens
aaaatcttcaaagtcccaggagaagcactttccctcataacagacgtgtttcctgcccttagctttcaacacatgggaggttgttatagtcatgtgacacagaaaaagactatgggggacagtagcttccagtggagtgacagaaacagaaagagggtcagatgggaatcaaaggtcacccaggggctgtcatcatcaggggctggcctctgcctcagttctctcacttgtacccaagaaaagtccctgttcacttccccagagataggaaggcagccaacctggtgtcacactccagtttgagttcagtttccctc

SEQ ID NO: 161607 - DNA, 313 bp, Homo sapiens
ttttcattcaagagtcttggatttagtccacaaggcttaccagctgtgtgtcattgggtaggtctctttacccacttctccagttttcacccctgccactcttggctactgctttctaatctagcaacatccaatgtacaacataattccattccacactcatattctttaagttccctcttttgagaatgctctgcccacctccctcgacctgccccataccgctatgcttggccaacatctactcatccttcattcctcctcaccatctctaggaagatcccctgacatcctcaggctgggttgggaggct

SEQ ID NO: 161608 - DNA, 401 bp, Homo sapiens
aggctgtctctagaggatccactctgatgacacgtggatctgtgcgcgctgctctcctgtttgctactgggggagccgtatgactgctagttttgtaggtcaaaagtggtcgagtattgacagctttgtatataattcagtgcagtcgttttctcggctagacaagcggcagacctgagtggttccagacactttgttctcatgcaccttatcacatgactctgcctcagtttcctaatatgtaaaatgaggacctaagcagtcctcaccttctagggttgttttgagaattagaagggtaatagacacagcatccagaaccgtggcattagctatcattatttttatctgtatgattacaggttttcaccatgtgctggtgcaaaccagctttgatccag

SEQ ID NO: 161609 - DNA, 123 bp, Homo sapiens
ctcttccccctctgcttcaccaatttctgccaagacctttgggtctcttctcccctgacagttcccatatatttgtaggcctaatttaaaaaccacataaatgatactatgcataatcaaatc

SEQ ID NO: 161610 - DNA, 576 bp, Homo sapiens
acagcactcattccttcaccagatcacttttgttaagctgtgccatctttactcaccagtatacaacaatagtggctatagccactaccagtttatttccactaccgtacatgctcactaaagtaagaaaaattcaaattgttgtatacaacatacaaaattactacacactactgagttcactaaatgttaaataataaagtaggaggtatgttaaatgtttatattatgcagaaacttgtggtaacttttaaaatgtaagtgtttaagaacattcttgtaatatttaggggaaatagttgggatttttggatgggctgggtaaactatttttcctatttaaagtgatgaaacatagtctctagctgaaatgttgctatccaacatattttcagatacagattacatctgagtaaccagggatcctatatggagtagaaagagaattttcacaatgtttaagtgaaaacattcaactttttcctcttttatttcctttacctttccatttttacttccttttctgtgatcagtctattcatttcctctgcccatttttctaataggtattgatct

SEQ ID NO: 161611 - DNA, 337 bp, Homo sapiens
aagaggacacagcccagcatacttcatctcctggcatgtacaatgggcatgaccagaaactaggggctctggatctcctctaagcacatgctgggaagacatttactcttgtgtcactatcaatgtggttttcttgtttgttttttgtttttgagacagagtctccctctgtcgcccaggctggagtccagtggcgtgatctcagctcactacaacctccacctcccgggttcaagcaagtctcctgcctcagcctcctaagtcgatgagactacaggcgtgtgccaccatgtccggctaatttttgtatttttagtagagacagggtttcaccatg

SEQ ID NO: 161612 - DNA, 609 bp, Homo sapiens
gtccccatgcacatgtttttttgacattttcataccacagtgatttttaggaacacttatactgcattatagaggtatttcaaagtaaatttttaaaaattatgccttaaagtcttagtacgctatgtatcaatacagaagtattttaaatatggtaaaaacaacttagtcttaatcatgcaacaatttttgggagatactaaaaaatacttataattcccagaattctaatgccaggggctgggtgtgtggctcacgcctgtgatcccagcactttgggaggccgaggcgggtggatcacaaggtcaggagttcgagaccagcctgaccaacatggtgaaaccctgtctctactaaaaatacaaaacttatctggccatggtggtgggcacctgtaatcccagctactcgggaggctgaggcaggagaatcatttgaacctgggaggtggaggttccagtgagccgaaatcatgccattgcactccagcctgggccacaagatcgaaactctgtctcaaaacaacaacaacaacaacaacaacaacaacaacaacaaaaactgaatgcctttaacagcacccaagtcacctcttgaatgctttgctgc

SEQ ID NO: 161613 - DNA, 469 bp, Homo sapiens
atctaggaaaaaaaaaaacctcaagaaggaatggcctctggggcaagggagccaggctaggggatccctcaaggctgacaggagagaggaatttcagagagaggagggaggcagtgccagaacttgtaaggagacggagggtgaaggtgtctgtgttcacattctaactatagttacctttgcttcctgagtgacatttgtggctcacattggatctgagtgctacttcctctgcccagttgaagcagcttaattcagaggctaaagggagtttctgatctttctaactcagtttgtgaagccagttaaaataagaaagactgcttatttcattgggcaggaaaaacttgattatgtgaagcagtcaggaaatggagcatatggatgttaattacattttctggatcacacaagatcaaccagaaagagccttttgtgtttgtttcaatcctgttattggaaatctcag

SEQ ID NO: 161614 - DNA, 570 bp, Homo sapiens
ccaaacacacagaggagttacatctggctggtgctaggatggaaggtggggcaggtcaccacctcccagggactgagtgccaaagcaaggaggaagattggaggtgaggctgtatggagacagccacaggctcacagagcttgtgctgagctctctagggggaagcttgatctgcctgggaagcttccagctcctacctcctgcagagcccagaatggtgtccaggaaatatgtggccattgagtggaaccagccttggcatggtagcctgcaggaacccgcaggctagagacatggccacatgagcagtgaggatctcccccgaggagggtctacagtgtcaagagagggcaagtccacttcaggatcaaccttcctgtggccccttactttccttggtccacctttccaggtcacccatccagactgtcaccagggatcactgccctgggcaccaacccaatgcggggacaagtagaaaaagagctctggggaaaataccaaagggaatagtcactcaattttattgtgatgataaactcctggcaaagttccaggcctctctctgtc

SEQ ID NO: 161615 - DNA, 293 bp, Homo sapiens
acttattctcagacatctaaaccactaacatccagactggggatcccaggagggtctacagtgtcaagagagggcaagtccacttcaggatcaaccttcctgtggccccttactttccttggtccacctttccaggtcacccatccagactgtcaccagggatcactgccctgggcaccaacccaatgcggggacaagtagaaaaagagctctggggaaaataccaaagggaatagtcactcaattttattgtgatgataaactcctggcaaagttccaggcctctctctgtc

SEQ ID NO: 161616 - DNA, 257 bp, Homo sapiens
ttacagtgtttccttccaccatctgataaactgtgaggagaatggataacaggaaaggtcaatttttcttccattttgcagtattttgcttgttttccgcatctcacccatctccagcagttggcgaacacagcccacgagctgccctcagagctcccctggccttgtcctgccttggccctttaatcctaatgtgcagctgttctccctgccttcctttccactaggaaccctcctggctctcttcaatgttcctt

SEQ ID NO: 161617 - DNA, 617 bp, Homo sapiens
gcttttcactttcactaacaaaagggtctacggctcttcctttgtgcttggaaattcaggagcacctcccactgcaaagattaggttatgaatctaacaaatgagaacccagtcttcaagtgcaatgtatttgcctatgatcaagtttgctagcagttgagaatctatagttttgcaacaccacgtgattctctctgctgtattctaaatcacagaatatgtggtattattccacttgttctatcacacctacttacagacatctcgatttctgagatgtgggctcatctctcaatatccttccagtgtcatttcaaatgttgcctgatctaactccacaacacttcaaacacagaacaccacctcttgtgctcctaagttaaacgtgatggtggattaatcttggtcctttagttgataaatcaaggtaatttactgctgctatacccatacacagtccctcccctgctggatctcatgcagtgtggctttgttgctttcacttatgattttgctgctttcatttgggtcaatatcattgtagttattttgtagacaaagtagtaaaaaacttgatttttccctatcctatatatctgcagctcactgatttaaaa

SEQ ID NO: 161618 - DNA, 620 bp, Homo sapiens
aaagcaaaaataaataaatgggactacattgaactacaaagatttgcacagcaaactaaataaccaacaaaataaaatgacagcctattgattgggaaaaatatttgcaaaccatgtgtctgataaggggataatatccaaaattaataaagaactcatacaactcaataataggaaagcaaatagcctgattttaaagtgggaaaagaacacttgtcgacatttctccaaataagacatgaaagtggccaacagatatatgaaaaggcacccaacatcattaatcatcaggagaatgcaaatcaaaaccgctgagatatcacctcacacccattaggatggctgttatcaaaaaaacaaaagacaaattttggtggagttgtggagaacagggagccctggtacattcttggtggggttatagattggtacaaccattatgaaaaataatattgagatgtctaaagaaatttaaatgagaaccatcatgatctgatcaagcagtccttcttctgagcatagacccaaagtaaatgaaataatcacctcgtaaagacatccacactcccatgttcattgcagcactattctcaatagccaagatatgacaagagcctatg

SEQ ID NO: 161619 - DNA, 305 bp, Homo sapiens
tgtcaagttaacctaactcgtggaacacagcattctggaatgtgacctggccttccagaaaaatcattaaacaatgtctactgttcataataatactgaaacttccaaaaaaatcacagccacttgtatgttcagtgttttacataaaatgcaacgaggtatgtgaataatgcacaaatttcacagtaagaactgtactatattttccaaaatgtcttctacaaatgcatttatatatgtataattctcatgccaaagaactcagcaaatcactttccaccaacaaatttagtacatacttacgg

SEQ ID NO: 161620 - DNA, 466 bp, Homo sapiens
ttttctaaaattctggatgtaagacaccaaattaagttttctattccccgagtagtgactcacgcgaacatggtggctgcagcgtggggcagtggcacaagtgtggaactcacagtgaaggggctgctctctgttaattgccaagggtttcaaggaagccacataacccctctgccctagccacactggtgttctttctgtcccagaacacatcaagcaccgtgctgcctcagggcctttgcacacactctccctcctgcttgaaatgctctcggcactttatatggctgtgtcctgtacatggcttaggtctcagctcagatgtcacttcttcagcaaagccttcctgaataccttgcctaaagcagtactcctgccactctctccacattaaccctgttacttcttcctagcactttgttcctagaattattttacttgtttgttttcgtctctcaccatacac

SEQ ID NO: 161621 - DNA, 301 bp, Homo sapiens
gttacttccaagcctggcagtcattcagaaattaagattcttgatcagttatgtattcctttgtctctatcctaaatttgagctcttagcctcttaaagtaaatgtcaacctacttagttcaattttctgccttgtcagcatatcattgtctcatgttctgcattaatgacagaaaggatattaaacctattaacactgagcggattctgcttttattgtcaatgaattcttcttctgtatcattctcttggcctaacttaactaatgcagagtgctgaatattgagtgctatgctaactt

SEQ ID NO: 161622 - DNA, 439 bp, Homo sapiens
ccccctcaggggggaagcccctttccaacaactgatgtgaaaaggctcctgggccctgctcgcccaatgcctgggccaaggactggccattggagaggagactgctggcccctgtgatggtgaccttgagccctgtggccctagcctgggacttgagagggctcagctgttgagccagagtccagagatcttacacggaaagcactttgagaccacagatgctccaggaagtgctactgagtagccatccccatacctgccagtcactcagacaatctaggtgtggagggaggggcttgggctccagagtctggaaggcccagaccaaagaggctcctggttcctgcggtccagcctcagtgggatggagccacatggagggtgatggtggaggggaagcacgggtgagtcagtacaggccaggttttgttgcagtgac

SEQ ID NO: 161623 - DNA, 303 bp, Homo sapiens
gactaaaatagacactgctaatcattggtggggggtctggggaggagacagtaactttccctgttctccaggagttcacagagatagaaaaataaataaatgtgacactgtgtcatatgttttactggaaatgaatatacagttggtgagatggaagctcagaagagagagaggcaaattcttggtgagggagggtggtaggttaagagacatcccttggaaaactaatggttctgctgagtgtagatgggtagttgagcagacaaccaaattgattgggattggtgttggggtgcagggaga

SEQ ID NO: 161624 - DNA, 409 bp, Homo sapiens
tccaattcaggcttttgaagacatactgtatacacatgatcaatgagcttgtagtgcagtgcgccacccctttatgaaggcctgtgacgtcctttgtgatccggctactgcctacctttccacccagatatctctgcttcctacttcttgagtactaagttgcagttacaccggtctccaatttcatttcctgatacacaggaagtaaaaagtaggcaggcgttaaattataaagatcatgcactttttgaaaatacctgtggtaactttatgcaactttactttgtgtgaaatccatcaaccttcatcttctccctcttaagatttgggaatatctttcacgcttggagattcataacatcttgctcacacttatgagaaacatctgtaattttagtacaacaatcat

SEQ ID NO: 161625 - DNA, 452 bp, Homo sapiens
ccctcacattcactcaacactcactcactgactcacccagagcaagttccagtcctacaagttccattcagggttaagtgccctatatagttgtatgattttttatcttttatactgtatttttaccataactgcctagtcagtacagtaacatgacgtacaggtatgtattctggaagcaacagaccataactatctatgtttgtgtaagtatactctatgatgtttgtacattcacggaactgccatttctcagaacgcatccctgttcttaaatgatgcacaactatatctactgtcactctaagtcaataatttcatccaacagtgtagtaagaagttaattaacaactacgtgaatggaatagtttagaactggtcatgctttacttaaatttcaatataactgagggtaagtgaaaaggaagctttagaacctgagcgctctcgtc

SEQ ID NO: 161626 - DNA, 379 bp, Homo sapiens
agagccgccatcaggcacacacagagtcccaggaaacttggatccccaggtacccacaatcccagaggctgcagctccagccatggcttcctcatatgactccaagatagaggtggaatccacagggctgagcagcagacagatggcaagcctcacctccactgcatctcaccagacaaggcccactggcctaggaccctgtgcagctagctaccccaaccccacctgaggtctcagctctgcccttccctgggatggggctcccagaggtagcaggtgggccactctttttgctgccctaaagcccttgctcctcttgccctcagacttgggatggagtgcagtgattaggaactaacagggacccacagcacaggat

SEQ ID NO: 161627 - DNA, 311 bp, Homo sapiens
gcaccatcacgcccggctaatttttgtatttttagtagaaacagggtttcaccatgttgaccaggctggtcttgaactcctgacctcaggtgatccacccgtctcggcctcccaaagtgctggaattacagacgtgagccaccacgcctggcctgagtgtatttattttacatatttatatttgaactgaaacttttatgaaccattttatttaatgcattctgatattttatattatttcattttaatttttttccaaacaaaacttctcacatatttattattgaaccaacctactattgtagagctta

SEQ ID NO: 161628 - DNA, 304 bp, Homo sapiens
tatacaccccccacagacattaacatgtacggatgatcagaagccgaaccacctatgtgagctgcctgcctcttgtactcacacattccatccttacacactaacagactcctatactcctagtggtcatatctgtactactcttatgtataaacacacactctttgtagttctcacttgtctgccacactgtggcattcatacccagacccctgttgcaaatcttcacacagagcagtgttttcacacagacacgtgcatctacctgctcacacatgtgtgtatacccaccaacatttcactt

SEQ ID NO: 161629 - DNA, 229 bp, Homo sapiens
attcaaattttcatttgttgtaagtcatttcactgcctgactcagtttaactcggtttagtgccattcctgtgtagcttctgaccaaggcaaggcactgcttgcttcctaacttgcttcaggctcaaaattcctggactggttcttcaggaccccatgcggtatgaccctagcctatttatgtaaattaatgcttattctttatccagttaaaacctccataacacaga

SEQ ID NO: 161630 - DNA, 373 bp, Homo sapiens
taccatcctttctatccaacgtgggagaccgggcctacttagagaaaatgctgatcctataaaaattggcttcatgagactgccaagataaaaggattctcagtgcaggacggggagagaggaagggccaatccatcatccaggctcattaagcaactatttgtaggacactgtgcccagcgtcttagaaacaaagagcagcctaagacacagcccctggctcagcagagagatgaacacataacctcttggagagagaggcgtcaggcccaacacaggccccttgagaggaggccgggatgtatggccctagtatgcaacgtgttggctgggaaagtgaagaaagcttgttctctccctgaccaggctacag

SEQ ID NO: 161631 - DNA, 237 bp, Homo sapiens
tcaatcattttatcatagttcagtattttcctttcggtagctaatattgtcatttgggtcacacattaactgtacccttttagttttttttatagagtttgtttttcagaaaactgtttaaatatactttcactaaagttgtatgtaacatagtgttttgaagccaacagtggcctgattggggaaagatcagataagagtattgggtttacttttgccacacagttagtacccttt

SEQ ID NO: 161632 - DNA, 163 bp, Homo sapiens
aaaaatgactcattgctctaaagtaattatatttccattaaaaaaaaaaaaaaaaaaacttctgcaagtgaatgaggcaggaagtgtcctggtaactgtgcaaaggaaaggctgcagtctttgcataacctgtttccttgaagtgtcagagaaatacacaccg

SEQ ID NO: 161633 - DNA, 633 bp, Homo sapiens
ccgagcctttataatggttcccaggattgaaatgtataaatagttcccagggttgacattggtgaattttgtttggcagtattcagtaagttgtttatgaaatacttttgaaagatttttggacacagtttaacttaaatttgtagtattgcttcttctaaaaattagagcatattccaaagactctaacccaatttgtgaagaaaatagataagtttagacttgagtttgaacgaagaaagtatataaaaattaaaagctatttctatttcctgcctactggagttcagaaataaaatataaacctcagtggaaaatagtaataccttcatatttcattttcaatcttgaaccttgagtgatactgtttttttcccaagtttaaaaagttgtggtaaaatgcacacaatttattgtcttaaccattgcaagttacagctcagtaatactaagtgcattcacattgttgcgcaaccatcaccaccatccatctctagaactgttgcatcttgcagacctgagatctatacctgcaacaataacgcacaaccatcaccaccatccatctctagaactgttgcatcttgcagacctgagatctatacctgcaacaataacgcacaaccatcacca

SEQ ID NO: 161634 - DNA, 521 bp, Homo sapiens
ccctattggcataaattgttaacactgtcccttaatctttttaatctttatggtgtttttcaatatgctcccccttttctttcataatattatttctatatacttttctttttgtcttgattaatcggccaaatgtttgtctattttattacaaaactaaaataaccaaaacaggctggtactggcataaagataaacatttagaccaatagaatagaattgagactgcagaagtaaactcatacatatatcttcaattgaatttctacaagggtgtcaggaccataccatcagaaaataatatttttcaacaaatcactttgggtcaattgcatagatacatgcaaaacaatgaagctggactcctaacacatactatattaaaaattaacttcaattgattacagacatgaatacaagagctaaaactaaaaattatagaagaaaaagtaagagtaactcttcatgacctttaatttaacaatgaattatcaataatgataccaaaacacaagcaataa

SEQ ID NO: 161635 - DNA, 427 bp, Homo sapiens
aacccccatcaccctcagccggaaaatctcttggtcccctggtcacagtgattgaagtacccccgaccacaaccacacaacagggagtgatgtgggggagtcctgggcttctagaggctggttgtggcttcctgcctcagtttctttgtgggcaagaaggcaccagaggcctgtgacctcccctgctctcactgggactggcccccatcaggtttatgcagtgaggcgcagaccctcagcaaccgtgtcctgggccttctccatccccaatccctcccatgtcacctcccgtttcccattactgccaagctccagtgcctggggcaggaggacaacccatgcagccagccaggccatgctggcagaagctgctggtgggggcatctgggcatgctcaatggcaccccaagagctaaaatggactcta

SEQ ID NO: 161636 - DNA, 328 bp, Homo sapiens
aatgatatatctaaacattcagtataaacctgatctataacgatactcaaatattgatgaattgataaggaaactgccatattacagttgtaaattactaaggcacacagaaagacagaactagcttcaatttggacagtttataagggaaaaattcaactgtgatacctaggtagtacatatattagataacaaagacaattaacttccctatttgggtcatttaagtttctaattaaaggtgtacgacattctaaaccacttgtctttcttcttcaatccccttcttacattttcctgcttccatttccaagcatgcaatctccct

SEQ ID NO: 161637 - DNA, 773 bp, Homo sapiens
agaaaagacaagctttgctgtgggtcagcaacaaggagacaggatgcagctcacatccatctccccttcctggccttaaggcagtgccgtcattaggaaaggtctggggtgggttctgggattagcgggtgattgccggagggaaaggggaggtctgaaatgtcccctgggcatgtgcagctgtgtcttcgtgcctctgcagggtcacatgtgctgattcaggggcagtgagtatgaacgtgaggtggaaatttgggccgtgatgtcagcaagctgctgcccactccagccggccctttgggtccccaggatctcaggcagttttattctcacaaggagggaatttccagcacgctgctgctgttcttacctgccgtcatgtgagctcaggaatccccgctgtcagtcaccggtctttttaacccttcggggcacggtgtcacctcccctccccggccccagctgcttctcctccagagctggattcaggactgaaggagggagggaggcagcaccgaggccaggtctcccacaggcaatccccagcacccgcgatggatggacgagggaaggatgttttgtggaaacggtatttcccaaacattcctaaaaatcaagttttagtgagttgaacataactggtcttctaactactgtatattcatctctgggtccatagaagagaacagtgtttctgcatctccccagatgtgagacggctcctataaaaccctcaccgaacttccctggtgcagggtcttaaaaggcggcca

SEQ ID NO: 161638 - DNA, 159 bp, Homo sapiens
cttttcttttacccattttagggaattcttaatagcgtgcacatcaagcttttttgccttctcaaggagggtttcctcatttgaacttaatccccttggtgcacaaatgctaaaattactagtgttaatgactgaaggatgcgctaacctggattgaag

SEQ ID NO: 161639 - DNA, 570 bp, Homo sapiens
cagatcacctctctggtcttaaacaaagaaccctgaagtcttcccatcccagccagactacaagccaagaccctaaaaaagggcacaacattccatataatcaaccctctgccatccccccattacccagacagcctggtcccttatgacttccctcatctctcactatgctccagacatgctgatatttttattctgaaagcctgccaaatactcttggcctctgggcctttgcacatgctgactggaatatttccacaccccaatctgatatccaaatagctctcttttccccttccttaaggtcaactcaaaagtcagcttctcagggaggtttttttctggccacattcaaaaaattaaccttctgcccactgtaatgccaaaaccttatactcttttttcctccctatacttgccatcatatgacacaatatatgtctacttatctgttatctctctcttctacaagaatataaaccctatgcaggcaggtatttctgtgtgcactgttccctgctgtatccccagtagctagcacctggcaaaaagagaaaagattagagaaaa

SEQ ID NO: 161640 - DNA, 597 bp, Homo sapiens
ttcaaaatgtcagagttgtttgtacaagtatgccttctagaatatctaaaatagaagcctttgttattgattcttctattatgtttcgtatgatattcaaaattaaagtattttcagaaatactctcatgcaagcaaaatacagagtggaaaatgaacaaaatgtgaaaaacacatgtgaaagcattttattattaagcatctaataagtgcctgcttcttgtttgaaggtaggggaggaaggaagtgggtggcacttgtgtttggtatgttttgtggcacatcaccctctctgattggataacttgtcaaatctcagttgttttttaaaagctaagaggagtgtgactggtgagatctgcatttaggttttgaattgtctgtctgagttcaggcccagttattttatatcactgcaatgttgaaaatcacatttgatgatctcaaaggcaaatgttatagcttaaaaatgaaagaaaaatcagaatcaacccttctcttctccctattttgaaggggtaacactatagcctttaaagctaaaagggggaggaaagcttccctctggtggtaagcagtttgtgtacatttttccagg

SEQ ID NO: 161641 - DNA, 339 bp, Homo sapiens
accaagtctaaaagtggtattggccaggtgtggtggctcacatctgcaatcccagcaccttgggaggccgaggtggatggatcacctgaggtcaggagttcaagaccagcctgaccaacatggtgaaaccccgtctccactaaatacaaaaaggactcaggtggtgtgcacaccacctggagaggggcgtggtcctctggatggcccccgacgggctctatgcgaaaagactgtgccagagcaggatctactgggacgggcccctggcgctgtgcaacgaccggcccaacaaactggagagagaccagacctgcaagctctttgacacacagcagttct

SEQ ID NO: 161642 - DNA, 1290 bp, Homo sapiens
agaataagtatgtatggctcaactttagtttcttaactaatttggtttgagatgatttgataaatgaatgtattggaacaaaatgtaataaatagtaccagaatagtatatctataaagtttatgctgatattttttctttagcttttgtattccagtctatccttccctaactcaccttccaccccgcctgcaaacatggctttatttatttttatttttttaagatggagtctcactctgtcgccgtggctggagtgcagtggcaagatcttagctcacagcaacctccacttcccgggttcaagtgattcttgtgcctcagcctcctgagtagctgggattacagttgcccactaccacgcctggctaatttttgtatttttagtagagacagggtttcatcatgttggccatgctggtcttgaactcctgacctcaggtgatgcacctgcctcagcctcccaaagtgcttagattgacaggcatgagccaccacgcccagccacaaatatgctttattcagtttaaagtgtggatagtcgttctggctaattttgggcttcctttaaagaccatccagggcagtctcagccttagtaacagcggatagacacaaattttcctttataaatggatagaataattcacttgttacattgggagcatttatttgagaacagactcctcaagcacttgtggttacttagactttatttaaaagttttttctctatgtggcggggaaaactctttttaaaatttaagatatgccccatgagagcatttatttctacatcagtggttctcaatggggagcttttcccccaggagacttgacaatgtctggagacatttttggttgtcataactaggagggtgatgctggcatttagtgggtagataccagaaatgtagctaaacatactataacctccacagcaaagaattatccagcataaaatgtcagttgtggcaaggttgagaaatcctgttctacactaaccgtaatttttagtccattgtgctattttgtaaatccattactccctacatgttttctgtttttccattgttacaaactagttggatacttcctgaaaaaaaaacaaaatctcttgggctcatatatggaagtgcagtagagctgtgaggacttctttcgctatttgaggctgatctttatagttggctaaatagctcagtagtaattttagaactcctggctcacttaaaaggttgtcaagcccaaggaatctgatccagtctaataagatccactctaataaaat

SEQ ID NO: 161643 - DNA, 292 bp, Homo sapiens
acttcctatctaagtaactgaactacagcactgtcacaacgctggcatgacatagaaggctcgccacatccttcatgtgtttagatttactcctagtgtgctgtggggccaaattgtggactcttttttcctatctctgttctttctagatgatcttgttcagtcccctagctttaaattctatctgtaggccaatgacctccaaatgtatatccatagcccagaccgaccctccagactccagactcacagagctgactctctcatacaacttctctatttggaatcctaa

SEQ ID NO: 161644 - DNA, 249 bp, Homo sapiens
tcacgccattccccggcctcagcctcccgagtagctgggcctacaggcgcccgccaccacgcccggctactttgttctatttttcctagagacgggctttcaccctgttagccgggatggtctggagctcctgacctcgtgatccacccgcctcggcctcccagagtgctgggattacaggcgcgagccaccgcgcccgcccggcctgctgtaggcttttgtggcttccccgctgcctcccttcccccc

SEQ ID NO: 161645 - DNA, 216 bp, Homo sapiens
gactcccttcccaaggtatagttggatacaacccacttgacttgccttaaagaccccaccctctcagggactgggctggtctatgcagcagtgaccctttctcagtcacacggtgacctttggccctcatgcatcccccaaatctcccagttagaacaccctgtggaaaacctgcttggataacgacctggattccaattaaggctttagtcccgc

SEQ ID NO: 161646 - DNA, 333 bp, Homo sapiens
ttatatgtaccatattttaaatccccgccccacaaaatgctgctaattaaatgatgacaggcagtaggggtaaatgtgcatcctagaatggatggaatacaggatttattcacctgttgatatattatctgtctggcccccacttataaatgtaggttctctgaaagtaagggcctcgactagaccatggctgaatgccctgacaagagaaggtgctcagtaaatccctggtgggtgagtggagaacaccttccaatccccgcagcagctctgtgaggaagagatggggctccccatttcccagatgagcactggaggctcagtgaggagcgg

SEQ ID NO: 161647 - DNA, 527 bp, Homo sapiens
gaatgagtattaaaaaagttgaggcaggatgtccactgtctgagctggaaatagtcttgcaattaaggagggtgaaaagaagcttggcttgagagaaacggaagagggagttgaggtgattgacgttccccaaggaccctcttcatttgtgtttgtttcaaggctttttctggtgacatagataattactggattgaaggtctctattttgctaggctgtttatgaggagattactaaacaaaagataagagaaagtcaagagctgatgaaggaaagtaatctagcctgtcttgctctctgctttagatggaacacgtgagggtgaaaaacagatcattgattccagttgatgtttataatatagaaatagcagagttatcctcctttacagaaatttcttaaatccattagtaccttacttaggtggacttgttcttgtttatgagattgttcacatgagtttgcggtcaagaaaggtgagccttctgcttttaggcttaatatttgcaaatccctgtgaaattta

SEQ ID NO: 161648 - DNA, 427 bp, Homo sapiens
tacatgtgcttgctggatgtggtagccgttttcaggtccctctgggaatcgaacctgattccccgtagcgtgatcccaagtgcgtgtgacattaaatattccttgaaggaggaatatttaagttaaaaacagaaaggtaaatagagtaaaccagaagaggtagggaaaagaatattccaagctgaggaaacagaatgtaaataggaccaaaggggaagaactttctccttttcagggaaaggaatccaatatatctagagaaatggagttcttcagataatgaagtggctttggagcttcatcaataatgtcggactttattttaaaagcaatatcacacgcaattgggatggtcggcagaggtttccaggggctaacgagaagatatgtgaccactagagcagaaagcatcacagcatccgagggt

SEQ ID NO: 161649 - DNA, 123 bp, Homo sapiens
tatcaaaaaaaagaacaacgtacaatcaaagtcctcggccacattgtagaactttgggggatgctcgctccaaccgactgctgtcaccttcaccgttccagtttttaaatcctgagtcaagcc

SEQ ID NO: 161650 - DNA, 470 bp, Homo sapiens
ggggataggggagtgggcacagtttatggagatagaaaaatccacaacagcttagagtggcagaactctactagtcttctgtaactgcaacaagtatatttgaaaacaggttcttcatcctaaaggctatggagcttttaagggttttgaggaagttttgtgtcccctccttctgggacacagagtccagagcttaaattgaatttaaatatttctaagaagaactgaagtccatttcatacttttgcatgacttcaagtttgcatttgcggcagttccattccatattagcataccccaaaggcatacattctgtggagaaggcagagattgaaatgctattaaggaagatcattgtttaccagtgggtcaggtggccagaccccattttacagcccatctgtcagccacagcaagccaatccgggaagaaggaacggaggaagaaaaagttagagtgagaaacacctg

SEQ ID NO: 161651 - DNA, 552 bp, Homo sapiens
caaatagatatgtgtattgtaattaaaaatttaccatactagagttttaaaggacattctttcccaaagttgaacccaaagtcccttgcttatttgtaaatgtgtatatttatattttatctattcttctaaaactaaaaagaagtttttttatttgatgttattccttttcttttttagcaacagcaacaaacaacagttgagtttgtcatttgagctgttactgtctttattgaaaataataatgtctgtgcttaagtatttaccataaagtgctgagcccagtactgtgctcatctattgacccacattatctcatctgtttgcaacaaccctaagagatgcattctcttaatccccgttttacataggagaagactgattcttaaggacgccaactaacgacccctcttctagagagtggggaaactgagattcagctcccagctctttgtctcctaggcttgagctcttcatcttactatgctgctttttccctcaatttctttttcatgccttcctttgattactttgtgctgtttttaattcttg

SEQ ID NO: 161652 - DNA, 329 bp, Homo sapiens
tgagttagcatttaaatgtgagcccttaaaagagaccaagtgtcactgccccattatacacatatcatgatttaagcacatatgaatataactgcaggctgtactctaaataaatataaacaaacatcaactttaggagataaggtgataaggtaaaactggacaatggacatttatttaatatctattatgtgcttggaaatttgaatcctcacaacaactctgtaggacaggtgataaaatatttcaagcccaagcaatggcaatttgaactatgtagtcatagaacaaatagaaaatgttgaattcacatacagattggtcaggca

SEQ ID NO: 161653 - DNA, 281 bp, Homo sapiens
ttccagatgtttccagggcagcagccaactcttgttctggcagccctgatcacactgcagtaattacattatttgtggcttcaattttaaatccattttctggtcattttacagtaactcaatggttcacagtcattgcaggagtccacagcctgaatgctgtccccccactccctttccatggcaattgtagttatggcaaaaattatcccaatcaatttgtgtcttaaaaggaattgagcagcccagagaataagtgaaggcggaggagcctggggagc

SEQ ID NO: 161654 - DNA, 176 bp, Homo sapiens
tgtaaaactgtagtacattgtcacaagcagagcattgatagtgatatggtctgcagatcttatttagatttcctccagttttactgtacttatttgtgtgtatctatagttttctgcaatcttactatatgtttatgttcctgtgttcgccaccataatcaagatattaacagttt

SEQ ID NO: 161655 - DNA, 485 bp, Homo sapiens
acttcccttttggagcagaaagcaggtgcttttaaagggggacttggcatgttagatgaacttgccctgtagggagtagctggtgaagggaggtaaaaggttataattgcatttctgaagagctaagtaggaagttgggagcagggggaaagcagaaagaaaaaagaacaaataataataatttaaaaaataactctttttcttagacaaacgggagtactcagttacactaatatcctatataagcaagcatcatgtttgaggtaggggtgttcctcctcttgctttctgaggacatcttactctttaataagagtagtttctaataaaccatcttaacttcaccagactctgtgattcaccctgaattctttcctgtgtgaggtccaagaacccggtctttgggtctggtctgagacccctttacagaaacacacagacatcaacctgctctcacatgtgggtggaatatgctataccccaca

SEQ ID NO: 161656 - DNA, 355 bp, Homo sapiens
acctgctcacctgcaccgcgggtggaggtgtcaggcagtgaatacgttgacccgacctgtccctctctccagaataacttcacctgtgttcttgtaccagttaaataccaagacagcagttggtgggattttatcatttattttagaaagacaaagcaggtcatgagatggtgttggaggagaagcatcttgtggtctcagccaagcctgcgtccaggggcaggtggcatgcaacgtatcctttagctgacggggtggaggtgggagaggctcacagtggagctgccactcaacagatgggtctgcacatcgtgtttcaaaagccatacttcgtgcatgagcgagatgggtaaat

SEQ ID NO: 161657 - DNA, 470 bp, Homo sapiens
caatccagtgctctcagctgagatggcagatctgtcattaattaaggaaccacatacccaggcaggccaataacatggatatgatcacataacattaagtccatgcactttaaaattatgttcaagttttgtaatcatcatgatcatctctgtgttttgttacctaaggtgtctcagagacatttaaaaggccatgggatattagcttggtggttttaatttgaaagatttaagagaatttgaggtgttcttgagaatcctgatttagttcaaataagtttggtgtatttgatttaaaacagttgtttacgctgggcgctgtgtctaacgcctgtattacagcactttgggaggccaaggcgggcagatcgcttgaggccaggagcttgagaccagcctaaccaatatggtgaaaccctgtctctactaaaaatataaaaattagctgggcatggtggcgcacgcctgta

SEQ ID NO: 161658 - DNA, 141 bp, Homo sapiens
gatttttggttcttatgaaggtgctttcttgtatggatagttgttcaatttggtgttcctgcgggaggatgatcaatacaggcttctatttggccatctttctccacctctgactataatccactcttaagtctttgttaa

SEQ ID NO: 161659 - DNA, 236 bp, Homo sapiens
cttggatgaattcatttttctaatcttcaaagaatcaaatatctttatagtgtccctcaagtgagtaagactttatttcatcataagaaaaaataatacaattttaaaagcttaaggttgccagcaagacacaccctcaatgttcattctccacatacagcttgctctgatttatggtgccagtacttttggccacacaattcactacactttgttctcctggttactggtgtcag

SEQ ID NO: 161660 - DNA, 492 bp, Homo sapiens
atgtcttagacatttgggaaccatctaggcaagatcctgttgagttctgtgatgctacggatggattggagagaagaaatactgtgttacatttcagaaaggctgtgaacccaagtatgctgttctattacagctttagttttccttacaaatactctcatagcagctttgaaaaatgaaagatctcagggtagcagaaaatacagcaaacaacaaaattctttttaatgaaggctgaagtcccacgtctgcatagttagtccctaaatggaattttaatttcaccttaagacctaccacaaatggaattttcaagcagcagaataaacaacttttaaaggaggattaagacaaaagaaaatcatttactaaactccttagggaactaaaacaccttctaaaactatgttcactggaaagctatcttttcagaagcctatagaacacagtctaaattctgatgagcaataactaagttaagctgcctgtgta

SEQ ID NO: 161661 - DNA, 336 bp, Homo sapiens
ttaatcaattatttgttgcttttagaaaaggttgtgcaaaaacattagctaaaactggttaaaattaaagcacagggaaagaacttttctgaaagatattaaacatactattaatttattttaaataggatggattggtaaaaataaaaatataaaagaacttaagtcaaaattcattgtttaagaacctaacaatcataaagtcatataaagtagtatgcagtaaaatgtgggaaaactataaaaatgttaatttttatagtaacttaacacaacaatttaaaaaaatggttgcaaatggctgggcatagtggctcacgcctataatcccagcac

SEQ ID NO: 161662 - DNA, 254 bp, Homo sapiens
atatgaagatcaattaagacaaggtccctgccctcaaggagcccaagtctagtagagccagaggaagtgttaaacacagcatagtaagggagtgtagattctgtgctgggcccagaccagcattaagtcctggcccgggctaggggagacagggagaggttggttctccctggatcagggggtgcctgggagtggatgtaaaggttgatagagaaggtgacctggagctgttttgggagtagagagtagagcgg

SEQ ID NO: 161663 - DNA, 235 bp, Homo sapiens
  misc_feature (198)..(198): n is a, c, g, or t
tactagggatactttcccactggggtatggtgaagggatgattagggtctggtgctggttgtcaagccatcctactgactgctggaagaagcgtcagaagctgggcttcctttcttatttcagtgtagagctggcagatgaggtgcaagctaccccttttgaatgggttagacttcagccttttttttttttttttgnaaagggtttcccctttttgtggccaaggtgcttaaga

SEQ ID NO: 161664 - DNA, 444 bp, Homo sapiens
aatcaaaatataattttcagaagtattcaggaccaagaaaacgtaattgctctgacaactgagagacctggaaaaacttttgtaaagttaacacaagtattgctgccatgctaagaaaactcctttttccacatcagctaccctaccctatctacttcaaataatcaaaacttcttgccatccgctcctagtgccaatactttcccatctaaaaatttgcgtttgatccttcctgtgatggatagtgctattgctaaatctatacttccaggaaactagaaagaattttaaattgccacttctgtttgctaacatcttcatcctatttacctactcccctccaaaaacagaacggcatttcaccttatacactctgacctctgccatagggatgcctttgagttggattaaagaaataagacaacttcctttatatcggtgact

SEQ ID NO: 161665 - DNA, 501 bp, Homo sapiens
tcttttccacaggaatggtaacattagcaaggcacaatggatacataactaagagagtgttactattatctataaagtattattaaaacacttaaattcttctgttacaattggcaagtcatataattatctaatgtaaaaaagtacttaagctccctgaaatacacatattcaaaagtgggtttcctttaaaaatgttaactcagaaataaaaaaaaaggatatattaaactatccttaatcacaatgaataatgtaaatatttctattatccatcacctctctaccacctacaggataaatttcaaactatcttagcctggcatttcaagctctttataaatgggtcacacccacatatacacttcttatattaggcctctgcagtaatcaggttaatctactcatcgactcagtgtctcctaagaacacattacataccacaaacttaggcttttactcatgtctttctctttgcacctctgtgaccctggaaaagta

SEQ ID NO: 161666 - DNA, 366 bp, Homo sapiens
ttgatgggtgtttagaatagttcctatacctaccaactacactgcagaacatgttttactttgccctaacctaaaggcatgggcagtcatagcacattgatgtaaactgcaagtgccctcagagaacttccgtaaattcagagggccataagagtcccacaggtgtgccctgagcctcagcagccaagactgagggccactgccccccatttcagcctctatttgtattaaaattgtgaagaggccctgttgggtctgggtacaggccctttcccaaagctgcatcttagcattctcttcagcactgtttattgagttggcctggctcactctgccaaagcctccttatctttccaagctgactcc

SEQ ID NO: 161667 - DNA, 427 bp, Homo sapiens
cttgaaacatcgtgtctggcttcagggctgccttgcctcactcttgctagctgtttttgctgagtctcctttgctggttctcctctctaaaatgttggaggttcccaagaactcacttcttgcacagctttttcacctgtacttagaccctaggtaatttaaccgggtttcatggctttaaatgccatttatacaccgatgacccacatttctattcccaacctagacctctctcctaaggtctgcactcatctatccagctgcctctaggacatcacgcggtgcctgcacagcacctcacactccaggtgtactcctttccattacaggacgtggcaactgcaagttgctagtcacttagacacacaacagtagatggttcacaactcctcttcttcacaccacatatccaacttgtccacaaatc

SEQ ID NO: 161668 - DNA, 288 bp, Homo sapiens
ggtcgatctagagcgatccctgaagctcacccactcagtcactcactcagtcactcactcactcagtcaatcactcagtcactcactcactcagtcactcactcacccactcagtcactcactcagccactcactcactcattcactcacccatcagtcattcacccagtcagtcactcactcacccactcagtcactcattcactcactcagtcactcactcacttggtcactcagtcactcagtcactcacctactcagtcactcagtcactcactcagtcactca

SEQ ID NO: 161669 - DNA, 268 bp, Homo sapiens
ctgcttcttcctctgctcctggtgatgcaggatgcccctttgcagaacaaaagtgagaaaggcctcatttgttcttaaaggagcagatatgaaggtcaccagttcagtccctctggtgttccacaaaggcgccaatgtgttacttttcatgaaatgtcaccatgaacccaccccttaacctgttcctcatggctcaccattctttcccattctctttgtggatgctctaaatgtgtaatcctgagccagcaggagccttggcaagttg

SEQ ID NO: 161670 - DNA, 213 bp, Homo sapiens
ccttttgaggaggtaagaagaatctcttctctgtgataccaagtgcaagatagggacatgtgtgaagaattgagttataaacaccagccttttcctgaaaccaaaagtttctcaccagagctagaaacttggagagagaaaacagtatcttgcagtagtatcttggtttctttgggcaagttagagagtgagcaaaatggctaatctcaatac

SEQ ID NO: 161671 - DNA, 328 bp, Homo sapiens
cagaacctacggcttccattttggagactgatctccctttatcccacatagttaattaaaatagaactggccatttctacccttgtcccccattcccatccactccagaggatccaaatatggcccatcagagttaactcctggacttctgctgaaactatttggaaagaaagcttttctttgagcttactaaactcagatataagcctggccctgctgtggccgtctttgtcaccacttgaggagataatgcctaaaaatgaatccaatccagaagaaagcagagctaagataaaacgaagaaagacagattctggctaatattaca

SEQ ID NO: 161672 - DNA, 343 bp, Homo sapiens
cacagtgactacctggaccaggaagttcatgaccaatcgaccgttccagaggaaacaaatggtcaccaatgtccttcaccccggaaaggcaacaaaatgtacaagaccacaatggatgtcatcttcatattaatagttggactcagaacccattttggtggtggttaaacaatcgtcacccacattggagtgcagtggtacgatctcagctcaccaaatctctgcctcccaggcttaagcaattctcctgcctcagcctcccccgcagctaggattacaggcacgcaccactactgcctggctaatttttatgtttttagtagagatggggtttcaccttgtt

SEQ ID NO: 161673 - DNA, 222 bp, Homo sapiens
ggctggaaggggcaaatgtggctagaaaagggcaaagggccgatccttgcgattatggaactattcagcaccgcaacacggcagggacgggggcccccagtggtgaacacgcacagaactcaaatcaatcaatctctctctctaacacacacgtacaagtaaacttcaggcaacctgagtaagaccggtcagcgataccgtgtccacatcctggctgtgacg

SEQ ID NO: 161674 - DNA, 404 bp, Homo sapiens
acaatgaaaatgagcatcagcctccagtaattctaaattttatctacaagtgtattcacaacttactttttgttattttttctgatgattagccaaaggtcagggatgattggcaggtacaacagttcaaatagaagtagttcacaaactgcctgtaagcctttcttgataaacgttttgatgaattagtaaataaagtgttttattttatacagaaatctctgtactttttcatatttgatcatttgtgcgtccagtgacatattgtagacatatacattcactgaacttattactggttgccaagatagtaatagcaaaatctcaaaagctgcatgacaggaattattcaaatagttctatatactgataaatcaaggtttaactatacaacaccctctagt

SEQ ID NO: 161675 - DNA, 409 bp, Homo sapiens
gctttccataaggatgcagaggtattacctgagactcaatgactgtcaggaagggcctttcactaatctcagtgttatacatcaagtgactatttttacttgtatttaattaagaaaattgttctgagcagagtattttgaaatgtttgtgacagctacaaaatcactccattactcttgtgtcattctcttttgtgagagaagtactataacttgcacaactaattttttttgtttatcatgtgtacaactatctttttggacttttagaatattgtaactcaagtaactatgctcctaacagtcctttcaaggttcctgtttgccaatgacaaaattatttttatttcagtagcttggtagattgatggtggaaagaataaatattttataatcagatagacctgaa

SEQ ID NO: 161676 - DNA, 600 bp, Homo sapiens
ttttgtatttttagtagagacagggtttcaccatgttggccaggatggtctcgatctcttgatctcgtgatccgcccgcctcagcctcccaaagtgctgggattacaggtgtgagccaccgcgcccagccaaagttacatgtttgtaccaacttctggagtccgtttcaggatgacaaatcttatatcccgggggagtgcttccaaattgaggaagttctcatcttccaaatttgtttctccctgcccttgactcaggccctcagatccagccccatgaggactctccccatccctgctggtccatggagactaggtcctgtagcttctttggagcaaaggatcatccctcccttttcagactagcacatacccagctgggacacactgtgacttaaccctcgttagtggcctactggccagattgtgaggtggaggaagagctgaggggggtgatgtggttttgcaggggagtggcctctgcactgcctacaagcgagagaagaatgcttcctaaatagggaggggggagccagttcggcagacttggaggatttgggaaaatctggtgattcaggatttgagggtgcatctagcccca

SEQ ID NO: 161677 - DNA, 319 bp, Homo sapiens
attggttattagtaactcaatagacttaaaaaataggcacaggttgcaagggaaggaaagataaacatttgaaattaataaatacactaatgatttagcacttgcagctgagtttacaatttgcctagtttgttacttcccggtgatacagcccagggactgctgtaaccacagtgccacaagctggtatggccccaagcaataagaaatgtatttcctcgactgttacgggaggcttgagagcctataaatccacggtgtcacgcagggctgggtccacttctagaaagcctgggagacaagaatcgtgttctaacga

SEQ ID NO: 161678 - DNA, 284 bp, Homo sapiens
cagtgtcgattaacatcagcggatgatgtcaccaaagtttccatcattcctcttaaataagaacaaagacactatggttccttttatttttgaatctcattttatacgatatattccatttcagagtaaataacttacatgcgtaattgtttcattttaccagaaagatatgattggtttcgggtcttagctcaaatagagagcagagaatttattctgttccatagcaatgtgaaaatggttaaaatatgaggtgttaagaaattttacaacatatcatttga

SEQ ID NO: 161679 - DNA, 303 bp, Homo sapiens
  misc_feature (33)..(33): n is a, c, g, or t
tgactagaggaccccatgtgctgggtcttacanagcatgatgccacagtggaggcagaacgtttcagccaggccaggcgaatgatgagggaggctaatacctttggtccagcacggcatcgtcctcgcatatccaagggcggtgtctccctttcagcatcatcactgaacaaagtttactgatcttttctctctcctttactaactagaacacacacaacctctttaacaactggaatctacccataatctgaacatggaatatggtgagaaataaggtatcacagtgccaagcaacagaagg

SEQ ID NO: 161680 - DNA, 296 bp, Homo sapiens
gtatttttagtagagacggggtttcaccacattggccaggctggtctcaaactcctgacctcaggtgatcctcccccctcggcctcccaaagtgctgggattacaggcgtgagccatggcgcctggcctgccccctctcttgagtctttacctgccatcttctctgggtctctgtcttcttctcggctcttcccgccgcagctcccttctctgtgtgcctgtacttcttatgggtctttgacccccatcttttgtagatgtagtttcccctttctcactgtctttttctccctttc

SEQ ID NO: 161681 - DNA, 113 bp, Homo sapiens
aatgaaatcagggtttttatgtttctgcactggtttctgaaacactatttgaatgcaaagttagagtgtctgccacttagttaccatttgttgactattaagagggtagaagg

SEQ ID NO: 161682 - DNA, 933 bp, Homo sapiens
gttgtattctagcatttttggtgaaattgtattagaatacaaagagttttagcactacagaggaaaaacactccggtttctcttcaaggttattttctttataaccttggaaaagtcacttgacctttctaaatgttctcatctacaaaatggtgatatttcctacctcctagggtggttgtcgtgattaaaagggtgaagaatgtaatgtgcttactgtagtgctaaggatataataagtcttcattattgctatattaagacctgttttagctgactccccagtggttggcaaattttgtattgtgccagttagagaggaagaataagttcatgatccctttatttaactcagagattgtgagaggattctccttttgggtcttattgttttcaaaggtgataaagatagactgccctttaaatttaagacctatactctacttctttttatattagagggcttgttctattctagcctttggctatatttttctcttcttactcagagttattcaatgggctttttctttttagtcttctcagaaagtctgaagatccatatagtcattcatgtggtaggtaatgtgtttttaataattaagcttaatttcaaaaatagacttgtcttgctgtctgttttcccaatttataacacttgaattaaaaatactccaagttatctctcagttgtatggttaatgttatttaatactaagattaccatgtccagtttgtcccttatcaagggtagaaagtaaaatattcaaagtcagtatattgaatttctaggctaatctttatttcagtccaccaacagttcaccccacccatggtatttctggtagaatctataatgaatgtcatgctctggttatccataagttacctagagcttcaaatccctttacagataattataaacctggagtt

SEQ ID NO: 161683 - DNA, 429 bp, Homo sapiens
ccagggatttctccactataacatattgtctgtgaatgagtgtaattgcaaattagaaaatgtaattcattttaatattttttgtattttgttatatttaaatgcaaactacctctgtgagattttctattagtattggaaactgatgtttatactaattatagtgtgaatctattggtgagctttgtcttagcttagtctttgaagtagttacctagggagaaagtaaattttttagtaacgctactcttcaggttttctgagactcaatttgagaatttccttttgagacctatagcatgttcatttttattacattctgttgtggcccatctttgtcatttgtgggtagattaagttttcatatcaaaccaaagtgcttccaaactgtggctagtgaataaaaagggaacaaatctggaatatacc

SEQ ID NO: 161684 - DNA, 305 bp, Homo sapiens
ggacacctaccaccccagcccctcctaacagggccctattcattcatccaccgaatggcaccgtgtccaagccaccttaaccagctctggtcactggggtggtcggggtctgtcaccagcctggacagtaaccgttgttccaaacaaacatgacgaagacgaagactatggcggtgccttaaaaccctggcagcctgtggtgttggctttccagatggcttcaggactttcccacaagcagcaggacccagcgctgttcggctcccggttcagcatgatggatggtggaagatgactctgggggg

SEQ ID NO: 161685 - DNA, 336 bp, Homo sapiens
gtactccctactgtatcctaggctctaccatatagcctaggtgtatagtaggttgtcccatctaggttcgtgtaagtacactttatgatgtatgacaacaaaatcatgtaacatcacatttctcagaatgtatccttgtcgctaagtgacatatgactgtaatttgttgatatccagattcttagaagtctgcttcacaacctaagacaagctgtgggaaattccaagggtatctaaactgaaaaccatgagcatgagctcagggtaatgcatgccttcctcaagccacagtgtctaccacccaaatgtttaggatacagtaggagagatcagtgc

SEQ ID NO: 161686 - DNA, 332 bp, Homo sapiens
gcctcaagtgatcctccagcttctgcctcccaaagctttgggataataagtggtgccaccacatcatttatccacctaatattttcttttctttctttctttttttttttttttttgagataggagtctcactctgtcacccaagcctggagtgcagtggcacgatcacggctcactgcagcctcaaccaggcaggttcaagcgatcctcctacctcagtctcctaaagtgtgggaattgcaaatgtgacccattgaccccagcctctatacttatatccttttaaatggctgctttgtatcccatggttttccacctgtgccctattgagg

SEQ ID NO: 161687 - DNA, 278 bp, Homo sapiens
aaatcaaaatcctacccactctttggatcccacctcctgcagaaagcttcctgggattcctccaaagccacaatgatcttttctaaattttctccctaaattttcactctgtacaagtattttcgattgggttcttttcttttttcttgtctctaaaaaaaaaaagaaataaggaaggaaagaaaaaaacgacttctcaacatttatccagtgcagtgcccccccaccccaacaaaggggtgccattgatatgcctcccttccacagtcagcccagtt

SEQ ID NO: 161688 - DNA, 144 bp, Homo sapiens
tgcccattcccctcaaagtgtccccatagtgctcttacttttttctgtcaccctgaattgtaataacctatttgtctgctttactggtttgaatgtaagctccttgagaaccttgctgtatccacagagttagcatagtgccct

SEQ ID NO: 161689 - DNA, 490 bp, Homo sapiens
tgaactaatttacattcccaccagaagtatattagcattcctttttctctacaaccttgccagcatctgttgttttttaactttttaatactagccattctgactggtgtgaaatggtatatcattgtggttttgatttgtatttctctaatgattagtgatgttcagcactttttcataggcttgttggccaaatgtatgtcttcttttgaatagtgtctgttcatgtcctttgccccacctaaagatgaatatttaaagatattattttccttgagctactttttttctcttgagacagggtctcactttgcactccagcctgggtgacagcaagattccatctcaaaaaaaacacaaaaattgtttggacattgaagttgaactttgggcaggtttagggtgtaaacacctccatgtgttaatccatgatcctttcttgtcaggagggttattttagaataaaacgcatttgtggccgagcacggtg

SEQ ID NO: 161690 - DNA, 485 bp, Homo sapiens
ccatcagggctatggcagggctggtgactccggcgcggtcaccaccagagggcagaaagcactcacatcagctgcactgctaccatcctcaagagccaggcagcccgaaccccttgcctacgtcctggtaacctgtgctacattctagatcttacttctactattttttttatttatttatttttgagacagggtcttgctctgtcacccaggctagagtgcagtggtgcaagcatagctcactgcagccttgaactcccgggcacaagcaatcctcctgcctcagcctcctgagtagctggactataggggagcaccacgatgtctgactaactgtttttgtttttttgtagagacgggggtctcactatgttgcccaagctggtcttgaactcctggcctcgagtgatcctcctggcctcagcctccccaagtgctgggattaaagacgtgagccaccgcacctggcttacatcaactatgaa

SEQ ID NO: 161691 - DNA, 948 bp, Homo sapiens
agctgactctagaggatacacctccataatgtgagcccatagtttgtttgtgcctgtatctgggaagttctggatgacctttgactgtatcaacgtagattataatcgagaatataaattacagctgagggggaaaagtggttactcctggtagatcaatctggatgcaatcaggaggacagaaatcacaaaataacttagagtctagtataaggaattattaagctatgataggagagtaactaaaaatatgaagtgacctctaaaggacagcctggggctgagagaggacccaaagaagacaagcttagaaggagatgccctcctcatggctgggggtaggacctttttggagaaagtggtttcagcccactaaataatagttctctgtgttgttgaggttccgcggacaaggcaacaattctctggaatgcagacaagattgatgggtgagtgcacagaaagagttgggtgccgctgtgggcacaggcctggaatacacagtacccatgtcatgaagcaaggtgatgtgaagttcctaaggtgatgtgaaggccccagcccgggatgtgaagttcctgagggtctgtgcactctggaagcacagctggggcagaactccaccagttgtctccacacacatgcgctctgatggaccacacagaaaaaaacaaatgcaacacctagatccaggaagagaggccccttctggaatagtccttctgctaccttgggacaaagcatcatgatcactgtaaagtagaaatgattaatatcacaaagttggtactgaagagtaaatggtgcaatttggatgtgcaagtcagtaaattgataattggcactcttgaatgcaaaatagaaactagattctcaactatactgaagcttccattatccagaatgtcactgcatatacttggtgaattataaagtcaaacaagaaat

SEQ ID NO: 161692 - DNA, 897 bp, Homo sapiens
cacatgcttccattgcttgattcctcgaaaagggcggggactctgggcagcggttgtggagtgccgcgggtccacagtgctgcactgagcagagaggaaggggcgtcccgggatatttggaggataaaggtgtgggcaagggtgatgaccacacctgccggctccggcagcggcttcggctccgtgtcctggtggggcctgtccccggcgctggacctgcaggctgaaagtcctcctgtggacccagactcccaggccgatacagtgcacagcaaccccgagctagatgtgctgcttctgggctctgtggatggacggcacctgctgcggaccctgtcccgagcgaagttctggcctcgcaggaggttcaacttctttgtgctggagaataatctggaagctgtggcccgacacatgctgatcttcagcctagccctggaggaaccggagaagatggggctgcaagagcgaagcgagaccttcctggaagtgtgggggaacgcgctgctgcgcccgccagtggccgccttcgtgcgtgcccaggccgacctgctggcgcacctggtccccgagcccgaccgcctggaggaacagctgccctggctcagcctccgcgccctcaagttccgcgagcgggatgccctggaggccgtattccgcttctgggctggcggcgagaaagggccccaggcgttccccatgagccgcctctgggactcgcgcctgcgccactacctgggctcccgctacgacgcccggcgcggtgtcagcgactgggacctgcgcatgaagctgcatgaccgcggggctcaagtcattcaccccaggagttccgacgctggcgggacacaggcgtcgcctttgaactcagggactccagcgcctatcatgtgccca

SEQ ID NO: 161693 - DNA, 973 bp, Homo sapiens
cacatgcttccattgcttgattcctcgaaaagggcggggactctgggcagcggttgtggagtgccgcgggtccacagtgctgcactgagcagagaggaaggggcgtcccgggatatttggaggataaaggtgtgggcaagggtgatgaccacacctgccggctccggcagcggcttcggctccgtgtcctggtggggcctgtccccggcgctggacctgcaggctgaaagtcctcctgtggacccagactcccaggccgatacagtgcacagcaaccccgagctagatgtgctgcttctgggctctgtggatggacggcacctgctgcggaccctgtcccgagcgaagttctggcctcgcaggaggttcaacgtgagctgggatgaagatgagagcccagattcccgagtccttgagggaggaagggattgaaattctaaaacctcagttctttgtgctggagaataatctggaagctgtggcccgacacatgctgatcttcagcctagccctggaggaaccggagaagatggggctgcaagagcgaagcgagaccttcctggaagtgtgggggaacgcgctgctgcgcccgccagtggccgccttcgtgcgtgcccaggccgacctgctggcgcacctggtccccgagcccgaccgcctggaggaacagctgccctggctcagcctccgcgccctcaagttccgcgagcgggatgccctggaggccgtattccgcttctgggctggcggcgagaaagggccccaggcgttccccatgagccgcctctgggactcgcgcctgcgccactacctgggctcccgctacgacgcccggcgcggtgtcagcgactgggacctgcgcatgaagctgcatgaccgcggggctcaagtcattcaccccaggagttccgacgctggcgggacacaggcgtcgcctttgaactcagggactccagcgcctatcatgtgccca

SEQ ID NO: 161694 - DNA, 554 bp, Homo sapiens
ctgaaaactacaatgttgaggggtgaaaggaagggctaaacatttttcattgtggtggattctgccagcgtagactgctaaatgtttgtggtttggatcttgttcactctgaacgctttaggccttgtgtaggttttccccagagtatgaggtggttgtgaactgcttttgctaatggtgagaatgaactatcatgatgttatataacaaggatggcattctgggagacgcaaaatttaaagtaggggaaaaggaggatggcaaaaactaagtaaagtaacttgaaaagttattctttctgccaggcgtggtggctcacgcctgtaatctcaatgctttggtaggccgagtcgatgaggttgagagatcgagaccatcctggccaacgtggtgaaaccccatctctactaaaaatacaaaaattagctgggcgtggtggcatgcacttgtagtcccagctacttgggaggctgaggcaggagaattgcttgaacccaggaggcaaaggttgcagtgagccaagatcatgccactgcactccagccaggcgacag

SEQ ID NO: 161695 - DNA, 436 bp, Homo sapiens
caatagatgagatctccttgtggatatctcttacatatatgaatgtcttcatctgggtgaagaaaaagtagattcaggagccatataccttagtctctatttttgggaggcataataatggctctcccaaatatgtccatgccctaatccctagaagctgtgaatatgttaggttacagatcaaaggcaaattaagcttgcaggtggaattgatattgctaataagctgaccttaaaatagggacagtatcctggattatcaagaaggacccaatgtaattacagaggcctttaaaagcagaagatggaagtggaagagagagtcgggggagatataatgatggaagaatgatcagagagaggcaacattagggttaagggctcccgggagggttaagggctcccggagggttaagggagggttaagggctcccgg

SEQ ID NO: 161696 - DNA, 549 bp, Homo sapiens
gagtctgtgtgaggagctagagacacaccacaccccgcctgatacatacacacactgcctgctgcacaccacctgctgtacacacacacacgcctgctgcacacagtctactgcacacctactgcacacccttgctgcacataaacacacacacactacccgatataaacacaggtagcctgccgcacggcacaccgcacacatatactgcctgataacacacacacacactgcctactgcccacacactgcctgatgcatatgccttgctgtatacatagcccataaggtactcactacctgcttaccaccacaccacgcactgcctgacgcacacacgtgcacacaaacactgcgcgctgcatacacagcccatacagcatgcagtgcctcctgcacacactgccccttccccactgcctgatggtaacgtgtgcgctgaccgctgcacaccccgttctgtgcgcacagcttgcaaggcagcacccctgctgcacacactgcaccacacacttcacacaaacactgccttaaacatggcacacaggg

SEQ ID NO: 161697 - DNA, 477 bp, Homo sapiens
ccaagtagctgggattacaggtaggcaccaccatgcctggctaatttttgtatttttagtagagacggggtttcaccatgttggccagactggtctcaaactcctgacctctggtgatctgcctgccttggcctcccaaagtgctaggattacaggtgtgagccactgtgcccggcctctagtacagatattttcttgaaattaattgtttgacctcccagcctatccatacgagtcaggactttttgggtgaactgaaatccaaaaaggagaaattgataaatttttataactagaccatgtacaatccaggtgcagctggactcagggtttcctggagccagcatgctatcatattctaactttccagaacagggctcaatttctatctgaattttgctaattctttcagattctttcataccatgaagtaaaacatctttcattctgaaattgatgataaaggaaatacctttg

SEQ ID NO: 161698 - DNA, 732 bp, Homo sapiens
aacctgggtctctagggcgtctgcgcaggaaggtgcgttgagatggcagttgccggagttggaggccgggcggcgacgaaattccatggaattatagttggtctactctgcaatgtctctatttaaaagcccaagtgaggacagacaagatgaacgtagaacatgagagatatctgcaagccaacaacaaagaattcaacagtatttttggatatccgaacaatgccatcaagacctcaaaatatagtgtctttaatttcctgcccctgaacctatttgaacagttccagagacttgcaaatgcatatttcctcattttgctatttttacagttgattccccagatctcctccttgacatggtatacaactataacacccctgatggtggtgctgtccattaacagctgtgaaagatgccatcgatgacctgaaaaggcatcaaagtgacgatcgagtcaacaaccagcctgttctgctactggtgaatggcaagataaaggaggacaaatggatgaatgttcaagtgggagatataataaaactagaaaataatcagcctgtcatggcagatatactattactctctagcagtgagccatatagtctgacatacatagagacagcagacctggatggtgaaaccaacctgaaagtgaagcaggccatctcagttaccagtgacatggaagatcgcctggagcttctgtctacctttaatggtgagttagga

SEQ ID NO: 161699 - DNA, 848 bp, Homo sapiens
aacctgggtctctagggcgtctgcgcaggaaggtgcgttgagatggcagttgccggagttggaggccgggcggcgacgaaattccatggaattatagttggtctactctgcaatgtctctatttaaaagcccaagtgaggacagacaagatgaacgtagaacatgagagatatctgcaagccaacaacaaagaattcaacagtatttttggatatccggtgagtgtcatccctctggctgtttcagaaggggaacaatgccatcaagacctcaaaatatagtgtctttaatttcctgcccctgaacctatttgaacagttccagagacttgcaaatgcatatttcctcattttgctatttttacagttgattccccagatctcctccttgacatggtatacaactataacacccctgatggtggtgctgtccattaacagctgtgaaagatgccatcgatgacctggtgaagtagcttcctgggcctctacttcctcactgcacctagtcagactgtgggcatgaaggacttcccagaactacctagtgctaacaagaaaccctgaatggaaagagatatttcctttcttctttccttattcatcccagagtaatatgcagtacctttaggcccaagattggtggtctgtgtatggccagaaaggggcaaaacaaggcctttctctatcttcctactgccaccacttttagcccctctcctgagcctccttccatctttaataacccactctttctttactcctctcttagctttttctagctttgttctcatcctttttcctctgctcctccttctcctactctatattccctttgccttcctctat

SEQ ID NO: 161700 - DNA, 518 bp, Homo sapiens
aacctgggtctctagggcgtctgcgcaggaaggtgcgttgagatggcagttgccggagttggaggccgggcggcgacgaaattccatggaattatagttggtctactctgcaatgtctctatttaaaagcccaagtgaggacagacaagatgaacgtagaacatgagagatatctgcaagccaacaacaaagaattcaacagtatttttggatatccgaaaaggcatcaaagtgacgatcgagtcaacaaccagcctgttctgctactggtgaatggcaagataaaggaggacaaatggatgaatgttcaagtgggagatataataaaactagaaaataatcagcctgtcatggcagatatactattactctctagcagtgagccatatagtctgacatacatagagacagcagacctggatggtgaaaccaacctgaaagtgaagcaggccatctcagttaccagtgacatggaagatcgcctggagcttctgtctacctttaatggtgagttagga

SEQ ID NO: 161701 - DNA, 334 bp, Homo sapiens
ctacagcttaaaatacatacggcatgggtcatgtagcatttttacttattcatatttcaacaaaatggctctgagttgagagccttttaattgatgggcaagttgaaagtgcagaaagagtagcgctgacccaacacatacctgaatccagctgacctaactaatgtcatacctctcccctacaaaataattatacacatactattataattatgtcccaggtatccaagttaaattctaaagcaataattcttatagtgcccaagttatgagagaattttctaggtttatgtaatgttatatatccttttttttttttttttttgagagatag

SEQ ID NO: 161702 - DNA, 415 bp, Homo sapiens
aagctttaccgcctgggccagggcgtgcaccagaccagaatcctgcggatttagtattgtgagggtagaagaccagcaagcagcatgacctcgtggttactgatcttatgaagaacacttgtctttcatatttgggactgtgttaaggttttctggaatatttttggttgtagtaacgattctgctttaggagctttcttctctagtgttgcacagacctgagtgatttgaccagcagtgctgcggtaacggaagaccactcgtgtcttcagactcgttctgttcctgggggtgcttgcttgttctaggccccctttgtatggagaggttcaaaccttgattgaatagtcgctacccaggtgtcataacctgtggcctcattggtgtcacctggactttttgtctgctgtttgca

SEQ ID NO: 161703 - DNA, 461 bp, Homo sapiens
cccgctagtggtacctcaaggcgggcagaaagcccatgaggggaaggggaggcacctggggaaaagcaaaacaaaaaacaaaaaacaaaacaacaacaacaacaaaaaaacgccgcggagaagcagagcctgggtccccaaggaagaaagtgtcttcccatcagcccttgcgctgggccccggggaacctagtgtcccagtttcgaacccagggtgtgcgtctggccactaggggtaccccaagtcggacagaaggcccatgaggggaaggtgaggcacttgtggcagagaaaaagaaaaaccgccccgcggagaagcggggcctgggtcccccacggacgaaagtgtccgtcagcccttgagctgggccccgaagacgctgacgtccctggttcgagcccacagtgcgcctcaggctgctaggagtaccccatggaggaaagaaggcccaaaagtttcag

SEQ ID NO: 161704 - DNA, 211 bp, Homo sapiens
  misc_feature (43)..(43): n is a, c, g, or t
  misc_feature (46)..(47): n is a, c, g, or t
gcggcgtttagaggaccccgtggcaggagggccgggagggagntcnngggtgaatcatttgatgtaaaagacttgactccataatctgcatctgtcctaatgctgtcatctggagtagagactcagccagttccacttgattcctccatgtctgccgtggtacaggaattatactctgaactcccagtaagtgtctccagagagcttcatg

SEQ ID NO: 161705 - DNA, 131 bp, Homo sapiens
ccagaccatcttccacagttgtgtgttttgatgtttgatgcttttgctaatgttgtttcgtaactttgaaatatccttttctgtcagccgcctgctctgcctgggggatcatactcctgtcagccgcctgc

SEQ ID NO: 161706 - DNA, 236 bp, Homo sapiens
ctcctgttgattctgtttctctggagagccctgactaatatataagcctagtcttttattgccttacttttgtctcatttcaggtttttcagagtgctcctaatctctgagaacttctgcattactggcttaattctctgcattgacgcagtctgtcatgaaatggctatcttcatgacaaaccaagcaaaaggagaggtgcttgggttttcataaacttggcagctgttttggaa

SEQ ID NO: 161707 - DNA, 372 bp, Homo sapiens
tttttcaaggatctagccacggtagattttgttcacttgtcactggagagttgaaggcaataattgtaaaggttgggccagatgtcttcatgtgctcacagtggtatagcctgctcctgggttgcttagcataaattgggtggaagacaagaaaaagataatatggttttcttgtgccatctctggggtgaatgttacgtattttcctggctgggaataaagtcttcccggtcgtctgattagcagggtgtctaccttttggtactttgagtttgtccagatgagtggttcttaaagcagggggcaatttatttccccaggggacatttggctatctctggacatatttttgattgtcacaatgggggcagg

SEQ ID NO: 161708 - DNA, 171 bp, Homo sapiens
taatgaagtaagtcctacatttttctaggaaggaatcaatagatttaaaaggaaaatcaaatatagatgtaaagacatatttaaaatagagtgagtgacaccagaaaaaaaagtttaaaattgtgattgtagggtcagggttaaagaatgttgctttgctggacgggcgcg

SEQ ID NO: 161709 - DNA, 271 bp, Homo sapiens
tccatgtctttgctattgcaaatagtgctgcaatgaacatacacatgcatgtctttatggtagagcaatttataatgttttgggtatacacccaataatgtgattgctggatcgaatggtagttctgtttcaagtttttggagaaattgctataccgttttccacaatggctgaacagttccactagcagtttataaatgtgttccttttcctctgcaacttgatttgacatttctgatttggctctcagtttggatgctgttggtataca

SEQ ID NO: 161710 - DNA, 368 bp, Homo sapiens
aaacaacggagtctccggtcattgctgatacttgatgacccagtgtgggtacccattaaagtgaaagtatccattttactttacgttcaaatgtaaaggctgaaattcggaacatttttaacaaagcattttaatgagtgctttgatacaacaacattttggctcttctgagggctctgtttttattgaagataaaattaccttaaatgtttattgctctgagacagcccaggatgagagaattacaaaaaagaatggatttatagagaggacacaatgttttgaacagtagagtctggagacaaacacatttaagagttaaatattttttaaaacagttgttaaggctgggcgcggtagctcacgcc

SEQ ID NO: 161711 - DNA, 348 bp, Homo sapiens
gcagtgaaggtacgggagctgctcctacggactccaggaggagaaaggagctggcaggacaggcctggaggtgtgagctggtggtgcaggatggggagagagcagcagagatgagctctttatcttctcatctaagtttaagccccacaatactggctttctggaaaccatcttgaggtgttcccatgaaggagggaggggcccactctgcctggggtgccctaaggacagagggacagtctgtgtcagtctggcccctggccaagcgtattcacacatgcctgtaatcccagcactttgggagtccaggtgggaggactgtttgaggccaggagttcaagaccagcc

SEQ ID NO: 161712 - DNA, 424 bp, Homo sapiens
gtatgagaggggtcacttctctgaaggatccaattgtagacaattagcaaattatcagacagttaacaagcaacaaataccaaacaacagatggcttagtgtcagagtgagtggcagagacagtaggtatcacaggaagggcaaaatagaggtcattttagactggaacaatatctgacagtgttgtgagagtgatttgagtgaggaatgtgctcttaaaggaattacagaaattggttttaataaaatctacattattggaaacaaaagtttaccaattaaattgtattttgggaaacacatgggggaaccttttttttttttttgggacacactttttcggggacccctctaaatccaccctgagggtttgaactttggccagggcccgtgttttacaccttcgtgcctggaaacccggggg

SEQ ID NO: 161713 - DNA, 190 bp, Homo sapiens
cccaaaggtgactgacctcacttttttcccatcctcactatttcacatacagacacaacctacacacacttcccctcttctatttgtgtgtttaaattctcttttcttttttttaaagagatggggtcttgctctgttgctcaggccagagttcagtggcatgatagctcactgtatccttgggctcaaa

SEQ ID NO: 161714 - DNA, 587 bp, Homo sapiens
caggtagctagccccatccctgcccggagtgtgtctgctgctcttctgacccagcgtttatcagaacagcataacaagagcacaggctttaccgtgggcagctgtgcagccccaggcggatcccctatctcttcccgtcctcagtttcttcatctgtaaaatggtcatcatgacggtgggtactgcaggggttgttggagcagcatgtgaggtccttggtgtgcttagctcatgcctggcaggtggtaaggatttcataaagctttcttgttaccactgtgagtgttatttccccagttccgcctttgtcttggagagagctgaggtttcacggaatacatttggaacaggcagggatggttatcaattctgcagatggctgtgcccagaatgatatagacacgaaacttaaatagatccctgcggtgcccaatggacatctcctttctgacgtcatgaaagaggatagtttttaaatgaataaggaatctacacatctgagggataacactgataattacgatcattttggaactgtggagacggcatctttagcagacggattctggaggcggactgagtggttg

SEQ ID NO: 161715 - DNA, 304 bp, Homo sapiens
aacttcaacatttctcaggaatgaaacaatgcaacaactttgtggaaaatgcctccgctgcctaagaccatctcaaatgaatgcaaaaccttgaagtttcaaaacttaaacttctgaaacacgttagaaaataaatttggggagaaaattagacgtaagtacttcaactgatcaaacacagtttctacctgcacaagaatatacgattcctaaaagacaagcgatatatgcatagcattgttactgtcttatccacctaaataccagaaagacaacaaaatgaataatctgagctatcatctct

SEQ ID NO: 161716 - DNA, 481 bp, Homo sapiens
tttaagcagaaatcgcttatcatattttcttagataatttgagattttaaactttggttagattatagttacctacaatgctttgagaatataatttttaaaagtggcacatatgctttatcccaatagtattctatgattaatatgcacacatctatgaagtatcatgtatgatacataaactattctgcataagtattgtattttgtataaactatattagtatgacatttagtttgtgtaaaaatatgcatgcatatttcatagatagcatatgtatattacataagtgggaccctaactgcatctatatttagtgaaatgtcaggatcgcgatgctgcggtgaatagcatgagctttctttcatgtccatgttaggagaggcagcttcctcccatcaaaagcacagctggggcagaggagggggttgagagcaaggttttctatctatctaattgtggtgacttttaaagtttagtt

SEQ ID NO: 161717 - DNA, 276 bp, Homo sapiens
gtatctctaacattaatacaaaaattagccaggcatggcggtgcacacctgtggtcccagctacttttgaggctaatgtgggaggattgcttgagcccaggagttccaggctacagtgcgctatgattgtgccactgcactccagcctggatgacaaagcgagaccttgtctctaaaaataaaaagtaaaaagagagagagagaaataaatgttggtcaggatgcagagaaattggagccctgtgcattgttggtggtgcagataatgttaagatg

SEQ ID NO: 161718 - DNA, 218 bp, Homo sapiens
gctcaaggccttagggtttcctcttccctgctcctgaactatctatatattcagtaagttaccaaacaatgttaattctacttccaaaatatgatttgtatctgaccctctctcacctgtcccataaccactacagtggtttaggatattattactttcctagaccatggaaatgaccttcttcatctaatctttcctcccacatactgtgttataca

SEQ ID NO: 161719 - DNA, 470 bp, Homo sapiens
agcttaaatagggcagcaaattcagacctccaatcaggctaattatgctttgtatcaacctgagacaatcctattcctcctccttcctcccatttgttcatgcaagatgtaggataaatattaaacttaagaaaattctcaaatctgaatggtatatgaagaaaccaaatttcattctaagacttaattttttccaagaggctctttggtgcctactctgtaggatcatacataataatgatagagaaactgtgtggttttctagctttcccaatagtataacgttattattttgcagacagtggtttcccagccaaagttatagccatgttcaaatataagcataaatctgcattcacaagactctaacaagcattagtgtgcatcaagggtcttcttcctaagcatgtgttataacttcattaatgatgataaaacattcttattagtcagattttaaatattggact

SEQ ID NO: 161720 - DNA, 364 bp, Homo sapiens
ttggctattatgagccctgctgccataagcattcttgtatgagtctcttggtgcttatgtgacggttgaagccctagaaatacagagttcgtactagcagtgaaattactgagtctctctctctctctctttttttagacaggatcttgttgttctgtcacccaggctgaaggccagtggtgtgatcccaactcactgcatccttgaccttctgggcccaggcaatcttcctacctcagcctcccgaatagttaggattacaggcatatgccaccacctgtggctaatttctgtttttttgttttgttttgttttgtaaagacaaggtctcattatgttgcccaggctggtcttgaactcctgt

SEQ ID NO: 161721 - DNA, 587 bp, Homo sapiens
  misc_feature (400)..(400): n is a, c, g, or t
gaagaaacagaggccagaagagcttctgtaacttgccccaggtctcacaaccagcaagtcgcctgctccagagcctcccctgtgagacagaacccgttaggagatgaggcctgccctgggtgaccctgcccggctgtgagattagagcttgagggcagggtgtgtataaagtcatctcaggctgctgtaataaaatgccatagctaggtgcctcagacaacagaaattgattttctcacagttctacaggttagaagtccaagatcaaggtgccagtgtggctcatttctggtgagggttccctgcctgtcttgtagatggtagatggccaccttctcacactgtgtccttacaaggcaaggcagaaagaaaagagagcgcaagagagcccaagccctcntggtgtcccttctaataacggcactaatcccatcaaaaggtcccaccttcacctaaacctaattatctctcaaaggctccacctccaaactgggggttagggcttccacatgtgagtttgggaggtacacgatttagtccatagcagtgagtgaaaccagctgatgactggctggtggaactgggct

SEQ ID NO: 161722 - DNA, 240 bp, Homo sapiens
cacagggagaagatagcataatcactgtgaaagtattatcaaatgcaagcacgcatttgcatttttggcaaacaaccacttttgattttacattgtattgttccataatatttaaagcacaaagtcctgaaattatcaaacctacttgagtttgcgatagtcagatactagtttcattgtgcttttaattaataaaatgtggattgtctaaattaaaattttcattatgaaatattttgg

SEQ ID NO: 161723 - DNA, 887 bp, Homo sapiens
ggggcccatgctgaagaaatgatggatgaacgcatgttcaagctatgcgaagctacaggagtggcaggggagcgagcacctccacctggctctctgcaattattcctggttagctggtcaccaaatctgacggtggcctcctgggaagcaggaggaactgacattctgggagcagcttctaggtttcagaaatgagctagagaattcaaaggaattgccccaagaagcaaatcaggaaggcagcggggcctcgctttgcagatgaggaagctgaagtttgggaagctgaaatggacttcccaaggccacggggcttcctcagaatccaggtccacattcccaagcttccttgagaggtcaagcaagagtttccagtttagaagtgcagacacctgggctaatctaagatcccggtcttgttaacacgtgtgccaggctgtcttcagtgactcagagagacagagaaattgtgggtaatttgcaaaaccagcggtgggcctatgtggctcctcactcccccaggacctggtcacccacagaaagcagcggacaaatgaaaatctctctcattatcacatctaggaaagactttctaaactgcctcatcctacctcttcatggtccagatggggaaaccaaggcccagagaggaaaagacttgcccaaggtcactagagaggtgggacacagccaggtgaggagctgtgactctgtcactccacaaagctgcccctaggaggctgagggcattactgcccagcctctactggccaggatgagcttaggccagtacctggaatgtaccatgggcatgccatgggctcttgctctttctgacatccaccccagccctttgcacatgctgttccctctgcctggcacacact

SEQ ID NO: 161724 - DNA, 416 bp, Homo sapiens
aagagacaacttgcagaatggccaaaaaaattgtaaactattcattcaacaagggattaagatccagaatacacaagaaactcaaacaattcaatgtcaagaagaaaaactacaagtaatctgatgtaaaaatggataaattagctgaataaacatctctcataagatgacacatacatatggccaacaggtatttttagatgagatctggcacgttcagggtggtatggccatagacaccaacaggtatttttaaaatgctcaacatcactcatcatcaggaaaatgccaatcaaaaccacattcagatatcacctcaccccagttagaatggctactatgaaaaagacaaaagataccaaacgctggtgaggaagcaaagaagagggaactctggtgtgctgttggtgggaatg

SEQ ID NO: 161725 - DNA, 385 bp, Homo sapiens
ttcatttgagcaaactaaataaataactgcaaagtagtcaagaacatgagattccttctgctgactatggaaggggtgggtggagtgaaggatctctcatgggctaaggagcttttcagtcactcaggtgttagatcccatgtctgtttaagtctgtctggactttggactccagaagccagtgagcattaccaccgtggtggtgtctgtagtaagcagtgcacaccacattatttatatttactgaaacaggacgtggtaagttggtcctgtttcagtggatatgttgtttttatttttgttcgctgaagtagaagtagatcgctttctcctgatgcctttttactttttctggtttaattagatctaaataatggtgcacaaa

SEQ ID NO: 161726 - DNA, 278 bp, Homo sapiens
agatacgtgcatttctagacacacatgaaagctcttaggaacaaaaagaaagctcagtcatgaattcttcctaaaaaattgagataggaaatctaatttcaagaggtgaaagtagatatggagggatgcaggccaacaatttaattttagaagtgaggaaactgtatcccagcgaggggaagtgacttgccccagtatacaaagagatagtaataataagaaagctaaggtcagaactcaggttttctgagtccccgtacagtagtcacttaactgtc

SEQ ID NO: 161727 - DNA, 502 bp, Homo sapiens
agtgttgggattacaggtatgagccaccgaacccagctagttgttactgttattgctgcagaaaagaccttgcttctccagtgaccataagggaagatggtaatacagaggcttggattggaggtagaagcaaagggagctagcagaataggagaattaggttgcctctttctggcctttggttggggcactctttaaaaaagtgccagatccaagagcccagggggctggctgtgagtgccctcatgtggatcagctatggtcagactgcttcacgcctgtgacctgccctgtataaatatactgccatgtataaataatggccccatatatatgtaatctggaaggataaacatcaagcttaacactggcaacctgcagggagggaagtggaattgggtgtgtatgtgtgtgtgtgtttgagaacctgtattttattactccgcacgtctttattgtttgatttttttcataatgagaatgagtttgtgtgttgggtaaa

SEQ ID NO: 161728 - DNA, 327 bp, Homo sapiens
acatactactaactgtccattcagttgatggtaaattctcctaaaatcaggcctcttgatgtgaactaaggcaaagagttgagtttcaaaaacttcaataccatattcaataggccatgtcagacttctttttcaaacaattactaggacttctccagacactgtcatcttggtaaatagcaccttcaatgcattcatctgatcaaacccagaaacacctctccccatcatctctctgatctctcatgcaattccactttcttcaaaatatatctcattctcttctttccataaccactgcaacagctttaattggggggtgggtgg

SEQ ID NO: 161729 - DNA, 143 bp, Homo sapiens
ctggcaggatgtggagaaactgaaaacctcttatactgctgctagggatgtacaatggtgatgtcacttcggaaaacagcctggcagctcctcaaaaaaggttaaacatagattaccatatgacctagcaattccattcctag

SEQ ID NO: 161730 - DNA, 533 bp, Homo sapiens
taacttatttcctcacacctgtatttcctgtaaactggtattcagcatattctgaatccaggctgacatttctagatcaaatggaagattattgataccttttttcccttaggttgaaatttttgtttctaaaaatgttaacataattacatatttgctttatcccaaacatatgtttccaaataccaataccaatcttactgttaacaaaagaatgctgaaatgcgaagtgtgatttctttgcatttctttttgatcttagaatatatcacactaacaatataaagtcaaaatatatgtttaaattattcaaagttattcctttctctgtgtggttaatgccaccaccttaatatatagttagactcttttgttttcatttattttcagtacttagggactgcttttctcatttagattcgatttaatttttttaattatgtaaaaacatttacatggttcaaagtcacaactataaaacaaggtacatttggagcatcttgttttcgttttttgttccccagctgccttct

SEQ ID NO: 161731 - DNA, 464 bp, Homo sapiens
caacgctcagagaaacatgtctgttctcaccaaccctacaatccagccaccactgcaggctttcctttgcctcctcccttctaaatgccctctacccagccaggtactttcccctagccaagacaccctcaagtggccttcggttctcacaaatgggtccaccagcacctcccccaacctccaaatgtgtcccctgactattccctccctggtatcaataggctctggcagagggaggagatgggcactgagttagaatttggggcatgcagaatggcctccaaaatgtctcaggttttctcaggccacatcttcttccctgtgcctgttggactctttctgcctccaccacttcatctgcatcagattccacagcagacccacatcacaggtgccccttcagtccacggctgccacctcagacctccagccacccctccagaatagagaggtatgtctgtggc

SEQ ID NO: 161732 - DNA, 219 bp, Homo sapiens
ctgggattacaggcatgagcaccgtgcccagtggttatttagattattcccagtttttcaatattataagcaatgtggtataaatatcttggtacacgattttttgcttatcactcttaaggatccttataataaattccttctattatttttatttctctttaggtaatacatgtacatagttttaaaaagtcaaattgtgctgcaaagtccaacttc

SEQ ID NO: 161733 - DNA, 100 bp, Homo sapiens
tgctgggattacaggcgtgagatcatcagtgatctcagccggatcttagcagatgacttaggccgtcttatatctgcatggagagtctggcgggtgcagc

SEQ ID NO: 161734 - DNA, 98 bp, Homo sapiens
gccgcagcccccacccttccccccgccccccagcctatcacagacagctgagataaccccttttaaagtattcctagagaggtggtttctttctcgga

SEQ ID NO: 161735 - DNA, 375 bp, Homo sapiens
atcaaccctgaaaacttatgctatgtgaaaggagctagtcacaaaagaccacatattttatggctccatttatataaaatatgtggaataggcaaagtccacatatttttcagaaactgggggaagaggggagtcagtagtgatgggtaatgggtgtggggtaacttttgtgggtgatgaaaatctgtagtgatggttgtacaaatttgtgactaaaaagcactaaattatatatttcaaaggggtaagttttatggtaaatgaattatatttcaataatgttttaaaacctcaaaaaattatatcttcctaccaatcctgacatagttgaccccatgaatgtactcttgaaaacataataaatgaaaacctaca

SEQ ID NO: 161736 - DNA, 455 bp, Homo sapiens
gcacaaggaaaaatgaaaggtcctatagtagaggggcaagtagcagctatcatattgagggctactaggaatatcttcgtggaagaggtagagtttgagcagctgtttgaaggatgaggagaaggtcagtagattgaggagtgggcaatgggaattccagcaagagtaggacagaagaggcaggacccatccaaggagcggcaagtgcctagtgtggatggagaggtatgaggtggggctggtgccagcaaggtaacatggggtcaggcacagaaaacgtggcccccacgatgagggttttgggcccctgttgaaggagctcatgcttacctgcgccgaatgccagtgcatggtgcaagggctgtgtgtgacttctgaacagcatcaagctcatcttggtgctttgtgggtgctcactgccatgtatgtgtctttcctctctgcatgctcacagc

SEQ ID NO: 161737 - DNA, 287 bp, Homo sapiens
gggtccggaggcagggtgaccacctgggaggtcatggcagcagtgcaagctgaggccgcttcatttcccaagagtggtggcaatgaaattgggctattaattcagtacggggagcctggggacagaagccagaggcagaaggttgagggagaaatgggaggggaggaaattgaaaaaatatgttttgaccatgagtttgagaagcttgactgtgaagggaggagataggaagaaagcggagaaacgtgtgtgtgtgtgtgtgtgtgtgtgtgtgtgtgtgtgtgtgt

SEQ ID NO: 161738 - DNA, 567 bp, Homo sapiens
cgtgatctttaactagtcacataagtggtatgatcatatatatctgtcccatagttaagaggcatcacccaacgtgaaactaaaatatgaaatgccacagtttataaattaatgtaaaataagttatgatacttctgtgatagtgtttgttatgcagccaataaaaatcacattttatataaaatttagttgtatggaatatgcttaagcaacaaaaaagaagtattttgaaatgtgatattttaacagtgggctgtaacagtgcaattatgaatgatttttattttattcttttgtatactttgcaaaatttgtaaattaagtatataaaactttaataagcagaaaaattttgaaacgcagtaagaaggctgtaataatatgaaaatggtatacactaataaagctcaatgtcactccaaaaaatgcagtgaaaaaagactgaaagaaacatgcaaatatctacactggagacctctgcgtggtaaaatgtgaggtaaaatattttctgcattttcagaggatcttttcctacttttatgtaataaacatatttatcataggctt

SEQ ID NO: 161739 - DNA, 155 bp, Homo sapiens
tagtggactcaggataatgtttattttgttcgcatttttaaaggaaaatgtaaataaaccttaaaatggttttgataattcacttctataaggaattcagcctataatgtttacttttcactttctattatcaaggtaactggcctctatgtgtg

SEQ ID NO: 161740 - DNA, 183 bp, Homo sapiens
ttaagtaatttgcccaaagtgacatgggtagaagtgttgaaaccaagcagtcttatctaaattctatgcttaactgctatactgcttctttctttgagacagggtctccctctggtgcccaggctggagtgcagtgagcccagatcacaccactgcactccagccggggcacacattatggag

SEQ ID NO: 161741 - DNA, 303 bp, Homo sapiens
ctaagtgtgtgtttggatgtgtgtgatggggatgtgtgtctgtctgtccgtgagcttgtgtgcaatttctgtccagcactttctgaggtaggcagccaggtgctagtagataggttttcccttccccatgtagctgagttctgaagaccttttccatccaggctgggccttcatttccctgtctgcagagtgggactgggcttggacaggtggttagagggaaacagagcagcttagctctgggaagctgcccctcccatgaatggttctgacctcttcctgacccccagctgagggtatgcc

SEQ ID NO: 161742 - DNA, 178 bp, Homo sapiens
gaaagcagaataagtagatattcactgggggctttctggaggttaacatccacccacccattttccctttgcttttacacaaacatgatggctcagtcttgcagaaataacatatatcagtgatggaaaaccccagaaagccccagatataaaggccctaattttgttaaatcacaga

SEQ ID NO: 161743 - DNA, 537 bp, Homo sapiens
caaaagtaaaagaactttaggaaatcttgagttcagattttttataagatcttcacttctagtctgttcccatttggtaatattatggttgaactgaatttctccattgcccttgactctaaagttctggactttctgctcttgttttcctccattatggaaaaatgacaaatcattctgaaaagtctatatgtttcaggtcactgctttgtacccagaaaaaaatacaggataggtaagatgaaggctcacagtctcaaatcctcacaaagggcatggtaaattaatgaaggagtcggcgtagcaaatgtaagaattatattttttatttgtattgtactgtggtataagcatgtaacataactattttggagatttaattttctgatgtaaaattcaaatatccaattaaaaataggtattttgattatatttttcttctataaatatttttgccttgaaccagagaaatgtgacagtttctcctgccctatttgggatcaatattttattcaaataaataaaaaagtttttcac

SEQ ID NO: 161744 - DNA, 253 bp, Homo sapiens
tgccgagttctggcccggaggcttctcagctggttcaaattgtcacaaagttcagctggaggttttcttctccctgtggtgtttttctcgtgcctgtggctgccctccaaaaagatccttgtgatgccaggaaggaatggcctgcttggggacccagtgagctcctagggccttttctgctgcttcttccaccccccatatttcacttggctctcaattgactcacctccaggtaaggtcggcatcttctccc

SEQ ID NO: 161745 - DNA, 411 bp, Homo sapiens
aatcttgaaaatccatatggccacctaatgtttgcatcctttcttcatctcagtgcatatgcagtttctgcccgcaaactgcctgggctttataccagctctacaaattactagctactcaacctttctaggcttcagttttgctcttcagtaaaactggagtaataggagcatgtacttcatagcactgttttgagaataaaggagagaatgtatataattaaataagatattgcctggtataggcgatgcttatatatgtttagtgatgggggcctattacctcctgaaatagcacaatccataatggggcaactttccatctattgacccaaaatctgtattcctcaaacattcccattggtcctagctttacagaccatgggactccgttccacagaatcagaatga

SEQ ID NO: 161746 - DNA, 274 bp, Homo sapiens
cagattttgacatatgtacttaacttttttacagtagtaacctaattgtgagtgtttttaaatgccatataaatgagggactcctagttgttagggaaaatcagtatctgatctctcaaactaggtcagtgcttttaaactgggctttcagggaatatctataggttgtataaaatgtgcttccactaataatgtataatggtaaccttttcccggtatgtggaaaagtagttttagatcttaaacattttcaacccttttgtgtaaactgatt

SEQ ID NO: 161747 - DNA, 456 bp, Homo sapiens
gtattttttgtgtggcccaagacagttcttccagttgctgaggaatccttcagtgtccaatactgtttattataagctctggctactggcagaagaatcagttttagcttggagaaactttatgtaaggaagtcattttatttttttaagttatacttaaaatttttatccatttatttatttattttgagatcgggttatgagactaatttttgtatttttggtagagatggggtttgaccatgctggcccaagctggtctcaaactcctgggctgaagtgatccacccgcctcagcctcccgaagtgatccacccacctcagcctcccgaagtgctgggattataggtgtgagccactatgcctgaccaggacgtcattttagaatccatgggaatactactacaatagtagtattgtctagtgcaagcttgtccaacccacagcctgaggacc

SEQ ID NO: 161748 - DNA, 484 bp, Homo sapiens
ggatggtctcgatctcctgacatcgtgatctgcccgcctcggcctcccgaagtgctgggatcacaggtgtgagccaccgtgcctggcccagttcaaggaattgttattgggacctgtgatgtgccaggcactctgccacatgctggagatgcagtgatcctgatcttcagtagttgacagtctatgcttgtagatgtaaacagataattacagcatggcatggtaactgttataataagagatgtgcactgctgctctgtggaaatgctggagaaagatacttagcacagcctgagaaggtgaaaagaagtccttgtttaggaggtaacacctgaactgaatcttgaagagtacttggaaaacgcccaagttgcgaggtaggtagaaccagcagctcataagagagcttagagaacttcttaatattctgaattaaaagagatggaggcaggaaggaatgtgtgtctgtcgggggagctagagc

SEQ ID NO: 161749 - DNA, 284 bp, Homo sapiens
ccacctcagcctctctggtaactgggaccacaggtgcataccaccaccgcccagctaatttttttttgtagacatgagatctcactttgttgtctgggcccatctcaaactcctgggctcaagcaatcttcctgcctgggccctcccaatgtgctgggattacaggtgtgagccaccatgcccagcctgtagttcctttattaaattctcctcagttacccagtgtgactgagctatatgacaataaaccacccaagttatggcctactaccaggcaaacaata

SEQ ID NO: 161750 - DNA, 231 bp, Homo sapiens
tggtcgatctaaggaccccggcatacacagagcagctctgagaaattagtttctactaaaagcacattcgtgttacattcagagaaatggaaaatttaattatattacttttctgccctgaataaataggacaacagcagatgttgtcctatttgagtagatatgacaccctactttaaaaagtacaggtgaaatgacacttggaaatgccacattgtagataacacattt

SEQ ID NO: 161751 - DNA, 415 bp, Homo sapiens
atgggaactatataggagcaaagttttgtataacactaaaattaagttgctattaatctgaactagattgttataaattaaggtgttaattataatcagcacagccattaagaaaataactcttaaatacacagtaaaataaatgacaagggaattaaaatggcacactagaaaacatatctatttaccacaaaagagggcagtaatggaggaattgaggaaaaaaagagactacagaaaacaaatggcaaaatgacagaagtcctttcttattactaattattattaaatgtaagtagattaaactctccaagtaaaaggcagagattggcagaatatatattttaaaacattcaagtatgtgctatctacaaaagattccctttaaattcaaagacacaaatagattgaaagt

SEQ ID NO: 161752 - DNA, 328 bp, Homo sapiens
ctcgacttccgtaacttttcttttttcttttttaacaactaagtcttgaatacgcttcctagaatcaattattgttactactccatctcaaaagtaaagaagtaaataaaagtatgaaaatgaaaaatgaataaagcaaaagatctcggtaatcatcttgaataaactgattatttaaaaacctaaaatttctttgctaaatatttacaattatgtcaaataatatggtcatcattaattgcattgattaaaagccacttgtgctattttctaagtattactagagctgaaatatacataataaaaactatgtttaatctatctaaaa

SEQ ID NO: 161753 - DNA, 361 bp, Homo sapiens
ctagaggatcccccactgtagactaaccaaggtcccccaggctcatggtcaaatgacatgtaagggacgtatcaagcggtgtgggtatgttaggagggaatgaatgtaaggagagagaggtgatgcacaggagagacaggatgagctttaaaggtagacagctctcgggtccagccctagctctctcccattctaactcttgggcaaggttcaaaacctgattaagattcatgcataaaactgagatgtaaggtctacctgaactggtagactaagggaagtggagtggtcttacttaaggaagggtagaagccaagtgggagatacaggtaaggaagctgtgacaagaaagggaaaccta

SEQ ID NO: 161754 - DNA, 239 bp, Homo sapiens
tccagctacatgaccgggatgtccaccaccagctcctacatgtctggagagggctaccagagcctgcagtccatgatgaagaccgagggaccctcctacggtgccctgccccccgcctacggcccacctgcacacctgccctaccacccccatgtctacccgcccaacccgcccccgccacctgtgcctcctcccccagcctccttccccccacctgccatcccaccccctactcctgg

SEQ ID NO: 161755 - DNA, 798 bp, Homo sapiens
  misc_feature (28)..(28): n is a, c, g, or t
  misc_feature (48)..(49): n is a, c, g, or t
  misc_feature (51)..(53): n is a, c, g, or t
aaaaaaaaaaaaaaaaaaaaaaaaaaanattaaaaaaaaatagaaaannannntaatatctagagccgctgccaccgggagccctctactatcagccatggtcaaccccaccgtgttcctcgacatcgctgtccacggtgagcccttgggtggtatccccttcgagctgtttgcagacaagatcccaaagacaccagaaaactttcatgctctaagcactggagaaaaaggatttggttataagggttcctgctttcacagaattattcccggggttatgtgtcagcgtggtgacttcacaagtcataatggcactggtggcaagtccatccaaggggagaaatttgatgacaagaacttcatcctaaagcacgcaggtcctggcatcttgtccatggcaaatactggacccaacacaaacagtttccagtgtttcatctgcactgccaaggctgagtggttggatggcaagcatgtggtctttggcaaggtgaaagaaggcataaatattgtcgaggccatggagcgctttgggtccaggaatggcaagaccagcaagaagatcaccatttctgactgtggaaaactctaatacgtttgacttgtgtttgatattttatcttaaccaccagactattccttctgtagctcaggagagcacctctccaccccatttgctcgcagtatcctggaatctttgtgctctcgctgcagttccctttgggtgccatgttttccttgttcccttccatgtctagctggattgcaaagttaagtttatgactatgaaataaaaac

SEQ ID NO: 161756 - DNA, 1013 bp, Homo sapiens
attacagcttcatatcagaggaaagcagagtttatcttaattcagtcagctgtgtgaaacacagtaccctaattttagcctgccggttctgcagatccctatggagtaagagaatggcaggtcttccagagagaaatcccagtgggtccctgacaagtttcacttttgcctccaacagcatccctggtggggcttgctgaaggtatcccaggacactgagtggcatcttttccaccattagcaattcagattcgaatgcgaatcctccaagcaacacatgaaagcagccctggttagctctggggcttcgaggggggcacaggcaagaggtttcttcacagaggaggctgacagggacccaggctccgacagagcagaagtcttggaggatggtgttaaagttggcgataaacaccagacaatctcagtccaaaaggggaagcctaacagtcttaactgcaacagggccaagcaggtgcgagggcaattagagtctcaatggctccggttgggagccccctggagaaatggcatggggcagaacagaggcagatgatgtcaacacgggttatggtgtggctcccacttaagacctgcaggatcaccacagtagaaaggaagaatggctgggggtgcagggcaggaggtgcgccatgaatctgaggaacactcctaataccccttcccttcttgccatggccactctgggactcgcctataagacaactatgtatccgctttattaccctgaaatctactcaagctcagagtggtaggtgggagctaccttcccaatacccattattccgacactttacttctggcacttagagatggaaacccaggcaataactactcaggaattcaggtgatgggaaaggacctggtggggtgctctcagtattggcccccagatccctctgacaaccagaggcagattactcctagaaattaccagagttaggtgatcatcaagacccatggttcaagacagccccaaaggctccaaggtc

SEQ ID NO: 161757 - DNA, 553 bp, Homo sapiens
cctcttacctgagtcctgaatataatctacatgattactacaatgctactaaataggctgctagagcaaaccacaacattcacaatttaatagcaaattttcagtatattctgcttgcagagcagaccctacaactttcatcaggcttaaaataatttcaaagcaattttgtctaccatggtacaagaaacctttcttcacacttatagaaatataaaatcaaacaggacacagttgccacaaagccttaactaatgagaatcaaaactggtaagatttattcttatgtttactatatactaaacccccttggtttcaaatctatataaactcaatgttttctttacattggatatgtaagcataattttcccagatgcacaatagaaaattggagaaagataattcactggtaaacatgaaagggcatgaccttaggcatgaatttctacccagcttgcaaaataatctagtccactttggtccatgtttagggaggtggggaaatgaattaaagtaccatccatttataacagaatgtggacccatgcttt

SEQ ID NO: 161758 - DNA, 431 bp, Homo sapiens
caatacaggaggacacccgtgtctggagggcatgtgctagagcagggaggtgggccgtgcagcacagggttagtgactgtgggctttagtgacatcctcatccctcactgcaggacacccggggccaatggggctgccatgcagctctgtgggtctgtggatttctgggccctggaggtgggggaggccatctaggacccaggctttgggggtatggggactcagggatgtaggtggagaactcggaggctgggccacagcagaagctgggccaatggcaggggatcttggggaatgccagcagggccacagggcacaccttgggcctggcagagagaggccactactcagaactatgacctgtcctcctgatgagtggaggggcgcaaggctggcagtgtgtgccgggtggacacgtgggttgccacatt

SEQ ID NO: 161759 - DNA, 458 bp, Homo sapiens
tgacgggaggagaattatgacaaggcatgtccaaccccctccttcccatcatgacctaaattagttttccatgtttattttggatcctgttggccaacaggggagtccactgagtcagttgtgggggcttagaattttatttttgtttttttttttttgagacaaaatcttgctctgtcgcccaggctggagtgcagtggtgcgatctcggctcactgcaacctctgcctccccagtttaagcgattctcctgcctcagcctcccaagtaactgagactacaggcgcgagccaccacacctggttgttttttttgagacagggtctcattctgtcatccaggctggagtgtagtggtgtgatcttcttggctcactgtaacctccacctcctgggttcaagtgattctcgtgcctaagcctcccaagtagctggaattacagacatgtgccatcatgc

SEQ ID NO: 161760 - DNA, 343 bp, Homo sapiens
ccccgttactcacgtggcagtgactcaaatgggatgtgtaagaatgaagagaatctgattgaaaaggaaaatcgtcagtggaaaggagagagaacgccttgctataaataatgtcatttatatttttaaaatcacacatatatataacccaaggaaggaaaatgcttcaataaaataataataactcaaggacaggtggaataatggaggctgctctgtctgagttctgcggttgataattgtacaaatgaaagattctcagcagaaggggggggcctgctgtgtgacccctggaaatgtcagtgttatgaatgagccccagagttcctgctcaaataccagt

SEQ ID NO: 161761 - DNA, 435 bp, Homo sapiens
cacacaaatatacacacacatacacacacacacacacacacacacacacacacacacaaagttctcaggaagcagtacttaatcttactagaggtgatgcattacaatatgttctcatctattatattctattcaattattttaaatttggtgctatctgttaaattgatttgacagcctactgctggttgtgactcaaagtttgaaaaataatgctctagttcaattgttagggtttctttctgttaaggatcttgttgaaaataacagaaacccactgtactttctaaagtaacagagtctactgttacctagagctgccataacaaaataccacagactgggtgacttgaactacatacatttatcttctcacagttgtacaggctggcagtctgagatcgaggtgctgtaagagtaggtttctggtgacat

SEQ ID NO: 161762 - DNA, 395 bp, Homo sapiens
tctcaatggttagagacactgtggtagaatgcacagcctggcacctagagatgattctgtagagggagcagctacaattacacatagaaaccattttgtccagttctatttaagttaaaaattctttgcatgtctcctgtttctctcaagagcactttcttatactgtaaccagagaggaggattgggagtttctgttagatgaggagagggaagggtggggtcaaaatggaagtgtgggaggggaagtttctggacagcgtctaggggacctcagagtcagatgcagtgaggggctctgtaggccacatagagagagcacaggcagaaccagccaggataggtctgggcacaagccgacgaggagcgtcacgctgaagcttaggaagggaagcc

SEQ ID NO: 161763 - DNA, 338 bp, Homo sapiens
atgggggaaggagtgaggagcaggaagcaatggagactagagaagacacatagccaggggaaccatcagaatgaccgaggctcctgagctggagatggtattgtcagtgaaaggcaaaaggttagtggatagaaccagtcgaaggcagataaataaagcaggaatatgcgtttgtcttcagaaagttgctgagcagatggaattctctagcttgtcttgtctccagagtgcagactgctctctgcatgctgggcagaacagctgggtcttcactactccagtctttcttggctagagccgacaccactttggtcactgggggggggccttgcctgccc

SEQ ID NO: 161764 - DNA, 191 bp, Homo sapiens
gacaccaaaagcacaggcaagaaaagaaaaaaatagatgtttgacttcatgaaaattaaaacttcttgtgcattgaaggacagtaccaacagggtgaaaaaaatgagagaaaatacttttcaatcatatattttataaggaattgctgtctagaatatatagagaatttaaaaaatttttttatttccata

SEQ ID NO: 161765 - DNA, 505 bp, Homo sapiens
aattgctcaggtaagagggagagagccgcccatatcagggcctcgggatagtataggatgtggcagcaaaatgcagcaggaggggtcactgagcctggaagaagaatggctgaccccaagggcacgtgacatatagacagctgcagaaaggaccttgagagggaggctgagtatccaggctgagttagaagcctctactctgacccgagaggctcctgccagcctagggaaataaagccccagcctgtggaggcgtcccccaagcaggctagggactagggaagaggctgccccccagaaaaggtgtaagaaggagaaggattactggctcagactacccagcaagtgagaccagagggaggatgtagagcctgggtgtgaggtcggtgtcctgggaagagatacaaggcccttcacctttaacttccaaacttgctgtcagaaaggcttggcccttctgtcctggctctgctccctggagcaggaagggagagcaggggaccaa

SEQ ID NO: 161766 - DNA, 798 bp, Homo sapiens
ggtgatctagaggatcccgtccacggtagatttaacctcctgactcaagtgatcttctgcctcagcctcccgagtagctgagactacaaggtgcccgccaccgtgcccggctaatttttttgtatttttggtagagacggggtttcaccgtgttagccaggatggtctccatctcctgacctcatgatccgcccgccttggcctcccaaagtgctgagattacaggcgtgagccaccgcacccggccaggttcaagttttagagatttcgtatttatccaacaagcctgtcccttgataacaaggtgcggtgattaagatgactgaggaacctgctggaactcgcccccggcattgatgctgaggtttctgatgcctgcaacttttgcatccttttcccatacagttcaattcatctcattacactgatctgagctggtttaagtatttttttttttagaaaggctgttacaaagcgatagaggcacctttatttagagttgtctatgttcaaaagccactacgtttcctgtgtttcacattaagtcactgagctagagaaggcagcttcctgtcagataaacataagaacgaggcatttgggacagtctgggtgacttaatctaactgggccagaatcggggagaagatttgagaactcgctgtcctctgcgggtgaggaggtcaaaggcggggtcttctttcatttctgtccctatgctgtaactccgtgtttgggacagagtcagctcctagtccttattgcacaaatggggttcaggtctcattggtgtcttca

SEQ ID NO: 161767 - DNA, 279 bp, Homo sapiens
cacccaccctcacacctctttatcagaagctatcattgcatctgtaaatgtcttagtctgtatcactaaaagaaaacaatattcctttttatttttttaaaactgagtcctttgtgttaaaacaatactattttaaaaagcaaaatcataataccattatcacacctaaaaaattaataatttcttgatactcagtcaatgctctctctaaagaactctcccaacaagactaccatgctccagtgctatttaatgaccacctcagaaagctggtactag

SEQ ID NO: 161768 - DNA, 171 bp, Homo sapiens
ttcaataaacctccccaaaatgcagatctgatcatatcattgctgtgctcagaagccactgaattgttataatgatcactctatcttacaaaacactcaaaggattatgtgaacaaactttaattatacttatcaatcctcaaaccaaacccatttgatctagcttgtgat

SEQ ID NO: 161769 - DNA, 528 bp, Homo sapiens
gaaagacaaccaaaaaacccaccaaaccctgtgtaattttctttgaagagaaaatatcttcacatggttcaaatataaaaaaatataaaaatatgtttattgaaaaatttacactccttttctatcctgtgtcagcctggttcccatctcccccaagaggtaagcactggtgtcaactcatttattcttctaacgattttgtgtagtttcaaacattctcttccttttaaacaaatgacagcattatgcacagtgttctatacctctatgcctttttaaattaaaagagtatttcagaaattatttaatattggttcttctttatagctatataatattccattgtgtggatgtactatgattaacaaatcccctgctaataaacagttaggtttttccctcttttcccttggccaaacaaagcttcagaaaaacatcttaaagcattatgtgtataaatatattagtaagataaatttctagaaatggaattattaactcaaagggtatatactttttttttttttt

SEQ ID NO: 161770 - DNA, 471 bp, Homo sapiens
gagaacatatccttgatttgcatgaaggttgagaattaaaagaacaagctagatagttctggtgagctgtctgatgtagtcaccactagccagatatattggtatgtaaattaactaaaaataaaatttaaaatgcagcttctcagttgcacttgccacatttcaagtactcagtagccacatggggctagtagctactgcattggacacaacacagagagaacattttcatcatcacggaaagttctactgggcagtgtgggtttagagcaatgatgtaagtcttaaagggctagacaaggatcaaaaggagaggtaagaaaaagaaaaagaaaaaaaatcaacccatagcatatgtgagtactaaaaccgaaacgggtgcttacatctaactaaaaattattgcctgctgaagaggttgaattgtctttctactcataaaacaccgcagggcctgatctatatttaggg

SEQ ID NO: 161771 - DNA, 321 bp, Homo sapiens
acatcccattatacatactcacatatctatagggccctcagagacccgtcattcaagcaaggcctactctgtcagtctaatatagtgtattagtccattttcacactactgataaagacatacccaagacttggtaatttatacaggaaaaagggtttaatggacttacagttccacatggctggggaggcctcacaatcatggtggaaggcaaggaggagcaagtcacatcttaaatggatggtggcagccaaagagagagcttgtgcagcaaaactcccccttatagaactatcagatctcatgagacttattcactat

SEQ ID NO: 161772 - DNA, 277 bp, Homo sapiens
attcagtgtaagaacaataactctatttcttctctgaatttcagtgggggcaagagtccctagtgattatctatcttacccttagagaaaaaggaagaaaagggaaagaaaaaaaaggaccttttggtttgacctgatctagatatctgagtatttttcctttgtattgatgagcgtgggagtggttttgatgagctttggggtgtgtgtgtatgtgtgtgtgtgtgtgtgtgtgtgtgtgtgtgtgtgtgtgtgtgtatgtatcatccctcaactg

SEQ ID NO: 161773 - DNA, 558 bp, Homo sapiens
ctccttcctaccaatttaaatgcttctcaaaatctctctcacatcccacttctttacaaagtctttcaatgctcattttcgtagctaacaaaattgagtctcagagagtatatgacaatgactccactgattaacagcagagccagtaccacagagttatttcacctctgtagccattactttctgcatagcaaaggtaggagtttaatgtgaaaatttctcaggtctccctggctctaacagctatagatgcaagtgggatggctctgcggtgagaaactgggcaggtcactatgggggaacagagcagttcaactttcatcttattcacatatggtcataccaagtaaaattttgtgtgaaccaaaatttcaagagcttcagaaaaggagcttgaacaccaaggatttagcctagcctcatcttatggattagaaatataaggacctttcttactcaacatgtccaattctgggaagtgagatgaaagccttaattgaggggttgatttgagtcagtacagagaacaatgggcttctcacaaaagtaaagcacaca

SEQ ID NO: 161774 - DNA, 488 bp, Homo sapiens
tgagctggcaccttgcaaatattgtacttgtctcatgggttctgttagtttgagaaataaaaaatagaaatctaatttaaaaggatttctaataactcagaatagctaatgttggtttcctctgaggtcatatgagcctctcgtgttggtgcttttctcttcattgtgtattatagtgattagatattggctatgaaaattattacttttcatttgtttgtgtgtttggaggttgattacctagtcacttgtttataacaaaagctgtaaatgatactctttgacagagttaaataaggctatcttcatgcccttgtgaaatggaaattgatgaaaatgtaacactgagtaccttttatcaacataaatttcaaaacatggaattcagaaggattcatccaacacatactcttttctattatctggattaatatacctcacttcattcattcactctaatcaggttcatgacctgaagatgatttggc

SEQ ID NO: 161775 - DNA, 291 bp, Homo sapiens
gcatcacccaacctgcagtggggcaactccaagctgaccggttacatacttctcaataggcaggtaggtctcagtgaataaagaaaaatggtcctcactatgcacaggctataaagggactagtatttcagtttaatcatgagaaaggctctctgctttaagaagcactctacatgcgtttcccaagccaaactgctggggctcaactgtgggttctgctccttcctggctgcccaaactcaggcaagtgactttatttcctccatttcctcatctataaaatgggagtag

SEQ ID NO: 161776 - DNA, 288 bp, Homo sapiens
atccttcagtttttgtagaaggaacagctttctctcagcactgttattttttctgttcacatcactaacaggataactgccataaacatacttggaaccaaaacatatgacttttggtaaaaatatcagctggtgggggagaggtaaactccttcctaaaaagtgagccctggccaggtagagtgactcacatctctaatcccagcaccttggaagactgaggcaagagaatcacttgtgcccaggagttcaaaaccaatctaagcaacatagcaagaccctgtctct

SEQ ID NO: 161777 - DNA, 320 bp, Homo sapiens
actactaacaatgaaagtatgaaaacagtatataatgtattcttgccgaaaaaaccaacttgatcaaccttccagatcaaactaccattttacaggaaacacaaggtagcaggaaacagcatggggatgcaatcagtaaaatctagagccagagaaatgctaaagaacaaagacccagtttctccacaaataaaatacaaagaaaacaaaatataaatttagaaaggaagaacttacagattaaattcaaattaaaaggtatattagcctactgctaagatggcaacattgccaaattaatctacagattccaacaattc

SEQ ID NO: 161778 - DNA, 269 bp, Homo sapiens
gtccgcctcagcctcctaaagtgctgagattacaggcatgagccactgtgcccccaacagatctgactttttagaaacgttttaacttcaaaataattatagattcaaagttgcgaaaagatttacaagggtcccatgcacccttccaagccaccccttacctggctgtctttcctcattgggcaggtgagagatggtggctctctgtcctgagggccaacactccaggaacccttacctctacatgctcagtcctcaccgacaaggac

SEQ ID NO: 161779 - DNA, 627 bp, Homo sapiens
tagaagatcgagtggggatacggcatgcgccacacgccggctaatttttgtatttttaggagagacgggtttctccatatggtctggctggtcttgaactcccgacctcaggattcaagaagcatcctgagttttcattactctccaagtattaagatcttctttaaggtctatcaataagctttagtaattttctctataaaaattttatacttcttttgctaaatttattcctaggtaccatatgttaatactttttaatgaaattgtgaatggcacctttttaaaaattacgttttcttaatgtggcatgttcactcttactcatattctctatcatctctcctggtgaatcctgtatagagagggttttttttttttccatccacctatataaaaataatggcttttttctagagaatatatttttaaatttcaggagcaatacacgcgggtaataaataatttaattaaactagtagtttacggatttaaaagtaaaagtctcttttcacaggctctcactggctcttatcccattcttctctccagggataacgctattaacagtacatggtgtatccttaaaggctgagagcttgtcatcagaactcaggatgttctgga

SEQ ID NO: 161780 - DNA, 348 bp, Homo sapiens
tagaaggaaaatttctttccaaatgtcttcttgaagcatatagtgtatataagaatctacctgtatttttgtcattttcatacacttcagaaatagttgtagaaactttatggtgcgatgtgcatttaccatgaagaacaggctttgttagcatttacctaataagttcctagtcattttgattaattcagtcttgttgacatgatctcatataagatctaaccacaagaagctggtgcttaacctcgatcctctcatttatcattgggattttagtaggatgctgattttgaataagttgaacaccttctaaacttttttccaaaatccagtgctgctaaaaacagt

SEQ ID NO: 161781 - DNA, 594 bp, Homo sapiens
tcttcgttggcatataataaggaggggggttaaaaatcagtaatacaaacgaattccttatcttagaattcttaaaggtgacactcctaaacaggttttttctcccctaaaccatgaataaataaaactgctacagaaccccagtggaaataacaaaagcaatgctatagtgctactatttagctttagttataggaaaatgaactctgctctgagacgataaaacactaagcagcaaatcacagtttttgtttgtttgtttgtttttgagagagtgtctcgctctgttgtccaggctggagtacagtggtgtaatcatggctcactgcaacctcagcctcccaggctcaagcaatcctcccacctcagctctctacccacccctaatagctaaaggaactgacttagttcttaaatgtcctcagcttctctctgttttcaagtccattcagcatttaacctaggacccagaaaggctgaatttaaagttacacagaacctgtcattcagattccttctacaaatgaatttctcaagcttttctaaatatttgacttccagcaaaaaaaatgcatttcgactttaaaacaatct

SEQ ID NO: 161782 - DNA, 273 bp, Homo sapiens
agagcagaggcccaaggcaggaatgcacccagcaagtccgagaagaagcagaaaagccaatgtggccagagggagagttgagaaagagatgtaggaggtgaggtccccgagccgcgctaggcagagacagggactcgtgcggacgtgcctttggctttgggcgaaacagggatctggagggctctgagcaggcagcactgtgccctgactccacatctccctggctactgctggagaacaaaccaggcagcagggaccagcagggtgacctgc

SEQ ID NO: 161783 - DNA, 354 bp, Homo sapiens
agtaaccaaatcaaaacagggttcggtcagcagagccaccaggcggatgtgagtctagccagaggcactgggaggcaggcaggagaccccactcacttgttctggaaggcttccctgccccctagacctgagctcttccatccctggcacccaggcacgagatttcctttcttctttttttttttttttttttccctgagatggaatctcgctctgtcgcccaggctggagtgcagtggtgcgacctcggctcactataacctctacctcccggttcaagtgattctcctgcctcagcctcccaggtatctgggattacaggcacatgccaccatgctcggctaattttttttt

SEQ ID NO: 161784 - DNA, 473 bp, Homo sapiens
tcgtaattctgttccaccgctgttctcggcctttctgatttctcggtgattctgttccgccgctgttctcggcctttctgatttctcggtgattctgttccaccgctgttctcggcctttctgatttctcggtgattctgttccacagctgttctcggcctttctgatttctcagtgattctgttccgctgctgttctcagcctttctgatttctcggtgatgctgttccaccgctgttctcggcctttctgatttgctgtcttgtgtctccatccatttccttctctacatgggtatctggggtgaggtatgtcgggatcactggctgagagctgggccgggggcaaaaatgcccagaggacacttcctctgagtgcagggggcagcttctgccagagctgaggggctgcagtgggttgggaggacaggcgccagtcttgcccatctggctggttgagaaagaagtaatgaa

SEQ ID NO: 161785 - DNA, 389 bp, Homo sapiens
ttggctagggtaacgtgaaggccgggtaaactacacgtcccaccatgcattgctgccttgttcagagtaggtctctacggaaacaggaaaaaaaaaaattctacaagtcccacctgttacttcgtttctaaacacctcctgcactttcggctccaacaccaaacaaaaacaaaagcctcgtgatctctcgtctgctccgggagccagacaaacagggggcccggggtcacaggcacgtccgctgtaacgggtaaattctatccagctccagcgctcccctctcctttccggggctggatgcacgcacaagccttctcctatctgcatccaatgggggctctccagccgcacaagggagaagaaccggttaccgtgcaagcaccacagac

SEQ ID NO: 161786 - DNA, 385 bp, Homo sapiens
cgagggcgtcctggtgcttaccacctgcaaactggagaggtggtgggagaactcctggagagaccctagtgtaagccttccagtaattaattgaagctgagcgctcaggtgagtagtgcgacatttagcgcccgctggatgaagggcattgcagacaggaaggaagccgagcctcgtgatctctcgtctgctccgggagccagacaaacagggggcccggggtcacaggcacgtccgctgtaacgggtaaattctatccagctccagcgctcccctctcctttccggggctggatgcacgcacaagccttctcctatctgcatccaatgggggctctccagccgcacaagggagaagaaccggttaccgtgcaagcaccacagac

SEQ ID NO: 161787 - DNA, 206 bp, Homo sapiens
cttgatgtcactgctcttagcacttggcaatactcaggttcagagggactgagtacagggaccagtatggcatttggcatagagtctggcctggcgtaggtatacaacaaaagctggatgaaagaatgaatcaacaggtggataaatgaaggtgtgaatcatacataggtgcccagcaggaaaagagctggactccaaatgactac

SEQ ID NO: 161788 - DNA, 419 bp, Homo sapiens
ccttctgtcaataaggtaaaagaggaggtaatatgatatgtgtaacttccaggaaaaagctttcagatctaataaacaatttgtcactgtttgagagatcaaggaagcaagtgttgagttgaaacctctttgagccaagatctccttgccaaggcacattagacatgtagtatgaggaagaaacaaacttttggtgtgttaagccattgagagaattggtggatatttgttatacagtacaacctaaattagcttgattagtcacctgtcgatatctgtttctgtaccctcatttcttcccatcagaagctgtgtcttctacacagtcctaggcttcagaagacactgactccagctccagctccacagggtggttcagtataagaatcatggtaatattagttcctaatcactaactg

SEQ ID NO: 161789 - DNA, 193 bp, Homo sapiens
aggcaaaaggaaaggaatgttctgagtgggtctcaaaagtgattcacaaaacgtacttcagaggggaagccaaacaaataagcaaccctgagagcccagcagccaaagacaaaaatagcagcaaagcacaccacttctccctggagtgttggctgacggtttctctgggaagtggagcggaaatggacttttg

SEQ ID NO: 161790 - DNA, 295 bp, Homo sapiens
tggtatcagattagatatagatacaactaaaccaaagggtcatttattttagaaaattttccgtttttttccaaacaagaaagttattgtctactcacataattgtttaaattgaagtccatattcgtaaatgacattttatgcttgcacttgaatattgtataatttttaactaaatttggttattgcattaaatgcttttgaatattacttttaaattgaaaatttagttaattctatgtagttttacaaaaatatagcatttaagttttctatccatctaacatcaatgtta

SEQ ID NO: 161791 - DNA, 139 bp, Homo sapiens
gattttctgtctggatggtctgtctgatgctgaaagtagggtgttgaagtctccagctactatttttattggtgtctgtgtctctctttggctgtaatagttgctttatatatcttggttttccagtgttgggtgcata

SEQ ID NO: 161792 - DNA, 461 bp, Homo sapiens
tagctgttctagaggatacaccaacgctgctcacattccagaggatgacaagatgcccagagaagtttcggggtcttgggtacgaattgaggatgatgtagtggtgactcaggactcacctctcatcctttctgcagactgtcccaaagagatgaatgacattgaacagatatgcagccaggcttcttgaccttcactgcggcccacatgcacctcaggttcaaaatgggtgtcttctggcagccctgcacgtgtgctttctgagtgtctctgtgtgtgcattaatatatgcattccatttgggagcatagcagctgtgtgaatgtatgtaattgtgtgctgagagcgtaggccaaccttcacacactttaaacataacaacatgtaaacattttgcttgctacatgcttgttctgtagcctgaaaaatatattgtcacagacacagtaaaatcagctcaa

SEQ ID NO: 161793 - DNA, 453 bp, Homo sapiens
atcacgaggtcaggagatcaacaccatcctggccaccgtggtgaaaccccgtctctactaaaaatacgaaaattagctgggactacaggtgtgagttgccacccctgactaatcttactttttttttctgtagatgaggtctattttacctaggctggtctcaaaactcctggccgcaagtgatctcaaagcaaaggaatcacacgcatgagctgctaggcccagccacttccatctttaaagtggatttttgggagaatgttagaaagatttaattcttgaaggtatacactgttgagcatttgtcacgtttcagtaaataattgagttcttggagcccagtggttttctagaaactttggtgagaaatctagacttaaaccttttaggtagagctggttacattatccaaggtggatttattctagcaaatacttatgtgactactctgct

SEQ ID NO: 161794 - DNA, 406 bp, Homo sapiens
tgatcctcccacctcagcctcccgagtagctgggactacaggtgtgagttgccacccctgactaatcttactttttttttctgtagatgaggtctattttacctaggctggtctcaaaactcctggccgcaagtgatctcaaagcaaaggaatcacacgcatgagctgctaggcccagccacttccatctttaaagtggatttttgggagaatgttagaaagatttaattcttgaaggtatacactgttgagcatttgtcacgtttcagtaaataattgagttcttggagcccagtggttttctagaaactttggtgagaaatctagacttaaaccttttaggtagagctggttacattatccaaggtggatttattctagcaaatacttatgtgactactctgct

SEQ ID NO: 161795 - DNA, 432 bp, Homo sapiens
tgggagcggggaggtcagttaggaggcggctcttgcagacatgggaatgtgaggtgatggtggcctgtaagagaggggtcaggacatattttggtgttaaagccaacaggacttgctggtggattggatgtgagatgtaggggaggtggcattaaggatgaccctaggttttggcctgaacagttgggtaagtaggaagattaacaaaggcgctgggttaaaagggagatcagtagctctgtttggggtgtgtcaggcctgagatgtcatcagacagtcttctactggagccagcactcgagagaggtgagctgagggacaggccatttgtgagcatcatgtggtcctctgaattgccccttcttcccatggcttcttgtcactcttcctctccttttgatttttttttactcaaatagatggtctgctttt

SEQ ID NO: 161796 - DNA, 399 bp, Homo sapiens
tggggcagtgaagtgatggtagaacccgaggctggaaaggtgattgaggttcatagtttggaaagcccaatatgtcatagaccataaaatatttttgacagagcttgcatgatctgggttttacctggggaacattaatctggcaatagcataggacagtgtggagtggaaatagattgaaggtagagacaccagaaaagttattctgcttgtctgttgaaaaagtttgggagaatcaggactgggagatgcaagcggtgtgaaaagcatttgccccatagtgggtgtgtagtaaggagattgtgaatgaataaaaggaagagatggatgccagtgacattgcaaacacagaaatcacaggacttgcaacaagttagatatggaaaataagagatgaag

SEQ ID NO: 161797 - DNA, 636 bp, Homo sapiens
ttgctttcagacttcagaaaagaggagtttttttaaataaaaccttgtctggccctcccgcaatggatgcagaaggtagactgttttctttcttttaattcacactcagacgttttcgtaaggggcttggtcctggcaaagtgggcctcacatacaaaccacccactttcctgaagcgtgattgattagcaaagctgttctgctcaagggcagcctgttttccccagcctggatgctgacaggtccgacatgcacagattttcaagcaggtcgccagtccccaggctgcaggctgtaggccaggacgcttgttcttgagggagaagagaggagaaggaatccactccgggggcaagaattaagctatattatagaattcccaagacacagcagggcaggccaacatagtccttgtttagagagcccctgatggtgttgggtgccaagaaaaccatggctgcacaagacacacagagtgaaggtgaatataaagatgtttaggcaaagcctgtgcatatggtactgatccccatttgtctaagaacctctaaacatcaaagagagttaaagaaagatagaaatttgatgcctaatcaaagtagcctatgatggaagtttggaaatacagccaagcaa

SEQ ID NO: 161798 - DNA, 454 bp, Homo sapiens
ttgctttcagacttcagaaaagaggagtttttttaaataaaaccttgtctggccctcccgcaatggatgcagaaggtagactgttttctttcttttaattcacactcagacgttttcgtaaggggcttggtcctggcaaagtgggcctcacatacaaaccacccactttcctgaagcgtgattgattagcaaagctgttctgctcaagggcagcctgttttccccagcctggatgctgacaggtccgacatgcacagattttcaagcaggtcgccagtccccaggctgcaggctgtaggccaggacgcttgttcttgagggagaagagaggagaaggaatccactccgggggcaagaattaagctatattatagaattcccaagatcgtgccactccactccagcctgggtgacagagtgagcgtatgtctcaaaaatagataaataaataaat

SEQ ID NO: 161799 - DNA, 413 bp, Homo sapiens
tgaaatcaagagagagactttggtccaaagacttttttttgtaaccttcttgggctccattcttcacatttgcttccgagtcaaggagaaggagcacagacctgagggatggagtgaattctaatccaagctctgaaactgaccagctggggcctgaaagcaagactgtgacctcagtctgcaccacttcccctcccatcagtaaagtgagaggatccattgtgctaccttctgcagtccctttcagctttggtgttcactgattctgtgatgaatttcctgtaatttctgtgtaggaacagaaaagagcatagaagatcctttttttgttttttttttgttttttgttttttgtttttttgttagggagtttcactctgtggccctggctggagtgcagtggcaagatcttg

SEQ ID NO: 161800 - DNA, 158 bp, Homo sapiens
  misc_feature (120)..(120): n is a, c, g, or t
agctcctataatctctctggtctgggagatgtgctgaatgtttgttttttgtcacattcgtgaatagggtgcagatttggcaattgttttctacacatttcctctgctaagaataaatancaggccaggtgcggtggctcacacctgtaatcctagca

SEQ ID NO: 161801 - DNA, 114 bp, Homo sapiens
ctgtgggcaggtgtagctccatattccttcaggaagcacccaggtggtggaacaggcgattccacccactcccactcctcctaggtgggtaagactcacctgcttaggaggcac

SEQ ID NO: 161802 - DNA, 187 bp, Homo sapiens
ttcaccacagggttgaagcaacttccaaggggaagtgtctaattagaggtatgtcatctgcgtgggatcacactgcctgagtttgccacactttgctgaagccaaagggagagatcggctggtgttgtcttctggaataagcccagaaaaggtcaatctaatatcgcaaatattcagcccatacaag

SEQ ID NO: 161803 - DNA, 247 bp, Homo sapiens
gggagagccacaggacgggtggggcactcaagatgtgcctgttagcaagttttctttctcctcattccactaattacagcattagctacctcctgcatgctattgcttccccagcacctgagctggaattggttaagtggacaagtcaagtgtgtttatttcagtgtgatacagtacaggtattgagttgctatttctggcctaaataggcagtcacttaaggaatgtatggcaaaaatgatagctt

SEQ ID NO: 161804 - DNA, 575 bp, Homo sapiens
tgcatcttagttgtcagagtcatctttcctgtagtttcgcacagtgtaagctttgcagatggcatcctcatggcattatttgttgggaacagggcccctgaaatctggccataaactggccccaaaactggccataagcaaaatctctgcagcactgtgacatgttcatgatggccatgatgcccacgctggaaggttgtggggttaacggaatcagggcaaggaacacctggcccacccagggcggaaaaccgcttaaaggctttcttaaaccacaaacaatagcatgagcaatctgtgtcttaaggacatgctcctgctgcagataactagccagacccatccctttatttcggcccatccctttgtttcccataaggaatacttttagttaatctataacctatagaaacaatgcttatcactggcttgctgtcaataaatacatgggtaaatctatgttcaaggctctcatctctgaaggctgtgagacccctgatttcccactccacacctctacacttctgtgtgtgtgtctttcattcctctagcgccactgggttagggtctcccca

SEQ ID NO: 161805 - DNA, 482 bp, Homo sapiens
gttgtattcctaggtattttattcccttcataggaattgtgaatgggagttcactcattatttggctgtttgtctattattggtgtatatgaatgcttgtgatttttgcacattgattttgtatcctgagactttactgaagttgcttgtcagcttaaagagtttttgggttgagacgatggtgttttctaaatatacaatcatgtcatctgcaaacagagacaatccgacttcctctcttcctatttgaatatattttatttctttctcatgccagattgccctggccagaactgtcaatattatgttgaataggagtggtgagagagggcatccttgtcttgtgccagttttcaaaggaaatgcttccagcttgtgcccattcagtatgatattggctgtgggtttgtcataagtagctcttattattttgagatatgtcccatcaatacctagtttatggagtgtttttagcatgaagg

SEQ ID NO: 161806 - DNA, 543 bp, Homo sapiens
caataaagtgagtcaagaactttttggtttctcagtgcatataaaagttacgtttactaaagtatgcaatagcattatgtctagaagaatatatataccttaaaaatactttgttgctaaaaaatgctaacagtcacctgagccttcagtgaattgtaatgtttttgctggagaaggttttgcttgtgtggaagctgatggctgctgtgactatcagggtggtggttgctaagagttggggtggctatggcaatttcttttttttttttgagatggagttttgctcttgttgctcaggctagagtgcaatggcacgatctcggctcactgcaacctctgcctcctgggttcaagccattctctggcctcagcctccggagtagctgggattacaggcatgcaccaccacgcccgaataattttgtgtttttagtagagatggggtttctccatgttggtcaggctgctctcgaactcccgacctcaggtgatccgcctgcctcagccttccaaagtgctgggattacaggcatgagccactgc

SEQ ID NO: 161807 - DNA, 493 bp, Homo sapiens
aggtgcttttctagatatcttgggtgattcatgaatgttgagaatgtcacaggctaatccatggatcctctccaaggcagaggggtagctattatttgagaaggccccactgggcttgaagccaacaaagaaagggactccagcaggatataggatgtggaaatccctgaggctgaggaagcaggcacttgccaagttttactccaggttccagaattgaatcctacatgcttgctcaggtaccctccaggcaaaccgaaaacccagtaaacatcaagccttgagtgacacaaatatctggttttgttacaatctgccagattccccatcttctgttgacgagcagtttaccatgaactgcagtataaacttgggcccagggagactggctccgatttattctgacagtttatggagtttagtatttcagccttcattctcacatggtttctgtggatggttgagttactggggaactagcagtgagtgacct

SEQ ID NO: 161808 - DNA, 486 bp, Homo sapiens
actacatacttccgtgagggccaggaggctcagacactgaagcagctgggtcaggcagtgggagggatgccgcccgctcaaatccctcaagaatctcttctgaaaaagtgagcaatgaaagtttcagaccatgaattaaaacttcaggctgtgagggcctggtgcagagagagacagcctggtatgatgctaacatgtacactgtactcaaatgtttataaagtgctttttcagagtaatcagttatctcacacactttaccttggtctctggtactcagaggggtcccaaggacttgaagcagggactgccttgcctagggacactgacgtatgtgtcctgctgcccctaatttgtttcatccttcctcctttaggcttctcatgtccccattatcatggctcagctcacagggcacaaggaggccgtgagacagtgtttggtgtagttttgtatggttttcggaagtatgtagtcgggtaccga

SEQ ID NO: 161809 - DNA, 229 bp, Homo sapiens
gaagtgctttcacagtcaaggatgtggccttcctgtgagctatttcacatacctgcattgtaaattcatgagagcgaacagtctttgtgcagcacaaattaatgcaacagtttaacacaaacaattcaaatagaagactgtccttcaaggaaagaaaagtgaagaaatgtggttaatatttgtcttctaaacttgagggaactcttatgccgttgcctaccatatttgt

SEQ ID NO: 161810 - DNA, 425 bp, Homo sapiens
ccatcagctgttttttgaccgccagccaccattgggcctggggaggggaggttggcctctgagctcagtcttccccactggctcccccgagtcccctcccctgctctggttatcaaatgcattcatggttcttgtagaaaataaagtgtcagggaacacaagaaaaattatgcatgatgcttctctgaaagcagctggtccactgtcagcactgccatgatctgcacatgccctctcctgcttccagtggattctctactccacagacgggggagtcttccatacactcctatttttctcaaaatgaagacaaagctgatctctcagcatctcctgcaggccctatgttcatgctctttgagccctcacctcaccgtgctccttcctgctgcagggactgcaagagcctgggaccttctccccct

SEQ ID NO: 161811 - DNA, 590 bp, Homo sapiens
acctactatgttccaggagctttctagagtctaaagatacagcaatgaataaaactgaccaagaagctgacattctagtccagggaagatagtcagtaaagggataagatacatatattgcatttttaaaaggtaccactgtatatagggtaggcaggaaagccctcattcaggtgacatctactctcagaaggggaaggagagagccatgcgtgcatctgaaggaagagcattccaggcagcgtgagcaacaagagcaagggccaagaaggaggagggtgcctggtattttccaggaagaacagggaggccagtatgcaggagtggaatgaggaaagggaaggtcaaagaggtaatggaacagatcgtagccagtttcttaggttattctaaagacttaggcatggactgtgagtaacatggggtatgaccatacacagcatgacacatcatcaccagtgatgaaataattatgatattagagcaaggtttaaaaggtaatttagctacattagaaataccagcatagactcaggacccttcttttttttttttttttttttttttgagacagcgtctcattctgtgac

SEQ ID NO: 161812 - DNA, 643 bp, Homo sapiens
acctactatgttccaggagctttctagagtctaaagatacagcaatgaataaaactgaccaagaagctgacattctagtccagggaagatagtcagtaaagggataagatacatatattgcatgtcagatgacagtaagaaccgtggagaaaaataaagctccaaagaagtcaaagttttaaaaggtaccactgtatatagggtaggcaggaaagccctcattcaggtgacatctactctcagaaggggaaggagagagccatgcgtgcatctgaaggaagagcattccaggcagcgtgagcaacaagagcaagggccaagaaggaggagggtgcctggtattttccaggaagaacagggaggccagtatgcaggagtggaatgaggaaagggaaggtcaaagaggtaatggaacagatcgtagccagtttcttaggttattctaaagacttaggcatggactgtgagtaacatggggtatgaccatacacagcatgacacatcatcaccagtgatgaaataattatgatattagagcaaggtttaaaaggtaatttagctacattagaaataccagcatagactcaggacccttcttttttttttttttttttttttttgagacagcgtctcattctgtgac

SEQ ID NO: 161813 - DNA, 369 bp, Homo sapiens
aggctctaaaggtgaattttctcctgcgtcgcagagctgaaagttaagcttaatgtacaaatctttattttccaaagaggcaggttggccttcttgtatcgacagactccagagcttagatttattacagaatgataatcaggcaaaagaataaatacgctgcatctttaattcattaatcacctcggaaagcaaaatgaactacagtaaagaggacaatatgttttcaaatgttgggggtgggggaagagggagtctgtttctcaataaaatccagtcgctaaaatccattttgcatgcagattagagaaagggcattttacctctgcggctgtagttcagataggagctggaagctctgcaaaggaa

SEQ ID NO: 161814 - DNA, 462 bp, Homo sapiens
gcttggctggtttggggcgtttctgtgggtggtggcccacaggactcttttggacctgggacatggccatatagctgctcatccaacctgtgggcatatctgcccaaggggctgtttctcaggtctggaatataagtacaaggctgcttggctggctcaggtgtgtgcccaccaggagcagcctgcagggctgtttcatgcctggtatgtaggtgcgcagctgcctggccagcctagggaatgtccacaaggagtggctgatggggctgttcaggttcaggacatgggctgttggctgcttggctgttctggtggtatgcccaccagggctgtcctgtgggacagtttctcatgctcttttagggggcgtagaactattaggcaggccagggatatatctgtagtgggtgggggcactctggagccagttctcaggtcctgtgcataggcatgcagccattc

SEQ ID NO: 161815 - DNA, 559 bp, Homo sapiens
gagtagctgggattacaggcgcgtaccaccacgcctggctaattttttgaatttttaggagagacagggtttcaccatgttggccaggctagtctcgaactcctgacctcaagtgatctgcctgcctcggcctcccaaagtactgggattacaggccttagctactgagcccggcccattctcaattccaaccactgccatcttgtccctggcactgcttttggtgcagctgtgacctctgtggcttgaagctgatggatacttcttagtcattatcttacttgactctcctagcagatttgaaccccattgattcctccctcctcaaaaccatctttccttggcttctgtggcatttttattcttttacttgccttcctccctctggctgccccctcatagcctcctctgtcatcttcctctgtgtgtgctgtgaatgtttgtgcacctcagggtggtctcagaagtcagctgtcacggaacacacttgctccatatgcttcaactgtactcaagtctccagtgtccatctgcatactagtgagtcccaagtctctgt

SEQ ID NO: 161816 - DNA, 361 bp, Homo sapiens
agatgccagagtattccaaaaattaagcaaaaagaaaaccaatgggaagggacttcaagattagtatggggtatgtcagccagtcacacaaactaaaaagatacctttcccactgtatggcagatccatgaagagcaaccacacctttatttttgacaccattcacctccaccaccctccaaatataccaacaggttacaggtcatttggcctatcaccagcaaactagatccatcatattttcctgaatgtgaagtgaaaggtctatcaagtaaagattatgtgggaaataaccaaacataagaatgatggtagggttgctaagcctggtggcataaactaatagtcccagctactcagg

SEQ ID NO: 161817 - DNA, 377 bp, Homo sapiens
actcttgattgttcatgctactgggggaaaaaaaaataagtagaaattagcctaatagttgtggcttattttgagtgaaggccttagcccttaaggcaattaaatttactgtggagagaagagctaatctaatggggagaaggagcctttgttacaggtgtggtagtgtggttctttgagtgacaagatttctgtttgccagattggttaggagaagtctgtgtgtctgctttctctcttatggcctaggatcactgtggtgaatgaaaaacctgtctcagggcctgactcagataattcccttaaaacccggctaaggtcatagatgaataatcagtaattgaacagaagctctgcaatagaaaagaagccagata

SEQ ID NO: 161818 - DNA, 326 bp, Homo sapiens
ctgggattaccaccgcatctggcctcattcactcatccttatacagggcaccactgatttgattttggcaaacagaatgagctaatacaacagtttgctggtgatagtctttttaaaagaagcattttccaaagtttgattagatagtacttttggttcaccaaaaagttatgatgaaaaaagtattcagtgctcgaattaactggagaaaaacagaattaaatgaaatcaaaaaagattctttacagccaagtttcttagaataataacctattttgtgagtcttttgaatggtgagaattagatttaataaagtagtatacata

SEQ ID NO: 161819 - DNA, 425 bp, Homo sapiens
aggcagacactctatcctaggaaaaggtgcataagtagaaagcaccctatattgagggaacacaggtaataacccagtgtcttagccaagatgcccagtgggtgctaacaggccagggagagaaggaagggggaagccagggtccggcaggatcaagtcatattctagatttcttctgaaagaagagcacataggaatctaatgattggatgagaaatcaagaacaatttcaaggtttttgactgattgactggaagaatgaggagattgttcactgtgatagagagacccaggtgcaaatgtgggggaaaggagatgaagagctctgttttggacaggttaagtttgagttgtgaacccaaggagacttgtaaagtaggcagttgactacacaagtctggcattcaggggaagtccaggttgga

SEQ ID NO: 161820 - DNA, 322 bp, Homo sapiens
tttggtggctccatttaccagaaggtgagtaagaagttggagaccactgtcaatttcacctggacagcaggaaacagtaacactaatacggtttgtctgtgtccccacccaaatctaatcttgaattgtagctcccataattcccacgtgtgtgggactgacctggtgggagataattgaatcatgggggcagtttccccatactgttctcatggtagtgaatgtctcacgggatctgatggttttataaggggaaactcctttcacttggctttcattttctctcccgcctgccaccatgtaagatgtgcctttcgccttc

SEQ ID NO: 161821 - DNA, 374 bp, Homo sapiens
ggaggggatgaactagagaaggaaatggggccagaccctgtgggggcttgtgtgtcatgccagagagctagggctttatcctcagggcaaatggatttgaaacaatttgacatgaccaagtttgcatgtgtaaagcatgaagtagagggatgaaaccagagaaagtgaaaacagagggactataatttatagatgacaatgggtatgtatatttttaggtgggtacagattaccaaacaaatatgatttctgagactgcataatcatgcactaagtggatatttcttaggggccgtttaagaaaatactgtaaatggagttatctataatatttaagggcttactactatattgtaatcacaaagtaacccaca

SEQ ID NO: 161822 - DNA, 1375 bp, Homo sapiens
ccccagcatcctgggcgtgaacgcacccagcttgattgtcacatggggaatagagacctcgcgcctgcctggcataggccaacccagtaatgttcatttaaagctggctttactagtccttcttccacaatgagaggtgacccttcacttcaccgagaaaggaaggaagaaagcataatatttcatcgcgtgaagaggccatgatttctccgttccgctgaggatcgattgagctgtttccagtttggggcgcgatgaacaatgccgcagtgaggattcttgtcagtgctggcgtatctcatgataggtttggaaataaattctgatgggaattaaaactggtgtaacctctataaagggccatttagcaagaactgtcaaaatgtaaaaaacatgcgcccttctgggaattacttctacagatctgcccgaacatgcaaaatgtctcatgcaccaggttcttctttgcagcatttgtttgcaaaagctgaggtgtagcaacaacctaaatatccatcaataaatatttatccatccatagactagaataccaggcagccaccagaaggaatgagaaagctcggtaccagcaggacctccaagttaagtaaaaaagcaagatgctgaacagtacatatagttctccaccatgtagattaaaaagggacggaatacatttgcttgtatttgcataaaatatctatgagtatagtcaagaaatagataatatgatctatgtatgcgggatgcggggaaggaagatgtttccgtgtatattccttggtaatcgttgaattttaagccatatgaatgcattgtctactcaaaaactcaatttattgtgaaaagactaaaaaccactgaactgtacacattaaaattctatggtatgtgatttagatctcagtgaaaaatatatattgaggatgggcgaggtggctcatgcctgtaatcccagcattttggaagtctgaggcaggtggatcacttgaagtcaggagtttgagaccagcctggccaacatggtgaaaccccgtctctactaaaaatacaaaaattagctgggcgtggtggcgagtgcctgtaatcccagctactcaggaggctgaggcaggagaatcgcttgagcctgggaggagccagaggttgcagtgagcccagatcacaccactgcactccagcctgggcagcagagcgagactgtctcaataaacaacaacaaaaaaaattacatttaaaaaaacttaggctatggggcccagcgtggaggctcacacatgtaattccaacattttgggaagctaatgccggagaatcgcttaagcccaggagttcaggaccagcttgagcaacagtgagattccatctgtatatt

SEQ ID NO: 161823 - DNA, 299 bp, Homo sapiens
gaattggtagcaggcaaatccttaaagtcaatgaaagaagccttaagaaagatcaatttcctttgcttcacaataattcaaacaaattattttcttggtaaggagtaagtcctcaatgcctgatgaaactacattggccttctagttgttagattctagttaagaatattttaagtacatacacttaacaactaaaaatatttaaaactacttcagatagtagtttacagagtggccaaaaatctccacatatttattttacattcatgtgcttcttatctctaaaccactgtcatttt

SEQ ID NO: 161824 - DNA, 209 bp, Homo sapiens
acaggtgctgagacaacatggtgaaacctgcctctactaaaaatagaaagctactaaaaatagaaaaggaaaaattagccaggtgtggtggtgcactcctgatcctcccacctcagcttcccaaagtgctgagattataggcatgagccaccatgcctggctaccattctcattcatcattgaactcagactaggttccatggcctggc

SEQ ID NO: 161825 - DNA, 198 bp, Homo sapiens
cccccacttctaaaactttgctcctgtggtgtcacctgccctttctcctgggtcccttttgcatcccatacagggtcctcagggcctaaaacaaacccccttccacgtccctcctctgggctctggcagcttctcctcagcttcacaataatgacaccatctatgcacctagcggtgctgcatgtcttgtgatgtgcc

SEQ ID NO: 161826 - DNA, 355 bp, Homo sapiens
tttttgataggtagtgaagctaaaacagtttccaaaagtgaagtggtcaacactatcatatgtttcagagagagccactgtgatattgcgatgtggaagtcattggtggaaatggtgcaaatagttttagagtattggaggaaaagattttgcctgagttcctttatctccttgtaattcatgtcagtcctctgtgaacattaatataattcaacaggtacccctatcaaaagacgatcgtcttttgataggactcactgtctctccgtctctctctctttctgtctgtttctctctgtctctgtctttctgtgtgtctgtctgtctctctctctatttgtctttctccctccct

SEQ ID NO: 161827 - DNA, 300 bp, Homo sapiens
aaaataatgataataattgtagtagtagtagtggtggtggtggtggtggtagtagtagtagtgaatgccctgactttggggtttgcagtaagctaggattaagtgcttcacagtgaggcacagtggggagctactctgaggatgaattgcctagtaaataagtgaggtttgtataaccgaggccagatcttagaacctcctgctatctgtacatagaagaatgttttagtcagaggcaaggcaaggtcaccaggattcactgagagtgttggtcagcatttcatctgcatatacaggact

SEQ ID NO: 161828 - DNA, 720 bp, Homo sapiens
ggtgtctaactagtcaaggagcaggacagagcaaatacatagttctgcaaggctccgtagcccactcctacagccacatggacctctgggcctctgttctgatctcatctagatttttcatctagtatactagtgccgtttctacctagaatggctgtcatctgacaactttttagtagtttagaattcacgtaacttgaaacttggtacagaacatccctgttgtctttactggcagtcgcagcagaaaccaggctgttgtctaactgtgaaggtagtgtctgagcacaagcctgaagctccaggggaggacagatttttacatttatttgtggactctggacatttggcaaaatccattgcactcaatagacagcagtcaaattaacagggagattgttctccacttatcgaaactgtcaaaaaactgagggaaggggggattccaaagagctgctcctagtgcattctttttatattaatggttagtgaataccagtgtcagaagttcacatcacagtacgaataagatgattggattttaatttttagacaaaaatagtctttccacattctaggtcatgctgataaaaacttttttgcgaaccaaactattcagatagtctgtaccaagccttacctatacgcagctagaaaatacctagagggctttattcattaacaaattatcacacatgcatgctgctcagagagtatgtt

SEQ ID NO: 161829 - DNA, 381 bp, Homo sapiens
aacactccatttcaaaaaaaaccaaacaaacaaaacaaaacaaacaaaaaaaaaaaacttgggaccatagtgaaattataaatagttttcttatttaacaaaattctatgagcatctttccatttcattagatactctttaaaaacaaaatggctaaaggttgcctaggttcaccatatgggtatatggttacccagtaatctatccatttatctcattctctattgtggatattgaggttatgagcatttttgccattataagtaactgcatgcacatgtgtttcagcagatgttttgtgggtgccttctggtgccaagggggctgggggagagaggatgaataactacagtgcccaactcactgctcatgtgaaaagga

SEQ ID NO: 161830 - DNA, 326 bp, Homo sapiens
tctccctactgtatcctaaagaatgacaataaagagccatttttgggctctcatccaacactacccatctactaactggtgtgtaacatccatcaggctttccaaacatcaccaagcagagtataagtttatacaagtacttacatgctttgtgtataaaggtacaatcaattaattcacacaatgcatttgtttattctaaagcaatccttaaatatcttgaaatgtgaagatagtacttccaagttacaaagtcacactcataatgagtcttaattatcctacctctttaaaaattaagaggtagatacgtaggagagtccgcg

SEQ ID NO: 161831 - DNA, 399 bp, Homo sapiens
aggatggcccctggtggtaggcacaagagcagctccaaagatgtctatgtcttcgccctgatccccagaacctgggaatgtgccatctgacatggcagaagagacgttgcagatgtggttccattaaggaccttgagatgggagattctcccagattgtcgagttggtcccaatgaaagaggaaggcaaagggtcagagagaggctgggagatggtacacaggtggctctgaagatggaggaaggggccaagaagccaaggaatgcaggtggcctctagaagctgaaaaaggcatgggaagttcagagaccggacctgctcagcaatcttgctaactaaattctgacctcactaatgtgtagaccaaaagcacaggctattaatttgcagggttaaggg

SEQ ID NO: 161832 - DNA, 723 bp, Homo sapiens
gctgggattacaggtgtgagtcaccgggcccggacttagtgttcttaacacagtttggtttataattttcctttctttggtttttatatcaggataatgctggattccaattctctagaagaatttgataaaacttctgcaaaatcatcttgtgacccatctttgttttttctatgggaaatttttgtgtcatgaattcatattcttaaattcaataatagaattattcagatttaggttttttattatgtcagtctttgcccatcatttttccagaaatttgccttttgcatcaaaatttttaatttattggaacggtgtttattatatattctttttaatgcctgtagtatctcttctgttattccctgttaattcatgataatgataattttcctctctttttttcttgattagtctttttgaagtttattgatttcatcagtttttttatataatgaggctttgggtttgttgatttttctccttcaaattagttttctatttaatcattttctccttttttctaatttccatttttctcagattttaatttaatatgctactcatttttctatctttgtaaggtatatttttagatcctttacttttaacctgtctttaaaaaaaagtttgaaggaataattttacttgtaaacagcattagttgcagtcctgaaattttaatattattaggttttcattttcttttatttgaaaagt

SEQ ID NO: 161833 - DNA, 332 bp, Homo sapiens
tcaacagacgtgactgtccatttctggtccctgagagaactttaggcacagggctgccttgccagtgcttcaaagccaacatctgagtccctggagcttgctctacccttgagacttacccctgcccacctcttggcccaggcaccaagctagaggggcagaacctacactgaatccttcccctcctctgttgattcatagttctttatctcctctgttatcctccctcccctttggggcacggctgatttttatcctctctacaggatacaaggttggctggtcccaaaacagtatttgaaagtggtgaaagggagttgataggaaagaga

SEQ ID NO: 161834 - DNA, 555 bp, Homo sapiens
gagaaattcaaatctcaaaatattattcctctgtcaccaatcagacttccgggattcactttcctggtgtcaaatattcttttttcagaaaatgcatcatgagtttatattaataattttaaacataattagtaaagtaaatcttctgaaaaaaatctaaattattttggagcaatattctattttgagatcaactttattaatatgggtatcaagagataaatttagattaaaaatattaccatttaatgtacatgattaatagatatggttatccaaagtaactttgataatcaatccagattttatagaagacaaagttttcatccgtctcattcaagttcacttttatacctaaagttgcaaagagtattcaagttgaaaaaaggatatgatatcaagaaatctgactgatatacactcatccagaaataaagaggttatggaaggctctttctacagctatttctcaacttacatacaaataaccactgtcaattgttcacttaaaattccaaactccaaccaatatttcacagagatattataaataaa

SEQ ID NO: 161835 - DNA, 186 bp, Homo sapiens
aatctttttaaaaatagcaaacatgttatagtttaaaacagttgaaaaaaggaagggaaaataagatggacttagaaagcagccctttaatttgaaaaagttttacaagcaggaaattcagtctcatctactgatttatagcatccataaatgcatgaaaacacatggccaaatcgaactgttcca

SEQ ID NO: 161836 - DNA, 496 bp, Homo sapiens
aagcaagctgaaactcaggaaaggaggtgcctgctctccatcatcaaagaagcaggaaaacttgtccttccttgttggaaatgagtaaaacttcagaaaaggagttgtacagcaaaatcaaacttagatctcaaccagattttgggagatcagggactctttgcaggggagaagctccacaacctcagcaaattatcctgttggtttgggcaataaagatagcccaggttggtatcaatcaataatgagatttatcaaaggtcaggaccacctttgtaatgtccttctctgtctttttttatctttattggtatatacgttttgtcgaaaataggagtgcaacacctgatttcttctgttttccatttgcttgaaagatttttcaccattccttcattttgagcctatgtatggcactgcatgtgagatgggtttcttggagacggcatagtcaaatgggtcctgatttccaccttgccaggataccgagctcgaa

SEQ ID NO: 161837 - DNA, 187 bp, Homo sapiens
gatggctcaccggaggaaaactccaccggcggatgccctcccacgcaggttgtacccgtgaaaccaagataatgaacattcataatcccagtagtttcctagtgtccctttgtaatcttgcttctcaaaactatagatcttctgtcactatagatagaaaatttactagaattccatatgaatgtga

SEQ ID NO: 161838 - DNA, 477 bp, Homo sapiens
gtcactgatgttttttagctgtttgcttccattgtagctctttgacatgctttaaaatgaaatggccacatgtgcctcagtattttcaagggatcatgtgctggtagttagttattttctctagctattctgtttcactgaacagaagctcagacacagcaaatagtttctggccaccaaaagtgcctgctgaatgcagtccttcaggacagtgtttgctggtgcccatgccaggacctgcccagggacacctgttcttagaagaatcgggcaccaggtgcggtggctcatgcctgtaatcccagcactttgggaggccaaggcagaggcggatcatgaggtcagaagtttgagaccagcctggccaacatagtgaaacccggtctctactaaaaatacaaaaaattagctagggcgtggtgatgggtgcctataatcccagctacttgggaggctgaggtaggagaatcacttgaa

SEQ ID NO: 161839 - DNA, 368 bp, Homo sapiens
tcattgtgtaccgcaaatctatgcttcgctgttctggcccatttactaaacagcagccagccagatcctttataagaaaaaaaaaatctaatattgtcaccacctgcttataaaactttaaagaattattgttcttaaagtttgtcagaaaaaactgtggaagactttgaagaaaaattacatgctataagcaaaattaaaagaccaagaaagaattgggaaaaattagaagacaaggttctaaaggaaccctgaaaaacataacagagggttcaagggtaaagaaatcatacactatgatctatcctcctctctctccaccagaatgggcaaaggccctaacagattaactagaataaacagtgaat

SEQ ID NO: 161840 - DNA, 694 bp, Homo sapiens
cactggtcattatttcctgggtcaaatctgcttgacattcaatttaatacagtctttcatcaagtcaaaaggccttagagagaaactttcactggccacccacattttcagcagggctgttgcctggtccgattcacttttgttttccaagtctttaccatcattgcatattacgcctacttctattgaaacagctactgcttttgatgatttccacagtggtgaacatatattgttcatccctgtaatgctagaagctggtccagtgcttggcatgtagtaggtgctcaataaatatgagatctgtgaaaaacaaattttcaccttacaaaggcattctcaaaatgaatttgacacatcctgctctctctacaaagttacaagctaagatagatcacagcaaagcagagatattgcagacacagattgaaaaccaagtgaaataatgatttagattgccttaaatcaaagtgactaaatgcatttttagaaagtacatgttgaaagttatcttgactagtcttccatttagccaggaagttttctggaagaagtataagtttagggattttttgtgaggtgagagggagaaatcataaataagtatgtgttctagaaagtggggtaagaccacagaggagtcctaaaggtattaatagaggtcaggaattggactttagaaaaacagaagagg

SEQ ID NO: 161841 - DNA, 1125 bp, Homo sapiens
agatggctcatgttggagcatggatgcctatatgagtactgacattcctgatgaaggagatgtgcacaatggcacttactgtgcaccaaacaaagtctgcctgaattccgcctgcacagataaaaccccagtgatttctgcctgcaacccagaaaaaacgtgtaatgggaagggagtttgtaatgatttagggcactgccactgtaatgaagggcatgccccccctgactgtgttactgcaggaagtggaggtagtgtggacagtggccctcctggtaagctaggtgggacaccttcaggagaaggtgaaaatcacaatatgactcattccagacgtgaagaacatgctgtagacatgatgatattatcattcattatactttttataatattattattaagtacaattatttgatctgcttgcttaaaaaatcaccagaggctgccccggcagaagctcctccagcagtggctccaccaccggccccagaaataaagccagaagcagcagaagtggccacagaagaaaaagaagagaaggaggaagaaaaagaagaggaggaggaggaagaagaggaggaagaatcagattcctaaggttagaaatagggagatgaagccaagtatatcaaactcctcaagtactgagtgggaatgagatgtttggtgaagtagaaatagatagctttagtggctctgactcagatatactgatgtagaaggaaggattctttcacttttattatttattttggtaattaaatttacattaatttaatatgttaaatattttagtaccttttgctttttcacatttcatttgaaccattaacatgcatctttggacatcaatgtccttgtctttttggcccaattgttttagtcaccagaaactttttcaggacatgctatcttctatttgtttgacatacagaatcatatgtacctgaatttattactaactctgggattttcattttaagtaacaactacctattatgtgaggacagttgtttatgtgattggttgttctaacttgccctataaatgtgcattcatcaaaggagaagtttttaaatccaaaaacaaataaaacccgattcatattagacaactcttcaggtt

SEQ ID NO: 161842 - DNA, 354 bp, Homo sapiens
cgctcacgctgtatacttcccttattcagcatctaccatgctgtactgtaattgtctgtctgcttgactgtgtcccaactataacaaacctgaagaagacatcgtgccgagaacagagcaggaacctaataaattttgttgaattaaagaccgagtgaataaacaaataacgttctacttcagtgtcctctttggcaaattattaattgctatgtctaagattctttttacatacagaggtgaaaaaatattctgacaaaaactgagaaagctacagtaatttttaaattagagttcaaaaaataagacaatctttctgatcgaaaagagtacactgaagtataaagggtgcag

SEQ ID NO: 161843 - DNA, 208 bp, Homo sapiens
agggctgtgaggcccgggagagggccagagctgcagctttaaattggagggtcacggcatgtggaggccaaggaagcagatgggatgtccggggagagagtatggactgaagcagctaaagaattgcagcatctaatggacaggaagaggggcagcgacagcgatggagcctgagaaggagggtgcagtgtccccaagccatgtggag

SEQ ID NO: 161844 - DNA, 578 bp, Homo sapiens
aatcccattcacgacgtttaaaagtgtctgtgcgcagctgttaaaccatgcccgtttaggatccatgcatgggagcatcacgccacccttaacttccaggtgattcaaatgaggctgtaaatcacaccccaaccattcctctggccacagtgatgggcatctaacacaggcctggccaatcatgcacccatcttcttaaaaatagggattagacctgcttgctcacccagggactaaactaactgcttctttggatatatggatgctaagagaaagactttctctccctctggggtttcaaagctgagatggtggaagccctgagatgctgacactcacctttctcagaagaaatggctgacacacagaaaaacaaattatggagtggagaaatgatatcatgtgaccctctggatccacccatactgaagctaattccctttctgtctaacctaatttgaactgggctcaacatgcaactgaaaggcaactaataaactcagtatagctttaatataaggcagtacagcctataagccaaatgcaaggccatgtgcagggactcatgcctgtaatcc

SEQ ID NO: 161845 - DNA, 521 bp, Homo sapiens
cagtttggatttaattttaagaaataatgaggtaagcatttaattttggggttagtgctttatctggtaactctgagaaaaggccatatatgttttaaaaatttacagggaggtttatatattttttttagcatattaactttttattcaacaatttgccagattttgaggtaggtaggggttagctgatttctcacgtcttgaatttcagtcagtcctatgacctgttagtctggacccagcattgctttttaaaagtttgtcttttgctgagtactttttcattgctttttcctggggcagagagccgagaagagatttcaggagatttgtgttaatagttaattgatccacatgtgaaggttgtgagtttaaattcccaatttgctgttccattgctacatctcgaagatttttcctgcaattagaaactacttaaactgttaacttttatctattattttgaaactagacatttttagtgtttaaacttttttaacattaatgtacaaatgaattgt

SEQ ID NO: 161846 - DNA, 386 bp, Homo sapiens
aggtgggggccgccctccgacggcgttagagacgttgtgcagcgtggccctgccagctacgtgaaagcagccgcggggcttgcagggctgtggaccttgtagggatgaccctctaaggtcatgctcgtcttcctccccgataagaccatacccaaatcctgttgccgtttcagagactcaatatgacggtttcattcattcattaacatcttcagtttatccataaacagatatacacgtgtctacagcactgccgagttagtagatacggcagtgaccaagagggacttgcacggtcctgactccatgttctagtgatgggggagaaacaatacgctccctatccatgagttccgcatgtgtgaattcaaccaactgcggataga

SEQ ID NO: 161847 - DNA, 183 bp, Homo sapiens
ttttgggtgctgaggatacagtggtgacctctggcgggtccctggctgctctcctagaccttccatagggtagcagtgagggtaggggaggaggaggaggcaagtggtaaatagtagttccttccatggacagggtaggtaatgtaccagattgtgttacatgcaatgaagatataaaacagg

SEQ ID NO: 161848 - DNA, 318 bp, Homo sapiens
aaaaaactgatgccactacacacctgttagaatggctgctgacatacaaaacattgactgctgggtgaggtgtcaaagctccagcatcagaaagtggtccactcgagggttggtaagaaaaatttactggcgacagtataggtttgaaaaaggaacgtttggcctgatgtggtggttcaggcccgtatgtaattccaacattatgggagtccgaggcaggcggatcacttgagatcaggagttccagaccagcctggccaacgtggcaaaactttgtctctattaaaaatacaaaaattagctaggcgtggtggtggg

SEQ ID NO: 161849 - DNA, 357 bp, Homo sapiens
taatgactggtaatcatttaactacacctacatcttggcagaattcaggcccctctcatcctcctaacctggtgtcctttcattagttttacaaaggcagtttcattttgctgtcatcatttaaactataaactatctacaaaagttagcttggcccactgcaggaatggctaagggagtttgggggtgaaaggcaagatggagttgtcaggtcagatctccttcaccatcataattttctcactgttacaatttctgcaaaggcagtttcacattcatccactagtgttagcatttttggtgattcttacctttgaattattacattagtagtaaccaaagatgattattctaatt

SEQ ID NO: 161850 - DNA, 496 bp, Homo sapiens
tcacaacagatgcaaaaataataataatgagctattttttaaattttttttaaattttttttaaatttcaaaataagtaatatattttagtaatattttatataatagtcattttaactgtggtaggccaaaaaatgaccaccagaagatatacacatcaaatccctggaacctatgaatgtgaccttatttgggaaaagggtctttgcagatgtgctaaggatcttgaaataaaggagatgattctagataactcaggtgggccctaactccaatgacaagtacttataaaagagaggtggtgaagaaacccagactggagaagacacagacacacagaagagaaggcagcgtgaagatgagcagagaaagatggggccacagccaaaatgtgcaaacagccaccagtagctacaagaggcgaagagtgggctctgccaggaggagccggagaggtaccccactgacaacttgatgtcagatttctggcttccag

SEQ ID NO: 161851 - DNA, 443 bp, Homo sapiens
aagcagttctcctgcctcagcctcccaagtacctgggactactggtgtgcaccaccgtacccagctaatattttattttttgtagagatggggtctcactatatttcccaggctggtctcaaactcctgggcccaagtgattctcctgctttggcccctgaaaattttgggattacaggtgtgagccaccacaactggccttctttttactttcatgatgctatgttttgatgcacaaaagttttaaattttgctgttttgcttatgttttttggtgtcagaagggttgcctaatctcaggatggaagatttatgcctatgttttcttctaagagttttacagttactcttacatttaggtcttttatctgtttgagttcatttttgtatagggtgtgagatagggctatacttttttttttgagtctgtaaaattaaatctg

SEQ ID NO: 161852 - DNA, 483 bp, Homo sapiens
acctagttgtcaatctttctactcctcattctaagacctcactacatcctgacaacttataaacaattttgactcttcattctcctctgcctctatcttgatgcttaagctctattacatagtcccctgtccctgagtaattctacccccaacccctggcccaaacaatcacagtcactgttgatggtttatggctgggctgtgttctcactttgcttcttttgaggttggaggaatgaagacaggaaagttctcactcctactgacagggctgctatagaagaatgagctctgggactcccagcttggatctggcaaagcacgctacctttataggcactgctattcatgttggttttgttggatagcagcatgaggactggacatatgatgggttaagttggcttctgtgggctattctgggaacacacccaacatttgtagctttaatttttctattgaaaactacctctaagttccaaa

SEQ ID NO: 161853 - DNA, 171 bp, Homo sapiens
taccattttacatttccactagcagtgtgtgaaggttccaatttctctacctccttgccaatcttgtttctgattacagccatcctagtgttaagtggtggtgttcttggttttctagctggattctatgacgtggcctttgggtaggatagggtggaggcagcaacagaa

SEQ ID NO: 161854 - DNA, 639 bp, Homo sapiens
aatttagctcggtaactgaatgggcacagaaatttattactttttcttgtatgatactgcccatacggtccagggcacagatattaacctgtgctatttaatttattccagaataaggaggatagaaagcttttaaatccctgattaaatcaattcataactaaagactctctcttaaggttacacacatgcaaattttcaaaaatccaccaaaggtggaaggatgtaatactttatgaccataaaagatgttatccttatatttcaaaatgactcagtacattaacaagtgaaaggaacaggagcatatgatgatcttggtgaaggcccaaaagtcatttggtaaaatttaaaaatcctgcagtattttttccagctggtttgactgcttagtttcatattccttatctcataaatgaattgaaggctatgaaagtttttcatttcggccccatccacaagacgtgccccacagtgccatctctgccactcatctctactacacttgatttcctctttatttgtaacttgggatgaaatggacaggactttgggctctttctcagtgacttcaattttttattacattatagtcagagaatatgacctgtgagatttctacattttggaatctggtga

SEQ ID NO: 161855 - DNA, 483 bp, Homo sapiens
actctgcagggcttagtccaggttgtgcgcagtgtcgtagtaccccctccgccccccgcacgcctgccacatgaggatggtccccattgttccagtctatgaactttcatcaaatccttctaggtcagggtttctcagctatcagcactattgacatttgggctagatagttttgtgagtggctgtcccatgcactgtaggatgtttagcagcatccctggcctgtacacactagatgtcagtagtacacatttaccttcttcagttgtgacaactaaaaacgtccgtagacattgttacatgttgcttgtaggacaaaatccacccccaattgagaatcaccactgctctaggtagagagggttaacagtaggcctgagtccttttcttcgtggaaaatgaccttgggttttccttctcctggcattcttttcctggacacatactggattaagaattaaatatagaatatctccaggtaat

SEQ ID NO: 161856 - DNA, 469 bp, Homo sapiens
cttctatgctggctgccagtgttttagtagcccatttgggaaagaagggttggaacatgaggatggtccccattgttccagtctatgaactttcatcaaatccttctaggtcagggtttctcagctatcagcactattgacatttgggctagatagttttgtgagtggctgtcccatgcactgtaggatgtttagcagcatccctggcctgtacacactagatgtcagtagtacacatttaccttcttcagttgtgacaactaaaaacgtccgtagacattgttacatgttgcttgtaggacaaaatccacccccaattgagaatcaccactgctctaggtagagagggttaacagtaggcctgagtccttttcttcgtggaaaatgaccttgggttttccttctcctggcattcttttcctggacacatactggattaagaattaaatatagaatatctccaggtaat

SEQ ID NO: 161857 - DNA, 219 bp, Homo sapiens
ggaattcaaggctgcagtgagtcatgactgcatcactgtactctagcctgggtaacatagcgagaccttgtctcaaaaaaaaaaaaaaataaaaaataaaaataaaaataaagtaacctcacagagccaatcaaaatatcacttttccaagtgaaattactgtttttttctaatagaccaaaatacttgctcaatcacaaaaaatttattaaatactgg

SEQ ID NO: 161858 - DNA, 152 bp, Homo sapiens
gttggcatctgcagcaagttcttttgttcagagaaaccttcagaaaatctaatgtgctgaaaaaacatgacttctaaatagtaggaaaatatttacctccgaagtctgtgaagcacctggcacctaaagcacactggacacttggcaagact

SEQ ID NO: 161859 - DNA, 177 bp, Homo sapiens
ctgactggaatgtcagccttatgaaggcaaggattttgacctgctgtgctcactgctgtatccacaacccttagaaggacctaaacaagtgttcattgaggccaggtatggtggcccacacttgtaatcccagcactttgggaagccgaggtgagtggatcacctgaggtcaggagt

SEQ ID NO: 161860 - DNA, 586 bp, Homo sapiens
atacaaaaacaaactcaagatggattaaaggcttaaatgtaaggcctgaaactatataaatcctagaagaaaagctagaaaatactcttctggacattgcctaggcaaataatttatgattaagtccccaaaatcaaatgcaacaaaaagaaaaactgacagttgggacctaattaaagagcttcagcacagcaaaataagctatcaacgaagcagatggacaaactacagaatgggagaaaacatttgcaaattatgcatctgacaaaggactaatatccagaaaagaacttaaacaaatcaacaagaaaaaagcaaatagccccattaaaaagtaggcaaaggacacgaagaagcagccaacgaacatgaaaaaatgccgaacatcactaatcatcagagaaatgcaaatcaaaaccacaatgagataccatctcacaactgagtcagaatgactattaataaaaagtcaaggccgggcgctgtgactcatgcctttaatcccagcactttgggaggcaaggtgggatggtcacttgagcccaggagtttgagaccaaactgggcaacatagtaagaccccttt

SEQ ID NO: 161861 - DNA, 578 bp, Homo sapiens
taggcatgaagatttctgtgagattttgagatgttttgaaattactcaagcaaaagaaagatatcctgggcaagctggaggttactgtaacctccaaccttttagctggaagtctgaaattctcccctactttctttcctggatgggcggagctttatcaaggctttcttattcatttgaaattgtcttctctcaggggctcagtcaacagtggctttggagaactgagctctttttctggcttatctccaggcccttcgagggctggtgcctgcacacaccttctacaggcagcctaaatgctaaggtggaggttgaacttaggtcatgaggtcttttcattttctatcttccttgttggtcctggcatctcctcagcacagggaccaggtaacactaaggggaaagcattcagattagcgcatgcccatcgcggcacaaacccaaccagattaggcagggaccaaagtctcccccttcttcactcctccccggcagcctgaggctcattttcccttcctgcttgttttcaccggttgctaagcagcgtgtaacatgctggcagggcttgcggccgc

SEQ ID NO: 161862 - DNA, 294 bp, Homo sapiens
agaacagggcagggagtttcacagtgttcttctacacaatgtctggaatctatgaataacatcagtttctaagttatgagttgatttttaactactgggtttaggccaggcaggcccaggcctgttttcgggcctgacaccgggctgcctgtctttggttttactgccttgttgttttttcttaaaacaggtactgagtataaaacaatataaaacaatatgagaaggtctctctcttccctcaatacacaaattttctaaacatatatatgaagcattttataataggaaaca

SEQ ID NO: 161863 - DNA, 386 bp, Homo sapiens
ctatccacctgtctcagcttcccaaagtgctgggattactggcatgagccactatgcctggccatctttcttaacatgtttttcacatttgtgatacatatacacacacagacatttgtatgtacctatatgaatgatactctacatgttgttttgctgcctttttactcagcagtggacacaaaaatcttttaatgccactgaatacagatacatcattcttttaatgtgaaatgtttctctatttagggtatacctgattgattctgatcagtgaaacggtagaggcaactctcaaatggactttggctatgggtagtaatcggttggaaactccttttgaggacattaacaggtagttgggagttaagtggctttttctggca

SEQ ID NO: 161864 - DNA, 538 bp, Homo sapiens
tttgagacggagttcactttgttgcccaggctggagtacagtggcgtgacctcggcttactgcaacttcctcctcccggattcaagcaattctcctgcctcagcctcccaagtagctgaggcaggagagtcacttgaacctgggaggtggaggttgcagtgagccaagattgtgccactgcactccagcctgggtgacagagcaagactccgtctcaaaaaataataataataaatttaaaaatattatatatgggtatggctaaaggctcctttaaccacagtctcacatatacatcttgccatataaaaaacattattttggccaggtgtcatggctcacatctgtaatcccaacactttgggaggtcaaggccggaggattgcttgaggccaggagtttgaaaccaacctgggcaatagtgaaactctgtccctaaaaaatttttttaaaaatcagccgagtgtgatggtgtgtgccagtagctacttgggaagcccaggcaggaggattgcttgagcctaggagttcaagacca

SEQ ID NO: 161865 - DNA, 357 bp, Homo sapiens
ggcactctgcattttataaccggttttatttctcttgtaatcactactgcagcctgcaatttcttatttattgtccaattcttccccactagggggtcagctccctgaggacagagacaggcttatgttattcatggctgtctccaggccttggcacaaagaaatagataaataaaggaacggaggttctgctaaggtcctttgagttctgcagagtgagggaagctggacttggcagggccgtgccatagcttgggtctacatggctcagaggcgtccatcactgatgccttgccccagccaccctccatggacaccaacgaggagctggccactgtgttctctgggcagcgctat

SEQ ID NO: 161866 - DNA, 415 bp, Homo sapiens
aaaactactcaggttgaaaaaagaaacagttataaaaattatcaaagaaaaagaagaatatcatactcatgaaactagaataagatagttacagaggaaacaaaagagctcttagaaaataaaaatacaaaagcagaaagaaaaaattcaatggaaatcatggaaggtaaatgtgaggaaataccacaaaaagtagaaaagcacaggagtagaaaaacagaagaaaattagagaacctgattagagggcatctaaaccagatgggttttggaaagaaaggagagacaaaatggaggggagaaaaacaataatgaaatatttaacattttccagaaatgaaagatgtaagttgctggagtacactgagcacccagcaaaacagatgaaaatggactcatattaagatattttgttg

SEQ ID NO: 161867 - DNA, 236 bp, Homo sapiens
gacccagtgagcctcaggagtgccaagccccagaactgcacaggcttttcccacagttgcatcacaagggcaagtctgttactcgggagagctcccaggagctgccccatcttagctgtctatctccagtgtcctgttgataagatctgttaacattctcagctccaggtctgaaatatacaaagaacagggcctgtttgttcaatccaaccttctaaggtttaactcccaaagga

SEQ ID NO: 161868 - DNA, 273 bp, Homo sapiens
gtcgactataattgtgtcccaaggcccatttctcctagtggactatgagctcctcaaggacaaagcttatttgtatttggctttccatgtgtggggtcagggtggggacatgggccaagtgcactgtgagagtgctggggaggacggtgagagcagtcttctcgttagaggggacagaacttgtacagaaagcacagagtagcagatcctggtgtgttcagggaagagcacacctggagagtgaggtgtacaggtgagggggcaggaggggag

SEQ ID NO: 161869 - DNA, 218 bp, Homo sapiens
tgcactccagcccaggcgacaaagtgaagctgtctcaaaaaaaaaagaaaaaagaaatacaaacagtagtactcgaagagtggagtaagggctcgaggggaagagggccctgtctaccactacctccccagcacctctcctccctgcacacatctgccgaatcaccaagtgctgcaggccctgcctccaaagtgtcaatcagtttctgcaccctgccc

SEQ ID NO: 161870 - DNA, 316 bp, Homo sapiens
gccgcaggcccgaccgggatgagaagtcctaatcggcgttctaggggcgttctaaaagaaggaaggaaggggatttgaaaggattgctcccgcagggctgtggccttaaagaggtggtgactggcaggttggactgacctgccgtgggctctcccttcctccccaatttaccttcgagaaaccctcgttgaggagacacccaagggctgagtcctcctccactttgaccttttgctattccatcacaaagaaaaaatggatcccaaagttaagaaatggaccagcacttgtttagaatcaggactggtgccttggt

SEQ ID NO: 161871 - DNA, 396 bp, Homo sapiens
tgccaggattacaggtgtgagccgctgtgctggtctaattgatatttcttatagtattctctaattgatgataaccccatcacctttattatcgtgttttagtttccttcttattctcaccaggatttttacatagctgtagtaggattatctgatttggagatataggcaaatatacattcatttgcaaaactttcattatttagaaattgattaccttggtcctgttcttatcccccttttctgcccagataagaacttaagcattaactgtgtaattccatttacatgaagctcaaagcagacaatttatctgttggtgacaggaatcagaacagtggttagttctgggggaggtatcgactaggaaagggtaaaagggaactttctagaata

SEQ ID NO: 161872 - DNA, 418 bp, Homo sapiens
tggtttcatgtgaaatctactgcctcaagtgcacaagcttccagatggggttggagtttggggcagagagtagcaaaaggataaggttaagacgctaacccatcacccagcaggtaagaggtgtcacttaaccttccagcttctggaagttgaattttgtaatgagctgtcactgtctttatcacctaacaattactgcaactgagtagggtgggataaaacctggaaaacattactctgtcaacagcattgatatctttgatgaagctgtctatggtggggtcccgggtacagttgaaaattggcacatggcctgttaaaatggtttaggttctttccattcctccactctgcagactgctcctggcttgtgatatggcaattgtttggtcagatcactagaggtggtcatgttgtt

SEQ ID NO: 161873 - DNA, 362 bp, Homo sapiens
actcacctcttatctccaggatgaagatcaggcttattaggaggtgatatgatatgtttagggatttagttaactgcatatttagggtgaatttaaaattggcaggatgatgaggatgccagaaaagctaatgtagtttcagactactttaatagattttgtagtaccttgtttgtgagaaataatagaccttttgtttcgcatactagtcaagccacagttggattaccatgttcaccagattttgtatagtcagcattttaagttgactggaatgtgtcttgggaaagatgactgaaatggtgagaagtctgaataatatgtcatttttacactagttgaaggaactcgtaatatttttc

SEQ ID NO: 161874 - DNA, 320 bp, Homo sapiens
gagctgagtgtggtctctaaggataaacttcagttcttaccatagtagctgctcgcatacagtactttcgagttgcttttgtgagcatggttctgtggagttctggaactgtcagaggcaagcttggcaagcccccttctggaacgcactggctgtgaataactgggaggtgctggcctcaggattcacaccaaggagggggctgagcctcctgcgttcaagggccggtatgttttggctgctttcttgcttttcttctgccccagtctgcatgattttgccgtctgaacaaccatcggggcatcactaagctccagcgc

SEQ ID NO: 161875 - DNA, 460 bp, Homo sapiens
ggaagctagtgacagacattcagggaagaaacaaggatacagaaatgtctttctctcccaaggccaggatcagcatgaccatggggcacaggaagttcgatggagctcagagttacaggaaatgccttgggtgcttatatccagagaaaatgctagaagcagcttcttaaaggggaagaggatcccactagacttaatacggtctctgcccacatcattgtggagctagatatctgtggaacttagcctaaggctttcaccttagacgtgactgaagtggaagaaatggaatcaggtccctacaggttgccaaattggtggcagctctgttggagttaggaaggatgcactcagaaaatctgtgcgctactctgcatttgtttttctttgatatgcctgaagtgatttaattaagctgtatgtgaaaatctccatgttagctccaactataataaaaagc

SEQ ID NO: 161876 - DNA, 454 bp, Homo sapiens
  misc_feature (1)..(1): n is a, c, g, or t
nggtcaggtttcattcttctgcatatgggtagccagttattcctgcaccatttattgattaggaggtctttttcttactgatttgcaaaggttctttacatattctggatgagtcttctatcatcacacacattgcaaatatcttctcccagtctgtggcttcccttttcatttcttttattgtgtctttagatgaacgaacagaagtttttactgttaatgtagtctatttatcatgctttatttgttatcctaaggggcactgccatccttaaaactcgtaacaagttacaaaaactttgtaaggataataagtacacgtaaaactgggataaaaatctcacaacagtatgaatatcaaatgtaaaaatacatattgaagagactgccatgttaataacatatatagtaaacaataaatgttaattactttcctaactcaagtgcttctcaa

SEQ ID NO: 161877 - DNA, 602 bp, Homo sapiens
tctgtttgtatacggaaaatcttattacattcttacacagagtgtgacacatttaatatttgctagaaaatgcatcttagaaattaaattattaagagttagtggtgaggaattttaaatttaatgttctatgatatagcacaacacagatttatttatttatttatgaaatggaatcttgctctgtcacccaggctggagtgcagtggcgtgatcttggctcactgcaacctccgcctcttgggtgcaagcaatgctcctgcctcagcctccctagtagctgggattgcaggtgcctgccactacacccagctaatttttgtatttttagtacagacgtggtttcaccatgttggccaggctggtctcgaactcctgacctcgtgatctgccctcctctgcctcccaaagtgctgggattataggcgtgagccactgtgccctgctgaatcttttatttttaagtgtgaatgttaaaggttgcaaaataataaaatgacctctgtggatttgaaatttggaataatatttcttgtccatattgatattacaactcagaggaatttcaccctgttattttatgtgtctttttagtgagtgaa

SEQ ID NO: 161878 - DNA, 490 bp, Homo sapiens
atgctcaccctaaactgaatcctgtaccagtggaaggcaaatgttataaaggatattattagatctactgacaaaactgacaagactgaatatggatggtagattagacaaaaagtatatttttgaagtcaattgtactgtggttacagaaaaaaacacagtattatatactctaaaataatgagggagaaaaaaatgtgtgtgtacacacacacacacacacacacacacatacagagagagagagaagatgagaaagaataattaaatgataaagcaaatggagtaaaatattcacaacaggcaaatctattaaaaaaggcaattgttctttgcactattttatttctacaacttttcgttatgtttgaaattattttcaaagaaaacatttcaaagctacattacaaaattagaattatggtaccaatcccatttctattaatatttcatttctaaaggaaaatatattattttaagatgttaaatg

SEQ ID NO: 161879 - DNA, 697 bp, Homo sapiens
caattgactctccatttcttctctattcgggagactaacctctatggactgcagcaactggaattcctactctctaataatcagttgaatttggccaaagggagctactagaggaaatcagaaagtgggagtcagagaatgtattacctatgctctttccctgctgggccatagcttgggggtagtattcctctcctgaaggtcacatctcctcgtcaggagctctgtgctttactaatcaatcttgctgtgttctgctaagtattccctctccttatctcttcagagttaggagtggcaattattttctgctgttgctaggtctaagatgctacaccatctcttacttgttgttccccttaactttgcccacacctttgtaaatagtctcttcattaaacttttgacagttatccttcagtgtgtcgtctacttcctgccaggaccctgatacgcttaacaagaggcaaaatctggattgctagactaatataccaaaggtcaatgtacatttagaaatgtacagttagagtgatggatatatgggggtgcctttttaaaataaatgtttgggtaatacaaaatctcttttcaaagctatgcaataaagaatacggtcttgcccaaagagaggtttgacctttgtcccagctcctatgaaataacttctaaatcttggcattgctgtaccaatagg

SEQ ID NO: 161880 - DNA, 194 bp, Homo sapiens
acttccaggagaaaggcttaacaatgtaagcacaaggaggataataactaggtgttcaagtgcagaatgaaaggggaatttatctacctgtctttttggataataagctgacagaatccagcactctgcctcagccctccctggtctgaaagacttggcaagtacattttttcctctattaatgtagtagttat

SEQ ID NO: 161881 - DNA, 548 bp, Homo sapiens
atgacactacaagaaaagagaactacaagccaatatcccaatgaaaatacatttaaacatactcaacaaaatattaatactaacagccctaattctgaattgcacagcaaattaaaaatatcacacaccatgataaagtgggatttatctctgggatgaaaggatggctgaacatatgcaagtcaattaatgtatacaccacattaacagaatgagaaggaaaaaaaatcacataatctcaatagatgcagaaaaagcatttgataaaatttgacgccatttcacaatagaaaacaaaaaccctcaacaaactaaacatagaaggaactcaattcaacgtaggaggggccacctatgaaaagcccacagctaacattataggctaagattataaacaagagaagggtacctactctgtcaatttctatccaaaatagtattgcagtcttagccagggtaattaggcaagaaaaaaaagaaagacatccaaattgaaaggaagaagtaaacttatctgtttgtagattacatgattaaatatgtagaaa

SEQ ID NO: 161882 - DNA, 510 bp, Homo sapiens
tccagcacagatgcttctcttgtggagtggaggtcatatgactgtacccttgccttatgggaagcaaggaaagcaaatattcagtagtaggcagaggtttctgccttctttcaagatgcatatggaagggaattccccaaggacaagaaggtgttttgatgctaagcaaccaagagaatgacttgtgcatcatgatgcttcctttggatcctccctaggtttgctttccctttcattcctgtttctactcagttgtcacctcctcagagaggccttttgtaatcactttctccaaaatggcaattccctatccctaatctagtactctgtttcttactctgccttactttttcttcataccgtttatcactgccacaaccaccactactactactacttatttacttctttattgtgaagttcttatcccagaacataagctctttgctcttcatttactcagtaaacatttgtttgttgaatgaagagaaacatagagattatgctata

SEQ ID NO: 161883 - DNA, 990 bp, Homo sapiens
ggctcatttgcatacttaggttccacaaagtatggtcagccatgtagtaatgtgattggacaaaaaggacatgacgtaacgctaacagactgagcagggacactcggcaaggcctgcctgtccgcattctccctggcctctctgagcaggattcttccttctgggtgtgggaaggaccttccctggaatgggggtcttatgacctacagtcaaacaaggtaggtcagagaatttgtttctggccagttttgtacagaatgacggaaggaaagttagagcagtatttttaagttttatggctggctttggggaaacggggttctggtttctgtgacctgctatgaggaagagagggattccagtttctgtggctgggcttaggggaggctgggactgagagacaggagggcaggagggggtcagagagaaactttttcttgtgaggcttttatgctggagtactgcttcccgactcccaacgtttgctacttgtaaaattttgtgattccacaggaaaggcaaaggcatggaagtcatgagaaggcaacgctaccttaacttcttctcattttattttttatagtgttcagtttaaaggcgtaaaaggctggaggagcagtacaacacagatatgtctgatcttcttggaggttctccctttagctaacttttgctgtgatgggtacttttttcatgcccctggttcctgtatctctcagttgatgtcattatagccatctgcgttcagcatcaaatacagggagccacgataataaaattacaggcaggaatacgtgagagagctgagaggcaaggggactgggctttagacggagcttgtgaaatcggtggcctcatttgttcacttgtatctagcactcctagaaagcaagcactgcgtggaggtccagccacaggaattcacaccaacgggcccagagtcggtcatagtgccctgatgtgaccatttcctagcagtgccagttcttc

SEQ ID NO: 161884 - DNA, 508 bp, Homo sapiens
tgagagtcaggagggagaaaaaagaaaatgaacgtttggaaaagggcattcccaaatcacaggagaaggggaagaaacgtgtctcagctactaagtttctcttttccatgacgctcaaagcagaaaatggctgcacgtgggcaattcgtgcgcttggagctcagacctgcagtcttgtcgtttgtctgccctgtcttggtgcatgctgggcctgacttttttatttttccatttcaaggagccccagcagggcctggaggaaatgagttttgcagcccatctcggcccttgagcttggctcctcggctgacctcggctccccgcctgcagacccggcatgaggcaggcagcaggcactgcggggcagaacttccgggacctgcaagaccagtccgctgccttctgagacgtagttctgaggtgtagcaagttttcattttcacagcataaaaccgtctacaaatacatacttcaaaatgaaatggaggatgcgctcaaaaaaaaaaaa

SEQ ID NO: 161885 - DNA, 400 bp, Homo sapiens
aacctcctaaaaatcagtaacacaatacaaaaatccagtagtataaaagaaaagttcacataaaggaatatatgtcccttttatgattataaaataagctcaatttcatttattattagagaggtgcaaataaatctacatagagatatttttttcacctaccagttaataaaagtacggaagtttgatagcatattctctagatgagggtataggaaacagacactctcataaaatgctagtacattgtaaattgttttaagcctgatacagaaaacgttgtctgtatctattgaaataaatctatatatttattgaatatgcaaatcctcttcatggaatttattctatagaaatacatacacacatcgagagttattcattatagtattatttgtac

SEQ ID NO: 161886 - DNA, 521 bp, Homo sapiens
tttgtgttctgaattgactatgtccagtgtggtgcgccctacaccacggctactcagttaatttcccagaatagacttatctgtgcttttcacttgagtttgggaagagctacaccttgaatttgtttagatgtaacttgttctattagcaaagggtcatgtcagagtgcgaacattttttagctaagaatattgcctttacgagaaccctattccaaaaggtaattacatgtgatctatagtcctgaaaaatcttccttttttggaagtgaaaaccaaatttattcttctttaaaactaaaaataatcgcttctctgcgacactgctgtcacaaaatatccatgccaacacttcacttccgagagtggagatgaagctgacctttaaaaacgttctaagagagacattttcattctcccagctgcagagacccaccagagttgctgctgttgtggggtgggagaaggaaaagtctccctttctgtccctggtctctgcttccccccagggcttggactca

SEQ ID NO: 161887 - DNA, 319 bp, Homo sapiens
acttgagacatccaggtcacgtcaatgcctgggagatacttcacatcttcagttatattctgtgtctctgatgtgaaagcctatctccatcctctggccttctctaaaatagtgtggctagaatgtaaggtacagaaacatggggaaggaaagctctgattttttttttaagctttggcttattctgggctcaatttatatctgggcacatagtttcaaacctcaaccatatgtatttcccactagtctgaaaaatcagtcaagacacagaggaacatctagcagccctaaccccaacactggaaaggagggctggggg

SEQ ID NO: 161888 - DNA, 224 bp, Homo sapiens
tgttctgatgaaggacggggggaaatcccaaagagtaataaatctgactataaggaaaagacgagggaaaacaggccaagaatagaaatacattgtgcctacaaaatggatccaagaaccaccaacatatccatagtgtaagcagaaaccatcaagtataaagattggctgataaaaatgtcaaggtatcattataattagagagctatccaccagctcattac

SEQ ID NO: 161889 - DNA, 342 bp, Homo sapiens
aggtagagtagctgtatactgtctacaactgctgtgcagaaagacctcagtgccagcttctccttggtgtagagtgaagagatacaatcatgctttggaaaatgtgttgatatcaaccttagacagaagggttaggctgaagacaatctctcacaatgattgtaaaattgacttaaccaatacttaccgtgtggttatcttcagtagtgctaatttctgtactcacaagatagatagaagtaaataggacagtgtcaaaaaaatttctgtaaatagtagttattgagtctttattctcttcattgcagagggaagctgagaaaaggggatgggggattatat

SEQ ID NO: 161890 - DNA, 493 bp, Homo sapiens
cagatgtggtagctcacagctgtaatcccagcattttgggaggctgagagggaggattgcttgagcctgggaggttgaagctgcagtgagccatgttgcactctagactaagcagctatgcaagaccctgtatcctcccaaaaattaactgatcagagatgtgactgtttatttttggactctctgttctattctattgatctgtatgcctgccctcatgccagtaacatagtgttttaattattgtagctttgtagtaagtttagaagtcgagaattgtgaggcccccatctttggtctttttcaagatattttttggttattcaggcccccttgaaatttgatgtgaatttgaggataagcttttccacttctgcaaaaaatattcttgagattttcatagagatttaagtgaatctgtatatcactttggatagtactagtgtcttacaaatgtcaagtcttcctattcatgaacacgcatgtctatttc

SEQ ID NO: 161891 - DNA, 595 bp, Homo sapiens
ctgagctctcgcatgagattatgctgggcgcgaattggatgttgctctgcgctcacctggtcgatgactttctggtctctggatcctggggcacatctgcattaccgctgaggataatcgagctgtcctgcactatcaaaggggaagaagagcatgcctgacccgtccagcggacactccattccgctcactgctccatctggtgcctgcctctgtcgggtggctgggtcctgtgctgactgttgtgactgttgacgccctggggggttggcgcatgggagttaggaggtctgccccgttttgcacaactatgcacccacccccagtgtcaggtgcttctcctctcctcctcctgtgtctcttctaaggatacttatctttagatgagatcaccctggattatccaggtgggccctaaatctaaagataagtatccttagaagagacacagggggagaagaggggaagtacttgtgaacacagccagattggagtgatgatgtggccacaagccaagaatggcaggggccaccagaagctggaagagcaacaaagtatcttttcagagggaacctggccctgtgataccttgatt

SEQ ID NO: 161892 - DNA, 421 bp, Homo sapiens
ttggagattaagttatattctaggtagatttaatatagaatgcctttactaaacacttttgggcagtggttgtcaaaagaaatgtgcatagatttctgagcttcattccatcattttgcattttaaacaaagtgattctgatacagaagattcttggaccatatttggagataactgatttttagggggtagtttgccaaagtatttaatagaacaatcaatttgttaagcctgttttaaaggttcccggttaaggccggtcacggtggctcatgcctataaatcccagcactttgggaggccaaggtgggtggctcatttgaggccaggagtttgagaccagcctggccaacatggtgaagccctgtatctactaaaaatacaaaaaaattagttgagcgtggtggtgtgtgcctgtaat

SEQ ID NO: 161893 - DNA, 321 bp, Homo sapiens
tatgtgtcattttgatttgtgataaccttaggaaaaagccagcaaagtctgggaaccaggtaatcgattgcaaattggagaatgatttacctgctatctaagataaaggaaaagggtaaatcacaatgttgctttaaattcctttcagctttgtttattgtttccttttgtgtggaatttcactgttgcattgatttaaacccagctcctatcaaatgggacatagagtaggccctcaagtaaacatttagcactaggcatgtgtgctctgtataggatatgtagaaccctctctctgcttctaagtcataaatagttctt

SEQ ID NO: 161894 - DNA, 171 bp, Homo sapiens
ctgtaaagtcacactgcaaagtgcagatacaggaagggtggagaatggtggcccttttgcaacttaccgtatacactgcgttagaaataatatggaccgggtcacagatggcagctgtgactgttagctccagcctggtgacttcaggaaagattaaatgagctaatgtgt

SEQ ID NO: 161895 - DNA, 305 bp, Homo sapiens
tgttcacacctctctcaactctcagtgctctgtacatttctgccgtaatctgcgtacctcctgactacaggggggcaccccgggcccccactctcagggcaaaggtggtctttttcatctcgcagtcagcaaatgtgcactacattattgtttattgtgaatctgtccacttccttccaatcctactgccgacactctccaccaagccactgtcatctccagagctcaatgcggctgcctcctatgtacccttcccgcccataatccacatcgacacagcagcgagcatggttggtttccttctt

SEQ ID NO: 161896 - DNA, 328 bp, Homo sapiens
agagttcacatttatttcaatgtagaatattagaagtgttttagtctttatttaggagtttggtcatgtttttgtgaccagaaatatgccataggaacttaactcttgtttatgtcaattagtctacggcaaaactggtttggttatatgtaattttgcttcagtcacagtttccaaggacttatcaactacattaagtgaagactcactacaatttacttccctttgcccttcaccctccttttaaatataaccttacaagctcaggggttctgttgtatttgctgatgtttcccaaatgctgagaggagcgactggcaggtagcct

SEQ ID NO: 161897 - DNA, 325 bp, Homo sapiens
cagcctccgttccctgtaacaccactcactcccagcacctctctaaatcaagcaggaattagaaaccaaactgcaccatctatcatctagacactgggatccaccctcagctgagagccaagggtctgtgctgattacagccaacctccctcagtctccggtgcacgctgctctcaggcagaggccagagaaaaggatgatgacccaggagaagctgggactctgtgaggctaactctcagtttagcaaacaccaggaaggttagggggaagattctgtagagaaagtcagaagggtacaactaacctttcagggcctggaaggc

SEQ ID NO: 161898 - DNA, 130 bp, Homo sapiens
atgttttaagtatttcagtttatatatctcttctaacatttttatatggaacaatcagtaatctaaatacaaattcctcttaaaaacgaaccacttctaagtgtttgtataaaggtatacattgtttttc

SEQ ID NO: 161899 - DNA, 226 bp, Homo sapiens
cgagggtgggttattgatgcactggcaggactgggcagtggctacttactaaggggtatgaatgtgtcccagcatgttaagatctagtggagctggactgatacctattggccgaatgtgacctctgcctgtttcaaaggtgtttaatcctgatgtctcataaattaagactcaggcctgtaatcccagcactttgggaggccgaggtgggtggcatcgataaaca

SEQ ID NO: 161900 - DNA, 479 bp, Homo sapiens
ctctctggcatccccactggctttagacacaacatcccccaaatctgttggattttgactatgaaatttagaattttttttctttcccaaagaacaactttctcaccactcttgttatacatactattccaaaaataagtgtaacaagaaacagacaaatacaggacagttcaggaaaccagtgagtttgaaaaatatatatatattttccctctaaagaatgtgtgtggccaggagtggtggctcatgcctgtaatgtcgatacgtggcctgctgcaggaaatggcaacaagaatagatacttaaggaagagcatgcaggagacattctatcacaacacggaagaacgaaggaaaagaggaaaaggaagcgtactacggaggaaggacactgaacaacgacaaagacaggaccacgctcgcccaggctagtctacgaacctcctgagcctcaagctgagcctcccacctccacctccc

SEQ ID NO: 161901 - DNA, 146 bp, Homo sapiens
ctaatcaagagtctcactgttattgaaactttctctgcagtgtcagaagtgacagtgttgcagacctcatcacctgttggcatcaggtagcagggagagctatcacagaatagtttagtttgaaataatagtttaaaatagtcaca

SEQ ID NO: 161902 - DNA, 654 bp, Homo sapiens
ttctagaggatctccttcgacggtgtgctgatctggactaacatgaattcatgatgtcctaccatttacaatgtttggcagataattttctacaggaactggccgttccttgaaagttatgagacagaacttacccataaaatcatccagtactttttggggaaggagtggaatcttttactatattcaccatatttttctggttatgggtttactctatttttctacttcttcttgagggacaatttaggtaatttccatttctaagctttcaaatgtatgtaaaagtggaccagcttgggctggcgcagtggctcacacagcactttgggacgccgaggcaggcagatcacttgaggccaggagtttgagaccagcctggccaacatggtgaaaccccatctctactaaaaatacaaaaattaatggctgtagggacaggcacttgtaatcccagctactcaggaggctgaggcacaagaatcacttgaatctggaaggcagaggttgcagtgagctgagatcgcaccactccactccagcctggacaaagagcgagactgtctgaaaaaaaaagtaaaagtaattaactacttgctgaaatgacatggatgggatttcaaaattatgctcattgaaagaagccagacacaa

SEQ ID NO: 161903 - DNA, 208 bp, Homo sapiens
cttggaacaggagattggaggacatgagcccccccaccaagtcccagagtcacggaaggctctggaggaaatgggagctgtgaagtcagagaaaggggctcccccacccaggggtcaagaggatggggtctttgaattttgttttttttgtttgtttggcttggttaaaaagaattttttttaatagaaacagtgtcttgctacattg

SEQ ID NO: 161904 - DNA, 420 bp, Homo sapiens
ctgtttgggaatgagatttgctacacccgtaggcattttcttcttcagaaaagagactgtttagctttctgccacccaagtcagtcatcctcagcctgaacaatggagcttaatgttctccatcttcctaagagttagtgtctgttgttatgaaagtgaattgaaaccaaatgtactttctattggaaaagctgcccttgctctcagctcatggacaaaactgagagagaaggctcttacaaaacagagggaaaaatcctcgctgtcatgtcataacaccagttatttcactgttagacctatgaacatatctttgatgcaacactacactatttgatgatgtttctgtgtcacttaagatgggcgtttcatatttatctcttagaaatgttagcagatttttttcacgagttatcttgc

SEQ ID NO: 161905 - DNA, 614 bp, Homo sapiens
gttgtgatgatatggtttaaagacaaatgtaaaaatccactgtcaatagactttaagcctgtggggaaaagtaagtatctgaaaccttggaataaaagggatttttaagtgaagccccttatatattgaggaaagggctcaacctcttgagtcaggtggacccaggttcacaggtcatttcagctgttatgtgacctcagttttctcatctgtaaaatggggttggtaactatctctgacagtagggttatgataattatgaataatatacacaaagcttctagcacagtgtccctcacatgacaggtgctatctctgctgggtgtcatcacatgcaggcttggggttcagttcgtaactgatccattattcatttatttcaaggcccagttcggtattccatattaagagagagaggagctttgcaaacttagtctaattaaacagattccacagaatctgtaatattttactttctacagaagaagagctagcagaaattattccctacgcttcttcagttagaaggaagaggacatttattcataggaaggagggaatgagaggggtgggggtgtgtgtgtgtgtgtgtgtgtgtgtgtgtgtgtgtgtgt

SEQ ID NO: 161906 - DNA, 180 bp, Homo sapiens
ggcggccctgggcagacagggagttgataacagcactggtcccctctgtagagttgagagagaccccatgaagggggtagaggaggaagagggaggaggaggcacagcctgtgtctgggtaaggtctgtttcatattttccccaaatcagagcttcaagaaaaaaataccttgactgtga

SEQ ID NO: 161907 - DNA, 375 bp, Homo sapiens
aaataaaaaattttaaaaacctgtcaagttagatgttaaagaggacatgtaaaataaaatctccctaacatgtttatgaaatagctgcaaaaggctgagcgtggtggctcacgtctgaaatcccagcactttgtgaagccgaggtgggtggatcacctgaggtcaagagttagagaccagcctggccaagatggtgaaacctcctctctactaaaaatacaaaaattagccaggcgtggtggtccatgcctgtaatcctagctactcaggaggctgaggcaggagaatcacttgaacctgggaggcggaggttgtagtgagccaagattgcgccattgctctccagcctggggagcaaatgcaaaactccatttc

SEQ ID NO: 161908 - DNA, 662 bp, Homo sapiens
aggaattcactatagagcttgtgctgatggacaggaccattccgcagtcagatgcccacacactggaggaaagaaatgcccacatagggccaggcccagtggctcacacctgtaatcccagcactttgggaggctgaggcgggtggatcacctgaggtcgggaattcaagaccagcctggtcaacacggcaaaaccttgtctctactaaaaatagaaaaattaccctggcgtggtagtgcacacctgtagtcccagctacttgggaggctgaggcaggagaatcacttgaacccaggaggtagaggttgcagtgagccaagatcacgccactgcactctagccttggtgacagagtgagactctgtctcaaaaaaaaaaccaaaacacaaacccaacaacactctggccagggacgaacacggcgccccccgaaaaaggcttctccaaacccatcccggttcgcgccacgcggccccagtgactggatagaggcacactgggcacaagcgaggcaccaaggagacacccggcgccaagacaagcgggccaggcgtcccacgcaaaacaaacacgcccgggcgaccacaacgttcagagcacaccccaagggagctcggagcgcactactgggctaacacaacgggtccaacaaaccagatca

SEQ ID NO: 161909 - DNA, 337 bp, Homo sapiens
tctctttagttatgagacaaagcctatacctacaaattagtttgatcactttggttgagtttactagtaaagagccctcctaaatagtttacatgatatgtgtctacacgtgtgtatctgatttgccaaaattgaaatattttgtacatggcaaatacgttctttaaatgtgtaagcaaataggtttattttagtcaacaattgatgacaggatagaaaaataaccagaaatgtggatccagctcttatcatagaaaatttgtactcctgtagattccatgacatcctcacctcctggtttatctttgacctttcttttggaatttctaagggtagg

SEQ ID NO: 161910 - DNA, 209 bp, Homo sapiens
aagatcatgtctttaaaaactcagagtaacctctgacacaatcttttccttaatttttaccctgatataaagtctagcttcaaaatgcttttcctatctgctccaaagcaaagttatctgaaatgtctcctattctccctgccaagcagcacacaaggtctataccttctgagaccatcatcaaccacgctaaagtgacaaaacctctg

SEQ ID NO: 161911 - DNA, 328 bp, Homo sapiens
cagacccccgttgttattttttaaattcagaaaataaaaaaccgtgataagttatgcattgctttttgaatgtcaatgctagctttaaaattgaccttcttaatgtattctcaaaaaaggccctaacacataaaaatcaaatgacacacattaaataataatatttaattgattacagtctaatggaaaattcaatactttttaaaagtgcggcacttttgaaaagtgcctcatagctgggcacggtggcccatgcctgtaatcccagcactttgggaggccagggcaggtggatcacgaggtcaagagatcgagaccatcctggtca

SEQ ID NO: 161912 - DNA, 268 bp, Homo sapiens
atgacatgatagaatcgagctcggtaccagatatgcagagaacccagaaggcacaggagcagtgagctgagatcacgccacggcatttcagcctgggtgtcagagtgagaccttatctcaaaaaaaaaaaaaagaaaaagaaagaaaaagaggtaagcactgagaaaatcatattacactttgacagcaagagtaaggagtaagggggtctgggttttcagcaaggtagcaccatactgtgttctgatacacattttacaaaaataac

SEQ ID NO: 161913 - DNA, 586 bp, Homo sapiens
ccatgtaatatatccacacaatagaatcttattcgtcaataaaaaggaatgaagtactcctagttttagaagtttcaatagcagctttcaccaactaaaacaactcagtacataagcacaaagggtatagtatatcaagtggcctgcaacagatgaggctaggcgggcattgctatgctattcacttcattttattcccctctatcatgcaatctctccttgccttatcacccagacttcctgaaagagaattctatactctcataccttcgcatctccgatttacttctcagtgaactccagcttgtcttccaccttcactctgaaattgctctaggccactagggaatcctaatttgcggataacatagagatttggcggggcggcgggggggtcacttttctgaactgttagtttgatactattttaatatttaactatttgtaggtcacaacgttttctggaagtacgatgaatgctattgaaacttctaaaactaggcctagttttagaagtttcaatagcaggaagaagttcaagagctctattgtataccatagtaactctaggatttttgggtttggt

SEQ ID NO: 161914 - DNA, 501 bp, Homo sapiens
atctttcacatagcttagataaattggctagttaaataattaccaaagggtcatagcctaataatatttgtggttttaaatatttacaattaatataaagagaatttggcataagatctcagaggatttcagaaaagtacatttataagctctgtcataatcttacatgactaatgaaagcaaatagaatagtcctctctcatccgcaggggaaacgttctgagacccctagtaaatgcctgaaactccagatagtacagaatccaatatatacaatatgtataaatggtattttaaagtaaacacatatttatcttggcatttaaaaataataaacctccttttctcctcatttaacaagcatctattgcattcctactatgtgtttgccttgggctatgatgcctcaggagtaaacactaaaaaggaatggtgtcagagttactatcttgttggacaagtaattaggtacattctaatacacattactctttataaatt

SEQ ID NO: 161915 - DNA, 372 bp, Homo sapiens
agtaccatctggcatactatattttatgtatttattgattactgtctctcctactagaatgtaaactacatgcaggtaatggtgtgtgtgtatgtgcgcacacacgcatctcattcaatgattagtcaatcattggtctattttgtttaatactatatttctggtagggaacagtacctggtacttaattggtattcaataaatatttgaacaaatacctcttctatttttgaaataggtaccatatttgaaagcatgggtataactaagcaatagacatatagtaggccctcctctctatagtctaggaataacagctagttgaacaatttttatatgccatgtaccgtgttagtcctgcaaacagtcata

SEQ ID NO: 161916 - DNA, 386 bp, Homo sapiens
aagccacaacttccttatccctccatagatgattagaccttttaatcagattttcatcttttctttccatcaattagcagtttcccaatagctgacctttgggaccacaattatggtttccagtgaagaagtgtttacatcctaacacatctacccatagcaagtcctcccatgacctcacactccatccccaaagacatacacacacgaagggggatggacacacgaagggggatggacacacgaagggggatggacacacgaagggggatggacacacgaagggggatggacacacgaagggggatggacacacgaagggggatggacacacgaagggggatggacacacgaagggggatggacacacgaagggggatggacac

SEQ ID NO: 161917 - DNA, 502 bp, Homo sapiens
tgaacatggtagaagtgggaaaaaaagccaaaacatcgcctcccgttaggttgtggcttgggatagctaaggcagaagagagaggctggttgctttggaatcactagttatttaccagtacctttctcgcatcccggcacgctggtgaagttgtaaaagtcacaaatggtgggctagagatgagggtttctgttgaggcagcaggcccagaaaggtggggtaaggccaagctagtggggccagcatgagaccctgcctgccagctttcctgtgaaggattaattaacctccccagattctgctgttacaaggaaaagaaggtttaaggaaaggaatagttaagttactacccctgtgactcatctacactgaggaaaaagcccgtgatgattttggagtcctgattctggagaattgcttgaacctgggaggtggaggttgtagtgagccgagccgagatcacgacactgcattccagcctggcgatacagcaagactccgt

SEQ ID NO: 161918 - DNA, 293 bp, Homo sapiens
gaacccctctctaagtgcgaccactcttttctgtatagccagaataccctatgtgttcatctgggaaggttatgacatgttctgcttaagcttccagaaatcccactttggggggaataatataaaagatgcagaggctgtgaagtctgaggctgcccttcttttactaggcttgttcttattttctttgctgtgattaggagatcaggtcactgggagaccccgaacagattgctgcttctatttaaggaggaaataaacttgaatatgaatcccagctctgctgcgtacca

SEQ ID NO: 161919 - DNA, 441 bp, Homo sapiens
gatatattaggttgttcagtgtgaatgtaaaattttaggtccgtatttgaagtgttagaactagattctcacttgttttcattactgaacaacatgggccagctacttatgacgggcaagccaccagccaccatattagcagagaatcaatctgtaggtaatacgcataccatgaaaagttgcttctttctccacagcgttattgcgtctgagaatactacttctcttcctcccctccttgaaagcccgaaacaggatagggttaaaccatttagggatttttaataatcactgaagacagtgcaacaccatactgtcatgttgagttgcaaatatctttgactggaggaggttggaagatgaaatttcaaacattattccatgtctctgccagtagagatacaagaaattgtaaaaagaattgggctagctgtactgtag

SEQ ID NO: 161920 - DNA, 468 bp, Homo sapiens
taatctggaacagcgccctgagcacatggtcaagatgaacatcgccagtcatgagacaaaccgacatggagaatctgctgatgtcgtgcactgagaagaacagcatgtctgctatgcagtagtcctgccaaaaatgttatacctacctgaatctaatcacaaggaagccattcgacaaacctacgttcaagggcttcctgacaatgactgcactggtttaaagcacactttaaggcgggctgatcacgagatcaggagatggagaccatcctggttaagacggtgaaaccctgtctctactaaaaaatacaaaaaattagccgggcgtggtggcgggcgcctgtagtcccagctactcgggaggctgaggcaggagaatggcgtgaacccgggaggtggagcttgcagtgagccgagatcgtgccactgtgctccagcctgggcaacagagggagactccatctcaaa

SEQ ID NO: 161921 - DNA, 500 bp, Homo sapiens
tgtcacccaggctggagtgcaatggtgtgatctcggctcactgcaacctctgcctcccgggtgcaagcgattctcctgcctcagcctcccgagtagctggggctacaggtgcgagccaccacgcctggctaatttttgtatttttagtagagatggggtttcaccacgttggccaggctggtctcaaactcctgacctaaagtgatccacccgcctcagccacccaaagtgctgggattacaggcatgagccactgcacctgatctaacagtgaataactttttaaccatgtccaaaatctttcccctttgaagcagtggaattttggagctttctgagatgagtgcaaactatttagctatacttagttttaataagaatagttgctgaaaaattattttctataaggatcaagcagaaaatcaaaagtagttgattgaaaagtcttcagttgagttgatagtaacgtgctggtttgttagcatgaacagatgtacctt

SEQ ID NO: 161922 - DNA, 388 bp, Homo sapiens
ccacggcccgtgtgtggttagcagagagagtggggagcctgacttccatttcccatttctcccaattagagccttgctggactagttttggaaaagatattattttagtggtttccaaatccctgaacttgtagttggaggaaacctctccactcctctcagaatcaaaagcttcaagcagatggtttctgagagggctggtccagacggccattatcaggttttttctccctcattccaaagcctgtcctcactgctgttgccacagcaaaaacctaaatcagggagagcatcagtgtcattcatccaagaaagacaggcacttcctgcttccaaatagatcaaaatgaagcccttcagctgagaaccagaggctgttccattgttc

SEQ ID NO: 161923 - DNA, 281 bp, Homo sapiens
atatgcaaagatcaaatttgttataagactttatataaacaagctctgtccagtatttatgacattaacaatgtaaagcataatcttttagatgatgcatacttcagcctatgtgactttaaaaattatcaaaaaaacagaaacaaaacccccaattaaagaatcctcattaataaatcctcaagggaaaacacttcagccagcataattgacaaaaaaaaatgcaattagtagttacatattaggaacatattaagaagttataaaagaaagaaatacag

SEQ ID NO: 161924 - DNA, 611 bp, Homo sapiens
taacaatcacacatccccaggctcaggcacatgcacgcacaggtgccagaggaaacatgcagcacccactgctgcctccagctacccctgcatcttgcatcctcatgctgctctctttctctgtccccccacccccgcctgccctgcctccttcagcgccacctgtcccaggaagagttctaccaagtctttggcatgaccatctctgagtttgaccggctggccctctggaagaggaatgaactgaagaagcaagcccggctgttctaggcagaggctctataaatatatatgcatttatataaagatatatgtaaaatctctctactgtagcataagatccttccccttgtgtaaactgataaatcagatacacaagcttgttggaaactggggtgtaagtcaaggggaattatactctcaatgagggggcccaagaaacgtgcattctgtttggggcaaggactttgcattctgaattgtttttgcacacttactgtttctgaactgtatttcagccagcagagagtggcaggtagccttttactcttgtccttctgtggagaccaaggatgatgaaaaactaattcatttttttgtgtaaactgatt

SEQ ID NO: 161925 - DNA, 439 bp, Homo sapiens
gtcgaatccaaatcactcattgtgaaagctgagctcacagccgaataagccaccatgaggctgtcagtgtgtctcctgatggtctcgctggccctttgctgctaccaggcccatgctcttgtctgcccagctgttgcttctgagatcacagtcttcttattcttaagtgacgctgcggtaaacctccaagttgccaaacttaatccacctccagaagctcttgcagccaagttggaagtgaagcactgcaccgatcagatatcttttaagaaacgactctcattgaaaaagtcctggtggaaatagtgaaaaaatgtggtgtgtgacatgtaaaaatgctcaacctggtttccaaagtctttcaacgacaccctgatcttcactaaaaattgtaaaggtttcaacacgttgctttaataaatcacttgccctgcacatc

SEQ ID NO: 161926 - DNA, 1114 bp, Homo sapiens
gcagagattcaacttcatgctggaccattatgtctagagacatgtgaatgtctgaaaaactgccctggaaaatgccactattccaatgtgtgagtgtttttcaagtttttattctgtctagccccgaaagtgagcttaatggctggctggggaaaggtatgcattgtcagcagctctttaaccccaaggacctcaagatgaggttttgttttgtttgtttattgttgtgttttttttttttaactggcaaaagccaattttaggattaaagccaccttatgaccctctgatatcatttttattgcagacctagtctaggggcaggagggctttggtggtctcagtgctttcaggtttatttgtttgcctctgcacttttaaacttggggcagcggggaggatctcgtccatggatttcagacatctgggaggggctgcttcaggcgtttaggtggtcctgtctggcagtgctcagtctaccactgactgccagttctgattgtgccacgtttccagccacatcactcattttacagggtctcagggctccatttttcctcctctcttcccatagtcactggcccttatcttttgagatggctgggagtttggcctcagggaaagaggacatcttctagatatggcatttgaaagtagaaactgtattttccaagcccagttcttccctcgcccacaatgggaagtagccacttcagacatgagaaatggtgtggatttggcacatctgtatgccacttaagcaattctaacagcttgaaatactgcagaaaaaatgcattttgcttcttaagttggcagtcccttggtccgcaatacaggggtcatgccaacgtctcttgccctgtttaccccttattttaggaaacaaattgccttatggcttaaaaaaatccttttggaagtgtgacgtgccagtagaaaagcatagacatcatgagtgaacagctcagtggcttttcacaagtaaacaggcccgtgtaaccaacacctagatcaggaaatacagcattgcaaccccctcaccacacacacacacacacacacacacacacacacacagacacacacacacacacacacacacacacacaca

SEQ ID NO: 161927 - DNA, 366 bp, Homo sapiens
atttcaaagaaaaactattgtgtaacctcatttataactgaaagatataaggcccacaaaagctatcattcacaagttaagatgtcttataaagtgtcaaagtcactgcaccaagccatctcctccatgtattgttaaatgtatttaatagtctttggattattgaaaacagctgattaaaaaaaataccaaataatcaaagaagatagacaagaagatcattttaatgtgttttatattctaaatgctttggcctctttccaacagttggcattcactgttagataataaattacaaacctggaataccttcataaaatactatactttttaataaatatttgccatcattcatctttcataatt

SEQ ID NO: 161928 - DNA, 125 bp, Homo sapiens
gtctcaagccacgtggaataaattgtggaaagacctgtgctgtctggcttgtgcctttacacatgctgttatctctacctcaaatgctgtcttcccactcagtaattaccacttccacacgtcat

SEQ ID NO: 161929 - DNA, 191 bp, Homo sapiens
gaagggaaaacaaggtcgcctagaacatcgggaaagcctctcataaagctccataagcccctcaaacttgtgactatccataatcctgggccttttaaaatactgaccttttgatttctcttccttctagtctacttatctctaaccacaaccagaacaatcaccctagaacatgatgtgttttttgtttt

SEQ ID NO: 161930 - DNA, 375 bp, Homo sapiens
cttgcaaatgtgcatatgcctccttccgaatcaccagagtggagattgggccaatatccaatctagtcaataatttataaagccagagcattcatccacttcttgcaaagcagctgaatatctatgggggttagtcataatctgagctccttgcaccagagccatttgagctacagaatagcacagagtgtcacagaatagccaaaagtgcagagttatttcagtatgagagaaggaggagcacctgactgctcctcgccatgtgcagaggaggagcccatgcatttccaaacccaggggttgcttggtttctagcttggtttctgtctgtaccccatcttgctattgtgtgacttgagtaagcccatctccact

SEQ ID NO: 161931 - DNA, 674 bp, Homo sapiens
aaaatatgaaaacaaaaatatgagcacagttttattctagtcctaatgaaaagttattgccaaactagtgataatagttttacatttagtatcacgtactgaatactaatatgtataattgtatccttgctgtttagtcatttaactgatatttattgagcatttattatgttctaggtacccattgtaaaagtggtcaaatcagatttttaaaagtgtggtgataagtgctagggagaaaaacagattaaggaagaaacttaaggagtgctggggtaggtagggtgggttgcacttttaaatgggttagtagggaaggacatctgagaaggtcatatgaatcaagatttgagggaagcgaggaagagaatgttaggcaaaaggaacagcaagatccaaggccctgagtattcctggcagatttgaggaggccaatgtggctgtagcagagtgagaaagaagaatagtaggagattagatcagagagattagggagtggtagggggcttattaagtagagtgagctgggtagagtattgagattacattggcttttattctgaactagggcgaggtattggaagatttcgaatgaaggactgacatgatctgactcaatattagccccagtggtcaaaatgaagtggaagatacagaatagagagacaggagaa

SEQ ID NO: 161932 - DNA, 260 bp, Homo sapiens
cttcagaatcataagtgctgagtcggctctgagagtttgttcagtctcttttctaggttatgtttaggtgagtcttcaatgatcctgagtgtgcagctattcccatttgtaaacgtatccagagaacaactgctctaataagcctgccactcattctagtttctctcaatccttttggagagggtaagaattttaaaaactggatcattacctactaggggtaggaatgcaggctgagccttaggaacatggcacaataa

SEQ ID NO: 161933 - DNA, 252 bp, Homo sapiens
acaagcaacacgcggacatgcacacacacagagcaacacgtggacatgcacacacacacagagcaacacgtggacatgcacacacacacagcaacacgtggacatgcacacacacacagcaacacgcagacatgcacacacaaacacagagcaacacacagacatgcacacacacacagagcatgcacaggtgtgcatgcatctctctgctcctgtctacctccagccccatctgtcacatctgtttctgtg

SEQ ID NO: 161934 - DNA, 414 bp, Homo sapiens
aagaaataggggattcagaataacaagatttagaatagcagggcagctgagagaacaccctgagtaaagagggaattgcctgcctaagcctgaagaggccagacccaagttcctgtcagcccattttccaggctggtgcctgcatttctctttggtgaggattgctgcccttctctggcctcctggaggtaaggagagttcttggcagcagaaaagcgcgtagcaaccagagggggtctcgagattgacctcacctcccagggatccccgagccccttctcctagagcgagtgagtctcttagaggactaggaagactcttgggtgcccacactcagagaagtctctgggcccaggattctgaagccattctcaccgctgtcaaaagctcaaggagagctcaggctgtatcagt

SEQ ID NO: 161935 - DNA, 674 bp, Homo sapiens
gagggacctcatggggcatctagtctatggcttccaggcctttgatggaaactcgatgagaagtagatttgacagcttctcatcatgcacagacacacctgatggaatgaaacctcatagcctttggttaccctcggtgcatgcgttgcaccctggtgagtcccagtccactttagtctgttctatttttattaaaattttgattcacaatctctgctgggtcagcctgcagttcaagaagcacagctgcattccaacctcattcccagatgagaccactgactcactggtccctggtgccaccccacacctctgagggtgactccatgcctgctcatggtacagcacagagacttggatgatttatagatgtgcaggaaggctggtagagtgcagaccgcagtatttataccttcaagactagctcttactctcagctagctaaggcctccctattgtattttcttcttatgcaaatcaccctggctcttgcagatccagcttccatttcaccttgtgcgtggtaccagttcaggtcaccctgccctcaactttctctgaacgcctgtacccctgggggttgtaccactctgggggtagtgagaaactctgtgttatcttcctctcctgagaccctcttagtttcctagtttgtggaatttccttgaggatgg

SEQ ID NO: 161936 - DNA, 252 bp, Homo sapiens
  misc_feature (36)..(36): n is a, c, g, or t
gtgactgggatataccatggtcactatcagatgtantcgccatctcgtgacggcgattatttgatgtactttgcatgttttaactcactttatcctctaactctagaagacacaagtgtgtcagtaatttggccaagaccattaacctagtaagtgatgaactgattgaggattcaaaagtggcagtctgttccagagccagtgccatgttgcttcctgtataaacaagggttaataatcgccggtcacgag

SEQ ID NO: 161937 - DNA, 219 bp, Homo sapiens
caaaacataaaatatgctggctttgtcggttcatgggaccctttgctgtgctcactatggcctcgggaccactgtccctgttgctctgcttgggaagcttctccttccctcctttgcagaagtgacccctcctcaccctttagctctcggtcccatgtcatgttctcagaggagccttcttgactggggtgaagccctaccaaaggctcagaattctgt

SEQ ID NO: 161938 - DNA, 233 bp, Homo sapiens
agatatacaccaatggacgcagctgtgttccaatacaaccttctttacaaaagcggaaggagggaaagagtggtccttgggctgtagtttgcctataccaggtctaaggaatgaaataattactatacacatgaggtattacattcttctgcgggaaaacaaggtcagtttcttttctaaaattctcagtgattcactttcaaaagccattgttaattcttaatattcacatg

SEQ ID NO: 161939 - DNA, 438 bp, Homo sapiens
agactttcttatgcttcctctatattatgatggtaaaatcttggtaagaaagtcaggtccaattcaaaagagctcaaaggaaaaaaaaaaaattaaagatgctgtcttacattttttgggctgctatgacaaaacaccttagactggttaatctataaacaacagaagtttatttatcacagttctggaagctcagaagtccaagatcaaggcaccagcagatctggggtctgaggaaggcccattccccacagatggcgcttgtcttcacatggtggaagggatgtggggggctagggtgctcccttgaattattttataagggcactaatcccattcacaagggtggagcaccataacccaataagctcccaaatgccccactttttaatactattgcattggagattaagtttcaacataatgaattttggtggg

SEQ ID NO: 161940 - DNA, 315 bp, Homo sapiens
ccacagaacctggggatgatagagtaaatctccagtccctcttgtccgttggactttgtgtgattgcctcattcttgtttctcatggggctgttgctatgaagttgacaatggaaacacatggcagagttgggtgatcaagtcagaagaaaggtggagcactgaattttgcaactgtttggccaaaataaagaagacttgtgccttaggctgctgcagaaaatccagagacctggcctgcattttaggattatatatcttagaaggtgataattgaaaggcggagaaaagatagttagttatggttaggataggg

SEQ ID NO: 161941 - DNA, 407 bp, Homo sapiens
tttttttttgataagacagggtctctctctgtcacccagcctggagtatagtggcgtgatctcggctcactgcagccttgacctttcaggctcaagtgatcctcccacttcagcctttcaagtagctgggactataggcatgcaccaccacacccggctaattttgttcattttttggtagagatgcagtctcactatgtggcccaggctggtcgagaactccagggctcaagcgatcctcctgcctcagtctcccaaactgctgggattacagtcatgagccaccatgcttagcctcaatagcttaatctaacatacctctgttccctgttttgccaaaaatcaggttatatgctcaacagtcccataggaatcacctctgggccaaggtgcccactacctatcca

SEQ ID NO: 161942 - DNA, 322 bp, Homo sapiens
ctgagctttaagtacaagtctttcattcaaggaaaggtatcaagaagagaaattggcaccaaaacagtagaattggatatatatatagaatctgtccaagaaatcatttaaaacatagtaaatttggtacacagaattaaatggacttcttcccagaacaatggaacagcagtcgaggaattgaaaacagtgcctgctggagaaaaacaggaagagaaagagacagtgggaacagagagaaggggaggaagagaggacgtgaatgaatgcaagtgttatttattgacattttagaaattttaattgaggtgatattactgta

SEQ ID NO: 161943 - DNA, 333 bp, Homo sapiens
aaagatgacaggaatgggaacaaagacaagcctctagccaacattctgtgacaaatcctaggactttggagataaccctggagcaacccttgaatggcagccgactcaccagggcatctttctggacttccatggattaaaacacactccaccatagcatctactaatgtgacagtcttctctctattttgggggaccagtaagtggagagctgaacatgaacccttttattccagtagcagcctggcagggtaaaagcaaattggtcttgtgattatttagagagaggaatgctgaaaaaaacattagctaaatctaacgcactgtgatgca

SEQ ID NO: 161944 - DNA, 573 bp, Homo sapiens
cggtaccggtcccatgcacagttacaatcagagatggatggattgatttgaaaacaaaataaaatccagcttcagctgggcgcggggctcatgcctataatcccagcactttgggaggccggggattaggctattgaaaaacttgagatgcttaaaaaatgcataacaaattttaagggcacacatgaaaaagaaaaatataaattagctaactaccaaaaatctagtgagggaaaataggataaaaaaacaacaatgtaataattattttttaaaaataaaaagccaagaaagtttctttaaaaaggccaaaaaaaaagacaagcagaaggcacaaagacagcagaatcaagtcaatttaaatatatgagtaatcacaaaaaaaacagattaaacatgccagttacaatcagagattgatggatttgattttgaaaacaaaataaaatccagcttcagctgggcgcggtggctcatgcctataatcccagcactttgggaggccgaggcaggagaattgcttgaacctgggaggtggaagttgcatgagctgagatcatgcactgaggccag

SEQ ID NO: 161945 - DNA, 448 bp, Homo sapiens
aagtggttgtggctgatgacagggagaaatgttttgagcctgtgggcaagaaattcccaataagaatttttaaaaatgaacatgtataggtatgtgcagtaagggaaaaaatggtggggtttgactggtatatgaccctcctctagaagcactagactggtaaggaacaattgtcctaagagaacatgtgtgtaacttcaaccaccagaaagcatatgtgacccttcccagacactggcaagtcactgtgcatatggtgattagccagcagcccactcaagggggaggatgagaggaggagaccagggaaaaaacaggaaatagtaaatctgtaagagccctgagtcaaagatcaggtggggcccctgatctttcaagttgcccattggtcctttccaagtgtactttgctttgttcaaaaaactttcacatctgttttaaaatctac

SEQ ID NO: 161946 - DNA, 128 bp, Homo sapiens
tagtccttccacccaggttctagaccacatcttttcttactatccctgaaaccctgccccagcactcatccctcttcagtgcacgtcttcaaattctctccctaatgtaacttcccctcagtctgtaa

SEQ ID NO: 161947 - DNA, 359 bp, Homo sapiens
ggttatctctgaatagtaattattttttctaaaatttctcctaaaatcacatattacttctgtgggcacacagcttccttaactgatttacttttcttacacaatatttatatgtacaaatatacatttttccttcccagttatgtctctgaagctctgagttaaaccttaaggcccagacatgaatacaaaaagccctggccgggcgcggtgactcacagctgtaatcccagcactttgggaggctgaggcaggtggatcacgaggtcaggagttcaagaccagcctggccaagatggtgaaacacgatctctactaaaaatacaaaaaattggccaggtgcagtggctcacgcttgt

SEQ ID NO: 161948 - DNA, 455 bp, Homo sapiens
  misc_feature (4)..(5): n is a, c, g, or t
attnngtgacagccatttaggtgacagccatttaggtaacagccatttagcctaacagccatttaggtaacagccattaggtaacagccatttaggtaacagccatttaggtaacagccatttaggtaacagccatttaggtgacagccatttaggtaacatgccatttaggtaacagcctttaatgtaacatcaaagcttgaaaattttatttctttatttctttctctttttccttagagtcttttaaaccaacagcattaatgataaatggtatatgtcaaactctgataactaaaaaatcccgcacctttctgaaacagtctcctatatccaatgtcattagggtatatgtgaggtacattgtactctttggatggacttttaaaaaatacatatgccacattacaagaaagagacaaaattgatgtgatatgtatgtgataaaatctgac

SEQ ID NO: 161949 - DNA, 253 bp, Homo sapiens
cccgccaccgtgcccagctaattttttgtatttttagtagagacggggtttcactgtgttagctaggatggtctcgatcttctgaccttgtgatccgcccgcctcggcctcccaaagtgctgggattacaggcgtgagccgcccactttttttcttaatttttatgaaattaaattgagtaaaacacttccttggtcagcctttggcctgtgggctctcattctgcaaagcctgctgtgggcaccaaacctgg

SEQ ID NO: 161950 - DNA, 372 bp, Homo sapiens
gtacctaggtttgtgcccgagatatgggcaggctcacccactgctccttgatgacactgtatgtcaagaggcttcaagggcaaacaccaccaaaatcctcactggcttattttaactcaacaggctctcactgcttcagcagcagtgagagaagaaaaagcagagagagggtagaatagaaaaagaaacagaagaatattttctgtgccttgcctggctctttatggcagacagtgcacacttacgaattcatttctcaccaagcatggcatcctgttatttccctgccatgcccaccttcaaaacatcttggcattcacctgaaatgggttcccagttgattaccctgttctaacacttctccgtgtaatc

SEQ ID NO: 161951 - DNA, 331 bp, Homo sapiens
atcaagtctagtttctgagggaaaaattcctcacatatcagattagggttttcttccagccaggtggaaatgaggttttttccaaaggatgttatccataaagaaatgctttgttccctgtttttacctgcccaaagcaagcaaacctgagagcagtggtgtaaatgtcactggttgatacaggctgtctttaattgttcagagggacaggtgtcttggtaagtgggtaacacacaaattccacaggttctaataggtcgatatcactttaactcacacttagaagtaaggtgagttcatggcacagacaaactggaacacagttgtgcag

SEQ ID NO: 161952 - DNA, 580 bp, Homo sapiens
ttccacctcccagtgccttcctgagatggtcccctgaagggaagacccatccttcccttctccaaacaccacttaaaccacttaaaccctttcattaaacccttaccctggcctcaaaccatctaccacgctgctgtacccctttatttcagagacggctctgactctcactcagaggtgacactcaccctaccacttgtctatggctgtgcatccctcttggggccatctcttgtggacaagaatatgagccacattcttcatatatgagaaaattacaccaatctcagaggattagaggtcatgccaaaaaacacacctggtagttatgtttaaatatatttttaaggctgggttaaaaaccacgatgaggcgaaaccccatctctactaaaaaaatacaaaaattagctgggcctggtggtgcacgcctgtaatcccagctactcaggaggctgagacaggagaatccctagaacccaggaggcggaggttgtagtggcgtgatcgtgactcactgcaagctctgcctcccaggttcataccattcccctgcctcagtctcacgagtagctgggact

SEQ ID NO: 161953 - DNA, 457 bp, Homo sapiens
caggctggtcttcaactcctgaactcaagtgatccaaccatctcagcctaccaaattgctgggattacagacgtgagtgaccacgaccagccaatacatgaattattttcattgacaataaatgcactaaacagtcacctcaaaaatacaggtaagtaacaaaatagcataaccaaagaaagtagaaagaaagaattaagtatctttttaaaaaaatcaatgacccatttctcactactcctccctcttaaaataaaacagaaaaccttgatgtaaaaacaatcaagcatgggaagactttgaaaggtggaaaggacaaggtggattacctagagaccttaggacctaaagaacactacactaatgagctgtctaccataaatcccagatggggcgctggagaagcctgcaacctgaaactgccaataggcccagacccaaaaaaagagcccctttc

SEQ ID NO: 161954 - DNA, 227 bp, Homo sapiens
ataagactatgtcatgaaagctttagaatatccaacacattatagaatattttcacggaaatatttcggatggaattttggctttaattctttctctttttttcctgttcttttccctctccccacaaccacttctgtttcattttctgttttgctccttcttttcataagtagctggtagtcagtgttctctttttcttcctgtgagacaggatctccctctgttg

SEQ ID NO: 161955 - DNA, 316 bp, Homo sapiens
aaaacccaggaccagagagattaacagcagaattctatcagatgtatataaagaagagttggtaccaatcttattaaaactactccaagaaaaatcagtgaggtgagattcctccataactcattctacaaaactagtatcatcctaaaataaaaatttggcaaggacacaataaaaaaagaaaactataggccattattcatgatgaacatagatgtaaaaatcctcaacaaaatactagcaaactgaaaccagcagcacatcagaaagataactcatcatgatcaaacgggttttattcctgggatgcaaggac

SEQ ID NO: 161956 - DNA, 505 bp, Homo sapiens
ctatcggtcggtacctctggatgcaagtgtctggctgcctttaaagccagctctgtttctactatcctgggctttctcattaattttttctttttgttccttctgctgtcagtcaaatcagtctgttccaaacttgtgcctgttggcctctctgcctcatctctcctcgtttcatttatcccatccatgaccacccgattaacctccattaaacaccagcctctactttcttcgtgggcgatgtttaacaacactccattaccccttgaaggtatctggcgtttaagggctctctctctagcttaatttcttatattctagccaaagaactgttttcatgttccttcaacatacaacacatgtttttgtgatttttaaaaatatgttttttctacacgaataagtatagcccagattatctcattagtgacataaaaactctcctgactgagtaagcctgtcgttgttactattgttattattttgacacacacaactatttaga

SEQ ID NO: 161957 - DNA, 328 bp, Homo sapiens
atttgtacacagtccttaatacttgctcgccaagtgagtgaatgctagaggctggcagctgggtggagggaacttggttagccaggggggattgcaggagcccgcaggacactcgggcggggccgttgcaggcaggtgggccttcaggtgactgcgcaggtgcagccctgtcaggaacaggtagggagactcatgcacagcagcggccagcacctcggaggcctggctttgtccctgcagtgttgctcatcttcagtgtctgttgctctctgccgggggaggctcagggaggcaggactggcttctgctggattccgagtgcacgggc

SEQ ID NO: 161958 - DNA, 376 bp, Homo sapiens
gcaagctggggtattttctaatctaaaatagattaggcattttctgggaatgggaagaaatgagtagattagggattgaattctgttttctcttttcatctcttctttattttatcgtccaatcattctcactggcatttaaaacacacttaatttagtcctatccttgtagagcaagttgatgtcatctagtttgatttagcctatttagtccaataagttaattggttaataggccatctgtatgcatcaggtgacaggaatgctaggatgaatgcaatcacacacacacgttaaataagacgacatgggattgtataaaaacagttcagtttactccctatgactgctaaagtaaggttttctcatttctgat

SEQ ID NO: 161959 - DNA, 182 bp, Homo sapiens
ttgaccggtgagcagtatggtaggtagtgtttttaaattttgtccctactttgttttcttttccttagagactctgactaattaggactctgcacgcttcatgtcctcagtgaatacttattgactgcatcacagaccaattgatttatcatacaccaatgtaaatggctaaaatactgcca

SEQ ID NO: 161960 - DNA, 372 bp, Homo sapiens
gcaactttatttaagctctatgatcacctgggatgatatatatactttggaactgaatcactttacagagtgtcccaccactttctctcccggagtctgaagaaagcctttaagctgtgatatcaacagtcaggagtccttaggatcagagtagttcagtcaaagcaagatgtggttaagacaagaagctgatatgattaaagttatagtctgtatcgcccctcctccaaggttaacttttagtggtatgtaagtgccagcaataagtttaatctatgaaaccacataacttggattttcttctaaatatcttaaaatgaaggcgattttctagataacagataatagtgaaaagtatccctggagaaagca

SEQ ID NO: 161961 - DNA, 335 bp, Homo sapiens
tctaaactctcaggtgaagtggaggtaagctgcctctgcgaggatggagccacggtccactcatcttgacagagccaattgagtaccctgggatgcaggtatttattgggggtagggggtgggaatgcccaggggcagacccagattgtaaagtggctcagcacagaaaaaggctctttcatgctgaggacctgtgggccatcacctcagatcttcacctggcactccattttgccaaaacatcagagcatcgctaaatgtggcagtgactgcttggtgctgtggaaacccctcactagaggctcactggcaggtgcaggtgggcagtggcacct

SEQ ID NO: 161962 - DNA, 344 bp, Homo sapiens
tccctccatcaaacaatctgccttacttgctgcagccaaactaaagttgtctagactcccctctcccatttcttcagttcttctagctccttaacacacactggtccaatttctgccccatcactcttggcaaaatccattatgacctccaggctgctaaatccaagatacagttcaggcctcaatctgctcatcctttcagcagctttcacagggctgctgagtagggttgagcagttttgccctgcacacaggtgccctgcagaggaatgaggtgggctgaatgaaactccttttttaaaaattctcggctggcatagtggctcacgcctgtaatcccagca

SEQ ID NO: 161963 - DNA, 521 bp, Homo sapiens
aggacacttccagagcactttgatcaccctgctaacacactgctcttcatgtgctacacaaaggtatgcagcttatctcccctcttgagattttaagctacttgaggtgaaagactgttttagtaaccacacagcagacaggcagtgaatgttaatcaaaagaaagaatgaatgtatttttgcatgtatttcttaagagtttacaaatttgaaaaaaaaatgaccaaaaattgcttcgagaaaagctgatttaaatgtaccaaagccacattttaaaaggatcagagagaaatttgaaaacaacgggagtccagaactgacagcagtttataacaactccttacctgagtctaaaatactgggaaataaattcacagtggttaaagctactctgcagattgtatgtgtgccaaaacttgagttttacacaaaccatgctgtggccaaataaacagtacagttttcaattcgaacatcacctatgagcaacttcttcagttcagtgatgctcaaatatcaga

SEQ ID NO: 161964 - DNA, 247 bp, Homo sapiens
atcctgttttaattttttaatgacgtttatttctaccatggtagaatgcattagtagccccaaatcctcaccattgcctctactggcttctttgtcatatggcttcacagatactctcatcaagaggtgattatgttttgccacccttaagtctgagtgtgaccatgtgacttgccttggccagtgggatgctagaaggcaggttaccaccagcagaggccagccagatcaagcatttgtgaaactg

SEQ ID NO: 161965 - DNA, 240 bp, Homo sapiens
acgtcatgaaacactgaaatgacagtcactgaaatgacagtcactgaaatgacaaaaaggcaggacactgtttaagttaaaggcaggacactgtttaagttaaagaggaataaagagacataaaaactaaacagcatgtgtgaaccttgattggatcttagattacaaaacagagctataaaggatatctttgtagataatcaggaaaatctgagtatggactgtgtattagaaaatatt

SEQ ID NO: 161966 - DNA, 330 bp, Homo sapiens
gtccgacggcagtggtggttccatgtgtacaggagcgtgtgagggagcgctgttactatcccgttctcacacagagggaacggacacactgacatgcagctccatgtctaggtcctagggctggggactggtggagctggggtgtgaatgcttgcagtccgactccagggtttgcatttgtcaccatgaggttctgccgccttttcatttgctgcagtttgctaaaagctttgatcagctattgtgcgtcgtgagtgcaaagatgaagaatttaggatctactgtgaatcctacctcccacaacctcacggtgtatcttcactgacatat

SEQ ID NO: 161967 - DNA, 385 bp, Homo sapiens
agagcctacagctaaccagggaagacatggtgagttcagtaaaaggcaggtaaggaggagccttgtgtccaaagctctgtaaaattttctttacttgctgcataaaaaataaaaagactcagaatatatccaaagatcttatatttaataggcctttaacctgagaacaaatcaattaatttttagatttcattttatcatgctcattcttatacatccatacttagaaaaaagaatgagtaatattaaaacaaagtagcggcacactcaacagacctcacaccactgagatatgagacgaatgcaatcatatcctacattctacacatatctgaaaactttaaaagaaacttacagaacgtgtgggaatcccccgcatgaaatt

SEQ ID NO: 161968 - DNA, 321 bp, Homo sapiens
tgcacactacgaaggtcagtgactgttacctttcctcccatcgtccagccggctagcagcatttctggcaacccagagctctgggccctggaacagggtctccactgcctctcggttgtcctcctcctcctcacgctgcccctccccttctcattacctttactgcttcttccttgtactctcattttcttttttcttttcttttctttctttttttttttttttaagacaagagtttcactctcgttgtccaggttgcagtgagccaatattgtgccattgcactccagccttggcaaaagagggagactccacctcaac

SEQ ID NO: 161969 - DNA, 553 bp, Homo sapiens
aatgagaatgatgccgccatcactaaattcctcctgggccagatggcatctgcctcattgtacaaacttcatctttttaaagtcacatatctacttattttatctggttgaattattccagtaactttcttggcaccagaaaaagagatagcaaatattaattctgctctttttatcacgtcaacggagtttcttctccacacttggttttctcaatcacctaaacaaaaatagcagttggggcctccttgcatcctgaaagagtcatggggaattttccagggaaaggaaggcatggcatctgccacccccttgttgggagaggatttgttttaattgttccataatctggggtgtcaactattcagcaatcagtgtaataacagaaactaaccaattagaatggacacaagcccttggggaggttggaaggtatccaggcagtggttacttgacaaccagtgtgaaagtagttcaatattttaacaggtcgagatgtacctgccaaacaccagtgcaaatgcaggcacatggtgggtgagggatgggttga

SEQ ID NO: 161970 - DNA, 149 bp, Homo sapiens
aaaaggcttagaaatgtagaacaaaatttctgtaaggtttcctatgaaaaaaaatttttaaaactaacaagacttgtgtgcacatttcctggggtaataagaaagttgagacagttgaagaaattgtacttcacttttcttgaggtggg

SEQ ID NO: 161971 - DNA, 526 bp, Homo sapiens
gtactacttcatcctaaattaaattggtaagaaaacaatatgtttagtttctactattcagaaactgtgacctagggaaagattggtatgaaaaaaaaatccctttccctttctcagtgtatatagtacaactctttgttacatttaaactatatccatggatatcagtgtgctttggaatcctctgctagcattaaagatggaaataaaaccattaatttgggcgaaaaaattacaatacaatacaatacaatacaatacaatacaatacaatacaatacaatacagtaatggtcctccaaagatgttcatgtcctaatgtttacaacctatgaacatgttatgctatgttacatggcaatggggaattgtgctggcagatggaattaagcttgccaaacagttaaagttatcctggattatctgagtgaaggcagtataatcacaagagtctttataagaggaagagggaggcagaagtgatgtgagaaagacttcattagcattgctggctttgatgataaaa

SEQ ID NO: 161972 - DNA, 389 bp, Homo sapiens
gcggtggcatgatctcggctcactgcaacctccgcctcctgggttcaagcgattctcctgcctcagcctcctaagtagctgggattacaggcatgcaccaccacgcctggctgatttttgtatttttagtagagacggggtttcatcatgctggtcaggctggtctcaaactcccgacctcgtgatccacctgcgttagcctcccaaagtgctgggatcacaggcgtgagccaccacgcctggcccagtttttctttttttattcccaatcagtattttattatatggaaacaccaaaatttgcttcctgttgatgagcatttgggttatttccagatttagactgttaagaataaagcatctataaacattcatgttttcttttatcc

SEQ ID NO: 161973 - DNA, 438 bp, Homo sapiens
caaggaaggcctggcaggtgttccctcaccccgctttctgttccatacatgtttcttgagcgttgatatggcctaggcctggctctgggcactccgtcatatatgatcccataagagatggtgttttgctctaagaacatgggtgtggtaggaagctagcccttgggaggggtcagggtacatctcagtcctctgtcactgtggggaggacctcagtgtcagtaaagttcagggttagtctggctggaaaaaaggtggcagcattgatattcccttccctgtatataaaaccttgagaggagtcctgcataaaatccggtggcagaacccaggctctgcctctcagggcagcacctacctgtcatagtaatttagctgaagttcacatttattttctttttcttattttttactttttttcagaaatggggttaccct

SEQ ID NO: 161974 - DNA, 376 bp, Homo sapiens
agagaattcaggagatatcaacccctgagcaagaggtgcaaagcgttaggtactgggtttgatgtacaggtccaaaagaaggatgggcagagccaggtacccaggctgtataccggattccctgggctctaacctgtctctgtgccacatacctacttccttcctcagccacacctctggatggagacactggggccctgggcaccagggaggagagcagtggaggaggcagggccttagggtggggcagcaggggaggagcctccccaggaactgactgggtccagggcttggagctgctctctgcagttgtgtgggctgtagagtggagggccatccctcctcacctcagccccagctcccaagcctctggagt

SEQ ID NO: 161975 - DNA, 403 bp, Homo sapiens
tttcacattcttgagcctagactaactaaacttagtaaaataaaataagtctgttaaaagaaatcaagaaaatgccctcgtttcctgccaggctcagtataaattggcagcctcacatcagaatctatcagcagtgtgcataaggcaccgtcttgtccatggatgcttatagacttgtgcacattcaacagctagtgtttctactcaatagtaagccttggacaaaaaactggcacagaagaatactgtaacctatgcttgtagaattaattgggtttatcagtttttctaactaaaaatagacacagaatggggaaaataatgaatttaaaacttaaagttctgtaagtcttagaacttttaaaaagaaaacctcaaaactaaaaggaaaaaaagatatgcc

SEQ ID NO: 161976 - DNA, 142 bp, Homo sapiens
caaagcagagctgacgtccagtccacgcctcatggcactttggaagtgcatctgacaccgtttgcctgccatacacaagccacaaagactttttgaggcgacaggttatgccaaaaattaagtaaaaatgacacagcttcag

SEQ ID NO: 161977 - DNA, 674 bp, Homo sapiens
agtcttcttcctgttagagtgccccaggacttgcactgttccttctctaccttacctttcgctatctaccctcactcccttggtgatctcacccaacctcctggctttaaagactgtctacatgctgctgactgtcggatttatttctctatcccagacttctttcctaaacttcagctgcctgttctacagttccacctggatatttagtagaaatctcaaattaataatcaagctgaaaactaaactgctaatcttcctgaaagaaaccttttctaccagcagtctttctcatctcagttgatacagtccatccttccaattgctcaggccagaaaccttggaatcagccgtgactcctcacatctcctctcccttcgtctttcttcacctccttactcacatctcaccccaacccatcagaacattctgaaggcttaccttcaaaatacatccaaaatctgaccatcttttcctagttttgtctgagccagtaccatctcctgcctggattactgctattttatagtctgttctcacaaaagcagtcatagtgttcctttttaaatgtaagtcagatcatgtgactcttctgcttaaccctgtagtggctcaccatgtcactcagagtcaaagcccatatgtctataaccatctctaggatctgcccccat

SEQ ID NO: 161978 - DNA, 344 bp, Homo sapiens
ttgactccatatgcatgttctcgtccatgggctcatacccagtccaaaggactttaccccagctccatctttgcccagacacacttgaggctgcagggttttgtttggatgtgtgtcccctccaactctcatgttaaagtgtgatccccaatgttggaggtgaggcctggggaggtgttttggtcatgggaggagattccttacaaatgtcttggtgccctcctcacagtaataagtgagttctcaccctgttacttttgtgcagagctggtgactttagtctgacatctctcctgttctctgtcttgccatgtgacgtgactgctcctcctttgccttctgcc

SEQ ID NO: 161979 - DNA, 408 bp, Homo sapiens
  misc_feature (23)..(23): n is a, c, g, or t
tcggtacctacttttccacaggngaaggaggagggtgcttcattctgctgcagtattcgaggctcacctggctgcaagggctgagggaatcaatatcttggcatacctataatacatcttggcaaaccagtgtataattatatacaccaaatgtaaggggaagagacatgaaatgtgggaattattagtggatttactttgattaattcctctgcgtaagcatctattttgaagccgttaagaaaattcagataaaacatgtgaaacttaaaaatactaaatagttaagtctcttaattgcctgtcttctagcagtcaggcagttgagtcaggaatgagatggagtgaccgttttacttaacgctttataaaatgtatttgtcggttttttagattaagtatatttta

SEQ ID NO: 161980 - DNA, 279 bp, Homo sapiens
ccttgccgtcctggagcgctgcctggacttgcgtcctgctgtgttccttctccactccttccgcgcacactctgtcctgatttctgctaccagcacttccttgaagttgttctcaaggttgccaagaccacccaattgtcacagggaagaaacattttgcagacttcagcttacttgaccttcctatacttcctggtgctgttgttcactccctttgcttgcaattctgtcttttctttgtttctacaatgttactttctcctggttccaccccctcct

SEQ ID NO: 161981 - DNA, 367 bp, Homo sapiens
gagtattaaaaataggcagtccccaggaaatattgaaaattctagggctctcagaaacatcaaaatcaggtcctctccttagtacatgacttctggttttgggggcttcttattatcaacaaaaatctgcttgtgataatctggagtaatataactgtttccaggtgtttcttcaacaagacaggtgagttgcttcttcactgtggacatgagcaggaggtcttgctcaagtttcttacacagagaaaacttctagaaggtttaattttatcatttggcttttctactgccatgatgtaaatagacacctgcatatatttaaccattaaaagaatctctgcttaattaattgctataattctttttt

SEQ ID NO: 161982 - DNA, 295 bp, Homo sapiens
cttgagttttagtgcccagcatggggagacattgcatggaaataaccattcctaatttgcttagttgaaacagaaaacaggagagtctgctggcagtaagacaaaattattttctttccaaatcttaagaatttggcttaggactgggttttgtcaaagaatgttcttgctgacatctcatccagcttcttccatcccttgagcccatcagttaaaactgttcgatgctcactggagctaagtcctcttgggaggcttttaatggaggtagattactattcattttaaaacaaaa

SEQ ID NO: 161983 - DNA, 243 bp, Homo sapiens
agaagaaagatgcctaagtatgttcttataggcaaataaaacacagactttgaaactgtcctgaacaacaactattctactgtaatacttaatacagaagacaatgatccagacaacataatgcagttacttgcaatgaaaaggaaaaaaacttgacattccccctatcaaaagacgacttttgataggaggagaatgtgggggaatatggttgttatgaaccatgagggtgtattctcgtgt

SEQ ID NO: 161984 - DNA, 514 bp, Homo sapiens
caccatacgtcttaagctatcatttctttgaaatataagaaaatgtgcagcccattgaccatgaacttcaaaaagaagagaggaggtgcactttgtcctgagggaatttgtggtatcataggtctttgaagttggctctagcattcatcagtgaagaagcagacccatagtagtctcattcttacccttgtataatacaacaagatattctacccatctggtcctggagtagggcggaggctagtgtttagtatggaaatattaataggaggagacaaaacaattagaaagtatgcactgaactacttagtacttgtgaagaagtagaagcataaaacccagagaagaggtcttattctctatgtatgagagttttattatctactgtgtgccaggtacgatgctctgagttatttcacaagtaccatttttcttaagagtcagggccatgtccctttattgtctgtaagatggaaagagaaaatgtgtcccttcctcacgctgactgaaagta

SEQ ID NO: 161985 - DNA, 491 bp, Homo sapiens
taaacttgacatttatttgcaggacagggatcattcttttttttaggagaaatgtcccatgtttctttccattatttctttaaagataatttttgggtgaagcgtcacagtatttttatttatctatcatcgtgagaagtctgagcaacattacttttggtaagcatccaggattatcattcaaattagatacttgcagacgtcacatgtctgggtaagtttagcagcttgataaatctgtaagtccctgcagcttatggttctttcacagtccagtgtgtatcacaggcacttgacctttcttgaaaaggattctactatgaaatccaaatgtccagcttcttaacactgaaacacgtatatacaaacacacataaatatgtatatacgtacttacacatatatgcttatatatctatatatattgtatctatatttcaccactttccttcaaagtaatttagtatatccataacccaaaacaaaacaaa

SEQ ID NO: 161986 - DNA, 149 bp, Homo sapiens
agtcacagcaaaactaatagtagctaatgtttattgaaatcttctgtgttgcaagagggtgctaagcagttggtatgtactaattcatttaatcctcacaacagccataagaggtgtagaggctattattatccccatttaacagttga

SEQ ID NO: 161987 - DNA, 358 bp, Homo sapiens
gctgggattatatcatgagcccccgtgctggccttgttcattcatattataactcttaggaactttaaccttagatcatagttagaaatgagttcaaacttttaatatgtatctgtttttaacattagctatgactctgtttcaaaatataattctaggccataaattaaatgttaaaatatatcatcacaacttttaacaatattcctaatttaaaatatctgtctagattgtaaataaagaacattcagcagctctgaacactattacataattcaaaatttaaaattagcactaaaataattttccattttcttgaaaactggtacaaatttctaaataaataatttccttaaag

SEQ ID NO: 161988 - DNA, 196 bp, Homo sapiens
tgccatcttggacttccaagtacctagaactacaggacatacccaccatacctggctaatttttgtagagatggggtctgtgttgcccaagctggtcttgaactcctggcctcaagtcatcttcccatctcagcctcccaaaatgctgagattacagacatgagccaccaagccaggcctcattttcttttctttt

SEQ ID NO: 161989 - DNA, 254 bp, Homo sapiens
ttagttatcttagcatttgcctccagcctcactttctgtggccttgtttcctgtatttgcccagtgtgtttataaaataaggatttaagaaactaagttttctctgtagagtatcagtcccgtgttaagatgtttcttattgccttgcctgattctgcctagttgaatctgtctgcttttccagagtcccatgaatcacatgtactgctatgagtccaaagaaaataaaaaattaatttattaaaaatgagtct

SEQ ID NO: 161990 - DNA, 196 bp, Homo sapiens
caaaacgggcaccccagtttccaaaatttgtatgaccttgaagcccaagtaatttctttctgcttttcttacttcacattccagatagaaaaaaaataaacatgaatgagtgaatgtatctatctgattatctcagtttcccccccttttttctagaactgagtatcctaagttgttgacctgacccccctataga

SEQ ID NO: 161991 - DNA, 180 bp, Homo sapiens
tgcttgctgagcaattctacaaagagagccacacatagtacacagactgaaaaacagagctacacaaacacaaacagtggaggctttgggagaaggtccagtactcacatttttaaagccattctggggtagtccaagagagctaagcaacaaagacaaaatccttcagctaataaatct

SEQ ID NO: 161992 - DNA, 402 bp, Homo sapiens
ggttaaaaatcacatgaagtgaaatcagaaagttgcttgttcaaatcccaactttgatatttatgaacagtgagactttgggttaattattaaacctcattgaattgtaacctcctcttctatgaaaatgaggataagaataccaggctagggataacgtgaatattaaatgggggaatatatacaggggcctcaattatggtctggtactcagaaaaggaaaatgaccaggctgctctcactctcctagcacgttctttaccttgcaacccctggttcccatcactcaggtcaatttctccagagatgcttgaaagcatccttttctcctgttccttcaacatttcctttgtcagagtttgccagctcaccatcaagttaaaacctcctttaatgaactaa

SEQ ID NO: 161993 - DNA, 338 bp, Homo sapiens
  misc_feature (268)..(268): n is a, c, g, or t
  misc_feature (312)..(312): n is a, c, g, or t
atggaaaaattgatgacactttcttgcttctggtgtgcttcccttccacgttcattttccataagaagcttcctccatcccacctcccaacaggccacagtcaattgaagacatttaactgtgaaaatgaggctccataaaaagaatttagaggccgaagccgggcacagtagctcacgcctataatcccaaagtgctaggattacaggcatgagccactgcacccagccaaaaccagctctttcaaaagactccagtgcttgatatnaacaactgcctgagggttccccacccttttgcagtttccacatnacaattaaccagcattcccttcctgg

SEQ ID NO: 161994 - DNA, 234 bp, Homo sapiens
ggtaaaggcttggctgaaggaacaagagtatgcacaaaggtagaggtggagagaagggaagattatgcaggatcttgtcagccacactttgatccctaactacctttcctatccctgagacccaaggtggcagcaagtaggatactttgggtaaaaggacatgttagtcatcgaaatttgtgtacataaaaatccatagcttttcctgatgttataacttctagcctttacacg

SEQ ID NO: 161995 - DNA, 619 bp, Homo sapiens
attaatcattacagcattttctttcttggtaaaataatcagaagattgttgacattagttcttagatgtaagaagataggaagctctgcttcactgatctgacttcaggtatgaccttcattattgccttctttcctatttaaagctgtgactcatccaaaaagccttctccaagagactgtgtatcatgtaatgggtactgtgacctatatgtgctagattttccagagcagctctgatttaaaatagtgtggcccctcatcattcttaacagatgatgtgattaggaaattgttaaccaaatttgtaacttaagacttgataaaaaggatagtatgtaaaacctttgagagtaaggttcatgagctaatcatcttggcacacattcctcacccaaattctgttcccctcagcctgatgccttccacttagatattcagtaaatatttgagtaaactgactgaatgaatgaataagacgtgaagtctttaaaaatggataagatttgaagctttgatattccaggattagggagacaataagttaagcatataaaagcaggaatgatagagtaaattagggagacctaaggtcttttctagagcggaagtatgtagta

SEQ ID NO: 161996 - DNA, 456 bp, Homo sapiens
atctgtgaaaagggggatgactagtacaacttccactgtgggagaccacaagaaaaatcagccctctccaaccacacaaaagagccagcaagctttgcaactcccaaggaaccagaagcagaaagggatgcagtatggcatgacagactgtgagtctgagtcacacagatctgggttcaaatccaggtatccactaccggctgtctgtggattaaatatggctacaaaccttttgccactctttccatcaagaggtggcgtctagttcccaacctggaatctgggctggcccagtgacagctctgaccaatagaacatgattgaggtgatgttctgggacgtgagcccaggcctcaacacgactggcttccactgtcttggcccccagatgccatgctgcaagaagttcaggatagactcttgaaggattagaggccatgcaaagagaagctgcct

SEQ ID NO: 161997 - DNA, 461 bp, Homo sapiens
ttagagagtacaaacctctctgaggtttacagcagcctcagtaatttgcttggaggcaagtattccaatgaaagcaaacacagagccagtcccgagccccacgaccagcgctgtacccaatatgcacccagggtccagaaacgtccggcggtgaagagcctcagacacgtccccgtccatctcctcggggaccatgctgaggtcaggccggcatggttttataagctggcctcagacggctccgttccctgtctcctgtctgggtcagcccagctgccattccccggggacatgcttgcaggctgcatggccctccacctcctggctggggctcgccgcccagggatgggtccctgactcctgagcccacagtgtgtcccaggtcacatggggtcaggaccatgagatgcagatgcggccttggagggagaaactgcccactcggaagtgctgggtggccg

SEQ ID NO: 161998 - DNA, 400 bp, Homo sapiens
ggcttataaacatcagctgtagtaacgatacccccaggtgggaaggggtggtcatgtagtcaggcaggcacagaggagtgagaggccaaggctgagccagcagtggacttgggtacgattttcatcttttgccttggaacgcatgtctgtgattcccactaaatctaactttccttggtttaaatcctctcagttctctcatggcaatttctctggggagtcacggaggtcaagacacagctctgttcagctggtttaccctgtcctgccctgcccaagaccacagcctgcaacagtgccctttgctcaccttgttacagaacctgccacgtggtgcatccccttttataaaccatccacagcaaacttctggggatcctggggtcatttgaaggcctgg

SEQ ID NO: 161999 - DNA, 307 bp, Homo sapiens
acagatttccagtgggggcagaaatatgaaaagctaaaggggaatttctgagaaaagaggaaataagaaaataatatggggcaggagacagaagtcttagaagctgatgatcaaaagaatagggagattcagctagtgaagatacagaatgtgcaaatgcagaatgaaaagaatctgcaaggaaggcctagagcaaaagttagaattatcagaaaacaagatttcaaaggcaaaaacctaggaaacaccacttgtcttggtgtctatagtgaccaaagatttttaaagaagctaaaagggtttcccc

SEQ ID NO: 162000 - DNA, 356 bp, Homo sapiens
aggcttttttgtagtaggatgacaagtgccaacttgggtaggaaagctagagctagagatgagggaaatcgtctttctgcaatcgtcagagtaacagctggtttaggcaagaatcattaatacatgctaaacctagggaggaagtttgatgaagaccaaggtatttgcatggtcttaaattgcctcaccacagattgatgggggttaaaatagtaactacacagtggagaaactggatttggatactatctaattgagtaatcaaaattaccaccacgaatgaaggagagacacactgtccaatcagaagtgacaccccaataagggcatattacttctattctgccaggagccca

SEQ ID NO: 162001 - DNA, 283 bp, Homo sapiens
ctatgttgcaacactcacatctatgcactgaaatttacgttgactcttagaaagttttagagatttggacattttgcctcacagcaaattagcccttttggccctcttcttccttattaatccctccctacttggtcccctagaagcctcctcagctcacttccatctcgtcttaggaccacttccaagacacctgcttgaagaatcattgccaagagcagggccactcctttcttccttcatctcctccttaaagtccactaacttgaatgtgtccccacgt

SEQ ID NO: 162002 - DNA, 405 bp, Homo sapiens
ctctggtacagcaccaccatttgcaagcaaacatgccagtaagctcccagaagtgagcatgctgagtaattctcaaaagggtggcttactagaagaaacctgctggcaaaacctaatctccttcccctaaaaaagaccccacatactacaaaatatcctggctcataatacactttaaaatcaaatgcggctgggcatggtggctcacgcctataatcccagcactttgggaggccaaggtgggaggaccacctgaggtcaggcgtttgagacaagcctgacgtttggccaagtggtgaaacccgtctctactaaaaatacaaaattagccgggcatagtggtgcacgcctgtagtgccagctactctggaggctgaggcaggagaatcgcttgagtccggggcg

SEQ ID NO: 162003 - DNA, 359 bp, Homo sapiens
ttctgctggtcaggcagtcacccccgtgggcacaatgctggtggctgctgtaaggatttctctcaggttcatctctgtttcctcaccttgctggttcagtcttccagcttctacttctgaaatgtctcttaagtcccctacctgcctcccaggtcatcaccctaggttgacactggcctcacccaatctcttcccttcacatatctctctcagctgggggagggagggacggcctggtgagagggtccatgagacagtcaacgaggcagacgtggccacttcgggggagactaagctcactgctgaaggaggcggagctcggctgacccttgggtgctcgacttggggcaggggcctgg

SEQ ID NO: 162004 - DNA, 465 bp, Homo sapiens
agaagtcttaagggaaaactctgcgaggaccaacaggctcagaattagctgtgcattgcaaacagatggtgtgtccctgaggaaatagcgtagttgccctaagcaattgggtgcttccatctgatttagcttagtctctgtaactgggaaaaaggaaaatcttatggaagaaatgagtataatcacctgtgaaccattctaaactattatctagagactagtgattattgacttacatatagatttcataattctgcaagatagtcttcggtgttgtatcatcagttatccaaggtataaataacatcaagacccttatgcctctgagcctgatagatccttatcttttaataaccaaccccccactttcttcagtagccatgatgctactgtatcaatgctaccagcaattggaaacccatattcctaatgccaagtctcggcatgtagattttgaggtctgaa

SEQ ID NO: 162005 - DNA, 330 bp, Homo sapiens
tcactatgttgcccaggctagtcttgaactcttggcttcaagcgatcctcccaccttggcctcccaaagtgctgggattataggcatgagccaccacactcagccttgaaaagtacatcttttatgaccacctgttggttatccaccatgtgagtctcacctaatacaggactggtggtttaggaaatacctgtggctgtcgcagttttggtcctgcagggaaagtgccatctacaaaatgaacttggaatgtctaggttcaggcagtctcttcctcagaaagcaggaacctccagaccagatctaccaaaagccattctccctcccaca

SEQ ID NO: 162006 - DNA, 249 bp, Homo sapiens
tctagaaaacactatgctaaaggagtattagtaatcaactgtaaagacactgtggtgtctgaatggatattggcaaggaaaagctgatgaatatgttgaataacatgttaaacataatatattgcatgcattaatcaatgttccatcataaaacaccattaaaattacagcaaaaggattttttttttttttttttgagacggagtctcattctgttgcccaggctggagtgcagtggcgctatctcgg

SEQ ID NO: 162007 - DNA, 538 bp, Homo sapiens
ctgaacagaatatgaaagtgggtagcagctggaggggcgtgtttgtggtccccagcgcgggctctacgccgggggcgcatccttcccacgtgccacgggctatgaggaaccggcccctcttcctccctaatctcagcgattccagctgggctgcagccacacggagctcaccggaggccacctggcaagcctctgtgattatctgctgcagacgccgaggcctggagtccctgagcatcgagcctccccggggagcaaatgcactcggcactcgtgaggtccaccgccaactccataacagcgctcctagggaaagagcagcgccgggcgtgtcactttttacacaagggctgtttagctacgtgctgtatcagacacaggggacccctccctgcctgggggctttaaatgccacgcgctgaggccagcccttcctgacgtgtcagccactgccccccagtgtctgtgggaccctgagggcccctcggccttccgctccggggagcacctgaagtgcctcaatttactcactatctgc

SEQ ID NO: 162008 - DNA, 383 bp, Homo sapiens
ggtaaccccttcaaacatttaatttctggcacactctcaatctgggccgacaaaaataacatagatcttcaaaacattaaggctacgtgaaagaacatggacacaaaagaccacatagttgtatgattctattcataggaaagtccagaatagggaaatctatagaggcagaaaggttagtagttgcttaaggctaggggaggagggggaataaggatggtagctaaagggcgaagtgttactttttcgtgtgtgtgtgtgtgtgtgtgtgtgtgtgtgtgtgtgtgtgtgtgtgtttagctggtgtagtcgggtcacagggagttactacttgaggtgatgaaaatgttgtaaaattgattgtgatgatggttgcacacatc

SEQ ID NO: 162009 - DNA, 449 bp, Homo sapiens
aacccggtttgcattaggaagtgtaggccacatgctcatatgctgtgtccggactgcgcaatttctgtgtgattttatttgtatcaatgatgactctttatggggggtagaaatgattcagagttaacaagccatatttttagttgcgtcagtgatttcctttgatcattatagaatgttaattttattttctgtatattgtttcggtgttattttgatggcatattttatataaatggtagaacaatatggaaaattcagaaaattgagggagaaaatcatcgcagtactttgacagctgtttcagtttggagatagttctttattctctatgcttacattttacaggttgtaatcgtgtgtggctgctttcaggcagtgtgatttctcttgtggtctagctacatttgagtggttagaaaaattggttgctttctttagttttttta

SEQ ID NO: 162010 - DNA, 477 bp, Homo sapiens
ctctctagtagctgtgttctgtgggttgaccaggatcacttggaaaaagcaagatggaacctaagcgtccaccaatggtggattggataaagaaaatgaggtgcatatacactgtagaatattacacagccatgaaaaagaataaaatcatgtcctttgcagcaacatggacgcagctggaggttgtcattctgagcgaacaaactcagaagcagaagatcaaatattgcatgttctcacctataagtaggagctgaacaaggggtatatatggacataaagatggggtatgaggattgaaaaataatctctctggtacagtgttcaacatttgggtgatgaggccgggcatggtggctcacgcctgtaatctcagcactttgggaggccgaggtgagaggatcaggagttcgagaccagcctggccaacatggtgaaaccctgtctctactaaaaatacaaatattagccaggtgt

SEQ ID NO: 162011 - DNA, 446 bp, Homo sapiens
gagtcttgggtccctttccctcttcccttatgtgggagccacacccgaggcatcctctttcccctccaccgtcaatctctcctaccctagggcatcactcccttccacccgccaaaatctagaatggcccccacattggaaatgctgtccttgactgctctccctcctgcagtcatacttccaatttttcccttatgcttctcaatgaatggatcaacagctccatgtacccgaagtctccatattcctcagttctcactctgttcccagatctctctgtgtggatgaccttgccacccttccttagaatggctctgtttagcgtcacccagtcagtgactttgtgtcaactcattcttacctggggtctcagtggaatgctattccactgaccacgctcttccttggaaacactcttctataacagcagttcccaaccttttagg

SEQ ID NO: 162012 - DNA, 586 bp, Homo sapiens
cccgtcagtcaccctgctgtttactatctccctcagcccccgggttcgaggcccagagcccacccacccacaaccagccttcacacagttaacgccttctgcccccagtcagggagctgctgtgtccctgccttcagcagtcacactgtctcagtcacagtcacacgtactcacactgggcccagcacccccctcgggacacgcaggctcctgcatcacccagcctcccggctttgaggcaccctcatctcctccgcttgcactgtctctgttatccgcccttccctttgggatgtcagcctgcttctcacagaggagcacactgagagagtcacacctgctctctcttcatagactgtcttcttggacctggacagggtggaacagaggaggaaggacatctcaggtggtctttacagaccactgcaggcacccacccactgctgcctaccacccagcagcgtggcacagtggcagagacacagcctgaagacacatcaccttggtccaaatcctggagtggccacttgctggacaagtgtctgcaggaaggttttttaacctctcagtacctcggtttcctcct

SEQ ID NO: 162013 - DNA, 399 bp, Homo sapiens
tgagccaagatcacgccactgcactacacagcctgggcgacagagtgaaactctgtctcaaaaaaaaaaattataaaaggtgcatcattaactgtcaatttgacaactgaaaacatacatgaatttggaagatctgactataatgcaatcagtaagtttgatttactaaatacagaaaataaaacctttgcattttaccaagggcataattttttaatgtccacaaagcaattaaaacttaatcatgtacttggatgcaagtaaacgttaataaatcctctcagatacctcagagctgcattcataaatcatataaacaatatcaaaaggtaagcaaaagaaaaattcaaggacagacatacttctaagtaatgtcagaatcaaagatcaaataaatat

SEQ ID NO: 162014 - DNA, 289 bp, Homo sapiens
ccatattttattacactatctcattgtggtttttcacactgtgggaattggacttccagaactaggggagcctctccactttcattttagtctgaccacttttcttcagggaaggcaaaggttcacaaatcaagtttgttcatgttaaaccccaggaagagatttaaaaagaaaatcttgctacataagcatccacaatgtaaagtacaatattttatatgttatatccatataacaataactgttctaccaaaagcccaagccaaacaaaatctaacaaagtctcatt

SEQ ID NO: 162015 - DNA, 172 bp, Homo sapiens
gagggctgattcttttatcattatataatgtcccactctgataatttttttctgcccttaagtttatgtgatattaatatagctactcctgttttcctttgattaatatttgtataacttttcctatcattttattttcaacctaactgtactgttgtatttggagtgagtt

SEQ ID NO: 162016 - DNA, 192 bp, Homo sapiens
ctgctgtctcttcataccacactgctggtttcatgcatgagtgtctgagcacgtgctgagcatgcctctcagaatgcacacattctccgaggaacactcatccatcacaccagctcacaaagccgaccttgacctagagcccttcctcacacccaagtcccttctttagtgtttctgtcattctttagttat

SEQ ID NO: 162017 - DNA, 345 bp, Homo sapiens
taacagtaaaggagtatgctacggtttgaatgtttgcctcctccaaaactcatgtcgaaacccagtccccagtgtggcagtattgagaggcggggcagttgacaagtgactgggtcatgaggggtctgctcctgtcactgggttaatccactcacagatggatgggttatcatgggagtgggactggtggctttctaagaagacgagggtcctgggcaagcatgttagcatgctcagccccttgccatgtgatgccctgcgttgcctggtgactctgagagtcccctctccccgccagcaagaaggctctcactagatgtagcccctctaccttgtacttcccaa

SEQ ID NO: 162018 - DNA, 159 bp, Homo sapiens
atttttgacagaggactagaggcctcctccctcccctaaatgctttggcacttgacacaaccttagggaaaaggaaggaagccaagaagactcaggagttaaattttctcagcagctgggcagaaaaagagcttgaaatcatagaggaaaaataaagtt

SEQ ID NO: 162019 - DNA, 249 bp, Homo sapiens
ggcacatgcactttctcatgagttagccaatggcagttttttaacaataaactatttcaaacttttcaaatagtcaattacaaattgtcatgttatgaggttatactcttcttttcagtaagcttgaaatgcaacatttcaatataaactagaaatatattttagaaaatcccaagccattgtttacgagaaataaatttgtatatcactatctcaaagcgccaaaattgttttttgaggtgtttatcc

SEQ ID NO: 162020 - DNA, 910 bp, Homo sapiens
ctgcgcctggccgggagttcttaaataaaataaaacaatggaacaaaactactatttaaagctataagacaactttataggaaaaaatactataagacaactttataggaaaaaatacatataaagagggcctaccacatactagagaaaattaacctgcaacaaaaaccctacaagataaaaaaaaaaattcctcaagaccttgaagcaaaatgatcaaataatttacaagggcaagaaaataaggctggtatcagccttctcaaaaaacatcagccaaggtggtaggatcacttgagaccaggagtttgagacctgtctgggcaacatggcaagactctgtctctacaaatttaaaaagtagctgggcatagtggcatgggcctgtagtcccagctacttgggaggagtctgaggctggaggactgcttgagaccaggagtttgaggttgcagtgctgcagtaagctatgatcacgtactgcactccagcctgagcaacagaggctctgtttaaaaaaaaaaaaaaacacacacacatcaaggtaagaaaataatgaaaaagcattttccaaaacctccaggaaaaaaaaattagaaccaaagctttttatatccaaccaagctattcttcaactatcagaaccacaggaaaaaagtttaaacattcaacagcccaagaaattctgtactcttaagtcttcttaagaaatttactagaagatacaaataaaacttacagcaaagaataacataatcacactaagggcagtggaggggaataacccacttaacttttgaacattatattttgtactatatattctcagaacattaaacaaatactgggctctaactcctaagcttctttctaacagaggtatgagctagaaactctgaaactattctat

SEQ ID NO: 162021 - DNA, 120 bp, Homo sapiens
cagggcccagcaggggcattctggggttcttaagttgaaggctttcttggcgggacctgcatttaaggtgaaggaagctatataagatggtggctggccacatccagatggacaacactt

SEQ ID NO: 162022 - DNA, 290 bp, Homo sapiens
caaaaacacccggggacgaggacctcacactcagcagacagaggaggcaggatcacagttcttccttctccagcctcctgagaagctcctccctctgccccacctcctggggaaagctgactgggctaaagtgggagtgcagtggaagtgaggagaggcaggtggcaacgtcagtcttttacaaagaatgtccccgattgcagtcagagagaggagaagagaaggaatatgaaatctcagtttccagagagagatgcagatgccagaagggacaattagagaactaacaa

SEQ ID NO: 162023 - DNA, 226 bp, Homo sapiens
catgaagagaactgtttaaaaacctaagcagtcacagtctgagtaacattaaatacaatttgttcacagacagtctgttgcagattttgtaattctcccttttggattacagatttgacagatttgccacttattttgagatttttaaaaattccttattgttttaggagttacttaaatttatcattatggaaaattaaaacatacatacaattacacagaataa

SEQ ID NO: 162024 - DNA, 580 bp, Homo sapiens
agaggacccctctctgctcccagagttctgtggatacaagcatgtgcaataatctggctaatttttgtatttttagtagagacagggtttcaccatattggccaggcgggtcttgaactcctgacctcaaatgatctacccacctctgcctcccaaattgttgggattacaggcatgagccactgggcctggcctgttctctagtttctactggatttattagtgaaactcttcagtgccttccccacttcctaaagctacaggttatatgggtgaggggacacttgagatgaatatggaagacctagtattatttagccaggtgaacaagagttaaaatatcaattcagacagagcatgggcatgaaatactatggaggtattaaccctttcttccacttagaaaaaaaatagtgcatctcattgccagctctcatttaattttacataaacacactctttgaggctgaagcaaatctgactgattttcaatgtaaaaataaaatataaaaactgttcttaaagttatttctaaacagaacaaacatcagaatcgtctgaatcattgggatcgtctatt

SEQ ID NO: 162025 - DNA, 549 bp, Homo sapiens
tcggttcttcaccgactatttctccctcaaactctgggcctctgcttgggctcttgtagccgggtcctctggtgtgaacaggagcagatgaccaatagcacttagctgggtgacaacccataggaggtatgcttataaaatgccaggggccactgagtgtccattgactaaatgtgctgtccagcacatttattcggagaagtttgattgtctgacgccttcttctctcaactcatcaaagtcattctccgtccagctgtgttccattgctggcgaggagctgcattcctttggagggggagtggcgctctgatttttagaactttcagcttttctgctctgttttttccccatctttgtggttttatctacctttgctctttgatgatggtgacgtacagatgggattttggtgtggatgtcctttctgtttgttagttttccttgtaacactcaggacccttagctgcaggtctgttggagtttgctggagtccactccagaccctgtttgcctggatatcagcagcggaggctgcagagcagtgaa

SEQ ID NO: 162026 - DNA, 230 bp, Homo sapiens
ggactcagctgcaggtgcccctattcaggactccctgtcctgactgttgtagagttccaggccaagtcaccccagcccatgctggcctgaactcctcagcaaatccttcccttcagtctggatctaggtcttgttcttcacaatcccttgtttcttaattgatggttcactggagcttggactttgatttccacgactgtgggcctactgtaccttcatccacctctcag

SEQ ID NO: 162027 - DNA, 795 bp, Homo sapiens
  misc_feature (770)..(770): n is a, c, g, or t
  misc_feature (776)..(776): n is a, c, g, or t
cttcttctagtaaaaccattcccagctgaatagctgggtaaggcagagggtccatacaggaacccagtaaatgggacttttccctcctaatttaggatgagctgtcttcaacttctcacagacttgatatatctttccttttaaagtagattaagtcctatcctttacataataagaatgaagataaataaaatgccaatggtagaagtgcttagcttttggaaggaagtaaatcttaagttatgactaataatgcttatgcttctcctttgaagcaacacgaatgttgtctaaatcatcccaattctgcaagtggcataaaatctgattttcattcagttcagcaactgatcctcaaaaacactttgctgaatgcaaaaaaaaaaaaagaaaaaaagaaaaagaaaaaaagtgattgttcaggtaatatcttcccagcaaacagcacttaaagaaacccccagcttttttttctgagaaagagtcttactctgtggcccaggtgcaagggtgtgatcggcaatggtgcgatctcggctcactgcaacctccgcctcccaggttcaagcaattctcctatctcatcctcctgagtatctgggattacaggcttgtgccaccacgcccggctaattttggtatttttaagtagagatggggtttcacaatgttggccaggctggtctcgaactgctgacctcagttgatccatctgctcggcctcccaaagtgctgggattacaggtgtgagccactgcgccgggcttatnactatntttttttttaccagtcatg

SEQ ID NO: 162028 - DNA, 178 bp, Homo sapiens
agccctgttttcctcataagctaaaaagtgaagctggagataattctacagaaaaaaatttgaaagataccacgtatgcagtcaggccagaggtctctacttttcaacatggaatctaaaacaaacataaagaagcaacgctcgcctgtgatcccagcactttgggaggctgagacag

SEQ ID NO: 162029 - DNA, 617 bp, Homo sapiens
atccatgctgcagctgctgagaagtagagcaggtctagaagagctgccctaggagttttaggaggaagctctgcgacctccccatgcttggcagggagccaccaccctttgacaaacccagtgcactgattccttaggtatgcgtcccatgaccccatggtcaaatgggcacaggccagctggggtacacatgtacaggtgtaccagctgttaaaataccaagatgctctgtaccagctggtaaataactgccctccaaatgcctccagtgcccactcctgtgctttcctgctgcctcctccaccaggacccctcaacaccgcctcccccatggcccattaactccaagagctaaaatctcactgcatccaacctagggccaggtactctgtcactgttgagtattttaaacagcactctgcctcctagactctggtgcttccagggcaaggagtctattttattaatttctgcatctctagcatgtcttgaagccacacccgcagaagtatcagttcaatgcatccaccaaggacccaagaggagcttgccatgaggcagggctgactgtgagtgaggaagagtgagcagcggcgagttgctgtggtaggtatcac

SEQ ID NO: 162030 - DNA, 678 bp, Homo sapiens
cgcctatttgtcttttactgtacttttttataccatattttaattatttttttggcaaagcattaaatggttaaatggtgcatttaaagagatttgttatctgtttgtaaatatttcccatgaaaagaaggcaaataataataccctgacactgcattgtagtaaatctctgtctcttttgctttcatcttgtctaggcacagagatgttaccagaatgtttttgggtcgaagttctcctttggaaaatctatggggtgatgtgtcctcagccaccctttggttttttcctggtcatgggtttcagtactatctggggataaaccaagataactgccatggttatgttagctagagtgtccattggatctcagcttctggtttattttctcccataagatgacctgaggtatggagtgtatcctctcaagggagcaagtggatattctggggctgaggggaatcttccggtgtactcttattttgaaacgggtaaccctttgaaatgttaaaattgccttccctcaaccaggcttccatttcttggagacaaattgctggtcagccaatcagatgctggtaatgaggggaaaacacagaaataatttctgccccctggattctctaaggggacagaaaaatagtgaaattaatatagtaaaagaaaaagagtaaaaaa

SEQ ID NO: 162031 - DNA, 274 bp, Homo sapiens
acacaaacaaaacaggaattcacacaattttcaatagagagggaaatctgctgacttacaccatcaacaagaagcttgcttctagtactcaaaccaatggcacttctcttaagatcacatctgccaggtgtggtggctcatgcctgtaatcccagtgactcaggagactgaggccagagaatcacttgaacccgggagggggaggttgcagtgagccaagatcacgccactgcactccagcctgggcgaccgagcaaaactccatctcaaaaaa

SEQ ID NO: 162032 - DNA, 525 bp, Homo sapiens
atgtcctctcttgccctgtgtcactgacacttttcccatgcagaactgtggttcatacccctccccttgaacatgggtcacctttgacttagttgcaaccaagagaatgaggtgaaagtgactttgtgtgatttctgaggccaggttggaaaaggcaggcagcttctgcctcattcctgcaacactgacacacggacctcctgctgccataaaagcagtctaactgtcccaaggccaccatgctctgaggaagcccaatctagtccacaggggagagcacatgaagaagcctagggccacaaaacaagaaggagagaaatgtctgtccagcccctggctgttccagatccctcactgggagtgggtggttctggccactgtctcactgcacctgtagagagaactgcctgatcaagcccttcctgaattcctgacccacagaaaccatgaggtaatttattactcagagataatgaccaaaacattcatatagtcattggaagggggttttagttaccataggat

SEQ ID NO: 162033 - DNA, 334 bp, Homo sapiens
tccactcggagaagaactccttccgcctttaacaatgtcttggtcccaccttcgttccttgcctttgtggatccagttgccttctgaaaggtttttctgatgccatctgacatccgaatggtgtgatctccacattgtaaccggtaatacttaggcacgtcaaatcctttcaccctggccagactaccccactggctttcctttttaactaatattctggtctctaactttgctctcaaaagggatcctgttgagcaaagcactgtaacttctctgacttacctactcctatttccccacttcttgcttatccattcacttcatcagacaggcc

SEQ ID NO: 162034 - DNA, 411 bp, Homo sapiens
tgacccagaggtggacccagacccagacctagacccacgcggccagctcccaggcctaaatcctgccttgctccacccaccacgccctcattctcccttctatgtcctggagccctctctccgcagtgctggtgcgaacaaggttcacggatgcagggatttgaggcctgagttttcaccccacagaaaagcccatagggaatctctccccagcctggcaggttgaaccagatggaggatgaaccaatacggaggcagagggaccagccctggctgggggtgaggagccagggattagccttaagaaggtggttgaaagtaggtccaggaggaccccagctcagctcttgagccctcccagggccagggactttacaggaaatggacagttcatgagccctactgtgtgca

SEQ ID NO: 162035 - DNA, 220 bp, Homo sapiens
  misc_feature (10)..(10): n is a, c, g, or t
  misc_feature (18)..(18): n is a, c, g, or t
tcggacctgntgctccgngagaatccacctgccgcttctcaccctgcagccgctcaccagctgcagcttttcctggcattgacttcttttccagcctctttcaccatggcttactatagcctttaaccctggcactcctccctcccggcacccctgcccctgctgcccttgctgtttccctagtcccctgaccttcatactcgaattctggtcttagggg

SEQ ID NO: 162036 - DNA, 278 bp, Homo sapiens
tgaataagttcccttaaggactcaactgaaaaggcggcttattaacccagggctcaaacaagtaacggcagcacaaagtgatatacaagactaaacccaagagtggcaaccaccttctagctgaaccacatccctgtatttttttatactttgtgaactaagtcagctttgcactccagctgcctcctgaataagagattgcgcaaggatatggtaggtgggcgttttacccatcaggactggaagcggaagtttccaggtgtgcacttggagggtgg

SEQ ID NO: 162037 - DNA, 234 bp, Homo sapiens
ggccaggtcttcaggccctatctcctgtgccccaagaggccatgaaaaccagttctggaagtggcctgaaagtgaaagccagtgtgttcctcttgctgtctgcattcctgtttgcagttagtttttggcttctgagtaaaaaagtctctgttatatccagcatttttaggtgttttcagcagaagtcccattatggtataaagaccatcacatttgcagacacctctccctctt

SEQ ID NO: 162038 - DNA, 392 bp, Homo sapiens
agccaagaggaaaagtcacagagaacagcgaggggaggtggaagtttcaatacagaaattgtagccatggctgagaaccccagcactggaggccggaatttgtgcgtttgaacgccagaggcttggctagtcatgattagcaaaggaacttcaaagagttttggagcctgctttatatctgtgaaatgggaattatttccatctcaaaggtttgaggggattcgctgagagaaacttcttagcatgggatctccagaaactggaagccacagagaaagcagcggccagagggaggaggaatcggacaggctgatcacttggagtgttcgcctaagcagtttctagaaatggaggcagggaccatcaggaagctcaaaacctttgcttcagcc

SEQ ID NO: 162039 - DNA, 149 bp, Homo sapiens
actgccctgggcccccagcttacaggaagtcaggaagcttgggtgactgggaagaagtgtgggggccaggaagagtgttggtatgtccagagggcagcaagaagaagggagagggtgagtgggtacatcttcaagtagccaacacactg

SEQ ID NO: 162040 - DNA, 539 bp, Homo sapiens
caaaataatggagtcatagaagagttcagtatgaaatggaaaccaaaaaaagtttagcagttttgcacccagaaaaaaagaaaacggagaagggtaagcttgtaacaaacggatgggggtcttttatatgctaaggtatttgcccttcatcctatggttaatcaataggggagctttcagatgtattcaagccagatgacactgtagtttagaaagataaatctagtcctacgcagaagacagagtgggagataaagcacttagtggcagggaagacagttaagaaacttctacagcagtccagaaggagagatggtgaagctacaacctaaaagacagcatggaaatggcaaggatggacagtttctctcccaactccacatttccatctctgcttctcccacaaccaactatggccaggaaatttactggtcacagggttccattacatgtacaccaaggacaacataaaagtcggtggagtcaaagtgcaattaagaggattgaaaggggaggcccagaaaaagagtcccaggcac

SEQ ID NO: 162041 - DNA, 431 bp, Homo sapiens
aaagaaaattaggcaagaagtgaaatttcttaaaaaggcagttgtctaaggcactgttctgacatgcatttccaaaccgccatccagccgtgtggtgaaggtaacacgccaaggcaaagcagtcggcaccaggcctggcttctccacagggaccgccacccgtgcagtcatgcaggctgtgagctgtgaagagagatcctcccagcccaccccatcccggcaaagcaagagagcccaggacgaagcttccccaggtgaagggcctcgggggagagcaggacagtaaagccggcccagcagccttcacgccccctccaacaggctgctcatgccttcaaagcaaacgcgatgaaggaataaaacaccatcgaagagaagcagaagctcagagccattccggtgttgggacctcagggaaactgagaggagaa

SEQ ID NO: 162042 - DNA, 411 bp, Homo sapiens
ctgaggtgggacaggaccgaaagccccagggtgcaggagcgaggggctcctgcgatgggaagatgggagagctgggagcgttctcgcatgcagagctggtgtgttttcttcctctgggaaggaaggaggggagggccatacccaggaggggacaactagaaacttgttgaaaagcagcgtacatagatcacaggtccaaggacgaagcaggtgaacccgtcctgtgattttaagcatgaaaggagaatgtttgcctggcatgggggactgccccagggatggcacagttggtcatcccgacatagaaatcgcctgggtgggtggtgccatagcccggcccctggctctgggggctgacattaccgtaaggtcaggaccacacgaagctgatcctgatgtgtcactcagaga

SEQ ID NO: 162043 - DNA, 354 bp, Homo sapiens
acaaaaataacaaaaaacaaaaaacaaaccatattcacacaatagcagatgccaaagcaacgctgtaaaaccacaaactctctaatgccccagagacggcattaaatgctttacatcctttccttgctacaatttttcttgtttccaacactcttttttcagactgtaccttttggtgctacatattattttcatattacatattgaaattgcatattgatatgtaatatgcaattaatatgtaatatgcaaataatatgtaattgaaattacatattaatttcagacatattataggtcaagtaagctgtagtgtgttgacctggggacctatccccatttgttaaagccttt

SEQ ID NO: 162044 - DNA, 293 bp, Homo sapiens
tgaaattttttctttctttgtggtaacaccaatagtactttcagactggacctgttctgggggaattggcaacaaactgaaatttcccattagttgtgtatggatctattgtaaaactgctgataaggtatcatcatcattattttttttttttgctgagattgttttttatcacattggatcagtgtctggcctttcaaaatggaacctgaaggcagatgtatttataagcatgtatgcatctgtaaatggtgaccaagtagataaaacaccttttcctgctggcggtgtgc

SEQ ID NO: 162045 - DNA, 560 bp, Homo sapiens
catttgtggttgttgctgtgttttactactgacattttggaactattagactgcttagctatttaattgaaagaaaggactttctcttcaaaacgaaggtatcttaattgtatagctgtgatattaaaaactgcttacctccagaaataatccaggtcttctgattagtgcagatttccaaaggccagtattgccatgaggcccattataattggtcctgatttcttcctctcaatcgcaatagtattttttgtgctccaaacttgggctactacatacagcatctgctttccattatgctcagagctgaaatatggcactgatactttcatacttggtgaaatcctatgtacagcctccaccagatgtatttgaaattaccctgtggaggactgaaaagctaataggagctgatagatgctgttggcctttagttaactctgaaatatagctttccacttgtgaacctccaaagtgtttagactcctttcagtggaacactggcacagttacataaatgttagtacatcccatacttttttcagctaatcttggcagta

SEQ ID NO: 162046 - DNA, 429 bp, Homo sapiens
tctccccaacccctctgccccaccgggaaggcactattcagtcactgaccataaccttgtagagcgcagtaggtctttagtgcagccacttggccggctgattgggaactcaacttccgatggtcctaacaaccctttgggttttgcaggatctttgagaagcaaaaccttttacctaggccttacggcttggccttctggtccattagtatcatccaccagttcacccaatttccattaataaccgcatctagaatcacatgaaacttgagatgggttgatctcctgtcttgaggcccagctgggcgggtatgccagccaaggagagggctggggcgccgggggtgactctcgggaggtgaagcacacaagcagcccataaggttgggatcctccgtctccaagtagcgcgactacagctcttgcccg

SEQ ID NO: 162047 - DNA, 498 bp, Homo sapiens
gaacagaaatgttgagaagggtagactgatgactacccctcagtggaaacagaccagatctcagcttatctggctggaaggaaagcaaaaaaacaaagcaaaaccaaccaaaaaatcctaagaaacaaaagacagattcaagccaatctgtgatttgtaaaataagccaggtgcaggcttgtgtgccttcagctgaatgtaagaagtccagctatcatgaagtctccatgtggacagacaattcagaggaatgagagagagagagacctgagcagctagcagtgccagcacctagatgtttgaatcttcccagcccagatacatgatggaaaaaacttcaagatgcccattggacagcaaccacatgaaagacctggagtgagaactcctaagctgagatctcactctttcagactccagagccaaataaataattattaatgtttaagccactgttttggtgtggcaacaataaaggcctggaacagggtaaaaaaa

SEQ ID NO: 162048 - DNA, 379 bp, Homo sapiens
ttttagcaagattatttgatattttatttaagcatccagaaaaggccaggacacaagaataaagagttagagtcctgctacactttgcaaacaaatagaagagggcatagcatgtccctggaatctccaagccccttgcagattctaactgccaactcctcatcccaacactgagtagcaaggctctttggatgtaagtggcccaaactcaaatgaaattggcttaagcaaaaaagggggcctcattaattcacagactcaaactgcagaaagcgtagagtggagctgagcttggagaagctgggatccaggagctccgtcaccaggtggatgctctcccatttcctttctgcatctccctgcctgttgtcttcatttc

SEQ ID NO: 162049 - DNA, 794 bp, Homo sapiens
gaacagaaatgttgagaagggtagactgatgactacccctcagtggaaacagaccagatctcagcttatctggctggaaggaaagcaaaaaaacaaagcaaaaccaaccaaaaaatcctaagaaacaaaagacagattcaagccaatctgtgatttgtaaaataagccaggtgcaggcttgtatactgggccacatggtgacttggatttttaagggttacacacatgaggcaactacaatccagaggaatttgtgactatcctcagaggccacagccattgatgcctctttcactctgcccattatgtcccactgaacagcttgggtgtcagagccagccattttgctctgtgaggaagtaattttgcagttaaattggacctggttgcattttctagtctctgctttctccaaatatcccagtacttagtttttgctctggttgaaaaaaaaaaaaaaaaaaaaaaaaaaaaaaaaaaaaaacctacactaatggattaaacaaccatttggaaaagacaggattttttcttaaacttttttgaggtaattttggaaaggatcattcaaattaacgtatgtgaagcacctaacataacagacccttggtaaatggtagcaaagaagattgtgatcattaggagctcctgagagagggcaggtgccacaggaagggattggaccagatcaacatttcagtgtcttctgaggattataatttctggaagttgctcccagatgggggacaactttcaacctacggtcaaataaatattgcttagaaactctcaat

SEQ ID NO: 162050 - DNA, 938 bp, Homo sapiens
ttttagcaagattatttgatattttatttaagcatccagaaaaggccaggacacaagaataaagagttagagtcctgctacactttgcaaacaaatagaagagggcatagcatgtccctggaatctccaagccccttgcagattctaactgccaactcctcatcccaacactgagtagcaaggctctttggatgtaagtggcccaaactcaaatgaaattggcttaagcaaaaaagggggcctcattaattcacagactcaaactgcagaaagcgtagagtggagctgagcttggagaagctgggatccaggagctccgtcaccagatactgggccacatggtgacttggatttttaagggttacacacatgaggcaactacaatccagaggaatttgtgactatcctcagaggccacagccattgatgcctctttcactctgcccattatgtcccactgaacagcttgggtgtcagagccagccattttgctctgtgaggaagtaattttgcagttaaattggacctggttgcattttctagtctctgctttctccaaatatcccagtacttagtttttgctctggttgaaaaaaaaaaaaaaaaaaaaaaaaaaaaaaaaaaaaaacctacactaatggattaaacaaccatttggaaaagacaggattttttcttaaacttttttgaggtaattttggaaaggatcattcaaattaacgtatgtgaagcacctaacataacagacccttggtaaatggtagcaaagaagattgtgatcattaggagctcctgagagagggcaggtgccacaggaagggattggaccagatcaacatttcagtgtcttctgaggattataatttctggaagttgctcccagatgggggacaactttcaacctacggtcaaataaatattgcttagaaactctcaat

SEQ ID NO: 162051 - DNA, 663 bp, Homo sapiens
ttgtgaaggttaaatgagaagttgcgttaaaatgctgagtgtagtgcccgggatagactgaatgaccaatacatattagggaccatgaggacaatggctctcattacccacggctgtgagaatccatccctcgactgctgcacaaaatgtcgaatccattttcaggggttgacatctctggagatctagccattggctccaatggcagaaccccctccgctcacttgcactccacctgctcctgcctggggcatcaagcagattctgtttgcaagcacactatagccaaagctcaacttgcttccccaaacagcacattgggtgttgcacctgagtggggagaggcacctcccttcatgtctgtccctgggctaaaggcctcgctgctcttaccctcccttcgtgctgcaccaaaccctttaacagccctgagggagttgttcttccacccaaccatgctggcacccttgccgaaagagcttgaatgattctagaaaaatctgttgacgtatttggcaatatcagggcagctcccctgcttcctttcatagtccctgaaacctcctgaggtgaggacacaccacagtctacccaacagtgatgaagttaagataatttctggattaacaagtggtggttcatctggtaggaggacaaaataag

SEQ ID NO: 162052 - DNA, 275 bp, Homo sapiens
agcatacacaatgcattctacaaatgattttcaaaaaaatctgaatttgttaaatatgaaaaaattggcaatcaaatcatcactccagaaaagcagatgttcaaggacaaaatgagaaacaaagggaactactgctgtaatacatacaataatattcagatgatgtttcttttagcatttactttgtactgttcttttagcacacttttttcattctttcttattttgtttaaattatttgcaagtctactctaccagtttgtaatttccttgaa

SEQ ID NO: 162053 - DNA, 543 bp, Homo sapiens
aatagagccagggtttcaccacgttgaccaggctcgtctcgaactcctgacctcaagtgatccatccgcctcagcctcccaaagttctgggattacagacgtgagtcattgggccttgccaaggtttttgggttttttttggaaaaaaaaaaaaaagtagtacacattcttagtgcagatgggcttggccagtaccacatgatggtgaagcagacgtgagacaacagggagaggcagggacagtgtgggctggagaccctgggcccccctactctatcctagtccattattatagccagatcttccactcggtcagatgatgatggaaatctggattttgtgtgaaatctctcagtttattgttgacaagtcaatttgaattttagaaacgtgatgtaggtcaactcttgagttggatggttctccgagctgccagtttacaactccgattctagcaaaagagacagcctctgccattttcagtacagctacaggaagatccttcagtggactagcttgtgacctgcttatctcctttttgtg

SEQ ID NO: 162054 - DNA, 275 bp, Homo sapiens
ccagtaatcaactcaaaataacccttatgccagaggggcatgtcaggggcagcaaattctggcctgctagtcctgtttggggtggcatgttctgagccccatcactctccttgcagacaggcacctagagttatgcttcatcttatcactctgaccaccccgctatgtattgcttattcattccctgagcactccctgctaaggaaaattattgtggcactcattaaaaccggtaaggaagactcttcccaacaggagtcaggaccatcgcaatg

SEQ ID NO: 162055 - DNA, 460 bp, Homo sapiens
ttttccatgcttttccctctagtacgtagaacttaacatccctttgccttgcatgagggctagattagtagactcacttctaatgagcaggttgagaagcgaaaaacagtaatttcagagcgaaggaacttggcacacattaccttaaccaagagacaagattaacatcaccaagattaaaatataccaataagtgtcccctgtttgatatgatgtgatgagacaggcacatcaactctatggtattgtacccataacctcagtctaatcattacaaatatcagacaaaccagtactcttcaaaattgtccaggtcatgaaaaaggggaaagactgagaaactgtcacaggtcagaggagactaaggagaaaactaaatgcaacatgagaacctggattggctattggaacagaaaaaaagacattcgtggaaaaaacagcgaaccggtacgcgctcgac

SEQ ID NO: 162056 - DNA, 480 bp, Homo sapiens
ttttccatgcttttccctctagtacgtagaacttaacatccctttgccttgcatgagggctagattagtagactcacttctaatgagcaggttgagaagcgaaaaacagtaatttcagagcgaaggaacttggcacacattaccttaaccaagagacaagattaacatcaccaagattaaaatataccaataagtgtcccctgtttgatatgatgtgatgagacaggcacatcaactctatggtattgtacccataacctcagtctaatcattacaaatatcagacaaaccagtactcttcaaaattgtccaggtcatgaaaaaggggaaagactgagaaactgtcacaggtcagaggagactaaggagaaaactaaatgcaacatgagaacctggattggctattggaacagaaaaaaagacattcgtggaaaaaaccggagaaatccaaataaaacctatagtttagtattataccaa

SEQ ID NO: 162057 - DNA, 272 bp, Homo sapiens
tgctctagaggctcccctctccctactgtatcctatatttttttccagtattgttttgggtccagaccatttgagagtgacatatagaagtcatttgttacacgcatgagagtgttagaagtgacaagaaagaggcaataaagagggttttctggatggggtcagtttttaattccttattgagattttacagtagctcaaaagaaaagcctgttgcaggccagttatgatggttcacatctgtagtcttagaactttgggagccaagatgg

SEQ ID NO: 162058 - DNA, 360 bp, Homo sapiens
tattttaaaatcaaaaaggtcttccttgtgctgacccttttttgtcaccctgcccccacctctgtttttcacttctataattttgcctttggagaatattctctaaataggatcatacaatatacaaccttttgaggttggcttttttgcactcatcataatgcccttcaggtctactaaaattgttgaatttatcaatagtttgctctttttgttaaattaccgaatagtattccatggtatgcatgtatcacagtttaattgtttgcctatggaagggcattttggttaatttcagtttttggctattacaagttaagctgctatgaacaattgtgttctgatttttgtgtggacata

SEQ ID NO: 162059 - DNA, 389 bp, Homo sapiens
cgtatctcaggggcgctgtacccgggggatgaagctgaccagcagtgagggaagtcgatgagaagatcaggtaggctgacatcgatggagatgggcaggtcaatgtatgaatgagtttgtacagagtgatgactgcaaagctgaaggccccccggggcagctgggcgatgccctgttctctatgatctcatctcttctcgacgcgcgcacgtctcgtcttcaacgactccccggcgatacagcgtgtatcctggggagccatcccagagaatgtccatagaaatgcctgtgagtccctacaccttaatgactcatttgcaaatcacttattatatattttgacaccttttgatgtcttatccctcccacgttcacattttcagttctcc

SEQ ID NO: 162060 - DNA, 201 bp, Homo sapiens
gcatactatattttctacactttatttgttttatgtaactattttaacaacctgaggacttttacaggctgcataatatgtcttaatatggatgtatcttagtttatttaaacagttactggtgatggacatttccatgtttccagtattttttctcacaaacaatgcagtattatgcctttgtccacattcaccattgat

SEQ ID NO: 162061 - DNA, 576 bp, Homo sapiens
ttccctctagttaagtctagttagtacctatcatcttctgaacttgactcacacattctcacatctgaactttcctcacactattcacataacacccccaatctgaaatgtgcttctttcctctctccacttaactgaatttttaaaaaatttgtaatgttctggcttaagcaccacatcttctgtgaaatctttattaaatattctactctgaagaaaattctcatccttccaaactccattgaggcttctcctgtgtacttaattcattctactttgtgttaactatctttttatgtgtaggtctcatcaccccaaccagactataaattcctttgtcattatttaaatccatgcatggaactcccatagacatcaaccaatcaccaatagacaagccttagaacatgtattacaggaaaaatagagtaacacatacaactaatacagaggaacaacaattgacattaaaatagaaaaaaaaattaacactcttggaatctatagaaaaatgtaaagagaaagaaaattgaagataatacgtcaactagaatatttatttgcctgcttcaacat

SEQ ID NO: 162062 - DNA, 529 bp, Homo sapiens
aatttccccttatactttcctttcttggaagatgtgagagacagccgctccctaggaggggcttcattctctgttcagacaaaaccactttggctagagaagccctcatgtgaggaagtccagaccaagccaggcccctccaggagactttaaagatggaatgaccttgtcacttggtgattgcttgggcagcctgctttgaaaaagagaacttctgacagacttcaggtcgtgtgtttatcctgaggctgggccattccaaactcatgtttcagggtttagaggttgcgtccagccagcccgtgggtggtaatcaaatgcaggtggagaccatctggccgggcctgtccctcccacccagccaagtaagggctggcctgcccaccacagaactggcccagaaagcaccctgcgtggaggcagatggtggacacatgcgtgtgcacgcatgcacacctctaggcgcgtgtgcacggaccctccttagtgaagtggtgctgtgtggatgcatctgatccagtgatttctt

SEQ ID NO: 162063 - DNA, 378 bp, Homo sapiens
taactgtctgggccaggtgtgatggctcattcctgtattcccagtgctttgaggaggccaaggcaagcagatcacttgaggccaggatctgttccctccacttggggggtcaggaggggtaagggtggatttagcctttttcctggttggctgaggctcctttgtcagcggtccctcctttggggccaccgccactgccgtctgctcccgacaggctgaggaaggggttggtctgggcagtgaggactggaggtccgcctgctgctgccactgctgcagctgcagctgctgcggccatgagacttgtgttgttgccaagcgagggagccactagggctccagcgggcagcaggggtggagcagacgctgtaggcagca

SEQ ID NO: 162064 - DNA, 355 bp, Homo sapiens
cgagagaacaaagaaggatagctgcccattagcatttcagggcgggctttttaagttttaaagatgactgcattccggctgggctcagtggctcatgcctgtaatcccaacactttgggaggccaaggagggcggatcatagggtcaggagttcgaaatcagcctgcccaacataatgaaagcccgtctctactaaacaaatacaaaaagtagccgggcgtggtggtgtgcatctgtagtcccagcaacttgggaggctgaggcaggagaatcgcttgactccgggaggcagaggctgcagtgagccgagatcacgctattgcactccagcctgggtaacagagcaagactacgt

SEQ ID NO: 162065 - DNA, 381 bp, Homo sapiens
acagttatagaaggtagcttctgatcagtaagaaagtctaccatatatgttactggaatttttaagcctctttctcttagaattctctcagttcctattacatggtagattaaccgaagaaagtcattctgacttcctgttcttggcagtaggaatcacctttctcacttaaaagcagagaacaagcctaatatattctattattctattctctcttctatccaaccaccagtcataatgtgataataattttcagttttagttgttgccctttctacttacttttgtgccataatgatgccttattaataggctatctcatatctttactaataaaaaagaatgtgaataaaatatattaaatcaaagtttgcttgaaaa

SEQ ID NO: 162066 - DNA, 547 bp, Homo sapiens
ctgttttatttgacaaccatcgagaataagttttcttgtttgtagagataaccaccaaataaatattactaaccaaaaacatactctcgggggtcagctgtcttggtgttgaaacagtgctgagaattaactgtgctgacaggtcctatctctcattggcacttttaaagctgacatcctgttacatggatacaaaagatggtaattttaaaggaaattttgggggcagtgatatgaatagtctttaataagagctggcatggtattgcctgttgtcaaagatgacccaagggtaagagtttattagtgcattttctcctaaactgaaagtgacagggcatgcttaaggcttttttgttgctgtttgttacaaatgaaaatttcattgcagaattttcatgctgaagagtattgatctatgttttcccacagccagaagaataaaaaaaagtatggagaaacagaaattactttgctatgactttagcattgcttcctgatcattttgaataacgataatgtattcagcttatggaggccaatctct

SEQ ID NO: 162067 - DNA, 239 bp, Homo sapiens
taatggacttcctttctttcttatttcctttctttctttctttctttttttcttttttttttttttggtttgtttcttgcatcttatgttatctctatggtaagtttagctaaatgaaaaattcccaggattgtaaactgattgattagaaattatttgatttttctttatttcattttatgttactttttaagacccagtcaaggaacatttccatatgatgtgcgtgtatccataga

SEQ ID NO: 162068 - DNA, 356 bp, Homo sapiens
tactctagagcgatcccctttttacgcaggcagataacgtgactgagaaatccacacaggccagcctgggaggcccctgtgttggccccatggccagctacctctctaattctggttctatggcctatgattctttgtcaggtctgctttgtacccctggtagaaccatgtctgagcatgccagccagcagggggatgctctttgtgtgaggagaagctggtctaatcccggatatcctataaagttgagcagtttgcgaggggagacagaggacacgcctttaggactaatgtgtttttccttggcagaagtccaaggtgaacctctgtctttgccaaaggaacaccgcttcagg

SEQ ID NO: 162069 - DNA, 277 bp, Homo sapiens
attgacgttttcttccatacttgaaactataatttctattgaacgaataaaacacagcccaatttagatgtcagtatctctattaaattattacattgttagccacattaagttgtcatttttattttgttttcttgagaaagagtcaataattaacctcaatgattgaagtataatgtttcaaaaacaacatagagccagggtagttaatattatacttgttatattttgagagcatgactttttcatcatatgtatgggaaatagttgtgcttga

SEQ ID NO: 162070 - DNA, 262 bp, Homo sapiens
tccttctccagttcttcactggtcaatcaagccattgttaccccagcaggcagagctctgagaaactgcatcctgggatctaatgatagcaatagctacaatatataattctcagttcattcgtcccggtgtgggaacttaattccctcacttactcctcccaacaactccttgaggtagggattattttctttttaactttttattttgaaataatttttgcctcccagaaaatctgcagaaactgtagggtttcctaata

SEQ ID NO: 162071 - DNA, 239 bp, Homo sapiens
tatcaggttgttgctatatacatggcattgtaactattaacacctctgaaaatgcttctctacaactttttgaaacttgttgagtttcttgaatcttccaccagacaaaacctaattttctgttctagagagaggcagattctttttcgctggggatgttctcatcctaggatatcagaggcaccatggagattggggataggagtttttcattgtgctattgcttttcatagagaaac

SEQ ID NO: 162072 - DNA, 563 bp, Homo sapiens
tgttctcatcctccattcctcccttatcatccagagagaccctaatttctcccctcagcattccgaaccctcctccattctctctgttcttgtcccgggatcatgccatccctaactgtcaccattctgatcccctactgctcctcgtcctctatatggggcctcctattcctccctttcagcattccaaagcctctatttctcctgtcatcagcctgagggcccctcatttctccctctcagagttctgaacccccatttctctctcaacttcagatgccccgatgtctccctttagcgttctgatctccaccattcctctccgtcctcgtcccaggatcccgacactcctacctgtcagagttcagagctgcattccttcccgtcctcagcctaaatccccccatttctcctcgtcagtattccgacgccgccattcctcccccttatcggcctgagggcccttcattcctccccgtcagcgttctgagccacaattccttcccatcctccgcctgagcgctctccacgtccagccccaaggctgtctcaccagtttggca

SEQ ID NO: 162073 - DNA, 440 bp, Homo sapiens
tgttctcatcctccattcctcccttatcatccagagagaccctaatttctcccctcagcattccgaaccctcctccattctctctgttcttcctgagggcccctcatttctccctctcagagttctgaacccccatttctctctcaacttcagatgccccgatgtctccctttagcgttctgatctccaccattcctctccgtcctcgtcccaggatcccgacactcctacctgtcagagttcagagctgcattccttcccgtcctcagcctaaatccccccatttctcctcgtcagtattccgacgccgccattcctcccccttatcggcctgagggcccttcattcctccccgtcagcgttctgagccacaattccttcccatcctccgcctgagcgctctccacgtccagccccaaggctgtctcaccagtttggca

SEQ ID NO: 162074 - DNA, 577 bp, Homo sapiens
agctgtaggatggagtaggatacctcccttcccccatccctcccccaggaggccccaggggtgcccaggtgttgggagagacaaggggagactctgaagcctgggagccctgccattggggattggatctgtctcccttctctgccacatccccctggcttggggttgctggggtgggctaaggaggcaggcgagacctgcgcctcacagtgtagccaggagggatggcgtccaggctgctctcttgaagctgctggtaaatgaataaccctgcccctgcctccatggctccccggctctcctggccagggactgctgggggtggaggcagatgcaaccccttggtcctctgcccatgcctgcaaatcccatcccagacagacccagagaaacctcctctcggttccctccatctcctttccctaagccccttcattgtctaaggcgacctccttctcccatcctttcctctcactaagcccggccccttcactgagccccctccaatctctaagcccccttccctcttggagcccttccccttgctgagccccaccccttttccagtcccatcctt

SEQ ID NO: 162075 - DNA, 328 bp, Homo sapiens
tgaatgaaaataaagcagtgtgaggaagaaggaaggtaattctttcttataggttgattatagaaggcctttctgatggagtaatgcttgacccagagatctgaatcaaatgagagagtgaactatgcaggtatttggaaagaatactgtcagcaaaaagaagagccaccacaaaggccctcaagcaggatcatgcttcccctgtcaaagaacagcaggggaccagtatgaccagagcagagtgagagggtgagtgggcgaagatagggaagtaggcactggggggcccaaatcacataggccttccaagccatggactctgtggttt

SEQ ID NO: 162076 - DNA, 366 bp, Homo sapiens
tgtgaggcacggggagggaggaagtgatgataggggggactggaaggcccaacgctatggctgggagttggacaggagacaggtgagagtgttgtatagagcagaaagcacaaagaggtgtgtcaaagttaggcaggcaggacaatcagacgtgtcacatgaaagccaagaggacacagcaacagagacagataaaagttagaacacctgggttcaaggctcagcccccacagctcgtttcccatatggactcaagcaagtccttttgtgtgtaataaacctcaatttccttgaaaagaaatacaaaaggatatcggtatctttgcttcttatcatgaagatggtctcaaaatcagaagaaataat

SEQ ID NO: 162077 - DNA, 429 bp, Homo sapiens
tgaacgaatcgagctcggacccctccataatgtgtgcccaactgcaaagaaaacagttcatgctggtgactgagcccagcagggcttgccttctcgatctcaaaggttttgcttttgtggctgtggaggctccaatgcaggtcctctgctgacgacgccatttctcttcctctccctggactcagggcggccagctggagcccttccgcctgcgagtcggggaagtggcgctgtgaacctgctgacaatggggctctaatgagtagagctcatgctgaatgcagccttgctcctgctctgggcagcctcagcccaggagtgctggggaggctggagaagggaagacgggaggggagacaaatgcacagaaggccagtcctgtggcccactgtgtccttgtctgcctttctatgacctcaaaatggaact

SEQ ID NO: 162078 - DNA, 198 bp, Homo sapiens
atgcttaaaatcaagacacacacaaatacagcaaaacacatttaacttatcattatccccttcacatgattctttttctatattccatttttctttgatgatgatattgccatctttatggtcatctcaatgggacatagaaaaagcattataatatagctctctcaatgctacctccaatttaatcagcccatacat

SEQ ID NO: 162079 - DNA, 449 bp, Homo sapiens
ccagccatgcagaactgtgagtcaattaaacctcttttctttataaattacccagtctcaggtatttctttatagcagtgtgaaaatgggactatgatcacgttttctcaaaaactctctggaaggtgccactgcagcacaaggaaacaagattctgcagctcattaaacatccagacaaactacatatcaatttacacttctggcagacaaatccaaatcctgggctggaaaaaaaaggtccatttggggagaaacagggaaatgtcacaaaactaactccccactagattaacagctccatcggaatgacacttttaatctctcttctaatttctcctatatgcgggaaacaggtgttgagggtgaaccaagtctattctcttttactaagccccacatccctctttagaaagcagggttacttattaccctttggtttcagctttg

SEQ ID NO: 162080 - DNA, 811 bp, Homo sapiens
tgatttttgtagttttagtgcagatggggtttcaccatgttggccaggctagtcttgaactctgacctcaagtgatccacccgcctcagcctcccaaagtgctgggattaccggcgtgagccaccgcgcctggcgacttgtgctaacgttaaaccaaaattatggggggtcattgtttgtggactgagtttctgcactaggtcctagcagaccaaagtagttacatatattaagtgccacacagttacatggaaactttacagaccagtttttcctgaaaacagaaaatcccagtctgtctgaatcagaataataaggaagtcccttcttctttaacccttaaaaaaaaagtaacccgatgttaaccaatcagttatttttcattgttttgtttccttgctctcatcttacaaaacccactattctgctgtttctcattgggagctttcattctgttttgtagaatggaggctgccccattcataagttatgaataaacgccagttagatctgtaagtaaatttgttgtaatttttttctgacactaggaattgccaaatgacccttcacacgggaagtactagtttttgtttttaccagtcccagtcccctatgcctttttaaaaaagagatgaagtctcactgttacccaggtaattgcattggctatttacagccacgatcataggaaacgcagcttcaaactactggctcaggggatcttcctgcctcagcctctcgagtatcctgtatcttgctaacagagcatgttgacaaacttggatttgtgcccatcaaataagtttgaact

SEQ ID NO: 162081 - DNA, 422 bp, Homo sapiens
ccagagggtctttgtgagagcagcagagtggctgagggctccgagcagaggactgctgcaggaaggaatctgcaagccagaatttccacgtggtagaaaaagaccagctcagaccagagcaggaggggacagctggaggagagccctgtgctactggttaccaagctgcacttcaagggcaagggccccagagcaggacaggcccaggccctaaggctgagctgagatgcagctgtagtgtgacctcagagaaaagacttgacctctccaatcctgtttccaccttctacaaaaggctgtgatagtccttgaaggagtttgaccacctcagggatgtggcgtgcgtccagtcatgttgggctgggcaggttgatggtcatgttacatctgcaaattctcagagcaggagccatttcctcaag

SEQ ID NO: 162082 - DNA, 314 bp, Homo sapiens
ctgatcctgggatggagacaacaaattcttaaggaatgtgggccttgagatcctgcacgtacctggtcaacaaataaggtcacctactgtgaaaatcaacttctcagagcagcagcactcacccaacctcctaatgaaagaggaatcatatggattaccttcaaagaccccactgctcaactggaacacagccagaatcttacagaaagaaagaacaagctattgataaggaatgcctaagacagcatcggggttagaagctaacacctactcttgtgacctgatgatcagaaagagatgtttatgggctgagg

SEQ ID NO: 162083 - DNA, 244 bp, Homo sapiens
acttgtaatcccagctacttgggagtctgaggcaggagaattgcttgaacccaggagacggaggctgcagcgagctgagatcatgacattgcactccaggctgggcgacacagcgagaaaaatactcagttttttgtttgtttgttttttgaagagaatttgaataggcatcccaaaagagaatattcaaaaggccaaacatttagaaagaaactcaaccttattttgtcttcagagaagtact

SEQ ID NO: 162084 - DNA, 311 bp, Homo sapiens
tatcctcaggtgactcatcaacgactcggaagatagacatcactaggctgatgacacccaattcaactttcgcatgtagctctcttgagtttatcacctcgacttcacaggaagggctggtcacgtgaggggagactttgggtaggaggaagagagtgggcagaagaaggaaaaatcagatctgcctgctgccagccttcaccgttcagaagaaacacttaactcttttcagcaaccgcaacaaataattatgttgggctctggccatctggccctgtttgacctgaatcggaagacaggtcttattttag

SEQ ID NO: 162085 - DNA, 151 bp, Homo sapiens
aaacagagataacaatactgatcatcttcactttgcacagtagcacaggactgtaaaaatgaccatacaagctgaaacagtgcaacctgatcttaatcagagattaatcacagagaattatgattctcccgtaacctttaaaaatttttgg

SEQ ID NO: 162086 - DNA, 550 bp, Homo sapiens
cttgcaggagttgggacttcattctaactgcaatgagaattcaatagagaattctccagcaagggagtgacacaatagggacatctcttcaatggctgagtaccagagtagaggcagcagagctatgccaacaggctatcacagtaatccagacgagaggtgatgaaggctcagcctgggacacagtgagactccagaagtggtggattcaggacataatttggtgatagaccccataaactttttttaaaggttttggatagatagcttttatcatttatttattattgaagatatgtacgacacaataaataagcttgcttcagacgtatatatagaactctgtatccaataatgagtgaatccacattcttcacaaggacacacgaaacatttctgtgaaatgcctgtggactagtccacaaagcaagtctctgtaaatttcaaaaatgtatacccttgaaaatctctgaagtcctggagatttaagtctgcaactatcttagtcttactaccaagaatagcccctaaggaaaaaaaaaaacccttt

SEQ ID NO: 162087 - DNA, 892 bp, Homo sapiens
cagggtctgcagctcctcatacttgatctggtgcatgctgtcagccttggcctggctgcggttggcgatcttctcatactgggcctcgacctcagcaatgatgccgtccgtgtccagggagcagctgttatgcgtggacagccccacagatgtgtccaagatctgggactggagctcccagatctcctcttcatacagctgcctgaggaagctgatcttgtaagcttgccatccaggtaagactccatccagctccaccctattcatgtatgcctcatccacatccttcttgatgaggacaattttattctccatctctgtatgcttactgatctcatcctcgtacttgttcttgaagtcctccaccagcccctgcatgttgccaagatctgcctccagtttcagcttctcctggcctagagtgtccagctgccacggaggtttgttgatgtagctcttggacatgttgtccatgctgctccaagctgtcttctgctgccgcaggaggctctacttggtctccagcatcttgttctgctgcttcaggaaccgcgatgaagggggcaaacttgttgagggtcttaatctgctccttctcctgagtgcacacggcctggatgttggggtccacctccagcttaagggggctcagcaggctctggttgaccatgatggctgtgatgcctcctataaccaccagctcggccatagcctccacccagacccatgctggcacccaggacaccctggacactgctgctgctgcccacttgggagaagctcgaggaactgacgcaggcaccaggcctactcatgttggagtggctgctgaaggtccggggccagaggtggacaccctgtagaacttctgggtcaccctgatggacatggt

SEQ ID NO: 162088 - DNA, 623 bp, Homo sapiens
tgcactccagcctgggcaacagagcgagactccatctcaaaaacaaacaaacaaacaaaaaaaatgtaacgtgcaaacagatttcatctattccaatgcttgtacatagacattattagcatttcatcaggatatttccgttatttaagattgtcatggaattgcagcatcaccagccttgggctccaattccagcaacataccacacaaatacataagaatattagagagcactggtcagcaagtcgggttatttatccaacacctactacataatggggcacagttctaaatgttagggaaaaaggaaaaatatatacatattctaatgggaaaagacatgtaaataatttacaaagtcaaaaaataattacaagctcatccaagcaaaatctattttatcattcttagaatactgtcatgggggcaactgggtggtaaggtgctcaatgtcaccctacctgaaaagaaagcatcagtcataaatgggctgctttcaacccctacgaaagcagaacagcagaaggcagccttaaaatgataatggccatggcttgactgggcaccgtggctcacgcctgtaatcccagtactttgggaggctgtggcgggcaaatcattgg

SEQ ID NO: 162089 - DNA, 471 bp, Homo sapiens
gtagtagtgtgttggtataacatgacctgagcttgctgaccagtgctctccactattctccatgtatatgtgtggtatgtagctggaattgtaacccagcgctggtcatgctgtcagtgtccatgatcactctcaccttaccgataatggggcactgatctgcatgttaatgtgcaaatatgcaagctttgtacttattcaaatgggaaagcacgtgtcaattatttacagaggctagataatgatttacgagctcatcccaactacgacgagttacctgatccctgagtatgatctgtcatggctgtagcttgtttctgaagtgaaacaatgtcaccctacctgaacagaaaagcatcagtcataaatgggctgctttcaacccctacgaaagcagaacagcagaaggcagccttaaaatgataatggccatggcttgacgggcactgtggctcacgtctgtaatcccag

SEQ ID NO: 162090 - DNA, 593 bp, Homo sapiens
cactgtggctcacgtctgtaatcccagcactttgggaggctgagacaggcggatcacgaggtcaggagatagagaccatcctggctaacacggtgaaaccccgtctctactaaaaatacaaaaaaattagccgggtgtggtggcaggcgcctgtagtcccagctactcggaggctgagtcaggagaatggcgtgaacccaggaggtggagcttgcaatgagccgagatcgtgccactgcactccagcctgggcaacagagcgagactccatctcaaaaacaaacaaacaaacaaaaaaaatgtaacgtgcaaacagatttcatctattccaatgcttgtacatagacattattagcatttcatcaggatatttccgttatttaagattgtcatggaattgcagcatcaccagccttgggctccaattccagcaacataccacacaaatacataaacacacctgcctgcccttcttcatggtctttaaatcaacatgtctatttccaaacaacccctaggtaggtaagggaagaaagcatcatcacctactaatttaccttaatcacagggcagtaagtagcacagaattgtaa

SEQ ID NO: 162091 - DNA, 324 bp, Homo sapiens
gaggacatttgccgatgtctggagacattactgcgtttgtcacaactgagggagaaagcactactggcatttagtgagtagaggctagggatgctgctggacaacctgcagtgccccagacagccgccacagtgaagaattatctagccccaaatgtcaggaatgcagaggccaagaaactcttctagatctcactcccagttcacaagaaacatgaaggacacagggacgtgataaacgacatcaccagaaagtcctcagtgtagtccatgctgtgagagattctgcaagacagatgggcctgatatcttcaacagatacatg

SEQ ID NO: 162092 - DNA, 554 bp, Homo sapiens
tgacaccatcgagaaatatacagtcatttgtcagaccagtgattttacactgtcacatgctataactgccaagaaacacatacacacacaggaagtacttcatagtgaggtatgtaaaaatatcagaaggggtataattgagtgactatggctaatcacacacattttccagcatgcagcatggcatttgaatttttctagtatatcagcgttatgttaaatatatcaagagtaaaggaagtagtagaatattagaggagaaacaaagggagtgaaaaaaatggaaaaaaaaaagagatagatttgaaaatgtatgccgggcatgtatatgtgtgtctatggtttttaaaagtttctactataaacagcacttgtgagcagggcagtgtctggtgccaactgccctgggtatatatttgcccttgtttttcattgacaagatgcagacctatgtagatgctatcaatgctactagtaatagaagattaatatgcaatccaaatgatatattttgtttatactattaaaaatatttgatttttagactgaaaatg

SEQ ID NO: 162093 - DNA, 385 bp, Homo sapiens
aacacagccagactcattcctaaacatggactagtttatgaattcatgctttacctatggctgctttctaaattgagtacttgggacagagactctgtgacccaaactatttatgatcttgccatttacagaaaaagtgcagtgacctcattagagaacaatgcagtcagttaatatctattaatatataaaatttgaaaacacataaaaaataccaagaaaagccgcacatctgtgattctaatgtgcaatgaggtgccgtgaggcattgcagcaaactcagaggcaccgtggggtattttaaatttttgacggaaacgcggtaatacaggacatccgttggacactgcaaatactactcatgtgaggtttttcactgcttcaa

SEQ ID NO: 162094 - DNA, 457 bp, Homo sapiens
tatactgggtcaaataaaatgtattactaaaattaattcatctgttccttttcattttttcaaaatggctattagaaaatttaaaattacatatgtggttcacactgtatttccactggccagtgctgcacttgaggttacttgcaggaaaggctgaaatatcacaatctacaaatagctaatctccattttatttctttgcactatctttctaagtacagctcatatttcatctccaagaagggttcttcaactattcctgttaacctgtatctctctttggtagaactcgtattgcctttaaaatatacacttcagtgcctaattacataagtatattttatttttccctaatttttcaagttttgggtttcatcaactagacagtaaaaatcatgaaggcaaacagacatccactagccttttgtttgaataatgataagtggtatagtgctaa

SEQ ID NO: 162095 - DNA, 324 bp, Homo sapiens
agattttttctcttcagttttctcctttcagtggagagtaaattcagttgcaaatgtattatataaaccaccctttacagttcctgtagcagccttttaaactcaaaatagcttccctttcactcgcaaactcattgacaagtgactgccccatcttacttagactaggctcaactgtttcttccttgcattattccaaagtgctgttatttctccctaacaggtccccccagtacatgccccacctccaatccatgaaaaatgctcatgttgtttggtttcattttggctttgtctttatagcacatagttcagggggatcct

SEQ ID NO: 162096 - DNA, 215 bp, Homo sapiens
tggtgctgggcgagtctgctgggcctattcacttggcagttagcctacaagtaccaaggtgtcctaataacacatcatagattgcagaccctaacagctatatatccaacagccatttttcttactgtcagaggcctgatttgatttgggtgttcactgtcccatgggttcaggaaatgtggcacttccctagatccagaggataaatgtgaata

SEQ ID NO: 162097 - DNA, 409 bp, Homo sapiens
atgtgtgtagatgcatgtggggcttaggggtagattaagagagatgaaggtgtaggctaaaacatagccaagccatgtcttggagatgtactggtgctgtgaagagaacactaaactgacaaacaggcgacatggccttcagcatgtcacctaggctctttgtacctcaaatttttccgctttaaaattaaagagttgtacaaattaacctctaagttcctcctacctataaagttctatgaccttaagaaaacaaaagggcttttcagttgcccacagagtctgaaaaatcaacatgctttattttgcaaaggttatcgataacacgtagtcttacagcatctaaagaagctactttttaagatacaaaaaatctgtcataacagggaagctgtccacaggaggtcta

SEQ ID NO: 162098 - DNA, 520 bp, Homo sapiens
catagaaaaggagaggaggcaaacgcagcccaaactggggggtttctcttcaaagccagctggtctggctttattctacaggaatttttttacctgtcagggtttggacaacaaagccctcagcaggtgctgacgggtacaacttcctggagaagcagaaaggcactgagaaaacatcttgctctgttgctcaggctggagcgcaatggtgccatcgtagcttactgtaaccttgaacgtctgtgctcaagcaatcttcctgcctcagcctcctgagtagctgggactacagagacagggtcttgttctattgtccaagctggtcttgaattcctgacctcaagcaatcctcctgcctctgcctcccaaagcactgggattattacaggtatgagccaccgcactgggccgtcatgcttactcttcggagagagaagtgaagtatctgaacgcctcagcctgagaatgggtcatttgcaaagtaaataaaggcaatgccaaacgtcagtacaacaagcaa

SEQ ID NO: 162099 - DNA, 743 bp, Homo sapiens
catagaaaaggagaggaggcaaacgcagcccaaactggggggtttctcttcaaagccagctggtctggctttattctacaggaatttttttacctgtcagggtttggacaacaaagccctcagcaggtgctgacgggtacaacttcctggagaagcagaaaggcactgagaaaacatcttgctctgttgctcaggctggagcgcaatggtgccatcgtagcttactgtaaccttgaacgtctgtgctcaagcaatcttcctgcctcagcctcctgagtagctgggactacaggtatgcatcacaatgcccagcgaattaaaaacaacctttttttttttttttttaaaagatggggtctcactctgtcacctaaattggagagcagtggcactgtcatagctcactgtggccttgaagttctgggctgaagcaatccttctgcctcagcttcctgagtggctgggactacaggcatgaaccactacattcggctaattttaatttttttttgtagagacagggtcttgttctattgtccaagctggtcttgaattcctgacctcaagcaatcctcctgcctctgcctcccaaagcactgggattattacaggtatgagccaccgcactgggccgtcatgcttactcttcggagagagaagtgaagtatctgaacgcctcagcctgagaatgggtcatttgcaaagtaaataaaggcaatgccaaacgtcagtacaacaagcaa

SEQ ID NO: 162100 - DNA, 1102 bp, Homo sapiens
atcccttttcccttgctgtccatatctacagagttattttccttaaaggaactttcagaatatgttacaagtctgtgtccatgaaaatactgggcagccaggtattgatgaccacacatttcttttagtcatattttcttttgagctcataaactatttcggagttatgggaagaaagctttaaagctttcagcttctcattctcaaagaaaatgaaatcaaagaacaaaaatgaaatttaccaaaggtcaccaaggtggtgacctttatgtagatacagacttgggtctgtttcccaacttaatatccagggattttttttctaattagactttaagcatgttgactagtaaactataagtaacaatgatcacgtggaagttgtttaatgagttgtttccagggaaggcactagtggctcattttttcagtctacccgaggtccctgtacttgaatgtttgagaagcactttgtttcttttaaagatttattttacttggattttaatttttatctttatttttagagaaaacatcttgctctgttgctcaggctggagcgcaatggtgccatcgtagcttactgtaaccttgaacgtctgtgctcaagcaatcttcctgcctcagcctcctgagtagctgggactacaggtatgcatcacaatgcccagcgaattaaaaacaacctttttttttttttttttaaaagatggggtctcactctgtcacctaaattggagagcagtggcactgtcatagctcactgtggccttgaagttctgggctgaagcaatccttctgcctcagcttcctgagtggctgggactacaggcatgaaccactacattcggctaattttaatttttttttgtagagacagggtcttgttctattgtccaagctggtcttgaattcctgacctcaagcaatcctcctgcctctgcctcccaaagcactgggattattacaggtatgagccaccgcactgggccgtcatgcttactcttcggagagagaagtgaagtatctgaacgcctcagcctgagaatgggtcatttgcaaagtaaataaaggcaatgccaaacgtcagtacaacaagcaa

SEQ ID NO: 162101 - DNA, 266 bp, Homo sapiens
agaaatagacaaaaagaaagaaaaagaagaaaaggaaaggaagaaagaaagggaaagaggtaattgaactcaggaaagaaatatgaagaaaaaggcaaaattatctcagcaatgaagaatgaattataaaagtgttcaaggaagagtagactcaatgacataaagaaaaatgaaaagggtgagagaaataattagaaaaagataagaaaaaagaataatattcatattattggattacgtgaggaagaaaaatacaaaacaaacaa

SEQ ID NO: 162102 - DNA, 158 bp, Homo sapiens
atacacagctgtcacttggcccaacccagaatcaggaggagattctgatactgaagacttgatattggtcttaaatatccaaatgcaaactaaaaagactgaactcagcaatgtgaacactgaacaagtcttgaaataactgggcatagataccaaaa

SEQ ID NO: 162103 - DNA, 181 bp, Homo sapiens
tatggtgccttctggcaatctacttgaagatatgatcttcattttggttgaaatctaataccccatgtgaagaacaaggacagtacaactcaaaattctggaccactgcatatggtatcttttctataacccatattttaaatacgtgtattaatttataacacaaacatatggatgtttc

SEQ ID NO: 162104 - DNA, 232 bp, Homo sapiens
caggaagatacagtttgcctaatcagactggaaagttctacgagacaatttcttcaacacataaatagcctgggaaaaattttttaaaaatagaaactgttaaaagattaaaagaggcataacagtcaaattttgtgtgtgaaccttatttggattctgattcaaatcatctttaaaaagcatttttgggcaagtgggaagagttgagctgcattggatattacatattaag

SEQ ID NO: 162105 - DNA, 368 bp, Homo sapiens
ggagggagggttgtgtacagaagagaccaagcagtgttttatcaaaaactggcccagggatgggcatggtggctcatgcctgtaatcccagcactttgggaggcaaaggcaggaagatggtttgaggactggagttcaagaccagcctgggcaacacagggagatcttgtcttataaaaaaaaacaaaaaaacactagctgggtgtggtggcacaggcctgtggtcccagctacttgggaggtgggaggatggcttgaacctgggagatcgaggttgcagtgcaccaagatcgtgccactggtactccagcctgggcgacaagagcgaaactctgtttcggggaaaaaaaaatgtgggtacactgttg

SEQ ID NO: 162106 - DNA, 407 bp, Homo sapiens
atgccacctgccctgctaattcaaaccaaaaaacaaagctgtggtatggaggaaatgaagtccctttttaagtatacattagataagagaactgacaagtaaatacggggtatataaggtacagactccttcttggtaaggcagagaagtcacaaacattgaatggagaactcaggaagacttctttgaggatttcaggtagttctgaatgaaatacagcatggaactggaagaagacatggaagcaagaagaacgctgaagttgggttgagaacaagctggctgcctcagctagaaaaaaagataatggcagaagtgacttggacaagggaataactggcaggctgcccaagggagcacatgaaagaaatcagatctgctgcaacaagctaccacaggcaatgggg

SEQ ID NO: 162107 - DNA, 355 bp, Homo sapiens
agatgtagctctttcctcctgaccctgagaggaagaaagctgagctggaagtggaaggagacaggacaaggttggaggaggcattggaatctgattttactagctgaagggtagccctgtcacagagctgactgatagagcttattccagggcatccttaccattcatcattgtctcactggctcctttccaaaaacttcctccattaagagggtcagagcctcggcctccttgccttctagtgacaatttcctttattttaggggattttaaattagggtgcttaaggacttgaagaacatgaatgggaagagaatataactctaattaagtcacatgtgtcattttcctttgg

SEQ ID NO: 162108 - DNA, 454 bp, Homo sapiens
cagctgccatatgactgactggaaccttacaaaaaatacaaagaactctgactatttgagtaatccagaaagaggttgagactaaaacaaaaatgtgatttatttggtggtaagatgattagagtgtgggttgggatgggcaatgttgagactctttatgaggaatataaaattggatgcagtgctgcagttcaggggcatatcaagaagagtaaatgagatggttcacagatgtcaaaagtctgcttgccagtggcaagcaggttttttattttttattattttttttaatttacaaaatggtaaaggattcaaattttaggaaatgaaataatgtagaacattattcatacagaggatgattcatcgttctgagggccagattaagtaatgccagtatgacattgacattctgcaaggggaaagggaatagtaaagaataaagaagagggaa

SEQ ID NO: 162109 - DNA, 919 bp, Homo sapiens
taaagaaagaagagtgagggcaaaaggcgaagaatgccagctgagctaacacttcctccctcgcccacctttaagcttttccaaaaaccagagccctcacccaacagcttcaggttatgatttttgttgttgctgggatttagtactgtggccgcccctttttagaaaggaagtgagtaaatgtagttctgttacttgggaacattgctcccactagcaaaaatcaagatactgttagaaggaagaaagggagaatgaatgttggaaaggtaaaaagcagtatcttctccaggtggtcaagaggcatttagctagtaaacaggcttccaatggaactggccctagctaatccctagtgcagtggttcttatgtgtcctcccctgctccagaacagctgcatcacctgagaacttaggggaaatgaaattctcggggtccactgtaggccagctgcttagcaactcggggatttgacccaggaatctgtgctttaacaagccctccaggtgcttctgatgcccatgaaatttgagaactaccgtcctagtgcagcggttcccaatcaatggcatgcattaaaatcacctatagagttttttttaactatgtaagcctagagccctattatagaagattctggttaaggaggtctggtatgagctccttatatctatagagtagagccccgttattcatggtttcactttccacagcttcagttacccatggtcaaccatggcccaaaaatataaaatggaaaattccagaaataaacaatttataagttttaaattgtatggtaccttaaagagcagggttgcaaaaattaaaaaataaaaagttttaaattgtatgccgttctgagtagtatgaggaaatattacagtatattgttataattatgctattttattgtta

SEQ ID NO: 162110 - DNA, 365 bp, Homo sapiens
ttcccgggttcacatcattctcctgcctcagcctcccgagtagctgggactacaggctcccgccaccacgcccagctaattttttgtgtttttagtagagacagggtttcaccatgttagccaggatggtcttgagctcctgacctcatgttccgcccgcctgggcctcccaaagtgctgggattacaggcgtgagtctggctgattcttgagccatacatgtgttggacaaaatcaaagcagcacagttaatggtaacagagctggactgagatttgatctgttgcctcctgcacacaagacagggtttgcagtttaacaaaactaattgcttgttaaaataaacattaacactgttcaaagga

SEQ ID NO: 162111 - DNA, 545 bp, Homo sapiens
caagaggaaaagagttccggagattggccgtacaaaaaagtggatgtacttaacactcctgaatggtacacttagaaatgattaagatggcaaattttgttatgtgtattttataataatttttacaggttattttggggaacagtcagttcttaggtgccttgtcacaggctgcaatgagaagtgcacagctctgtcggtgacgtaagttttttgggcacaaacatgaaactgaatgtcatggagccttttgatctaacgtccagtttccaggaaagtcggggttagaggaacacgtgccatgacatcatgagaaagccaccagagtcaggagcaggacagtctgcagtacacacagttgctgattttgtcaacagacactgacatgaaacagaaagctgtggtgaggggatgggggcagtgatgccgcaggttagaagagtcagaagaccatcgccatcccgtgcaaatgcagaccagatgtgacagatcctggatcccaaaagccagctgtcttatctgggggacaatggggacattttaga

SEQ ID NO: 162112 - DNA, 401 bp, Homo sapiens
aatctaggtcctggttacatgagtgtgtttaatttgtgaaaatgtatatagctgtacagttatgtttacttttctgtatatatgttatacttaaataacaagttaaagaaaaataatagcaacttaaagcaaaatataactatagggagttctagcttctcatggaagatttatggtagtccacatttttagttttcagtcaaatgtaacacattttgaacactcattataggcaataattggaaagaatttaggtaattcatttcatctgctcctcaaatgaaaataatcagcttgggtgagcactcatgactataaaggtagttatacacatgtgaaaatgcagaaaagtagaaagttaaaatcaccctgaagttcgaccacttagagataaccaccac

SEQ ID NO: 162113 - DNA, 1484 bp, Homo sapiens
cctggagctttctgcacaccccccgaccgctcccgcccaagcttcctaaaaaagaaaggtgcaaagtttggtccaggatagaaaaatgactgatcaaaggcaggcgatacttcctgttgccgggacgctatatataacgtgatgagcgcacgggctgcggagacgcaccggagcgctcgcccagccgccgcctccaagcccctgaggtttccggggaccacaatgaacaacttgctgtgctgcgcgctcgtgtttctggacatctccattaagtggaccacccaggaaacgtttcctccaaagtaccttcattatgacgaagaaacctctcatcagctgttgtgtgacaaatgtcctcctggtacctacctaaaacaacactgtacagcaaagtggaagaccgtgtgcgccccttgccctgaccactactacacagacagctggcacaccagtgacgagtgtctatactgcagccccgtgtgcaaggagctgcagtacgtcaagcaggagtgcaatcgcacccacaaccgcgtgtgcgaatgcaaggaagggcgctaccttgagatagagttctgcttgaaacataggagctgccctcctggatttggagtggtgcaagctggaaccccagagcgaaatacagtttgcaaaagatgtccagatgggttcttctcaaatgagacgtcatctaaagcaccctgtagaaaacacacaaattgcagtgtctttggtctcctgctaactcagaaaggaaatgcaacacacgacaacatatgttccggaaacagtgaatcaactcaaaaatgtggaatagatgttaccctgtgtgaggaggcattcttcaggtttgctgttcctacaaagtttacgcctaactggcttagtgtcttggtagacaatttgcctggcaccaaagtaaacgcagagagtgtagagaggataaaacggcaacacagctcacaagaacagactttccagctgctgaagttatggaaacatcaaaacaaagaccaagatatagtcaagaagatcatccaagatattgacctctgtgaaaacagcgtgcagcggcacattggacatgctaacctcaccttcgagcagcttcgtagcttgatggaaagcttaccgggaaagaaagtgggagcagaagacattgaaaaaacaataaaggcatgcaaacccagtgaccagatcctgaagctgctcagtttgtggcgaataaaaaatggcgaccaagacaccttgaagggcctaatgcacgcactaaagcactcaaagacgtaccactttcccaaaactgtcactcagagtctaaagaagaccatcaggttccttcacagcttcacaatgtacaaattgtatcagaagttatttttagaaatgataggtaaccaggtccaatcagtaaaaataagctgcttataactggaaatggccattgagctgtttcctcacaattggcgagatcccatggatgataa

SEQ ID NO: 162114 - DNA, 1430 bp, Homo sapiens
cctggagctttctgcacaccccccgaccgctcccgcccaagcttcctaaaaaagaaaggtgcaaagtttggtccaggatagaaaaatgactgatcaaaggcaggcgatacttcctgttgccgggacgctatatataacgtgatgagcgcacgggctgcggagacgcaccggagcgctcgcccagccgccgcctccaagcccctgaggtttccggggaccacaatgaacaacttgctgtgctgcgcgctcgtgtttctggacatctccattaagtggaccacccaggaaacgtttcctccaaagtaccttcattatgacgaagaaacctctcatcagctgttgtgtgacaaatgtcctcctggtacctaccactactacacagacagctggcacaccagtgacgagtgtctatactgcagccccgtgtgcaaggagctgcagtacgtcaagcaggagtgcaatcgcacccacaaccgcgtgtgcgaatgcaaggaagggcgctaccttgagatagagttctgcttgaaacataggagctgccctcctggatttggagtggtgcaagctggaaccccagagcgaaatacagtttgcaaaagatgtccagatgggttcttctcaaatgagacgtcatctaaagcaccctgtagaaaacacacaaattgcagtgtctttggtctcctgctaactcagaaaggaaatgcaacacacgacaacatatgttccggaaacagtgaatcaactcaaaaatgtggaatagatgttaccctgtgtgaggaggcattcttcaggtttgctgttcctacaaagtttacgcctaactggcttagtgtcttggtagacaatttgcctggcaccaaagtaaacgcagagagtgtagagaggataaaacggcaacacagctcacaagaacagactttccagctgctgaagttatggaaacatcaaaacaaagaccaagatatagtcaagaagatcatccaagatattgacctctgtgaaaacagcgtgcagcggcacattggacatgctaacctcaccttcgagcagcttcgtagcttgatggaaagcttaccgggaaagaaagtgggagcagaagacattgaaaaaacaataaaggcatgcaaacccagtgaccagatcctgaagctgctcagtttgtggcgaataaaaaatggcgaccaagacaccttgaagggcctaatgcacgcactaaagcactcaaagacgtaccactttcccaaaactgtcactcagagtctaaagaagaccatcaggttccttcacagcttcacaatgtacaaattgtatcagaagttatttttagaaatgataggtaaccaggtccaatcagtaaaaataagctgcttataactggaaatggccattgagctgtttcctcacaattggcgagatcccatggatgataa

SEQ ID NO: 162115 - DNA, 388 bp, Homo sapiens
ccatggcttctctgcctatcccttatgtacttttctctttcatatttctgtctcttcatttctgtatgatacatactaagttacttctttagaaatcctaaatatttctctttttagctatggcttgcctatgtttaacctgtttgatgtgtttctgcttcaataatgatattttttcattggacaagttctgtttttcttcttctccaaacttacctgttctcttttcatactattctgttcttatcttatggtttccattcctttatctctgtgaacatgaggtctggaggcagggaacctaaggctgattcgcactgacttcctagaactaaatcaaaaggaaaaccccagccgggcacagtggctcacacctgtaatcccggca

SEQ ID NO: 162116 - DNA, 522 bp, Homo sapiens
catgcaggagctgaggcaagcggcggttcccagctctcagtgcaaaagacatttgtcatctgagaggctggactcagttattataattttcaattttgtcaataaaaaccgaatggaaatttgttttcttacttgtagaaacctcctcacaagacctcccatcttacattccagggagaattagcagggtattccgccaagacataggttagactgcggttctgacctgcaggcctcgatgccctgcgccagggcaccagggcatgggcaaagccctccccctacacaaagcaagggtgttatgtctacaaccgaacggggacactaagagcccccaacatgcacggttttcattccaaagaaaaccaccagttctgagtacaacttccacctggctctattaactgagtacacgtttccccaacacagaaatcctacaaactcccgtgaatgctgtggtgaaaagcaggagctgccagggcaagatggatcgcacctgtaatcccagcacttcagaaggct

SEQ ID NO: 162117 - DNA, 190 bp, Homo sapiens
aagtgtagcttcagtggcctattgtatcctaggaaaacaccttgatcatgtgaaagctgaaagtaccacagttttctgctttctttccagtgatttcaatagtctaatggtatgcttctctgtcccaagcataatcagcacagtatctcaagacacatcaggaaggagcaagccatgtatataacctact

SEQ ID NO: 162118 - DNA, 715 bp, Homo sapiens
aaggaagactggaaccttgggctccttggaggagccggcagggggcgcgagtgtgagcgctggcagccgggcagtcggagtggctggtgttgcgggggaggcgggcccacccccagagagggaaggcagtggttccactaagcccgggacccctggaaatagccctagctcccagcggctgccatcgaagagttccctcgatcccgctgtgaaccctgtccccaaacccaagcgcacctttgaatacgaggctgacaagaaccccaagagtaagcccagtaatggtctacctccttcacccacacctgctgctccacctcccttgccctccaccccagccccgccagtcacccggagacccaagaaggacatgcgtggtcaccgcaagtcccagagcagaaaatcctttgagtttgaggatgcatccagtctccagtccctgtacccctcttctcccactgagaatggtactgagaaccaacccaagtttggatccaaaagcactttagaagaaaatgcctatgaagatattgtgggagatctgcccaaggagaatccatatgaggatgtggacttaaagagccgaagagcaggacgaaaatcccagcaactgtctgagaactccttggactctttgcacaggatgtggagtcctcaggacaggaagtacaacagcccgcccacacaggtaactcagccctgacatcggcctgta

SEQ ID NO: 162119 - DNA, 690 bp, Homo sapiens
taatgagagtctttccaagaagtattgccaaagaataaatctcatcagttggcagattttaatttgggggtaataagtgaagattgtctgagtgttttggaacaaaaaagaacttttagactattgtgttctaggaatctttcactcaatttcccccagttacgtgcctagcgtaattatcctgaacaattgagaggagagtcagataagataaccttttacgaggctgacaagaaccccaagagtaagcccagtaatggtctacctccttcacccacacctgctgctccacctcccttgccctccaccccagccccgccagtcacccggagacccaagaaggacatgcgtggtcaccgcaagtcccagagcagaaaatcctttgagtttgaggatgcatccagtctccagtccctgtacccctcttctcccactgagaatggtactgagaaccaacccaagtttggatccaaaagcactttagaagaaaatgcctatgaagatattgtgggagatctgcccaaggagaatccatatgaggatgtggacttaaagagccgaagagcaggacgaaaatcccagcaactgtctgagaactccttggactctttgcacaggatgtggagtcctcaggacaggaagtacaacagcccgcccacacaggtaactcagccctgacatcggcctgta

SEQ ID NO: 162120 - DNA, 298 bp, Homo sapiens
gtgaacaacacaaaaccctgccctaaaagacttgttgaacggcatcgtaggtgagaagggggcctggcgaagccctgctccctacggttctgtgagttcctccatgcccaccctccaaagagatctgcccaaggagaatccatatgaggatgtggacttaaagagccgaagagcaggacgaaaatcccagcaactgtctgagaactccttggactctttgcacaggatgtggagtcctcaggacaggaagtacaacagcccgcccacacaggtaactcagccctgacatcggcctgta

SEQ ID NO: 162121 - DNA, 406 bp, Homo sapiens
tgcctcagcctcccacagtgctgggattagacgtgagccatcgtgcccggcctccccttgtaatttcttggcaaagtcgggttttctgccccgtagtgtctctgaacttttggatctgcccagtggtgtcccctgggggtgcctggcctgctccccagcccctggtgtcccctgtgaaacggtagtaaagcgtagacgccatgctgtcaggtgagccgactgctgccggcggctcttccaatgtaaacgctgcacagctgagccgtcaaagccttttcatcatacggaaacttccatcagatgctgctgacccacaggcacgatgggattcaagtttgggtttttggtggtgctggaatcccgtggggaggccgtggctggtgtgacctcagcagccagacccacc

SEQ ID NO: 162122 - DNA, 412 bp, Homo sapiens
tgtcaaagatcatttcagattaagtataacaaatttcacattcatttgtgagcatatatatatgtatatgagaagcatgtaagaaattcgtatatctcacatactttttaaaaaagttttctggtattggagtgtcttcgccatccactgccatgcacaagaattatatttaagttttgagcattagacttttgcacttattttcaggaaaagtcgtggaggaggatagagtagttctgtacatacatagctgtatccaaaagtatttaagatttgatgttatttaattgtaaacattgttaaaacaaatctttcatatgcattaacgttctaggttatactttctgctactggatgcaaggtatttttgtttcatttttagaattaggtggcattgaaaacagattgcaga

SEQ ID NO: 162123 - DNA, 882 bp, Homo sapiens
cctaggatctgaagaaatcttgcaagctgaagcctgacagtttggtgcaaacctccgagggctcaccacttcagtagaacatgcgtaaggaagagttctctctagacaaattgtatctggacaaataagaaggtccagtgatctgcttaggccatatatatgcttttataagagggaaccaagacaaggatgatgtcaccaacagcatcgacatccaagctttggagcttgaagaaactcaaagagtgatgctcgataactgagagagtttcctccacaaacgtcttggactcattggactcattaaccttcagattcaactcccagctctttccttcaataccagttttcatattaatgcttcccttttttcattttaggcattcccctttcaagaagccgatctccagaccctaaaacaactgatctttcccattgactctccacagatggttcaggtggttttacaggaacaacactaacaaagtcctctggagaccctttcttggatcccgctccaccttctcaggaggtttatgatcacctcggagttgttcagcaatgagacacttgccttgaacaaaaaggtgactgacaatgttgaacttttcctgagtcttgtgctccctgaaagttgcaacaattatgaaatcccccaccccactcctttgtgtcccaggaggctaactacagaggaccaccctgcccttgcatattccaagacagactcatctccatccttgcgcgtgactcccgtaggactcgcagatggctccgttagtgacctgcttgcataaaaccctcggtccccttccttttctttgaggaagttctcattaacgatcattctccttataatagcctgaataaaatcatatattt

SEQ ID NO: 162124 - DNA, 425 bp, Homo sapiens
cctaggatctgaagaaatcttgcaagctgaagcctgacagtttggtgcaaacctccgagggctcaccacttcagtagaacatgcatggttcaggtggttttacaggaacaacactaacaaagtcctctggagaccctttcttggatcccgctccaccttctcaggaggtttatgatcacctcggagttgttcagcaatgagacacttgccttgaacaaaaaggaggctaactacagaggaccaccctgcccttgcatattccaagacagactcatctccatccttgcgcgtgactcccgtaggactcgcagatggctccgttagtgacctgcttgcataaaaccctcggtccccttccttttctttgaggaagttctcattaacgatcattctccttataatagcctgaataaaatcatatattt

SEQ ID NO: 162125 - DNA, 482 bp, Homo sapiens
atgtgtagaagttcagagacagggagtgaccagatcgggaagcctcaagtagttaaggatagctagagcatagagtgtagagttagagtagaatggtgatggtgggtagaggtcagatcttaaaggtccttgtcagccatattagaaagtctagatttttttttttttttttaatgaaggcagtggggaggtatggaattattttaagccagggcatattataatcacatttaccttttaataaaataatagcatacatttattgaatgcttgctatgtaccaggccctatttgaattcctttatgtgtataaactttggtatacttttttaaatcttcacaatcactttgtgagagaggtcctgctattatttttattttatataatagaaaatgaggcaaagagagattaagtacctcacccagtttcatgcagccagtaagtggcagagatggaattcaaaccagctacaggatggaaa

SEQ ID NO: 162126 - DNA, 571 bp, Homo sapiens
aaatcaatagctttgtggccatgataaggttggtaccacttcactccgtgtcctcagtgaggaaactgaggcacagaatggcaagtgactgagcatcagcacaatgagtcagtgccttattcctgctctgtctcactttaagacatcaagttgctcatctgaattttttttttcttttgaaacggagtctcgctctgtcgcccaggctggagtgcagtggtgcaatctcggctcaccgcaacctccgcctcccaggttcaagcaattctcctgcctcagcctcctgagtagctgggattacaggcatgtgccaccacgcccccctaatttttgtatttttagtagagacggggtttcaccatgttggtcagggtggtctggaactcctggcctcatgatccacctgcctcggtctcccaaactactgggattacagatgtgagccaccgcacctggccctgaaatcttaaagggagataggtactgtaaggtcctctaaagagtgtcttgagactgggctttggggttctatcttgaagaaggggagtcccaggagacaaatgtgtgcagg

SEQ ID NO: 162127 - DNA, 303 bp, Homo sapiens
gggtaagtaacgcaggcactttgcaggctggtggaggaacacgttttcagaacagagccctgagctttcttcagtttataccttgtccagagaattaaatacacagcaccaggggaacaaatccaatgccaaaccactatcagaacatttccaactgttgaccgtatattttcattcaccaattaaatgttgtttgagattgagtctccctctgtcgtccaggctggagtgcagtcacgcaatctcagctcactgcaacctcctcctcccaggctcaagcagttctcctgcctcaacctccca

SEQ ID NO: 162128 - DNA, 186 bp, Homo sapiens
ccaatggaattctgcccccgcgctgcctttggactcaaattgcaacagcaactcctccctgtgtctctggcctgctccacagatttcagatttgctagtctccacacactcctaacaatcgtttaagtcagttccttaaaataaatctgtgcgtgtgcatttgtgtgtgtgtatacacacatccta

SEQ ID NO: 162129 - DNA, 225 bp, Homo sapiens
ataagacatcatcaggtactgttgggaaaatattaaaatcatgaagatacatgggctccaacaatattcatactgataaatgatgtatacctttaaagaagaagtttttttcagatatctcaggacataagggacatatttcaaatagaagctggaaaaatatgcactattaaagaattgttgaagaaaaatattttctttggaattaaaagacagtcaaactac

SEQ ID NO: 162130 - DNA, 401 bp, Homo sapiens
gcccacctgtgggttgctaagtatccgagggtacaagcatttggtgggagtgggtgaatatggtaaaggctaccaaactgatgtaaaattgaagttggcctacctatagtctttagcacatgcaccataaagagcctgatgattgtcttctattacaaattaaaggtagtacttaaatcactttggaaataaaacaacaacaaaaagacctagagtttaatcatcaatcacctgtgcaagaggccgcactgttggaaataatggacagagatgatggccaacagcagaaactatgtcccatttttaaagtcactcaaagagtgtaggctggtagaataaaactatagatagtgtcaacaatatacaggggatattcttacttcaggattgcttttgtagtt

SEQ ID NO: 162131 - DNA, 362 bp, Homo sapiens
gtgttcatgtatactggtaaggtgatggtgaggaagaccatggtgtggatgcatcagaggtagactttatagatgcacagaggccctggttgatggtaaaattgatgaaaataaatggtgggattgtgacacagagggctgaggcaggaggatcacttgagctcaggagtttgaggcttcagtgagctaggatcgtgccactgcactccaccctgggtgacacagtgagactttgtctctaaaaaaattaataaaatgaaatgtagaaatttttaaattttttcattggtgttttggaaatgttgagtaacctgttttaataaaatacagattacagttggtgcagcaaataaaggatttat

SEQ ID NO: 162132 - DNA, 278 bp, Homo sapiens
acagcctaaccagtaaacaaatagacatacaaatgagtggaataaagagattttaaagcattcaaactaaaaaagaaaaaataatcatgcactttttctcagggacctattggaggatgtgctccaacaaaaagagggagtaaacccagagacaggtgatccccaacataggagaaatatgaagggaatcctgggagtgataataagataactcactaagtatcaccgggagtgatacaaagagtaacttaaggatatcttaaggttagtagctatag

SEQ ID NO: 162133 - DNA, 427 bp, Homo sapiens
cccaaacgcaatggctcagagatggctgggggcatgagcagaatgtcacctactggagaagtgaaggaagaaagaagagaatttcagaataaaagcaagagtaagcaaattgctaaggcaaaacagttttgggtattgctactgatccactttgtatatattgtactggataaaaggacaggaaagcagaggggaccagctttagttagaaaggaggttgcatttgctaatattcccatggaaacaaacccagaccacaaccagctgatggagcttagtccactccaggtctaccacctcactagctgttcagccttgcactaggcacttaagtttatactatgacaggtcctagcttacaagctccttaaggtcttttcaggttttttttgttttttcttacttttaagatttttttttcctggag

SEQ ID NO: 162134 - DNA, 440 bp, Homo sapiens
cacaggatcttacatttactgacaattttcaacacaagaaaatttactttaatgtattgcctgtatttaaaaatactgctaggacaaatatatcaaccagtggctgacaggagacatgcctctgtgttctggttccagagctgttattagtgttcttttcaataacacacagctgctttctttctcacacaggtgaaaggaagactcatgtttttgggtcacagagaaaggtttggtcagcaaccatttactgaacttctgtgactaagggatgacaactgtgccctctgccatggagaatggaaagttgttcacagagcttgggaatctgattggtgagataattaaatgaccacataaggcatcctccacaccccaggctgatgaatatcacactcctgtgaatgtctgggcagtcctccacaccccaacccctaccc

SEQ ID NO: 162135 - DNA, 219 bp, Homo sapiens
tctccatgaaaagccagaactgtgctgaaccttaccagatttgtattcctttatttcataaggccctggtatttgacagatttctagtctgtgttccctgctaacagatacattgtgtaccactccttaaatagtccatactttgctagttggggtagtaggtttcgggaaatgagaattctcatttgactttttgattcttaataatttctattcctg

SEQ ID NO: 162136 - DNA, 477 bp, Homo sapiens
ttgactcgatgtcatttgtaaaacctttttcagtcatttaacttctaaaagaatgcttcaatcaaagctatctaacgtgtcctcttacccttttgacttccatttgccctttcactggccataaagtaggagcatggaatagaacaaagagagtcgctacagaatgtctgttgtatagatgtggtcagataagctgtgcttgggacatgggagagatgcctagactaccacaatattgttatcaaatgaaccagagaatagtgaatatttttgttgccttttcaagtttttcatagaatgaggaaaattaattgaacattacttatttaagtaagtgttcttcaggaatgaagtatcgccttagcacagccttccttcatgaaaaatttaaatactagagataagactaaacttgaggaacaggttctctcttaacctaacaacattaaagcttgtcagaaatccaataggggccag

SEQ ID NO: 162137 - DNA, 702 bp, Homo sapiens
gacaggtctacaaggataagtgtggacaagaagatggggcttcttctcccctcagctcccagtcaggtttaccatatctcactgggaaggccacattgtcaacatttctctacccctccaactccaagttgaagaggctgaaattctggtgagtgcagctgagcagttagggctccctttctccaccaagctcccacttacagaatggaggcttcatcccatttgcagcagaatactggagccctaatcgtcctcaccccagctcactcgtagggcagaggttccactgagagaagcaagccaagaaggcaagaggctactatcccacccagcacccagagtagtgcctcagagacctttcccagggcgagagacagttcataacaaaagagagctccgaggtactctccaaaggaactgactttatttgaaacagtgtggggaagtacaggcctaaggacactttagaaaatgataacataccttaaagaacagtaactaaactgtaggccatctagttcatcagagagaatcagggaaaggtagctaagaggagccctcttcaggtcagaacaaatctcaaagacttacagcaaagactattccttcccaaatttaattggatcagactgctgagcaattgatgccctggaacattgtcaaaaacaatagaactgcaattaatggatccttgagactgag

SEQ ID NO: 162138 - DNA, 473 bp, Homo sapiens
actaccccctgatgacacttttcaggttcccctttgctcagtagtccttctgcccatctagtttctaggaacctataactttggagtattttctgtctcttttctctccactcccagcaaatatctgatgtgtcttaaatgcatctttcttcatagtatttctgtggatatctttcttcatagtatctaagatctgccccttcctttgcatttctataattcattcagtactttataaaaatgtggtctcaagaccacctgcatcataattacacaagtttcactcacaaaaaaaggccaagtcccaggctgtataccaaatctactgaatccaaatatctttagagtaggctaaggaaatatttttaacaaacatccacacccctcactccctgagattctaatgcatgctaagatttgggatttctgtagcctaatccagacccttatcaattcatgcatgtaacagcctc

SEQ ID NO: 162139 - DNA, 373 bp, Homo sapiens
caagcagttaatacagactcaaagtatcatcccacatattacttattacaaaaagaaaatagacttcatgatacagaaatctgacagacaccagtgatcaaacatagcatcatcaataatagaacaattggacattatgaaacttttgaaataatgcactgatgtggaaataatatcccttatgtagcatttgtgccaaaaagtcttaacataaatctattatataaattgtagaatattctacaaataactggcctgaatttaatttataaaaaagaaaaaggattaagtaactgttctaaagtaaaggagatccaagagatgtaacaaccaaatgccctggtctgtattaactgcttggatcctgaataag

SEQ ID NO: 162140 - DNA, 210 bp, Homo sapiens
ccgccagagaagctaaaagcatctgaaattgtgggatctggtttaaccagagggtcagaaaaagcagccggatgatagccatttacagataaagaagggctgctgacaccaggaggttgaaggactgtccaggatcaaacaatgtacctgcaagctacggaggaggtcgcatttttacgttacgcttagaatacatggcactgacatctc

SEQ ID NO: 162141 - DNA, 419 bp, Homo sapiens
acagtatgattacatgatgatcaatctccctctggactgaagcttcttaaaggtaagacccaaggctgtctgcgctgactcatgcctgtaatcccagcacttcgggaggccaaggcgggtggatcacttgaggtcaggagttcaacaccagcctggtcaacatggtgaaaccctgtctttaccgaaaatacaaaaattagccaggcatggtggtgggcacctgtaatcccagctactctggaggctgaggcaggagaatcacttgagccttggaggctgaggttgcagtgagccgagatcgtgccattgcactctaataacacaatcatgggagtgaagttctgtcattataagaggtgagctcagcttaagagcatgataacatccacattacagggaggaacagtggacatgtcaaa

SEQ ID NO: 162142 - DNA, 120 bp, Homo sapiens
ggacattctgttgtctgatttcattattggagttatgctattttccttaaaatgaattgggaagttttccattgtttttccctctggaatactttatatcatgtttgaattattcccttc

SEQ ID NO: 162143 - DNA, 547 bp, Homo sapiens
ggtaatgactcaggctcaggggatgtgggagctgcctctggcagggcagccccctctgcctggtgtgcagggaaccaaagtttgcagcttgtgcaaggcagacctggcctcttcttctcaggcctgaggaaggtgctgctggccaagactgactgtccgtgctggctgagctctggggcggattggccagtcctgctggtgtttccaggcctgatggatgaacagggcctccagagtcatgggtgactacagcaccggctccttgtcaggcccaaacgaaaaccactgctgctgtggcctagcgaccttagagaggagacacaccttgcctttgccacttgtttctggcctgggctctgcactcctctccatcggctactctgactcatcgggagtagacaaagggacagaagtttccaggaaaagggaaagagactgcaggcaggtcctgtggctgtggaagtgggtctggggagccttgacaaggccccccgctccagaggcccacatggccagcagcagccaggccataagcagtcagcagctg

SEQ ID NO: 162144 - DNA, 421 bp, Homo sapiens
gttggaggctggactgagctatgatggtacctctgtactccaacccaggtgagagcataagatcctgtctctcttaaaaaaaaaaaagagcatttactacctgtcaggtgctgaatccatgctcttgctaaatctgccagcagccctgtgaggtgggtgcagtcacgtcccttgcgaagatggggatttgggggcgtgaagaggataagtacctcatcaaaggtgacagatcagatttgaaccacactcttaactgctgcggtttattggccctacaataatagtgcccagttcacagggtggtttgggggattacacgacgtaatgtgtgttaaagggcttagcacagattcagctccagaggaacatagtaaatgttgatttaccgagaggcagaagagcgggatccacatccacccac

SEQ ID NO: 162145 - DNA, 482 bp, Homo sapiens
aggatgtatgggtcattttgaccagtcattccctcgctctggcatcccacaatttttccgcctccctccgaaagcgataataatatttagaggcgttcgctggggctgaatgagaattagccctaggcgcagcctatcattaggacgggacagcagggccactgtgacatttttaagaaagctgagatgatggaaagaataagaaaagagatgattctgatggagagagggctgcacagccctacggcgggcaagagattctccaatttgtccaactcggctggcaatgctgtgctcgaggccctggaaaattcgcagcacccggctcgcctaagcccgcgcctgccgtctgcccccctgcacagcgctctgggagaactccccgccaagggcaaattcgaaatagacactttgttcaacctgcagcacacgggcagcgaaagcaccgtctcctccgaaatctcctccgccgccgagagccg

SEQ ID NO: 162146 - DNA, 433 bp, Homo sapiens
tagaggatcccgctacatcctgcaactctacaaaattagtatctctaaaatcttctgccacgtcccattagtaatttgacttctttggtgcaggctttattatttttggcctcagtaatcttttgttaatttaagattactttagaaaacaatgttaaaggaaagtaaatttaaattagctacttggatttcttgttagaagttcaagaaacaagtttgagagaatcaattgcgatatgatgactaatccaggtattttaagatggttattttttatttatcataatcagaaattagcaaaaaaaaaaaaaaaaaaaaaaaattcgggggtaattttttttaaaaaagttttaaaaaaacggggccatggggcccagggggctgcttggaggggcccctaatagagggggccacgcatagggaaggtcgggga

SEQ ID NO: 162147 - DNA, 552 bp, Homo sapiens
ttctgtgccaggaccttttagatttagtcttttgggcagagctggaatatttgtgggagtgagcccttctttctcaagcctaggattggactttacattcattgtcttgttcctatcatgatgaatttcttgagagagacaaactgtcttcttaaagaagagactggaggagagatcacagtcctcctgccttttctgacctcacccctctctccttcccacttgtccgtcagcatctcggctgctctttctgggagctgaaccaaggaagagaacctctgctgtgctgtcgttaataggctgagcactcaggacagctgtgaggcagaaatgtggctgggccattgctctgctgcccatcataggtcaggtctctgtctttaccacatcactggctcctgcaagggtatgtagacaactggtcaacatgacagcttggtgtaaagcagaggtgttgacagttaacctggagattcaggctgtatagacagtcaacggaggccatttagccctgtggaaaagtatgcatcctccacaccaggttctgaggaa

SEQ ID NO: 162148 - DNA, 531 bp, Homo sapiens
ctgttctcctgccgcatctccgtggtagtgaggccctttcttgcttgtgcctacgcatcgtggtttaagttctttgtcttgtacctgatcatgataaatttctgcgaccacataggagcatgtcgttcttgattctccacaggtggaggagagatcacagtcctcctgccttttctgacctcacccctctctccttcccacttgtccgtcagcatctcggctgctctttctgggagctgaaccaaggaagagaacctctgctgtgctgtcgttaataggctgagcactcaggacagctgtgaggcagaaatgtggctgggccattgctctgctgcccatcataggtcaggtctctgtctttaccacatcactggctcctgcaagggtatgtagacaactggtcaacatgacagcttggtgtaaagcagaggtgttgacagttaacctggagattcaggctgtatagacagtcaacggaggccatttagccctgtggaaaagtatgcatcctccacaccaggttctgaggaa

SEQ ID NO: 162149 - DNA, 472 bp, Homo sapiens
ggattaaagttgctgagttaaaatacggacacatccccaaaattaaaataaaaattccaagttggtataacttgtattattgttaacacagtcaacaaacacaataagaattcacattgttggtataaaaaattcaaaatacaaaaacttaagtctgaactatgacagagatttatctatcctaaactaggcaaaataaattattttaattatcttcaatgacagacctctgtcatttatacttgggacttataagaatatgctaaatgttttgaatgtatttaagaaactgaagcttggttaataacttcagaacaaatatattgagtcttcagtttagacttccttagatagtcatgcatcagggcttatttcatttgtaccttctgtccattagtctgtgcttggaacattcccttcccacagtctttgcagtactgaggggcttatggaatttgaagtatttcacagt

SEQ ID NO: 162150 - DNA, 386 bp, Homo sapiens
ctctctgagttagccaatccctgaagacagaaatggactgcccctggagcatgtttttcaaatacaaataatccattccagagcccacaccctcaacaacctcttttatcagatgcttacactatgaggccgttagccacctgccttatcactccagggcgaggtaccagacagctattaataggagagtcccaatgtcccgtaacccactgaaagtattcaaacgaaccaattctaaacctacttaccctgttcctctcatttcttcctgtggaaatcataataaagactttcacccacctttccatctgctctctccatgccactccctttgcctcctgaccaaccctggtcttccctatgtggccccttgtggcatggcatgc

SEQ ID NO: 162151 - DNA, 497 bp, Homo sapiens
ctggtgactgcacaattccacaaggctttcaattctactctgaatctcacaagatctaaacttttaatattaacatttaaagttttttattctaagagagcaattttttgtaagatctggaaaataacactgtaacgattgactatataccttattgaactacagaaatatctaagattagatatttcatctccctaaatgctagagtaaatcacacagctataattttgttccataaaatcatctagattccaaatttcttatagttcattcttgtctccattaacttgcaacatacaggtatctcaatgagaatgaacattttcatgaaacggttcttggaaaaatcttgatgatttgttaaaagcaaataggagttagcctaatgaaggggatggaggtaaaatagcattaaacataaaaagcatcttaaacaaaacttttgagggatgaaactgtatgacgaattcagagacgtaggtcaggtgtagtggctc

SEQ ID NO: 162152 - DNA, 498 bp, Homo sapiens
attaatccacctatgacctgaagtccccactctccactgcccccctacccattgtcccacctttccaaaccaaataaatgtacatcttacacatactgattgatatcttatgtctctctaaaatgtatacaagcaagttgtaggccaaccaccctgagcacatgttgtcaggacctcctgaggctgtgtcactggcatgtctttaagcttgacaaaataaattcctaaattaattgagacctgtttcagatactttttgggttacatagttttaatgtttaaattaaaaaaaaatgctaactctagaataattttattacacaaaacacataaaacaacagcacacagaagaaatgtaaatcaatacaaataaaatatttctagtaatgaaggaagtaaaactgcatgttggaaaagaagagagttggagttgaattattgctagtaagagtataagttaattgaatcaccttgaagaacaatctggtaattcctact

SEQ ID NO: 162153 - DNA, 429 bp, Homo sapiens
caggcggctcacgagagagcccaggagttcgagaccagcctgggcagcacagtgagaccccatctctacagaaaaaaaaaaagacaagaacagaaattagcccagcatggtggctcacacctgtgataccaatcctcccgctttggcctcccaaatttctgtgattacaggcatgagccactgtgctcagctaaatcttaatttcttttattctcctctcctccacctcattttccacccactaccagaatcatcttctattttaaaaatctgcgtctgaaagaataacattataaaagtagtatattgaggttaaacgtggccacctggccatatgtttagctctcgtccttcacaaaactccattaatgtgacagtgaaaagattttaaaaaggttacacctgcaaggaaaagaaaacaggagagct

SEQ ID NO: 162154 - DNA, 241 bp, Homo sapiens
caaagtgccctgaattttctgtggtactagaagccacaaaatctgaatgctgggaggaatctttttgagtatgggagggccagtcaaccccaactgcattaaaaaatggcacaggtttatacattacttgcttgaaacagaggtaggccaggcatggtagctggtgggcagacagcttgagcccaggagttcgagaccagcctaggcaatgtgggaaaaccccatctctacaaaaaattaa

SEQ ID NO: 162155 - DNA, 277 bp, Homo sapiens
ggaaaagccaagggaggagagaggtttaaggatatgatcagcactgttaaatgatgctggacggtcaaaccagaagataactaaaaagtgtccactgaacatagaaacatggaaatctttagtgacttagtgagagcttgtttgtggaataatggagtaaaagttcaattgaaataacttatgagtgaaagatgaagaaatgcaaacagcatgcatagataattctttcagaaagcttgactgcaaagaaaaaatgggcaatagcttcaggatttat

SEQ ID NO: 162156 - DNA, 344 bp, Homo sapiens
caagaatcacttgagcccaggaggtggaggttgcagtgagccgagatcgcaccactgtacttcatcctgggcaacagagtgagactctgtctcgaaaaagaaaaaaaagagagaatattatccaaatatttatactgtatgtacttcaattccaagctgtcaccaatagaagttgtattattttatatcactaagaaaaaatgtgctaaataaactctgatgtgctatatcaattgtgggtgcattcccatttcagagacattaacatttgtaaaacaagtgctgaaatatggtgttttcaagccttgtctgcattgatgggcaagcacgtttaaggtatttaa

SEQ ID NO: 162157 - DNA, 203 bp, Homo sapiens
ctgcgatccctaaagatctttgagcatcaccaaatgctagctgtaacacaaaagggatatgtttattactgctgatttatttttatttgctatgtgagaagcaaattactactgatttagtatgtaaggcagtgtgaatagtcatatggttatgcttttttttttttttttggaaatggagtctcactgtgtcgcccaggctg

SEQ ID NO: 162158 - DNA, 535 bp, Homo sapiens
atccaagtcttctatacttcccagccccaaggcaggtagttgggtcatgtggctaattcttaacaatggaatgcatatagaagtgccatgtcaattctggtctgaggcagttaagaggggataaaccttctccatgctttcacttttcctgctttggcaattttgggaacaagtattccagacaatagaattgcaaagtgaaggcatcttggatcctcaatttgccatctgaaaagatgttatgtaggacaactactatctgatccacttcaggttctgacatgagcaagaattaagcctttgttgtgttaaactttgttacagcaggactgcctgtcctatcctgactaatatagcctgtttaaaactctgagaagctagcttggctgaggaacatactggggcttcagtgggagccaatatgaaaggaaaaaaagcttggacggacatatctgtagagctagcccttgaagggagttcatttgacagtgtctagaatgatgcttcttctagactaaggtcagtaccaaagaac

SEQ ID NO: 162159 - DNA, 291 bp, Homo sapiens
cagccccctaccgagcctgccagtaacaagccaacaggcagaaggaacgtcagaaaaagttaaggctgcctgtggtgcagggtccaccctggcacagggagccgggggccaccagccctgctagtccactgactgcactggagctgggagctgccagaggctcagcatcctgaaggcaccgccaccagtatcacctggaagcgggaaaccaccagctgcctcccgccactctgcagtgggccttgcctgaccaagcagagtatgagttcctgcagggcggggcctgagccc

SEQ ID NO: 162160 - DNA, 311 bp, Homo sapiens
tacattatctctgatcatcacagcaatgttgcaagaaaattttctttcatggatgagaaaactcaggcttggagggataagtcacccataactgtggggctgaatgtaaaacagcgtctgtctgatatgaaaatcgaaaccatgacgccatcctgcctgctcattcataaaggccagggaaaggtaatagtagaaggaaccagcgtttactgagccgttactgtgtttctgaaactctggtgctttgcctacttacttatttcacatctctgctttgtgaagtttggggtatgtgcctagtgttagagaca

SEQ ID NO: 162161 - DNA, 396 bp, Homo sapiens
cctgtctcgtctccatcctccccaagggcccacttgaagcccagtgactcccattctgagcagggctcctgaacctgtctcacagaagtggggttctaaaatgtggtctctccctaactgcccctagaagcccttctgcagtgcaccatccttacatccgttctctagccctgcagcctcttagccttcctcctcttccagaccagccctgcatctagcccttgtggccaagttcccccgtcccccatgcctcctgatctttgctctgttagctcgattctatcttctgcctccctccctactgagttcttcccctcaacctctgaatacagatggtccctgtcttagaactgtttgacttcaggatggagcaaaagtcaaaatcgtacagtagaa

SEQ ID NO: 162162 - DNA, 142 bp, Homo sapiens
aaagagtttctaacatatatctgagtttaatataggctgccactgagtccctgattcagttgaacaactgaaaaaccagtaaagctgctcctcactgtttagctatgtcctcaaaataagaatttttggtaatatataagaa

SEQ ID NO: 162163 - DNA, 749 bp, Homo sapiens
agtagagatggggttccgccatgttggacaggctggtcttgaactcctgacctcaggtgattcgcctatcactgcctcccatagtgctgggattacaggtgtgagccaccatgcctggtcattaaaatcatatatttctttcccgtaggctacagtaccatcaagataagacagtattttaatgacacaaagtgaggcctaaccaatcctaaactgcacattagctttagacttaagaacgggggatattttagaatgtttccaattatactgttgatataaggtaaatctttcttctggttaaacatgctgcagtggatgtggtcttcattctaaagcttcaggcaggccccatatcatgagtccaggcaaggcttttgaggctgtagacagttgcactagaagcactccaaggagccaagtcctcatctacctccctgaactcagcccccccgctgtttaagatttttgagaagattgaaaggagagtgctctagaagacttcattcatgtaaagaattacggtaagagtatacattgatgcccattaaaaagactacaaatttactacagtgtttctcatgctactaagagaataacctccatataagtgattttttgtgtggtccaagagactggaaagtgagaattgaaagaaaaaaagctctcgttgattctttgtaacttaaagtcgctgcaggaagaacatggcaaggtctctgcacaattattctttgctttcttttcag

SEQ ID NO: 162164 - DNA, 217 bp, Homo sapiens
cgttactatgagcatgaaatgataatgcaaagagcttagtggccggcacaacaggtgagcattcagaaaatgtgagctattattaccagctcccttcccctaaactctataagcctagagttaaattcttactgcagagaaaattatatttgcttacatggggcctccgcagctacagtctccattcttcaaggagagggaccaggttttattcatc

SEQ ID NO: 162165 - DNA, 499 bp, Homo sapiens
taaagaatggactatgatttcagggtggaggtaggagaggagccaggaggctgtggcaggaatccaggtgagatgtgacaggctggtgggaagcgggaagaaaataggtggatttggaatctgtttcagagatgcagtcagatccagcagagaattcagggcctcactgagtatcaaaagctggagggatccttagaacttgtcctcccaattaacacagcttacataggagaggacggaagcactgctgagtcagggacccaactagggtcacaaagcaactcaaggtggctcctacctgaggagtcaggctcctgcctcaaaacccagggctctttcatcatgaaaagactagaaaggggtcagcaaaccatggcctggcaatccagcttgctgactgcttttgcaaataaagctttattggaacacagcactctcattggtttaagtagtgtctatggctaccctcacactacaaagacagattgagtagttgtgg

SEQ ID NO: 162166 - DNA, 191 bp, Homo sapiens
cagatgaagagaactaaggagggctttctataggaggtggtatctaaaactcaagccagaaggaaaactggaattattcaggtgaatgggtgggtgtcaagaaggtagagagtatgacatttgacaacccttgaaagtagttcagtgggccttcagcttagaggaggagggagtataggcaaaaccaaaca

SEQ ID NO: 162167 - DNA, 564 bp, Homo sapiens
tggagaatactggtcaggagagaattatttttgaattaaaataaagagaaattgctaagtgatatgtacaggaaatacagttgtaactggttctgtctgtcgtcctgcctgtttgagagtattttacgtgttcatgtcttgcatctgtctcaaaaagattcttggggagtagacaagatagagagaaaaatcattggcctattggtgtccactagaaagagagagaaactaggatggagtttgggcatagaacagtctgaggttggccgggcacggtggctgacgcctgtaatcccagcactttgggaggccgaggcgggcagatcacgaggtcaggagatcgagaccatcctggctaacatggtgaaaccccgactctactaaaaaatacaaaaaattatccaggcgtggtggcgggcgcctgtagtcccagctactcgggaggctgaggcaggagaatggcatgaactcaggaggcggagcttgcagtgagccgagatcgcgccactgcactccagcctaggcgacagaacgagactccatctcaaaaaaaaaaaaaaaaaa

SEQ ID NO: 162168 - DNA, 162 bp, Homo sapiens
cccctttctttttcatgatgcctctgtaattaagaagcagatttttccccccaaaggagagtgttttttctgtggtcttaacttggattcatatggattcgtggctttgtgggttcttaaaccttccacaattatatacaaaattgtggaatttggtataca

SEQ ID NO: 162169 - DNA, 302 bp, Homo sapiens
caaagataggatgaatccccgtttcatgccttcagagtaactgatcacagaggtccactgtggatcacatccatagagctcacccatgtcctagggacttgaacagtgtccccaaaacttgaacagcacatactaggtttgcaataagcactgggaaaagaaagggaggagttaggccatcctgcttccaaattttaaggtcttaaaccatcccccaatggtttttcaacttttaagcaaaggaagcctattttctttttttctttttctttttctttttttttttttttttttgagacaat

SEQ ID NO: 162170 - DNA, 268 bp, Homo sapiens
ggaaaaagcatttccgggacaggccggctccgacattcctcacatgggcccttcaggcagcaattactctattggcttcaacattctccatccaaaccacgtgactccagtttctgtgctccgttttgcagaggaaggtatagctgagggctccagtaatcccaagatgatgcacgtttctcttgtaggggaccttccccaaaccctctccccaggaggttcccgtggctcagtctgcaaatccacacagcccggacactgatttgca

SEQ ID NO: 162171 - DNA, 119 bp, Homo sapiens
tcaagttctcattacaagttcatgcaagaaacagggatcaaactcagttctgtctcactcttcccagaaacaaacatcaacagaaagtgactcagctttccccaacccccactccctga

SEQ ID NO: 162172 - DNA, 162 bp, Homo sapiens
tttctgttaagttcctgtgttgcttcatggaaaaccgagttcacagaataaatcttaacacactatttttgcctttccaagtgggagaggcaggcaaacattgactctaatctaccatcttgcgggggggtggggatgggggtggggaacagttttatcttt

SEQ ID NO: 162173 - DNA, 250 bp, Homo sapiens
aatgctaacacagatcagatatgctgtggaagttttaccattaacattgctggttgaaccttgggttcaagtgtataatggtctctactaatttacaagaaagtattcatttggttctcttctcccagactgcactgcaatattttcactccgagtctcacctggaactgcctaaaaggggtcactcatgcccataccattcacaacctctattcctgtagcatctgagggtacctgtggagactggagg

SEQ ID NO: 162174 - DNA, 881 bp, Homo sapiens
  misc_feature (25)..(25): n is a, c, g, or t
gcagctccgacccctcataatgagngcccagtgagactcttaagcttttttgagtacaagaacaatgccttatatgtattcatcgcccctgccaatattttacacatagtaggtcttgccctagaggcagaaccaatttggacagcagttttaacaattcagacaccctgtaacatgttgcttctgtaacaatccatggctttggacttaagcccagtgaaagcacattagtggttatgagtttctccctgtaaggtttttcctctttgtctcctttctattttttggtacgtgagcagcctctgtctctctgtagggaagcaacagacagcttcagtgagtacaaatgttatattcacatgtggaacatagccccagagataatcatatgtaccagtgatccgtcagtagatgctattacccgtgtggttcttttatcaaaggaattaagttctcttgatgtgttaataaacagtacttttttggccagctctggagtggatgaataggtgtttggatgtctgtctagattgacagctttagattgcttttttcctgaaatctggtaattccagatttacagtgaattttctcttaagttgtgttttcaagtgatcacaccgaattggtgggcagcaattctttcttttaccaaaaaagtaaaattatcgttaacactttttatcaacaaaactaattctttaagaagtctttgttaattttttgtcttttctctctccctacatttgtatttgtttaccacagatctttagatatgtttctgttggaaggaagtattctctttttttgagacagagtctcgatcttgtcacccagactggagtgcagtggcattatctgggctcagtgcaacctccacc

SEQ ID NO: 162175 - DNA, 931 bp, Homo sapiens
tgaactcaggtcctagactccaggtccgatattgaataatggtttctggccatgctcatttatagtctttgactgcagtttaatgtcatctcagaatattttttagatttttggattatttatttttcctttgtcatttagaccctaacttgtagatcaggtttcacatctgtgctgcagtttagcacccaaaaaagaaattttatatatgaaagagccaaagtatatttttctttatcctttggttatttttcctttcctcttcacatagcttgtggttaaattattttccttagactttcatactaaaataatttgcctttgggtagaggccaagcacagaccattttcaattctctacaagattgtttttctaagcagctcaaatgaaaaaattcccatgtcttacaatgggcatttgtaagttggttattttgggcaatcagtgctaaaatgtagagtctcttcaaaatcttgaatcttctcagtacacctacctttaggaaatgacctaaaataactacatagaaaacaatagcaatgaccccaaagcccacatcagttatcatttccagattcatgcaacagtttgtcttctttatattgagtttaacttttaaacgagacttagttaccttagaggaaactaagaattggaaagaagaaccttcaaactaaacaaaataaacatatggcttacatttgttgagtgcttaccttgtgccaggaataatgctcagtgctttaactgcattattattttcaaaacctacaatcccctgtagtaggtaattttttatgtatatactagatgaactaaagctcaaggaaataatttgtccaaggccactcagcagtaataaatgccagacccagaactgaaaaccaaatcatactggctccagatcgcttgttcttcatctttaaaaaa

SEQ ID NO: 162176 - DNA, 343 bp, Homo sapiens
catgtatgtcatgtgagatacaagttaaaaaccaggatgttatatttaatctggctctaggcagttttccagatcaatgttttgtaccaagtacacagtatgacctctgaagattcaggaaaggaggcaggaagccaaggtaaccctagcaatcagcttcttatttgaactgctacagaagcatttgcctgaaaaaattcacttcccagcctctttctcactggacgtggtgtatcagcctgcagtggctgcctgcaggaaatctccctgcagggaaggttgaaggactcagggattcaggctcctgggtttaccgcagtgcagttacacaatgggaaattta

SEQ ID NO: 162177 - DNA, 409 bp, Homo sapiens
aaaaaggacaaaaagatgaacgtgatatgaatgaaatctgagctttatcttaggagcacaacaaacttactgcgtagcccacaaaacagggacccctcctactctgcagggaagttccctatcaatcagggcataccctgcacattctgtgacccaaaacgaatatggcacacgagtttctagcttgtgtctcttcctttcaagaacatcatccttggtgatgctgaaaagccatggtcttggcactgtggtcacacaatgctaatgcttgatcttgaaccatctcatttaggaaaaatttcaccatgaactgaagcattacactcaaacatgctgaaagacgaggggaaaaatttcattctctctttaaatttgattcatttcaatattaaatggatcccgattttta

SEQ ID NO: 162178 - DNA, 300 bp, Homo sapiens
tcaaatagcaccgctgccgccgttttaccctgtgaccctgcaggatggggatgggactcactcagagaggctttaagatcagatgtgcaaaagcgtacatagagtggctgagaaaatacaagcacttggtctccagagtgagttggtgcttaacaaatgttcactcctatgctgttttgctgtttttccggcatctaccttgtaacaactctaccaaatccctttatctttggacttctcttcctgccctcacccctttgcacttagctccgctcactgcattgctctgctctgcttaca

SEQ ID NO: 162179 - DNA, 340 bp, Homo sapiens
gacagtgtaagcagagtagagcaatgcagtgagggagctaagtgcaaggaggggtgagggcaggaagagaagtccaaagataaagggatttggtagagttgttacaaggtagatgccggaaaaacagcaaaagcgtacatagagtggctgagaaaatacaagcacttggtctccagagtgagttggtgcttaacaaatgttcactcctatgctgttttgctgtttttccggcatctaccttgtaacaactctaccaaatccctttatctttggacttctcttcctgccctcacccctttgcacttagctccgctcactgcattgctctgctctgcttaca

SEQ ID NO: 162180 - DNA, 316 bp, Homo sapiens
agagtggccctggcttctcccaccacagtgtgcttccatgttgccagggcactgttggaaaagaggcacagtcacattcatatttccgcaatcccagcccaaaggccccccaaagccagcttcaaccgcagagtgtctgtgctgtcagagtgggtaggctggttttggaggttgcccaccttgctttttctgtgctcagattccatccctttgtagtcctagagaggctgtgttcccgcccctctcatattactggtaagtattatggaccaggtatctggaaaggcctacagttggatcctagatgaggctggca

SEQ ID NO: 162181 - DNA, 298 bp, Homo sapiens
aggaataagagaggaagaaaaatatgcatagccgagttaattcattcagatgtgttagctgtgcacctgagtcttggagaaatgtcttgctcctctgagctcctccaaatgggatttttgatggagtcttacatgttttgctctcttctcacatcaaaacattccacgtactttgagtttagattcagcccttcctcctggtattaaggaagcagtgaatacatcaccatcaaccttctttctatcaatatgagagacctacctgctgttttctttatttttataagaagaacacctt

SEQ ID NO: 162182 - DNA, 587 bp, Homo sapiens
gattaaaatgggagaaataatactgttcttcgggtaatacaggagggatttttactccctttttctcatcgtttatgaccagaattctgagtggcattggaatttgtgttgcatgaccagctctgtgatacttgaatgtgttagacttctgaatgactgtattcactataacatcagcatccattaaaaaatcactctttcaactgcttgtacagttagagttctaaaaagagagtgaggaccaattaagtatatagctactgcaaaagtaatcattgtaaaggctgtttgaatgggttcagctaaaggtttgcatgaaatacgccatttaagcaagtgtagggttaactcaaggaagcttaattgatcagcaggtatttattgaacacttactgtgtgtctaatgctcagattagtatgtaagagccattgctgttaaggagacatggcttatatttatgaaacaacttgaggttaattgtgtgctgaattctggggcactgcactgtggataataggaggaatccagaggaggaaaaaagtggtgaaggtagaagttggagaagcctttctatgggcagcctaaa

SEQ ID NO: 162183 - DNA, 361 bp, Homo sapiens
  misc_feature (15)..(15): n is a, c, g, or t
  misc_feature (23)..(24): n is a, c, g, or t
ctcgtgcaagttcgngcagcggnncgacgaggtcaccttctcattaacctctcaaaatgaatctatttcaggccaggcttgaaaatgttttctctctaaaaactaccatgcagtctaacagttaattgttattcttatcaaagaatgacccacattaacatttacttggggttattagcatatttattaaaaaagggagagaaatgagcattctttcctcttctgctgtttgttatggggtgttatggaagaaagtcatgagaaaaaaaataaagtacgtatttaccaatatttcaggctaatccataaatatcaaaatgcctatacccatcttggccttgaactggcagactagtgacca

SEQ ID NO: 162184 - DNA, 570 bp, Homo sapiens
cttcccaacctgtgccgcccatggggatacaggacagtaacgagctaaacaaaacctgctgcctgaatggggggaacttgtatgctggggtccttttgtgcctgcttcccctccttctacagacggaattgtgagcaccatgtacgtatgcaaagagaactgtgggtctgtgccccgtgacacccggctgcccaagaactgttctatgtgtaaatgctggcatggccagctccgctgctttcctcaggcatttctacctggctgtgatggccttgtgatggatgagcacctcatggtttccaatactccagaactactactgtctgcatgtaccactcttatgctttaaaataatgaatacatttccataatggtctctaacatttccttatagtaccaactacttcttacctctctgccctgccctcccccaaaaaactacctttttcaaaaggaaatcagctatatctccactgtgctggagtccagtatttcttgatacatgtaattctaccaaggtcttcttaatatgttcttttaaacaactgaattatatcttcagattattaa

SEQ ID NO: 162185 - DNA, 537 bp, Homo sapiens
taataaatgccacagggggtattctagaaactcagaaaaggggacatccaatatacctagagattcagaggaaattccaagaggaaataaagttatgctgagttttataagaatcctcttaaaatattggtatcagagctcaggtaccgtttcttcttcatcctgctcccggccttcctgccttttatgaaagagatgttgttcatctgattgttctgagtcaggtacatgggttgagccacgttttactagtgggtgtgataactgagcctgaagtatcagaagccaagcccctctccctaactcacttcctgtccccatgcatgggagactcttcggcttccatctctatgtggtaaatgcactctcaggagaacttctagagcaggacttctcaacctcagcactaccgtttggatagtttctcactgttcatgagtattggggttagggtagggtcctgtgtattgtaagatatttgagcagcgtccctggcctttactcactagatgccaggagccatcaacctttcccagt

SEQ ID NO: 162186 - DNA, 464 bp, Homo sapiens
atgttcacgtactagttcaccgtgcatgaattcagtaagtcgtatatcgtgaagatcgttcgatagtgatatatacatatcttcattccgttgtgtacctgtctagtactcctttaaaaggatgttcgtaagttcgtcaaaccattttccttttgtgggcacctgcgttgtttacagtctttagatattacaaatagtgctaggtattacaaatagtgctataggacatagacttgtaccatatgtctttttgtactcttaccagtgtatcttgaggagattcctagaagtgggatttccaggtcaaaggctaaatgtcgatattagatattgccaaaaatcaactctctctcctccataggagtattaccattctgcattgcctcagtaatttatgagagtaactgttttccttatagccttgctatcagaagatttcaacaaacttggaattctggcagtct

SEQ ID NO: 162187 - DNA, 466 bp, Homo sapiens
gtaaaatgaagatgattcatattatcttccctacagcaagagattcttaggaagcagaaactctttaacatgcccaagctttttggaaactgtaaaatgctattgcacatgtattttaaagttgtacttgtcatggagaggcaattattgttcagtcgtttaaacatgtcaatatactaagtgtttccaggacacacaattaagaataccttctcccagctttggggagatgatcttcttaggcgacggctcagactcttttgaggtgggcagaaaatatcttggcatcctttcaattttgtgagagtaaagatctgctggcataattaaaacaagccaaccaacaagtggcagcaacatcaggagattacttttcaatcactaatcgaattgatctcaccagtgtggaaaatgcagttgtaaattatcaggtagaataaagaatgtctcataagtatcagtaata

SEQ ID NO: 162188 - DNA, 1733 bp, Homo sapiens
  misc_feature (1733)..(1733): n is a, c, g, or t
gggcttggctggggtgctcagcccaattttccgtgtagggagcgggcggcggcgggggaggcagaggcggaggcggagtcaagagcgcaccgccgcgcccgccgtgccgggcctgagctggagccgggcgtgagtcgcagcaggagccgcagccggagtcacagccgcagccagagccgcagccaaagcctcagagagcaggagttggagcgcaggccctgctggatccgcgcctagctcgccgccaggcaccggccggaggacgggccgtggtgtcagctcactgcccgggcgctgtgggaggcagcgagcccgcgaccccccgggccgggcaccgccaggcgcggagcccagatcgcccccctgccaggcctggtcacggccagagcacgcaggagttcccagggtctggatctgcgcgcaccctaatgacctggggactgaagagaaaaaaggaacgaggatttcatctaaaagcataacgtgggcactaggcgaggaggaaagtggagaccacctggcacggggcagaggtgcctggagcccacgcttgagcatcggagaccctggcatcctagcagccgcgaccttggctctgccctgtctgagctggaaacacagcttagcttctagacatcgctggcacaggcctggcacaagtaagcagtgttctcacctgtctgaaacgggacacggggtcggaggaaccaggatctagcctggccccaagcggaactctctggtggcccagaggtcgtcactggggagcccgcctcctgccctagcctcactggtgcggatgtgccgctgcccgccggagcaccatgatggcaggatgacctcagccgaagtaggagcagcagctggtggtgctcaggcggctgggccccccgagtggccccctggcagccctcaggccctccggcagcctggccgggcccgagtggccatggcagcactggtgtggctgctggcgggagccagcatgtcaagcctcaacaagtggatcttcacagtgcacggctttgggcggcccctgctgctgtcggccctgcacatgctggtggcagccctggcatgccaccggggggcacggcgccccatgccaggcggcactcgctgccgagtcctactgctcagtctcacctttggcacgtccatggcctgcggcaacgtgggcctaagggctgtgcccctggacctggcacaactggttactaccaccacacctctgttcaccctggccctgtcggcgctgctgctgggccgccgccaccacccacttcagttggccgccatgggtccgctctgcctgggggccgcctgcagcctggctggagagttccggacaccccctaccggctgtggcttcctgctcgcagccacctgcctccgcggactcaagtcggttcagcaaaatcctgatctggtccattcagcagaggactgcagaagtctgaggagccttaagatatcaacttaaagcaatgggctcgtcgcagaaaggaatagctgtgccgggtcttcagagaaatcccgggctcggttccacgccctgaaggaaggccaaacctggctcaagcatgttacccggcctggcagggaggccggggtcacctgcaggtccgcgtggcgaaacaagggcacgctaagtcaccgggacccaatccattcagcccgggcaatttacagggacaggcacggagacacagggctgacgcgggagaacagtn

SEQ ID NO: 162189 - DNA, 1764 bp, Homo sapiens
gggcttggctggggtgctcagcccaattttccgtgtagggagcgggcggcggcgggggaggcagaggcggaggcggagtcaagagcgcaccgccgcgcccgccgtgccgggcctgagctggagccgggcgtgagtcgcagcaggagccgcagccggagtcacagccgcagccagagccgcagccaaagcctcagagagcaggagttggagcgcaggccctgctggatccgcgcctagctcgccgccaggcaccggccggaggacgggccgtggtgtcagctcactgcccgggcgctgtgggaggcagcgagcccgcgaccccccgggccgggcaccgccaggcgcggagcccagatcgcccccctgccaggcctggtcacggccagagcacgcaggagttcccagggtctggatctgcgcgcaccctaatgacctggggactgaagagaaaaaaggaacgaggatttcatctaaaagcataacgtgggcactaggcgaggaggaaagtggagaccacctggcacggggcagaggtgcctggagcccacgcttgagcatcggagaccctggcatcctagcagccgcgaccttggctctgccctgtctgagctggaaacacagcttagcttctagacatcgctggcacaggcctggcacaagtaagcagtgttctcacctgtctgaaacgggacacggggtcggaggaaccaggatctagcctggccccaagcggaactctctggtggcccagaggtcgtcactggggagcccgcctcctgccctagcctcactggtgcggatgtgccgctgcccgccggagcaccatgatggcaggatgacctcagccgaagtaggagcagcagctggtggtgctcaggcggctgggccccccgagtggccccctggcagccctcaggccctccggcagcctggccgggcccgagtggccatggcagcactggtgtggctgctggcgggagccagcatgtcaagcctcaacaagtggatcttcacagtgcacggctttgggcggcccctgctgctgtcggccctgcacatgctggtggcagccctggcatgccaccggggggcacggcgccccatgccaggcggcactcgctgccgagtcctactgctcagtctcacctttggcacgtccatggcctgcggcaacgtgggcctaagggctgtgcccctggacctggcacaactggttactaccaccacacctctgttcaccctggccctgtcggcgctgctgctgggccgccgccaccacccacttcagttggccgccatgggtccgctctgcctgggggccgcctgcagcctggctggagagttccggacaccccctaccggctgtggcttcctgctcgcagccacctgcctccgcggactcaagtcggttcagcaaagtaagtgcctgggtggccaattgagaaggtgggggtccgggtgggtgcatggcctggatggccctgtgaggggtatggctgttgtcccattttacaaatgaggaaactgaggttcatggctgtggaggaagcagaactgaggctcagagagggccaacagttcagtgagttccaggccccagactcaggctctggaggcccaactcgtgtttatttgtttatttacttatttagacagggtctggctctgtctaaataagtaaatcaacaaatatacactacaggttaacacaggatgtgtgaagtgagagacgatgtagagaacagacttttgtcttttgctttc

SEQ ID NO: 162190 - DNA, 393 bp, Homo sapiens
atgttctaggctccatgcaaaacacttgatagtctgctcttattcattaagcaacaatacttttctttaaaactatgcacaacagaaagcttttaaaacaagcaactattttcacaaaggtacaggagttttcatttttgtatcagtgtgaaaaataatgcttctaacattaagtgggtggcatggttaagcattcactaaaatatagagattgtgcaatttcttgaaacatttcactatgacttaatcattataaacactgtgaccttgtaaatcaaacattcacatccatatgtaactagaattctctgtggcttcaaactgctgcatgagttcagataacagaaaatgatttgtttctgaaactcaggatggcaaattggtctcaagggg

SEQ ID NO: 162191 - DNA, 215 bp, Homo sapiens
accacgtccagcctggagccattatttactgtcacagtagaagtcggaggaatattattagcaactggtgtgtagaggccagggttgttgctaactattccatgatgcataggacagcccccaacaacaaagaattaccagccccaaatgtcagtagtgctgaggataagacacacattttcaaggtaccttaccataggactcaaagtggcaga

SEQ ID NO: 162192 - DNA, 348 bp, Homo sapiens
aagtagtctgaagcaatgtcccttctcccacagaatttcctcctgtgcctgaacaattctgaatgatttctagtcacagaaatgttcacaaagcagcctattccaatgttggccaaaacaaattattcctttttgaaacacaaaacacaaatctataccttctttcacatggctttaaatacttaaagataattatcatttacatttccctaattttccctttatccaagcttaacatctttggctatttcaactgttcctccgaagtccttgtttctaggtaacttagttgctctcctctgaacaaactctactttgtaaaggtactacttgtggtattttgtggta

SEQ ID NO: 162193 - DNA, 211 bp, Homo sapiens
cctcccaaagtgctgggattacaggcgtgagccaccacgcctggcccacattttgaaattttaaacttgtagattatcattcaatatttcagtatgccatctattatttgtagtaaatgttaatatttactttttcttaaatggaggtgatgtttctcttttaaacaagaatgtgtgaaaatatatctaaaagtttataataactgctttg

SEQ ID NO: 162194 - DNA, 385 bp, Homo sapiens
agattagcaagattcacattccattctagccataggacatgtcagttcatctgtatgtgtcagaatcctttagatgagagtgacagaaaacccagctcaaactggcttaagctacacaactctacgcatgtcactgaacagtccagagtaatatgctggatccaaaggcacatgtttgtttttggggcattgtttctctttgtctctcacagctgatttttgctgtgctggcttcattcccaggaagattttccccatgtctaacaaagaagggcaccaacagctccagactgttaatctattgacccagcaaaaagagagactattagatcccgattgttccatcaaagcctagggacagattctcattggcctaacttgggtc

SEQ ID NO: 162195 - DNA, 455 bp, Homo sapiens
aggaggcagaggttgcagtgagccgagatcgtgccactgcactccagcctgaacgacagagtgagactctctcaataaataaataaataaatactcaggagggttcccagtaggaaagggtcacagtctgcggttttagcttagaggttgaggggagggaagagatgagactgagccccagaagggtggatgcttgggggtatgtggtgcaaaggagggagcagagcggaaaggtaagaaagggacataaaacatctcagaagacttagcaactgctttgacttggctcagggcaccaacaaatggctccttgtgttttcctggacatagacaaagaggtggaaaaaggagtaagaaccatgggtgctccactgccctctgctggcccctgcaagaagtgtccagtgtgctggcaaagtgtcatggggttttctcttgaatgatggctgcacaca

SEQ ID NO: 162196 - DNA, 362 bp, Homo sapiens
ttaactgaacatactgcaggtgtgctatagcagtatacttgcttgaacagttttaaggcaccagacaagtacaggcctgaatttttaaaaagataattccagtttccttcagaatcagtgacatatttacaagatactaatataagcttagaattggcaagagcagctttattctgaggtctacaggaagataatgtgaacacatttgtcatcatcagtgtgctaaaatttccaataaaatttgaatctgtgggagtttattataatctctaaaatcattaatatattaccttaaaaataaaattgaatactttttttgcagagttttttttttttgttttttttttttttttttgcagagt

SEQ ID NO: 162197 - DNA, 385 bp, Homo sapiens
ggcaagaataatgatccccatttaacagataaagaaacagaggcctggaaagatgaaatgacttacctagggcaattgaattagagttttagagagttgaaataagtttttatgctatcttctccagcccttgattcattaagcaaaccttaaccaagcacttcttctataactgagctatccctgagatgctgagatactgatatcaatgtgacaagacctctctcattccccagtagttgagagggagactgggatgaagaaccaagcactgacatgactaatcacacatgactatggtgtgattagtactgaagggaggtgggctcaggggctgcaatgcccaaaggggctctggccagccctggggagagcagggtgactg

SEQ ID NO: 162198 - DNA, 402 bp, Homo sapiens
agtccagcagaaagaaaaccaagccccagtcgtggagttcacaccaagcagaagctgctgatgagaaacaaagtcccacacaggcaatggcccaaatcaacagccaaagcaaatgagatgcagtccatgagccaaggtctcagatagctgttctcagccctgcttttatgactttgcaaagggtgtgctcaggctggggtttcagggcgtgctgggagtccagagaggcaagggattcttccaaagtcattctcagatgttggaatctcttgcagttgaggtctttttatatctttaccccagcgatttggggtaagaataaaacttcattttttttttcttgaagatagatacagatcaacttggaaatgtccaatgttatggggaaaagggaggaaatgg

SEQ ID NO: 162199 - DNA, 184 bp, Homo sapiens
tgcagactcaggctcacagctggccataggacctgggacaggcccttcacctttcaatggcctccgagacgatggtatgtgtgatgcttaatattgactgtcaactcgtttgattgaatgataaaaggtattgttcttgggtgtctttgagagtgttactaaaggagattaacctttgagtcag

SEQ ID NO: 162200 - DNA, 317 bp, Homo sapiens
caaaaaaagatggctgactaaaagcatttcatatgctcacctcctccacttagaaaaaccaaaagagtatatagacaatcatacttctgataaattatctaagatagaacactggaattcaacaggaaagtgacaggaaacacagaaagcaaggaaggagaaagaagagaagcagcctacctggctgagattggctaggaaacagcaagtgacttcccaagggtaagcaagagacttctagcagcccacatccccacgtatggaatcatgcattcctggcaacgagagccctttaccttcccaacccctgaaactga

SEQ ID NO: 162201 - DNA, 196 bp, Homo sapiens
actaaggttttcaaagaagtccaactaggagaagaaacagcaatccaggcagagagaatcctcaggaaggactcggaggcattcaaagagctggtgcgaaaagatctgcaaaattttctcaagaaggagaataagaatgaaaaggtcatagaacacatcatggaggacctggacactaatgcattagactgggtgg

SEQ ID NO: 162202 - DNA, 494 bp, Homo sapiens
ttacttttccacaggtaaggaaaagaaggtttatttctagtggagcaatttcctgcacataaaaacaacaaagaaaagatctaggttcgctgtgctatatcgaccgctggtaatttaaaaaaaaaaaaacttaccaatttaatcagtcagctttgcttacactaaaggctctaaatctgccccaaactactggttcttctaagataagactctaagaagagactgtacttaactcatataaaggttctcaggaaattgagtgtgagtgccaatgtaatagtctgcctcctccagttcttctttcctagaagatgcttgtgctgtttagttttcttctttttcctttgtataatttctcaatgctcttaatggcattgttttcttgtttgtttgtttttgtgtttcctcatgagcttatgtttcatgagaatcaacccaagatgctatggaatcttatgtagaaattatctgtatctgtccctgtggaaaagtga

SEQ ID NO: 162203 - DNA, 275 bp, Homo sapiens
gggagttcgagaccagcctaggcaacatagtaagaccccatatccataaaaaatttaaaaaaggagtttgtgttcctgtagtagcagacttgggaggttgaggtggcagtatcacttgagcccaggagttcaaggctaaagtgagctgattgagccactgcactccagcctgagcaacagagagatacgctgtctcaaaggaaatacaaattaaaaaaccagccgggcatgctggcgtgtgcctgtagtctcagctacttgggacactgaagtgg

SEQ ID NO: 162204 - DNA, 414 bp, Homo sapiens
gagacaaagtttcactcttgttccccaggctagagtgcaatggcacgatctcggctcaccgaaacctccgtctcccaggtccaagcgattctcttgcctcaccctcccgagtagctgggattacaggcatgcgccaccacacctggctaatttttattttcagtagagacggggtttctccatgttgtcaggctgatctcgaactcccgacctcaggtgatccacccgtctcggcctcccaaagtgctgggattacaggcatgagccactgcacctggccgatatgtgaagcttttattcactgctgcatccccagtgtgtagaagagtgtctggcatatgggagacactttagcatttgttgactgaatgttgttaccaccctgttcagtactgtcttgagctggccagtgga

SEQ ID NO: 162205 - DNA, 154 bp, Homo sapiens
ttttgtaattggtttttcatgactttgttcccccaatagcctttcactaccacaagaagaatgaccctatattttattccaagacagtcctggaccattgggccagtccagtaggaactgactaggtgatgatgtgctcacaacaagcccttgt

SEQ ID NO: 162206 - DNA, 606 bp, Homo sapiens
tatgtattgattttcaacattcaaagtgttttttaacatgttttttcttgtgtgcactaataaaactgtaacaatgtgggctgggcacggtggcttatgcctgtaatcccagcactttggcaagctgaggagggcggatcacctgaggtcaagagttcgagacccgcctggccaacatggtgaaaccccatctctactaaaaaatataaaaattagccatgtgtggtggcaggtgcctgtaatcccagctacttggaaggctgagacaggacaatcgcttgaacccaggggggcggaggttgcagtgagctgagatcatggcactgtactccagcctgggcaacagagcgagactccatctccacacacacaaaggtatgtgtgttatctccatgtatatatggataaccatctcatacccattaggatggctactatttaaaaaaaaaaaacaacgaaataggccgggcgcggtggctcacgccggtaatcctagcacttggggaggctggcggatcaccggaggtcgggagttcaagaccagtctgaccatcatggagaaacccccgtctctaataaaaatacgaaattagccgggcatagtgg

SEQ ID NO: 162207 - DNA, 538 bp, Homo sapiens
aaacgacccgaagacttgtctaattatgccccaggtatatgataatgtacagtcacgtttcttagagtaactcagaacatttatgacacagggttatctttacttctctagtctcagagtttcacttagcaggtcatctgagtgaaatctaagccagattcctgtggatcttaatgaaaaggtagtagaaagtagtggcatagcttgaaatttaactattgtcagatattgggcaaaaaccatctgtatacctcatggacctccagtaaacacttgtacattatgagtttagattgtttaaagtagatttcagtatttccagagtgaatttagtgttactgtgaggaggagggtgagaatatgtttctgttgagtggaagtacttgtgtgtctgcgggtcgtaacggccatgcaacaccacccacggaatcgagaaagagtataaatctgtcaatcctgtacgtgtccggaccgagtgaggtttcccgtgttgagtaaaattaagccgcattctccactcctggtgttgcctaacgtc

SEQ ID NO: 162208 - DNA, 251 bp, Homo sapiens
gtcatctgtcagcaaaactaattaggaccctgaaaaaattgtcagttgcagggatacatttctcactaatgaagaaacatggaaaatatctgtgtaaggggatcacgctgtttcttaagttcagattattggaagagggtggtgatgtaggtgtgtactcttcctgaggttgggtcaaactaaaatgataattgagaatgtcttgaatattgcccttgttaataagttgatctgttttattttatttagaa

SEQ ID NO: 162209 - DNA, 237 bp, Homo sapiens
gagaggatccccgtcccaaggatgaggaatgtatgcttacattaggtggatgttatggcatgtaaattatacctcaaaaatgcaaataaataaattttgtaaatgtaaataaatgaaaattttgctaagagtaccaactcagttgataaagttggtaaagtcaacatactagcattagaaaaaaatatgttaacatgtaagacatttagtttaaatcactatataaaaagccttcca

SEQ ID NO: 162210 - DNA, 571 bp, Homo sapiens
gggattactgtaaggatcagagtgtgcaataatatacacaaaagtgctttgtaaactgtcaagccatgtggtaaacacagcagtcacaagttattcaccatacaaggagcagggccacattacaccctaaggtcgagagcaagaacccactgctcagagacaggatgatcacctctcatgccaggtcagataacatcctctctagatttttttctctttccaccttgaactcaagctgtgtgatttcattcactgttgcaattgctgactgtcatctaagtgccactgtcaaaacattagaggccaaagaagtcaaaaagaactaaacacaaaaagatagctatcagcaggtaacaaaaccattctcaataaactcagcttcaagaactcctgtacatgaaaatgcccatagtcaggcacaagtagctgttttttcatatgttaatgtcatttattctaagagagaagcactctcagatacactcgactctacctctagaagacactagaatggtggagtagaaagcgcaccctccccaaccctccctcccccactgcctccaacaagcac

SEQ ID NO: 162211 - DNA, 1415 bp, Homo sapiens
gccaggatggtctcgaacccctgacctcaggtgatctgcccatcttggcctctcaaagtgctgggatcacaggcgtgagccaccatgcctggccgtggctgttcttaagcagggagacaggtgtgatcactttcatttagttaagtttctttgccagtggaagaagctcaactgaaaccagctcaggcacagaaggaacttaattggcttctatacgcaaaccacaggccaagctaggttcagttgaccttccggtcccccggggccagggacttaactggcagcctgcccctctcccatctccatgtctccacgtctctttgcctgccagctccctctctcagggatgcctcttccacacactggcgttcgtgactgccaatgtttcacacctctcaggttcatgaccacaaagagatcgaggtaggagcgcaggaacttggttaagcatcagggctacttgcttactcattgttttgtctaatttctctgtcttcagtgtcctcacataggaaatggggataacaacagcaccagcttaatgctgtgagggtcaaaggagatgatgtccatcaagtacttacctcggggatggacactaagtgctccatacatgttatgagctctctctgttcccaagtccagaaatctagacaaaagcttccattggcccagttgagttggggttcacctctggcaaatcaatgatggccattaaagtgggttgtgcaataaatgagaaggtgaatttcaaagcaaataggttggggtgcagaatgatttccaagaaggattggcgcagttctagaaaaagaacagaggtcatccctctggctgccagcagaaaagggtttgatcaggccccaacagcctggaggtagggaagtacctaagaggcaccacagttgtccaggtgagaaataacgcaggtctgagctaagcaacagtgcagatggagagaaggcggaggcaagagaagttttggaggtagaaatagggggcatggtgccaagtgcacgggagagatgagacagaatgaaaggttgaaggtggccccaggtgctagcccagaaacctacaaacagagcctctccaaaatgttgcttcattactcaggttaactcttcccaacaccactgccactccattctgctcagtagcacaaacttagttgaaggtaaacccagccacatctggacatttcaaaagactatcttaagtagattcttggtccacttccagctcctctgcttcccactgctccttctccttgtgggtagtcagtgttctgggagcttctattctgacctggcaccaggggcatacaagtgattcaggtctgccagcaactatccactgccatccactgagccacagaatccctactaaatctttgtcctgaccatgaggcacct

SEQ ID NO: 162212 - DNA, 650 bp, Homo sapiens
tttattgagcatctctatgtgtcggacactgtcctaggttggacaaagtggtgaatgagacagataaagtccctcaccgtctagtgggaaagatggaaaataaacaaacacaaacgtgcaatacagcttcactgtgaaagtatcaggctcattatcttctgaggcaaccaagcatttgagtcatataggcaatgacctttgctttaatcatttgccaattaaataacttacaatgtcacttggctcagtacccgtacttctgcctataagtaaactctttttctgtagttccacctataagaaaattctcatcctctcttcctactcagattaacaagagcatttcaaactatgtgataattatagctcctgttgaaaattattgtttatgaccctgggtttacacatcagtttctgtgaatttggttattgtagagtctgtacctaacagaaagacctactcttagtgggctcacaaagtctaatttctgaatgagcaagtttgagggtgaaagccatattgttaatgaactcatcaaggtaaataccacaggcaagcttctggaaattaagtcacctggcctcactgtccacacctaccctctttcaaataactcacatgtaatacattaaaaaatttatctctagga

SEQ ID NO: 162213 - DNA, 127 bp, Homo sapiens
taaaagaaagtgtatcagcatgtgatatgtcatgccaaatgctgcagataagtcaagaaagatgagaactaataggcctttggatttaacaatattcaggtaattgatgaccttgaatttcagtgat

SEQ ID NO: 162214 - DNA, 395 bp, Homo sapiens
tataggccacgtatgtaacatttatatatgtgatgactcaaatttaccttttcacaaaatgcaaaattgctattttccttttaaaactaaaaaattaatgtattaccgttagtgaacagaaaatataaataacaatgtcatataattctttagtacttattacctgagatattctaaataagattctgacttaaaaataccaaaagatatatttactcctaaatcaaaaaattacttcaaaataaatacttttaagaaagtttttaaatattgcctgacagtcactatttgtgtctaggacatctaattattgaaaacaatggcaaaaagaagagaaaatcacaaatggctaagtaaaaagcctctgcaaaacagcttatgcaataaataaacca

SEQ ID NO: 162215 - DNA, 484 bp, Homo sapiens
tacaggtgtgaaccaccacccctggctgagttgggattttttaattttccatagatttcccattaggaaggcaacctggtgtgacggtatttgagagtcaagagatctgggttctaatcctcatttcatcatgtaatactttgtgtgtttcagaattcttcacagtgatccttgcttgtcctcactcctttgtacagcttttttttttaaaggattttatccactgttgtgccagtaactatgctagtgtcactttttatgctagtaatagttctattttcaagttcattctgtttcctgagtttaaatttgtgtttcctagtgccaactgaacatttctgtcatttcatactccatttccaaaaagaaactcattattgttccgctttgaatttgcttcccttctttatgatcttttcatctcggcaaatagcattgctatgtacccagctgcctaaggaaaaaccctgagtcgtcatctttc

SEQ ID NO: 162216 - DNA, 600 bp, Homo sapiens
ctgtttccatgtgttaaaaccctggcagaccttagcgggctctgacttggaaaaccttgcggcaagtgctgggatacaggcgtgagccaccatgcccggccataattttcttttcttttttttaaaaaatattttgtggagatggggtgtcgctgtgttgcccaggctggcctcgaacttctggtctcaagcattccttccacctcagccttccaaagtgctggaattacaggtgtggactactgtacctggcctggaagttgactttttaaaaataaatttggattaactaaggagcctctgagtaaccgcaatagaaccctcggtttctacagaatttgaaaaaaagttttatattccatatttaaaaaatgacaaccatttactttcctgaaattgtaaacctgttatagtcatacccccttgttcatgggggatacattccaagacccccattggatccctaaaattgtgggcactgctgaacccagttgctatcaattggaagacgtttctgtttgtattttctacccacaaatttaatgccttctccatcttaactaagcacttatcatacactgtggctataactttagcagt

SEQ ID NO: 162217 - DNA, 270 bp, Homo sapiens
ttcaacctccacaaggtcttctaaaaacacagctgcgctagcagggctcgcaaggctgtggggttctacagaaaaaaaggacttgaagttccctccttctaacctggtgacaccaatcagacaggcagttgggaacatcaacatcatcatcatcatcaaataacctaagtgggaggactggaatcttccatgctggtcccatgaagacccacccatcaggaggagcccatctcatctgcactgtgtatgctcagcccacctccttgcctc

SEQ ID NO: 162218 - DNA, 453 bp, Homo sapiens
aagcacttaacacagtgcttagcggctccccagcttcccacttccaaggcttccttttactttctctcttggatcccatgttttgtcaggatgatgtctaccaaccaaaatgcatttaggaagtattggttcacttttccctttttcttaaaccaagacatcttcaaatgtctgctagagctctggtcaacatggaaccccggtattaacatactgcatagatgtaattccagcaaaaagcaaagaaacaagacatcttacatagcttgtgtggtcttaccaagggaaaattcatggtttgtgttcatcttttgaaatagtaaaaataactcgtgagtttcatttctactttcttggagccccagtcattgcagaatctaccacagccacagatcccatttcattctctcctgccccctgaggcttttatccttatcctcattttcaaggtga

SEQ ID NO: 162219 - DNA, 141 bp, Homo sapiens
ctatcctaccccaggctcagaatgttggggtatctccacctgcctgagaacttcaaacatacaggggctgggcttagagggcagcagcaccttcgttcagtgcatgagtgaatgaatgaatgagggagagaaagaggaagg

SEQ ID NO: 162220 - DNA, 493 bp, Homo sapiens
agtagaatcagcatttatgatcaacatcttctgaatgaacaagacctgggctttccaatagaccctctgagttcaagtcaggcactgtctacccagtcccctgcctgtccaaggattctgactttctgggcctcatgttccagagggcagggacaagtcatcagataactggacttctccactaagctgaaggcaacatgggagagtaagtggaagacatggtgctgtcagctagggtccaaggaaaggaagggatgatacagacagatgttgtcgggaggtgacatgagcatagccaccccagtgtcaccatgcaaaacaccgaggaggccgcccctccagccactcacagggctgcctgagccttaaactgacttcatgggtctccttactgatcatcatgtccttaagcagatgcccgtgacctccttctaaagagagctaagtcctgaataaagggaagtgactgcttcctcctaagctttgatgcgtg

SEQ ID NO: 162221 - DNA, 171 bp, Homo sapiens
tgtgactaaatgaaagactctgagacaaggagaataccctggatcatgcagatggatccaatacaatcacaagggcctatgtaagagagaggcaggagggttggagtcagaggagcagatgcgatggcagaagcagaggaagaagggtgatgtgatactgggaatgggaag

SEQ ID NO: 162222 - DNA, 362 bp, Homo sapiens
gttctcactggccgtgtggaggaagaattgggggagggtgttgaaatattctgtctaatctaatacaatatttaagtcaaagctgagagctttgatatggagaggacacacagtgggcctaatgtttgccattatgtatttttgaaaaatcttgtcttcagaactccattcctagaaattcaattatgcagaatgttatacagaattaaccaatatcatgggactttccggagctcctgaaaagtcaaaaaaccctcaacattactcaccacctaaggtagggggcatggaatctgcagagtggtgaacagtcaagtggactaccctctccccgcccaccaatgttggtctgttccttttct

SEQ ID NO: 162223 - DNA, 161 bp, Homo sapiens
aaaaggactccatcttctagcctaggatcttgtctgaagatgtgttgcctggatctccttgcaaccaagatggcagccaacatagaacggaacagaacagaaagaaactagatccctgaactgatgaaataaactaacctgggggctgcctcatctttggg

SEQ ID NO: 162224 - DNA, 416 bp, Homo sapiens
ctgcttcaccttttgatgtacagggcctaattgtaatacatttaaatgttaagtctccaccccaaagtgaacatgggatgtatgtaacacgaatgtttgttcattacgcatgcatcaggaccccattcacggatattcatagctcctcctataacctgttgaataggaatgtatggccaacctgttcagcattaagctcttgtcccaactccatctccttctaagtgcctttcagtgtctgccagaagctacgcttccaagactgtcaaggatggccaccttacaggttgtaaccctttataataaatagtctcctttctacttttttctttcacagctggagatcctttctaaatttataattgtgtcaatctttaggttgacaccaccaaaggtaaattctgaaattccctgag

SEQ ID NO: 162225 - DNA, 555 bp, Homo sapiens
gattgattgagattttagatactggcagagtagggaggatgggcttaagggctaaacctagtggctgacactccgttggggttgagctagcgactgcctaggtgtccataaggcatggaagtcaaggccctgacatgaaagcctgagataacttgggggtggaggagtgtgacccattagggtcacccctctgccctgggctgtccacatctccactggccatgccagacagaagcaaagggtcccagtctggctgactcagccgcctcatcacccctgctgctcttcacctcgctcctgtatctccctcctcacctggcactgggcacaaaagcccccacgtgtcccagcccagggcaaggtatctagagataagacagggaagctgtggacagaaatggctcgtgctgccccagactcctctgcctgggctctcctgtggctgtttggattccaggagagggcaagctcctctctaaatgctgggggctcatgaaggctgcagagaaactccctggccaggaagccccaaggcactttctgttgtcctgccct

SEQ ID NO: 162226 - DNA, 221 bp, Homo sapiens
ttaataaataattattaaattttgaaaggttagcccttcattatgaattattcataaattctacataagaattacatgaagataatatttttcagaaaggttaaaacaatttaacatttctttatctattttatgctctactttttacataaagtattgtcaacttcaatcaccacaacctaagtaaatttcacattaacaaatggccatggccaggtgtg

SEQ ID NO: 162227 - DNA, 320 bp, Homo sapiens
actagatgaacaaatctttaaaaatagccagtgcagacaaggtggtgaagcagaacatgcgaacctaccatgcatcattcacggctagaaccctccaggtgcggaaggtagtattttaataactttccatagctacaaaatattattacatagaagggagtgatttttttctaatatttatcctaaagaaatagtcaacaaacatttttaaaaacatcaattacagtcgtacctatactagcataaattagaaacccagtatccaacattgaggcagtgggtaaatgaatcgtggtttatcaagtcattaaaatcaatct

SEQ ID NO: 162228 - DNA, 104 bp, Homo sapiens
cggtacataccagttcatcaatggtagcaaacacatctcacgaatgtaagacgttaaataatcagagaaactgtgtgcaggctgtatggaactgtcacgagaca

SEQ ID NO: 162229 - DNA, 253 bp, Homo sapiens
tgtaccttgtagcctagccgactctgtcaaaggtaatcctcccagtgcaataatcctctgctttcaaaggcgaaaactgtgtaaattgaattttacagaaatctttcttaaatttcaaaattattgttatttaaaacgtatatttaacttatttttgcattgcaaaattggacataaaaacaaaccacagtctggccccaggtgaggtagggagaggattgttaggggaagtgtgcacagcccataataggcc

SEQ ID NO: 162230 - DNA, 267 bp, Homo sapiens
aggaataataagctagttcctgaaagccccttgtacagtgcacagacctgttcaccaaacactctggaccttccttcctccttcttcccatttacattttgcctgttcaggaaccagccagatccccttcactcaccatgagtagctggtgcactcaattaattctcctggaagcacatgcattttagaaaacgattttagagactcactcattcacttgattgattatttatcaagcacctattttgaatcagaacctatgttagg

SEQ ID NO: 162231 - DNA, 374 bp, Homo sapiens
gaatcccaactgcttcctcctgcccttttgattaaaagaacggtaagtcagcaggagaggtgctgcttttaacaagcaggggtgtgcagcaactgattggtatctttctttgaaaaaaagtagaaaagattgatgttaaacaacactaatcagagttgattacagggactgaatgaattcattgatgggaaagaaccatgcttccagagacaacaaaagagattagataattgtcaggggaagagtatttggaatagtgctgctcatctctgacaaccaggaatcagttcccctagctctttaaccattccttaaaataggcatatatgtgcaataagtacagttctctgctgggaacgttgttctcaccaagc

SEQ ID NO: 162232 - DNA, 349 bp, Homo sapiens
tgcacctgcctgtctgtgtgctcaccctcctgtaaggggtttgagctgtcgggagaccaaacagccgagccgcacctctgttagacacgtcctgcaaggggaatcagggaactcttggaagtcttctgtttcactactattttaaaccagttatggaggtaattttttattaaaatgttattcatgccttcttaaatatttaataaattctaattctcttgcagatataaagatcatctggattatccagtttatgaatacttaataaaataataatatttaaataatatataataaacatcaaaactgagtatgatatttctttttttttttttttttttttttgaga

SEQ ID NO: 162233 - DNA, 365 bp, Homo sapiens
ccgctagagcttaactatgtgggaagttttgcaaccttaaatacagcctgctataattattagacaaaagtaatgtttcagatttcagcgtggctcttatacagccgtacctgtatcagtgaaatgccttgctttagattgcacgacttaacaagctcaaagattcatgcaagcccgggattccgaactcccaagccattgttctttctatgacatcttcctgcttggtctacaaccaaccactttatccaaattcatactcaattttgaaatactcagataaagctttcaaaaatgctgtctgtgtctggctgagtgcacactcaatggccactccacataaaagggcacattaggaggcctgg

SEQ ID NO: 162234 - DNA, 519 bp, Homo sapiens
tgtcagttatttgttacaacataacgtaattacagtcctttttgcgaaaggctgatgaaggcaaaaggagaagagatagcagaatacaaataccttaaacaactggtttacaacaaagtaaagttcaattaactattccattctccaggtttttccgccggacatgaactccataatttggatacagtgtaattcacttaaattgctttcattttttatttgcaccaactgaatattgtaacatttttcatgcactgacatcaatacacaataaatgtgttgagtcattttctctagccataaggaaatatcagaatgctttcacagtatttctaaaaaaaccatattgctaaagcctttacttaatatgatgtgatcttttctcaactggttaaatgcccgttttccatcaggattgcacagacctttaaagcaatcaaagccatatcaaatgtccatccatcttaagatgaaggaacatgtattttctagcattaggaaaccaagtgattatcttaa

SEQ ID NO: 162235 - DNA, 176 bp, Homo sapiens
caatggcctcaagagctagactgcccaggcagctcatatttcatacagttttactattttaaataaaatcaatttgaaaaaatcattatgttgaagaataaaaatgtttaaatattacctgatttttttttctcatttcttttttcccttttgaccttcctccttccccatgcaag

SEQ ID NO: 162236 - DNA, 237 bp, Homo sapiens
cctgagcaatctctttaatctctatgaacctctcactgtaggcatgagacagtcaggatcctacagccccctacaactctcattttctctcagtgcacgtgtgcacgtgggtgtatcctgtacaagggtcttattttgctatggtagattcctccttttcccctcttgacataagtgaattttaaggtccttggagttcctcatcagagccagccaaccttcgtattgtcagttcat

SEQ ID NO: 162237 - DNA, 401 bp, Homo sapiens
atacattgtctgatgacataataggcttcttaccctaaatgagagtattcacaaagttttcgctagtgtccactcttttaatgctttccctttttctatcatttcttaaatgcttcacaaagaacacaaaatcaaggccacagcaaagacactgtcagctacgctgagtagcaggagcttgctgtcattggcagcagccctattcagagtaccctgaatttctttcattacttctgtatttagggagttattctctgttgatctagttaatagcaggatctgagtgaagccatctttcttcctcaccacagtatctcagtatctgtcggcactttgttagctttgtgctgaaacgcaccctcttgacaaaaggctggtttcttctgtcatcaataagcttt

SEQ ID NO: 162238 - DNA, 507 bp, Homo sapiens
ggccgttacaacagctcaagttacaacagctccagttacaacagctccagttactacagctccagttacaacggctgcagccacaacagctccagttacaacagctccagttacaacagctccagttacaacagctccagttacaacagctccagttacaacagctgcagttacaacagctccagttacaacagctccagttacaacagctccagttacaacagctccagttacaacagctcctgttacaagagttttggtatatgctttctcaaagatatgctgactatatgcaatttttgtctgttttaaagggcaggtctggggcaggattaaagggtagagagagggatcttacatcaaatcctctgggttagaataggaagtcagatgaaagttcatataaaccactggtgctactctgctgacaaacatatccaggagggttgacatgacctttccaggactatatacatcttacaaatgtaactcttacagtgaaagaca

SEQ ID NO: 162239 - DNA, 246 bp, Homo sapiens
tgggaatgagaaagcactgggagcttggccgttacaaaggcacacggggcattttgtacttggcacacacaagatcaggtacaccctaaaaggaagcagcaatggacagatgggagtttcacaccctgcttatagcattttctgtttaaatccagagggtcctgtatcctttgtgaatgctggcttttcttctgcattttgccatagtttttgcttttttcttcttgtcttcttttgatacatttc

SEQ ID NO: 162240 - DNA, 445 bp, Homo sapiens
aggggggcctggcacctcctggcgctgacggattgtcagcgggaagcatggggggaagtcctatacaacagcccctccaggcttcaaaacactctgttccatctcaaatcaccttcttcaagggttctcaagagagtttggatgtgctaaaatttgtagaacaagatgacgatatataacacttttacgaccttaagctaagtcgccatccgcccaccagagctatttatgcatcacgtggcactcctccccacaggcagggaccaggcataggcaaatgatcatgactgtccacgagcaagtcagcccggggctcaacgggggcactcatgacacaaaactgagggttgtgggaacataaaagcatgccctgctgttcctgagtggatattaggtaacgggccaaacaagcggcttgaagagactcaagggactgggacgtgtc

SEQ ID NO: 162241 - DNA, 425 bp, Homo sapiens
tagagaatagtgtcacacacttgtaaatatttatttcagttttgtttttttaaagttttttagaactagatcctgatgagtaatcatgttattttcaagcaataatttgaggcactattcttttaatgtaacttttattatttatattaaaccaaatgatatcattgttggtataatcaatatatgacagaatttgttactgtgaggaattttagaggttatctagtgtgagttatttttcttccttcatgccagcccattcacaagtataaaagatacatctttaaaatctccaggacatcagtcaattaattttagtggctgcgtcatttttcattgtagaactgtactgcatgatttaagcaggttcctgttaagtgacatttaggctgattcactttttcactattgcaaatggtgctttg

SEQ ID NO: 162242 - DNA, 630 bp, Homo sapiens
tagaagtttattttaacatccatctatgacccagcaactccacttctagatatttacacaatataaatgaaaacatgtcttcatataaaacttcttcaagactgtttaaagtagttttttccataatagtaaacaaaacaaaacaaaactagaaaacctaaatatccatcaataggagcatggataagcaaattgttaggtatatttatataatacaggactcctcaacaataaaaaacagtgaactactgatgcctgtaacatggagtgaaagagggctgacacaaaagaatgcatattgtatgattccatttatataaagtggttacattttataagtaggcaaacactttataacacaggcaaaactagtgttaaggccgtggaaatcagaacaatgcttgctcataagggtggaagttgacaggtaggggcatgaggaaatgattggggtgacagaaatgctctttatcttgtctaggatattattccatttgttcaaactcataaatttatatacttaagatctatgcatttcactgaatgcacttttttttttaattaaaaatattttagccccagccatggcaaggacacatatacaaattatagcacaataaaaaagtgacc

SEQ ID NO: 162243 - DNA, 914 bp, Homo sapiens
ttgcctcaccctcccgagtagctgggactacaggcaggcacacaccaccatgcccagctaatttttaatttttttttgtagagatggggtctttctttgttgttcaggctggtcttgaactcaggtgatcctaccactttgggttctcaaagtgctgggattaaaggtgtaagccactgtgcccagcagactgaaatcattttataactgtgcttttcaatgttatcttaaaattagctggggaagaattctgtttagtttttgttttttggtgtcagtctcatttaaaaattgacaaggaaatgaatggatttgtggtaactgccttttaactttgtaaattttaacctaatgtatgtttaaattatcagaaatagaaaattcagatacttctatacttactgacttattataaaaactgtgcctaaactgaaggacagaaccacttaaattattcatttatttgagaagaaattttctattttaattcaacaatgacttttttcactatattttcatggttgaactggctagagtgggtagttatttcaataggtgttggaaattaaaaaaagtgtagatagtttccagtttactgattttcttccaaaaatgtgtttgggacatagaaaatgttttgcagaagcagcaaggaaaatcatgtgatgaaggttaggccctaggctagagccagaatgtttcttaacttgtgccaaaatgtccaacatttggaataataatggcaaacggtgcaatcactgaaataaagcatgaaaaccatgcttaaacaagagggttcgttctatacttgtgttagcttttagctttagggggttttgtggatggagaaagaggagtggtgtaagggatctttaagattacttggaggagactggaaaaaatggattctttgg

SEQ ID NO: 162244 - DNA, 265 bp, Homo sapiens
gcatggtctcttccaggtcaagccacactgtagttatttgggggataaatgcttggctaatttatattcctttataactgtctttattaaagtgaagacccttgaccctgagtcagaatcacctggatggttcctagactccactcctacaaactgaatcagaatctctgggattggagcccagaaatttgcatttttaatgatcatttccaggtgatcattaaaataaaattgtattttataaaatttatttaataaaatgtat

SEQ ID NO: 162245 - DNA, 368 bp, Homo sapiens
atgaaaaaaaaatataaaatataccccccccccccccccccaaaaaaaaaaaaaaaaaaaaaaaaaaaaaaaaaaaaaagaaattgagtagtattagctttttattaattcattcagcaaatacatatgacgcaatcacgatgtatcaggttcactcctactagatgtacatgaacaaggcctttccctgaaggaaaagtggaatagacatgagattaagcatgcaaattacagcctcttcctcagagagctgccgatagcaactaaccctgacaaaagtcaatcacaatatcagttccttcctctacagagtgttaaaagtttctcggctgggtgcgatggctcacgcctgtaatcctctgtaatcc

SEQ ID NO: 162246 - DNA, 337 bp, Homo sapiens
ggaaaaaaaaattttttttgagacagaatctcactattttgcccaggctggtcttgaactcctgagctgaggcaatcctcccgcctcagcctccgcagtagttgggattacaggtgtgagccactgcacctggcagaggtcagagactctgtgagcaagtgacttcctaatactttataagacttaagcctaaaatgagacagacaggcctctaaaccttactaagtagaggagggagtggtaggccagctcctaataggaaaaagggagagaaagaggctacacatgtcagtttgtccttccagattccccatataggtgacaaggggaacaaggc

SEQ ID NO: 162247 - DNA, 557 bp, Homo sapiens
atgaaaaaaaaatataaaatataccccccccccccccccccaaaaaaaaaaaaaaaaaaaaaaaaaaaaaaaaaaaaaagaaattgagtagtattagctttttattaattcattcagcaaatacatatgacgcaatcacgatgtatcaggttcactcctactagatgtacatgaacaaggcctttccctgaaggaaaagtggaatagacatgagattaagcatgcaaattacagcctcttcctcagagagctgccgatagcaactaaccctgacaaaagtcaatcacaatatcagttccttcctctacagagtgttaaaagtttctcggctgggtgtgagccactgcacctggcagaggtcagagactctgtgagcaagtgacttcctaatactttataagacttaagcctaaaatgagacagacaggcctctaaaccttactaagtagaggagggagtggtaggccagctcctaataggaaaaagggagagaaagaggctacacatgtcagtttgtccttccagattccccatataggtgacaaggggaacaaggc

SEQ ID NO: 162248 - DNA, 684 bp, Homo sapiens
tattggtcaccgtggctcccgtccccaggtggaagtgtggctgaatcgagtgctggaccgaatgtgctctaccctccggcacgaaatcccagaggccgtggtgacctacgaagagaagccgagggagcagtggatcctggactacccagcccaggtctgaggcgggtgggggctcggcggcgcctcgtggctgagataaggggcgagtttctttgcgttcatgggctccgctgttaactgtggtcccctggaaaaccatctaagctttcagcaggaatgtctgcgttagcaggcgccagcgatcgctcactgcgtgggcaatggggggtatgtactttcaggtggccctgacttgcacccagatctggtggacgaccgaggtgggcctggcatttgccaggctggaggaaggctatgaaaacgctatcagagattataacagacaccttcagaaatatgtactttgatttctcgcctgaaaattggcagatgctactgagagtctttaaaaaaaaaatgtccttggttagaaatatggaaacaaaagatcatcttgaaaagaaggagaatttacctgtaattccacaacccaagcatgacactgcagggcccttatgcaacctgttactctgtgtgtgtataattgatttatatgtaaaaatatacagactctggatggcgtta

SEQ ID NO: 162249 - DNA, 181 bp, Homo sapiens
tatttgccatcataacccatctgttttctcatcctagaaccctggcatcatacttgacacttcccaggggaaccaattcattaccatattctgtccattttactctgaaacaaatcttgatattttcatccattcccttaatccaagccaccattactttcagttgggctaccatgttagt

SEQ ID NO: 162250 - DNA, 120 bp, Homo sapiens
aagattcccattatcctggtgtacatgtccgtataaatgtcttccccttcagtgtgggcaagacttgtgaatatatagtcggccctctcaatctgcagattcaaccagccacggatagaa

SEQ ID NO: 162251 - DNA, 568 bp, Homo sapiens
aaattatagcgtatcacctaagctttaatagcttctgattttgttctaattttcccaaatattaggtggtacgccagatactgtttaagtgaaaaatcatttggttaccttggctatcttaccaactttttaagagacctacattgatgataaacctccagaaattggagattattgtaggaaacccaggtccatttagtgttcactgatgccctttcagtttaacttttctcattttgatgatcatcagcttcctgttctaaaattaactggcaaatcattctagcatctcccttcagatagaattttgtgttaatgatttttctaagtgtttacttggcagcttggttttacttaaacattccttctcatgcaggttccatgatgaagatatttctaaaaacataagcatgcttctactttagttatcactttgaatttgatttttaaggtatgtgggcattttgtgtttgaaatgcaatgcaaagctgtccgtaaaactgacacaaatagatcacctgatattttagctgtcttcatgatggaatcatactacgctggagcaatt

SEQ ID NO: 162252 - DNA, 546 bp, Homo sapiens
gcagacagcaagtcctgcctccaatgctaatcagtgttgaaggaatgaagtagatggacttgtcccagagcacccggcaatgaggggtggcgctggaagggagctccagccccataactcacaccggtgtccggccctcctcgaccccattctcttcccttgaggatgtctctggaccaggatggccggaggcctgttgggtggcgagggggactggctgctgcgacggcgggggcaggggaaagggcctgttccccaggacactgggaggatatttgggggaaagccccgcactgggttctccccattttgcccgctcggcttaggggctcggagcccggagggagctcgggcgtctggccgccccctgccgccttcgtcccatcggccccgaacggagaaagggcggccccagagagcctcccggggtcggcggcccctcccgcgcgcagccccgacggccgcgcagcgccctctagtgccgggcagcggggcccgcgcggtccagcccgcctgcccgcccgcggctccgcttcccgcggccgc

SEQ ID NO: 162253 - DNA, 437 bp, Homo sapiens
gagaaaaaaaaaagaagtttgtgagggattcctaagaaagtgaccgagggagaggaggaaggggagagttggaaaagttaaatgattcacttgtaagctactagaactttgttaagtttggggacatcatggttttgtgaaatctactttcgctgaaatttatgtccatttctttgcctccttctctctgcacaccgcctctactcagaaatttaaccatttacacacaacagaaagaattttcctcaagatcgctacttttgtccagtatttctgattgtctttctgcttcaaatctccagaaaatgtattccctttaacaacttaacttggagaaggaggaaagagacctaagcagatatgactccacctaagttttatgaggaaccttcgaaggaaactctgagaaaaatgagtctgtatctttttctccctct

SEQ ID NO: 162254 - DNA, 199 bp, Homo sapiens
cctgaatttgtattgctctgtttttaaaggaattttgtatttttgtttttgagtgagattggcctataatttttccttcttatatgacccttttcaaattttgaagtcagaattattctagctcattaatgtgagtggagcagcattttctcagaaagaggaaacaatgtcggtctgtttcagatgacattttattaat

SEQ ID NO: 162255 - DNA, 202 bp, Homo sapiens
atttgtaattagcgatacctagaagtgatttggctactgtaccacatcaattttggccacctccagtctctggcaatactattttgtgtcctgggagcaattcttgtggatatggagaataaaggttattgatagtgtaggggattttcaaagacattaaggaaggctaagaggttgcattggctgtaggattggaggccta

SEQ ID NO: 162256 - DNA, 415 bp, Homo sapiens
tgcatcaccagtaccaaggaaggtgataacacctcctttccaggtgccttttcctagctgggatcttcactcatctctgaaccccctcacagaatccacgtcagataaagtggctgtgggagccaggagagacccagcagagacgatgggtccacctgagccactgcctccctctgcctgaaagcccagtgatcccttctgcttcactctgaggcccttgcagttttcagcaggacaaagaaaaactgtgctttgagttaagacacttgaaaaaaagttcatttgcacagggagtctcagggactcctagccatgcatcccaatacctgcatcccaagggtaggaacacagctgtaagttctgggttcagagcctcacaccatgctggggagagcggagagccggggcctcttct

SEQ ID NO: 162257 - DNA, 342 bp, Homo sapiens
tttaatattctcataatctagaagctattctctacaatgataaaataatccaactctcaggcaatactgagcaaaatacaacgtaactaatatctcaacatacttgaccctatattttatatgaaaataaatgaggtcaggcgcaaaggctcatgcctataatcccagcactttgggaggccgaggcgggtggatcacttgaggtcaggtgttcgagactagcctgaccgacatggtgaaatcccgtgtctactaaaaaaaaccacaaaaattagccaggcgtgttggtgcatgcctgtaagcccagctgcttggcaggctgaggcaggagaattgcttgaa

SEQ ID NO: 162258 - DNA, 166 bp, Homo sapiens
ttttatacagaattctttacataactctcatttcagaacatcagtattttatggagcctagtttttgaaaatgctaaactaatatctggaaagaaatactgatatttaaatcctaggtgcttgtcatctactcagacagatgatgaagcagctaaccttcatttgt

SEQ ID NO: 162259 - DNA, 517 bp, Homo sapiens
tgtggccactgctgggagaagggggagggctggcattggcacttcaagactgtctttcctattctcttcaatgtctctttcagtgatatgaaattaaaaccagctactgtgaatgctcacctgatttttggttatttgagatggctgccttttgtatgtagttagttgttaaaatttgatgttcctcctgggggtgaggggggtgacaaacagtgtaggcttcttctattccatcatcttgctctgcccctgtggctgctgccttagttcagcatgccaaagtgccgtattttggggtattgttttcatgccctaacagttccttgtggcagcttttgtgtatctctaatctaatgcttgtctcattggatcatgtttgtttacaaggatctagcacctactacaagttactgccctaggtgcaagctcttccgggcatgtctttccgttccctttcaatccctctggcttagcccttgcctccctagccccttccaaaactgccttttattgctga

SEQ ID NO: 162260 - DNA, 566 bp, Homo sapiens
tcagggtcctggggagggagatgaatactcctgcagcaccttcaatctaacctgaggtggagtcctagcctctaacagaggacaaacaccctttaaaggctagaatatccagttacatgtaggctgaccagattagcatgagctgcctccagtcgaaggctacagacaactaaagacgtaacaactcacaagaatcaattcatatcccttaggtaaatagctccagcttcttctagaaacttctacacctctattttgtcatctgtgaaatgcagatacccaccatacaggatcactatgatgattaagtcagatctatgtataaaagatccttatgaaatacagagtgctggacttctgttaccagtgcttcctgggtcttcactaaggctgtaggactggattctagctctgcttctcttggctactaccctggataattcaggcttggagtggtctgtctctcaggaagatgctttttccctttttgctttagttgggacctaagtggctagaggcacctgttttttgtttttgtttgtctgttttgagacagagtctcactc

SEQ ID NO: 162261 - DNA, 392 bp, Homo sapiens
gaaattggcacattagactctgctacaaaacttacctgtttctgatctctcgaaatcaatgaatctcattattattcatagctcttcctttaaaaaaaatgaaacacatcatttgcaaaaagaaaattttgtcccatgcagtctaggttgttccaggagcttactgagaaactacaacagccctctgaggttaactggtactattcactgaactctcaagtttctgccttgtgaatctggtggtgggaaatttggctgtagtaaagaaggagcctcacttgatctctgcggaaatcattgagaattacaagtaggatgcttcatccttgtttaaaaaatagaagtaattgtttcttttggaagtagcatgctatttatttaactgcacaagt

SEQ ID NO: 162262 - DNA, 436 bp, Homo sapiens
tgtactggtagataaggaaggagggggatgctgggaatcacagtgacgttagagaaatacggtggcttgcaagcttcctagatgtggctttaatttcatgggtaaaaatttttttgtcactttccttatcacttttgaactgccaaatggttaaacagacgaatcctaccctgccccaggcctctttgaacaagtgtagtaaagctctgctctgttggagttgctccatgccattggcctgagaacccatctatgtaggaacagtgtccagtgttcttgtggtaccaaattgtgccattggatacaataatctgttgagtctgggtgggataagtgatttgtatttgttttggtttaaaaacatactttgatagaaattagtccctttcttttccttctcttctacaatgtcaattgcccatttcatttgtgtgtt

SEQ ID NO: 162263 - DNA, 399 bp, Homo sapiens
taaaatctagacagttatattataatgtgataacagaggtatttaaattaacagcagcaacaagatttgatgctgggattaacaagaggagatcttcattatctggctatgtcaggcaaaccagatatcagcagatttggcggggggagagtggtggctggaaggaaactaattagtggcccatgttaattttctataatgctcagaataactagataataatattctcttcatttcttgtcatcgcagaatcccatgacaatatctcttgagttgtaatttttgtgtgtgtggacaatcaagtcagattcaacaaatattcatgttatctattataaccaagaagtaaaactatagtttaagaaaaattatctgccattatattgtgacttgacaact

SEQ ID NO: 162264 - DNA, 124 bp, Homo sapiens
tactctgattaaagccaccaatttattgtggtttgcaatcttagttgagcttactctgctgcctatcagttatttgtctttttttgctggagtttattctttctcagcacatattccagatttt

SEQ ID NO: 162265 - DNA, 349 bp, Homo sapiens
agccatgggatgctatgtgaaaacggttccaccatccagtgcaggcaggagttacaaagaccagaagcaggtgggcagggtatgagatgtcagctgaaggctgttgctatgatcccagagaggcaaggagaaaggcctgactggaaacagtggtgtcacagatggaaaagggaggatctggggtagctagaatgggcctgcggggagaacgagaaggagagactccaggcgtagatgttggttcaggtgtgttggcgacatcagtaagaggatcggggtgcaaggagaagacgggacgctgcgttccaccgtggaggtggtaaggctgaggtgcccgcgctgtgcatgc

SEQ ID NO: 162266 - DNA, 336 bp, Homo sapiens
caggtttgcactcggaaggaccactgtgggctgtggagggagaaagaccagaagcaggtgggcagggtatgagatgtcagctgaaggctgttgctatgatcccagagaggcaaggagaaaggcctgactggaaacagtggtgtcacagatggaaaagggaggatctggggtagctagaatgggcctgcggggagaacgagaaggagagactccaggcgtagatgttggttcaggtgtgttggcgacatcagtaagaggatcggggtgcaaggagaagacgggacgctgcgttccaccgtggaggtggtaaggctgaggtgcccgcgctgtgcatgc

SEQ ID NO: 162267 - DNA, 506 bp, Homo sapiens
cttacagccgcttcatgaggaactgctgttggctccattttccagattaagaaaaattttgaataggtcaattaaacccaaagtcagaggtgataagcagcagagcaggaatttgaacccaggccatgactccagaatccactgttggctatttcgccctggagacccaaacgggagtacacaggaagatgcccaaacaaggacatgatggtgttacaaaagctttaaaaactcagaaccaagtagggggaaaatgctgagggttacatcatcctcctaaaagagatttatcagtgtgcccctgaactctggcccgtgataaacggtcgtggcagtaagataaacagaacaagtacacagcagatcggctttgctgctaaagggggaacacattctaacattcctgaggcgcactgtccaagggcaggccaggcaagaaacacacgataaatatccaaggcatcaccccatccaccagctgctgccgtggctggagacgcagtcca

SEQ ID NO: 162268 - DNA, 243 bp, Homo sapiens
ctggtcttgaactcctgggatcaagtgatcagcctacgttggccttccaaagtcctaagattacattttattttattaagtagtttaattaatttatatttaaaatgattgcttaaagaaatgaagttgttatttccagttacgttattattgttttgtgtgtttctagtagttttatttttctcatttcctgttttactttcttaatttttatttaattttgtactggcatgcattattttt

SEQ ID NO: 162269 - DNA, 109 bp, Homo sapiens
tgtatgaccttgagtaagtcacctaacttctctgtgcctcatccataagatggggatactaatattatttaccttatagggtttaatgtgatgattaaatgatttaata

SEQ ID NO: 162270 - DNA, 456 bp, Homo sapiens
atatagccactagtgggactcctggctcacacagtagttctatttttaattttatgagaaattagaaaagcatgggggtggacatagagaagactttataaaagaagcaaaaagtgtgtccaatcttaaaagatgagtagcatttgaagaagtaagacatgccaaggaggatattttaggcaaaaagataggtatgaagagatctttaaaagctacagactgggaaaccaaaaactgaactttgcaggggcagtaagaaaactggtgtcaccagaattaacattcatactgaggactagtatgacactggataggcagcctagggctaatttatggaggtcttaagtaacaagcatagaagttgagatgtgatgggtaatagttcataattcagcataggttcttaaggaggcaagtaacataattaaaatagtgttttataaatggcaatcccac

SEQ ID NO: 162271 - DNA, 137 bp, Homo sapiens
acaaacaggtgcttgttgaagctactagacttgatgagatcactagagtaaacacatagaccggcacctcttttcatggccagatttcactgtaaagtcatagaaagtatgaaatgggtttgtatttatttctatat

SEQ ID NO: 162272 - DNA, 242 bp, Homo sapiens
cagtggaacggtaaaggggcgggtgcagtagggattgttgtcctaaatccttaatccatgagacacctctgtgaggttgagggagtgtggggcttactatttaatataccaggggctcccacgtaaagaatgtcaaccaaagcagtgcaaaaacatttggtgtattttgagacctccatgaatggccttctggcccaccacacagccctgatggtggggggcaggagagcccatggcctccc

SEQ ID NO: 162273 - DNA, 141 bp, Homo sapiens
ggtttggggagacctggggagttgtcatcccatcctctccctcatctctgggagagggatattatgagaaacgtgaactgagaggcccctgggaaaccactggttacccagtcctccctgaacctggaaatggggatgcaa

SEQ ID NO: 162274 - DNA, 525 bp, Homo sapiens
gtgacaggggactgcagtaaagaaatgggtaaaatttcccatttttagggaagttatgttttaatagggagtaagacaataatcaagtaaatatgaagaacctcaggtggtactaagagctatgcaaaaaattaagcagacagatggatacattttgggatttgtgagacagagaggctaccatgtaacaaaatgctcaggaaagacttcactgataaattgagacttgaccaaagacccaaataagttgagagtctgagccatgcagacaccttaaggaagagtgttcctgatgccattttattttactgtaatggcacttgtaaatttctgcccaaaattatctctcttcctcaatcataagtgttatttaccaaaagcccaccattgtgcagaactgccatccacgaagctcaaatataaaaaaatcaaaggtagaaatctgcctagcaaagtgagtgacaggagtttccatgtcacttgttatgacgatattaataacaagcatttattgaggacttatta

SEQ ID NO: 162275 - DNA, 424 bp, Homo sapiens
cacctgtatggtttccaatcagttttttaaatgttctgttcttaaagtgggtaacaacaaaatgcagacatgagcaatgagtaagggggatggaagaccaggtgaatgtgtttctgcagagaggggacataagccagtccttccaacactgtccttagacggacaaagaacctctgcccctttccttcctgcttctcagaataacaatgtgagcatttgggctgctctcaaaccctaaagggattcaaagtagccaacagtcgggtatcctctccttctcgaggtatgggtctcatgggtctcggtgcatcaagccaagaacagaaaggatccaatcgactgtccccatcacttctatttgaattgctgggataattcctacattttaggaaacagacaacctctctaagtgacacagtgtaac

SEQ ID NO: 162276 - DNA, 579 bp, Homo sapiens
aatcacagattatagttgtagtttatgtcagaaaacagactgcttcttactaagtcttatggcccacataagatgggaaagggaattattttagtttttaaaaaatcatatgtatcaatcactttttaaacatttcctgctttaacaagatttttaaaataattaaactaccaatcattggtcctaatttcattaaagggcttctactacattaagtcttcccatttaaaaaatgttacttgtctctatttagaccatcttttaaatctgtaagtaaaggtttagtgttggtctaacagatcttaaatactgctggtaagatttattttcccttatccatagggatacattccaagacccctagtggatacccgaaaatacaggtagtggcaaaccctatataatacacccacacacacacacattttttccctatacatacatactgatgataaagtttaatatatactataatacaagttatgtgaatgtggcttctctcttaatatatcttattgtattatactgcaagtaactgaaaccatggcaatcgaaacctcggataaggggagactactg

SEQ ID NO: 162277 - DNA, 422 bp, Homo sapiens
ttccagtttatgaatgaaagcaagtgaaccttaaagcagcatttaaaaaaattgttgatggatgaaggcttattagaagatataaatataaaaatcttgctcttgttaactttcttttttggatttctgtgccccagcctccctcgcatttgtgtgcctgatgtgaagtgcatacgccctggagctgcacagctgtgtttggcttcagctttgtacgcatctgtctatgtgacccttttgacctcttggagccctggttttcatgcctgtaagatatggcttacaggaagaatcagagagtcatgtttgtaaagtgtctcacatggcccagcacatagtaggggttcaaataaaatgattttcctttctttccaatctcaccttcagccactttactttcgagtgttgcctggacactatat

SEQ ID NO: 162278 - DNA, 488 bp, Homo sapiens
aatccggtttcacaaaagatatgtagatataaaaatgatttgtaatagcacatctatattgctgatgaaatacattcataagctgttttgtctatacatatgcatacattcaagtaacagttgaaactgctgaaactatgtcagtatattttggcacatattatgaattgccatttggaagaaaaaaacccaatattaaaaatcttttcttataaaagaatataaggtctctctctcgttagtcttgttagtattattttttctcccctaaggaaatccaacaattatgttgggaaatcaaggcaaccttcaaaccagggaatctagatgtacaggaaacaacaggtagattggcaaaaagataaaggccaatttaagagcagaattaatttcttctgcagtgaccctagatcaccacagaaggggcaaaagtccagaacaactggcagtaacataaaatccaaaaacacagttgtttgaaagatggc

SEQ ID NO: 162279 - DNA, 453 bp, Homo sapiens
cgctctaggaggatccccaactcagggcgagctgcctgggggtcaagcagctgcgactccaaggagtcaggcagggtgtccagggcctggagagccaggcccggcagccccagaggatcagcaagaggttgcaggggtggcagctccagagcttccccgagcggctctagtgcctgcgggtccaggaagcggggctgggggtccaggagctgaggctccggctcgggcgatggtggctcgagggcctgggcctctagcagctgggcctctgggcaagtgagggaggccagctcactaaggatgtcggcgtcagcaagttctgagtaatcagtgctgtctggctcaggctctgggggcagacccgtggccgcagccgtggctccgggactatggccttggccaggctggggactgtccctaggctcaggctcaggctcgtagaggggatggctg

SEQ ID NO: 162280 - DNA, 344 bp, Homo sapiens
agcggtcacccacacgcgaagtcggagcggcccagaccatcccctctacgagcctgagcctgagcctagggtccaggaagcggggctgggggtccaggagctgaggctccggctcgggcgatggtggctcgagggcctgggcctctagcagctgggcctctgggcaagtgagggaggccagctcactaaggatgtcggcgtcagcaagttctgagtaatcagtgctgtctggctcaggctctgggggcagacccgtggccgcagccgtggctccgggactatggccttggccaggctggggactgtccctaggctcaggctcaggctcgtagaggggatggctg

SEQ ID NO: 162281 - DNA, 441 bp, Homo sapiens
caattcagtgtcattaggtacattcgcattgttgtatgaccatgactgctatccatccccggaactttttcattatcccctactgtaactctgtacccattaaactgtaactctccattctctgttcccctcagcctctggtaatcactgtctatttctttgaaagtggggttgtataatacctgttcttttgtatctgccttaattcacttagcataatgtctttaaggttcatccatgttgtagtaccatcatgtgttgcttaacgatgaggatacattctgagaaatgcattgttaggcaatcttataattatgcaaacagaatatactaaccaggctgtatggtatagcctcttgctcctaagctacaaacctgtatatcatgttagtatactgaatacagtagtcagttgtgactcgtggtaagtatttacatatc

SEQ ID NO: 162282 - DNA, 399 bp, Homo sapiens
aagtattcctgaatttggtgaagggactatttaataggcaaacaaataaaaacatttgctgcatttgaatttcatatgctctgttttgcatcatctgattgattaaaaaagcagtgtttctgtgttctttgatgttattaaaacggatttgggttttccttgcacagttattctttcagaaggtgttaggaagtatgttataatattttttttaaagtttagttatggtcgtttcttagcttgtgtcaattattttctttttgcacacttagaaaggcaaaagaaaaaaagaatatagttctaatcataaaaaggtaacaatgagctttaagatataaacctgcattgtaacccaagtaagtcaaagtcttcaaataactttgtatacattgagtcaaa

SEQ ID NO: 162283 - DNA, 568 bp, Homo sapiens
caatctatggtaggctaacttgttagcatgtaattaggagggcaaaatctcaagattctttacagttcttgacacataaaattcaggatgatttcagatttttttttgctttttgtgtaaactgtcccacttgatcattccattttagtttgaaatgacaaagacattattcacttatcataaatatattttatctttttaattagtatgggtcacctgtaactattcacacacaatagtctctatgatgtagcatgaatgtgtacggcatgtgactacagaagctcaacaagtttggatgccttaatttgccaaaaatttgaaaacctgaacttactggatcttaatattaaataatatagttgaaccagtataaaattaatttattaaattgttcttttcaagtatagatttacatttcctctttttagtccaactctttgcttcacaatttgctttcacaccaataaggagagatttcatatcagaggtttatttctgtgactttgctcaattgtgctgcttctgaattcgttatcagacagcctatatactttattgtagctaa

SEQ ID NO: 162284 - DNA, 234 bp, Homo sapiens
cttttagagctatttggctaaaattaatccacacaatttacgtttaccttggatttgtaggcagtcatcccacatactcaggagttcttgtaaagtgacaaaatctaacctacaaattgtaaccacttttttcaagataaatgatttcaacattggtaacaaaaatcactaaattataatgctgatcttggaaaagacagacatccaggcagaaactggctgggaaacccggag

SEQ ID NO: 162285 - DNA, 557 bp, Homo sapiens
tcgatctagacgatccctcataggttcgcaggtatagaaggaaagtatgacttgagtctggaaaggtcaggactgtcaccactcttcactgaccttgagaacaattcccagcccagcccttcctagcttataaaaacattgtgaccttccatatgtcagtagtgtttctgctatctagttgttcatctcactggcgaacaagcgcgcagcctgtgggaagctcccaagttcctcgggccctttttggaagagcttctaagatatatgttgtatggctgcctacagcccagggggagtgcatttttacaatcattagcagtgaccttgtgaggtgtaggtgctattattcctggtccggggaggaaatcatgtggtcggtccagccctggctgttaggcctgagcccacactctgagggacctttttgggagcaattggtttacatttgcttctcaccagataattaactagttaagtgctttaggatgcttagttactagctcctttgaagcatttcatttgttttcacctgggattgacctcctgcgaacctatga

SEQ ID NO: 162286 - DNA, 281 bp, Homo sapiens
gaaatggtcatcttttctcgatgccaccccagcgagcagccaatggataaggccagccaataatcccaccactaagctcgccggcactgaaatggccaagctggtggttcaggagagctggaagcctggctcaggacagagccctgggaagttgagtctgcaaacatgccctcgggttcttgttgacgagcaaagctcagggttgtggggacaaagaccaggacttaacaaatatttaagacatctttgttgatgctgggattttgtggcatcgataaaca

SEQ ID NO: 162287 - DNA, 271 bp, Homo sapiens
cctgcttttcacttggcctccactgacactgggatggaggggtggttaagttatcactgagcagtgctttgagtttggattctccagtaggcctctgctgtcatatctctgtagagggagggatagggatatgtccttatcattgggtgggtgttgaactcaggctccccactttttttccacccacactctagagggaggaagccacgttactgctcagtgggtatgagtgtcctgtgtccccacttggcctgctgtggtatcatgttgt

SEQ ID NO: 162288 - DNA, 178 bp, Homo sapiens
gttccatgtaaaggctccagaatcagaactggcgtcacaccttggtgtcaccccttcctgctgagcctgtctccccaggagtgaaatgagggtaatattcctcctacaaagggtgcggtggtgggggtttacatgaggtgggcgcatctgtacaaacgtgtttatcattgccagctac

SEQ ID NO: 162289 - DNA, 222 bp, Homo sapiens
tgtcagccgcatcctgaccctttggccactctctcccctccgaaatcctctctggctccagtaaggcttttctgcatattctaccacccaggccatgcctgtctcctatcatcctccccctccaccatcatcttctttccatcgacctcccaaaccaacttctccagccctccaagcagacgaccctcatacttagccctctccccacctgcctatcagcca

SEQ ID NO: 162290 - DNA, 511 bp, Homo sapiens
gttcacattaacatcaaaaggaataaaatattttgaaataagtttaaccaaaaagtcaaatgattataccctgaaaactacaaaagattgctgaaacaagttaaagacgatatcaatatatggaaacacatttcattttcatggattggaggaatcaatattgttagaaagataatattcccaaagtgagttgcggattcaatgtaacacctaacagaatcccagtaacattttttgcagaattagaaaacactgtcctaaatctcacctgacaggctcttattaatgactgccacaacagatacactgagaaaaagaggcaaccatgaaaaggtggaaagttctgatgacatagaaaatagcaatcagcctttctcacatcccaaggccttcaaaaatatacaagtgcagcatggccagtatggaattcaccgaaaactaatcaccaagctagaaaagtggtgagagaaaaaaaaagggcaagaatatctttggcttatcacctcccact

SEQ ID NO: 162291 - DNA, 407 bp, Homo sapiens
tcctgtgcttctttcctaaaaaatcttgctgaaaatgtccatcaggatattagactgaaaacagatgtaactatatctaattttctctgacaggaaatcagacatggatgtcatcatctcatctacctatccctaatctattcttcatcctcctcaataaagtaaagccacatggtataataaaacatcaaagtggtataatatagctgtatttcacatggaaatatgcaattccttaagctcttctccaagattttgtattgtgggaaaacaaactatgtgggaattattgcattattgatttttgattaggacttagcattatgaaaagtttcattgtttactataaagatatttcatggcaaatagaagtatgctgttgtaaaataaactaaggcagattagta

SEQ ID NO: 162292 - DNA, 262 bp, Homo sapiens
ggagattttcaggttgtttgtgtgcttagtacaaatatatttatatacagccacaggtattggggcttgctaatttaggcttttttttttaaataaagcaagtgttttattttcactttgcaataaataacaacacttgtttgttcctttatttcaactacattaaaattaaggaaaacagaactatcatctctaatttccacagtgtttgatatcatttgatttctgtgctttcatggcctgctggtagtggttgttggta

SEQ ID NO: 162293 - DNA, 151 bp, Homo sapiens
aacgcctgtgtggttcaagggtcaactgtatgctgaagccatcttttgaccgtctgtgctctccaccatctatcttttgttgttattcccctttttcatgtacagtacaattcccttttttggtgtacagttctatgttctgacacacagt

SEQ ID NO: 162294 - DNA, 243 bp, Homo sapiens
cgacatccggcctttgcgttctctccaccagctcccggctcacccacccagcagctcagcacctgcgaaatccgtctcccgatgcacacttgctaaccgcgtgggtgtgagcacaacgatgggaaacagcggaagtccccggagtgcagactcaggagtgaacctgcctgaagagtggcgtctaacgcacacactgtggtcagctccaccccactatgggtcccgggaataggagcaagtatg

SEQ ID NO: 162295 - DNA, 274 bp, Homo sapiens
cagataacctcagcccaaatctgtgccttcgactctagactctacctacttatttgcctactcaacatctgtttggtgtctaaaccagaatctcaggcataagacgacacaaaaaaacaaaattcccgattctcttcacaccacaaacattttgctctatagtcttcctcatctcaataagcaattccagctaatgcctgcttcggcttaaaatcgtgccccccacacacactcctaactcccgacaggatctcgctttgttgcccaggctgga

SEQ ID NO: 162296 - DNA, 592 bp, Homo sapiens
ttctgccagcagggttaatccaaagagcaaacagttgcaattttaaaattaagatggaatactcagaaaaaagaattctagagagtcatctgacactaattggtagctacagcatgacaacacccattgggaaacatggatgcaggcaagacaaaattcaaaaggaaattatctgatattgacatttggtgaaaaccaccgatgttccaggttgttcctatcacgttattgaactgtgaggctcttgttctgcctctgtttctctaagtctccaaggtttctttttgtgccctcctgaaaaaggagctccgttttcttctcttaggtttcacaatggccaaccaattcaattaaactcttaagaagggttgcaggctttcctccaactctgataattgacaggtccagttttcccactttggtgggcatcaggaccatgtgggatgcgatttaaaaacacagatgctggccccaccccagatacggcacatccaggagtcgtgcaactgtgtctgtgttgggaacaacagctctgctgtgattccaatactcgtgcttggttaaaaaccaccgtttttcccctgtggaaata

SEQ ID NO: 162297 - DNA, 1046 bp, Homo sapiens
  misc_feature (869)..(869): n is a, c, g, or t
  misc_feature (962)..(962): n is a, c, g, or t
  misc_feature (1046)..(1046): n is a, c, g, or t
aggactgtctgcatctgtgtggtatttaaaccttaggattaagtgagatgaacaagacagggacctgagacctagctcttctgtgggtggacattgaagggtgcagcaggagaggtgtcctccgatgcctgccttgggataagaggaatgggattacaggagccaagagaagtcctgagtttataggaatcggggcctagaacaatacccggcatcgatagaggaaagagaatcagctgtgatgctacggagagggtaagacaggacaaggggattgcatgtggaagatagagaaatagagtatgcgcctgtggcagagtttttaacactgttttttgttcgttttgagatggagttaatgttgcccaggctggagcgcaatggcgtagtctcagctcactgcaacctccacctcctgggttccagctattttcctgcctcagcctcccaagtagctgggattacaggcagccgccaccacgcctggctcttagttttgcatttttagtagagaggggttttaccatgttggccagggtgatctcgaactcctgacctcagatgatgcacccacctcagcctcccaaagtgctggggttacagggcaagccaccatgccgtttcttcatattttaatgtaacagaaaaatcacgtaacaaagtttctggtgatagacaaaagactaacccatttggaccatttggacccaaaattctggctagggattaaccggtgggtatcaatggtggctaccttaacatgtcttcaaacaagcatccctcctgtgtaacagcatttaatgttcacctgggggttatgtttcattttccagggaactgtaagttctaggttggtcagagtagagcanaggacagcattagaagcaggcatatgagatatgtgaatacagctagtggctgcttggttgaaaggaggcattgacttcagcaacacaattatngttttaataggaatgtgccataccgaatccgtgtgcggctgtccagcgtaatgaggatgaagattcacctgctatatctttgtn

SEQ ID NO: 162298 - DNA, 1144 bp, Homo sapiens
tgtgcaagggtgaactgtactcttcctccctgcttgtacaattattgcagtacatgtcacgaagtcagataaaattatggcatcttaagggttggaaggaaacagaagttctgttgctcagcctcacaccaaagcaaatccagaatgctcacaacagggagtcaccaaattacagctgaagttcttaacaagaaaacatactaccccataaacctttctgttttaagtagttctagtttgaccttttttctcctatttgtgaattaatgtagctccccattaccacacttggtcctaggtttttcattcacattacagaagagctgttatatctcatgccaagtcttcttttttctagactttacatccataatcctttattcctcaaaagacatggtttccaaagccttcaccattatttgccatttagatgtgccccaatttgctaaagttccgcttaaaatgtggtcacttgcataagttagcatgcttctgtctacaagtaaaggaaaagccaactaaaagtgttaccctattcacataaggaaacatctggcgatggggtggttccagatgcttactgatgatgacggaccctagctctttctgtctttcatctctgccatcctcaatgcaggggatttttatcctcatgttcatggttgcaagcagcttctagcaaaacctctttaaacataggcacattcaaaggcagaaaaaactcattttcctcacacttttctttttaagtaaatctctcctttccagtaatggctcagttgacttccctttacatgtcactgtacctgaatgcatcacattccctcctgaaccatctggttaagataaatcaccctgggctgggcgtggtggctcacacctgtaatcccatcacattggaggcaaaggtgggtggatcacctgaggttgggagttcgagatcagcctgagcaacatggagaaaccccgtctctactaaaaatacaaaattagccggttgtggtggtgcatgcttgtaatcacagctacttgggagtctgaggcaggggaatcgcttgaacctcggaggcgaattttgcagtgagcctagatcgcaccattgctctccagcctgggcaacaagagcgaaactgcatctcaaaaa

SEQ ID NO: 162299 - DNA, 394 bp, Homo sapiens
tacacagaataaggaagctctccatataccaaattgaaaagatttctaggataactgttaaatgagaagagcaaaattaaggaggcagaccagtgtttataggatgttacctttggggcaagaaagggaataatacgaataaacatttggatttgcttgtatgtgtgtaaaaactacgaggagaatacacaagaagctaatagtagtggttatggttaggaagcagggtggaaaggggtgaaatgtagtaaatggtacaggagtagaagcaagacttccccatgtatatctttttatgttattttgatttttgaaccatattaatatgttatctagctaaaacaattctgctaaaaatttataaaggaaaaagtaatcagctacattaaatgtt

SEQ ID NO: 162300 - DNA, 246 bp, Homo sapiens
cataacatacaagaaaagcatatcatcataagcttgatgaattttcactcaggtaagcagcatccaaaagaagaaacagatctattgcaaaaacctccaatcactggctcccaaagaccaccaccatcctgagttctaacagtggagaaccattttgggaggcagcaatttttaatttgattcctttgacagtgcaatttacagcaagcctggcaaagtttcctggaaggggtcagacagtaaaca

SEQ ID NO: 162301 - DNA, 445 bp, Homo sapiens
ggcacaatttagaaacttgtttattgattgcttctattgctctcctcattggccaggcagcatggaattccaaagggcattgtgctggagtggagccacttgcatctgaggttattttttcttttgaggtggattcttgctctgtcacccaggctggagtgcaatgcgattatcgcaatccactgcaatctctgtctcccgtttccaacctgattcctcgctctgtcatccttcccagaccctttcatctccaattatctctgcctcctccaactaacctgcaaccacattatctgtgttacacaatttagaaacttgttattgattgctttctattgctctcctcattggccaggcagcatggaattccaaagggcattgtgctggagtggagccacttgcatctgaggttattttttcttttgaggtggattcttgctctgtc

SEQ ID NO: 162302 - DNA, 101 bp, Homo sapiens
cccacatttaataagaagcgtttgtttagaggctccacagggtcaggacttggatccatgtgcctgtagttctcttggtccttcctcaaggttacaaaatg

SEQ ID NO: 162303 - DNA, 532 bp, Homo sapiens
gtgcaaagccgcgttctccacaacaaaaaatataaatctattagcctagcatgctggcactacacctatattcctcagcctgttggctgatgttgaaagcaggaggttgcagtgagccaagatcgcaccattgcactccagcctgggcaacaagagcgaaactccatctcaaaaaaagaaaaagaaatcaggctaaagtttacccttgtggggaagggagagactataagagggcttctagagttctactaaggctctgtttctcctttttcttgagctgagggccagttgtgcaggtatgctcattttataaagttcattaaactatatacttaggatttgtatgcttttcagtatgtatgttatacagtcatgttacttaatggggatacattctgagcaacgttaggcaattttgttattgtgcgaacatcatagagcatatgtaacacaaacgtagatgatatgacctactgcatacctaggctgtatggtgtagcctgtcgctcctaggccacaaacctgtatagca

SEQ ID NO: 162304 - DNA, 707 bp, Homo sapiens
aagcacccgccaccacgccaggctaattttgtgtttttagtagagacggggcttcaccatcttggccgggctggtctcgaactcctgacctcaggcgatccacacctgcctcagcctcccaaattgctgggactaaacaggcgtgagccaccacagccggccgcaaatgtttgtttttaggttagttcagaaagcgtgcagtctggcctcaggcccgtgctctccccttcctgacaacacagcagccatgcttgttcctcactggccttccaggcactggatccagtggtggtcagagcagccccgccctcacgagggcaggcagacagtgaacaagtaaacagcccgaccaacatgtgatttcactagtgatgccttggggcagcacaggggccagggagaggaactgggtggcgggttggggagctccttgggacgggcagtcagggaagccaccacgagaggtgacacaagcagaagcttacacgatgagaaggaccagccagttgagggtcgcaggctaggggcgtgctttgtgagtggacagagcgtatcaaagcaggaagatcacttgagcaggagtttgagaccagcttgggtaacataataagacccagcctctacaaaaagtttaaaaactagcaagatgttgtggcatgcgtctgtggtcccagctactcgggagactgaggcagaaggattgcttg

SEQ ID NO: 162305 - DNA, 851 bp, Homo sapiens
aagcacccgccaccacgccaggctaattttgtgtttttagtagagacggggcttcaccatcttggccgggctggtctcgaactcctgacctcaggcgatccacacctgcctcagcctcccaaattgctgggactaaacaggcgtgagccaccacagccggccgcaaatgtttgtttttaggttagttcagaaagcgtgcagtctggcctcaggcccgtgctctccccttcctgacaacacagcagccatgcttgttcctcactggccttccaggcactggatccagtggtggtcagagcagccccgccctcacgagggcaggcagacagtgaacaagtaaacagcccgaccaacatgtgatttcactagtgatgccttggggcagcacaggggccagggagaggaactgggtggcgggttggggagctccttgggacgggcagtcagggaagccaccacgagaggtgacacaagcagaagcttacacgatgagaaggaccagccagttgagggtcgcaggctaggggcgtgctttgtgagtggacagagcgtatcaaagcaagaaagagcctggcttgcccagaggatgcagctagagaattccagcaggatggcagggcctgggccttcagggcaagccctttccctgtgggccaggcatggtggctcacacctgcaatcccagcactttgggaggccaaggcaggaagatcacttgagcaggagtttgagaccagcttgggtaacataataagacccagcctctacaaaaagtttaaaaactagcaagatgttgtggcatgcgtctgtggtcccagctactcgggagactgaggcagaaggattgcttg

SEQ ID NO: 162306 - DNA, 743 bp, Homo sapiens
tgaagctgagatttggtgggaagggaagcagaaaaaaaggaaaagtaaactaggttagtttgaggaagagaaccttcctgcatgtaggggagcccctacctccatctgtccctgctggttgctttgataggggaacagggttggactcaacaagggctaagtctgaagatatagatgatggtcacaatagctactgagagagctcccagcatccccctctctgcgcgttggctcaggtgactgatgatgttaatgaggttaaggtcatgagttcaaacccggcaatggataccttgccaaggctaggggaacctccattgtgcaaccaaggagcaccatggatattatagccctcgcagatgaggcggccatcacccacatacaagttattatgacaatgggccccaggaaagctctggggagcagagctcagcaccatcatcccctctcttgagtaaacaagtcaaagcactgtgctcccctgcctgacataggggtagtggtgccaccttcatatgcaatttgcacactgttctatagtttccttaggggggagtcagcctctgtgactctactactgtgggcagtgctgaatccccagcctgaggagcttcagagggtgctgtcctctctccacatgggttgatactgatagagtcctcactataatatagtgagagatccaggaagaataggtagaacaagctagtcctgggccctcccaacacggagcagcaacatga

SEQ ID NO: 162307 - DNA, 276 bp, Homo sapiens
atagagatgttgcccaggaagctaatgttctattagcataataagcagcgaagtgttggcacctctgctgtctccactggagcatcttctaggtacattcaccaggaaagctgtccttggatggtgagtaggtcagtttcactaggtgtgatttcactttctgtcaaagaggaagaggcagaaagtgaagtgagagaactggaaaatgtccagggagatttcctccggtgctgctattggggaaatacagtctctttgtgggcagcaactatttct

SEQ ID NO: 162308 - DNA, 274 bp, Homo sapiens
aaaaaagacttatctatactgatttactaaaagacaggagacaaaatatggacttcactttcatcataggaacaaaatcacttggtatactccattatgacacccacatggtccaaatccatgccctggccaaatgagggaaaaaaccctcttttttgttgtgctggcactagcacctgactgaagagctattctcctttgaaatttttggagacttttagcaaaccacatcagtcgcctccctatgatttcaaggtagcattatataatagca

SEQ ID NO: 162309 - DNA, 527 bp, Homo sapiens
tggcaacaccctcacagatatactcaagatcaatacttcaatccaatcaagttgacacttaatattaaccataacacagcccaataatcttgggccagagtccctgactctcctcctgcttttagtcaacggaaactcctgatgctttttcatttgcatctctggattctgtttcgtccttcctgtgctgtgtaactggttctttggaatcaagtggagaacctgttactttttaccttgttgcattggctcattgttctaggtttgttttagcctaataaacttgtgttttgttctttttcttttttttttaaatcttaactctcattcaaattatttattctaattcccaacctcatgacatcttgaaatttgtaaagttaataaaaggtatgtattgtgataatctcatttcatgttattctgttgttattgaatatatctgaggagcaatagattaggatagtataagttggggtacctgtggatcagaccctggaagacttggttgaggtaatctgtgaggg

SEQ ID NO: 162310 - DNA, 117 bp, Homo sapiens
cctgaggcccaaatagatgacacgatctggctcaagataactaatcctgccagtgtactactactgagggaaattcctcctggccccttgagaaactgccactcactaacctcacag

SEQ ID NO: 162311 - DNA, 536 bp, Homo sapiens
taggtggatgttaatgctattaactgatttgacatgttgaatttgagatgttagacatcgaagtgaatgggtactctgaaagagcatcaagaaaatctgactgaaaaaagattgactgagatgggcgctggagtataagccagagtttcacaggtaaaggggtgcagacccagacctcaagaaagggctcttggatctcgtgtaagaaggaattcagggcgagtccatagagtaaagtgaaagcaagttcattagaatactagagttcaaacaaggtatggggccgcccagctggagactccattttccagactcctttgcagctgtctctggaatgtgacctagttatcaccaagggaatatgaatggaaatgataagcgcaatttctgcttcatcgggttaaaagcaaattgcttgccctcaacatctgttcttttcccctgctgtaagccagaacatgcacatgcttgcaattcaacttttgatcatgcagatgaaaacatttgctaagaaattaaagatcttttaaaacgac

SEQ ID NO: 162312 - DNA, 266 bp, Homo sapiens
ctcggcttcccaaagtgctgaaattacagatgtgagccaccatgcctggtctttaaatattttcagtggtggcaaatcttcatactccgaggtcggatttgatttgtggaaactgacaaaagttattctgaaccaaagctggcacatgaggtacgggtgatcaaactggctgacagtattttggtcagagcaggatatgacagtttcttatttaattttgaaaactactgatgaaatctagaaataataataatagctaaaatttg

SEQ ID NO: 162313 - DNA, 516 bp, Homo sapiens
atatatatacagctcacttaattttgagaagcactgatccctccctttcaaattttccttactatttgtctatttccctatcattattgtggcaagttccagaaacaacttgtttatattttccaaaaaaataatgggttgaaaagtatatctattaactaagggggaagctgatgtaaactggaaataggcatcacagattagtttaaaaaaaattcagttaacttgagaagatactttttcctcaaatactctaaagaaaaaaaaaacaaaaggactaataaaccaataaaggttgtcctcttatttacatatgacagcaaatactagcatctactgtcaaaattagtatctaaaacaggcagctatagaccaatttcaaatctcattatgcttctgcatgctaattctgccttgctttttctctctagctccatttttcacattgtaaaaatggtggaaataatatctgctaatctttaaaattctagatttaagagatgctaaaaaaaattg

SEQ ID NO: 162314 - DNA, 384 bp, Homo sapiens
gttgtcctctggatcaggaattgggaaacattttttgcaagagaccagagagtaaatatttcaggctttgtgggccatagggtctctgtcacaactactcaactttgagtaagaaagtgagaaagcagccacaggcaatatgtaaatgaatgggtgtggctctattacaataaaacttcatttacaaaagcagatggtagaccagatctgccctatagtttcctgacctctgctctatctatgtatcacacaatgtgtatcttttaagaggctgcacagaaaaggcattttgtttagatcctaataccaggaaaaggtatgcttctcccaaggaatctggttgtctttattttataaccactatgagtcttggaacagaggttt

SEQ ID NO: 162315 - DNA, 465 bp, Homo sapiens
tagatcaaggcgtcgttcatagttcgtgagtgggaagaccgtggattgaatggtccaggggagggtgagggtggcttggaccagggcagcagtggtgaaggtagtgagacctgaccagctcctggacaggcgtggaaggtgaagctgatggtgtttgctgggatcaggtgtagaatgtgataaaaagcatggaacttgacatgatctcaaggtttttggggtttgatcaactgaacagggagttgtagaaggctgcaaaaggaagactcgtttagcagttcaatttctgacatgtcaaggtaggaatgccctttagatatatagcagatatttggcatagcaatttgtgtgagtctggagttcagagatgaggtctagggcagagatataaatttgagaagcatcggcaaaaagatggtatttaaaactgatatagtttgaacacatgtccctgcgaacctatga

SEQ ID NO: 162316 - DNA, 493 bp, Homo sapiens
gttggctctaagacaggtggcaggagaaaagacaggaggacctcaagtttctagggtgggtaattaagggaagggcagttattaaatcagcagggaaagcaagaggaggaggactgggtttttttcaagagcagaagataaaaatttggtgttggatatgtattatagatgcctgcaggacatccatgtgggcaggaggcagaatgtcatagtggaaagaacaaagcggcagaggaccttggatttgggctttgtcatttaccagctatgtgacctagagtgtcatgaacctctgtgaagtcagatttctaatttagaaagtggagataagaatctctgccataattacctcaggatgattttataataatctaaaatttaaaaatgtgtgaggaagtgctttttatttttatctttttgagatggagttttgctcctgttgcccagggtggagtgcaatgcctcaatctcagctcactgtaacctccacctc

SEQ ID NO: 162317 - DNA, 270 bp, Homo sapiens
atacttgatcgtgtgccatgaggagctctgaaataacaaaacgtggtcactgcctttgaaaaactttcagagtgatcaagtacatgaaatatttattcaaggaaggaactagagtatgatatgtaaatgtataggcttttttaatcagatatcctgagttcattttctacctccatggtttactaaccataatgataggcaaggtgtactttggtttcctcatctgcagaatagaactaataacaggattcaccttagcactgttgtgag

SEQ ID NO: 162318 - DNA, 646 bp, Homo sapiens
tttgttataggtcattgggacactatatctagcaaacatttattcagtgttttggtataattaaaaataaaaaaacccaccaccaccaaactacttgtgcctaattgaggcaagagttgaagcttaactttttctaatttagttgggtgactaatgaaccggtgaggattcaggacaggcataccagagggtgctcagaaatgaaggtaattgagtcaattatagtacttttgaataaatgcagggcagattgtcattatgtgcagaactctgatttaaaataatcattgttggcatgtctccttgctgcatgtgtacaatttcatactcctataatgagtgttttagcttgggagaaccacttagggatttttctcattgcacttggccatcgttgttttatcccattgggaaatgagaaactcaatttttaaaaataaatcgtgatagcatcaggtgatatcttgggcttgaaaatataaaatcttgagccactctcatttcactttctttctcatgacagatgtctttatgaatggagttggctacagattgtctggtagaattgcaaaattgataccttgatttagtttatagtggaaatcctttgtcctttgaacttacctattatactgcttaatgataa

SEQ ID NO: 162319 - DNA, 502 bp, Homo sapiens
aagtgtctaggctgagtgtactcaaatctgtctaaaaccaaagcttagtagtggcaggtctccatctctgtgcagagccaggctaagctgtctgatgaaaataatgggacagaggtagaattaaaaaaactaaaataaggctgggcgcagtggctcacgcctgtaatcccagcactttgggaggccaaggtgggcagatcacccaaagtcaggagttcgagaccagcctgacgaatatgatgaaaccccatctctactaaaaatacaaaaattagccaggcgtggtggtgcgtacctgtagtcccagctactcgggaggctgaggcagaagaatcacttggacccaggagggggaggttgtggtgagccaagatcatgccattgcgctccagcctgggaaacaaaagcgaaactccatctcaaaaaaaaagatatatcaatcagtcatcagtgctatgaagaaaaagtggagcacagcaaggggactgcaagtaatagggtg

SEQ ID NO: 162320 - DNA, 246 bp, Homo sapiens
atggcgatcatcaaaataagccatatgcagctatgcatcctgtaactctgagaatgaattattataatagtacaaaaggaagtaaggacatctagagtatctattctctacctgttgcattccaatgaagtcaatacaactatcccaatgtcctgagtacatagaacagccagatattagaaatgaaacacatttctaagattcttttctatctggatacaaaaaacaacacagtcaatattcatt

SEQ ID NO: 162321 - DNA, 713 bp, Homo sapiens
acatcgagtgccgggcggcgcagcttcccgacatgccgctggaggagctgggccagcaggtggactgtgaccgcatgcgggggctgatgtgcgccaacagccaacagagtcccccgctctgtcacgactacgagctgcgggttctctgctgcgaatacgtgccctgtggcccctccccggccccaggcaccagccctcagccctccctcagtgccagcacggagcctgctgtgcctaccccaacccagaccacagcaaccgaaaagaccaccctatgggtgaccccgagcatccggtcgacggcggccctcacctcgcagactgggtccagctcaggccccgtgacggtcaccccctcggccccaggtaccaccacctgccagccccggtgtcagtggacagagtggtttgatgaggactaccccaagtctgaacaacttggaggggacgttgagtcctacgataagatcagggccgctggagggcacttatgccagcagcctaaggacatagagtgccaggccgagagcttccccaactggaccctggcacaggtggggcagaaggtgcactgtgacgtccacttcggcctggtgtgcaggaactgggagcaggagggcgtcttcaagatgtgctacaactacaggatccgggtcctctgctgcagtgacgaccactgcaggggacgtgccacaaccccgccaccgaccaca

SEQ ID NO: 162322 - DNA, 643 bp, Homo sapiens
ataaagaaacagactcagagaaagaggcttgtgtaaaatctcatagtaactgatgcaactgactggcatctgtcgcgcattttagtttatttgtgattgaccatgatgcttccagctatactaagaagcaggcagtcaggtgacatactgtacagcaaagaaatactgagtccctgtttgagatggagggagagctgagagaagcttcttctgatatgtaatttggagtttgctggtgaagttttcttctgcatatgtgctttcccacgcatatcttacttcctgattggcactggctgtgtatcacaagttgtaattatgttataattagattgtttatttctttaacatctgacttctgcagtgttctatcctataagttacataaatgtaggactctgttttgttcacagtattccagcacagtgtcttgcatgcagtagtcactttatgaaaattctgaatcagtaggcacatgagaggtaattaagagagagagataaattgacttagtcaagattatatagcagtttggtagcacttctgggactagatctgattttttctatccttaagcccagaattctttgtacaacatagtgctgcttgccacatgcctatcatgattagagctatatgattt

SEQ ID NO: 162323 - DNA, 305 bp, Homo sapiens
agggattgtcctgcctcagcctcccgagtagctgggattacaggcgcctgccaccacgcccggctaattttttgtatttttagtagagaaggggtttcaccatgttagccgggatggtctcgatctcctgacctcgtgatctgccacctcggcttcccaaagtgctaggattataggcgtgagcctccgcacctggcatgcctggccatattttaaaatattttttttaaggaggaaaagatccacgaaagtaaagtgcctagggcccatcaatgtcagatgcagccacgtggacaaagaacact

SEQ ID NO: 162324 - DNA, 544 bp, Homo sapiens
taatataaatgacatggtgggctctacttttatgaaagttatctcaatctatatagaaaataatgtacttctgtgacttcagtaactatagaaaagttgtctaaaatgttaagtaaacataaaacaagtaaacaagtttaagatgatgtggtctcatcatcggtttaaactgctcattactattacgttttaaatcttactgttaataaatgtgttaattatgatgcctcaaaggtatttcaacaagaggacacaatttaaagactaaataaattactcaaaatgagcttcagaggtgctgtaatggggtccatggtcttgctgatgcacaaagcttcatccaccccctcattgataactaaagcaagcccatgttagcattctgatgctgctactcccgcaggagatcaaactcactgccagctacaaacgggagaaggtaaagtcacacacagccccctccctcgctccaaacacactgcatgggtgtgctctgcaatgcactgaagcaaacaaaatcctcagtaacaacaaaaactgtcta

SEQ ID NO: 162325 - DNA, 103 bp, Homo sapiens
actggtcctttttgcttggagacccctttctctacagaaagagctattttttctttctcttcttttcttcctattaaaaaccttcgttcctaaactccttgtg

SEQ ID NO: 162326 - DNA, 213 bp, Homo sapiens
agatgtgaggcctaacacctgatgatagtcaacaactcttcgggctcagagaggactggaattctgtgaagtcattagaaatgaatactccacccttctctcaggttattgaataatctgtatcttaaatgactttgataggaaaatgctactccaatttagccagaagaggagtcgctggtaaggagttgctggtaaggatttttaccccag

SEQ ID NO: 162327 - DNA, 134 bp, Homo sapiens
gtggaaagaaaacacccaacccatgctgaaactcagtgacggggaggggagagtgcaggcaagaaggcaagaaaatggcagtctaacgtgccacccgggatctcattcagaggggtcaccttgtcctgccaggt

SEQ ID NO: 162328 - DNA, 226 bp, Homo sapiens
aacttagaggcatcagacaagaacagagaacctgaccgggcgtggtggctcacgcctgtaatcccagcactttgggaagccgaggcaggtggatcactgggcaacagagtgagactctgtcttgcaaaaaaaaaaagaacagagaacccccaaaatgagacagaaagtctctgcatccattaatcccaaaatctcaactcaggtcctactatgagaaacagacaga

SEQ ID NO: 162329 - DNA, 260 bp, Homo sapiens
gggggacaacaacaacaaaaccctaatgagttctaaaagtgaaaaaaatccaggtatattactcataaaaatgataatcagtggcatctgacttcttagtagtaacatggaatactagaagacaagaatgcaattactttttttttttttttttttttttttttttttttaacccaaccctgccaaaaattcaacacagtcccccaaattaagttttttctccgtctctcatttagcagggcccccacactctcttgtgt

SEQ ID NO: 162330 - DNA, 438 bp, Homo sapiens
aaagcagttaatacagactcaacacacccaagcaaataatcaatgagcttgacaactggttaatagaaaatccccaaactgaaatgtgcagagaaaaaaaattaaaaagccagacataacatccaagaattatgagacaacttaaacaggataccagaagaataagaaagaaagaacaatgcagaagaaacagttgaagtaataatggctgaaaacattttattaacaggcacctaggcacagatccaggaatcctagagaatatcaagcagaattaatagcaaaaacaaaaccaaacccaatatctatgacataaaaaaaacatagaaacgtcacatttaaattgaaaacaaccatcttatattcaacaaggctgatgaaagcaagtaatggggaaaggatttcctattcggtaaatgagtctgtattaactgctag

SEQ ID NO: 162331 - DNA, 309 bp, Homo sapiens
gcacatctgcacatgcctgtgcctataactacattgggcagcgagctgtctggggtgtgctggtcaacaagcttccctgaagcaggcggccatgtggagggacagcatgtctgtggtttcacatttgtccccgtcatggccttgtctgtccacttgtttctgtgggaagcaccgggccccagaggccggggtgagtggtgcctgcctgtctcctgggcaggggcagcatgtctgcatggatgactgtgtgccgggtctggatctgctgtgtgcgtgtttttgtctgtctgctgggagcctgctgtctgc

SEQ ID NO: 162332 - DNA, 441 bp, Homo sapiens
gactatcatgtgactgctcacttatctacacaggccactaagatgcactgcaccggtcctcaccatgactcctccctctgctgcccttctcactccaggctcctaaacacaggccacctatttgatgggatatttcaaacctggctttgattgtgagggtcagtttggcatacaggtgatttccttgtagattaagaacatttactttcttcctgctggatccctcccagagataccatcaaacctctacctacgcaattagttttcacaggtggctgttttgcctccagtaaaactactttctttctccttctgcaagtcaaagcacagcgaatacacacgaaaacatttcagatatgaaataaacatgttcataaaggcagctatgatgtaatgtatcatttttgactgatccaaattatggaatgaactccccacacc

SEQ ID NO: 162333 - DNA, 611 bp, Homo sapiens
caatttgcgaatgttagggaaaggaacaggcatgtttcaacaatattctgaaagtttcttggagttcagagctggaaacatatttttgtaaaaaacttttaatcagttgacaaacttacatttttcagggggtcagttttagcttcttcattgaatttttcttttctgaaccagcaatcaagactccctacttccttttgctctccaagttcctgtatcggtaaatgaattgtccacttgctgtaattttgccatttagccctctctaaccaagatgttgatcgaggcctttctagacattttggcgtttcatcaacttctttgcaatttcttaagcattagagctttaccacttttagccatgcagtgcatgctttcaacctctcctattttctccaagtgttaatctttatttttctttccttacagcagttctctcaatctcatttttatgttcaattcttacattctttaggtggaaagttccactgtctcaaagttggtgaattctgtgtgtgttggtgtgcatgtgtgtgcttaacatctgaaatcagtttacctaggagtgacttacttcttgaagtacaggtagctagctattctgggagcaa

SEQ ID NO: 162334 - DNA, 337 bp, Homo sapiens
tctccattctgacagtcttaagtcatcacatcaggttattgatcacaacccttcagtacctctcctgtgccctccttggttcaaaatccttagcaggcaagagccaggcctctcccatgtgattccagaccagctgttcggtcctgttgccaagcccggccatcaccccgccattcagaccagctttcctgggcttgctttctcctttgctgtgcttaatctgggtgttttccttaaaatgtagcctcttgtctctgctcattgaaatggaactcattctataagcaccttactaaagactttgttattcactaagctataaacattttcctgaaaa

SEQ ID NO: 162335 - DNA, 123 bp, Homo sapiens
tcaccatatttgatagtgttgatctcctttgcctctgcaaaattctgctcttaaacctgtggcaactctggtctcacgttgtcttaatctttgtactgcttaacactcactcacttcttccca

SEQ ID NO: 162336 - DNA, 231 bp, Homo sapiens
atgggtgctatacaacatgcctaactctgtgattgatttttctagaaccaaggagtagaggtggggcaccaacactattccagctggggctccaaattcctgtctgtaggatggcctctgcctgaggtcagaaagcaggagcaccgtgaggttcaggaccgtcttctgcacactggctaccaggaccagtaggctattctatgctctgtccatcctcactattctttacag

SEQ ID NO: 162337 - DNA, 432 bp, Homo sapiens
ctttttacctcttcccataatataaagaatacttcctaactcattctatgaggccaatattatgctggcatcaaagctatacaaagacatgccaagaaaagaaaactacagaccaatatcccttatcaatacagatgcaaatattctcaacaaaacagcagcaaatcaaatccagcaatgttattacatgataaggccttaaacttttaactgttaaaaagataaggctcgctgcggtggctcatgcctgtaatcccagcacttcgggaggccaaggtgggtgaatcacgaggtcaggagtgcaagaccagcctgtccaacatggcaaaacaccgtctcaactaaaaacacaaaaaattagctgggcatagtggcgggcacctgtagtcccagctactcaggaggctgaggcaggagaattgcttgaacccg

SEQ ID NO: 162338 - DNA, 325 bp, Homo sapiens
tgttcagcattggtggataggatagaggctgattttacacactcttatattaggtcttttgtgaaatggtagttggtcaagaagaggatataaaatgagaagaaagcaagagaatgagagagattaaagtcagaagaaatcatttcatgggtgcctttactatggttgaggggaaatcaaagacctagaccccaaaacttgtggagccagagaccatggttcaacataaacccatagatctaggcaccagaaaggggtggagtgctaattctggaacctgtggttgagcaaatttaatggtgatggattagacgttggtatgttc

SEQ ID NO: 162339 - DNA, 380 bp, Homo sapiens
atatccagactatcagctgccagaaaaactgtttccctccccttccctgctcattttaaaggtcctatttaccagaacactatgaaggtagtaaaactatggtaagacaaacacatacttacatattttcagtttaaaaggtgaaagtacacagaggtaacttccatttagctcactcccctaagtcattctccttgtggatttcctctttacaggccttaaggtgacttgcatcatgttcacgcccagggtgaagtgtatcatcaccacctgcaaatatttctaaatgggatcagttctattaataacaatgactatttctaaaggcagtaataagtaaaacagggttgttgtagcaaacttaaaactcacaccagcaa

SEQ ID NO: 162340 - DNA, 121 bp, Homo sapiens
agatttaggggttagctttcctctgttttatttctgaagcagtaacccttggcctagccttacatataaacaccccactgactaccttctatttatcttttctttgcaaagccctcatttc

SEQ ID NO: 162341 - DNA, 271 bp, Homo sapiens
gcgcttaaaaactgtacctaactccctcccatagcagacagaataggataggcttcttccctacctggtgttcaagttctaccactgccctcctcccttcccccatttacctctctagaattaccaggtatctatgcatacatgaattctctgcttccattagatttacttgtcattccccaaatacaccatgcacttgcatattagcaaagccaagtttgtctttcacaaatgcagaggttaaataagagttaaggatgaaggtaaacca

SEQ ID NO: 162342 - DNA, 352 bp, Homo sapiens
gacaagcaacacaggtttttccacctcagagctgagtggtggcatgaggatggaggttagggtttgcaaatctataatttgttccaaacagttcaaaatcatttagtgtgaagatgaattggactaactgactaatatcagaagttacacagtttgctgtgtttagctatgggtagcttgagctactcccaaagcaactgagtggcaagaaagggtatctaagaattataaaaacttctcatgtattatgtgtgtagctagtagaatgtttatcatcttgaaagtatgttcttgtcaaagtaaaaatgtgtacttggatttagtaattatttatataggaactttctttttc

SEQ ID NO: 162343 - DNA, 210 bp, Homo sapiens
gtgtgccagacagaccatcactgtgctgttcagagacacatctcatgtgcaaagatgcacatagactcaaaataaaggaatggagaaaaatttaccaagcaaatggaaatcatattggtggtaatgataaatataacccagttttcttccttgcttggattccatattttaacctctcactgattcagagggttggagataaaatatttg

SEQ ID NO: 162344 - DNA, 304 bp, Homo sapiens
aaacttggatattgtgtccttggactttcagctcacagaaatctgcaaatatgcagtctcagaatgtactcccaccctactctaatggatgcagtgagtgagttatttcaggaagaaaggcatcagggcttcctcctgtctcttggggctgaggaaactcttggagatggccttccccacattcttaaggataataacggtgtccaggtctatggagtgcaaagccccattttgtttttacaaatagtgccttctgtgtggcattgtattccttaaaaatagaattgcatccatcagcctctgt

SEQ ID NO: 162345 - DNA, 407 bp, Homo sapiens
taccacaataactgattttccttaatttgcttgttttaatatattttctgtagattccccaatttttaaaactttttttggttttattttttattatactttaagttctgggatacatgtgcagaacgtgcaggtttgttacatagatatacatgtgccgtggtggtttgctgcacccatcaacccatcatctacattaagtatttctccttatgctatccctctcttgtctctcatctccctacaggccacagtgtgtgatgttcccctccctgtgcccatatgttttcatggttcaactcccacttatgagtgagaacatgcagtgtttggttttctgttcctgtgttagtttgctgagaatgatggtttccagcttcatccatgtccctgcaaagggcatgaac

SEQ ID NO: 162346 - DNA, 333 bp, Homo sapiens
ggcaccggttatggtgatgctgtagagtgactgaagcaactaggaatctggggcatggatgcacttgagaaacgaattgtacttaagatgggtcagatggacgaggcctttgagtttgtgaagcagaggcgaagcatcaaagatgggtcagtggacgtcatggcaacagccagagggcgtgagacaggttgcaggctcagtgccggcaccggtgggtggcaaaggggtgcacagaccgcactcagtgcctatgctggtgacaaaagaaacacgcaggcagagttagtcacccgtcaaggggagaagcctccgcgcccagcaaggacgctgcag

SEQ ID NO: 162347 - DNA, 301 bp, Homo sapiens
tcccaccaccaaaggttccaggggtcagataggaaggaaagtacagtgaaaagggagattaagcagacagtgcagtcatcaagtcctctgcaaattcaaatgggagctaaagaaaacaaaaaacagaaaaacaaaaatgtcatactatagcttacccttttgtcatttcggtatttttcatgcattaggtttcagaaacaagagctgtctccagcaaacagattattatttgacaaagacaatccccttattcaaaatagggaactgccgtgtaacatggaaggtggcctgcgacaaaggc

SEQ ID NO: 162348 - DNA, 489 bp, Homo sapiens
tcccgtgttttgctgtattcagatggtaaccctagaaggcagtcattaggcagaacctaatggaatatacaatacaagatgcatgtcgtgtaactagtttctattcatttctgtgttaaattggttcttagaatttgcaagaaagtgagacaactccaaattactttagtatgaatccttagtactcaagggaacatgagggaatagtctttttcagttgcacaattgctgtgggttccaaaagtgtattcatttaaagaacactaatggaatgctgagaggtactgtgtacaccttggtgagaccaaagtttctatcctaatggaggttctgtactagtaagggaggcaggtaatgaatgaagaaacaattagtcacaaattgtgatgaatgctaggacagcataattataattgcgatgaggctaggatgggtaaaaacaaggtgatctccttagggctgtcaaagaaggcctgaagagcaaagagg

SEQ ID NO: 162349 - DNA, 583 bp, Homo sapiens
ccctaacctctacgaatgagacttgtatttcttctagatacttgtaatacgtgaggcctggccctggcgttcacgccttctacagagctgttttcaaattaaaccagataatgtggggaaactgttcaggacagtgtgaggatagggcgtgctcaattagtttactagcaagaactagaactacagcaggtattaacacaaaatgctatcctggagagaaagtggtagctattagctgagcaccgtgtaatcaatcatccctcaaccaaccacctcaagcccttatcttctaccaatttcactctttctcccaacctgcctcacctaagcaatcagtcctcataaaaaaggaagacaaaggccaggtgcagtggctcacatctgtaatcccaacactttgggaggccgaggtgggtggatcatgaagtcaggagtttgacaccagcctggccaacatggtgaaaccctgtctttactaaaaacacaaaaattagccaggcgtggtggcaggtgcctgtaatcccagctactcgggaggctgaggcaggagaattgcttgaacctgggaggcagaggttgcaat

SEQ ID NO: 162350 - DNA, 143 bp, Homo sapiens
cctctacaaaaaataaaataaaatagagaccactggccacaatcttatttctttccttttcacacatagttgaaaacacaattcatacccaaaggaaaaaaaagcattatattaaaaagacacctgcacttgtatattgatcg

SEQ ID NO: 162351 - DNA, 329 bp, Homo sapiens
agaaaaaccagcgaaggcccagcttgagcagccaatggcacaagaaaatggcacaaggaggccactgtaactgacagacacgcctgctctgccactgggactgatcttgtgtggggagttctgatcagcaccaggcactctttagaagcaccgtgtccggcttctgtcctcttctactgtcacgtggcagaaaattcctctctcatgctatcctgggtaaagtcctttcttcaaaaagatctcccttccatagtcctcccattagaatcttttgcactctgtacaaaaagacaaacattctgatgagtccatcaacattaggcagagtt

SEQ ID NO: 162352 - DNA, 555 bp, Homo sapiens
tccaagaaatcacttcctaaaacagagggaatgtggaagagagaaaatctgatatgtcctgcaaataccctcagaggctctggaactgatgatatcaggtatatctagaagtggagctaaaggaggagttaaaatagggttgattaaaagactgggaagcaagcagaccccagacctcttgccagacttcacgtgtctgggtgcctgtccctcccaaccctaatggaagacctggaggtatattctccggagatgttgtttctgagcaggagggcatctgtcctagtccaaggtagggagggttcttaatgaaaaggggaggattaataaaaagtgtatacactgacttgttagtttcctatggctttgtaccaaaatagtacatacctggtggcttaaagcaacacacattgattctcttacagttctggacaccggaatctaaaatgagttccctgttgttggcaggactgtactttccctggagattctagaagataatctgttatttgcctctttcagcttctgggagcagttggcagtccctggcttgtg

SEQ ID NO: 162353 - DNA, 164 bp, Homo sapiens
aaggctgttttaaagtggactgaagtatgaaagggacacacctgctctgggcagtgggctggactaggtgttctgcgaggccccccactcctaaacaactacaaagaataaagaaaaaagcagggtagacacaggcccatgaaatcctgagcatgtgtgaccgg

SEQ ID NO: 162354 - DNA, 222 bp, Homo sapiens
tgaaggaacggtgagcgcacctgccttcagccctcacccacccagcaggcaaggctgagcagaacctgtgtgtggggccctcaggccactaggccctccttcttccaactgcacacctgtgcggggccagacttattccacagactccaaaagaagagaccgtggcagatggacgcagacacgagatgctcccatcttctatttcaccagacactgaagaga

SEQ ID NO: 162355 - DNA, 459 bp, Homo sapiens
cctcagctaagaacaatccttgggaagttcatctgcaactgtatacctagtgagaggtctccagagaaatacgcctgccttgggaagaatgtgtgtacattttaaggaaacatagttcataaaatccatactggagagagaggtatttacatttctaggatcttttccacctgttctctatggagtaaagttttttcttcctcatgttttgcctctttatcctgtatataaacagagaaactctgtttttctccatccctcgtctaggatacagatgttgtatgtataggagattttaacctagtttgcaatgttacttcaggggtagaattgggacgtgagggaccatgtggttatggatggcttttaaaatgaataatgagaatctgaacctacccagataaccttgggtatacatttatgataaaattaataaagacaaatgttaaaaatttaaca

SEQ ID NO: 162356 - DNA, 532 bp, Homo sapiens
agttcgacggagactctctctctctctctctccttgaggtgaaacattcaacttcggtccttagacattcccactcttgattcctggaccttcagactcagatcaggagttacaccatcggctctcctggctctcaggcctttggacttggactcagtttcaccactggctttcctggttctttagcttgcagatggtggtgcttcacagcctccatctctgcccgagccaattcctatataaatctcttcttacatacacatcatatataccctattggttctatttctctggagaaccctaatacaatgggtcctccagcactcaccccaaattaagcatgtttccttttacaaaaggtagaaatgtccactcttcataagtcctttaatcaggtcccattcaaactcctctaaaataaatttctccaaaattctatttctatatttcactttgcatgctcactgtttatgccacttcaagggcatacgatctctcaaaactgatcagtttgcagagtctcctcgaactg

SEQ ID NO: 162357 - DNA, 337 bp, Homo sapiens
ttctttcttttctttctttcctttctcttctttcttttcctttcttcctttctttctttttctttttgttgttgttgttgttgagacagggtctggctctgttgcctaggctagagtgcagtggcaggatctcggctcactgcaacctgtgcctgcctccagggctcaagtgatcctcctgccttactttcccaagtagctgggaatacaggtgcatgccatgccaccacacctgactacttttttgtatcagctgctacaaaagttactgcattttttgcatttttattttttaaacctgattgtgtatgtgtgtgtatgtatgtgtgtacgtgtg

SEQ ID NO: 162358 - DNA, 259 bp, Homo sapiens
gccgactctagagcgatcccccgtactcacaatttacgaaagaattggcatctagattagaagaagctatccagaatgcagcccagagagaggggcaggtaaagacacagaaatcatgaaaaagtttctgatgtcagtgattgtaactgtcattcctagaacttgtgtggttcttttcatattatttgtggtcatatataatgatttccctcatttccttctcttctcttgggttttgttcaggtacacagggaggttg

SEQ ID NO: 162359 - DNA, 153 bp, Homo sapiens
aggcaggctgacgtagctgaaatacagtaaaatcttagaaaatttttgctgaatgaataagaaggttagaattgtcccaaatgaggatgtatcaacctagaccatatattgttttcaaactataacagcatataaaggaagaatgaagaaggt

SEQ ID NO: 162360 - DNA, 169 bp, Homo sapiens
cttattcctgtccttccattcctcttgaaccccttccaagcaggcatttacccccaacactccactacctttgcctcataaccacacagctgaatctgatgctctgccctcctcttgcaaaaccagggacctgcgctctcctggcccctgctgccgtcccctccacagc

SEQ ID NO: 162361 - DNA, 377 bp, Homo sapiens
caaagcgctgttctatgtcttgacgggggttggacgacataagggtgtgagccaggcaagttcctggtatagcatagccttcactcctcaacgatatttttaataaaatataaagtggggccggacacagtggctcacgcctgtaatcccagcactccgggaagtcaaggtggacagatcacttgagatcaggagttcaaaaccagcctggctaagatggcaaaaccccatctctactaaaaatacaaaaattggctgggcgaggtggcatgcacccataatcccagctactcaggaggctgaggcaagagaattgcttgaacccgggaggcagaggttgcagcgagccgagatcgcgccactgcactccagcctgg

SEQ ID NO: 162362 - DNA, 374 bp, Homo sapiens
agaggctggcccaggtgcccagtgtgggcctgctactggggtccaggggagaaaatgagcctgagatagggcagaggcccaaagagtcccagatatcaggcctggcataggcagcaccccttggtgccttgagaatcccttaggtgaggccaagctgtgtggttaggagtcttggaggcaaacaggcgggcatagcctagctctacttaccctctgcgtagccttgggcaactgagcctcagtttcttcctctataaaataggataataatagggtccttcctctaatgcttccctttcttgtccctgagaccgaggtgtcagatattcaggatgtccaagttccctcctgcccttaggtgggcccactgcttt

SEQ ID NO: 162363 - DNA, 696 bp, Homo sapiens
atttccccattgcttgagcaaattatttaatttcagagagactgagttggctcatctttgaaatagtgatcaagcctaattcactggagtagtgcaaagactaaatgttgtagtcaatgttaagtgcctggtaccatgccttggattgaatgcttacaatgtatgcattccataaaagataattcttcatttttcctgaggaaccttctgagtttaagttactctttatttaaatcctcctcagctttataaaacacatcatcattgaatttgaatcttccagagtcgtgtttctaactcacatttttctcataagcagtacaaatttacctgagatgtgacggatacataaatttgttaaattagcccttccaaatgaaataaataaatgaaaggaaagggaataaactatcaaaatcctcatgcgtctatttgtggctgaagtgttttattagattttataacaaagtttaaaaacaatatcaagtaggaatgtgtatgtgcttcttaggtaggtaaccggatgagcccatgttacaatatgttgaattttgtctatatgggaatgcctttaggatgccgtcatggtgccaaaacttaaggtggacagagaatgagaggaaggccctgacacgcagagcaggaactgtgatctgctaaccagggtccagatgctggccaggaaagaatttcatt

SEQ ID NO: 162364 - DNA, 361 bp, Homo sapiens
aggaaagggaactccctgactccttgcacttcgcgagtgaggcaatgcctcgccctgcttcggctcacgcacgatgcgctgcacccactgtcctgtgcccactgtctggcactccctagtgagatgtacctggtacctcagatggaaatgcagaaatcacctgtcttctgcgtcgcccacgctgggaactgtagatgggagctgttcctatttggccatcttcgctttttattttttaaaatagttgtgtcatcttggtgggttgggcgtggtggctcatgcctgtaatcctggcactttgggaggctgaggctaatggatcatttgaggtcaggagtttgagaccagcctcgtcaacatg

SEQ ID NO: 162365 - DNA, 686 bp, Homo sapiens
ggagttcaagaccaccctggtcaatatggtgaaactccggcccaactaaaaatacaaaaattaaccaggcatagtggcgcaagcctataatcccagccacctgagaggctgaggcaggagaatcacttgaacctgggaggcagaggttgcagtgagccgagatcgtgccagtgtactccagcctaggtgacacagcaagactccatctcaaaaaatataaataaataaaaataaaaataaaaataaaataaactgcttcaaaagaggctgagcatagtggtggacacctgtaatcccaggctgaggtgggtggattgcttgagctcaggagttcaaaaccagcctgggcaacatggcaaaaccctgtctctattaaaaaataaataataaagtgctgaaagaaaacaaaatattatcaacaaagaattctatatccagcaaaactgcccttcaaaaatggagtaataaaacattcccaggcgaacaaaagttaggggagctcgttacctgtagacctgccctgtgagaaatgctaaagggcagccttcaagttgaaacaaaatgacactagatagtaacttgaagccatatgaagaaatgaagatctccggtaaaagtaactgcatacaaataaaagccagtaatactgcaagtctggtttgtaactccattttatttcctacatg

SEQ ID NO: 162366 - DNA, 229 bp, Homo sapiens
ctcgcttagtggtcatcagagtttctagtctctcttaaggattaacagaaatctctctattagcagtccttgtcacctggaagcccctgttgcctgcctgggcagctagtaataggaatagagatatctgtatgcacttgagaccacataggttttgtctttccaatgttgctaagagtaccatagaaccacagaatttataacagtaaagggaatttagagatcgtct

SEQ ID NO: 162367 - DNA, 226 bp, Homo sapiens
agtagctgggactacatgcacgcaccaccacgcctggctaatttttctatttttagtagaaacggggttttcccatgttgtccaggctggtctccaactcctgggctcaatcagtccacctgccttggcctcccaaagtgctggcattacaagcatgagccgcaatgcttggccccagctcattctctaagaccagtatcaccctgatatcaaaaccaagcaaagg

SEQ ID NO: 162368 - DNA, 411 bp, Homo sapiens
taaaactgagtacaaacttccaaagaggtgggaagaaaatcaggaaagtatgatgtcctgcaagtcaagtatccaagaaagtgaattagagaacgaagtgatcagtgatagaatattctacagataggtcaagtaagatgagggctgagaccagaccactagatttagcagcatgcaagttactggcaacttggactagagccctttcagtggtgtggttgcaataaaaacctggctgcgtgggtttaagaggagaactgatataatcagatataatcaaatataaacaacgctactgagttttgctttaaaggaaaagaaattcagcagttgctggcaaagtgaggtcaagagtattatttttaaataagtggaagaacagcttaactgtatgctgacgggactaatcca

SEQ ID NO: 162369 - DNA, 566 bp, Homo sapiens
atctttttctgagatgaaatgatattgcttgtcatagaaataagagaaattttattattccttcagataaaggcaattagctaaaacaaactgctacttcaattatcaggtgaatttaggacgcactttatgaaataatttgcaataagcagtacagtcaaatcttatgggaagataagatgcagccaatcttaagaatttatgtttgtaggctgagcacgatagctcatgcctgtaatctcagcactttaggaggccggatggacgaatcacctgaggtcaggagttcgagaccagcctggccaacatggcgaaaccctatctctcctagaaatacaaaaattacccaggcgtgatggtggatacttgcaatcccagctactcgggaggctgaggcaggagaatcactggaacccgagaggcgaaggttgcggtgagccgagattgtgccactgcaccccagcctgggcaacagagcgagactctgtctcaaaaaataaaattttaaaatcctgatttttttttttaataactctgaacaagtttctttaactctctgcctcaat

SEQ ID NO: 162370 - DNA, 540 bp, Homo sapiens
tagctgttctagaggatctccgacggcggtgtttacggtacgtgtagcagcatccgcggcaggaagaaagatcccaagctggtacagtgtttcaaggacactcaaatatttctggctttctggcagcaaatatttttctacattttttgtaacagagtttggggtggcaatgggtaataggtaaatattatgaaactcttgaactaagtaccagcaatggcagttactttttgttctgaacgcattatcatttagatattatgggcattactcatctattttcataattttcagctacaaaatatatgccttcaaaatcatatctataatcctgaccacgctcctgatccagacccgtatttccaactgatattgtggtatcattacttacctaaaaagcattattacttatctgaaattaaactcagtattctctctctcccaaacttgcatatattattctattgccaagccaggaaccttagactcatactcaacttctaacaccttctaacattaacaaaatctggaggactcaaa

SEQ ID NO: 162371 - DNA, 506 bp, Homo sapiens
ggatggctagccaggattccgaaggcaggaagaaagatcccaagctggtacagtgtttcaaggacactcaaatatttctggctttctggcagcaaatatttttctacattttttgtaacagagtttggggtggcaatgggtaataggtaaatattatgaaactcttgaactaagtaccagcaatggcagttactttttgttctgaacgcattatcatttagatattatgggcattactcatctattttcataattttcagctacaaaatatatgccttcaaaatcatatctataatcctgaccacgctcctgatccagacccgtatttccaactgatattgtggtatcattacttacctaaaaagcattattacttatctgaaattaaactcagtattctctctctcccaaacttgcatatattattctattgccaagccaggaaccttagactcatactcaacttctaacaccttctaacattaacaaaatctggaggactcaaa

SEQ ID NO: 162372 - DNA, 854 bp, Homo sapiens
cattagaacattggaaattttattagaagttgctaagtatttcaaaaatctatcagaagtttgcaaatgattttataaagacagaccctcaagatgacagctcaggatgcaactgaaatttgcttttttgagtgtatttggcgtttgctgtttgtgaccctgattttcatgctctgcagcaggctgtgctccctggccaggaaagggggtcatttgctcagagccaggagcccttccctgcgggttaagttaccggaagtcatgtctggcagggcaggatttggctggttctggtctcaaccacagccgactccacagggcttggcctatgtgggattcagcccacgaaaacaatttcttgttaaaagcacctgtcttaccctccctagtgatctcactgtatttaaaatatttatttaaacaaggcaagtattccctttttattacaggttgagtgccccaattagaaaatccaaaatgctccaaaacctgaaacttttgagctctgacatgacatcacaggtggaaaatccacacctgacccgacagtcacagtcaaaacttatttcatgcacaaaattaaaacagtgtataaaattaccttcaagctacgtgtatgaggtgtgcgtgaaacataaatgaattttgtgtttagactcgggtcacgtcccaaatgtctcattatgtatatgcacatagtccaaactctgaaaaaaatccaaaatccgaaacatttctggccttaagcattttggatatgggatacccagcctgtaggagatacttggccatgtttagtgggagccaatggatgtatacctaagaatctgcctaaacctcgaccgtgcttcctg

SEQ ID NO: 162373 - DNA, 430 bp, Homo sapiens
ctcttttggggtctttgctcttttggggtctttgctgatacacgaagatctttctctccagcctaatgcatcacaggccaacatcagaagcacagatttggcccctggccctgaaaagagagatgggaggagaggatggagcatgggatccaggcactgctctgtagctggggctctgagctctactctccataccctccttcagaggagacaggtggggaccgaagccatttccccatctcccacagggggacacagactgacaggcagtcaatgacccttgtttctggggccttgtcttctctcctccaggcatctgaaccttgcagcttccctgcccctcacttggcagccctcctgtctcagcagtggagagaggtgggggccctgggaaagagttgcccgttcctagaccagactgcagagctga

SEQ ID NO: 162374 - DNA, 378 bp, Homo sapiens
gaaactgtacttggggcagttctggctgtgaaactccttttaccacagattagagtccatatgcttcccttcatctgatatgcatttgacttatgaaggggagaatagcagatgattagatgcctcagttggaagaaatttgcctcacactggtagaggtatgtctgctactgtgtaattttataatataaattggatttaacaactgcattctaaattataattcaatctgaaactaggcacatcctaaacaaggaaaatgctagagtgtgaatcacgtatcttctttcttggaaaggcattgtttttgtttcctaacagagggttgataaagaggataaaaatatggaaaaagttctcacccaataatgtggcata

SEQ ID NO: 162375 - DNA, 974 bp, Homo sapiens
caccactcctagctaacttttatatttttagtagagatggtgtttcaccatgttgcccaggctggtcttgaactcctgacctcaggtgatccatctgccttggtctcccaaagtgcggggattacaggcatgagccactgcgtccggccagatcttcttatttatattgggctaagcatcatatctggcaaaatgaaagcaagtctttgttatatgttcagtttgctactgtcttccatctcctggttcctttgactctatgtcttcatccttttccaagaagtctcttgcacatcttccttcccacaccacaaaagcatctcttgcacgtttgggagtttgtgttgtccaggcggatgctgtaggttcaacttcagccaataaaacttcctctcacctgaggctataggtgtctctgggatcagtaagtcacttactgagcctactttcttaccccagattctgtgcaccaaatcggagaacaataggctggttgtgcaaatagacaatgccaaattggctgcagatgacttcaggaccaagtgagttggggttggacagggatgggaaggagccaagtgagagttggggttggatggggatgggacaatgccaagttggctgcttctgtctcatgtggcatcggatgtcattgacccagaccccaacccagtagttcatagcagaagagaacaaagggcattaagctcaagatcctgaaaaactatccgctctccagtggtttagcattaacagtttacaacatgtgctagaatgcatcatccacctggtaagcaacttgtgaagcaggcgggcagggatagaatctcctccacaggtggggaccctgaggcttggggtgctggtgtgacttgccagaagccatgtgggtaccgagtggcagagctgggacttggccttaaattttgtaccaaattttcctttcttgctatagcaatttcctgtgaaactgt

SEQ ID NO: 162376 - DNA, 564 bp, Homo sapiens
ataaaggaaccagcacaataaaacagtaagcaaaagatctaaacagagaagatatacagatgacaaataagcatatgaaaagatgctcaggctgggggcggtggttcacgcctataatacgagcactttgggcatgtaaggtagaaggatcacttgagttcaagaccagcccgggtaacatagtgagacaccatctctatttcaaaaaaagaaaaaagaaaagatgctgaacattgtacatcattagggagttgcaagttaaaactatgagataccactacacaacggtcaaaattgaaaatacaacaccaaatgctggcaaggaggtaaagcaacaagaactctcattcactgctggtcagaatacaaaatagtacagctactttggaaaacagcttggcagcttcttacaaaactaaacactcttaccataaaatgtgctgactcaatgaattgaaaactcatgtccacacaaaaacctacacataaatattcagagcggctttatacataattgccaaaacctggaagcaatcaagatgtccttcaataggtaaatgaata

SEQ ID NO: 162377 - DNA, 386 bp, Homo sapiens
cctcctcacttgagctgtgcaaactagggcgggttgcctgacctctctgtgttctctcatctctaagatcagtacagtcgcagtctgcgtcgcggcgagccttgacatgagatgctgtgggtaaacatgcctcccctggctctcaacgcgtccgcagtcagtcgcatgcatccttccttccgctcctggacacccagaggggtatccggcgggcggagaagccatggctctggaagcctgggaccctcggatgaggcaggctgtggggagagaggctgggaggatggcccatcgtcgcgctgtcacgtgggtaattgagagtttgcggaaattcaggggttctggggaagcgaggttggcgcgtctgtgtgtgtataatttaatgc

SEQ ID NO: 162378 - DNA, 262 bp, Homo sapiens
ttcccaacctgtgcccgggccagccagggtaaagtggcttaatcttcaaccatgttttcatcttactcaacagatgttgcccaaggccttgggtagaagggacctagggtcaccaccctcctgtggggcactggtggggcaggatggagaggcaagagggcttgtttgccacggacactcctgatccttgcaaagagctgaagcagcttttctcaacttctgaaaaataagtcaaaagaatttttcaagggtgatcgccaaa

SEQ ID NO: 162379 - DNA, 248 bp, Homo sapiens
gtgacccatttctggccaatgcaatgaaaggggacacctgtatggggcttctagaaaaggttttcctccaccagggaagagatctccccactaactaccctggccatgcccctgtctcctccggttttgaacacatggtgcctggagctgccgccttcatggaagcatgagagaaagaagaggctcaccagagaccaaatcagagctctgacatcacaaggctgagatgagagtcttcgaggatgcat

SEQ ID NO: 162380 - DNA, 261 bp, Homo sapiens
attagaaaaactatgcttttccaaaacttaagcaaattatcctcttaattctctgcaaaaataactagatcttttaatagaaaccatactaaacaagatgaaatgagtatttgacattttttatgataaaaaagtgaatatattaataagcctctaaatgacgattaattagcaacagagtgttattctgttttgttttttactcaaaaatgcaaattatttacttacaaaaatccatttaaaacatcaaggttttttccc

SEQ ID NO: 162381 - DNA, 500 bp, Homo sapiens
tgtgcagaagtgcatcaagctgaggccctaggacctgcagggataatccaggggctcaagaaacactgattgaatgaaatgaacaaagaaagagcaagcaagctatgtattttgctggaaccttttacatgagactcaggtttcattttgaagacacccaggtcaatgtgtagattatcttgactctgcctctttaaatagagcacagattgttatatgcaagttgcgtgctagtgtgttttaagtagagaaacaaaaggagtgtctttacattagtgttttcttcaaagaagatagagatcattcaggatgctaggttttttttttttcacttattttgaggatctttacaaaggaaaatggcactttgaaatcgcaaggatgatgtagctatctggttgggtttgatcctgccagttccgctaggagaaatcttacttcatattggctgaattgctgacatgagttttaaagataaaacaatttgagaaattgaaaat

SEQ ID NO: 162382 - DNA, 493 bp, Homo sapiens
ttaaaaagaaatcctccttactatcattcccagatattcttgtctcagctaaagatacttgtttttcattttgagtaaatattccaagtaactaaagctctttcagatttaggaagaaggcgtttttcctttcccttcctatcccacatccggtttatcagcagtgctgtcatctttatcttcaaaatatatccaggttcctttacttcttaccccttccacttccgtgtctggttcaagcccctgtagtttctctgcaggttggttgctctgtctcctaactgcttttcttacttctgtcctttcttctcttgcagcctgtactcagcaaggccagacggatcctctgctccaaacttgccctggctgcctacctccctcagcatgaaagctgaggttctcgcagcagactgcaaggctctttattacagccgagccctcctgacgtcattttcctctctttcatgtctctctggtcacttggcctcctttc

SEQ ID NO: 162383 - DNA, 512 bp, Homo sapiens
tctgttttgtagttttaactgttcagaaaactagttgtggaatttatacaaacttgagttatttctaagctgccctaatgcctgtccgtttttcccattaataagaaaactattaatttaatgctgttattaaattgtctgttttaattctttagatgatgtgacctatctcctttttaccctctacaatttttctacttaaattaagaatattacttaagcctattataagttaaagcatgtaaatattctttaactcactaaatgagtcagtcttgtagaaaaatatttgaccattaggtccaggggagtgattaataatttttacaggcatttgtttaatatcaacaaaatattctagctgtcatgatagcaaatatagtaagacataactttttctccagatatatcagaaacgttttaggaatgtgatttagagcctagcaaaaactcacagttagtactaagtcatctaaagtgagttggtatggaagcatcagcaaagctactct

SEQ ID NO: 162384 - DNA, 274 bp, Homo sapiens
cctgttccccctaaaatcagtcagacctgaccttaaatcctggctctaacactgaataaatgaatgagcttgagtaagctgccactaggagcttcagagtaacaggaatacattccctacacctcacaggctggacatagaggtggtgctcagtataaagggggatcataacttcactggacttttcaatcttacatcaagagcagagggcagtgttagacattcagtaaatagccgtcattataataaggcatgggctcatgaggattaaatg

SEQ ID NO: 162385 - DNA, 766 bp, Homo sapiens
tggaggcaaaactaatataagtggagagtttatttgggccaaacttgaggattacaacctgggaacatagattcaagtttccctgaatatacactcctgttagcagcagttacaagtggagtttgaaaggcaaaatagggggacagggggtggactgtacaaagttgtttgctaggaattctcactggtttacagaaccagtgagaattgattagtgattgactatacgttgttaacctataaggtatggattatagtgttattataattcacacctgatgtggattattaagctaatttatggctacttatggcaatagtaagcagtttaaacagatgaatacatagctcaaaggaggggagtaggcatgattgtaatctcattttaatatctatctgggcctgatatttaaaaggacttgcattcctcagataaaagttcttttcttttctcagttgctacagtgcttcagtttaaacttcacatctattggaagtctttcaacgttgttaatctggattagagatccttgagagaaaatgccactttcttttttactatactgtatttaatatgctcaatagtatcaataggcatatttctgtttatgtaagattgtagtgtggctgaaggctgaaggggggcaagagcacatgagaagctattgcttccacttatctgcttttcccaggttgaatgtgtgctagattattttaggaccttttgggctcaaaaaatcaatggggaagcctgaatttagatgat

SEQ ID NO: 162386 - DNA, 221 bp, Homo sapiens
gccagcaatcgactagagccagactctacccccagtgcaggaaactaggacgaggcagaatcagccctcatgttaccacctatgagcatacacatgtgcgtgcatgcgtgcgcacacacatacacgagcgtgctataggaaaacagcaagagtgacgccaccttgaagcgtaaccgccaggaggactggtgtctgacccttgcatacaatgtgtcctgcag

SEQ ID NO: 162387 - DNA, 265 bp, Homo sapiens
aaaggtcacttttgttatgtgttagcaaagagactggcagcattttgcccctgccctagagatctgtggaactttgaacttgagagagatgacttagggtacctagtagaagaaatttctcagcaggaaagcattcaagaggtgacttgagtgctgttaaaagcattcaagaggtgacttgagtgctgttaaaagcattcacttcagttttatgtattcacaatgatatggtttggaattggaacctatgtttaaaagggaaata

SEQ ID NO: 162388 - DNA, 624 bp, Homo sapiens
acgctggagtacagtggcacaatcatagctcactgtagcctcagactcctgggctcaagtgatcctcccacattagtccctcgagtagctaggatcacagacgcagaccaccacacctggttaattttgtattttttgtagggatggtgtttcaccatgttgcccaggctggtctcgaactcttggactcaggcaaaccttctgccttagcctcttgagtaggtaggactacaggtgcacaccactatgccttattaatttttttttcatttttgtataggcaggatctggctgtgttgcccaaggtggtctcaaaatcctagccttaagtaatccaccagcctcagccttctcaatacctgggactgcaggcatgcaccactctacctggtttgattttttttcttagtgggcagtgagggatgttgaaggctttgcacaagggagtggcatatttagagtcacgcaccaggaaaatgagcgtgcagggcgagggctgacattgaaggtgaccctggaagttggggccctgctggacatgggtcaggctgtggcgtccagctgtgtgagatggaaaaccattctgttgtcatgactccaacgtgtctttacttctcttatagg

SEQ ID NO: 162389 - DNA, 151 bp, Homo sapiens
aaaaatggttgtaacagtggttttacatcgttaaaatgaatgtttattatttcaattaagcttctcaccaagaagcttaagtacttaaattatttacaatttatcacccagtgagttttcctcttggccctagctgccagaaaacttaaac

SEQ ID NO: 162390 - DNA, 263 bp, Homo sapiens
agagctctttgtgttggctgcctggggacttgaagagctttgcttttgagaactttggtccttccctgaaccggctgctgcagctgacagctctgcctgagtgggaaagtttaaacgaggacaataattcagtttgagtgcccctgaatcatgtctttgtctctgctcttgacagaacagaaggaagtttttcattattaaggatgccagctgcccacagattgatatatctgtagccagggctggctcactctcaagtaggt

SEQ ID NO: 162391 - DNA, 246 bp, Homo sapiens
aaaaagtcccccaaactctagggcagttttcccgttaacacccactttttgctgtgcctcagacccgcgctctcctccaacttcttttgctttcccataccaaaagcaccatcttctcccttttccccgaacccagggggctcccctgaagccttcactttctctttagcttcacctcgcacccttgctcttccatgtacaatccttccctcctttcgcctagtctcttccaagactttcctgaca

SEQ ID NO: 162392 - DNA, 152 bp, Homo sapiens
atgttataaagacattaagtgtccactcaataactttgattcaaactatcttcatgttcttcacttcacaagataaagctcttaaaatggactttgtgaggttccatgtgtttggtcagtcatgagaggaagaataattcagagtgagagga

SEQ ID NO: 162393 - DNA, 656 bp, Homo sapiens
tttttattggctctataaagttgacttcaattcctaaaagcaatctgataatatctgaaaatatgctattccagtcaaagccttggaaaaataaccagtgtctccaattgtgttccattataaaagaaaacacattcttactgaatttatgcaaataactagattgccacaaaataagaatactcctgaatagtttccaaattttggagaactcaggtagagaaaaaggtaaattttgctctttttgagtatttgaaaaaatactcaacttcttggtacaataaaaacttcagctgaattaaattagtgtttaattgaacaatgaaagatttgcgaatcaggcagcccccagaatcacagcagtttcagagagactccagggatacctcgtggtcagaacaaatttatagacaaaaaaaaagggaagtgatgtacagaaatcagaagtgaggtaccaaaacaattggattggttacagctctgcagttgccttatttgaacacaactggaacactcagcagtgtgtgcgtggttgaattacggctgctgggattggccaagactcagtgactgttacaggtgcatactcctaagttaggttttcaatcttgtctacctattaagctaggttgcagttcatccataaggactcaaat

SEQ ID NO: 162394 - DNA, 495 bp, Homo sapiens
tcattctccacaaggtgaaagtttagtaaacagtgaatagcttaaggaatttaagaaggatgaatctcagatcttggtgagcaaaatgaggacaaacaataaatcttttcctcaagagtatttggttgcgtatgctaagtctgaatctcttactgcaagtaaactgtgtgatatctattcttacagacaaagtaaatacagctcttcaaggaacaacctgcagtcatcagggacaggagcgtctccatgaaggaaacctcacaggcctttctgctgaaaaccttgcaactccttggagagggcagccctggcagaaactcagacaaagcaaaccctacaggggagtgaattgattataattttagcacagatttcacagcccaggatcccccactgtttgttgcaggataggaagtccagactgttttttatctgcctattcccaggttatcaaaatgattcattatggccaattcctgagagattgatctagaa

SEQ ID NO: 162395 - DNA, 574 bp, Homo sapiens
cttttggtgttggagttacttgtggctcaatgttataatatatttcagaggcaaacaagatacttcccaaaatgtcaaacattaacaaaattataaattcaggaaataaatttgatgttctgggaagatgtaatttcctgacagtctctaaaatcatgtcctttagaccttcaaaacatgtaaagacatttgtgtaaatctcacacttttggaatttttttcctcttgattttccctctaaaaaacattttataactttgctattaatttgtgacattctttttacctttcaatagaactttaacaaaattagtctttgcgatactcttaaatagattaatttgagaattttaaatgattttaaactttgaagaagcagattgtaaagacatttatgggaggagtgttacaccatgcctcatatttcagactttaaaaccaagacacattacttttttttgtacgtaagtattttctaactttgggcaaatacttaaattccactctctgtttcagcgtgagattatttaagtcatttaaattaactcatgaactttgctttagaaaaatgttt

SEQ ID NO: 162396 - DNA, 448 bp, Homo sapiens
ctcataaaagacagctgtatgagcttcactaatgtatttgtcctgacctgttgttgagcccgctgttcactacaacccatgccatgctcttcatgaagatgaacaggagaaatctttcttagggtttactatgagaaagggctacactattctgaagcaatatgtttgtttcaatttaatagatgttacaaatttggcactggattaccaagaagtataatggccacctgcagcaccacgggaactaaccaactaaccttccctctagatccatctcacagcttttatccctctacccagcacactatccctctctttctttaggttgattccctcaattatttattctgttcttttagttatctttttcacttaaaatcctttgggagaacaaagatgtattaatcaatttcaatgtgtttatatttaataaaaacttctttaaata

SEQ ID NO: 162397 - DNA, 700 bp, Homo sapiens
aatcttgtattttcccataactaaaaaaattataataaagcagtcaatgttaatattaaatacaaacactgccctacatcacccattctttttcagattacataagtacttttgctccctctctacaaactccttgtatctgaatacttgatccaaccattcattcataaacatctgtcaaatattttatctcttcaaaacctccaacttatcgggcacctcatatgtcaggcgcactattcggtacttcacaacatgacctaattttatattttataattaagtttatactgctaggagagcacctccccggccaagagtcttatctcaattacctctacttcaggctccttttacctagatacaacactaccagtgctcttggcttcaaccactcattttctccagagtccagtagcatcatcaatttattccttctggtaacttcaacttctatttacactgagtccacttaacaaaaaactgtatccaattctccaaattaaaacaaacccccttcctagagcctgtatcttgctccaggtatatcctttatgtgctttactctccagttctttgagacagagtctcattgtcgcccaggctggagtacaatggctcaatcttggctcactgcaacccccacctcctgggttcaaacaattcttgtgcctcagcctcccgaacagctgagattaca

SEQ ID NO: 162398 - DNA, 199 bp, Homo sapiens
gaagaggttgctgactgtaagttgaaaggaaagtttgacggtgcaaagggtcctgctaaagttgcctggaaaaaagtggaagaggaagatgaagaaagaagaggaggaggacaatggatgagaaaaactttctatgccaggagtgatggctcactcctgtaatcccagcactttgggaggccaaggcgggtggaggtca

SEQ ID NO: 162399 - DNA, 469 bp, Homo sapiens
tcttcatagctgactctagaggatacaccgacagcacactgaatcagtgtaagccacaaacgatacaatgacatctttaaaagaccaaaaagaaaaaactgtcaaactggcaaaatatatcattcaaaaacaaggctgaaaggctgaaataaaaacattcagataaatgaaagctcagaaaatttttcaacagtagacctgtcatttggacctacaggaagaaatgaaaacaccaaaaatggtaaataaatagttaaatgctaaaaactagcttttttctacttgatttccttaaaagacaaaagactcatatatatctatatgtagagagagagagctgtttttttgtttgcttgttttagtttttgtttttgagacagagttttgctcttgttacccaggctagagtccaatggcatgattttggccatcgcaacctccacctcccgggttcaagcgactctcctgc

SEQ ID NO: 162400 - DNA, 241 bp, Homo sapiens
caccgtcccctgaatgatgccaaatttcacacccttgttttttctcacattctgcctttcccaattgtgcctgtacttcatgagtcatgaaatgcccatccctccatgacatccttcattcacaaagtctataacagcctctcctccaaactcatttgaaactactaagttagcattataaatgttagtgcacaccattctctaatgatttcatatacattaatgttattttctaaagtag

SEQ ID NO: 162401 - DNA, 611 bp, Homo sapiens
cttaagttaaacataaagaattcataaaggtgacaaactccttaatgaatcatccactgaccttaggaacatagagatgtgaaacacatagctcatgcccactctcttttatataaatattatccctgttgctaacattgtggtgggtgggtcatagagtcagtaaatgttgtttaatggtgagttggtgtcctttattctctttcttgtagtcaatctggtatttagttgattgctgaaagtaattatcatttgcattcaacaaataacattgttgatactggtattctctaattagagcattacgattttctaaatagtccattagagttgcttatattgttcacaatcaaggttattcaatataagcaaacgctactgatttactaattattcaaaaatggacaaaaatgtatacttctttgatataaaaatagaattactagatactacgatgctgataaggtgctgtggttaaattgttaattgcttaaaatatttaagtaaaaagtaattaaaatctgtagttttgaattcaaatatattcagtttcaatgtttaccttattataacagtgcatcttaaatgtttcttcagaaaagtaaaaggaa

SEQ ID NO: 162402 - DNA, 242 bp, Homo sapiens
tctctctattctccccgcccatcaaggagtctgagatcgttcactttttcctaaggatgtcctcaaagatgaggttttgaagattatgcccatgcaaaaagagacctatgctggccagtggaccaggttcaagggatttgtcacagtcagggacaagagtcacatcagtctgtgtgttaggtattccaaggaagtagtccctgccatctgcaggccaccattcactggccaacctctccatt

SEQ ID NO: 162403 - DNA, 456 bp, Homo sapiens
aataaataacggcctccctaatattttgcataaaaattatttcagtttataaaaccaactaccaaaaaactgaggttcagggccgggcacggtggctcatgcctgtaatcccagcactttggaaggccaaggctggcggatcacttgaggtcaggagttcgagaccagccttgccaacatggtaaaacctcgtctttaccaaaaaatacaaaaacttaagctgggcatggtggcgcaatgcctgtagtcccacctactcgagaggctcaggcaggagaatcacttgaactcaggaggtggaggttgcagtgagccgagaccgcaccactgcactccagcctgggtgacagagagagaccttgtatcaaaaaaacaaacaaacaggccgggcgtggtggctcatgcctgtaatcccagcactctgggaggctgaggtgggcggatcacctgatgttg

SEQ ID NO: 162404 - DNA, 628 bp, Homo sapiens
atttgaggttgtctggaaaaaaacagcgagttgaagtgacaacaaaatactcccctcaagagtggaaaatcctggccgggcatggtggctcacgtctgtaatcccagcactttgggagtgccaaggtgagtggatcacttgaggtcagaagtttgagaccagcctggccaacatatagtgaaaccccgtctctactaaaaaatacaaaaattagctggacatggtggtgcatgcctgtagtccccactactagggaagctgaggcaggaggattgcttgagcccagaagctcgaggctgcagtgagctgtgattgcaccactgcactgcagcctgggtgacatagcaagaccctgtctcaaaaaaacaaaaaggctcaatgatattttattgttgctgtataggtttatttcaacattgctctgttgttggatttttccatttgcttttatgtcagatgctttagtgaaatctttatacatgtatctttgtttcttaaattattccactgagataaatttctagaagtagaattgagtcaaagaatatgaacattattgtggctctcactgcatgttgctatactggttttcagaaaccctttaccaacttttaccagcagtaatgaa

SEQ ID NO: 162405 - DNA, 281 bp, Homo sapiens
cgcctcggcctcccaaggtgctgggattataggcatgagccactgtgcctggccaacatttatttgttaactatatttttattttgttagtcttctgccacatttatttgatccttaggtggttgttgtgtttgtgtaaccaacctctagttctctgtggcagaatgtgggcataaagaaagaagtaaagttatgaaattttcttcttaataacatttgtttaaaagaaaatacaaaaagccacttaaatcctaattcatatgtctgacacagccaaatca

SEQ ID NO: 162406 - DNA, 315 bp, Homo sapiens
ccctcacggattacctcaagcaatgatatgggtttgatgaacaagggtcagaagtttcctttggctgtagtgttcagtgatcatggcgttctagggagtgcaaagaagaaaataagcagccaatcctctaagacctttactctaattagggagtttcattaaacccctgaaaagcttaataaaaaaaaaaaccaccaaacaaatgaaaaccataagtacttttacaagataagataagtgctgttgcaagacaggaattaatggcccctgatgtgggcttgggtacctacaagagtctttgtggaggttggaggg

SEQ ID NO: 162407 - DNA, 429 bp, Homo sapiens
ggcatgatcttagcctcaaactcctaggctcaaggaatcctcctgccttggcctcccaaagtgctgggaattataggtgtcagctactgagcttggcctcacaattcatcttgagtcagatctgttagaaccttaatctttatcctgctctccaggaattcttgagaacgtggagaacaaagtatgttaactgactccttctgcatggccacttctgggttcagtggtattccccggggctcaaatgaagattattttattaggtgttttctgttaactggccatttttgaatgaacagaggggtcagaggattaaagcagaactcacagggttcacaaacaatttactagaaatcataggtatcaaattgagaacatattcttttttttttttttttttttggaggtaacccgggaggggggtcccga

SEQ ID NO: 162408 - DNA, 477 bp, Homo sapiens
atacttacaagagtctccaaagcaggtgtagaactttaaacgagatgtgttttccaactgggctgtccgttaatggcctaaactgagggcaatgtgatttatcatcagaaagatacataggtcaattttttccattcagccttggccaatagtactgaatatttagggttcaatataaaatgaatttgtaacagcactattttcaaaagaatgagtcttcacgacaacaaaaagtagatctaatcagagttgcaaaggcaagggaaatttatcaggtagaacagatgcattcaaagcaatggaacttgtgacattttatttccaatgtgcatggtaatcaccgctaaaatgtttacacctaattaaatatggggaatgctcttacttatatagcatcatagaaaaattaaggagagatcaaatatacacaaggagctaggtatattttgaattattttgacagtagagttgaagaaa

SEQ ID NO: 162409 - DNA, 251 bp, Homo sapiens
aacaaaaacaaagtactcactagtcaggctgactttagaaaaagctttactttacccacactaatttagacatagaaatagagctgtttggccaggcacagtgagtcacgcctgtaatcccagcgctttggaaggctgagatgggaaaattgctgaagccaggagttcaataacagcatgggcaacagagtgagacccctgggctacaaaaatcaatttttttttgttttaaattagctgaatatggtggt

SEQ ID NO: 162410 - DNA, 495 bp, Homo sapiens
tgttttttgagcaagtttctgctatctctgctcttatgtatgcttgattcctctttcccccacacctaacccactcatctcaaaaatgtaatatgtcttttctgaaatgtaagtctcatcatttagaatccatcagtggcttactagcactttgaagataaaaatccaaaatccttttagcaaggtgtgtaggcctaccctattgagaaagattttaaatctttatgtttgaaagatacttttgctgggtataaaattctaggtttaaagatgtggttgtgctgttacctcctgggttgttgcattgtttctgacaagaagtctacagtcactctaatctttgctcctctgtatgttaagtgtcttttttctttctttttttttttaaaaactctggctacttttaagatttttctttttaccattgaatttgtgcaattcaattatagggtacattggtttagctttcttcatgtgttctgtgcttggggtttg

SEQ ID NO: 162411 - DNA, 370 bp, Homo sapiens
cccaaagtgctggggttacaggtttgagccattgctcccagcctgaatttttaattaaatttaaatttaaatagccacacatgtctagtggctaccatattggacagcgcagttctagaccgatgtgattcaggatcattccctcagcatcgtggggcaaagagaaaactgccccaagctggcctgtagaaggctcaggcgaaggtttcccaatgccgggatggggggtgcgctcagcagcatcaccccttatgattctcaatcgctaatagctccactcaggttcatttctcggtcaggggcatttctttgtcacagaaggaatcacccagctctgggagatacagcagcctccactcaggtagtcctt

SEQ ID NO: 162412 - DNA, 158 bp, Homo sapiens
aagtacagccaacaaaaatgtctgaagtctattttgggagctaatattctaggtttatcttttctacacctaccttgattctagcttctcaaagacaacgtagttaactagtccgtgggtgaatacttcactgagcccctcaagtggctaattatttg

SEQ ID NO: 162413 - DNA, 194 bp, Homo sapiens
tctgcccatcttgcccgtggacccacggtgccatggccagcccacgtccttggggcattttgcaagcagctggtctccccgccagagcctctactgtgcagggcctctggtttagggggggatgccaggcgttggggcctgtgagtcagctttttgcaaatgttggacgcctgtcactctgtctgcccatgcat

SEQ ID NO: 162414 - DNA, 451 bp, Homo sapiens
cctaatggagccgaacactagtcgctgggttccacggttctcttccgtgacccacagcttctcatagagctataacactcatgcatggcccaaggttccattccttggaatccgtgaggccaagaaccccaggtcagagaacaaaaggcttgccaccatcttgagagcagcccaccaccatcttggaagcagcccgccaccatcttagaagctctaagaacgaagacccgccggtaacactacagtgcaatttaccgagaaggagcccaaagacacaagactctagggtggcacaaaatgccacaggtttccagaactctggttttctgacaacttaggctacatccctcaaagagcaggctattgtaaaagagaacctgaagttgtcatatcacatgcttgctaccactattagacatttgtatttttaaaattaaaattgggctatttt

SEQ ID NO: 162415 - DNA, 616 bp, Homo sapiens
ctaagcccctcactcagagcagccccaccattccccagggataggcaggtcctcgctgtggcccagatgtcaacatgggcagctctgccccaaggatgtggcatgtgtttaaatgtataaaagatgaagaggagatggtaacagaagtcctcctaagaagaaaactatttagaaacatgtgctcactaaatcattgcagttagaagatgaggcccgaggaagctggggtggtataatttgttcattgctctgggaaaagagggagaaataaaagcaaggaggaagccaaagaagtagtggaatgggaatgcccccatgatctgaccctctccctaaccctttttgagacagagtctcactgtctcccaggctggagtgcagtggcgccatcttggcttagtgcaacctttggctcctgggttcaagcgattctcctgcctcagcctcctgagtagctgggattacaggtgcccaccaccatgtctggctaatttttatatttttagtagagacgaggttttgccatgctggcctcaaactcctgatctcaagtgatccacccgccttggcctcccaagtgctgggattacaggtatgagccaccatgcccggcctc

SEQ ID NO: 162416 - DNA, 297 bp, Homo sapiens
tattcatcacataccaataattttctgcttcctaaaatatgaaagataatgactcatccatccagcacttatcaatattgtttatgatagaaaaaagataaatgcatcattcccttttgtatccagtgcactggataatatatactttaaacatgcaaattttaaataagaaatgcatttatacaacacaactaataggaactcaaaggttttataaatattaactcttcacatttttataagctagttttacaagattcttattttaaacagtggacctaggatacatgtaaataa

SEQ ID NO: 162417 - DNA, 417 bp, Homo sapiens
tgtctgcaccagctctgagacttccagtgtgtatttgcaaacccagactgacttttatggcctccaatgttggggaatgatcattgcagggtgtcttcttgaccactcgaatttttgggacctcagagaaaatgctgccaccagccaattcccacaagacacttcagggaagagaacctcacagtctcagacaacaggctgcaactcctggggaacctgaacaggctggttgctgggcaggcctggtagaattaacccaacttcccatttcattcctacttgacattccagagagatgggctggagaaatctgccttgtctgtctttaaaagaagacatttctcccacggcttcctcctcttcgaattccctcatctatccatctactctcactccccttccgctctcaaagctgtt

SEQ ID NO: 162418 - DNA, 234 bp, Homo sapiens
gttcagtgttgagccagaacatataaattcccatctgaaaacctaacttcaggaaaatcacttgaacttttttgtgtctcaccaagtatgaggcctgtctctgcagcctggggatgttataaaggtggattagcccatgtttttaaagcacttacagctcccatggggaaaccttttgcgacttccaggcataattacctgtgtattccagctggaataaggcaaacagagtgc

SEQ ID NO: 162419 - DNA, 105 bp, Homo sapiens
tgggattcaaatgctctctgccaagttatagtttctgggtcaatattcagtcctagaattctgctcaattctttatcagtgtgatagagtcagattctcaattct

SEQ ID NO: 162420 - DNA, 511 bp, Homo sapiens
tccatgactttcccattatttcacactagggagcattggtggttcaatggcagaattctcatcacccattatttcagactgattaactccatcttctcttccaggtctcctctgccatgcaagtgggatttggctccttctagccccatttttcccttccctctcacttccgaggttgctggttattaacacagatattttaacacacacacacagttccactcgggttaagaaatgctgtcgttacactagaaatttctggggtgattctaaaaaagagaactttctttaaacgtaatcttttagctagtatccactttagactcagaaaatgtaagttatctacagcctgacaaagactagtacaacctattcctgtctcaaaatgtttctaaaattagagtgaacattgtgttaactgccacagttaaaatcaaaatgatggatttctcttctgaaatcaatcctaaaatgcttcctctcctggcagtcagaaaactcattcaccatt

SEQ ID NO: 162421 - DNA, 177 bp, Homo sapiens
tgtctccctgccaggtgcttctgtggcctatggttgccctgctgctccctggacgagggggtgggtgtggaccagccctcgtggcccctctgcagccagcaccatcctcagtaaagactacaggtatttcctgagcacctgcagggtgccaggcactgtgctctgtgctgatgaata

SEQ ID NO: 162422 - DNA, 302 bp, Homo sapiens
aaacacaagcaagatttattaaatacaaatcgactgtaatgagaggtttatagtaaaaaagaaaaaagaaaaaaacaaatgttgtaatgttatattacttgtatgtgtacatgattaaattgaaagccaaaacttttaattaagatactgaggtttatttaggcacctctcagcatgttggatgtagttcaagaattttctgaaaaaggaagcttgtttattaagtgaaaatgatgtgtcttttgaagcaggcatagaaagtcaggctacccttttggaataaatgtctaaaattttatcac

SEQ ID NO: 162423 - DNA, 322 bp, Homo sapiens
ccagatctggataagagaccttccttcacaggtgcactctcacacccacactcacttagactgggactatgtcgacatgcccattcacctagtgtgcacatctttggggtgctggaggaaaccagagtacctgcagaaaaccagcagacctgggaagaatgtgcaaacatcacatagacaatggccctggctgggaattttttttttctcatcagccttgtaataaaaagatgttattccaggtcctgctgtacacatattaaataggcaaagatgttcaagtttgacagcaccctccattggcagggctaagcagaaacac

SEQ ID NO: 162424 - DNA, 619 bp, Homo sapiens
ccaagcgtgacagacacaaatcgagcacacggtgttgtgaaagtggtgcccgtagactctcttgatgcagacttgccgcaagccttcagtatgtaaaaaacccaagaacacaatatccgtgaagcacagtgaagtgaggtgcgctgttgaagttgatggtgttcactgtacatttcataaccacagttagaattctatactttggagtttggactgggcaaaaatgtagtgataacctatcaattatggctttagcagagacatattctataggaagcaacagtagccagccctggctagtgtaggcaaaagtagggtgtgtagaaggggcctggagtatctcacagggtctaaggaacagtgggtacatgagcagcaggaagggatgggaccaggccagccctggtcagggactccccgtcagagcactggactttacagttctcgaacctcagtcctcggcctctgtgcccttcactttacatcttgagcaggagaatcacagtggccaagagaaatccagtcagctgttgtgtcccagtcagctgtagtcagaggcctagggtcacggatcaggagcctgactgccaggggcccagtgtgtccacccagcaggtga

SEQ ID NO: 162425 - DNA, 150 bp, Homo sapiens
gcgtgagccacggtgcctggcctaaaattgctaatttttgacataaggcaatttttttcttttttcttttctttttttttttttgagatggagtttcgctctgtcacccaggttggagtgcagtggcgtgatctcagctcactgcaagct

SEQ ID NO: 162426 - DNA, 246 bp, Homo sapiens
tcattatcacattctgaagataaacagccacaggatctatgaactctcatcaggcagttaattattcttgaatttttctgcactcttgaaacatattctatttatttaaccgtcccctgggagccctggtcgcctttgtccctgccacacggccagtggtgtaaaacctctgcatctgtcagatttctccatgtggagcgtaattgcctgatttccatttgaaagtacagccctgacattaaaatg

SEQ ID NO: 162427 - DNA, 281 bp, Homo sapiens
cactatggtcaccgagaaaaggtatggaaggagaggcaggcatggccctgcttgtgacggctctgttcagtagaccaatatttttgtctaacttttgttagataaaaaaagttatgtttgtttggagaaaaaaagaaaagtgatgggaaagctgtggactggcttttggaagctgggttttctccccagctcttgaactgtgtggaggcctcttcctgtgttccggcctgtggctcttctgggcaaacgcttgccctgaccttcatttagtagatatgagg

SEQ ID NO: 162428 - DNA, 376 bp, Homo sapiens
aatattgagaaaacacttcccagtaggtattaactaatccttagctgtagcagttagaaaagcacactcctaaaagattcatttcttacaggtacttctgctttttaaatttattccgaacacccaacagaaacaaaaacaaaataatgttgtttttagttccttaagctaacaaaggtttttctcaggttacattttattatgctgtttgtgatcacgggcataaaattacctttcaaaacaagaaaattcaagaacaatccagggaaaaatacaagtttaatgctatagtaaatttagaatccaatctatcgtctctagtgaaagagataccagtgtccttggcatgattacttgagaagctagcagaggttaa

SEQ ID NO: 162429 - DNA, 412 bp, Homo sapiens
ctaaatctctctaatttgtttcccagttcataaagtggaactaactttacttgctgctccttcttgtccaaataatttgaatatgaaagcactatatcagcataaaagctgacatttatgaggaactaatcccgtaccagcgacttttcaggtgacaccttctctaatcgttccttgaccccatcaggagcacacgatccctgtttcacaggcagactgcctccctgctcttagcatcctccagttacacatctctttccgccctgccttccccgaggtgctggctttcacttgtcagtgacggtcattctgaggctgagatgtaagagatacgaagtacctgtccttaccccacccctaatgcaagcaatgccatcctgttggcacgtgccacggttatctctggggccat

SEQ ID NO: 162430 - DNA, 502 bp, Homo sapiens
tcgcttatggggtctttgctcttttgggtctttgctcattcacttgtgagaggaatgttagttgctttagaaaatacatggtaattatttaaagtgtcctaaagaaatgtggtagctgtttcattctgttgaaaatgggccgagcgtcagttccattttctgtgcatggcagtgttcgggcggaggcaggtgcatcccggggaggagcacagttcatggtcctacgtctcctacgagagccgacaggaaatctgcaagagtaccttcagcccctcgcagatactgtcctggcccttctaaagcatccccttcccagggtccagcacggaagcactcctataactgtgcagtgagaccttcatctgggattggatatagttataattggagaggagattcagtctagatgagacgattaaacaacaagagaatgtagtttaatattgtcaaatacccatagttcataatgacctgagttggcagttaagactcctatgtaatg

SEQ ID NO: 162431 - DNA, 204 bp, Homo sapiens
ttgacgtggcttgatctcagctcaatgcagcctcaacctcccaggctggtctcaaacgatcccccgcctcagcctcccaaggtgttggaattacaggtgtgagccaccgcgcctggccaaataaggctatcttttaaaaacagtaagttcttggcatctggtgggtagaagccaggaacactgctaaataaccatacagtacac

SEQ ID NO: 162432 - DNA, 541 bp, Homo sapiens
aacagttcccctttctggcaattcataccaggaattgtctttttaaatattttgatctttttgtaatgttcattctattggagtgagataagatctgagtgtggttttgatctgcatttttctcatgagtagtaatgttaaccacgtttttgtagacattcggtcagtttcctgtcttctttggaaaaatatctaatccggttatttgcccagtttttgtctggcaattgttctgttgttttgttatttttttgccagctggtagtatgactggcttgtaccttttcaaaaataatcccttatcccaaacttgtaatttttagtgtgcctttttattttgtttattgtttcctttgttggtcacaaatgcttcagcttgacgtggtcccacatgtgcataatttcttggtggctgtgctgttggttactaatcaagaaaaaacaaaatcactaccaaagcagtcccttgtcaataatttttttcccttgtatttttgtttactttttgtgaaccctgagcatacatccaagttgctctaaa

SEQ ID NO: 162433 - DNA, 242 bp, Homo sapiens
tgctgggattataggcgtgagccaccgcgcccagccgactatccaaattttgatcttcaaaactgtcctcattccctcctctctctttccatccttcagatacgatagaaccttctatgtgtttaaatggcagccttccatcatcacatcagtgactccttagcttgttacatattctttcatgaggccatattttgtgtacctgactttgtgtatatcattgacaatggaccctggaaaag

SEQ ID NO: 162434 - DNA, 506 bp, Homo sapiens
ctattttttttcctatgactttagaattagattcttagaggattggttatattaagttcatcaaaatcaaaggaagcagggtcattttccaaagcactcaattgtatacgtatttagttctgcttttttttttcttgtcatttatatcatttaggaaatctgctatctttctgtatagaaaaagcagacatttcattttagtgataaaaattaccaaagagcaatctgacagcaaacttcacaaattcaggctcatgcagaaatagacactagacttcctttgtctcaccatgaaacactaaagatctttcacattttagatttctttgactattccctgaaacattttcattataaatattcataattaagcaaactaagtctttcatctgttttccttattttcctaccccaatctgactaatcagatactggaatgtgtgaaagtcaatgctgttcataaaggtaataaattacccccactcaaatccagatggattagagcc

SEQ ID NO: 162435 - DNA, 488 bp, Homo sapiens
tggatatgtaaccataaataatacttacaattatactttgcttttcatgtgccacacagagtttctatgaacaaggattaaattttcttgctaagactgagaaatcaactagctagagtctagaagggagatgtgcaacccaaggatggatttagattaatgattcttcgatggcctcttactattctcggggtgcagcacaagttccttcataggactttaagactctttgggatctagtccctgcgtatctctccagttctccttaccattctcctgtatctgcctctggctgcagctgtgccacagccagactctggaaggagcctcttgctgtcaattatccagcaagtgtttactgggtacccacttctgccaggcactgggttagaggttggagacatagcagtaaagacttgctctagtggaagacaagcatttaatactataattaactgcagtactgaagatgaacaagggtgatggag

SEQ ID NO: 162436 - DNA, 516 bp, Homo sapiens
tgccctggtttctagaggatccctctctgctcccagattctaggacactacgggtgtgggaccgacacgcactgggcgcagagggctgggttcggccactctgctgtgaccgtgctgtgaccttcagttactctcctccctgggctcagtttccccttcttgaaaatgcgggtcacgctgatggcccttccagccctgcgatcctcagcctctcccagcttggtttccccgacctcaggtgatccgcccaccttggactccccaaggagctaataatggcttggattctacctttaaaaggcattttttgtcaataatttctttttgaatgtcatttattagataaccacatagtttaatactctgcacaaatgtgttttttaagtatgattttgttatgatgagttttcattatgatcatagacttacagcctcaccatttactgtctgttctccagtatcttagaggaatttagagtttacatatagattcatagcatttttttgatctgagag

SEQ ID NO: 162437 - DNA, 254 bp, Homo sapiens
ttttttttctgccggcaatactatttgagatgagaaattttcattgcaatttacttgagggagagggtagtttatttttagttcatctagcactgaatgtgtagtaggtcttttgtgtatagctctgttgggatcttctactagatgtcttacctggggtgggggccatgtgctatgctcttgatccctggatttgtgaagacttgaagccaaagctgaagttctaactagtttgggaaatattcataagagga

SEQ ID NO: 162438 - DNA, 230 bp, Homo sapiens
aactaatacacaacttatgaaattattttttaaagcattctcccaatgtaataattatttcaaggaccctgaaacaatcaggtaaaaggttactgacaaacaagatcccatacggtttcaaagtttcatcctacaaattacttaatacaaagagaaagtcattcctttagaatctggcattcaatacctctaagcaagtgatcaaacttttcttttttttttttttttct

SEQ ID NO: 162439 - DNA, 639 bp, Homo sapiens
cagttttttttttcctaccccagtggtgcctggaaccccagcaagacagaattgttcactcctccgaaaagggggctgaagccagggagctacatggtctcactcagcaggtcccactcccaaagagcccagcaagctaagaaccactggcttgaaattctcactgtcggcagagcagtctgaagtccacctgggatgattgagcatggtgggggaggggtgtctgccattactgagacttgagtaggtggctttgccatgaccttgctaaggactgggtggaactaaacacagtgaggcaaagcgactgtggccagactgcctcattagattcctcttgactgggcaggacatctctgaaagaaaggcagcaacctcagtcaggggcttataaataacactctcatctcactggtacagagcacctgggggaaggggtggctgtgggtgcagcttcagcggacttaaatgttcctgcctgccagctctgaaaagagcagcagatcctgacaaggggagttctccaaccacagtgctcaagctctgctaagggacagactgcattctcaagtgggtccctgaccaccgtacctcctgactgggagaaacctcccaatgggttgacagacacctcataca

SEQ ID NO: 162440 - DNA, 339 bp, Homo sapiens
agaggacagggtacaataatagcccagactgcagggcaggagtcccatactctgaacctcagctccagggttctcttccagcctcttcacagagtcccagactgagcccactgtaggatctcaagaaacacttcttgacatgattccaaaatccattccacaaattccactcttgtctttcctctgcctgtccagcatctatcttgtttatctgtatcctatcttatcccctctccttccatactttctctctttgatcatcttggatccagctggtcatataagcagagataagtttgttcatttatttattcattcttttatctattcattttacaa

SEQ ID NO: 162441 - DNA, 581 bp, Homo sapiens
gttcttaattggaaaaccttgccaactcccaacctcaggggatccgcccacctcgagcggccaaagtgctgggattacaggcgtgagccaccacccccagccaggacttgtttttataatcaaatttatgatgatcccagggacttagctgacagcagagtaaaaaggaaatagaatctaatgggcaacactgactaggctgtggctctatggttagacatgaacatcacaaattgatgtcttatctggaactcatctacatgctgaagtgatacattataaaacagttgcagaatccaggcttgctgggactagtcagtgaaatcaattaccggagcacattatttcagatgcttattccttcacagaggatgtactttttgcataagaatgtgacaatactcacaatttctggaggtatagcctcagccaaggtaaaaattatcttctctcttataaaagggggctctatgtatctaggggtcttactacttacagacaaatgcattctacacttggagcttctagccggcttcatatttgcctgagccttaactgtcccttctccttgaaaatttaaa

SEQ ID NO: 162442 - DNA, 333 bp, Homo sapiens
ctctgtgtcacattttggtaatgtgaccaacgtttcagactattatatctgttatgattcgtgatcagtgattttgggtgtcattatcatagttttggggaaccacaaaccatgtccatctaagaaggtgaattcagtctataaatgtttgtgttctgactgctccagctactgactatttcccatctcttttcctctcctcagacctctctattccttgagacacaactgtcttaaaattaggccggttaataaccctataatagcctttaaagtgttcagatgaaaggaagggtctcgcgtctctcacaccaagtcagaagctaaaaatgg

SEQ ID NO: 162443 - DNA, 218 bp, Homo sapiens
gaattaagttgctggagacaattaaaaactggtaaatttaagatgtgctgtcaatgacatattcacattggaaccctctggaagattaagggcttttttcttccacttagttagacaataataacaagacctttggtctctgattatccaatctaagaataagtcaatctttggttatactagagtaatcaaagaacacaacacgttgatttggaaga

SEQ ID NO: 162444 - DNA, 212 bp, Homo sapiens
cccccatcccaggtgtctctgaggatcccagacctggcaggttcgcctgggaggagaccccccagccacgccttcccttggctgtgtagtcagcctggggtcctgccgccccaagtgtgcccacgtggctggcttgcacatgagcagagagaacatggtgtccccgggggccgtgcaggtctcagtctcgcgggtgcacctaaccctgatgc

SEQ ID NO: 162445 - DNA, 1071 bp, Homo sapiens
ctgatcttgaactcctgatctcaagtgatctgcctgccttggcctcctgacgtgctgggattaacaggtgttacgccactgtgcctggcccctttggttagaacaagtatatttgggagaagtgagacatgcccttccaatgaaatatcaagactggacatgttgaccttagaacctatatgggctttaatagatagaacataggcaaagctttcaaaagtatagttgagacaaggacttagattcaagtaaaaattcaatcattagaacattagctttacttggattatcaaaatgaactgatttacatagatgagtaagcatcacctcaagagtagtgaagtcagagtgcttgttttggaaattttacattaaagtgtatatgtcatcaaattttgaacagtttaatgcataatagtattttccccagcctgaacattcttagagactggattaagacaatgatatttcagtgaaaaccatctgttttatgaattacttcataaaagtaatttttattttgggctattttgtgacagtgaaaagtattacagggaaggtaacaaaggctaaatgagctttttggtggtggattagaaccagaggaatcaatataaactcgtagtgtttgatacttagtacagaaatgtaggtgtatgtatttgcatgagtttgtatgtgtccatgtatttcctacctctgtttgctaggaaggtagttaaaagaaaacttgcctcactctgtcccttttggacagaagttaccatttttgttcttactgattaataattaaatggtatttagagatgaagactgtgtcctaccactggcagaggaatcacaagcccttaggagacattgcatcccttccgactttgtttaggcattagaatttggtgggcctaagcaagttaaatgcagattgagtacttggagttggtagaccatgtggggattagaagggatttagtggtaactctgtcaaatctttacctctacaatagaatgaatcactcaaaactcacaggagtgtcagttttgagtcgccatttgaacggttgtttgattagt

SEQ ID NO: 162446 - DNA, 402 bp, Homo sapiens
  misc_feature (14)..(14): n is a, c, g, or t
  misc_feature (18)..(18): n is a, c, g, or t
  misc_feature (21)..(21): n is a, c, g, or t
aggatcccccggangcanacngcaacaccggcctgttctttcccatctctgtaaatgacatttccatcctttcagctggggaagcaaaaactcttggagtcatccttgatcctatatataatcagaaaatccttttgaatcttccttagaaattatttagaaattaaccatttttatctccacagctactatccttttatgagccactcatctcacctgtggattattgcaataacataatattgttattggattatagcctcttaatattcctaacttcatccttactaggcttcagtctgttctccatacagagcctgggtggagaacatcatcttgtaaaatacaaatagatcatgtcagcaccctgctcagaatccttcctgtcgcagtgtgcttccg

SEQ ID NO: 162447 - DNA, 773 bp, Homo sapiens
ggaggatcgcttgaggccaggagtttgagaccagcctgagcaatatagcaagaccccatctcctcaaaaattttaaaaagctaggtgtggggacatgcctatagtcctagctactcgggaggctgaagagggaggattgcttgagcccaggagattgaggctgcagtaagctatgatgataccactgtactccaagtccaaagggagggcccagaacaaatctgtcttcaaccccattgccaattgtcagttatatcagaacatgcccgtggtccctgatctttttcaggaaattaaaaagctggtccttatagcaaacaggaactcagagctcttggcgaggcagtatgatgtcttagtgtatgggcagcatgcctgttttcttgctgattttgcaagtgctccagaaatgtagactggtttttttctttcttattttagtatttcatatcctgatttttaaatgttgggccaaaaaaatgacacatctggctggacatggtggctcatgcctgtaatcccagaactttgggaggctaaggcgggcagatcacttgaggtcaagagttcaagaccagcttggccaacatggtgaaacctcgtctctactaaaaatacaaaaattagcttggcatggcagtgcacgcctgtaattccagctactcgggaggctgaagcaggagaatcacttgaaccctgaaggcagaagttgtggtgagccgagattgtgctactgcactccagcctgggcgacagagcaagactctgtctcc

SEQ ID NO: 162448 - DNA, 275 bp, Homo sapiens
tttcactatcttggccaggctgctctcaaactcctgacctccggtgatctgcccgcatcggcctcccagagtcccgggattacaggcttgagccactgcacccagcgtcaatgtatgctcttgtagagaggtcctttgtatctgaaatttattttaaataactcacaactatttatttcttatattgttttaggaatacgataaatttttggtcacttcaatttgaattgaaaaataaagtctcagttttggggacttgattttgacataaggta

SEQ ID NO: 162449 - DNA, 139 bp, Homo sapiens
atatactgtaagtgaccactttctctgaaagtcctagcgcctccctgggtgttattttcttatgaccaccgtcactataatgctagactaatgttatgatgatcacggtttccaaagcaatcccccacaactccaagaa

SEQ ID NO: 162450 - DNA, 263 bp, Homo sapiens
gcaagaagcagctatatgccaaaagtattaagaaggatcatctcttcagaataagtgagaagtatatcactggtaattttttagatttttgctgaatgttttagtaaaatttgggaaggtagtttttttttgagttggcaattatatgctgtccctcttgttttctcttccaaaataatcattcttctctctctctctctctctaaaatgggagccacagagccactgtcagaattgtatacatataaacctgagaacattgc

SEQ ID NO: 162451 - DNA, 888 bp, Homo sapiens
tagtaataactactggtatggaattttatatcatacaaggatccatgtcataaatttaagaaaagactcattatatttaaatgagtcgacttaccgtctttatcatgcccactttggcactgccagggacaatgaaacccatgtgactgggtctgtgcccggtgaaaactgggcaaatacaactaggttgacagcgtgctataataactggagaaactaagatacacaataagtgatctcttttcaatttaacatccatggtcctccaatcaatatttgatctaccttttaattagatctctagcatttcctctctcttaggtggcgaccttaccctgttctataggtcgtgatctctgtgcctgttattatatgttcccctaacctgaaatgacgacttctccaccaatccacattcactaagtcaaacccaccttctcttgtaaagaaaccttatctgacccattgctgctcacctgacttgcgggtctctttatgctctttctacatggatatcaaaatgatttcatctgtagagcttcctctgataatagctctatgttcagagggattctgaggctatggtgagggtcaccgaaaaaaggtacttgccccatatataggaggtgaagaggtatttgccctctctatcttggcactttttttttttttgagacggagtttcgctcttgttgcccaggctggagtgcaatggcacgatctcggctcactgcagcctctgcctcctgggttcaagcgattctcctgcctcagcctcagtagtagctggaattagaggcatgcgccaccacacctggctgattttgtatttttagtagatagggtttctccatgttggtcaagctgatcttgaactcccaacctcaa

SEQ ID NO: 162452 - DNA, 665 bp, Homo sapiens
agaaatgaaggggcaattgagacatactcagacgaagggaaactcagagaatttgtcactggcagacctaccctaaagaaatggctacagaaagttatcaaaatggaagagaaatgataaaaagaagaaatactggaacactgggaataaggaaaattgaaaagagcaaaaatacgcagactcaaattattgaaccttcaaaggatggagggaaagttcccttcacccctatgcccttctcctcttgagagatatcatgtttgatggtggaagaaaaaattacaacactgtctgatgtggttctcaatgttctcaaagaggagatataaagaagaataagtagaaatcgttgaactgaaaaatgtaataatgaaattaaaaactcaatggataggctcgacagcaggatggagaagtcaggtcagtgaacctgcagactgaaaaacaggaattacccaatctgaacaaccgaaagaaactagactgaaaaaataaaaaatatttaagacaattatattataaatgaggagggtaaagggatgtagagagagataataatttttacattggacttgaattagtaaaatgttgacacaaataggctgttaaagattatggatgtacagtgtaatacctaaaacgacactaaaaatctaaacagacac

SEQ ID NO: 162453 - DNA, 379 bp, Homo sapiens
agcaatttcaaagaaaaatattacatcttttgaatattccacaccctataaaatcttgtagtgataacagcattcacttaggtacaatgctctaggttaaaaaaaaatcaagcatgctttactatccaaatctgttcactacctgagttcaaagagtaagaaatagagtagcaagtttattaagcggtatcatgttatccaaatctatttggttcacaacttcagttggtaagtaaatgacagatttgacagcaatagatttatttaaaaatttatctgaaactaatggctcccaagttcaggtgataaaagttcaggtgaatatttattttatttctcaagtggatcaattataattttaagtctgggtaaaaaacat

SEQ ID NO: 162454 - DNA, 380 bp, Homo sapiens
cccagcacttcattatccatgacctcagttatcttcacagctcagcatgttagcaagcaggtagcaatatcccccttcacagttgtctgagggacccaggcttacgaggattaagccacatgccgggtccatatggctcctatggacagggctggccaggagctgtgaaccagagtgtttatgagcctctgtatctttatatatttatctcttcattgcatctcttttcccccaaattaacatttcctttgtagatgacctgaagtgtaaaacaagcctaaagccaacaactattttaaatattggcagaaaagacacatgccctcaagaactgcccccagaactctaataacacaaggcctgtgaaagaaacctggggc

SEQ ID NO: 162455 - DNA, 296 bp, Homo sapiens
ccgagatggcgccactgcactccagtctgggcaacagaacgagaccatctcaaaaaaaaagttctacttttattcttttgtttgtggctctccagtttttctagcaccatgtattgacaagactataatttctgaattgtatattcatgatccccttgccaaaattcgttgaccttgtatgcatggatttgtttctgggctctctattctgttcattggtttttgtatgtgtgtttatgcacatgccatactcttttgcttactacaacctttacataaagtttaaaattaagaag

SEQ ID NO: 162456 - DNA, 359 bp, Homo sapiens
aaatattacagtatgatttgtacaagttcagaaactgaaaaccaatatgatttgccattgaattaggtaagggcttagtattttaaggtaataaataatgtgatacttgatttgaaatgagaaactgggttttgatctgtcacaattcgtgggtaacctggataaggtttgtttcatgagagtattaatgtgttcttatacctgaatttctttgaacttctgaaatggataatttcgaaagtagcatgtcatttagtttatagagaaatctaggccagccagcttttcaaatgaagaaattcctctaggattattaaggaaaagtagctgctgtcattgtaacaaaggatgtattttca

SEQ ID NO: 162457 - DNA, 408 bp, Homo sapiens
gctgcccctcgtttgtgttgagtttacactatctgctgactcagcggggaaatatttgcctgagttactttctggcccttttgcctgaaagttttccagattctctgggcagaaagctctacttttaaaagacattttgaggctgggaacagcggctcacacctgtaatcccagcactttgggtggccaaggcaggtggatcatgaggtgtcaggtgtttaagaccagcctggccaagatggtgaaaccctgtctctactaaaaatacaaaaattagccaggtgtggtggcaggcacctgtaatcccagctacttgggaggccgaggcagagaactgcttaaaacctgggaggcggaggttgcagtgagccgacatagcgccactgcactccagcctgggcgacagag

SEQ ID NO: 162458 - DNA, 120 bp, Homo sapiens
agatcagtgaggagggaattccaaaaagggaccagagctgggagagtgggaatatgtatgatacatatggaaaatgatgagtcaaaagcagtttagggcaaagagttcattttgcagagc

SEQ ID NO: 162459 - DNA, 105 bp, Homo sapiens
aaccagggaggaattgatacataggaagtgaagagttacatcaggggatgacttctcttctgcctatctatgcctgtctttaaaacctcagtttctatcccacta

SEQ ID NO: 162460 - DNA, 417 bp, Homo sapiens
tgtagatcctaaccagaacaactgcatagtttcacctcaagatgggctaaggcggggtgtggatagctcacgcctgtaatcccagctgctcgggaggctgaggcagaagaatgtttcaacccaggaggtggaggtggcagtgagcgaagatcatgccacactgtactctggcctaggtgacagagcaagactgtctcaagcgtaagctgaatatgggggtggggtgggggtgggcacagcacaagtggacatgcctttcaggcccaggatggcgcatgcaaaggcccagaggcagaaacatgtttggtatgttgaagagcagaacaaagacaagcatggcaggagggcaggagctaaagcagtggtgtggaaggaggccaagaggcaaggattgtttgtggccagggttgggtgttt

SEQ ID NO: 162461 - DNA, 210 bp, Homo sapiens
ctgtgctctagttccttgtgagtggttcatttcaccaattacagatagcagagctctgctgaccccaagccagcccgggttcaccttggctgcaaggaatgatgacggccttgtccagacctggctagaaagatgcagcccggcctgtttgctatggatctaaactgcctgctggttcctttccaaggcaggccaggaaacagtggtgaa

SEQ ID NO: 162462 - DNA, 321 bp, Homo sapiens
gagctcggtacccgactacatacttccgatggatgaatatttagtaataaatatatttaaggaagaatattaaccaaccaaaaattaatttaaattgaaaatgcttcccagttataatcagtaacaaggaagcagatgattcccccacaaaaatacagaactgtaggcaataaacagatctttgtggaagaaaaagagtaagctatttaagggaaaaaataggtgctcccatacttaattattagttataaactcgctgttgaaataccaagagtatttaaagaaacaagaggccgggcaaacctgcggaagtatgtagtc

SEQ ID NO: 162463 - DNA, 578 bp, Homo sapiens
caccatcatgtggccattatggattcagcatgtgattctgatcagcagtttcgggtactcactggtagcttcatgctggtcccctaaggcatgccctctgatggttgcttttaaggttttctttcatttctccttttacagaggacattcaaatgcactttaaaaccaggaggcaccaaacaattgaatatgactaaccactcccacatttaactatttcagcacagtcatagaagtgatgaccaaggcagtcctatccctgatgatgctatggtccagcagggagacaaagaatagaccccaacaaactggcatttcctgtactggaaaagcacattctttgggggtaattagagatttaggcaattcctgggttttatgtgtttttgacctaaaatcaagcattttaaaggtccacaggagaggccttcactctgcagtggctaatggtgatttactttctttcttcacctccaatgcctaatccccaccccactttatgttttcctagcacttgtcaccatcgggcctaccagcgaggcagagcaatgtggtggttaaagcaaaaacttcagagc

SEQ ID NO: 162464 - DNA, 290 bp, Homo sapiens
tttcaagcaaattcacaaaagagggctatctttattaaatatcagtgtgtatgaggaggtttctaggacaagtgaagataatttacacagaagacaaataatagagggaaagagccagagcacatgcttcaagaggagaatacagtatttcctatcgggaaaataaagaggaacaacttaactggaacgagaagatttctactagaagataaaggaaaatgatggggggaaaaggggatgtaggattatactggcccacaggccactagtttacagcctctgactagatg

SEQ ID NO: 162465 - DNA, 843 bp, Homo sapiens
gtttctactgatcttcatttcactagtctttatctttcccatgttaaatctgttactcttatccagaattataccttttatccttaaaaattcagtttttttcttttttttgagacggagtctcattctgtcacccaggctgaagtgcagtggcatgatcttggctcgctgcaacctccgcttcccaggttcaagcgattatcctgcctcagcctcccaagtagctgtgattacaggcatgcatcaccatgtctggctagtttttgtatttttagtagagacagagcttcaccatgtttgccaggctggtctcaaacccctgacttcaggtgatccacctgcctcagcctcctagagtgctgggattacaggaatgagcgaccacacctggtttgtttcttaaaaaacatcttatatttctctgcttaacgtgctcaatgttgaacatgtgaaatataataacttttcataatctcttctgattctgtctctatatcatctttgggtctgtttttatgtattctatttttcttgtcattatgggtcagatttcccagttctttgcaatcctaataaattctgtttagatgaaagacattgtgaatttcactttgggttgtggatatttttgtattcatgttggtatttttgagatttgttctggagtgcagatgagttagctggaaactaattcttttgaggcttgctttttagctttgttaggtggggcgtatcctttctgtgtttatttttgtaagggtatacagatatacatgttttcttatttccctctttatttattcttatttaatctgtaacaacctttttccttatattcgtaac

SEQ ID NO: 162466 - DNA, 228 bp, Homo sapiens
ttattagtgttggacaaaaaggaattttaaaaattagtaccatttttagaggtcttaattatgaaaaactgtgactgtgaggttccaaactgtgtcacataaagaaatattagcctaaggaagagagtactagagggggcatgatacctttgcttagatgttagcaaatgccctagtctgtgctctcactattagagcttcttgtaagtgtatagaatgttagagtta

SEQ ID NO: 162467 - DNA, 345 bp, Homo sapiens
tctggactgatggaatcatggatggacccctcaccaggccaccgagactcaactgtgccacgtcagtgtcacgggggaggctgaacttcgccatccagccctgaacacaggatctcagtgttgtctcaaatcagcccttttgcaggcatgcacagggtgtctaagagtctggtgttaagttgaaaaggtctaatgtagtgttttaaagagaaaaggattctccagccccatagtggtgagaagtgacacagagtcacattacataaaatgacgaggcctgaggtgattgtgacagtgagggtgactcattaatcccaacactgggatcctctgagctctccctag

SEQ ID NO: 162468 - DNA, 586 bp, Homo sapiens
tcttttttattatactttaagttgtagggtacatgtgcacaatgtgaagatttgttacatatgtatacatgtgccatgctggtgtgctacacccattaactcatcatttacattaggtatatctcctaatgctatccctccccactccctccaccgcacaacaggccctggtgtgtgatgttccccaccctgtgtccaagtgttttcattgttcaattcccacctatgagtgagaacatgcggtgtttggttttctgtccttgcgatagtttgctcagaatgatggtttccagcttcatccatgtccctacaaaggacatgaactcatccttttttatggctgcataatccataaatggatttcttaatccagtctattattgatggacatttgggttggttccaagtctttgctattgtgaatagtgccgcaataaacatacgtgcctgcctgcacagtttctaagaaccaaaaggttgacctggtggaagatagaggttgcaggccctccacacccctgctactcatacctccatgcttcaacttttccatctataaattggggttgttataaggattctgggt

SEQ ID NO: 162469 - DNA, 528 bp, Homo sapiens
cctggagttagtgtcagactcacaagtaaagggttcaatccttcacaagattattctcacttcagatgccagttctaaatggtgtctcctgggccacccatgcttctgataaactggctactaatccaggaggtcaccatgatgccattcggggatcaatagaacaactcacaaaactcaggaaagcactatacctatggttagttttattataaaagatacacccagggcaaagtctgggagggaccacagagcttccatgccctctccatggagtaggcctatcactcacctggtatatcaatgtgtttactgaccaggagcctccactgggctttggtttttattggggtttcattagataggcatgattaattaaatcatgggccatgtgactgaactcaatctccagtccccctcccttccctggaggtcaggcaagtcaaaaatcgcaattctctaatcatgtgaccagccaccatccggaagctatctagggtctcaccatgagtcacctcattagcgtaa

SEQ ID NO: 162470 - DNA, 292 bp, Homo sapiens
ccaatggcataaacacacaggaggatgggggaagacaataaaattggctctgatcattaagagtttgaagtcggaatgtcctctgagaagtatgggtctaggcttctgtagcgtgtggagcccaatgtatatttggaattcatccacagaagactgatgtttgaaatcatagaggaattgagatagcaaagaaaacaagtgcaatctagaaaatggtagacgacacaggcttgggtagatgacacaggcttgggaaagccttacattgaagggaatttcctaggcacacttc

SEQ ID NO: 162471 - DNA, 551 bp, Homo sapiens
catacttgcattccttttgctatagaagctttttgagaaaataagtatacacatttataaatgcagagaagatgggtgtctcccctaaagctgtcagccaacttgacagatttttaataaacattcttgagtatcaatgagagcacaccatgtcctcatgctgtcaaaatgtttccattaatttcaaattctccctaactctccacacctcctaaaaaaggaacattctcttccctaattttccaacttgtattttccaaagcaaaaataatgaactattccagccttttctggtatgatttccttcctgttaggcaaaaaaattaaacaaagcatgttaattctctacttcttttatttatcttttttcaccacatgggaccacacgctgtttttttggaaacccaggacagtatgtcccctgtcaggtcatttaaaagccctcaattaactcccccacactgatggaggaggaaagactcaggaactgaggtttcttcccttttctactccaaggttaattaccaactaacctgcacaacttaaaaaaa

SEQ ID NO: 162472 - DNA, 911 bp, Homo sapiens
cgggtgtggtggcacgtgcctataatcccacctactcaggaggctgaggcaggagaatcccttgaacccaggaggcggaggttgcgtgagccgagatgggggcattgcactccagcctgggcaacaagagcaaaactctgtctcagaaaaaaaaaaaaaaattaagaaaaaaattattacaggtatatctatgaatgagttcgatgaaattgtttcgttccctacccgtacccttgcacataattatttcctttgtagctgaatactgcctattgattgctagaatgacacaggatttcagcatcaattccattctgtttttttcctctagatataaatgctgagggacttgattcccataaattgataggaatggatggaattttgtaatgacaatgtcattagattatacttcagaattatataccagaaattacatagtgatattaccaaaaaatcattttgaatcctctgtcttacgacaatttgtgattaggttactctttaattctggtgaaaggaaagagttagaaaccatgtggctcataaaagggtctattgctcagttattagcgttcaccttcgccattccactttgccacctgaagctttcacatcatgggccaccttattaggatcctgggagggtgaaactcatgcctttatcttgggagaagggagtttatccctgggagaagggagtttgagaagggaaagtggggaaggaaaattaaagaggttttaggaaagagcacatatgggagttgaagacacggaagtcagttctcctgtatgcacatatttgtgtccgtgtgctccttggagagtcttggggttaacccagggaaatgcataccaggctttaaaacaactcttccaatctgcttagttttttaatatttaaaaaccaa

SEQ ID NO: 162473 - DNA, 522 bp, Homo sapiens
atgttaaaatggaactcataactcagctcctttagtggtacttccaatagaatcaactgctgacccttggttagagacaccacttatcaccatttcatttctcttttacttatgatacagttaataggacattttctttagctattaaactctattagtgctcatattttaaaagaaacattccatcaatgccttttttttttttgagatggagtctcactctgtcacccaggctggagtgcagtggcacgatctccgctcactgcaagctccacctcccaggtgcacaccatcctcctgcctcagcctcccgagttgctgggactacaggcacccgccaccatgcccggctaattttttgtgtttttagtagagatggggtttcaccatgttagccaggatggtcttgatctcctgacctcaagtgagccaccgcgtccggccctggttggtgcttggacggaacatatttaatggtatgtggtctgaatgggtaaggaagtcatttaaggctggtggttt

SEQ ID NO: 162474 - DNA, 347 bp, Homo sapiens
cggaattctctaacgagcgcgtttctcttcaccccctgggcccgcgtggacccccgtccacccccacacgccctggggggggggccgggcccacacgccctggaagcccctagaggtgactctccctgggacccctgtaccagggaggaaggataccgccacccgtcaccaccccccgccagaagctccttcgtgactcctctgcgcgtgccttcccacacctcctccgtccgggactgcgaggagtgggcggtcgactcgagttcgcagcccaggcctcccacacgcccctccctgccgtcagcacccacccgcgcggcagcggcggcggcggctggcgggcggcc

SEQ ID NO: 162475 - DNA, 933 bp, Homo sapiens
  misc_feature (897)..(897): n is a, c, g, or t
ctacctccacgggcgcgccctggcaggaggggcgcagtctgcttgcagcggtcgccagcgctccagcggcggctgtcggctttccaattccgccagctcggctgaggctgggctagcctgggtgccagtggctgctagcggcaggcgtcccctgagcaacaggagcccagagaaaaagaagcagccctgagagagcgccggggaaggagaggcccgcgccctctcctggagccagattctgcaggtgcactgggtggggatgatcggcgggctaggttgcaagcctcttatgtgaggagctgaagaggaattaaaatatacaggatgaaaagatggcaatgttgcctcccccaggacctcagagctttgtccatttcacaaaacagtctcttgccctcattgaacaacgcattgctgaaagaaaatcaaaggaacccaaagaagaaaagaaagatgatgatgaagaagccccaaagccaagcagtgacttggaagctggcaaacaactgcccttcatctatggggacattcctcccggcatggtgtcagagcccctggaggacttggacccctactatgcagacaaaaagactttcatagtattgaacaaagggaaaacaatcttccgtttcaatgccacacctgctttatatatgctttctcctttcagtcctctaagaagaatatctattaagattttagtacactccttattcagcatgctcatcatgtgcactattctgacaaactgcatatttatgaccatgaataacccgccggactggaccaaaaatgtcgagtacacttttactggaatatatacttttgaatcacttgtaaaaatccttgcaagaggcttctgtgtaggagaattcacttttcttcgtgacccgtggnactggctggattttgtcgtcattgtttttgcgtatt

SEQ ID NO: 162476 - DNA, 563 bp, Homo sapiens
ctcccgaaatgccgggattacaggtatgagccactgcgcctggcttaaatattctttcatgatgtctcttacgtcacagtcactaatggaacaagaaatacatagagaacacatagatggagagggaaatacccagaactggaagagagttgagaagagggatgtggggtcggtcacgtgtgggaaagaaggatgagggcaggttcagcatgtgcaagagttttaatggatatagaaaggccactgttttctgtttgccttattcctgatttatagagcctggggaagcctctcttttttccaagattcattcactcacttcaacaccaaaagcgtattgttgagtgtctgctgtgttagagggcgaaatgatcctgtacttttgagcttatgatctggtaagaaaggtgagatagaggaatcaaggcatgtataaacactccattcaaatggttgtccaagtccctgctttttaggggtcttagctcttggaaactcctgtgtcccataccttgcagaagcatttctactcttttcctttgcagaagttcatcatatgctac

SEQ ID NO: 162477 - DNA, 287 bp, Homo sapiens
gcacttagggtgataatgatgtgtcagtgtaggttcatcaattgtaaccactccggtgagggatgttgataatggggtgactgattttgatttgctgtgtgtgtgtgtgtgtgtgtgtgtgtgtgtgtgtgtgagagagagagagacagggtctcactctgtcacccaggctagcatgcagtagcacaattacagctcaccacagcttcaacctcccatcgcagcctcctgagtagctgggacaacaaacgcgcaccaccatgcctagctaatttttgtgttttctg

SEQ ID NO: 162478 - DNA, 203 bp, Homo sapiens
acatgtaaaacaaatattgtcacagaaacaatagtcttatttcttgttgaaaattatgacggaattctcacgaaatagaaggatgatagcttatctgtattttgtacttttttagtggggcatgaaagagctggtgtaaatggatcatagctttaaaatagaactgagggtatgaataatatttaaggaaacttgaagtcagt

SEQ ID NO: 162479 - DNA, 1149 bp, Homo sapiens
ctgctcttaattctaatatttggtcattaaaaataacgtcttatgaccatttccacacaaaacttttggtgtgcatttatacttatctttgagtgaaaacacaggattataaactacatgtttaaccacagcagataatgccaaacagcattctgatgtggttgtggcaatttacatacccaccccagcgtatgtccctatagacatatctctccaatactcgtattgtctgtctttttcattttagtcatttcggtgaatgcctactagtagctcattgtgattttagctttgatttccctgatgaataacaaagaaaaaacattttcctatgtttactgctcatttggatttccccttgtatgacgtgcttgtattcatgataaaaactcttggctgggcacagtgtctcacatctgtaattccaatgctttgggaggcctagctgggaagatcacttgaggccatgagtttgagactaaccaggacaacatattgagaccctgactctacaaaaataaagaaaaaaattagctgagcatggtggtatgcacctgtagtcccagctacttgggaggctgaggcaagacgacctcttgagcccaggagatcaagtctgcagtgagctatgattgcgccactgcactccaccctgggctgcagagcgagactctgtcttaaaaacaaaaaacaaacaaacaagcaaaactctcggaaaacattattgccttgttcttagtctcagaggaaaagcactcagtctttttcattcaataagatattagctgtattttgtagatgtcctttatcagaaaatcattttctactccaaaaaaaaaaaagaaaaaaaaaaaaaaaaactgtgtgtgggggggcctggggccctggaaaaggtttttgaaacccattggggtgggggggggggggcccaggtgggttctcggaaccctggggccaaaacggtggtcccataagagaaaaccgggggcaaagagacaaagcggcgggagtttcctccccatattataaaaaagcgcgcggggggacaccccagaggttttcgggaccaaactcccagaggggggcccgagagggccaagacgggggcctcataccaagggagccccaggggaggccggaattcaagtg

SEQ ID NO: 162480 - DNA, 729 bp, Homo sapiens
gcattttcacggattacctcaaccactttttttcattcctccagaatttccaaagtgctctgactagagtggagagtttgcattgaggagaaatagtaataaaatagtttggggtggtttgcgggaagaagtagagatttaacatgggggtggtcagaaactgacatgagttaaatttaaaattttggacgttttcctatggatgagtagaaaaccactgaaaacggtttaggatgagttatcctagaaaaggaaaattctgactaaaagagaaaacacaaggtagcagggtttttggcaattgtgagtaattcattaaagatggaactttgaatttgagggtgaagaaatgagactggaagagaaggcaggatgcagattataaaggaagctaaagtgtttcagctttttccattgagcagtgcgaaatcattgacagatttgatatgataaataattggacaattttgcatatttgaaaatgaatttggctcccacttccctaccttgctcccctgttaaaatagaaacggggattgatttatgtcccattcctgaatgcatgtaaaatttatacaaaaatactttctatgaaaatgatttgtaatctgtagacttaatacctgggagatgtcttgagatataaaatcgcatcctttgggctgtgggttttttgttttctccaaataaatctgatcttttcttaaaaaaaaaggaaggaaggaagat

SEQ ID NO: 162481 - DNA, 310 bp, Homo sapiens
cgttctgcaccggcgccttctgctccaggcgcacttctgcacccaggcgcacttctgccccagcaaggaaagagatcacagccaacttggaagccccagcaaagagagagatcacagacgatctagaagccccagcaaggagagacagtgcagacaatctagaagctccagcaaagagagagatcacagacgatctagaagccccagcaaggagagacagcgcagagttcaataacaagtagaaaagacaggtgaggatggatccctgacaggtgaaggagatagaaagaagcagaagtgcgcctgggtg

SEQ ID NO: 162482 - DNA, 469 bp, Homo sapiens
tcccaacaaggcgagagatcgcagccgatctagaagtccctacaaggcgagagatcgcagccgatctagaagtcccaacaaggcgagagattgcagccgatctagaagtccctacaaggcgagagatcgcagccgatctagaagtcccaacaaggcaagagatcatagccgatctagaagtcccaacaaggcgagagatcgcagccgatctagaagccccagcaaggaaagagatcacagccaacttggaagccccagcaaagagagagatcacagacgatctagaagccccagcaaggagagacagtgcagacaatctagaagctccagcaaagagagagatcacagacgatctagaagccccagcaaggagagacagcgcagagttcaataacaagtagaaaagacaggtgaggatggatccctgacaggtgaaggagatagaaagaagcagaagtgcgcctgggtg

SEQ ID NO: 162483 - DNA, 677 bp, Homo sapiens
catgaacaggacaaactcagtgtgccttgggtaaggagggtggcgacactgattttaactgtcaaattgatctagagttgtcagatgggataatttaaccctcaaatgaaggtgatttatcctatgtattgtaatcaaatagtcatctaagtcactccccatgagctctggtaaatcacttttagtacatattgaaagtgaccgtattgtattttattgcagaattgcgtcttatagtaataactaatgcatgccattggcttttgctctagcaccgaattacactcacttggaggcacatggatccaggtgggcactgttgcttccatttgcttgtccacagtcagaactgagaggcaggtaggaaaactgtactgctgcagtctttgtagattagctcaattcagagacacctgtggtcttgtgaaatgccaaactttactccagtggcatttgggtcaatgtgaactaggatgggcctagcaattctattaggtgaatgacaagtgctttgtaatgaaacagaaggactttatttaaacagatataaggactggacagaaatcaggcttaaattgtaccttatctgggctcctgctgtaaccttgtaactggtcttaccacttgtggtctcaagactattttgtcctgcagcccccagagcatctcctgtgaaa

SEQ ID NO: 162484 - DNA, 440 bp, Homo sapiens
acccccaacacacacaccagtgcagcccaacaatgtacttctctctgcagaaccccagcttggagaaggcagatccacagggaaactagggtgactttatttcccccaagaatcatgttttggagggactatggagttaatccagggaagtattttcaaacctcttaaaatagaaccaacatgatttgtaaatccacactgatttaagctcatcttattatctgaaaagctttgctgcatcccacatctctgatgagctctcttttatgctgcaccttgcagtctgcccaggctaatcaacccaggaagccatgatgctatctctggcacatgaactttcagcctaagaggtttatcctacctggattactttccttctgccataattttatcagcaaaaaattatcttaaaactccatccaaagtttcatctaataagc

SEQ ID NO: 162485 - DNA, 723 bp, Homo sapiens
atgcaaagttgtatgtataccatgatcccaatttcttttaaaaagtatacagatgaaaaagttaccaataatttattgttgtcagacattgttacagtacttggtgtgtgttaattaatgctcatatcaattttgtgaggtaggtactattgttatctattttacgtatgaggaaagtgaggtatggaaaagtaacttgcccaaggttacatagtaagtgttggaatcactgacaagaaggaaatgtaccaaaatgttattagtgatcatctggatcatcattatgagtcagtttaattccttacatctataatagagaatgtatttctgctgtttatgtaattggaaataacagtttaaaaagaaattatagcatttttgaaatttaggaaaacagtaatatgagaaaacttgtaggttgaattttaaagaatagctgctccttcctgtatctaaagtagaaattgtgcttgactaagagggaaaaaaaggcacaaatccactattttctattaatacactctccctaaatgataacctctcagtatcatgttaacaattttctgttttttttgataaggaaagtaagatattctttagttcatggttcagcacaataaaagcacaactcaggaaactgtcaaaccaggttttgtttggatacttaaatgctttacgtcacagcaaaacatctccagggaatgtgcgctttcctctctgtaa

SEQ ID NO: 162486 - DNA, 469 bp, Homo sapiens
tttctattgtgttagtgtgtatgcatacagggtcacaatagttgtacaaagtattttcttcctaggaatctgtcaatggaaagccaagggcttgctgttagtaacactgtgaggtattcccttcctgtgtattttctgtttattatcacctaatgtctgctgccactgcatatccatagccaaagaagatcacatatagcatctgtccagtatgaatactgtggctgatcacagtagctatggtaccagaatttgatccaattatcaaatccaacaattcctaccatgtcagccactaatcagagcttccaatcagaacaagaaagcttgttttcccaaactgagataacagaattctaaccaaaagcaaattattgatgcattaactagctagcaattcatataggacttttaaaaataataaaaaggtttttttgattttttttttttttttgagacggagtctcgc

SEQ ID NO: 162487 - DNA, 722 bp, Homo sapiens
acatatgtggaggaattggagagtttacaagatagtgaagaactgccaggccatggtctggagaagatggaaacttgatgtttggggccattgtgtccctggggtgttggccaatttatgaaagaagcagttaagagcctgagtggcacttttgaggggctagaagggaagaccctggtaaacatcccaaactttggattgggacccaaaaaagctccatcccaggagtacaggtgacctggaaacggatcagcgtaatcgaggactgaagtccagttctagctacgcccagtccttgagactggattaaggtgatctcagattgcaaggacctcaaatgcctggcagaagcaagtgaatatccttctggaggaacagagcctcatcctaggcctctaattatttttaaggacaatttttcaaatgcaggctttcctccctttgcacagttcccttatgcataaatttcagtcagtggccagctgcagtggctcatgcatgtaatcccagcgctttgggaggccaaggcgggtgaattgcttgagtctgggagttggagaccggcctgggcaacatagaaccccatctctatttttaaaaataaaatattaattatcactgcttagttaaattatagtggtctcccaacaatacagatcagatcccagctcccatggtatatacactgtgagtgctgtataaagtacaagctctgccgccag

SEQ ID NO: 162488 - DNA, 501 bp, Homo sapiens
ctccaccccatgacaggaaagttggccccaggcgggggcaaaggggcagtccaggaagtacagggattcatgctgccttccaaggggaagtgagggagccgcctgcctcttccctggaggggctgggggaagccgatctgaggcctggccatgcgaagccccatctgcccttcatctaggcttctggaaggtagggcgtccttcctccacgtggaggacgggatttaggaaaaggggctgtctcctctcagctcgggctgtgcatcaggtactaggagcactcaaagagagcccccaaactcaggtttctccatttctctcccgtcccccggggcgggcacggagggactccgccgccgccggcagtatgcggggtccaggccgccccatgcctgctctaccaggaggggaggccaggatccgccgggcagacggctccgcggttcaggtttccacccttgttatttaaagcctgagcctggctcctggcaggcgggcagg

SEQ ID NO: 162489 - DNA, 170 bp, Homo sapiens
attttggatgtgttgtgtttgagatgcctttgagatatgtaaatggcagtcaatgaggcagtcaatgagtcagccctctgtattcagaggttctgcatttgtggattcaaccaacagcagatttaaaatattcaggaaaaacaaatagatggttgtatctgtaactaaca

SEQ ID NO: 162490 - DNA, 625 bp, Homo sapiens
atgttttctgtaaaatcatattgggaattgttttggtgctatacttataaaaagccctggttcatttgctagaacatcatgcttccttattttttctacttcagtagtttatagtttatcttggtatattatcactacttcaactaaggttatttttatctttgtttagtgtatacagatctgacctgatacttattctaacactagctttttaaaataacactagtttttacttatgtctatcaaaacttctgcttttttatttacctatacttcatatacagaatggcttctagttttacttctcttaaattgtcttattaatttcaaatagaggcaagcattggccttctttattatgtctttgagtgtagctatgcctgggaatttacatgttaaaatacaatttcattatgttattttcatttctttctcttttctattatagtgagagttatttttattttttaaaaattatgtctctaggtagttatatattttctattttattaaggctagtaaatggggtattaaaaataattgcttaaagaggtcacggccggctagaaaaaaattttaaaaatacatatggagcataaagagctgaatagcaaggaatcttagc

SEQ ID NO: 162491 - DNA, 450 bp, Homo sapiens
ggggactcaggaagtgacggtgtcagaggatgacattcccagcccccaccacctccacccgaccaaatgctgccaggagacaggatctcagacacatcgattcctttaaggaatatttattaaatacttgctgtatgccagatctccaacagtgaacaaaacagatttggtccacactgctgcagagcttatattctgagacagacaccagacttcgtgcagaaagatccccctcttcctagttgcccagcccatatgtcctagaaggaaccgtgagatgggcagccagagacataagttctagtcctagcattgcccctgactctccatgtcaccttggaccgagttttccacctgagaaatccaagcatgtggcccctcacacattttctcaggtctcttccctactcccagtctctgggtctagtggttcatgatttcccggcatga

SEQ ID NO: 162492 - DNA, 577 bp, Homo sapiens
ctcttctcttgtctgccaccatgtgagatgtgtctttcaccttctgccatgattgtgaggcctccccagccacatggaactgtaagtccatcaaacctttttcttttgtgaactgcccagtctcagatatgtctttatgagcagggtgaaaacagactaattacagactctatcccatcctggtccccagccatccagtacctctctccaaaggctactgctgagaacctaaaacactgaaaatctgaaacatttgttaacaactgtttacaagaaaatccacaccactgatctatcacttcagattatgaactgttaaaattacattttcaagagctttttaagaacagcattacatcctttactaaccatccagtcttggacatacctgcactgttattcaagtattcacatcaggaaatgatctgacatgataaactgtaagaatagctatccccaacagctggtatcatgaatgaaaagagactttttgattaattgggactagttacttcaaaaattgcccccaaccaataatctcaattcagtgtttctcactgagggcattgccggcttt

SEQ ID NO: 162493 - DNA, 393 bp, Homo sapiens
agcacttttctgttttttctttcccacaaaccctctttgatacacagtttgtcccaggctacccctcaagtgcctgaatccagacctactggaattcagatatccatgagtccaagacgatggcccttgacttggctgtggaaggtcattgaaggcccggttagttcttcctggggagcacccccctgcaggtgtccgtacaccccaagcatgaaagaagctctttatactgacagcagctagaaataagaggcttaattcctccaccagaaagtaggggaataaattttgctcttctcccctttcttaaagcttttaattattttattttttgagacacggtttcattcttttcactcaggctggagtgcagtggcacattcatagcttact

SEQ ID NO: 162494 - DNA, 478 bp, Homo sapiens
ttttttttttgagaaggagtctctctctctgtcacccaggctggagtgctgtggcgccatcttcactcactgtaacctctgcctcctgagttcaagcaattctcctgcctcagccttccaagtagctgggattataggcgcctgccaccaggcccagctgatttttctatttttagtagagacggggtttcgccaggctgttctcgaactcctgaactcaagtgatccacctgcctcggcttcccaaagtgctgggattacaggtgtgagccaccacacccagctggtctggtccactttcttggccggatcattcatgacctttctcttgccaggttcctggatgcctatgctgagcacaagttacagttctgggcagtgacagctgaaaatgagccttctgctgggctgttgagtggataccccttccagtgcctgggcttcacccctgaacatcagcgagacttcattgcccgtg

SEQ ID NO: 162495 - DNA, 355 bp, Homo sapiens
gggcccagcaatcaagatctatagctatagggaagtattgagttgattatgagttatataggtcaaaatgagtagcttgcttgattgaagcaggtaattcgtgccatacttttctctttgggaagacctgtaccaacaataacctctgctaaacactttcgcttttttaaatttgcaggtacttttttggggctgtctttggctgcctgtctgttgagagtttgttttctttacagtccatctgatttacagtccctccgggttgatttgtctcatttgggaatgagaaattttattttaatgcattaagtaatagtgttgagtggccaacaaatgtgaagtttgaaaagctcaa

SEQ ID NO: 162496 - DNA, 133 bp, Homo sapiens
aaccaagcctcatggagacttggaatatcattgaggacacaacagcagctgattttgtcattcctcagaaataaacatccagtgtttccttgtccggtgggtctttgttggacaaggacttagctttcttcaa

SEQ ID NO: 162497 - DNA, 350 bp, Homo sapiens
ctgtatttctctttagataaaaatcaaagtaaaactaatactgatagctttttaaaagatctacagtcataataattttgaattcattcacacagctttcttgaatcttaaaaaatattttctttaacttcatggcagaacttaggagtctcaccaaacacacaaacactggcaacttgcttcactagttaacacctcatttgtatttatggagccattccaggtgatcactgtagcactctcatattcctaattaacaaaatccttctaattacaacttaaaatttggtggcctcaagttctcactttattatctcagtagttttaaacatgaaaatgctgcatagctt

SEQ ID NO: 162498 - DNA, 281 bp, Homo sapiens
agaatgagccggacctcataggtcgcaggtgattgtattgctcagccaagtttttgaatcactggtctagactgtgaaggtacagaataaggagggtgagatactgttcactgtcaggacaccaaattgtttccttacagaaacatagctatagagagatggcaaagcctaatgtgtgtggaattgtgtgtgcatgcatgcacattcatacacagctgatatgagtaaatcatacagttttgttgcattttctcacctcttgctatcctgcgaacctatga

SEQ ID NO: 162499 - DNA, 265 bp, Homo sapiens
gaacccaggtccgtgccgcctgatggccaagcgctggcagctagcctaacaaacgtacagtgctgtagggctgtggctctgcgagacttcccaaagggctgtgcagttcacagtgccaccaacagagggccccctgcgccacacccaccactcaacaggtgcaccttcactagggagctttcggtgatacagggactggcctctctcacagactaccagcaagatgaccatttttcaggtttactttctacttgagttccattca

SEQ ID NO: 162500 - DNA, 293 bp, Homo sapiens
aatccaatagagctgaatgtcaaggaaaactttttttttctcctaaatttaataaataagtcaattatatatttagtcttcccaggagtaggagcgaatagtgaaatatttgttgctaagaaggtttaaaattaggtgtagggtaggaataaacatttcctgggttggattagactaaaaaaacctacgatttttccctgtcatgtccatttacataattctgatactaccctagatgttgccagagtacgtgagtgttatttactattacagatgcataggttttttttatg

SEQ ID NO: 162501 - DNA, 250 bp, Homo sapiens
taagaggcagcctggcttccaacccccaaatctctcctccaaccctagtctggtggagcacgttcctgcgccaacacttattccagaagtagatgaaggtcaccttgccctaaaaaatactgacatcaaaatgggaggtttaaaacaaaacaaaacaaaacaaaaggcctatgaatagttgcttatcaaatatcaaaagcatgaacacaaatctgaagacatattaatttaaggatttaaaggatattga

SEQ ID NO: 162502 - DNA, 342 bp, Homo sapiens
tggcgttatactctacggcattactttggcagataattttcatctcatgaaacctgtcataaaattcaaactccagattaaatggtagccaaagtaaatgccgtagagtatagacgcaaaactttactttatttatttatttttttgagacggagttgcactccatcctgggtgacagagcaagactccatctcagaaaaaaaagaaaagaaaagaaaagaaaaaagaaaaataagaccattataagcagaccaccttgtatagaaaaaaattcaaacatttgttaagtggcatcctataagtggtgtcgccatttggcaagataaatttcatctcatgaaa

SEQ ID NO: 162503 - DNA, 597 bp, Homo sapiens
accaagacaaataatgctaaattcttaattacagttcttgcctccagagaaataaagaaaataattagctgatgacaagaataacactctctgtaaagttactgagcacagtaacaaataaataaacaaataaaacacccttcttaggaataattatcataaaatttgctagtcagaaacaatacatgaaggatacactgtagtttgcatcttcttttccctaagaatttttagagtcatttagaattttagaatgtagtcaagaaagacaaagaatttgttgcaatgcacttgtccatctcaaattgtcctcctcacattgactccccagcaatgtttaggagaataaagccacaataggatggagtggagaaatctctttccccttttttatgagctgccctcacagtaggatgttatatttttgcatgcatatgttcattgttcacaatagcactattcacaatagcaaagacatggaatcagcccaaatgcccatcaatgatagactgaataaagaaaatatggtaaatatacaccatggaatactatgcagccataaaagggaatgagatcatgtcctttgcagggacatgg

SEQ ID NO: 162504 - DNA, 139 bp, Homo sapiens
gagctgttggggaagggtgtgggcaaatgctggctttgacgctcggggtctaggaacagagagaaatggacattgagaggacctcgttcaacgggtgaggtccatggtagaagcatgacaggggcactgaggattggag

SEQ ID NO: 162505 - DNA, 439 bp, Homo sapiens
taacaagtaactacttactgtgtcttctaaaagccactgtgctagtggctaggtaggttataaaaacccaccagatattgcagatagtaccacaatataatttgctttaatctctatgaccttcagaatctattacatcctagtcttccctaggagactggggtttcttggaattattttaaaaaagtgatccaaaactggatctgattttgccatggggattgcttaactaattggtttattagcttgagtctcatgcatcatggtggatattactggttgtcaagttgtggttggtgaatcgtagacttttagaactctcagagaaattcagagttgacccacattacattttacagatgagaaaatgtgaaacaaatgactaaatggtttcactagagccagacagttactgtcagaattgaagcttaaactacag

SEQ ID NO: 162506 - DNA, 478 bp, Homo sapiens
ccaaccaagaagatcagtattcctaatgctgtattttatattttagagacaacactctgcttatctaaggagaaaataataaacgtatttacagcacaattttattttaggagtagctgtttttctgaaattagtcatcttttgtgctggctttatgaaggccagactgcggttgtagttaataatcgggaataaaaataacgcttcttctccactgacctgaggagtattcacacgaagccaattttttacactcattcctctcttcgataaagttacacagcataatgagaaagaagaatgacaaaggacagagctatacctatcttaaaaacatttggtagaaagtactacatttgctgttctgtcatgagtaaggtatgatggcactgtatgcaaactagtatcaactcttattttcaacgtgtttaacatgtagtacctcattgtgacttcacaaaaactataggagatagaa

SEQ ID NO: 162507 - DNA, 521 bp, Homo sapiens
taaaaaacttatttattatgtttggtgaggttgtagggcaacaggcactcacatacattattggtggccacataaactggcaaagtctccatgaaggaccactttgcaacgtccattaatattacaaatgcatttaccattgtcctactattccgcatctaggaatttatcctgtacctctatttgcatatgtacaaaatggttcatgtttgaggatattcactgtagctttgtttgtatttgcaaagcctgaaaacaaattaaaaatttattaggggattaaataacgtctggtgtatcattaaaatggaatatcatacagttgttaaaaagaacaaggaaatggtgtacgaaattgctatggaattatctctaaagatgtggcgtgaattgaaaaaatcaagatgcagacagtgtgtacaaacagatatatttgaatatgtatgtttgaattcatcatgctaacatatttatagaatggatttccggaaggctgcataataaatttagggttgatgtgg

SEQ ID NO: 162508 - DNA, 449 bp, Homo sapiens
gatggctattatcaaaaagacaagtgatacaagagttgctgagggtatggagaaaaagaagtccttgtatgctgttggttggaatataaagtggtacagccataatggaggttccttaaaaaactgaaaatacaactaccataagatccaacaatctcacttctgggtatgtattagtccattttcatgctgctgataaagacatacctgagactgggcaatttacaaaagaaagaggtttaatgggcttacagttccatgtggctggggatgccccacaatcatggtggaagataaaaagcacatctcacatggcggcagacaaaagaacagagcatgtgctgagaaactcccctttttaaaaccatcagatcttgtgagacttattcactatcacaagaacagtatgggagaaactgcccccgtgattcaataatctccgaccaggt

SEQ ID NO: 162509 - DNA, 578 bp, Homo sapiens
agtacgatgctcaatgacggagacaaatgaacgccgtatagcaaagtggatattatggaagagaggcgcggagctcgctacggattaggtttacaacggcggagctggggtataaaacatgaaaagatggtggggaaaactgaacggcatgatcaccattatttaggtccgtaaccattgtttcattctccagctcaatcgtgtatgaccagcaactgtcaatggagggtcacttaagaaaaatgcaaggttctgacgattatccaactcacacttaccaaagtgattgatgggggtttctgaaaccactacaagtagcagtacctgctcgtggatgccaacaacagcctgcctggcattgtcatgtgcatacatgtgccatttggatacgacatgccagtagcaagaaaaaataggtaaaaatcatacctctctgagcaatcaacattagcaagtaggaggtcactggagtggagtagaatgtgggtcactcgagggaaggtggccggctgcatccacagtcatttacccatccaataaacatttcctaatacctgttaggagccagaaactgagac

SEQ ID NO: 162510 - DNA, 260 bp, Homo sapiens
tcaagctggaattactttaaataaattcttggcttcatgttttttggagcagacagatagtatgaatttgagctgcaaatccatgtaagggctagcttacagttagaaattctcaggagagagttttctctctttctacctactgagacagtcaaattccccttctatagagttgaattttttcttttcttgttcacttttacaagaaagggcagccttttgcagttcccaaatttatgcacgggatctcctatcagacc

SEQ ID NO: 162511 - DNA, 221 bp, Homo sapiens
cagctatcagagcttcagtaaagtggatattagaatccatatcccattatgaagttaggagcactaactgagataatacatgtagagtgcctggcacttaataggtaatccaggaaatttactttccttgcccctaatctaaaacagtggctacagccagcccacatctggagacatgggtccataactgggctactggggctacaggaaaacccccaagc

SEQ ID NO: 162512 - DNA, 442 bp, Homo sapiens
aggctttctgctttggggacccaaacagttccatctatggtggaggtgtaggctcattcctacatcaacgtcaacaagccattgaacacaacaacatttaggagtagtcgagcccaccttctccaatgtggcctgcacagcccaggctgcagggtgggagaggttgattctggagaaaagtcattcctgctcccctggtacactctcctcccccactgcttcatacagagaccaatgtgatgatgccatcatgatgttgaagcacacactgaaccctgtaatcaattaaagggttttcccatccacccatccacacacacatccacccatccactcacccatccatccatccatcacttatccatgcatccatccacccacccagccatgcattcatccagccatcccacaatccacccacccacccacacatccaaacatc

SEQ ID NO: 162513 - DNA, 781 bp, Homo sapiens
acacgctcttcttaggtgatctgggagctcctccctgccttccttatttattatctccaactatgatttttccccgacttgtatatctaacttcttgacaacttcatttgacttgttaatagacttatcaaacttaatatgttcaaaagagaactttcgatattcctttctaaactgttttcccgtagggagttaaccttggttcctccctctcctacacacttcacatccaattccccagcaagtcctgcaagcactacctcccaaatatatgctgaatggaattctctccatttccactgtgactgagggccttttcttttttcttaagacggagtctcactccgttgcccaggctggagtgaagtggcgcgatcttggctcactgcaacctccacctcccgggttcaagcgattctcctgagtagcagagattacaggcgcgtgccactacgcccagctgatttttgtatttttagtagagatggggtttcaccatgttggccaggatgatctcgatctcctgacctcgtgatccgcccgcctaggcctcccaaagtactgggtttataggcgtgagccaccgcgcccggccggccctttcaacactatcttcacctctcctttgtcttacagtgcaacagtctcctaacaggtctaactacttccacccttctctatccagcaggcagagcggatttttaaaaatgtaaatcaggtcaggtcacttcccttcttaaaacccttaaggtacacattagccaaacccctgccttgggct

SEQ ID NO: 162514 - DNA, 618 bp, Homo sapiens
agttacacatatgtcttacggattatatatgtcacatcagttatagacaattctggagatgataatctattaaagtagttcaaagagagtcccacaggaacctcttttgaaatcactgatttcaacttactaaagatatgggtgtacaacataagtggaaacattttctactattcatatgcagatgaatttcattctagctcagaaacatttggaaaactgacatcacacgtgacttcaagctattaaatgttagtgatagcaccttagaaaaacacaatggctttcaacatgtgacagtttgtgtctcaagtcaaaaatggacagtgatgtgtaagaaaatcaaattacataataacaattcctattactcttgtggaataggctgtttcttcccaccaagtcagtgatgtttctgagatcataatgttcactgtaaatttaaagggatttctttttccatagcactcagcaagaaacgtgtgctaaagactgaggttccttggaaacatgctgaaaattctgttctcaagggtgtcagaaccatacgtactgcaaataatttatgaagtcctagttcattgcaataagcagatgcgtagacaatctgctcagaca

SEQ ID NO: 162515 - DNA, 333 bp, Homo sapiens
ccttttcaatgtacatcaggattttttattcagaataattcattttaatcagaataattttaatcagaataattcatttattcataattctttattctccagaaaaaagcgggtatttaatttcaaagctaagatttaatttccgaaaatagttttctagttccaatgctaaaatctagtttctaaaagagtaaagaaagtaataaaaattagcaacttttcttttgaagacttttagataaataataggaattaaatttaggttcagacccagcatggttgctcatacctgtaaccctagcactttggaaggacaaggtgggaggatcacct

SEQ ID NO: 162516 - DNA, 626 bp, Homo sapiens
tatcatcatcatcaccaccaccaccacaactgccaccattataatattaccactgggattacaacattgtcaccattccaacattgccaccattacctccactcaggtatcaccaggatcaccaccacctccatcacatctccatcaccatcaccaaccctcctaccatgtgtgctaggtattgcgttagccactgtggctataaaggcaaaaataaaaggcaaaacatttactagttatgacccatactctatgctaattgctttatgtatgcttaatccttataacaatgctctaagaagtgtatttttatcagatagctagatgacagccaaaccctggttccaacccatatctgtctgattataacattcttgttcttaatcactatactttactcacataatttagtgagagacgaaagtgtttatataactattataatataatgtgataaatgaaaaaaaaaggcactatggaaggacataggagggccacctggccagactgggagaagaggaagtggttaaggaaatcttctaggaggaggtaccatgagatgaatcatagaaaatgaaatgaagttagccaaggcttcatagctagcaaatggcagagcaaagact

SEQ ID NO: 162517 - DNA, 429 bp, Homo sapiens
tgccctctgggactcaagaacttctaccctaggtccaatgtccagatggtagagagctttggggtacagacttctatgctggagaggtttccaagagatggctgtttacggtaggatgttgatggaattcatgaaaataggcttacgcagtcagaagcataaaatagattttatttagcagttcatcagcttgatgtataacttttctatatgtagacgtatggtatgtatacatccagttgtaccattgtcctgagccttgccaatgtcgggttctcagccacactggcataccaggtcatcttaatttggagaggcaaacctgcagccttctcttggcctgggagtgtgaagcacacgtgcttatctccaggccaaagccctgatgcccccagatgtgttgattcattgttgaggaagcaggaggag

SEQ ID NO: 162518 - DNA, 245 bp, Homo sapiens
taggttggagaattttcatgagggaaagaatcaagcttttatagctctgttagatatggatgcccaagtaaactcttctactgaactcctggaaggagaaagcatccgaaattaggtaacagggtttggccaggtttacagcaggagaaagaaagaagccaatatgaccttgtgaacaaaactttttaggccaattctgcgtactgatgctgctaccttcacatctgaatatcactgggaactga

SEQ ID NO: 162519 - DNA, 335 bp, Homo sapiens
aatgcttaaaatatcaatttaaatgcaaatgaatcttatcattccaaattagactcatcccattgtgttgaaattaatatagaaaataacaccgaacaccaaattacaagtaattaatattgacactgtgaaaagtatacactctcattttgatatttggggaagaaagtcttgtctgtgcgtgtgccattgtgtcctataagcaacaactagaacacaataccctcagtgctagtaatcatgcaggattaacacagcaaaaatctgagagggaggacaaatggcaatgatacatcttagaatccagtaatctattctttgggtctgaggaaaag

SEQ ID NO: 162520 - DNA, 454 bp, Homo sapiens
tgcccacgactcacgaggatccctctctgctcccagatttctaacagaacgcgactgcagtggtagaatcttggctcactgcaaactccgccagaagcaattctcctgcctcagcctcctgagtagctgggattacaggcatctgccaccacgcctggctaatttttgtgtttttattagagatggggtttcatcatgttggccagtctggtcttgaactcctgatctcaggtgattcacttgcctcaaccccccaaagtgctggaattacaggtgtgagccatcacgcctggctgtttttcattttgtaaaagatggttaaaaattcatgacggggctcctgaaataaggcatcaagcagtaagctctaagcatagatgtttgagaaacagcagcagtcaggcgtgcattcatgatgggggaagcacctctgagcaaaggtacgggtggtcag

SEQ ID NO: 162521 - DNA, 318 bp, Homo sapiens
ctcagtgtccagggagcatgtttgaaactgtactgtgcatctcaaaggcctttggcagtaaactcatgttcctacgagtatgacggtgaatgataatcaacaggtcacagccatgtgacctggagagcagtgattaaagagtacgtttgtattagagataggggacccgttgtctgagcagctctcctcagccccgctctggccctctctcttcctctgagggaatggaactaactgtacatagaaaatatctgcccagaagatgaaaaaaattttatacgtagataaaacttataaatttcattgattaatctcctg

SEQ ID NO: 162522 - DNA, 350 bp, Homo sapiens
caaaagtgaagctttgtggtaagaaactattcagtttttttatttgatatgcactttcatgtgtcttggtgcatagtgctgatgggaaaagaatgaaatatatgatgaaatactgtgcttgaagagcagcaagcattgaacccagtcatagctcgtgaacttgtgaatggacctgtttctttttaagtatgtgaaaatttctgggaaatattctgatgaattttacataggtcatctcttactattgaacttaaaatatttccctttttctcccaagaagaacattttcagttttacttcttttgtcctgtgctgccttcagtgaatgaagaaaattactgctttattca

SEQ ID NO: 162523 - DNA, 196 bp, Homo sapiens
gtgaggaaaacagagaggaaaatggaagcctttggagaaggtgatagattgaaaaatgaggatataacataaaaggaacccgatgctttggcccttgccattgattggacatcagggtataatccgctggcagtgttgctgtcaatgtggtatctctgctcgggacctgtggtgacccagctcccatgatttggct

SEQ ID NO: 162524 - DNA, 327 bp, Homo sapiens
tttcatcaatccttaatgttgctgtcccggaactagtttgcagctatcctacccttaatggctcaactccaccatcctctttcaccttctaaaggaagctgtcctttcccaaagttcaaaaacaaaggagagaaacagaaaaacaggtacaaattccagagtaagcttaagacagtattacattcaagtttactccttgcttgactttatgattagggtttaaagacatactatcctctattcaagcgcttcagttaaatgcaagatagggaaataggataagagaaccctcacctcttaggttagtttcgaaggaccttcttcagg

SEQ ID NO: 162525 - DNA, 419 bp, Homo sapiens
actttgatatttctgatgttctgggatattataggaatgataccacttgaattcagctttctaagaagtctggtatttcaatagtcttaatatgagtaagaaaattatgatcttggtactggatctaaggcagaggtatcgaagctgttttaatgttgcttgagataggacagaacttcagagtaaaataaatgtgtatagacaatctgttcaatctgttcaaattaagttgttgagctgtatatttgaatcttaagactactaattttgttgtatctgtcttttcccaaatatatgtgtacttcttttaataagccaaaacctatgcaacttttactaattcttccctaactacttcttttggaaaatgattaaatcttatgtctcacgttttgacatatctattgcatttaaaagat

SEQ ID NO: 162526 - DNA, 271 bp, Homo sapiens
ctgggtttggtggtttgttttttttttgtctttttcctccttgttttctctttgaggactaacttggcagacgcagccaggtgtgaacagcgcttatgtggctgccgcggtgcttcctggaagaatcattataaattcgttcaagatctgatttcttgttggtttctgtgcttgtgagcatttagaataaaagtctgtatcagttaatcctttgattatgtaaatcattttattttgttttcctctcattttcaaactgaggtttgaaaac

SEQ ID NO: 162527 - DNA, 1061 bp, Homo sapiens
ccccgtaactcgatcagacatctgatcatattcttttccagtgaaatttcttttttagacttaagatagctaaagttggtttctattgcttgcagtcaaagaatcctacgtgatctgagtttacactccttagcctctttatgcccctttccttcctattttgagaaggggcagttgcaaagagactcccccattttcaaatgctggcatattaccttgacctcttctcaccaagaccatatccatatgtcccatcccccagttctttcctacccagcttgttttcctgtaaagctgatccaaataattccagattcaagattggcttcgacttcaatgcttcttctgcttctacctcacttcttgctttcttatcatagcatctgcaacagacttcatgtgatcttctcttgatctcccatttccatgctccgtctccctcctagaccctttctgatcgggctgcaggtcagttcctccactggaatcaccctcttgatccacatctctcctaacttgtggtcagagggcagcccctgggaaccaattctctctaacaagcataaagaaatctttctgattccctttgaaagtcatcaagaaaattacttatgggggacaagagcaaaccctttatggctggtttcctttgggggaagggcagaacagttcttgactttcagaatatatgtctaaggacttaacatgttcaaggaactttagagatacaaagatacttgaaagattcttcttttccttgccaggtggtggaagagagatgtgaagagaactaccatttactgcctaccgtggcggggcctttacatgacagtgtggagctactgccacttattacctgtgtattatactatgtgtctggcactatgctaagcaccttatacgcattctcctacttactcttacaactgccctgggcttgggtattattgccatttccattttgcagatgagaaaaataggctgagaaaagttaaatgaacttccttaagacatccaactaggatggagagtatgactcataaccagagtttgcttgagca

SEQ ID NO: 162528 - DNA, 380 bp, Homo sapiens
gtgagaaggagtcactgtgatgcttagctgtcctaaatgatggtttgctcaatgccaggactgggtttctggtgatgaatgaatattccagattttgaggagctctaagtggtccaggagtccaagtaagcagtctggctggaataaggcagcatcacggaaattctgtaaggactgacacagagagctcatgctgactgtgatgagaaattgcagcacctctatctcgcaggtaatggagtagtttgttattggtagtctactccaggccaggcagtgtgttatgggctgaggatgcagaaacaggcaggacacagtgctgtcctagcagtgcactggcgggtctctccatgcaggccacaacacagggtcagtgttca

SEQ ID NO: 162529 - DNA, 594 bp, Homo sapiens
gtgaaatgtgcatgtgagagatctaggttgtgagctccttatgagaatctaactaatgcctgatgatctcaggtggaacagtttcatcctgaaaccatcctccatctggaaaaactgtcttccacgaaacaagtccctggtgccaaaaaccagtcactgtgcattaggatgtatgggtgacacagtacttagtatctagaagtagggctgactcagcagaacctgaaatatgttccactggctgagtaatcaagtggtagatggcaagaaaacatgccttacaagctttcagctcttcaaaagaaggcctttctcagtcagtggcctgagatctaagttgaatgaaagtggtaataggggtagagggggttacaggtctcataggtggtaaagcccaaacacaggaaataagatggctgctcctagcctttcccaagaagaatcccgtgataagagttacaggttagctggacatggtggctcctgcctcagcctcctgagttgctaagagcacaggtgtgtaccaccatgtttgactcatttttgtcttttttgtggggaccgggttttgccctgttgctcctactggtctcc

SEQ ID NO: 162530 - DNA, 225 bp, Homo sapiens
tgccccctccctggagcacttagggatggatgggggaaactttcactataacaaaaggcgagtaaactctttctgaaaattagtttaaggcccctagtggtttaatctttactgccgcgtaaattaactcaaatattaagccagcaataaaccggcgctccagtatcaaccatccttttctctgttaatacgaactaggaactcaggttgctgttttctttcccc

SEQ ID NO: 162531 - DNA, 351 bp, Homo sapiens
ctagaatatccccagcccacagcatgggacctggccccttattcactgaatagatggatccttttctttatcctgcggcttctctgcagttcagtctcccagtctctgtctcccagtctttgtcacgtgtacaaaacctggctcttctgtttccctggctgtctctggtgtctctgcctccatgtctccatgtttctggaattttccgtgactattttctcctcttggggtgtgtgtgttttacgctctgcctctcgaagtctctattacattctgtaagtcaggccgggcacagtggctcgcggctgtaatcccagcactttgggaggcaagacgggcagatcacctgag

SEQ ID NO: 162532 - DNA, 540 bp, Homo sapiens
tgcccaggcgtgttggcagagggactttcaggcttcagaagaccaaacctctgtcaataccaggattattatccacaccgttagtttcttaatgtgaaggatatcttaaaattgatgtataacacattacagacagcgagaaaatatttccaaattatatctgataaaggacttgtatctagaatatatataaaagactcataactcaatggtaagaaaacaacccaatttttaaaatgggcaacacatctgaatagacatttcaccagtgaagatataggattggctaataaacacatgaaaagatgttcagtcggctgggtgcggtggctcacacctggaatcccagcactttgggaggccaaggtgggaggatcgcttgagaccagcctaggcaacatagtgagaccccatctctacaaaaaataaaaaattagctgagtgtggtggtggtgcatgcctgtgcaccatgtcccagctacttgggaggctgaggtgagaggactgcttaaactcggaaggttaaggctacagtgagct

SEQ ID NO: 162533 - DNA, 275 bp, Homo sapiens
ttagtaccctgtgcatagtgggtaggtaattataatttgtgaatataaaataatcctatactaagcttcacatatgaggaggacaatgctgattatcactgcacacattgtgagcggggcttgtaacagctgaagaacatgcacttgttcagttccctttttgagtaattattttagtcgcaaaagacaagaatgaattctttggccttagagtgtcatggggctaattggcctagtatgcatttaattcatggtcggtcttcattaatgtgggg

SEQ ID NO: 162534 - DNA, 326 bp, Homo sapiens
gtaccctaaagggtcttattacttaccctttaaatgcgataatgtgaaactttattgccattgagtgtatgggtaccaaaccagtactgtgtaaggagggggcagggggcatcaagaaaatactgactcatggaaaagggcctcataagactgctgtgagagaaaaggattttaacagttagcttcatttttctatatgtgagaaacagactgaacttaagttccacaatttcctcaggaaaggctgacctgaaggggtggttatgctgcaatataagtacttaacctgttgcatcatcaaaagtgtacctcctgtgttagagtat

SEQ ID NO: 162535 - DNA, 827 bp, Homo sapiens
gaagagtttttcaaaagtggaattactgcaaaaagtggaaaaatagcctttggatggaagttactgatgagacaatttccatcggtgtgaaagccatctttccaacagagatctgcaacatgagaatgtactgtctcctagggtggcaatagcctcttgtattagtctgctcaggctaccagatttatcgtttaaactgcccataaacagaccaggcagtttaaacaacagaaatgtatttcctcgcagtcctggaggcagaaagtctgcgatcaaggtggaagcagggttggcttcttctcaggtgtctgtccttggctggtaaatgaccgccgcctccctgggtcctcacatggtctttcctctgtgtgtgtctgtcccaatctcttcttataaggatgcaagtcttatggatcagagcacaccccaatgaccgtgtttaacttgaatcacctctttaaagtttctctctccaaatacaatcaccttctgaggcactgttagggcttcgacacaggaattcttttcctaggggattcagttcagtccaaaacgcctaccagtggagacttgcaacatggcggcctgctggtccctcgccaggaatatcacaggcgactgttccctgttgcatggaatagaaggctattccagagtactgtctctatttatgagatctgggatactgggagaagggcaaaataaagtccaagtagaaaaaaaacctatgaaagttttagagagtaaccataatttcagcccgatgtgaaacgatcctagatttcagctgaaatagtgatgtgggaagtgagggggccgggattcaa

SEQ ID NO: 162536 - DNA, 363 bp, Homo sapiens
tttaaccttcagggccacttcacctctgacctctctccattggaaaagtcaaataacacatctactgtcacacaaacaatgcgtggtagggctaggattagaatcctgacagtcagccacaagccagtgcctgacatgtggttaataattgaatttgataggaacccagtagccgcttgtagttggctttctcaagacctcaaatttctagatattctttattccctttatttatactggagatttgccaattttctcctgaattcatctatatctcacaatacaatactaaacataaaaactaaaacttaatatatactattattctggcatttctcatcactccaagttatagcctcagta

SEQ ID NO: 162537 - DNA, 406 bp, Homo sapiens
taagcatacccagagaagtcctgggctctttatctgtcattggagtatggtgctttcctgcctgggtgtgtgttcggctgatgacaccataccatttcagcctcctccccgtctgctgctatcatgggtaggatgtaaagaaccaggattcattacatttggactataaacttttgcatacagtacttcaatgcaaatgtcctaacagccatatgagattctcattatttcttgtacacatttcactcaggaggcaatgtgatttcaagaacgtaattgacttgtgctggttcacacagctaagtgttgagcagattcagtatatccccaagcccatggtgaatgcggtttcttggttaggacccagggaccaattttttaatttcagctgtactactaaatatta

SEQ ID NO: 162538 - DNA, 490 bp, Homo sapiens
cagggagggcggctgctgccccctggcgtccgccagagcccgcggcgcgtcccgacagctccgcgcagtccgggcccgcccgggaaaggcctccacgccagtcaaccccggccccctcctgcgtccgggcccgcggcaacgcccggggacagtccctgcgcggcagcggccacagcaccctagccctgggggagggaggagcgggcgtcaggggccccgtgaggtcggcgagggacccccgcgccggggagcttaattgaggggctccgcggggaccacaaagcagcccgcggtggaacggggccgggatccggggactgggttgcagccccggggtggatgagaggccccgggaggtgcagggcccggcagggagggcgtggagggactcatggtgacgggagcagcctccgctgggagggagccccgccgggcggggtcggagttggcagcgcacgccggaccgggggcggggccctccgagctccgc

SEQ ID NO: 162539 - DNA, 615 bp, Homo sapiens
gttctcatatttttatttatagcaaaatgcagaacatagtttcaatttctaaatataaactgttttttagaatttcatcctgtgagatacagtgccatagtgttgggagaagtatgttccaaattcagaagtacttctgtagcatcaaattgatttcagtgactcagcatttcaacaagtatttaccgagcacctattatgtgcgcaggccctttcctgggtgctggatatctaatgttgaataagttagacattctccaagtattactgaaaagttgaaattctgtttttaagaccttctatgattaattcttcacatgatgttcagttttgtgtggcctggggtataactgaaagtttcataagatcactacgtcctatttccatatagatcaaataaaagactcttgtccatcataaatctgagccactgtttaattggacatcccattttttgctttaatcaaaactagttctttagctatgatttatcgtttatcttagttctttctcctcccttccattaccaagaaaattgactctctttttatcagctttttttttttttaagacagaaatgtttttatgacttcatgtgcttgtatatatatgaga

SEQ ID NO: 162540 - DNA, 232 bp, Homo sapiens
ctagtttctagaaccatcacaattaaatataaaatcatttaacaaagttaaaatagaccttaggcatcatgtgacttaagattggaaaaaggttttattttaaggctaatcccaattcactggtagtggctgcttggaatagtgtgattaaaaggacccaggcaaggtccaggttcagttggaaagagggctgcgtttggtgtgtgttgtctgccaggagtgagaaagcagg

SEQ ID NO: 162541 - DNA, 262 bp, Homo sapiens
aggctaagactatcagctcttgaaattacggatccccaccttgtccagcaccttgcacagcatagatgcccagtattatcaatattatcaaatattatcaaatgacacctcactgatttggacacattgtgggaagggtctgtgtgacataccaccagctaaagcatttccaagtctatgcaggaactcccgaaataatgaagctagcagaatgcctgcaactccataaatatcatctcttttctcaagaaggagaaccaag

SEQ ID NO: 162542 - DNA, 141 bp, Homo sapiens
tggcagctttaggagcccctgctgtgtcagggacgggggctggacctccccatggactgcccccactgtcctaacaggccacagcaggggagattctgtgcgctgctgactttctgcatgacatcttttggaaggatggtg

SEQ ID NO: 162543 - DNA, 398 bp, Homo sapiens
cggaagcacactgcaacagcagatgaagaagagggaaaatcagaccactctgtactgggaagcagagacaggcgcttcttgttttggcctccccatgatacgcattttaaaacatgttgttgctaagactttggaattcatgttgctttttgtcaactataggtacaaaggagtatgtcactttttatagctgttccaaaagctggcagatattaagctaagggccagatatggcctaagataatagaaataaggaagtaagctagaattattacaacttcccaagatatttaaagatgtctgaataactattctaattacaatgtctcatatatttatgagattattcttgggtcatttcagaccatgctgggacatacatggtgcggtatgctcag

SEQ ID NO: 162544 - DNA, 214 bp, Homo sapiens
acatagaattcttttatttttagtaatttgccacagtgaacgcacccaattcatagagggaaaaacaaatcctcttaggaaaataactcctctaccctactcagcggtgggtgtcctccctctccttagcccttccatctggaatggttgaggccgcctctcccaagaagcgctcgaagcacacccgccagcgtatcgctcagcgctccccctc

SEQ ID NO: 162545 - DNA, 499 bp, Homo sapiens
gcattcttcacggaaatgtgcctgtgaggagcattaactcctgttatacagggagaatagctagctggtagaggtctcagggagaaatcttgcctattgctattgaggaggccaggtcatcttgatttaccattttatgtcccacctcccttcccacctctagcctctcttctcctgtggtaggaggactaatggccccctcaaagctgtccaggtcctaatccccagaacccatgaatgtgttaccttacaaggtaaaaggaattttgcagatgttattaagttaaggatattgaaatagggccattatcctagattatccagggggcccaatgtcatcacaaagtacttgtaagaggaatgcaggaaggtcatacggggagaaggcagtgtgacaagagaagcagagataggagtaatgtagaatgagcggtctacaggtgcagagggatctacaggtgcagagggatctacaggtgcagcgggatctacaggtgca

SEQ ID NO: 162546 - DNA, 653 bp, Homo sapiens
aagtagtttgtgtgacccaagatccttccagttatccatctgccttttcagacttctcagaaccaagactcagaagaaggatattattgtatgtgtagaggtttgattggagacggcattagtcttctctcacgctgctaataaagacatacttgagactgggtaatttacaaaggaaagaggtttaatggactcacagttccacatggctggggaggcctcacaatcatggcagaaggcaaagaaaaggcaaagtcatgtcttacatggtggcaggcaagagtgtgtgtgtaggggaactgccttttataaaaccatcagaactcataagacttattcattatcatgagaacagcatgggaaagattcgcccccatgattcaattacctcccacctggtccctcccatggcacgtgggaattatgggagctacaaattcaagatgagatttgggtggggacacagccaaaccatatcagagacaaacactacttaacaagggtaaggttgttgtcccagttgcgcctgagctgctgtggaaggctgttgattcctgaccaatgtctgtggttgtgagggtggcaggtaacactgtgtgagtgaagcctgggctgtcagggaagggtgtagatagtcgactatgaatgggctt

SEQ ID NO: 162547 - DNA, 347 bp, Homo sapiens
ccagtgggttttatatttataaaagttttgttttattctttagcatttttttctttgagatttaagaactccctttagcatttcttgtaagatgggcctgagggtggtgaatcctctcatcttttttctgtttaggaaagtctttatctctcctttcaattggaggggtaatttgctgaagaatatattcttggatggcaggtttttttttcttttgagcacttaaaaaatgtcaatccattccctcctggcctgtgtaatttgcattgagaagcctgttgccagaggaattggaatgccttcatatgttatttgtttctttcctcttgctggttttaggatccatt

SEQ ID NO: 162548 - DNA, 263 bp, Homo sapiens
aaccctcttctttctttctgctcctcctggacgtacccacagtatgttacttgtggacactcgaatcttctctttccttccaagacctcactgagtcactggccctctttactcagggacattgtgaatatgcaggacccaaagaatcctgcagataggcactgtgggaccaattacttctgaaatattgacaactatagctactattggagtttactgagcaacaggatgaagaaacagcagcatctgaagcattcatttac

SEQ ID NO: 162549 - DNA, 328 bp, Homo sapiens
acagagtctccagtagtgtttgctgtgttgtatgtgctctgtaattggtagccttcattttggttgaagtcgcctgtgtttgtaccatcaaggccatttatacaggaaggatttgggatgggcttgttgggggtggtgctaaaccgaacctgaaaatgcagaacttagaaacttggatcctgcgtgagcaagtgccttcctacggtacaaatatctccttgtagaaagagtagtagaatcgcacagtttccagtgtattcatccacctccctcctatgtggtgtaataaacatgttcaggagttagattcttgtgaacacttacagag

SEQ ID NO: 162550 - DNA, 130 bp, Homo sapiens
actagttcaaccattgtggaagtaatcttttaatgatattttcttattatattgctacaggcaacatcagtagaagcctatctagttacactaaactaaagatcacattcaccattcttacagccaagtg

SEQ ID NO: 162551 - DNA, 317 bp, Homo sapiens
acctgccttttggggatcttctggcatgatgcaaacatttgtatcaaaaaacaacctttgctgtggagaaaggaggtggcagaacctgtgccccaaagcagacgactgtgccgtgagggtgctgtgtccacgggcacctctgcccattcaggaaactattgaatggttacacagcagggcacagagggacttttattttctttccagacaatgaaaaacagcatcataaagaagaaaatgcttctacactaccctcactctggccaggcacagtggctcaggcctgtactcccagtacttttaggaggccgaggcag

SEQ ID NO: 162552 - DNA, 285 bp, Homo sapiens
catccctttgccaatattatctactcagagacaagtccaaatgccaacacctgggagaagtctttgccaatgattcctcccctcacccccatgggagttaatccttcctcatgttccctgactagcctccttcccaggtaatctgtccagcacatcctccacttacatgtgttacggtgaaccttcacatgcctatctaatttactgggagttcttgaaaaacaggaactgtgtttcatatgtctatacactattttcagaacctggtacacagtgggcactcaa

SEQ ID NO: 162553 - DNA, 449 bp, Homo sapiens
aaaatatacccttctccagcaattcatcagttaatatacatcttcacttgaaatactattctttttgtataaatggctattcatattttaaagggatatgaaccataattggaaaatattttccagatttcagggaaacaagaagaaaaacttatatttttcagcttcattctttgccagcttttcattctgagatatatttttagttttctcaaagacaagaagaaaacattttctatgatttttgcaaaaaaaactgggtgactcacatgttatatacttcccattcgctctttgagtgaatgctgagaaggtcagggacaggagacaaaatattattccccagagccaaagacatgtgaagaacttccaagaaattgcatgatcctgtttgttatctctcatgggttgcaaaaagtaaaccctaaaagattttccccaccttcaaa

SEQ ID NO: 162554 - DNA, 173 bp, Homo sapiens
ctagaatctcaccacatggaagtttctataatcagagggttttctctgggttgtgcagactgtggagccaaaaggcagactcatacagaagacttctcaaaggggaaaaaagaactgaaaggactataattagaaaaatgtgattgtaaattaatttccctttaggatgtaag

SEQ ID NO: 162555 - DNA, 371 bp, Homo sapiens
tagggaaaccaccactcctgcatccaatcttatgcccaaaaagcctgaagggaatctgaggctcaggctggagctggtcatgccccctctgccagcacctcctcaggaagggggtgactggcatccctgggtgaaggctatgctgtaacaagggtgggggtttgggggtggtgctattcacctgcaggaggtgtaggcccgaggaaggagattgcaggtgggatggaggctgtggccaggtagtggctcaggggtgaccctgggcctcaaacctctctgtccccccctgtccttccttgtgctatcctggcttctgagagggcagctccctgcaggaaacaccatcataggaataggtgcagccggcaggg

SEQ ID NO: 162556 - DNA, 650 bp, Homo sapiens
aagataaaaaatctagaaagaaaataacgatactgaaaatacaatcttctttttaatttcaaaagacatgtgaagtagactcagtcttggggaaggacatcaaagcctcataagagctgcatctctaacttagtgacatgtgagtgaagcaggctgggagatttccccagggcttctcagaatcgtcagcgggtgaacatccctgtgattttcctgtgcccaaagcagatttctcagagcagttctcagaacaggtctagaaatgactgctccatggcacacactttgggaaatgctgctcaggtaaaggccagaaaggcccagacactgtgttagatcgaatgcagtggtttaccagcaggaagaactgtggcagcctcttgggaatgtcccttgagtttcatattagtcctctggaaatgacaagacagtcgttctgtctgtcctgagattcagatgatctactctacagcaataggattgtttgtgcaggccattcgagttcagtagctcttctccagaaaaccataaaatttcttcttttgaaagttcttgacaggcagaatttagttgtcaagttagagcatggaatcacgaccctgcatattttaaaataaaacttctcttgttctgcatatactttagtgcta

SEQ ID NO: 162557 - DNA, 489 bp, Homo sapiens
gctccatgttatcttcaacagacagttcttccctgacttccccatataaaatactcccagtcactcgctatagctctcatcctgctttatttttcatcattgcacttatcaccagtgatgttataattttattaatttgtttaccagctatcttccttgactagaatttaagcttcatgatagcaggctttgtctgttttgctcattgctgtatcatctggtatatgtaaggagttcaataaaatctgttgaatgaataaatgaaaaaaaaaatttcagtcccccagatgaagaaaaagtccttggaaagactgggaccacttaagaatgagtttttatataaattagtatgaaaatgaaatgtttattttataacatatagatctcaatatattttcattctaccagtaactgactactctatgggattatctaaggaggatggttctatccacctatcacaaacaacttggtaaacctctaaaaaat

SEQ ID NO: 162558 - DNA, 456 bp, Homo sapiens
cccagagaagcgccttcatctggatgaacagtcctgggggtcagcgctgccactggcttgggggacagagggggcatgactgctggcccttccgggcctcgtcagcgtcagcagccacgggcagaaacatggacagcggatctgaggagggtgccatccaggcttaactttaattcttggtcaagttcaacatggtttgtgttccctattcgcttgtctccagctggcttgtttcttatggattcatggaactccaagtgttcagggggagtcgcctttttgtcattttcctcgctttgaatttcgtgaggatgtttgcagaagtttttacttttctgtgcacttaaatctgccagtctcttgagatttcatgtattgatgtgctgagaacagcctttcctacctaagatggcatgagttctggaagcttccctctggctcttcccactcatgtct

SEQ ID NO: 162559 - DNA, 234 bp, Homo sapiens
tgctgggattacaggcatgagccaccgcgcccagccaaccctggtggtttttaagagcatttgaaatctggcataatatctactttaacaagtactgcaagatgacttactggataagtcatatgaatatttccaagtttgcccagcatcaagataacatctgtacttccagttttgcaattcaatttgctttggaaataaaaacatgttgctaagctcagatgattgcaatgc

SEQ ID NO: 162560 - DNA, 476 bp, Homo sapiens
ggagctcggtacctgtgggtagcaacaagtgcttatgcatttctgaagagacaggaagcccagtatgtgtcacatatttggggatgatccccttcacttggatttctgccttcctctttgcagacaccttttttcccctacattactttgaagattcaggagctcatctttgattagctcccctggattaggagctcccttttctgattgcttctgtcagttctctgtgctgtttctagacctgtttccatattcttcctcaggttcttcttttcaaaggcttcatgctctttgatccctgagtagcctgttcccatgctcacccctgatgattcaatgttgagcgttgcttcagaatgtttctttggccatctcttgctgctgcttctcccaaccttcatgctgatcctgctgcctattactgcagaactaggccgatagctttcctacagctttctgtctccattttgttcttc

SEQ ID NO: 162561 - DNA, 130 bp, Homo sapiens
ggaaccctgagatgatatatttttcacagtaaacttcaatccttggctacttgagattatgatcttgatttgccttctgatcatgtcgctcaagcttgacgatttctgctaacttgtatttcttttctag

SEQ ID NO: 162562 - DNA, 256 bp, Homo sapiens
tcctttttctatccagtatctagtgttatccaggttgctgctggtgttataaaaagcactgaaagaacaatcctttaaaacttagctcaagccaacttccttgccaaacatttttttaatttctttttttcttattgtgaatcaggtagcctcttgagccacagtaagctaagagagactcccttgtcaaagatttttcagattaagtcagtaaacagtaatttctctttgctctgatcccacagaattcactgag

SEQ ID NO: 162563 - DNA, 318 bp, Homo sapiens
agactcatcaccaagaacagtgctttctacagggtagaaaatgattatcaaaggaatggatttggtactctttatactttcattttgggatcaaattcttatatagattggaatttaattgccttttacagctatgaaaggcgacaattttattaaattgctctttggaattccttgttttgcatttatagtcaactggttcctttttggttttcatgttttatttctaagtgattaacaagttacaggctgttatttaaaagcccttcttcagtgacgcagctgtggaaagtactaataaaaatggaattggctggg

SEQ ID NO: 162564 - DNA, 481 bp, Homo sapiens
gaaggttatatccacatcgtacagcggatgctacactggacacggatgggtagaatcatccattcagtgaagcatgacttgtgttgaacaagacaagctggctgaagcatttgaaggcgcttttgaggtactgaggtaacattcaactgatcttcactcctccccagatgacaaaaattacctggctttcgtcagccactgtcctcatgtcagaggaaattccatctgctaagaagtgttgcccacagaggaacctgtgtatagctggagaaccatcatagcaggaagaagctctgaccgttttaataccttcacgaatccccacataatgctaagatggtgtcttgtatccaggagtagataaaaccaaagatgtctttctgtttgtattgaaaaataaagaaaaactttagggaaaaagaaaagtcagccagaaccccatggcttactcagaaaattgtcagggccctgaggaattatg

SEQ ID NO: 162565 - DNA, 346 bp, Homo sapiens
tatttttcagataatgaggattgctgaaaacctaagtcagcctgaacaaccagtacattttcttgaatttattgtacataagtcccccacgtaagaggctgctggaaaataccaaagagacatgagaaatgtcatttctggccatggggagatcaaacacacagcatatcaaagatcacttacaaagcatcctgtgataaataaatccacagcagcataacacaaactaaagacatgagtatatgatgcatttttacccgaggctaccctgggctagagtttccatgcctggtctttgttttgataaagcaacactttacacatgtaggctggaaattatggtggg

SEQ ID NO: 162566 - DNA, 463 bp, Homo sapiens
ctggggggttgctgcttccaagcacccagatcatgtctttgacagcctgtgctgcacagctatatacctttctttgggtacctcggagttggcattaatgggagtgatggctgtggaccattatgtggctgtgtgtaaccctttgaggtacaacatcattatgaacagcagcacatgtgtctggatggtcattgtatcatgggtgtttgggttcctttttcaaatctggccagtttatgccacttttcagcttactttctgcaaatcaaatgtgttagatcatttttactgtgactgaggacaattgctcaaggtatcctgtgaggacactcttttcacagagtttattctttttctaatggctgttttcattatcattggttcttttgatccctacgattgtctcctacacctacatcatctccaccatcctcaagatcccgttagcctctggctggaggaa

SEQ ID NO: 162567 - DNA, 416 bp, Homo sapiens
atagtgaagatgtactgctgtacaagccaaatgaaagcaaattgcttctgaaattctgtttgtagagatagagaaacctttgccagaatgatagctgcatatcaggtactgaactaagcagatcacatatgaataccagctcttccttgtagtcattaagattaaaacacagtcatcctctaaaaatatttgttttctgtattagccagacagttgtattaagtaggtacctgctaggaattgcaatccttgcatctttcagttctttgacaattctttcaggaatgcaaattacttttgtttggagggagagctcctgggatctccatcagacttcctgataaaaactaccctgcaactccacctgtcatggcatcagtatgggaattttgtctgttggaaaactaagactgccc

SEQ ID NO: 162568 - DNA, 692 bp, Homo sapiens
agacaatccttattagatggtcattttacttccacttttggtacgacattctttcttcccatgatgtgtcaatggctctatgtatcctatcattggtgacacaatcccttctataacactggatacttacaatcagtaattaacttaatgtgtagctcaatcactaatgttaaaagtttatcttttaaaaatgactaaattcataaaataatgtctaggtgttttttgacaatctggtcctaagtgatctttttctttttcacagggaaatgggggaaaatcagacaatggtcacagagttcctcctactgggatttctcctgggcccaaggattcagatgctcctctttgggctcttctccctgttctatatcttcaccctgctggggaacggggccatcctggggctcatctcactggactccagactccacacccccatgtacttcttcctctcacacctggctgtcgtcgacatcgcctacacccgcaacacggtgccccagatgctggcgaacctcctgcatccagccaagcccatctcctttgctggttgcatgacgcagacctttctctgtttgagttttggacacagcgaatgtctcctgctggtgctgatgtcctacgatcgttacgtggccatctgccaccctctccgatactccgtcatcatgacctggagagtctgcatc

SEQ ID NO: 162569 - DNA, 579 bp, Homo sapiens
taatcccaacacgatgggaggccaagggtgggaggatcactagaacgccaggagttcgagaccagcctgggcaacatagtgagatcccccaccatctcaaaaaaagtaaaataaataaataaataaaaataggtaagaaccaaaatatggtatttttcttggcataatacaaaatcagctttatttatctttcttaccttaatgtcttctctctatctaatcatataccacacccctctcactttcaagtacaaagctctaccctacttacctacgatttattactcaactcaggaaactcccctaactcattcccctctacccttgtcaccacctacttaaaagattgagaatatgcacccaagggggaaaaaagccctctataacaaaggatttctccttggggaaagaaacatattcagatttctattagggcatcttagtcaagttggccaagagaaaaattaaaagttcagcaattttgaaccactcaacagagacagctctgaaagcactactcaggggagttaaacatggcaagatgatactgaagtccaacctaaccagctacatcacata

SEQ ID NO: 162570 - DNA, 441 bp, Homo sapiens
cttctaggcctgttgtgtgcttttcagtggatgttaaacgtggagtgctgtggggttggaattccggctggaagtaagggccagggcactcaagatgcaaagaccagtgaggccaactttggcctgagtttgctcacaggtgagccaggtagtcctgggctcagaccctcccatcctagggaaatgcaggctgtgctcaaggctgtccattgtgggaagggactcccaagggactggctgtgtccgatgggtcagggaaggtaacatttgaggtcagtcctgaaggatgagaaagacacttctaagctcaggaagagggaaggaccttccaggagcatcctgggcacagatgagcagtttgatggatgggcagggtgggaggatgagagaggatagacaagaatgggggcagatatgtctatagcattgagaaccaaataa

SEQ ID NO: 162571 - DNA, 295 bp, Homo sapiens
caggatttgttttgagggttaattaaagtaatgaaagccaaggcctgagtgtggcacctggcatacagtaagtgcgtaatacaggatagctctttaactggtagtgttgctgagtcacaagcttttgcccttgacttcaacccagtctgtcttttcacctgctagttggatgaagatgtgtaaggcgtgctgataagatttgctgatgacacagagctttaagggggagcaaatctgttggatggtagaactgaaattcaaaagttgtttgcccctggattgagctgaaatccaa

SEQ ID NO: 162572 - DNA, 132 bp, Homo sapiens
taaactacagcataccagctgaaccttgggatacgcttaattgcccagggtggcttaatcttcagccctgccagttgcagaaggattatttgtctttggtgaactcagtggagaattgaaagtaaatttgtt

SEQ ID NO: 162573 - DNA, 497 bp, Homo sapiens
ttcggccccaggtacgcatcaggcctcagctgaataaccagtccccaggtggacattaacccacaggtcaaccacagtccccaggttgatacctggtccccaggtggctactcaatctgcagggtaacattaggcccctgtaggatcccaggccccaagtggattcctaggcccctggtgaacatcaggtgcaggtgtccaagtaggccctgggtggacataactgtgtacaggtaaggagttgacctgtggggaggatgagcagtcagcagcccactggggtcctgagtaggtcttctggaaggaggaggctgaggggatggaactttaaagaagcaacctcacttccttggcaacagaccctaacagaacttagaattctggtaaccaggccaggcacggtggctcacacctgtaatcccagcactttgggaggctgaggcaggaggatcatgaaatcaggagatcgagaccagcctgaacaacatggtaaaacc

SEQ ID NO: 162574 - DNA, 183 bp, Homo sapiens
acaacttcttcaccatgtgatgttgcccaaagagcagccagaccctcctaaaattaagttatgttacatcattcatctgttaaaatccctcaaatggctccccaccttgcttagtaaaagcccaaagtccttgccatggcctacaaggccccacataatcagtgcacacacacccgtcaccct

SEQ ID NO: 162575 - DNA, 581 bp, Homo sapiens
  misc_feature (196)..(196): n is a, c, g, or t
atagccatcataaaagtaaaatgtaaaattactttgacattcggagactctaccattgtattacagaaaagaagttgttaataatctttagatcaaattagaactatttactgggagcccaggcatggtggcctacgcctgtaatcccagcactttgggaggcagaggtgggcagatcacttgaggtcaggagttncaagactagcttggtcaacatggtgaaacttcgtctctactaaaagtacaaaaattagatgggcgtggtggcttgcagctaattccactggaggctgatgcatgagaatcacttgaaccctggtggcgaaggttgaagtgagctgagatcacgctactctactccagcctgggtgacagtgatggaatgagactctatctccaaaggaaaaaaaaaaaagaactagttactgggaagtctgttgtttgaaatagaagttttgatgccttgtttgttcatttagttctggtagtattcatggccgggaggaggcgggagtcacagtaaggggtacctcattaaattagaaagctctctattctaatcattatcccttaaaaaaaaa

SEQ ID NO: 162576 - DNA, 344 bp, Homo sapiens
caagatatagtgaggagtttggtaaatctattcctactcatcaatagaatgtagcagtttgatgacttctaaaaaacctttcaggaaatttgaatgaatagacaaattgaaatataataattttttgttaccactgtgccctgatgctttcaaatatacaatggaatcaatcatcgttacaataaagttgccaagagtgtttaggatctagaaccaaataatctggttttgaaatattgttcataaccggtattaagtactgtgatgattgttgcatttgcgtatcagaaggaccatgggcttagtcttgaatccgctttctctcattgatatgagtatgataa

SEQ ID NO: 162577 - DNA, 1095 bp, Homo sapiens
agcgggggcacgagccccgcccgagctcaccgcccctgctcccctctccgaccctttgagccgtggccgttgccagatgtccacaatgggaaacgaggccagttacccggcggagatgtgctcccactttgacaatgatgaaattaaaaggctgggcaggaggtttaagaagttggacttggacaaatcagggtctctgagcgtggaggagttcatgtccctgccggagctgcgccacaacccgttggtgcggcgagtgatcgacgtcttcgacaccgacggtgatggagaagtggacttcaaggaattcatcctggggacctcccagttcagcgtcaagggcgacgaggagcagaagttgaggtttgcgttcagcatttacgacatggataaagatggctacatttccaacggggagctcttccaggtgctgaagatgatggtgggcaacaacctgacggactggcagctccagcagctggtcgacaaaaccatcatcatcctggacaaggatggcgatgggaagatatcctttgaggaattcagtgctgtggtcagagacctggagatccacaagaagctggtcctcatcgtatgagcctttttcttacaagcaccacccaacaacttctgctttcttccctatctctttcaagatttgctcaagacgtccaactgtctctctgacttatctggaagtatttctttttgtgaagccatatgtcctaacaggagcttcatcaccaactcagtgctattaattctccttctctgaatgactcagggtaccctatagggggaagagcaagtcaaatgagcatagtggggaaagaaaaggaaatggcttttataaacatcttttactttgttttgattcaaagaccaaactagaactttaaaagttcaaaaataagaaagtatacatttttgctgttatttctcatcattttgtatatgggaggaaatttataatttgcatgggtgttaggtgaactgttttcatttgcttgtgttcagatatcttgccagattgttaacttcctattgtagcaacagggacaaatatatttgtctttgctgggcaaaaagtaatca

SEQ ID NO: 162578 - DNA, 587 bp, Homo sapiens
acctcccactctggtgcacaagaagcttcaacacaataatatgggagaagaggttttgtaaactataaagcaccatgcacatgtgaatgctattatcattctagggtagtagttggccaagtttactaatgaacacacacttagggtttcaatgagtctttacctaagcacattcccactgccctgagtcacattaacctacttcagatgctaacttggcagtgatttttactaaaatactgaagctgaaaaacataaagagtggttttcctatattatctctcccttggcttaaactgtgaagcaccagaacttagtgatcagacaacatgacctggaatcagactcccaggaaagaatcccacctttacatcttactagcttggtgaccatggaaagtgatgtggcttgtgtgtgtctcagtttccctcatctgtctatccaaaccagaacatttcagagtgaaatggtttatcatctgaccaggacatctgagaatgaaagcaggtgatgtcaatgttaatgcgaggacaacaggcatacaccagaacggtccccaggcaagtagaggaaataaggtggctcta

SEQ ID NO: 162579 - DNA, 331 bp, Homo sapiens
gtgttgggtcagcacaaagggccactctgtgggacatggtggggacaggaggacaggccagattctgcatttgttctttgctggatgtggagagagggcaggatgggaaagccatggcctccaccaggccaagcactgctttgagatgctagaccactgtgctgagcccgtggacatttcccttgggcttcatgctggaaatctggccaaaaaaagaacgtttttctccccaaatgcccaagactttgtaaatgtcaactatttcagagcattttccgggttactaagagcggtggtgggggtttttgaggaaggctcattccatccacac

SEQ ID NO: 162580 - DNA, 176 bp, Homo sapiens
gggtaattaatgaagaaaagaggtttaactgacagttccgcaggctgtacaggaggcatggctggggaggcctcaggaaacacagtcgtggcggaagggcaaaggcaccttcttcacatggtggagtgggagagagtgaagcaggaagtgctatacacttttaaacaaccagatct

SEQ ID NO: 162581 - DNA, 302 bp, Homo sapiens
ctagatcatttgccgcaccttctacgtcagcacttgcttcttcactttgtacttagataatgaaaccagcttctttttttaaaccccgtgaaacaaattctacagctttttttcttttgcagctttcccacgtctcttagtcatcatagaatgacagagagttatgtccttgctctagattagatttggcctaagggaacattgtggctgctttgttcttcaatccaggctactgaagttttctccatgttagccataagtctgtttcactttgttattatttgtgtgttcactgaagtagg

SEQ ID NO: 162582 - DNA, 477 bp, Homo sapiens
agtggcctccaggctgtccccagtccctgggagctctctcccagagggtgaatctcattgacaccacaccaggataagggaactggctggtgttgagtgaaacctagaaccacccccaccatctatgtggagggcatacccagggcatcagtagctgcatttcccacctagcttctgccaggctcagcacaactatgtccagttaggtgtcccacgcctggtgattgcccatgcattgggccctgaccccttcccacagcactggccctgcctggggacacacatctctatcccttccatccaccatgaacacataaccagcctgctctcaaaccatgatccttgccccacacctccctgtagtcctgtaagcctcaggcgatgcaaaccaagaggggaaaggccctggagggttgtgggggcggctggctgtcataggcaccttagccagtactccagggaactactcccaccccc

SEQ ID NO: 162583 - DNA, 219 bp, Homo sapiens
ctgcttcagttcatttgttgttttcaagaaaactatgttgagcacctactgttgacagacactgtcctaaggaactcagaaacaaaaataactaaatatgccttctagaacactgcatattgaagtctagaagggaagagaaggtagacagccagaatacaatgtgttagattttctgatcaaaatatgtggaagttgttatgggcacacattatggag

SEQ ID NO: 162584 - DNA, 169 bp, Homo sapiens
gatttgcctatcatgtcctggatggcagactatatcctctaggactgcccaacatcttttaatgctttcttgcatcttcattatattcctttcttatagaccttttgtcttactctacaaatataatcaagcacccaaacctaaaatgtttcctcaatcctatctgttc

SEQ ID NO: 162585 - DNA, 325 bp, Homo sapiens
ctgaatggcagaaattgttattcccattttacaaaggaagaaactgaggctcaggggtttacataagttgcccaagatgatataactagtaaggacacagctaggagtaaaacccaggcctgcagaggtcctatagacataatctttgcattacacagagccctggccacagctacctcctagtcctaatgttctgcaagtcttgctttttaagctctgtttttgttttggttttggtttgttttttgggttttttttagacagagtcttgctctattgcccaggctggagtgcagtatataatttctgtgcccatttcagtcgg

SEQ ID NO: 162586 - DNA, 310 bp, Homo sapiens
catggcagggcgtgcgcctgctgcggtgtgggtgactgggtcctcaggagcagaagcggacgtgggtgtctcaggtctgaccgtgctgaggagacagtccacagggggagtgggggcttcagaggatgagacaggaggtgggaatattttgggactggccgggggcagccaggctgtggggacatctcacacctgtgtgcctggggccaggttatggagctgtccaaggtctttgggggaagaaacagcctatgagaatgctctaggcatgtcagggacaagaacagctgtgggggtaccctcagtttca

SEQ ID NO: 162587 - DNA, 190 bp, Homo sapiens
gggagaatcctgaatattggcctaggattatgccgtgtcaaatctaaagtttcttttgggtttctgtgatgtactagaataacatctatttaatttaaatttcatatttaaattttgtttatatatttaaatatgatctgacagccttactacatattagggttgtggtccttttttctttttttttttt

SEQ ID NO: 162588 - DNA, 119 bp, Homo sapiens
atcacacttgtcaaagtgggtctaatgatgtcagtcatctttttctaccttgcatttcttcattgcagcttacactgacaaatgataccattcctatgtccacagttttctttgattaa

SEQ ID NO: 162589 - DNA, 425 bp, Homo sapiens
agaaagaaagaaagaaaggaaggaaggaaggaaggaaggaaagaaggaaggaaggaaggagaaggggaagcagaagggagaaagaaaaaaagaaaagaaaagaaaagaaagctaaacaaaacacatctgtggggtcaaatgaggcccaaactctaccaggttaggactcgtgacttcaaggaaccatctacttttcatggtttgaacctgggaacattgatcttaaaagcaaaaacagtaaaatacagctggaccccaaacagtgtcaggtttggcgagcttattaaagtacagacctgagtatcttaaccagatgatgttcacaaaaccatggatgaatggtgcagggctcatgtttaagagttagcccagatggactgggcggagctggttaaagacccatctttcctggaaatgatttccct

SEQ ID NO: 162590 - DNA, 344 bp, Homo sapiens
agagagagagagagagagagagagagagaaaccaaaacagtggggagatggacaaaagaggaatttccatttttaacaactgcctcaagtaattctgatacagacaatatattcagaaaacactgatctacactctactcctacatatgcttagaaaaagggaattgtcatgtggcttacaatttcattgctaaataaaatgggggcaacttggtaaacagaggctttcttccttctatcaagagagtatatatgtgcatagccaattcagcctccccactcctgaagagtgtgcaatgcattctgccagacacacagatcttgaggtaaaaagaagaaaatat

SEQ ID NO: 162591 - DNA, 438 bp, Homo sapiens
aaaaaaaggtgaccacccctgaataaccatctctacaatcactaccggctttgacattatcacatctggctgagcacagcacactcaggaatataaagctgtcccaaaagcaaagagataagaccaatctcacttattaaaatctgtctggataaggtgcccttctcaatatagtggaaagcctactccatctttaacatcagcatctttgtcgtcattaaatcctctttaagtcatctggttttccgcagcacataatcttaacttctaagttgttttagatacaacacttactgaatccctgtaaaatactataactggatattttatctcaagtaacaatgagataaaattttttaacatcagaaaggtggtgttttccattaacccaataggtacattaattattttcacttacaacaatactttttaaaatga

SEQ ID NO: 162592 - DNA, 334 bp, Homo sapiens
tggttacatgggggtgggtgtctttgttgctaggaaatatgctttgaaatattaagggataacttgcaaatagtttaagaaaaatatatgaataagagagagagcagatatgattaggcaagtgtacaaaatattatgggttgggaaatatggataaaaggtatacgggagctctttatactattcttgttaagtatagtaagtttgaactagtttaaaataaaaggtcaaaggaaatctttgtgatctcaggatggcaataatttcttaaggtaggacataaaatcatgaaccataaaagaaaaaaagtgtaatgattccataaagtatattt

SEQ ID NO: 162593 - DNA, 597 bp, Homo sapiens
aaaccatagcaattccactcctagtctataaaagcgagagaatttaaaacagggagtcaaacagatacctgtataccaatgttcatagcagtactatttccaatagccaaaaggtaggaacaacccaagtgtacgtcaagagatagaatggataagcaaaatatagtacatctatacaatggactattattcagggcataacaaggaatggaattctggtatatgctataacatggttgaatcctgaaaacattatgctaagtaaaataagccagacataagagaataagtattttataattccacttatatgaggtatctagaataggcaaataaagatagaaactacaatagaggttatgaggtactaagagaaggggaaagaaggagttatttagtgaatgcggagtttctatttgggatgataaagtttgaaaaccagtagtgatggacgcacaacactgtgaatgtacttactggcaccgaattgttcacttaacaaatggttaacacgataaatgttgtatcttattttaccacaagttcaaaatatatattttcactaaagcccaggtaaagaaagtcctagatcaaatt

SEQ ID NO: 162594 - DNA, 136 bp, Homo sapiens
gcttattggaggagtaagaggcaacacatgcaaagcagttaaccaggagcctgggtagggacctggctgtgagttcagagcctgggatttgtgggatggccagtgtatgcacttccagtgactgctggcattacca

SEQ ID NO: 162595 - DNA, 241 bp, Homo sapiens
gtaacatgggaaagctacagagtatggctgaatattaaacctgcctaaccttaccagcactctggtcatggtacatttgctgggcccagtcctgaccacagtgaactgtgcaggcttcataacatgcatggtggtctggaagccatgtgataagaagaagaaaaccacccagcaatgacatggtcacatgggctctcctggagtttgctaagcacctgggtgacctgggaaagaactttgt

SEQ ID NO: 162596 - DNA, 353 bp, Homo sapiens
tgcaacgtgcggccccaccatgttcacacctcactacagacaggaagcacatgttattcagataatcgctacccattttcctttcatcctcgtttttccagcgagcaaaacatcttgtacagtcagtttcttttttcatttcaaaagtacactttgaataggctcaggacggcctgatttaagcaagcagaaggaaaaatccttacaaaatctgtgtgggccaatcagcaatgtgacagaacgttcggcagatggcgctgtttccacacgagcgtaacggcggccacaagcgttctgccgccagggggcgccgcgttccgccggggaagcgtggctcccgggcgcgcggccgc

SEQ ID NO: 162597 - DNA, 307 bp, Homo sapiens
  misc_feature (228)..(228): n is a, c, g, or t
aggaagtgctgttacagaagctaggactaggaggcatgatcagtagtgttagatattttgaggaagtcaagctgtagactcaaacaacaaaatttttttttaactgttggggtaacagctcacaaataatttggtggatgtccccaaaacagtgaattaaaggggagaggtgagagttttgttttaatttataatgggcaatacttagaaaagaaaataattattgantttggagtggcttcaaggacaatacatttaaatatttgtcccagaaattgaccaaactttaaacaaaaaaccagaagtc

SEQ ID NO: 162598 - DNA, 414 bp, Homo sapiens
ttattaaacgcagttgaaaaaaatgaaacattaagaagattttaagacaaacatctgggtaaattagagatcatcttctctagggcttgtttttttagtttaattctaaacttcttgtatttacttaaaatgttattttataaatttgcccttcttttatttgatccccagtcacataatatatttatgcctgatatcctcgctaatttcacattagtggattttgctgttactatttgaaccctagctgctgccttcctcctacttctgtgttagctattactgctcctcctcctgactgctgtcatttgttgagcatctgttgcactaagtgctttctatattcagtaatcttttttaacaaccctcaaccctgaaagacagttaatctgttaggtgcactgttactttact

SEQ ID NO: 162599 - DNA, 270 bp, Homo sapiens
tctctctcccacagtcttcacctcctcttcgtcctcttcgagccgtcagacctggcccatcctcaaggagcagggctcatccagcttcagccagggccagtgctcctagaactgagctgcctctaccacagcctcctgcccaccagctggcctcacctcctgaaggcctgggtcaggaccctgctctcccagcgcagttcccagctgtctccctgctcctctactggtgatgggctaataaagctgactttctggttgatgcaaacctgt

SEQ ID NO: 162600 - DNA, 187 bp, Homo sapiens
tccagaaaatgctctcaaaacgagttatactttcaactagcatggcatgttgggacacaaaggggagaagagtagctctgagaatacactgagaagatttaaatataatcaggactttacagacccttgctgctgggagaaaggcttcctgtaaatctcagggaaaaaacatctgtgcaacacgctt

SEQ ID NO: 162601 - DNA, 156 bp, Homo sapiens
tgtgatctcaggatcttcggaatacacgcgctcattgatccataacttgacacgaacagtgacctagggataacagcgcaatcctattctagagtccatatcaacaatagggtttacaatctcgatgttggatcaggacatcctaatggtgtcacc

SEQ ID NO: 162602 - DNA, 226 bp, Homo sapiens
gctctggagaaaagaaaggggttgggaaggtgggtgcacgtgtgtgcacatgtgttttgaatagagtggtctaggcaggcctcacggaaaagctggtgcaggcagatggttgaaggtggtggagagggagctgtgtaggtatttgagggaagggtgctctggatgatgggagctctgtgtgtggagaccctggggagggagctgtgtaggtatttgagggatgatg

SEQ ID NO: 162603 - DNA, 350 bp, Homo sapiens
ctgtttctaccactccagaattgtgctggcctgctccttgaaagaggaagcacaaacctccactcctcctggcttccctgtaatcctgcccgagttgtctgtcctcctgtagcccacacccttctgtccctcaggcccctgcttagaggtggggtgtgggagggcacccactgtcactttatcctgtcacattctagccgcccatccgcaggtcctgtctcctctgagggcttcttcattgtcgtcacttaggatctgaactctgtccttggccttccaggcctggactcttgatatttagagctaagctttggcatttcaaataaaaaataaaaaaagaaagaaaaccc

SEQ ID NO: 162604 - DNA, 267 bp, Homo sapiens
taaaaaaaatcagagaaagaaaatcttttctttaaaatagagaccctctgggaatgttttctttggcctcaggaagcttctaccacaattcccgcccgtaacccttcctcccctcaccagtgcacacacatacgctctcttggaagcctctctcctggatatttacactgagttactgttccacactggaaatacacctctctggacttgatttgctcactctcatcttatccttttggttttcagcgctatgattaaccttgaatg

SEQ ID NO: 162605 - DNA, 473 bp, Homo sapiens
acagagtgcaaatacagaaggagcaccctatagggactttgaaggcagtgcttataaatgaaaaggcacaggcagaagaaaacaagagtttttatgggaagacagtggataagtggaactgagtttctctaacgtgaaagatggggtgataatcctaatgataaataaaaagaaaattctgaatttatgagaggttttctttatgaagaatgaatgaggacagattcaaagatatgactatcataatgttagactgtttgacctgcattctgatatagtttcttgatagacagaaaaatgttgtagttataattcagcacacagagatctacacaaactattatgggtatattgtggaaaatagggtatttagttcttccaggaaaaccttgacagaaaaactgatatttgaactgtcctggagatgaatatgagttttccagaacccatagactaatttaatggacaaacaa

SEQ ID NO: 162606 - DNA, 553 bp, Homo sapiens
ttatcatgaggtgttagggttcgtctgtgacctttaaagagctacagtcgggcaggcatgacacaggagctgaaggaaactcctggggtcacctccatctgaaagtctgttttggtctctgttgtgccctttcctggagaacagaagagtcttctgtctatgtcacaatcacaactaagcccaaattctcccggtgtctcctttgtcctctgtgtcttgagaacatcatgtacaaagctgctttgctgtgattgaaggaaatctcaatgtacttacattaacagctaggtaatttataggtgtacaatgtaactattaaagctcagattgacttgaacttgcatgcctattttttggattcacttgtacttccaatctgttttttctttacagcctgacccagttgattttgaattcaatccttagagaaatgtattatttgccttctttagatatactgtttttgaagttagaactgttctgcagcaccccaggtaacatggttttcttttcctctccacagccccctacccccgcttctctggcccctaag

SEQ ID NO: 162607 - DNA, 218 bp, Homo sapiens
cttttttttttcttttgagacagagtctcgatctatcacccaggctggaacgctgtctaaaaagaaaagcagggaatttgacacaaagaaaataaactagaaatagatctttgaggccaatggattttagaaaagaaaaatatcagctcttccttttctttaacctgttccttgaggacaatgccatagaatgttgtgagcatctgcaagcataaccg

SEQ ID NO: 162608 - DNA, 504 bp, Homo sapiens
tccttggaagaaaaagtgtcaaacttggtactgtgtgaaggtactgcacagacctcccaactggttcttaagagagccaaactgaggctaagttctgagaactaagtaagaactgacagcccttgtaggttagaaagtagtggggcaacatgttacaagtagtgcttctggaaggttagatgcggttagaataaaatcattgccattttggggagctgggaaaatggatgtcttcagtctagtctaaaaagggatgacttgaataagcttatataagaaagaaaagaaaaacctttttactcactggaccatttcataatcttgacttttttcaaacataaatctgtgtcatttttcttatttaaaacagctgagtagtttactctcctacttagagctgtgattcttatcatgggctcttgtgatctaaccccagcctgcctccctggcctctgtccttgcttaataacctctagccatatgaacctggaataccagtctaat

SEQ ID NO: 162609 - DNA, 256 bp, Homo sapiens
ccagcaaccctgcctcccaccttaaccgatctccaatcctacattttagtgtctagaagggcttccaggtacaattcaaattgtatcgcagacaatgttcaataatagtaaaagaatcacagtcttgttttaagaagcaaaacaaaacagtgcagagctcatgatccagccatgagtcgtggttaatgttaactacttaaccaaggtctggtaaccattagccaattattaggttgaatttctgtgcccatttcaa

SEQ ID NO: 162610 - DNA, 399 bp, Homo sapiens
tcaaaaaaaaaaaaaaaaaatctcataggcttatatgaggaatggcaaatattggccattatttattatcaatttaaaaatatttctaaggcctttggtggtggcagcctcttttcttgattctctcaacagaatagtgtacatttgtggtagattcatgcttattttcttatatttccttaccaaaacttgaagtcaggatattaccctttcttattaaaacctcttttactaagactggcaattgaaatcccattggatgccatattgggcactgtggaccaatctccacctcctgtatgccctctctttctgatgtggccacggtgaggtcactgtctcctgacctgcccttaccccactcatgtctgccttagtggatcttcttcctctcctcat

SEQ ID NO: 162611 - DNA, 412 bp, Homo sapiens
tctcactctgagttcatatgagatctggttatttaaaagtatgtggcatccccccctcaattctctctgtctctctcttgcacttgctttcaccagttgatgtgcctgtttttgcttcatcttctgtcatgagtaaaagctctctgtggtctctctagaagccaatgctggcactatgtttcctgtgcagtctgcagagccatgagccatttaacctttttataaattacctaccctcaggtatttatttatagcattcaagaacagcatactacagaaaattgttaacagaagtggggcattgctataaagatacccgaaaatgtggaagtgattttggaactgcatcctgagttcatatgagatctggttatttaaaagtatgtggcatcccccaactcaggatgcttct

SEQ ID NO: 162612 - DNA, 383 bp, Homo sapiens
cagtgacactgggttaggcaaacacttcttagacatgacaacaaaaacatggttcgtaaaataataaaataaaaaccaagattctgataaatctgatctcatcagaattaaaagcactggtcagagagtgaacaaataagcgaaagtctgggaggaaatacttgcaaaccacatatctgataaaggacatgaatccaaagtacacaagtaacttctgaaacataatgagaagaaaaaatctaattttaaatgagcaaaagatttgaacagatatataaccaaagaagatataccgatgggaagaatgcacatgaaaagatgttctacatatttaatcacaaggaaaatggaaactgaaacctttagaagatactactatctac

SEQ ID NO: 162613 - DNA, 343 bp, Homo sapiens
agacaggccgctgggagagacaggccactgggagggccctaggagggcagcttctcaggcctggtggcagggggctggattccccatacatgtttaaatagctttcactgcccgtgtgtcagtcaggtgcagggaccttgccacctcttcctagtggtctttgtaagaatgtagaagcatttctttgataagttgataagttttaggtgacaggcgaagccttcttaaagaattgtctcaatgttttgaaaacctcttatttaggatcatgatatgagacaccttttccttgaacaaaaacttttaaaagtctgtttagagtgaagaagctgttgtacattca

SEQ ID NO: 162614 - DNA, 520 bp, Homo sapiens
ttaggagaccattgttttagaaaactttgatttgtacatgttagttttcatgaaattgcaacacagagataggtcctaaaagtggaatgtatttaaaacttgttgaattagacacacacacacagacacacacaaagaatcagcagagaaaacaaaatacaagtcctgttctgtagttcttgccctttgaatatatttgggaagagttgcttcctatttcaggaccctgccaaaaaagaagaaagcttgcctttggtggggctatgccccttggagtaaatacagctctgtgttccctagcagctgccggaggatttggctgatgaagtacctgctcagcttagctaatcagattaaaggaagacatgtatgtcttttgtttaagcacctagtcccttatgtatcagtaaacaggtttttaaaaatcttttatgtcatttataggataaaacatatgcttgtctgaaaatatcaccttttgtggatttatctgatcaccaaataataaatattaagaaga

SEQ ID NO: 162615 - DNA, 403 bp, Homo sapiens
gttgggtgatggtttaagttttcatatttcataattaataatatttttaaaaaagcatttttatgtttacactgttatatctcaggtcttatcaacctcagcttaaaaagttgaagtatcggctgggcgtggtggctcacgtttttaatcccagcactttgggaggccgaggtgggtgaatcaccagaggtcaggagttccagaccagcctggccaacatggcaaaaccccatctctactaaaaatatgaaaatcagctgggcctggtggtgggcgcctgtaattccagctactcaggaggctgaggcaggtgaatcacttgaacctgggagcctgaggttgcagtgagccaagatcacgccattgcactccagcctaggcaacgagagcaaaactccatctc

SEQ ID NO: 162616 - DNA, 397 bp, Homo sapiens
tcatgatccacccgcttcggcctcccagagtgctgggattacaggcgtgagctgctgcgcctggccattaatttttgtatttttaatagggtttcgtcatgttggccaggctggtcttgaactcccaacctcaggtgatccaaggtcttaaacttctgacctcaggtgatccgcctgccttggcctcccaaagtgcctggattacaggcatgaaccacctcgcctggcccctttgtattaactctaagcccacccttagaggggaatgaacaaagagaaactacaacctatacctcttcccatatccctccgaattaatgacaccctcttcctttctgcatgcatcttttatggccttctatgatgcttgccagttatggatttgtatgtctctgct

SEQ ID NO: 162617 - DNA, 183 bp, Homo sapiens
tagagatggggtttcgccgtgttggccaggctggtcttgaactcctgacctcaagtgatccacccgccttgtcctcccaaagtgctgggattacaggcgtgagccactgcacccaggccagttctttaatttactctctagtgtaggcgctctcttaaaactggattatatatagaagtgttg

SEQ ID NO: 162618 - DNA, 501 bp, Homo sapiens
ttctaggtaagcatatactaaacaccagagacacaaatgagaatcaggaacaggcatggccctggccctcacggtgaccacagtcttgaaggggaaggatgacacgcacagaaacaggaagccgtagctgagctagtgtctaccacagagaggcacctggtgtcatgaaagcagataacagggggttgctgtgactgagtcagtgtggccagacgtccctgaggatgtagtgactccactgtcagatgagaccgtgaccaggtgaagaggcagggagagggaaaatctttccaggcagaaagagcaggatgtgcaaaggccctgcggcaggaaaagagcaaaggaagtgcaagagcctgaaaatggccagagagaacaagtgaacatgtggataatcacagcaccgacctcatacaggactgctcaggatacccaggacagagtcctagatgcttgaagtcatgataagtatccagaatgacacagaattccagccaggca

SEQ ID NO: 162619 - DNA, 179 bp, Homo sapiens
tttctaagaagactggtgggtaggggggtgatggctgaatctttaccatcacctattcttagggcatgagggagggagtgttaaaatatagtaagtatggaagagacaccaactaaatcatgtacctacagatgagatatttaatgcaatgcagggtctctgaaaaccccagaaaagtg

SEQ ID NO: 162620 - DNA, 362 bp, Homo sapiens
tgccggaattacagatgtgagccaccgtgcctggcctgttatttcttttcttccctgtaggttcctgactgcctcacccattatctttttttatctttcttttgacagggtctcactctgtcacctaggctggagtgcagttgtgcaatcacagctcactgcagccttgacctcctggactcaagcaatcctcctgcctcagcctcctgagtagctgagactacaggcatgcactactacacctggcaaattttccttttgtttttctgagacggagtctcagtctgttgcccaggctggagtgcagtgacaccatcttagctcactgcagcctccacctcctgggttcaagcaattctcct

SEQ ID NO: 162621 - DNA, 284 bp, Homo sapiens
ccaaagtatatgtgtctcttatccaagggttctgaagccagattcatcagcttgacattagttagccatccgccaaggcagagagccttgcattgggaagaggcagaaggtggacgccagagacatagaagatgcaacctctgctcaaaaagagctttaggcttatttgaaaataagtacacactttcaacatacaatattaaaaaaagtgaatagtttaaaacctggtttattggttttcaactagccacttttgaagaaacggtatacgtaatggcactcag

SEQ ID NO: 162622 - DNA, 179 bp, Homo sapiens
caagaatgcaaagcgctatacctcattcctagagggcctgatttattaaagccaggatggaggctgggcacggtggctcactcctgtaatcccagcactttgggaggctgaggctggaggattgcttgagctcaggagtttgagaccagcctgagcaacatggcgaaacaccatctctc

SEQ ID NO: 162623 - DNA, 296 bp, Homo sapiens
cctggacggggccgctggctccagggtttcagctggggagggggctgtgcgtgtgcagggagagcctacccatgtaatgggcatcccgggtcttaccagggagacagtcgtggtcctgatggttttccagtgtgcccatgagaagagtgaggctcagagaagtgcagcacgaagtcagggtcacacagctcaagcggtggagattcggactctgtcccctgtcagccacacctcgctgctgctcctgggtcccactttccaaccctggcatgttggggtcttggtgacattttgtg

SEQ ID NO: 162624 - DNA, 223 bp, Homo sapiens
tgctaggattacaggtatgagccagtgtgcccagcctgtggcaaagtgcagctggacaggaaaatggctcaggtttaacttccagcctcaatgaaaactaacatgaactctcatccatgcaccaaattaggaacactcttaccttgactcttagaatgtgtatttttaggaaaaggcccaaaaagtagtttaggacaaagaacccagaatatgggctcctaga

SEQ ID NO: 162625 - DNA, 322 bp, Homo sapiens
gctacaattttacttggccagagggactatgaacaaaaaagggtcatttcatccagcttccattttaaggcaggaggacttcttaaaagatttaactccattcagagtaaccagcaggttatctgatcctcaactcccttaacgtgggggtggaggacctgattccctagtcagaaaaggccttttctgaatatcagtatcactagggaaaggatgagggggagccaggagtggtttaatggatcccgcaaagcctgatgggtaacgacagcatgttaatttgaagaaataaactgctgcaacagcagcctaagaagacaaa

SEQ ID NO: 162626 - DNA, 148 bp, Homo sapiens
ggaacacacagagaggggcagagcacagaaccaatctctattaccaacaactagccagggtaagaactaccaaccacattgttatattgaatcatgcttcatttccatttgttaccgtaaaattcagggaagcaccttcaattctttt

SEQ ID NO: 162627 - DNA, 367 bp, Homo sapiens
caagaggtgttcggtcgatctagaggacccgtcaccgcgtggtttatacttttattacataagtttatatctataagcaataaatataattgttttgcaaatttttaaagtttattatagagatggatcatgctgaatatactgcctcttgcttttttcattatcagtactgttttggagatttatttatgttggcacatgtggctctagttatttcaactgctatatagtattcctttgtataaatataccacattatctctccattctcctgtggtggacatttagttggtttccaattttttgttcaaacaaggttgcaatgatcattcttctacatgtctcttgtacacatgtagggatattt

SEQ ID NO: 162628 - DNA, 279 bp, Homo sapiens
gctctacatacatcttaaagaatgggttcttaaactcaaatttacagcccctctttcccagaagcccctaaaaacatacccttgaaaaataccaaatgttgtattcaggacagtgtctaggccataatcagatatttagaaagtccctaagtgaagaggcattaagaaacaacatgaggtatagttctattagatgacatcctggtggctttattcatttagtgctatactaaggatttctcatgtttttacattgtgttcataatatgaattacaaca

SEQ ID NO: 162629 - DNA, 226 bp, Homo sapiens
gaaatgaatattttatagtttctaaggtaattttacatgtaatgctcatgatttcatgagttaggacaaaatctttgatctttttgaataagaaaagtgaggccccaggggttggcatgggggacaagtgacttgtctcaaatttcacagtttggtagagggcaggagctcaactccagatctgttctcttgccaaaaaaggaatacaatcttatggaaagacatc

SEQ ID NO: 162630 - DNA, 346 bp, Homo sapiens
acccattcgcgaatgcactagaaataaattttatcttcatgaaatactggcaggtatccctaaaatgatttgcagtgcaggatggctccatcgggccgggcgcgcctggctggatcctctaatttataattcctccagatagagctgcttatagtttaccaattcactgttattaaagtctgcttgtgaagttttcattttggagagtttggcttccagttctttaattctgagtttcatctgactttttagtgaagtaatattgtcttctcttaactgctctaactcttcttgagacgctgctcatgtctaaaatgagcatttaaaagagacattttaatagtaa

SEQ ID NO: 162631 - DNA, 561 bp, Homo sapiens
cacccacctggcacctacagccctccttccaacatcctgggcagggaggcgctctcagggggctctcgatgccccacactgaccatggccccaggatggccacttccttcagccagctgtggctccctcgggaacaggagtggaggagctggaggcgggggtcctgcccacctgcacgttgctccctaaccactcccgcagcagacgcccaaggcccacagggacccccagccccctgcattgctgcagcaaccacaggtccttccagggccttcgccccggcccagaaagagggggcatccgccatgcaccccaggggctctgggagctgcagctgtgggcagactcccaggccctggcaggaaacccgctggctcagcacgtggttaaatcagctccccgggcactgcctcgtgacttcgcagcgcctgctcacggtccctggagacggaagctccgcagggctcatttgttctccattagtcacctgtcccacccagaccacaggtgctggacagagacccagccggtgcaccaagcagggctggccaaagtgcccag

SEQ ID NO: 162632 - DNA, 195 bp, Homo sapiens
tgatcagctcgtccattactacagggtatctgggctccatggccagaaatcttcccagtgccactggttccgctgcagctgccacccctgccccttcacagagccctttcttacccagagccagatgagagaggtgatatggcagaggcttttctcccagcttccagcaacatcctctgaacacagcacaggcgc

SEQ ID NO: 162633 - DNA, 330 bp, Homo sapiens
tgaggactttggctggactgacaggccgagcttgttctgtcacattaccacgaatagtactgtaatggcacgctctcacttggatctgggccccgtctcagtggggaggggaggaaactgcctttgcccagatcaccataaaggagacagacagaggagttcatgagtgaaaggaggacttcctttatctcatggaaaattcaaacatactcaaaaacaaatagtctaatgaaaccccaggcatggcagttatcactgattaccagtcttgtttcagcagccctcccccggcctccgggagcaaatgcagagaatattttagagtgtacc

SEQ ID NO: 162634 - DNA, 597 bp, Homo sapiens
taacttactgagttaggtgctatttttttttcaccttaacacagagattggaaagtgtcattaaacaaatcagtccatccctctctagtttaaagttgtgcttcctcctagaacctcacagttctgccattttaacaagttaggtccaaattgctggaagaaaatcctttacgcttttctgtaaaaagctactctcttcaaatcagctcaaaattcagaaggtagaaggctttgttcttgcaggatctccaggtattccatttatcttagcacaatgctgtatacaataattatcattgttattatccttaataatactatagtttatatagcatttgaattttacaatttgcaagcaaagttatcacaagttagctatgaatggaagtttaacatacgtttccattatttcactaactatactgtcccttgaacataaaagaaattattcttctctagtttcatctcagtagcattgtgttatgccaatagcagtgaggaataatccccaaacaccattctcttgccttgttaaacatacattttttctttattttcttattctctgtttgaatatggagaaaaatcacctatcac

SEQ ID NO: 162635 - DNA, 132 bp, Homo sapiens
agaatgacaatgaggccccgccaggcgggtctcatccaggcaggcctaacaagattagattttcataaatttcagacagcgccaattcctaattcctcggtgtgcggccaggaggccagacagggccccatg

SEQ ID NO: 162636 - DNA, 387 bp, Homo sapiens
ctccactcccctgtaggtactcatccaaggcgtttaatatatgctcttgaacaggtacatgtctttataaaacatgtaaaattgctttctgtgtgtgtgttattgatttatagaaacgatattgcacaaaggagcttgtcctgatctttccattttcacctatgttctcaatatctatccatgttggttgtacatctagcttattatttctaacagctgcacagttaactccatcaagataggctaagttatgcagcggtaatagcacaaaaatcttagcagcttaaaattatgcaggtttactgcttggctccactacatatccatcccgttaataagagttttgctttggagacgtaggctgatggagcctccaccattcaacac

SEQ ID NO: 162637 - DNA, 531 bp, Homo sapiens
aatagaagtacgtcttcacaggattgttatgaagattaaattaattaatcattgtaaagtggttatataagtacttgttaaaaaaaaaaagaataattgattaaagtaaggtcctaaggaaaaaagaggaaatggggtcaagagcacaggcaactcagccttaaacaggaagaacaataccctgcccaccaagtcttaagatagcctgagtacaaatatggctaattttaaaggtagagatagaaagttgagacaaggtgacattctcagaagatggatttttttttttttttttttttttttttttttaaacagagttttcgcttttgttgcccaggctggagtgcaatggtgtgatcttggctcaccacaacctctgcctcccgggttcaagcaattttcctgcctcagcctcccaagtagctgggattacaggaatgcgccaccacacccggctaattttgtatttttagtagagatagggtttctccatgttggtcaggctggtcgccaactccagacctcaggtga

SEQ ID NO: 162638 - DNA, 281 bp, Homo sapiens
atgcttaggtagagaagtggaaggatcttattccctaaagacaccgtcctcaattttcatactgtagagacaatgagctctaaaagatgtgaaagtcaagtgttctcagagaaaggggtgcttatttctacatacaaagggcttaggtaaagttatctgtggaagatagcatttgagcttttgaagaaaaagaaggatttagacatgtaaaacaaagggggaggaggttttgctactagcaatgaggtggacaaaatatttgaaaatctcttttaccaata

SEQ ID NO: 162639 - DNA, 369 bp, Homo sapiens
atttaccaacttcatcatgttggtactgggcatctgggcaactagagtctctgaaatagagggggaagggggtcgggggcagggacgagaaaaatatttgaagaaataatgggcaaaaaattctcaaacacagtaaaagctataaactcacagatccaagaagcgcaaatcacacaataagaaacatgaagagaattacactcagacacattataaagaaattgttcaaagccagtgataaagagaaaactgtaaaagcaaccagaggggggaaaaagacgttatgtacatggcacagagacaaagatgacatcagatttctcactggaaacactgcaagcataaaagataatggaacaaaatatttaa

SEQ ID NO: 162640 - DNA, 508 bp, Homo sapiens
gtggctgaatttttaaagtacctctagagttatgattggacaatctgtttctgttttactataattactatttaatttgtactctactaatccagaattttgcataaacatccctcctatgattcctgcttaatagaatattgaaaatcatttcctcattgaaaatgttttgagctattaagaataaaatactctgttttcagagcagtttttacattttccaaactaagggagctgaaacagtaaagattcttttagcttgcctttcgttttcaggactagcaggttcctgtaatataaaggtctttggggtttttagtgcaagcctattgagaactgtaatttatttcacctcatttcacttataaatgatactattttacatgttccatgtaaaaggaaaaaataatatttccttaaaaattattctatacattcctataatttagccttgtgtgtgatgatgacctttttctataaaagaaaaatgtatgtaaatgctggtata

SEQ ID NO: 162641 - DNA, 482 bp, Homo sapiens
ctgtagcttaaacaatttcatgactcaacaactaagggttagggatacaaagatgaataaaatttgatttctgccctcaaagcactgagaagccaatggaagattttagagtaactgggtgttgcaattacggaagtatgaaaagagtaagtgctcccacattccttgctatttcctggaacatagttctgccttagggctctcgtattttttttctggggcacttttccccccattatctgtttgggtcactttgtcacctccttcaggtctttgttcaaatatcctcagtgaggctgtctctggccaccctgtttaaaattgcaaagtctcttgtccaaccccactgcctctatctcagtttcacacctcctgctccccatcctgcttcatttttttcatttttttccatggtacttaccacaatcaaaaatatattttctttttttgtttgttttgttttttctgagacagagtcttgc

SEQ ID NO: 162642 - DNA, 497 bp, Homo sapiens
cgtgacaagaaaactgctagaaagtagagcaaaaagaggccgggcgtggggctcatgctgtaatcccaacactttgggaggctgaggcgggtggatcacgaggtcaggagatcgagaccatcctggctaacacggtgaaaccccgtctccactaaaaatacaaaaattagccaggcgtggtggcgggtgcctgtagtcccagctacttgggaggctgaggcaggagaatggcatgaacccaggaggcagaggttgccgtgagctgagatggcgccattacactccagcctgagcaacagagtgagactccatctcaaaaacaaacaaacaaacaaaaactcctagtggtttttatctgtaacgttcttatatccagggcctctatgggctggtgttcaggttctatactgcataaggattccatatctaagggaccactttccacattgtagacacagcctagactcctattaataatgggttacaaatgtatcttt

SEQ ID NO: 162643 - DNA, 123 bp, Homo sapiens
atgacatacatatatatataaaataatattgtctagttgtaaaaaaacagtttagtaaatatttatgtagttactacaaagagacatccaaggtatgaaaactgaagttgtagacagcatgat

SEQ ID NO: 162644 - DNA, 363 bp, Homo sapiens
ctcattctgttgcccaggatggagtatagtgttgtgatcccagctcactgcagccttgaactcctgaaatcaaatcatcctcctgcctcccaggtagctaggactaccgacacacgccaccacacctagctaattattttttgtagaggggtggtctcgctatgtttctcaggctggtctcgaactcttggcctacagtgatcctcccacctcagcctccaaaagtactgggattacaagagagagccatcgtgcctagctgaccactgaggggttttgaagaatggaagtggcattgctgtactaaatgactagagaccccagtcatgtggcccagaactgaggttaactgggcttagaaag

SEQ ID NO: 162645 - DNA, 348 bp, Homo sapiens
aagtaacagcaatacaggcatgttatttagagatatgtaagtaagccaggtgaggtgattcaagcctgtaatcccagctactccagaggctgaggcgggaagaaaccaaccttagcaacataaagagaccctgtcccaacaaaacaaaacaaagggggcggggagagaggagtcacaggcagttcacccacacctggaaaatcgatgacttcatggagaatgaatgactcggggggattcagatcatgaagtcatgagaagaaggcctttcttcccagggatgatgtttctcagtatcaataatcagttgtgggtttttttcttctatttcttccagcagcttattga

SEQ ID NO: 162646 - DNA, 195 bp, Homo sapiens
aagtaacagcaatacaggcatgttatttagagatatgtaagtaagccaggtgaggtgattcaagcctgtaatcccagctactccagaggctgaggcgggaagaaaccaaccttagcaacataaagagaccctgtcccaacaaaacaaaacaaagggggcggggagagaggaggggtaggtaaattactaaatgta

SEQ ID NO: 162647 - DNA, 149 bp, Homo sapiens
aacgatacggcagcgccgcggagcctcggttggcctcggatagccggtcccccgcctgtccccgccggcgggccgccccccccctccgcgcgccccgcgcgcgcgggagggcgcgtgccccgccgcgcgccgggaccggggtccggtgc

SEQ ID NO: 162648 - DNA, 418 bp, Homo sapiens
tggatcagggagcataaggacttctaaggcacattacatacactataaaaagggttcttaatgctgtggaagagaacttcagagagaacattatgagggtctggaaggattacagttgaagatgatgccatcatttttatagaaaaagtcatgaaagccatcaagtctgaaataataaattcctgttggagaaaactctccaggtgatatgcatgatttcacaggatttatgacaaagccaatcatgaaaaagatggtagatatggcaaaaaaggttggaggtgaaggatttcaagatacgaattttggagaaattaaagagtcagtagacaccatgatagaggaattaacagaagatgactgggatggataagagtgctttcaaaccagtgccacaagatgaagaagacaacacaga

SEQ ID NO: 162649 - DNA, 213 bp, Homo sapiens
ctaaaatacacatgaggattttattaagccacactgatttcaaaagcataccagttccattctttacttaaaaaccatcaaatccactatgaaaaagctgagattagtgcattgtcctaaaacaacccatatttacttctgcaaaaaactggttaaatgatgacatattagattgctcatgtcatacatatggggatcctcttagagtcggac

SEQ ID NO: 162650 - DNA, 152 bp, Homo sapiens
ctcctctgtttacctcagtgtgtgggacaaatactatcattttctacttgtaatgatatgacagctatcaaaacattagtaagaaaacaagctccaggctcagaaagaccagaaagattctctccactcactaaccaggagaatctctctac

SEQ ID NO: 162651 - DNA, 404 bp, Homo sapiens
gtgtgtggagctgtgtgtgtgtgtggagctgtgtgtgtgtgtgtgtgtgagctgtgtgtgtgtgtggagctgtgtgtgtgagctacgtggaatcatgtgagggaaccgtgcagagctctctgtgcagctacgggaaagtatgtgagaaaccgtatgaggaattgcgtggggaactgtgggaggatttgtgagaaactgaatgtgactgtgtggagaaggcggggaagcaggcgggaagtgtgtggggaatcgcttggggaaagtgtgcgctcgtgtggggaaccacatgggggctctgtggagctggagctccgcgtactctgaggacctgtggaaatgggagcggaagtgtgtggaggggtgtggggccgcgtgggaatcgtgtgagggacgccgaggagcca

SEQ ID NO: 162652 - DNA, 267 bp, Homo sapiens
agagtgaaccctcatgtagactacgggctttagttaataatggtgtatcaatattggcttctcaactgtgtgggacatttgctacaattgacaagccaattgaaaaatagggaaaacagggagagatataagggggtatgtggcaagtcggtacttttcactcatttttccccataaactcctcaaaatataaagtctactaattaaaaagaggctcatttctacaagtttttattatggaagaagcccaatgttacatgacagtag

SEQ ID NO: 162653 - DNA, 515 bp, Homo sapiens
ttgggaggacaaggcagggggatcacgaggtcaggagatcgagaccatcctggctaacacggtgaaatcccgtctctactaaacatacaaaaaattagctgggcatggtggcacacgcctgtagtcccagctactcaagaggccgaggcaggagaatcccttgaacctgggaggcggaggctgcagtgagcagagatcacaccactgcactccagcctgggcgacagagcgaaactccatctcaggggagcggggaaatacctgaaaattgggctgggcagatattttaggttcctgcatactgtagtggctcacgcctgtaatcccagcaccttgggagacctaggcaggaggatcatttgaggccaggaatttgagaccagcctgagcaaggtagcaaaactgtctccacaaaaatgaaaattaaaaaaataaaagacataaaactaaatacaacatggtctcttacactggatcccaaaatagcaagaggacatttgtggaaaacttgatga

SEQ ID NO: 162654 - DNA, 152 bp, Homo sapiens
agtgctctttggggagtgggtttctgggtaaatgtaagagaaggctttactttttgcttataaattttcacattatttgaaaatttcatcacacatgtattatgttgggcttacttttttgtaaaataaagtatgtgtaatatatcattttt

SEQ ID NO: 162655 - DNA, 438 bp, Homo sapiens
ctggcaagagcttaggacgagatatggagaggagactgacgggagccacaggccagctcttccaaggcaggctaaggatgttgaggtggttctgcggcgctggggagcattgcaggcttgtgtgggagtaggaacaggtagaggagggggcctgcatccgcagtgccgggagcggcgcaggtatcggggcagggatgggggatggctctcgttgccggcatattattgtgcggtccttcggctaaggtgttagcagagctggtgggggccaggttggtcacactagtctcagagaaaggcctgaggggctggaaagcaagtgcagaggcgggctattgggacactgttgagtgtcacaaggacatgggttcgagttctgcctccaccctgaccagcttcaggtttctaagaagttgatctttgttaggtttaaaaaaa

SEQ ID NO: 162656 - DNA, 372 bp, Homo sapiens
tctttgctctctcgggtttactccaccttgagtccaggccaatcagagcagacgttgcttctctgtctcccagggccatgagaggacagacaacaggacgctgacctcctgagaattaagcccatgaaccccagccagtgacactcattccccagtggtcaaccttccgcagagttcagaaatacttacccgagggcaacattttatgcaaccattgttggtccaagtgggcagcagcagatcagggcctggaagcccagcatccagtcacctattctctgtgcaagagccctcatctagaaacctggcactggaaagactgtgacctttgcttggggctttcatagtcttacagcatacacaccagaagga

SEQ ID NO: 162657 - DNA, 632 bp, Homo sapiens
tctactggcatgttcccaggtaacaggtaacttctatttgcaactgggagttcatacaaaccaacagaaaaacttgctttttattttcccaaattaatccttttaaaagcaaactgaatagaagaaaaatgagtaagcgctgttattgcccagactatgctgcaaatcattttcaactctgttaaatggatttaggaaggaaaagaaagatcatcacttcagactccagtaagataaaaacagaaggcggctagaaagaacttaatggaaagggtactataaactagaagtctatttgcaaaactagactgttggctggttctcctaaaaccaggctgttttcataatgagttagtttaacattttgtctttatgtgtaagcacccctttccttggtgcagtcacagccaaactgcaaacagaaatcgagaagttgtgagctccagatttgagagccacagagagtttgtgagatcaaaaaatccactctcagtaaataaatctgagcacctaaatcacacagtcagctaaaggcaagggaaccagagggaaaaactccaaaggagtgatctcttatacaatggcttccagaccccactcaggcaaagaatcgaccggggatcctcagagtc

SEQ ID NO: 162658 - DNA, 172 bp, Homo sapiens
gtggggggtgaggactggcagatcccacaaggccttgtagaaatcttatacagtaccttgcccgtagtaggtattcaataaatgtttgcccagtcatcttttgccttctaggattatcatcaaatagcatttatctgtgtatttattggagttacgtgtgcttttattccag

SEQ ID NO: 162659 - DNA, 265 bp, Homo sapiens
gcacattcaagcaatgctggagggaatgtaaactgacacaatttgacatatctaagataatacacaaatgtatttttgtgcctttattatcatagatatgatagtatctgtgatattatcatagacatcatgataatgtcataatattatcaaacctggcaattcctctcaagaaaattatcctaaaaatatacttaaacaaatacaaagagacatgtccacaagaaacattctatgtggtattttttataccacaaacaaaact

SEQ ID NO: 162660 - DNA, 559 bp, Homo sapiens
cccagggtttccatgcttccatgagcagatgatgactaacacagtcggggcagtcagatgcagacagacagtggagcccacttactgctcagtgcttgttaggagacaaagatatgaaaattattaggacaaggaatacggctttatgaactggaagtttaaagacctggccatatatgctgaaacaggtaaagctacctagaaaaatttccttctctcactctcttctgagtcttctctaactgcaaattatgccacggttctctgtctccaggcttgaccccacagaggcatcactggtttttaagcagcaagtgtcaaatattttgcagaagagaatttagtgaggcttttatgggcaatgccataaggtccagagactttctctgactatattcattttaggtgactcattttcctttcctgatttaaagtgagtcctacagaattaatgggtaagaagtagggggatgtgggaagtgaaaagggataagcaggtaagtcattgttaagtcaccagccaattgtcatgtttcaaatattaacctatggatactag

SEQ ID NO: 162661 - DNA, 159 bp, Homo sapiens
tgctacttacggagctttctcggaggagcccaggacaagctttgttctcctgccactccccttggcctcctcttccttccctacaccgctgtccctggccctcccagcaggacgtctcagggccacatggattgccagcccggccagcgtatcctctta

SEQ ID NO: 162662 - DNA, 320 bp, Homo sapiens
actacatacttccgaattaatatattaatacattgctgtatttttgagacggagtctcattctgcacccagggatcatgcgtccctgtcgtttcgagcaccttgcctccctcttgacatcggagcctggaaaatttctgtgccatggctcagcgtcatctgtcttgttaatgtcagagccagaacacgaaccagctctggcttcccgtgggaccgggctctcgcttgtgtgaccacgttaatagattccttggaagaatgatctaaggaatttggaccaaatcttccaacaagaaataaaaacagctgccatctgttgag

SEQ ID NO: 162663 - DNA, 383 bp, Homo sapiens
aaaaagtggcctttctattaaacgtgccctttgaccctcatgcccttggaggtcggtgccagcctggagatgggataagattgtggttttccttctgcctttttaacatctgttgttacagtccatttgttgaaaatttaaagaaactgttttattccactttccctcagcatttatgtgtgtggtttcagtagctctgtggctatatgtacgaacacgtgttatttttccaattggacatgtgataattttccaactggaccttgccttctattgatgtatttatttagcatcttccttactccctccttgaaaaagaatcactcaaaaacaaataaaaacagccgtaggggcctaatacagtgctagacatacaagaggta

SEQ ID NO: 162664 - DNA, 524 bp, Homo sapiens
tgctgaggttgagaagtcctgatgcagaggctaagcagggatttctttcatcaatgactttgtaggatccatagtagattctcaatgaatattagctaagtgaatgaatgaatgaatgacatttacaagagaagcatttgaataacccagaaatcctgctcctgagttgtagcttgtttacataacccaaagaagagcaaagggaaacagtttctattagattggtgtcctgtcgctacccaatgtagtgagataggcaggtaaggagagggtattttggcaaagggaaatactgtaattttctgtaattactgtgcatggaaatgacatgtgatgtgtgtgatagtttgtgcagatacatggagtggcccactggcattaggtatgaattatgtgactattgtcagacatctgggtatgtattgttttctccataagacagaggaatccattctaagtatttagcacaaaagcaacgcatcttggcacttttctttgtctaatgaagcatccaagaggttcag

SEQ ID NO: 162665 - DNA, 269 bp, Homo sapiens
tagttttaactaatttagatcatagacatttgcattaatgatatgaaacccataccaattcactgttgggcatgaatgttatagtatctaccaagagtaaactgctcctgtgacttacattttttttttcttttttgagacggagtttcgctctgttgcccagactggagtgcagtggctcgaaagatgggtcagatggacataagatcattagacacaagactaccagcagcaactgaaactaaaaatttttatttttgttttttttt

SEQ ID NO: 162666 - DNA, 307 bp, Homo sapiens
ttagacatgtggagtaatttgaaagatgggagggagggagttgtctggctgctctaagtgaattggcaggaaggtttgtgtgaaaggtcccattcaggctgacaggcacaaggggcagaccttttgagatataatgtgcttctgattgctggctgacaaggtattttcttttctgtcttctaaaatatgcaagatgtacccatgttgtgatttacaactgggttgggattcagccacctgtgaacctttgcaagctccgtagtgagctgccaatgagaggaaagatgttctgatagacgcttccaca

SEQ ID NO: 162667 - DNA, 1192 bp, Homo sapiens
tcagtaactattagctgttactgtcattatctgtgttaacctgccagacaaccttatatgggttgcttttgctttcacacctgtatgatagtcatggaaactgaagcccagagaggttaagaaatttgctaggatcacaccactaataagcaacagagccaggattcaaacccaggtgtggctccagagcccatcctcttcccactgctaccctaactcaaactgccacatgctcgtgtcctttcagtggggagagtggttcattagagggggttgctacttttattttggacaggccagttctccattctgcaggactatcccatgtattacaaacagttggcaaccttgccctgctcaccaaatgggagttgcataccagtattccccagcttgtgactacagagatgtcccagtatgtttctttctgcacactcttggggctctacctctttttcaaaatattctcccagaaggaaggaactcaccttgaacttagctttctttgaagggtaggaaacctggaagacgtacaaaggagggagaggtcaggtgctagaaagtttgtgcacattgagggcatgggcagaatctgctcccaaaagcattgaaagccaatatgaggccaggtggtggctcatgcctgtaatcccagcactttgggaggccaaggcaggcggatcacaaggtcaggagattgagaccatcctggccaacatggtgaaaccccgtctctactaaaaatacaaaaaaattagctgggcatggtggtgcatgcctgtagtcccagctactcaggaggctgaggtaggagaatcattgaacctgggaggcggaggttgcagtgagccgagattgcaccactgcattccagcctggcgacagagtgagactccatctcaaaaaaaaaaaaaaagccaatatgaatgtggcttcattcttctaggcacactggcaggacagtgtggtagtcaggagcacagggtcaagaggcaggcagccttgggacaaacacctggtgctgccagctctaatatgtgtaaattactcaagctctgagcatagttcttctacctataaaatggagagactacaggtacctcctcagaggtgtggggagggtctagtgagccccaggctgtaacatccctagagcacagtgccaagcacacagtgagcctagtggctggcc

SEQ ID NO: 162668 - DNA, 161 bp, Homo sapiens
tggttctaggagaaaggctgtcccctgctgcagagctgatccgcacccctgtgcaaggaggctctgggctggcgccagggccccagtcatagctgcactctgcttcctgcaccccaagaacccataggtcagcaggggagacagacactggaacgaaggac

SEQ ID NO: 162669 - DNA, 208 bp, Homo sapiens
gtggaaaccaggaacactagaggtcctaagacacccaggacagtctgcacggccaaagacttctgcattcctcacaacttcctcaagtcctgctgaatattcacgtgggtaaaaaacctgtttataattgtctgagcgtaaaacctcactcaagttattacataggcacaacgtatgtgttacaaagtatgtgttaaacaggaagact

SEQ ID NO: 162670 - DNA, 378 bp, Homo sapiens
gtgggtaggggcttggtcgtcttatctcacccacagaccctgcagggctgcagcagaactctagagagtgccttttacatggtgccatgtggcccaggtcacagcaagggattacttctatgatgactaggaggtgtgggagggcacgggcatagcttgctcagtaggtacctccaggcttccctcgtctctctccagatacctgcatccattgcatggctggaggctggaggacaaggcaaggaggaaagggggaggggcattacagaccttggctgtgtcatccaaaggggacctaaagccaccccattccaagacaccgttttttgttttttttgtttatttgttttgttttctttagacagagtctcgctctgt

SEQ ID NO: 162671 - DNA, 525 bp, Homo sapiens
attgaatataaaataatcctaagcaaatgtaaaagaaccaaaatcataccaaccacactctcagaccacagtgcaataaaataggaaatcacgattaaaaaatcactcaaaaccatacaacgacatggaaattaaacaacctgctcctgaatgatgctcttgaatgatggttaataatgaaattaagacagagatcaagaagttctttgaaactaatgagaacaaagatacgtcataccagaatctctgagacatagctaaggagtgttacaaggaaaatttatagtactaaatgccaacatcaaaaagttagaaagatgtcacactaacaatctaacattacaactaaaagaactagagaagcaagaggaaatcaatcaaatcaatccaaaccaagaggaaatcaaccaaatcaacccaaagctaactgaaagcaagaaatagcaaacatcatacatgaactgaaggaggttgagaccaaaaaaaacattcaaaagatcaataaatccaggaactggttttttg

SEQ ID NO: 162672 - DNA, 239 bp, Homo sapiens
cccgtgacaagacaaagcaaaagcaggccagagttaaacaggccccttgggtcccttccttcatttcataaatgggaaaatcaaggtctgggcagggaaagggactcagccaaggccacatacacagcacactgatggccgagccggggttaggactcccagcataccctgtagacttctctaataatagataggctgcttggtttttctttattaagggttggttacacattatctct

SEQ ID NO: 162673 - DNA, 417 bp, Homo sapiens
gctgctgctaccatgatatgtgcccagtgggagtggctagaaagatatatcaagggctccaactgatcacagaatggagaagaagggagggggatattagtgaggaagggtgcaggaatagtctgtctaaagttagcttatctaaaatctgaccttcctttcgagttttcccatctagttggatgtgctaatttttttcctgccaagtttttgcactttaaataattttttaaccaataaaaactaaattcagtgagcccactgtgatggttaatactgagtgtcaacttgattggattgaagaatacaaagtattgatcctgggtgtttctgtgagagtgttgccaaaagagattaacatttgagtcagtgggctggggaaggcagatccacccttaatctggtgggcacaatcaa

SEQ ID NO: 162674 - DNA, 260 bp, Homo sapiens
tgatgatgctgtctagctctccccaccccataaatcatctgtttagcataagagacagtaaattccagggtttttaggtttctgtaccagtaactaggggtaaagatcaaatatttattactacaccacagcatctactatatattatagggaagaaaatatatctacacatcctagattcatggctaagcttcccacacatgctgtttctcagatttctttagcttaaaatattcagtatgtcacagtgtcatgttttt

SEQ ID NO: 162675 - DNA, 439 bp, Homo sapiens
ggaacccaccttaacttaaaaaaagaaaatgtattggcatatgtcactggaagcccaagggctagatccaaggggtcatacaatgtcattgagacctacctctgtggtaccacttctgagatgacttcaggcataacagacaggctttctccaaggtgaagacccccaggttcagacggcccttgggcttaccagccctattggggcactccttttttttccactcaaaagcactctccttggttctgtttgcgtcgtgagccgatccctgagccaaacactgtttccagggggtgaggtacctagactagaatcctgggcctgggtccctcacatgtggcacagagggaatggcagtgttaccaggtttggagcaagagtggagacagttcctgaaaacaaaagttgccggacaggcaaaaaataataaacaccccac

SEQ ID NO: 162676 - DNA, 1278 bp, Homo sapiens
tacttagagggactgatttaatttcccaaatcaaattgctctgcatttcttacaactattgcatctactttcaattcagaaaattaagacattttaattttattctttttattactgccaaacaaagcattaggagtactcttaaaagaatcataaaatgtatagcaacactaacagaaggataaatatggtaaaagagctttaaaattgaagttagtgatagaaatagtaacagaagtagaagtagatgctagtgcaatgtcatttagacatttattagttttttgagacggggtctcgctctgttacccaggctggagtgcagtggcaccatcatagctcacttcagcctcaacctgggctcaagcagtcctctcatctcggcctcctgagtagctaagactacaggtgtgtgccaccacacctgactgattgattgattatagagatggggcttcactatgtttcccaggctggtgtcaaactcctgggttcaagccatcctcccaccttggccccacctaagtgctgggattataggcatgaaccactgtgcccagcatgaaacactgtgcccaggcttgaagtaattcatgattgagggatattgaagaaggagtatactaaaacattgggttgcaatgtcaaaattatagatacttgtacttggatagaatgttccataaatgaaaatattcataatcacatgtagcataggagttatcaaaagggcactatggaaaaagtcatgattatatcatgaaattgttcaaacatatgagaagtagaaaaaaaatcatgtcagtactttcatcacccaggttcaacagttttcaagctcttgctacacgtcatctttttttcttttttccttaaattattttaaatgaacaacatgtcattttacccttactcagtttgggtctctaagaaatacaaaaataaccacggtgacatcatctttattttctggcacttcagtcaaaattaaagggaaatcttttggcaccatctatacacagctcataaattaaatttcccagattgatttacaaatgtctttttatagttgatttgctctaatcaggataaaaacaagatccactcattataaacagtggttaatctcatcagatgctttaaaaaaattatgaacatcttataatagtttgatacatttatcacaattagtgaaccaataccaattcattgttattagctaaagtctgtactttattctgattcctttagttcttacccagtgtcccttttctattc

SEQ ID NO: 162677 - DNA, 368 bp, Homo sapiens
gattacatgcatgagccaccgcgcctggcccctcccaccttatttttaaagagtcttgctctgtcaccgaggctggaaagcggtggtacaatcacggctcactgtagcttcaacctcctgggctcaggtgatcttcctacctcagcctccctagtagccttgactacaggtgcaccctactgtgcctggctaatttttttgttggtttgtttttgttttagaccaagtttcttgctgtttttcctcaggctggagtgcactggcgccatctcagctcactgcaacctcctgactcccaggttcaagtgattctcctgcctcagcctcctgagtacctgggattaaaggcgcctgccaccacgcatggc

SEQ ID NO: 162678 - DNA, 598 bp, Homo sapiens
  misc_feature (28)..(28): n is a, c, g, or t
cgactctgaggactcccccccgtcacgnttacctcaacatggaaagctcttgctaaggtgggaaggtctcagtcctccaaaggaaacgaagttgtggcagccttcttactagaaggatcaacttagtaattaacaaaaatacttaaaataatgaagaggaggtgggtgtaatcaagaactatgattattcaggatctctgtaggagtaaatgtattacttcaaaattctccagttttgcacgcccatgtttattgcagcactattcacaatagccaagatttggaagcaacctaagtgtccatcaacagataaatggacaaaggaaaggttgtaaatacacagtggagtactattcagccataaaaaagaatgagatcctatcatttgcaacaacatggatggaactggagatcattatgttaagtgaactaaaccagacacagaaagacaaacgtcgcatgttctcacttatctgtgggagctaaaaattaaaacaattgaactcatagagatagagagttagaaggatggttaccagaggctaggaagagtaggagaagagtcgggggtacgtgggtgtggttgatgagtacaaac

SEQ ID NO: 162679 - DNA, 265 bp, Homo sapiens
cccattcacctctctaccactaccacctagttcctggtgtcaccccagaaatcttatattacacaagctcaattttctgtttttagcgttcaggcaaaaagaaagaaaagaaaaagaaagaatacatacaggacataatcccaagctctcaaatggcagactcactatctgatgatcttggccttctctgagattctatgaaagtcatgggccctccttctagagcaaaagacacatacttgcaatgctttacaattagaacttg

SEQ ID NO: 162680 - DNA, 502 bp, Homo sapiens
gtgttcatgaattggaagaattaatattgttaaaatatccgtagtacccaaagtgatctacagatttaatgcaacccctatcataattccagtggcatttgctatggtttggatatttgtcccctccacatctagtgttgaaacttgatcccagtgttggaggcggggcctggtgggaggtgtttgggtcatgagggtggatccgtcatgcacatattggtgctatccccttgctgatgagtgagttctccctctataatttaacaagagaactggttgtttaaaagagcatggcacccctcccctctctcgtcttgtgaaatactgactcctcttccccttctgcaatgattggaagcttcctgagatcctcagattcgtgcttcttggacagcctgcagaactgtaagccaaataaaccttaatagaacgatcctaaaattcatatgtaaccacaaaaggccctgaagccggggtaatttataaaggtcaattaaagagg

SEQ ID NO: 162681 - DNA, 630 bp, Homo sapiens
aacatggcaaaactctgtctctactaaaaatacaaaaattagatgtgtgtggtggtatatacctgtagtcccagatactcaggaggctgaagcacaagaatcacttgaacctgggaggtggaagttgcaatgagctgagaccgtgccactgcattccagcctgggtgacagagtgcgactctgtccaaaaaatcctaaaaatacctgttttgaatgatataggtcttttttcttttccttaagtaatatagaagtaatgccttaaaaaagaaaaaaaatcaaaattatcctatgacctaacctccatctcttagcctcagactgtatagtgctttaaaagatctacaaagcattctacctcatttgcatctaaccattctaagaggtggctgttactattatttctccttttcaaaaaatgaaataaattggcttagtgctgtggcacatgcctgtagtatcagcataatgggaggccaaagtgggaggaccatttcaggccaacagtttcacaccagcctgggcaacatggggagaccttgtctctactttaaaaacaaacacataaataaataaataatgttttaaaaaatgaaataaactgatttgtttaaggtaagatgaccagcc

SEQ ID NO: 162682 - DNA, 348 bp, Homo sapiens
tctagagacaggaggggaagccaggctgggcttcagatagaggagagcagggaatgtaaacgttgagggattgggacgttttaggacttcagagtgttggtagattggggtggtggaaagggaggaatggtggctcctctcagtgttcagagatttttaaatggcatttttgaccctggaaatagcttcagataaaaaagtaggtagctgtgctgtatagatcagtgggagttggggaggaggtggtgcacctgcaagcaggatctcattgcatttgaactctagtctgagccaggttgttgatgtgctcagcattggactctcaggtttccttaggattgaatcact

SEQ ID NO: 162683 - DNA, 239 bp, Homo sapiens
tagccaaccaagggtagagtttccacaattctgggctgaaagccacaggactcagcactcattccaggtaccttgctgaagcaagagaaaaggcacccactgtattagatctgggtccctgcgatgtacactggctgtgtgacctcagatgagtcacgttacctctctgggcctcagatttgtcactttttctttttctcattttttagagatggggtgtccctctgtcacccaggctg

SEQ ID NO: 162684 - DNA, 535 bp, Homo sapiens
ggtacctacttttcacaggtatactcaacacttcgggcctcatgcaatcttccactaggagtgcaaggccaggatccttaactctagttgtccaaaccatgcatttccctttgacttgatagaagattcctccctcccaacacagtgattttgagagatatgaccaagcatctcaagatcccctaaatgattattttctgtagtctcccgttttgaaaataaatttgagctaggcattcaaccatttagcaaaaacttggtgcctgtccaatattttgtgaacacatcaatataatattacctatatccgaatactattgttcttcctttgtcagtagattgattgcagtgccttatgttaatacaccttgtttctcccttattatattgtgaaatttagtaagttgttaaaatcagatctaattgattttctccatggcatttggctacaaaagcatctcatatccaaaattcaccacaggagaagaaatccaggtggattcttttgtggcattttcacttgtgtattaaaaat

SEQ ID NO: 162685 - DNA, 311 bp, Homo sapiens
tctctgttgcaagcttttagttcgcaggcacactggttcaagtttaatcaccacaaaaatactgctttgtgtgaaaataatacatgagtagtccttattgcaaaaggttcaaagcaaacagaaggaatacatcagaggcctctttcagctccaccccccagtcccacccccgaggtaacaggtgtggacagttcgtctccctacagtcctttttcgcagcatttgccctatggcgtagtggctgggactgtgggctttgaagcaagatcatctgggttcaccaactacctccactacctacaaaccttgta

SEQ ID NO: 162686 - DNA, 482 bp, Homo sapiens
ttagagagcaagaaaaaggtacaaccctcccggcaaaaaataacggaaagcatagttttaatcctcttcctcccaacgtccttcccgagtgaaaataactgccaagttcacagctagcacacgaccttcccccaccagccctgcctcttaagaacactaggagctgcccgagagtcgtattaacaactctgttcaccaccacacacaaaaaccaggccacgttcaatgagttttactctacctgaccccgtgagcaacacagggacgtgagtgtgctgtcgatggcaccccaagcgatcacaccctccaccacactgcctttttaacagagtatctcactgagtagctcggagcatgaaacagctgcaggggttctcagctcccagcctccgaatgaaagtgcgtgctcaagtctctgaaaaataacaccaagctagctcctttgatggaaaagggatcccccaaaatgacgcagaaggaac

SEQ ID NO: 162687 - DNA, 704 bp, Homo sapiens
aaacaaacaaaacaccataagaatgtcctaatagaggcagaaaaggcatctgacaagccttaaccaatttatgcctagtgttccctttttggaacgctaagcatgtgggaattgtttatatcctactgcttaaggtcatggccaaagtctgatttttcacacgtcggcaattcaaaaaagtgcaacctccagcataaataagttaatatctcctgatgattaaaaatgctcaataaattaaatataaaagagaagattccataagatgacaagagaggcactaggaacatagaaacatctactataaagacatgtactaaaaatgcaaacccagaggccaaggcagacagatcatttgagcccctcagttcaagaccagcctgggcaacataaggagaccctgtctccataataaagtaaaaaattaggcatggtggcacaaaacaaatggtattgaaacacctgaattagcaaatgcaaagaaatgaattagacacagaactgcaccttttacaaaactacttcctaatgaatcatttacttaaatggaaaatgcaaaactcacaatttctagaacgtaacactgagaaaaccaagacgaccttggatttggcaataaggtttcacacacaacacaaaaagcatgatctgtgaatgagaaaatcgataaattggacttcattcaaaacaaaaatgttttggaa

SEQ ID NO: 162688 - DNA, 393 bp, Homo sapiens
aataaattagtaagtacagatttaaataatttttagggatcgaatgtaggcaatgtcctatcagtcaactcaaaagttccagattggactcataattgttgaacacctggttctgaaaccctcctctcttctccatctctaatttccactatccaagacaggcctttatctcttacttgatgcaaatgatcacccatccagccttgcccacttaaaacccatcctccagactgccatcggcataccaatggaatgctggaatgccaggaattcttctaagaattcctccacaccaggggtgttcaatcttttggcttccctgggccacactggaagaagaattgtcttgggccacacataaaatacactaacactaatggcagctgaagagct

SEQ ID NO: 162689 - DNA, 357 bp, Homo sapiens
agttagagcttggctctgatactaatcagctgtgagaccttgggaagtcaatgtctctgagcctcaatgtgctcatctgtaaagtgggcataaccctctcacaatgttgttacacgttcaacgtaatgacacacacaatgtcctggcatggcaaacagcacctggtgggcagtgcaggccggctccctcccttccaccatcactcctcactgcccaatgcgatctcggctcactgcagcctccacctccctggttcaagtgattctcctgcctcagcctcccgagtagctgggattacaggtgcatgtcaccacgcctggctaatttttgtatttttactagagatggggtttcatc

SEQ ID NO: 162690 - DNA, 161 bp, Homo sapiens
ctgttagcgcgatggagctcactacgtgggtgactgccccttctctcttgaggatttgtacacatgttcatcatggataattcttcctttcactttgattgtggagagtctgatgactgtatgtcttgcacatagttgtcttgtgtagtgaggttccatcg

SEQ ID NO: 162691 - DNA, 541 bp, Homo sapiens
tggtagcactactacaaaaacaaggaaaccagattctaacattcccaaataggaatctttagaaaaagctggatttacatttcttttctttttttttaggatgcagtcttgctcctttgcccaggctggagtgcagtagcacaatttcagctcactgcaacctctgcctcccaggttcaagtgatcctcctgccttagcctcccaagtagctggaactataggcgcatgccaccatgcccgactaattttttattttgtgtacagacggggtttctccatgttggtcaggctggtctcaaactcccaacctcaggtgatctgccggcctcggcctcccaaagtgctgggattacaggaatgagccaccatgactggcccgggttgtttcttaattggcagaaagaggtgaaccagtttttaggacatctcaagctttttaaatttcatttctattttaattaacctcagggattttacttatgcttggaatgttctttccagtacccttatccacacctgctcctccaaccaagagtgtcg

SEQ ID NO: 162692 - DNA, 299 bp, Homo sapiens
ggcaaggctgatcagggaagtgaaacagggaaggagggctgtcccaggtcatccttgctggcttgcatggtctgagctgggggcaggaacagacactcagtgcctttcagggctgggctacagaacaaagagaaggaccatcccatgcaggagtctagcctgttgatgccaacaccctccaggggagaaaggagtcacactgccacatgctggacagggctgccggagggaggagcaccggggggccctgcgcacaccctgagcctctctgtggactcattctcccaagcacagctggg

SEQ ID NO: 162693 - DNA, 400 bp, Homo sapiens
agcagagtgatcctacacaaattactccaggtgtctgacccttcatttcctcaagcacatcatgggggaaagaatgcctagctcagcacctggcagagagtcagccttcgctcatctcccctaatggagctgacagctcttcaagtccgctgacatcttctcttagtcatcccttgaaatactacccgctgttacttctctgctcctcagtctcctcctatgtaaaatggggatgagaaaggagaggttgcgaacctttaatgagcgagcccttggagtatccagcccttcccgacgctaactgactcctacgagggggcctggtacacagtaggtgctaaactaatcctctccgagctgggcttggggaagatgcctccgttgggtgtacagcgtgggc

SEQ ID NO: 162694 - DNA, 256 bp, Homo sapiens
agaagaccactgtggctacagtgtaccagagagagcgtggctcacgatgaggcagaagaaatgcgcagtgacccagcagttatgctaaggatttatcttttaagtgtcctttcactttaaactggggaataaaagtatccaacttatattttgtaaatgatcttaccaaataagagaaaaactgaactgtaaaaaggaaaaagtggctgggggcagtggctcatgcctgtaatcccagtgctttaggaggccaagg

SEQ ID NO: 162695 - DNA, 126 bp, Homo sapiens
atcctggggctgtatgggaattccaaagggcacatttggctcaatggcctggatgtcttacctttgggaagcagggagctgggaggagcctagctggacccctgccgctctgctggatgggtttgg

SEQ ID NO: 162696 - DNA, 436 bp, Homo sapiens
ctggattgggactgcacagtcacagcccttgcctccggtgtcacaagggcttcatggggctctggagagtcagatccctgtgaaagcagatggacagaaaccagccagagagagaggctcagaagattggagcaggcagttctgaagctcagggctgtgtcaaaagctagccaaatgtgttggggcgaggcggcttgcctggcaaacccatctgctttttgcttaatagatgggtttggatgcctgtggaacagaggcctcgggggacgagctttgttaactttgtgttatgttgaaggaatgtgacagaggagggtatgactgtcatccacccatcagggatctgtccctgacacgctggggtagaggatggaagaacatggaatagaggatggaagaatatggaatagtgccctgactcgaaagttaaccgatt

SEQ ID NO: 162697 - DNA, 495 bp, Homo sapiens
cagcaggagatatgatttcccattcccaggggctgcctggctttaaaagagcagcttgttactgtcatcgtccatttccccctggagaaaggcttttgtggtcggtctgcatggcagtcacaccctgggtggtccatgaggcctcagatgaagtggcccgaggccactctgctctaggcccacagacaaggcgggaatagcagttgcaggctagaaaaggaagggccaaccagacattcacagagatgcaaccagagcaacacacagctgagtctcttaagtcttcagtcctgtgtaagttgaagcaagacatcagaaatctctcacctgagtaattccacacatgcacccactgctgtccaatgcagtgcttgctcagcagggagcacctcttggccaagcgtattggcagcccttctaccgtgaccagcgtcagggacgtctctaggcgccttttcagaatagctggcaacatagggagacccagtctctacc

SEQ ID NO: 162698 - DNA, 242 bp, Homo sapiens
aaagtaccttacaaagtggtgacaatgagcacagaccatgatgcctcatggggacagcaccagctgtggaatcacagaaataagaatcactattctctcatctgcctactgcctacgtgaccctgggaacagttacccagccttcttgagtctgtttcctctctgaaagatgagatcacaagacctatctcggggctgttttaagtaaatgaggtaaatgaacatagcactcagcatagtgc

SEQ ID NO: 162699 - DNA, 317 bp, Homo sapiens
cctgaaccagctatgtatcaataaactcagcagttttacagttaagttctgaaaccacagccttttggtcacttgccgccagtattcttccaagagagattaagaaatgtttgggcctagaggcaacctttaaaatgtactgagaagtgcatttttgccagctctattgatattacttctacctagatgacccacatacttcttgatattctttaaatctttgcaaactgggtttataacatttccctcctggggttaaaacaaccccagccccttaggcaccatgtctttaagacatagcattagagaactttcac

SEQ ID NO: 162700 - DNA, 294 bp, Homo sapiens
cattgttggacatttgggttggttccaagtctttgctattgtgaatagtgcttttaagaacttaatgtctagggctgctatctctaatacagaacaaagcataaacatcagtgcttgatggatgcatgtgagtcaggaccctcatttcacataataattgctaatcacaattagttttcctttctgtattccaaaggacagaattccttgagagtcttgaatttagcaatccaacactgtgatacttttcaagtcttatataccttaaatctatcctacatacttctgtcagat

SEQ ID NO: 162701 - DNA, 409 bp, Homo sapiens
taggaatatgtcagtccttattaaaatgttagcttaggtattaatcatttaagattgcaagtgactatatgtagcagaaactcttcaacagcggcttaaccaaacaggagttttatttgtctcgtgtaggtgtccagtgcagcatcttcacaatgccgccagggacctgggctctggctatcttctggcatctcttagattgaaaaatggctgctggatctccagatacccagttgagattccaggcaggaagagggtagggaaagaagagcagaaggccaaatgcctctcgtgaagctctgcctttattattctggaatggacagccttccttaagactttgtctttatctcagtctcaggactagagagcctgggaaatcaagttttttatttgacacaatgctgct

SEQ ID NO: 162702 - DNA, 587 bp, Homo sapiens
agactctgtctcaaaaaaaaaaaaaacaaagcgattgagaaaatcaggtctgtgtgaccttagcaatgagttatttagcttgggccactgttagcttaagtcaataacttcaagtttgcgttgtagttggaatcaatagaggaaaagctctcagcattaccacatatatcagaatgtgacattgattgccagaccagccttatccaaacacaagtcctaggctttttgccctgtttatgagctttatatgctgagggtatttgatgagtcttagggaaaaaagaacagccctggggacacagctgcttttatgatgagacatgtttgcacccataccttaatgggttttggtggcaatattctgaaatttgccacctacatttcaaagatttgccctttgggtgaattagtgctgtagtagaagtgggtggaggctgaggaggttggattaagcaggtagaggatttctcagtgcatggatcgtgctgaggatggagatagagctctaagacatccacgggcctttcctgagtgatcagctttggctcctgggcaggggaattggagctggattctagtgtgggagc

SEQ ID NO: 162703 - DNA, 397 bp, Homo sapiens
ttttgtatatatttcctagcatatgagatatgtatgtttattggttgtgtatatacctaagaattgaaatgctagttatggcagaaaaacttcagctttagtatataatgctaaacaatttccaaagtggctgttgcaatcagtatgcgagagttcttgttgtttcacgtttgtaaatatctggtacatttagcaatttgatgttattgcatagtacatgaacatcttcaacattattgcccaattgccctcataaatggttatattcgtctttaaaaacatttaaaatgggatttttttttcaatctagtgggggtgaattttacagaactatggtttatcttttcttagtttatcacttccctaataatgaataacattgaatgtcttttttttt

SEQ ID NO: 162704 - DNA, 156 bp, Homo sapiens
atatatatatatatgcacacacacacacacacacacacacgcaccatggaatactactcagccataaaaaggaatgcaataatggcatttgcagcaacctggatggaattggagactattattctaagtgaagtaactcaggaatggaaaactaaa

SEQ ID NO: 162705 - DNA, 513 bp, Homo sapiens
aactataaactaagtggtatggcgaaatatagttaagtacattttaattagaacaaggttttcaaaccccggaaaattttgtatcattcaaaaaggcatcttgaatatatctactattatctaccatttacaattttaggcaattttgcttaagtaacctctgagccttggtgtctatctatgaaatggggattaatagaatttacttcagcagatttgccagagttaaatgaaacaatgtaaacaaagtatttggcacaggacttagcacagaaattgaaaatacatagtagctactataaaacacagaaagtaaaacttggcaaccttcttagattaaatatgcaggaaaaaataaacaaaaatttaaaacctcacacattaaaaaaacaagaaatatgcaaaaaagtgaaattaagtattatagggattatgagttttaaaaggctaaaatccactattctatagtaagtcaactacataaaattggttcaagggtaaagaaatgaaaat

SEQ ID NO: 162706 - DNA, 283 bp, Homo sapiens
catgcctggctaatcagaatattttcttagtcaaagattgtcatgatgtgcaattgctgatgaccattgcctagtgaaaagttccatttgttccagaaaagttatgatctatccagtgagattttgttctctgctcacaggacatgagaacagtacagattaatagataatgatggttttgatggagtccagggaaagaactccattattttcacatattgtggtagcagtggaaacctgtaggatttggaaaaccacaataacccgaataatgttcgcttta

SEQ ID NO: 162707 - DNA, 730 bp, Homo sapiens
acaggacttgacattcattcttatcaaatttaatttttttgaggtttttggctttaacgcttcaaatttaatttttaaactattaagctccatatttttttatcctgctcaattttgtcagtcacccattccttttaatcagtatttttattggcagtatttttactggcaggccagtgttctcagtcaagtcaacattgaaagagacagggctgaaataagcatcctcacgtcttcaacttgagatcattctctgacctgttgatcagattaagcagtccctttgctcatcccttaaccagtatgaatggtgcacctattatttagtctaaatttctgcatcatttacacaagatatcataaagatatcataaaccgtaaagctgaattatagatatatcacaccaacagcaataccctctactgcaaatgcagtaatttcttcaaaacagaaagtgaattaactatggcatgacttattttagagaagtcccttctggcttctttctgtagtccctttccttttttgttttcttgagacagagtcactctgttacccaggctggagtgcagtggcacgatcttggctcactgcagcctccgcctcctgggttaaagtgattctcttgactcagcctcccaagtagctgggattacaggcgtgggccaccacaactggccgctaggagattcttaaaaccaattcgtgccaaactgtcatggatgctgc

SEQ ID NO: 162708 - DNA, 384 bp, Homo sapiens
catgtatattaacttttacaataaaaaacaagaaagcaaaatgtggaattcagccctctcagggtagaggcggggcactcaggaatgaaaagggttgggggtggggaagcccacaatgatacccagaaaaaataataataatagcaggccgggcacggtggctcactgctgtaatcccagcactttgggagggcaaggcaggtggatcacttgaggtcaaaagttcgagaccagccatgactaacatggtgaaactctgtctctactaaaaatacaaaattagcatggtgtggtggcacatgcctgtaatcttggctacttgggaggctgaggcaggagaaacacttgaatctgggaggtggaggttgcagtgagctgagatgg

SEQ ID NO: 162709 - DNA, 792 bp, Homo sapiens
cagcccatgtcttaggtcgactctacaggtatccacctggtataatagtgagagttggttaggtcatatctctgtcactgtaataattttctcagttataactgcaacagcagttccaagatcaggaaattgaagtttagagaggtaaaaagttgcttaaaataggggtactggaactgagatttgaacccagattagactgactctagacctggcactcttttactgccctcagtagcatctgttaaagacagctaattccagttacctttgtgggagaaaagtgtttgtccaaagaggaataattattcctgtcagttcttagattagttttgatttaactctgctgctgagctgagtaccttccttcactagatatataaataggttgaccataaaatgtatcatccaaattgagacacttaagagtgaaaaggggtgcttaattttggattaactgggatttgtggccatcttaaggttgggccaggggccccatccttttctttctgccccacctaatcttccttacctgtactccactagaattgctgctttggagatgaggttttctttctgtggagtattaacttttatttctcagaattctagttagccggggggctgttaagtgctattccttctttccgtttttaagtaacagtcatgctttatcccacaggggtctagaggggaacctagccagggtttgcattcactcgtaagccagtgtccccgtcccagggtacgacgtggtttcaaggcattggtcactgcctcttgttttaccaa

SEQ ID NO: 162710 - DNA, 399 bp, Homo sapiens
gtatatacaaggagaagcagaagattgtagtttgaaatgttcatatgcaattcataccctaaaggcttggattccttctagcattaccaactatgcatctctgtgctttattgctagaggagacttgactattactcaagatttgattttttaaaatgacctgacaggagtgttaagagaattttgacagtggcttgtatctttgtctttgagtttttagcacctttaaatgccaagcatgattttttttttcctctataacctaatcttggaagtgagaaaagagtttgttttataactggggagaaagaaatggtttatttttgtgtttgatgtcagtcacaaaagaagggaggcactgagagaaatgtaagctccttttttggtgaactttactaa

SEQ ID NO: 162711 - DNA, 297 bp, Homo sapiens
gacagttttggaaatttgaataaagaccatgtattagatgacagggaattattaagttgtataagtacgatgatgctattgtgagtatgtaagataacagtgttttcttaggagatgtgcattgaaacatttaggcacgaagagtcaagatgtttgcaccttacttcaaatagagaaaaagaaagagaaattatgtgtgtgcgcgtgtgtgtgagagagaaagcagggaaaattggcaatatgctaagaattactgaacccagctgggcgcggtggctcacgcctgtaatcccacca

SEQ ID NO: 162712 - DNA, 324 bp, Homo sapiens
ttggaggatacagggctagcacatacaaagtcaattatatttctatatactagcaatgagcaattagaaatttaaaatacagtataatttaaaatagtaccataaaacacttagaggtataaatctaaccaacggtagagtatgtatgatgaagaccacaaaacactgataaaggaaatcaaagactttggagaatataccatgttcataaaatggaaaactctatatttattaagatgtcaatttcctccaaattggtttatggattcagtgcaaccccagtcaaaatcccattgggatttgtttttctgagatggagtcttg

SEQ ID NO: 162713 - DNA, 284 bp, Homo sapiens
tctggtcatagctgactctagaggatacacctccataatgtgagcccagaatattgatggaagttacctgggttgtgggtttatagattttttccctttgtttttgtgcattttgcaaattttcggctttgtgcctaaattccttttacagtcaggaacaaagcaatagatgttattttttaaagttcatgggctcgtgcccgtaatcccaacactctgggaggctgaggcaggaggattccttaggcccaggagtttgagaccagcctgggcaacatagggag

SEQ ID NO: 162714 - DNA, 725 bp, Homo sapiens
ttatattttttgagatggaatcttgctctgttgcccaggctggagtacagtggcacgatctcagctcactgcaagctctgcctcctgggttcacgccattcccctgcctcagcctccccagtagctgggactacaggcacccgccaccacgcctgactgattttttgtatttttagtagagatggggtttcaccgtgttagccaggatggtctcgacctcctgagctcgtgatccacccacctcggcctcccaaagtgctgggattacaggcgtgagccaccgtgcctggcccacaaagggatttctatatcatgtgccagtaggatgctttttattggtgattcatcgtggctgatagcaaagccaacatggaggcaagagctgtaaacaatctaaggttgtggagtgggataacaaatacttaagtaaaacttcaaaggttgctgagtagggtaacagatacttaagtaaaatacttaaatgtgatttcttagtaattgatatggtgatagataatctaattggttgattaactcatactttcctactaattatacatcagttattaacatagcttgaacctcaaatggatacaagatgtcttttactttttaaattagaatgagatgactcttcattccagttctttttaagcttgttatatttgataagcttaaagtattttttatgcattttctttatgcaataatatgggcaacatact

SEQ ID NO: 162715 - DNA, 496 bp, Homo sapiens
  misc_feature (15)..(15): n is a, c, g, or t
ccgcaattaagtcgngaccgcacatctgtgtgtgtgtgagtgtacacgtacacacacacacgacacactcacacaaacatttccactgacttgaaggctcaggagatatccccaaagccaaggcatggatctgctggctgaggaggtgtgagccctcggagggcaccatgtgcccagtccacactgaccttgtgtcttgccatcccttaaggaccccgtctcctctgctgtgtgctcatagggaagtggcccggagaggccaggtcagactcttaattctttggcatctgagatgtaagaacatgggccgtgcagccaagggtggacagacgccatgtgggtgtgtctggcaggactgcctgcctgcatgaaggtcacgctgccctttacagtcacactggccccagctccccacggtgacctgctaccaggcctgtgagaggggccactgcttgctgggctgtgggagcactaaaaggaagacccccctcaccaa

SEQ ID NO: 162716 - DNA, 296 bp, Homo sapiens
tgtgaagagcgtgcccagaccactgaggagttctcaacacatgtacataaactgagtgtgctgtagatgctatgcttctgggttcactgtgttttgggttccctggaatgtatctagttgtcttgttagtgagtacttaagctcaacaccaccaatgccttatccacaagaaagatattggatggctgaggataaaggtggttgttacctggacttttggcctcatgaggacatctcagtgtgtaagagggatccttaaacatgctgaggaccctctttgtttggtttgctgatac

SEQ ID NO: 162717 - DNA, 251 bp, Homo sapiens
aagagttgaggtctcactatattgcccaggctgttctcaaactcctggactcaagccatcctcctgccttggcacctcctaaggtgcttgggactaccagtgtgagccaccatgctgcccgccacccctccccacttttttttgtattagtgattggtcccaccacgcactgcttgctgcatattctttatcatctattgttcttataattcacagaaccactcaaagaaggcagctgttgtttggccatt

SEQ ID NO: 162718 - DNA, 414 bp, Homo sapiens
atattaagagtatccttcataaatactgaaacattgcaatgcagcaaaactagaaattaatgcctaaagcttaaaaattattcctataacttgaaattataaaacatcttactaagtacatattgagacaaagaggaatttttataatgtaatgagattattttacaagcaataaaaaaatgagagcactactagacttatgagataaatcaaagctgtattcagtaagtatagtcatggccttaaacacttctcactaagaaaaaagaaataaaacacatgaactaaatcaagtcaagaaatcaagaaaaaaataaaataaaatcaatgcaagcaggagataagcagtggtgataagaggaaagataaggaaattagcaaatagacaaacagaattaagaatctatagatatg

SEQ ID NO: 162719 - DNA, 269 bp, Homo sapiens
ttgagaggactttgcactttggtggaggtgatcaagtcagcgttaatgttgtctgcacccatgctgttatgggccatatgatagacagagctttctcacccatgctgtttcttccatagctcatgtactgcacattttagtccttcattaatgtggtattattctttttaaaatctgtgttatctcttcagcaacatttcaaggtctttaggatcaaggacttttatgccttccacaaagtctatgagagttgcaaggcacagatagtc

SEQ ID NO: 162720 - DNA, 389 bp, Homo sapiens
atgtcaggaaatcgagaccatcctagctaacatggtgaaaccccatctctactaaaaatacaaaaagttagccaggcgtggtggcgggcacctgtagtcccagctactagggaggctgaggcaggagaatggtgtgaacctgggaggcagaggttgcagtgagctgagattgcgccactgcactccagcccagcctgggcgacagagcgagactccgtcttaaaaaaaaaaaaaaaaaaaaaaaaaaagctctgaggcaaatatgacaaaatgttaacatctgtcaattctggtaatacttatatggctattctgttttactactgcaggtacttttaacatttaacatattccctaataaaaatagaaaacaaattaaactgtaaata

SEQ ID NO: 162721 - DNA, 466 bp, Homo sapiens
tcaaagagacatataactgagttaaccacatttatcttttaaccgcaccaaagtccaaacagatgatctaataaatggcgatggcatgaattgggaaacactaattttaaggtgcacataggaatagttgaaggcacaggaagggtggagagaagttagtccaatatttactctatgcatggattatctttcttggccaaagttgttggcaaaaactcactgatactctggtacctctaccagaggtcaaccagtgtcttctatccagcctatcacaataagaattcaaattgtcacctctatatttctgcatttgtttttccttattaaatattctggctggccaagcacagtggctcaagcctgcaatcctaatacttcgggaggccaaggcaggaggatctcttcagctcaggagttcaagactggccagagcaacagagtgagacctcatctctaccaaaac

SEQ ID NO: 162722 - DNA, 433 bp, Homo sapiens
ggcagctctggggttatctgtcaaaggctggaccaggaggtggtttggccaaggctcagcctaggcaaagtcatgaacctgttaaattgttctttgtcctcttctttcttcagatttttgtcctctttcctattgaactccgtttcctttgccctggtatctctcccgtatgtcctgcatgtattcctggctgagtacctgttctttatctcattcttatttttggatcggtgtcaacgaatggctgtctgtgctaacagataagatgtgaggagaagagaactaatatttttgaggccctgttatgtgccaggcactgttagctgatagggttttagttatattcctgatagaggcaaatgaatgtccaaagagttgtccagaggcaacgggaagacactcccactcctctgccctccccttctgcccagca

SEQ ID NO: 162723 - DNA, 533 bp, Homo sapiens
gtgttgaattggcaccacccaagtgaggctgtcgtatacctgggtagaggaatgaacaatacatcgcaggttgtgacaggcttattcctacgcttcatttaatatggaacccgcaacactgatttcagtgcaaagaactccctttccttggtctctgggaagaagtcactgcaaaatctatgtaatttgctcttcatttctcatatcccaatgaattctcaaatcagtaatgtgtgatgatatgtctagatatcttgtgctgccatattgcccatctcaaaatgatttggcaagctgagaaaacaattaaaccaaatagataaatctatcattgtaatgaaaaatattaattacaagcaaatgagagccaaatatatttcaatcagtgtttgccttgccatgtactgagatacggatgacgagaaataggtcgactgtctctgcactccgtttcttctgggatgactcccatgttaataacatactcccacgttaataacatatttccacattaataacagtgtccctgtcat

SEQ ID NO: 162724 - DNA, 467 bp, Homo sapiens
tcagacagagttctgctcttgtgtccaggctgagtgcaaggggcgatctcagctcaccgcaacctccacctcccgggctcaagtgatttgcccacctcggcccccccaagtgctggaattatgggcatgagccactgcacccagacacaaggaacatttaaggaaatttgtaatgcaatcgcaagtctggtgggtaggtggtagcattattactgtttttcaaatgcagatattaagagattttgatttgtccaagatgttctgcagcatgttattggtaggaccaggatgtgatcccaagtctgctgacccaagatctcatgctgtttccactttaataggcagatgaccatgtatcatgaatgctatagaggaaatacccatatgtggggaggaacttagactgtgtatgattgtcagtttcttctctgattttgaaaatctttgattttctgaagattgaaatt

SEQ ID NO: 162725 - DNA, 359 bp, Homo sapiens
aacttctttatggccacttaagaagcatcaatgaggttataggcctgctcttgggagcactgctgtctgtttcttattatagtgtgggtggcagagggtaaagagtggtcaagcactaagcagcaggcgcttccccaccttggtactctgtcgagtacatcatatccccagatacaaaaatgggagatagtgacttccatgcttctgttttggagcctgcagctaaaactcccctatgtttttattcactattcattcaatctaatacataaacttgctttgttctttaaatggtcctttatgccctctactcaattttttaagtgactcagtttcaacatgctgacatttttgacaca

SEQ ID NO: 162726 - DNA, 375 bp, Homo sapiens
gatgaggtagattctagggaagtgcaaccttagccaatgtatctgtgagctggccagagtccgaggtcacccctcactgctcatggtaatcagggagtcaggaaagtataccatcccctaccgagtgcttctgccatcctctatgccaaaaatggcatccagccccaaactcttacaaacacttttttactttgactgcccttgccccatctctccaccattatcgacatttaaatttggacactcgggttagagtccccatctaaacttgctctttaggctctactacatgtaagtgcatgggccagaaagcaaggtctctaaagcaagaccagcccccaccgttgtttgtttagaaagcgggcacattcctga

SEQ ID NO: 162727 - DNA, 1065 bp, Homo sapiens
gcatattttggactctcaaataactactctgtcctttaataaagtaataataaggaatagatgtgcacatagttagaaaagtatgagtggttaaaaacaacagtctcccatactgcctgttttctctctcagaggggaccactaatgagcttctaagggcatttctagaaaggaagaaaagaagataagaggccaaagaaggagggacgggggttatggagagagaccttccctttccagcactaacgctctgtgaagggcgctgcaccttgcattcttcatgtggtgttttgtcttagaggtcgtcccataataacatataaagatctacctcattcctcctagtagctgcttagcattccattatctcagcggactatcatttatttgaatagccttttattggtgaacatatggatacttccagtttttatttttatatacaaatctataattggcatacttgtacatacatcttgacatagttttgtgactaaaacggtataaattccaacttagaaatggaattgctgggtttaaggctacatgtatttaaaattttgatagctattgccagattatcttctagaaactgatcgaaggatgtaactccatcaagagtacaataaaaggcccaatttctcagctttctataatagcactgggtattttcaaacttaatgtttttcccaatataattggtgaaacatgatatttacgaatattattctgattttggtttattttgtgtataaaatgggacatcttttaaaatttttttgtagttttaattttgatacatttatatattttacccagttcctaattgggttatttggctttttcttaatttgctcatgcactttgggacatttttgtcttatgtctttaaaatatttttatcatttgtctttcgatgttatttattgatttccttatttattggcatagagtttaaatttttatgttgtcaatttgtgagtatttttctttgtcgatcgtgggatttgtttccagtttttaaaagccttcctcattctgagattataaatagacttactcgca

SEQ ID NO: 162728 - DNA, 228 bp, Homo sapiens
atttgccccttttagtttcttatgaacactgtagctaatgtaagacttctttggagccttcctcaaaatctgtttgctcaagaggggctccccatacctcattttggagtatacacatctttctcactcacctagtatactttcattgtcaaataccagagtggtgggcaatgttggctaggggacaggggatactttgatgtatcctgagcgaccgttaggtagagc

SEQ ID NO: 162729 - DNA, 244 bp, Homo sapiens
cacactggaccctcaaccactcctgagtgcaggactttgtccatttcccctcagggcctctttctctctctttctttctttccttccttccttcctttcactctctctttctctttctctctcccttccccttccccttctccttccttccttccttctgctctctctttctctttctctcttccttccccttctctttccttccttccttccttcctttttctttctttttttttctttttga

SEQ ID NO: 162730 - DNA, 404 bp, Homo sapiens
agcttggcatagggtagggggcaatacccatttatggcagagcccagtggtagaaaatagctgagcctgtgtcacaggagtgctggcttctgggtgatcagaggtaagattcccctttgcctaggtctctcactttgtctcgtgggctctctcttgttctttctcactctgtgcttattctcactgtctcttgccttctttttttttttttttaattgatccacactttattcaatggtgtgcccaacacagtctcagagacaaagagcagtctgaaatttccagatgctttggtaggtcagaagcacatgccatccaccctcttacactccgctcaactcccctcaccttcttttgttctttcttgctctcttacttcctctctctctctctgacacacacac

SEQ ID NO: 162731 - DNA, 283 bp, Homo sapiens
tggtcaaaaattgggttaaccaatggggggagaatatttggttaattgttttaatattaaattttcaagtttataatagagttatggttgagtagtcatccatactgagtaatcacgcattttttaaactataattgaggctcttctaaagctttgttttctaatctaagatacaaaggatattcttgatcttgcttgattgtaactacatctaccagtctttaatgtctgtttggggtgagtggcgatcctctgttgtaggaatgtttttgaagatttctat

SEQ ID NO: 162732 - DNA, 107 bp, Homo sapiens
tcacagaggccacaagtggtagagttgggatttgaatacaggcagtctgtctccagagtccaaacatttaactgttcctgggtggctgctatgtgctcatataggct

SEQ ID NO: 162733 - DNA, 360 bp, Homo sapiens
cgatagtttgaaacttttatcatagctagtttctttgtggttcagaggtttaaaagaattgttttctggattgacaaaggttacagaatgctaaactggtgtttgtttcttcttccactttcttacattcattttgggaaaataattaaaacactttccagaatactgtgaataataacaaagtcttaaatatgtgatttccactcagccatttttagtagagaagtaaaaagtatatgaactgatgagagctttttaatacagaaacatatatgaataatctggatgaataaagatctgcagggttttttttgttgttgtttaaaaaatctccttgagaaataaattggtagaataact

SEQ ID NO: 162734 - DNA, 923 bp, Homo sapiens
ccaaccacagatctctgacccacctcaagagatggaaatgaccgagaccctggggggaatattatttattgacttatttattggttaggttcttggttttttcattaaacatcagggagcggggtataggcagagatacctaggaaccaataaaaatatccccagggtttgaggagcagccagttgtaccaagaaacagtggctgaagatggagaagaagcagagggatcagtaaggtaaagagggctgggaggagtcacaacggaataaggaacaggtaccatggtgcacttactagagatgaagaatagccaaggggtccagggtataggtggaagaataatgaagcaaacaggacatgagtcagacgctggagccagagaccaagaaacagtttctgaggctggagaagtggtgatcactgaggagcagggaagagccgagggttaaagaacagtgagaaggatcatgaaataggaggaggtatcaggaaatagaggaaccaaatagcagccagacggagcagtcagtatccagaggggtgaggaagcagaagaatcagataaaatggaaaaggcaaacatatccaaggaactgggtatgagcctgagggacaagcaacttcccgaggaaccaggaagcagttccttggtttagaagagagcttgagggcacaggcaaaagacagtgataccagggaacaagaaatgtgaaatacgacccagagaatggattgcagtcagaggaagcaggagacaattgctgaggctgtagaatgggcagagggatcagggaagggacagagcccatggaacaggtggaaagatgagagaagagcctctgaagctgcagaatggcctagagtactgtggaacacctggagcaaggaacagtcactgaggctggggggcagccagagggag

SEQ ID NO: 162735 - DNA, 515 bp, Homo sapiens
ctgccaagtctgatgactggacgtctgcagcagacaagaaaaatcaggttgagtgggatttcttttcttttatggcacagattctagagtggtcacatattttacttatttattttaagatttttaaagttgtttttaaagtttaaaaacttcagcttttattttagatatagagtgtacatgtgtatgattgttacccaggtgtgttggacccaggtaaggagcatagtacccaataggtggtttttcaattcacgtccctctcccactctcctcacttgggcagttcccagtgtttactgttcccatgtttatgttcacgtgtgctcagtgtgctcagttcccatgtgagaacatgtggtgttttgttttctgttcctgtgttaatttgtctagggttatggcatccacatccatctatgttgctgcaaaggacatgatttcgttcttgtttatgggtttgtagtattccatggtgtacatgtaccacaattttttttttttttttttttttt

SEQ ID NO: 162736 - DNA, 329 bp, Homo sapiens
ctgccaagtctgatgactggacgtctgcagcagacaagaaaaatcaggttgagtgggatttcttttcttttatggcacagattctagagtggtcacatattttacttatttattttaagatttttaaagttgtttttaaagtttaaaaacttcagcttttattttagatatagagtgtacatgtgtatgattgttacccaggtgtgttggacccaggtaaggagcatagtacccaataggtgcagtgaggaattgggtcatcatctccttcatcatccattcccaaatcttccaacatggtcttaatagtcacagattgtttggcattt

SEQ ID NO: 162737 - DNA, 624 bp, Homo sapiens
tgaatgccaaactcccgattgggaccccagattacatggctcctgaagtgctgactgtgatgaacggggatggaaaaggcacctacggcctggactgtgactggtggtcagtgggcgtgattgcctatgagatgatttatgggagatcccccttcgcagagggaacctctgccagaaccttcaataacattatgaatttccagcggtttttgaaatttccagatgaccccaaagtgagcagtgactttcttgatctgattcaaagcttgttgtgcggccagaaagagagactgaagtttgaaggtctttgctgccatcctttcttctctaaaattgactggaacaacattcgtaactctcctccccccttcgttcccaccctcaagtctgacgatgacacctccaattttgatgaaccagagaagaattcgtgggtttcatcctctccgtgccagctgagcccctcaggcttctcgggtgaagaactgccgtttgtggggttttcgtacagcaaggcactggggattcttggtagatctgagtctgttgtgtcgggtctggactcccctgccaagactagctccatggaaaagaaacttctcatcaaaagcaaagagctacaag

SEQ ID NO: 162738 - DNA, 306 bp, Homo sapiens
atcaatatatatgatatgccaggtagcatgctttctgccttttacatgcatgttctcctttcattctcacctggcattaggggataaattaaaaaattatctccattttccagatgaaaaaactgaggcttagagagagatgaaacatcttgcccaagcaacacagctgggaagtggggagacaggatttgaaccatcgcctgcctcaccctgtaattagtgttccccaggagcacctttccatccgttaactgcttcaatctttgcaacactgcaagatggcaaaactaataactcacttttgca

SEQ ID NO: 162739 - DNA, 338 bp, Homo sapiens
atggggtcgaggcagcatctgggcctcacctggaagctgcctcgcccttttgggaagaaggggggatttgtgtaaatgccctcgcaaacaagagtgacccctgttcttggttctgctggctgtgtgcctgcgcccaacctggcgtctggccgactagggcaggagggctgttggagggggctgggagcctgctaggaggctcttcccccggcatctggcacatcttggtaaggcctctaatgcttgggagaccatagggagccctctggttacagtgtacccagccatcggacttcaaaacgggtttccttttctggactattaagacttcatcaaaa

SEQ ID NO: 162740 - DNA, 469 bp, Homo sapiens
tcatgctgtgaggaaggaaggctggatgaatataaaagcatgtgggcaatcggtggtgctattgagcagatgtgcagtgtagtgaggatcagttagtttttttttcagccctgccctttcatctgccctcctggtgctcagcctcctcagccagcccattcccagtgccacctaggcagtattatagtcttctaggtagaggaggagaggaggctgctgaaagaagagaacaagagtttccagagcatgtcatagtaagaaaggacacggaaatgaactagagccccagagacagggtgcccatgctgggtcccggggaatcctcctgggtgcctgcagcttggggctccacaactgccctgaattctgcccaccacaaaatggatcatagaagagccctcatttattgtcttgtgaccctctcctggacatagcacacttacctccacctgtgtgcctctggtattcc

SEQ ID NO: 162741 - DNA, 693 bp, Homo sapiens
gcattaaggatgcacaataaattgttttgttggttatggcacctaattctttctcactgtgaattttcttttgccaccttcataagagtggaactgcttatttgaaatcaaattgtgtataattttagaagagatggaagtgtcacccacaaaattactaagggtgagttttcatgtcattttgattttatataactaatgttgatttgatatggttgatatagttagatttagtttgatgtcatcagttaagaatatctgatcactgatcagaaagaaaccaactttattaaattgaatgattgtttgtcttgcttcattttctagggcttaactatgaaaaatgaattattcatgttttcatgtaggcagtactaaaccagacaaagtttgggggttcatctactcctagaagtagcagtgcagggcgtggtgctggatggagagactatgccccattctaaagtctgcaaagaaatattttgattctgaattactataatttacatagggtattgcatgaggattgatggagcaatgatgaagatactttgcagtaacttatattttacaggtttctgaagcaaggattgatacttagctcttccacgaaagcgcaaataccacttgctaaattgtactctgctgtcccgtaccaaaaaaatccacaaaagtatgtttttagatatatct

SEQ ID NO: 162742 - DNA, 639 bp, Homo sapiens
aaaacctaaaaaattcaaagattagttaatgaagaagaattaatgttaataatgtcatagctctctccccttttaatccataaagccctgtttattaatagcaacagcaataacaagaatgagcatattccctctttcccccaccagtggccttcacagcttgacagagcgcttcattctgctgaatgagcaacactcaggacaccagtggccttccgagtgggcagaaattccttgggcagctccagatcccagcaaaccacttaatcagcctttacataaaaaaaaaaaaacaaaacaaaaaaaaaaacgtgtgtgcgcggcgcgcgcctcgggcccccgggaaaactctttaaaaacatagcgcggtggggcgcgcgcgggggccccagtggggatagagcggaacaggggccaaaaacgcggttccccgaagagagaaacacggggccacagagaacaaggggcgggggaactctccccccacaatataaaaaaaccgccgcggggcacaaccagccacagggctgcgcaggaacaaaactccagaagggagaccggaagaggcaaatacggggggccctactacacagggagcccaaaaggaagggcaagaatcaaattacccccctacacggg

SEQ ID NO: 162743 - DNA, 276 bp, Homo sapiens
tcccgggttcaagtaattttcctgcctcagccttccgagtagctgggactacaggcatgtgccaccacacccagataatttttgtattttagtagagatggggttttgccatgttggccaggctggtctcaaactcctgacctgagttgatctgcccacctcggcctcccaaagtgctaggattacaggcgtgagccactgtgcctggcccaaaacactttttattgaagtataattgcatatagaaaagcaagctgcacatttaatgtgcaactc

SEQ ID NO: 162744 - DNA, 507 bp, Homo sapiens
aagaaaggccaggagttgatatttgaggtggtcttggaagaaaagaagggtacacacttaagtgttgaggggagagcattcagaccaagggaacaacaaaggcacagaaacatgaaggtaaaaaggaaggcacttaatgcataggctgcttcagataatcattctactttatttccatactttatagcatgaatgtaattaacaacagtgtcggatgtgtttttgtttttttgactgagctgaaagcgcctatcaacattttcttagtaaagatatctaatatttgtataattcataacagattataaactttttaataattatatagactgaatgaattaatatactgtatgtaaagctcttgaataacacttactaaaggccaggcaatgttctaagtgtttgttgttattattattatttaattatgaagagaccagactgagacaaaaacaaaaacaaggttgaagcctggcgccatggtggctcacgcctgtaatcccagca

SEQ ID NO: 162745 - DNA, 539 bp, Homo sapiens
cctacatttttgttgttgctgatgttgtaagtgtgagcgttggtgctattttaagtacaaggttttcttccattttgtttcctagctttttccctgaaacatagaagtgctgttgattgtgtaaccaactacattactgacttaactcattgtttatgagagactttccaggagtactcttggattggctagatatgcaatcatattacctgcaaatagtcattatgttgtctccactttgtaattcttaaaatttgtattttttatctttatatacctagaataatattaaataagtggaaatattatttctcttaccctgttcctgactttaatggaaaatgcttctagtgtgcaacattaaacaagatgctatttttaaacttaaatatgtttttatcatatcaatactggatattgaattttgttaaatattcttgtagtctctaagaaaggtcatgtagttattctcatttaaccagtattaagaattcacctaaggctgggtgcggtgactcatgcctgcaatcccagcactt

SEQ ID NO: 162746 - DNA, 380 bp, Homo sapiens
acatgtatacttcagttccatatactaaaatgccattttataccagtactaagatgaggcaaaggtatccgtgacagggtttcaggccaaggatgaataatataatgcaaaggcccatagccagaggcatgtatagggcacacagcacagccccagccacaagggatttctgccacagaagctgccccaggacactctcagcgtctaggaagtcaactggaaggcaaagagtacagctttcttgttcaattttatgtggtaagaagcaaatccatcagttagggcagctaagaccccatgagatagagactaaaccttgggaatataagcagttaactcacagagaaaaggttaggcccaaatggctgaagtgtataagt

SEQ ID NO: 162747 - DNA, 468 bp, Homo sapiens
gcgttacacaagttagtagacaaatgctaaccacacatgaatatcaatcaggtgccataaaagagcagctgcaatgcctcataaatgctttaatcctgttactagtgaaatggccatgacttttctttccttcagcaccaagtcatttcagatgggagaaatgtaaattaatattgctcttagctttcaaacctgtgactgctagtggcgatttttataggagaaaaatgtggggtcaataaaattttatttatatggagataattatggagaggactctttttaagccatcttctcagcataaagtaaatgcataagatcctttccttgatgaaaaagaaatcagcttgaaataaagatattgaaggctttgccacctcttggtgatgtatgactagaagtgagagccctttctgagaacttgccaaggagatgattaaacaggaggagagcatctgaatattgaaa

SEQ ID NO: 162748 - DNA, 385 bp, Homo sapiens
tcctggctcttgtgtaagaattctgaccgtgctaaccatgcctaggagggaaaggagttgttgtttggtagaaggtgctggggtttgagagatcagtaggacacaattggcagggagagcacgtgtgtttttatgagaattatgctgagataggtaacagatgaggatgaaatttgggcttgattgaagtaatgggggctgtctgtgaagctttgcggcagtacagcctaggtaatttgctgagcttgatgggtgtcaggctcagtccaagtgaaagcgaagagaggctgggattaagggtgcaaaggaatagtaaagaaagcatgtctgagatctagaacagaataatgggttgtagaggcaggtactgaggataggagagtat

SEQ ID NO: 162749 - DNA, 514 bp, Homo sapiens
cgtttttgccctcctcacctcactcggagcccaagctccaactccagaggcctgggcattcctgggcttgggtgacttcctcagccacctgtgctctgactcctctgccagaccttctccatggaaattccataccctgcttgggttctgacaccatgtggcctccaccagaccaaccccctgcctagatgccttctgagttcttggactgtgacacccctcccaggctgccatgtcagaaagacgccttcttgagaatcactttttatttccaagaactttttgttctttgattgctttgttttcatactatggatatagtgccctcttgagtcacactgaggataacaactcagacattgtaaaagctttcttcggttttgtgcatttttttcctgtggaaaataacaaatggtataagtatagaaatgtttgtaccaggccgtttagctgaatggtttttataataatgaagaactggaaacaaagtattaataagttgcaagacactatt

SEQ ID NO: 162750 - DNA, 291 bp, Homo sapiens
gagaatacagggagtgctctgggtttgctgtcagcttcctccccgcgagtgtaacaggaaagtggtgttcttatctccttataacccaactgtttataccccacacaaccacgcagcccttggtcaaggccaacaagtataggtccttccaggcttgccacggtgatcagagagggagtgtcctggggtcagagagagagtgagtatgctcagctgtgtcccatactcagcagctgacccagagcacgtgccctgtgcccagcacgcggctggcagcaggagtgtgcagtc

SEQ ID NO: 162751 - DNA, 163 bp, Homo sapiens
ataaaaccagcttgcttggttagaatgtagattaagttccaaattttggcaaaattcaagtggctatctttaagtttaccttgcttaaatttcataacctttttgtaaatatacaaatactacctgggatcccattaatttatataattaatagtacacaaaa

SEQ ID NO: 162752 - DNA, 234 bp, Homo sapiens
cacaacaatgtgaatggcttacactgaactatacacttaaaatggttaattttatgttatgtacattttcccacacgcacacacaaaaaaaagtttaaagaaagtgttatcttcaggaaatgggctagccagtatcccaattaacttaaacatggatggcagagcactctgaagagaatcctggattaggcagcagaaagcacagttgtcttacaggttatattcgcgagaaaa

SEQ ID NO: 162753 - DNA, 241 bp, Homo sapiens
ttgtaggagggaggtccctccaggctgtggggtaggaggtaggtcaagtggagactaagacccgggcatccctctgaatccagggttacagcacatgctgttccctctacctgggtcccccttttccctgcccccttttcttgcctggagtaagagtttttttgttttgttttggtttttggtttttggttttttttttttattgctcatttcaaaaatctccagcatctagtatagagtc

SEQ ID NO: 162754 - DNA, 243 bp, Homo sapiens
ccttttgctgttgttgctttttaagcacagatttgaaagactcaggcttttcagaaggtcgacaaaagaatagtttcacttgttatcatttttcaggagtttactttgaaaataaagtttccgtggcggggcgcagtggctcacgcctgtaatcccagcaggcacaatttttgtaaagcccagtgttgcagccctgggctcctgccatttgctcaataacatatgtaccttggcagaccagcc

SEQ ID NO: 162755 - DNA, 537 bp, Homo sapiens
cagtcataccgtgtggcgtcaggaggtgggacctggccagccccggggtggtggtgggggcagctgccacagctgctgggctcccggctgtctctctggatcctctgggcacggggcctgggcccccttcgggctgagggtgtgggctgctgaggactgtggtcaccccggagcccagcgtggaaccacggaagagccgcacagaggcagagcccccccagctgccctgcacccccggaagaggaaaccggcgcccgatggcaacagagaaagaagcggcctcctgcaggcagggcgctggggcctgagccgcgttgcggaaccgcctgccccatctcaccgcccgcctgggcagttgggaacaccacggactccgccccttcacccgctgctgacctcggctggaaaaatggcgggacgcgctccccggctcccccagcctcgcctgagccgccgctcagctgaaaaccctctttattttgctagctgggccctcagcacacgcgccgctggctcctcgattgctggcagcggccg

SEQ ID NO: 162756 - DNA, 560 bp, Homo sapiens
tgctgggattccaggcataagctactgtgcctggccatggatattaatttttaaagttccccaggagattccaatttgctgccacagttgaaaacctctggcctccagccctaccaggtcagcagtaactgagctgactcccacatctgcatggtaatccataaaggcagaggaagacagacgttccattgcccaaacccagattccccgtcacccagagcatactaaattgggagctaggcagataccaatgaagaaaaatgtgagcatatttacaacaaagcaggccactgaatgcaaactaaaattccgcatcccgtgtaagtgctgcaagaatgaaaagtggaggtcaaaccaccctgcttgagaatctgagtcttttgcacagcctcccagagccgagtcctttccctcctccagtctccgtttcttagcagagcagggaccgccttgaagaaatgagaaatcaattgtgtgtgctctgctgaattaaggcttttccaggcttgtcgatctgcattcatttgcatgcattggcactgtcttccctacagaatgaa

SEQ ID NO: 162757 - DNA, 256 bp, Homo sapiens
tgctgggattacaggtgtgagccactgtgcctggccaggaataagttttaatgagaaggaaacccatagacctaccaaacactaaaaagcaactggattaacatggggagcttggtgaatttgcttagggaaggaggtacacagatggtaaaaagttaattttattagaaaaaattggtattggtatgtcctggaaaacaggtattaaaacagttgtgatattgattgccttgctattgaaacttctaaaactagg

SEQ ID NO: 162758 - DNA, 426 bp, Homo sapiens
ggcccgcttcagcctcccaaagtgctgggattacaggtgtgagccaccgtgccccgccatgatataatccattttaatcaataagtacacagtatgtcagatagtggcaagtgctccagacaaaaataaagcaacaagaggaaagaacacatggggaagggtaggtgagggagcaatctaaagtgaggttgtcaggacaggcctcacagactcagtgatatgtgagcagagatcaaagaagagcagaagctgccatgtgggtatgctgagagtgggaaagtacctggagttttctaggaataatgtgttgctagagcagcatgtctgaggactgagaacgaatacagtaggagataagagaacagtgtactaagagctagaactggagtattcacaggtctctgtaacatgggtgaatcaaggctg

SEQ ID NO: 162759 - DNA, 275 bp, Homo sapiens
gcgactgccacagtcagccaggttggggaagaaattcactcgaagaaagcttcccagagcaggtgttagggttagaccagttagggggagtagagaggttgttccaggcctcacatgctcaggggatctgctactgcagatcagtgtggctacaccagggagacagagaggagaccagcttagagacaaagtggaggccagagcctgttgaaagctgtctttattctttaggcaatggaagccatgtgggtttcagaaagacatatttaaagaca

SEQ ID NO: 162760 - DNA, 382 bp, Homo sapiens
gctcatctccattcttttggctcccccggattcatctgattggttttaggactctccttactatcactcccttctcctcgtgtggttctgtgctggtttctcagttgctgattactatttaaaagctctaacaatacttaaaaagttacatcttataccatgattcaatctctatgtatccctccccactcaattaaaaagtacgttgtggatagttcaagctgctacccaaacatatatttctgaaagctaagtcacactaaacactaaatcacaggatccatgtgaagcctgaatcaatctgaatattttacactatttctgaccctgctttgtagaatatgcaagcttcccttgcgtataaacaaacatttaaaataca

SEQ ID NO: 162761 - DNA, 343 bp, Homo sapiens
tgtgcagggcctaaaagggaattttttaaaagtatgctggatagcttacagaatcatcatgatggcttaaaaaacaggtgtggaggctatgcaatttggtctgtcctatttactgtactggccactccatgaggaacaacaaggaaaatgctgctcccaccagaggatgggtgttgcacttataccatggaacacatctggtcctggacactgattgctgcctgtattagtccattttcatgctgctgataaagacatacccaagactgggcaatttatataagaaagaggtttaatgaacttacagttccacatggcacgcgacatcgccaggggatcctct

SEQ ID NO: 162762 - DNA, 421 bp, Homo sapiens
tttaagcgcacaggtaatgagaaagtgcaaatacagccccctctggctgcagcagtcagagagccaagaaaaaactgcatgtcatgccatcctattataataacagattaaaagggcacaaacagggtactaattagcagtcataaaaacttgaagctccagattgctcatcttcatatctgggcagtaaaagtaccacgtgtgcagataacatagaagtaaaataccagggtgcaattgcccagagctcagccagcatcagctgagagaagcagttgcatccagcagcacatcctacactttctcaagaatccaaaggcattcaggtgactgcccaagaattaaaaatcagccagcccagagagaggcaagtgcctcctaactcagcaagggacagcgggagaccttgccaacttctgat

SEQ ID NO: 162763 - DNA, 274 bp, Homo sapiens
caaagtgctgggattacaagcgtgagccgccgcgcccgaccgccaaattcttgtgttactggtcattgaggttatttgctcaagctgtttcctcaccttagaaagtattcctgaaccatcgttaccgctctttccaggggacttgtcctccttcttcaaggtccatccaggtcagatatcatcttatctgaagctctctggcagaatcacttgccttttctctgagttcataccagagaagataagcttttgttacagcacttaattacattgt

SEQ ID NO: 162764 - DNA, 321 bp, Homo sapiens
aaaaatattaaagttaggccaattaacaaccctacagtggcctctacatattcaaatgaatgatagtcacacatctcacacttaaaatcaaaagttagaaatgagctcagtgaagaaggcatatcaagagccaagatacgacaaaaactaagcctcttgtgccaaacagccaagttgtagatgcaaaggaaaagttctggaaggagattaaaagtgctaacccagcaaacacatgaataataagaaagctaaacagtcttattgctgatatggagaaatcttaatggtgtcaaaagaagaccaaactagtcacaacatttc

SEQ ID NO: 162765 - DNA, 140 bp, Homo sapiens
actgaacatactcccacaggggggctcctggagatggtgactggcctggtaagagtcactaggactattttttaaaaattaaaagagatggcacctcactatactcctaggctggtcttgaacacgtggtcttaagtaat

SEQ ID NO: 162766 - DNA, 386 bp, Homo sapiens
atatttcaattattattttttaaagctattttgagcaattgtgctatgagcatttctgtgcataccccttagcccacaggtgtcagagtctgtcacggacactcaggatgcagttggtgggctgtggggtaatcgctgggttgctgagagcatattcaagtttagaagacaacttcaagctttttaaacgtgattatacaatctacactcccactggcaatctgagttctcgttatttctcaggatgctaacagagttcacatgtaagcatttcagttcagccctatgcctggctgattccttctcccaaatacttctcagattgtgaaaagcagaaacagcactggttttagagctagccctgggctcgatgtccagccctgaca

SEQ ID NO: 162767 - DNA, 998 bp, Homo sapiens
aagaaatcaattttgactcaaattcaaagaatgacaaaattcacggtgagagttgggacagggatagggtagagaggaaattcttaataaaaattaggaacatcaggacagagaccattctagtctaatgaaggcacagataaacatataaataacacttagctgggcaggacatggttgcaaagggatgcggatgaaagtaacatatcacgacacaataaaaatcatttctatcacgaactaattcaacaaggaatataacatatcaaaataatcttaagttggtaagcagtattagagatttggataggaacaccagatttaaaaaatgtgaaaacatttttgcttcatatcttttcctaaataaatgaagaaacttgaggaggtacaatgacttgtttaatgccacgctagttagagtcctggtgacaaagtctctattctagttctacttttataatatcagctcactcccaagaagattccccatcacctgttcatcttcctctttgcatctgtggggccaactgatggttaatatttctctatattactaatacctcccaaggccataacagacacacccaggaactcagtaagtgactcagtaaagaaccaagccctgaactcaggtaatgtggtatagagcgcatcaggaattactctgtcctaattctcactagacttttgcttatgtgtcttgatcccatatttcacaagagtaagattcacatctcacaaaaaaagctagcctagaattaggaaacagagatgcaaataacactgtggttaaacattcagatattcaagactctcagaagttataactttgtaaatacgtaccactgagtggctaggaaaaaaaaactttaatgaaagaagactttttttaagtaattagaggggatgttttcataagaggagttcacagtaattaggaatatgtgcatatatcatcttgggaacacttcttgacagacaaataagtacctgggaaa

SEQ ID NO: 162768 - DNA, 366 bp, Homo sapiens
gcaggcacacactgccacacccagctactttatagtgaacaccagagtcatctggcaaatctgttaaaacataaattcctgtaggaggctctcagagattctggtctagtgggtctaggttggggcctgaatttgtacttttagcaagctcccaggtaatgctagtgattcccagctagtgagtttaatatagtaaggaaacaaacacttgttgtccatattgttgacttgatagttataccccagtagcactgagcattcagatcttggtttttaaaggaactaggactttttagagaagtggctgatttagtgcgggagcagagaaaatacaagatgagcctgaaaaatcttatggtgcttgaa

SEQ ID NO: 162769 - DNA, 408 bp, Homo sapiens
aaaatcacactgctgaatttctattaagtcagatttgttctttccatctccaagacagttttatgtttagaccattatcaagacacataactaagtttttcgacctcaaacagcagaaaactctttactccttctagtatgattttggtttttttgttgtttttcttcctgtaaaagcacagattaagcccttccttttttgaatttcatccacaaatctttagacttttccagcctttctccaaagctccctcagtacattctggaaggattctgggctctgtgcaaaccctacaatacatctttttcatagattgcattcatgctatcaagataaattatatgaaaacttatgaagagaaatgttcccattcgagcctaagaatagaacatctagacataagtgaa

SEQ ID NO: 162770 - DNA, 461 bp, Homo sapiens
ggacttgatcttttaccatggggcaacttaaatgattttcaatcaataacttcatctaagagggatgttgaagcaaaatatcatactcagatactgaagaagcgcagaatttttggttgcttcctcccttgtcaagtcagtcagctgatgctttctcaagattctcacacgtggctttgatacaggatttgaatgagtctttttctgagccagtgatacaagaaatatattgtggaagtgtcttgtcttaattctgcaatcgcttctgtacatgtttgaagtcctagaccccaggaggagagacagtcaaattagccaaaggtaatttgtgaagactggccatgggaggtggtggctaaaagtcctccggcccctgctgtctgagcatccccacagaaagtcctgggccgcactgacagctgagaaagaacatctcagggcttggatcccctgtggagagg

SEQ ID NO: 162771 - DNA, 243 bp, Homo sapiens
actccctgttacaataaaatggaatttcttgtagctccctgaactagctatgatattccaaaatcctatgtatttccgaatgccactttttctttctaattatgatgtcttcccttccagatgacatcataattagtcctttctaagcctaattaaaacatctgctctggacaaaatcctttgttgacttccttccaccagccctgggaagaatctatcatcccctttcctctaacaccccta

SEQ ID NO: 162772 - DNA, 468 bp, Homo sapiens
agtgctatgggaacacagagatgacatccaattcaatgtgcagagttcacaaagagcttctcagctagtgatgtccaggctgagataagagagcttaataggatgagaggggcttgcaagtaaagtccaaaatggcaggggagtaacaagagaggccagctcaggagaggctatgtacttacgaaccatatcaagaacttagaactttacactgaaagccttttaagtcaggttcacctattagaaagctcacttaaactgcagtaggaaaactgactgtaaggctggagaccaaaaggagatctcttaaaggtagaaggaaatgaatgtaaatgtgaagaagagaggcaatgccagctttgagatagagaacagaaaaaatatctgcaaaagacgtatctaaaaaagaactgttatccaaaatatgcaaacctggccgaacacggtggctcacgcctgtaatcccag

SEQ ID NO: 162773 - DNA, 453 bp, Homo sapiens
tttgcatggagttgggaaatcgtcatagaagtgaatgcaattaccagggtagggtgctgagtgagaaaggagctaaaggctgagccttatgcaaggaataccagtatctagtggtcagctacaggaaggtatgcctgaaaagtggagaacagtgcaaagaaatgaaagaggaaaccagcagtctggtgtcatggaagccaatgaaggagagtgaacaaaagagaaaggagggatcaataaatgccgctgaaaagatcatgtaggatgagggctgaaaatgcatgcaaatatcaaagttaaacatttactgctatctagaaattaggactgctattagttctactcagttagaaatagaggctgggcatggtggctcacgcctgtaatcccagcactttgggaggacgaggcaggcggatcacctgacgtcaggagtttgagaacaacctgatc

SEQ ID NO: 162774 - DNA, 442 bp, Homo sapiens
tcattttacaaataaagcgacttcctgacatcccccagcgtattcttagcagagccgtaactagaagttattttactttcacaacagtggcctctcacaatgtgacagaactgaaggatttgatccatgaactgactttcgtcatttatacccacaaacctttttttacagagcagattggtcagcgaatttggttataataggaaatatcagtggtagaatactttctcagatgaaagttaggagcactatggaatttagtgaaaaactcattgaagaaaataggtgtaggccgggcgcggtggctcacgcctgtaatcccagcactttgggaggccgagatgggaggatcacctgaacccgggaggcggaggttgcagtgagctgtgatcacaccattgcaccccaacctgggcgacgggagtgaggccctgtctcaaaa

SEQ ID NO: 162775 - DNA, 459 bp, Homo sapiens
gctggtctgtggttgtataaaggaatgttcgtaggaaatacatgctgatgttttcagaggaggtgggaggatgaataacagaccccaaagatacccataacctaatccctgggacctgtgaatgtgaccttccatggcaaaagggactttgcagatgtgattaaatgaaggatcctaggccagtcgtggtggctcacacctgtaatcccagcactttgggaggccaaggcaaggggatcacttgaggtcaggagttcgagaccagcctggccaacatggtgaaccccgactctaccaaaaatgcaaaatataagctgggtgtggtggcgagcgcctataatctcagctgctcgggaggctgaaatgggagaattgcttgaaccagggaggtggaggtttcagtgagccaagattgtgtcactgcaatccagcctgggtgacagtgtgagactctgtccc

SEQ ID NO: 162776 - DNA, 476 bp, Homo sapiens
taggaaaggaggctgcagactagagttcagagatgaaggaactactgtgaagatacagccaaagtatagcaattgaactgtacatgtgaaacgtatgtagctttgcctgaagaactgtttagattttatattgcagtgttgggtagaattttccccaaaacttaaaatttttatgtaacaaaagataaaatttcagtaacccatagcttataaaatctcaactctagtttgtactcacttgcctgctgcttattacccaggaaaaacagtgctaaattactaaaagtttgtcaaagatatacagacaaatgtttttcaaaataaggatatgtaagtgaatagtgtttgtatgaagtgagtttttctaacacttctgtctctcagttccacaaaccagagtcactgcctgctgtggaccctgctttcctggctcctgtgatggagccccagagtagtttgactctaggcagtttaag

SEQ ID NO: 162777 - DNA, 1015 bp, Homo sapiens
ctcttgtcccccttccaaaatgcagaaaattccccaagatttcatatttagcccttgatttttatccatatcaaagatcagttgcattcctacacttgactcatcagttttgctgatctctatctccaaccctgatgtctcacatttcgtgttgtctgctgtgcatttccattcaactatcatctcaaattcactctctgaaacagaactccttatcgctgtcctggaaaatttgccttttacctcgaatctcttatttctgttaatggcataaccctcttctaatcctacatgcttagatccttcaatgagctttagtttttctcccctagtctttcacacagaagtcagtgcatttggctgatcctttccccgaaatcttttatgtctctgatcatttgtctccatttccatagctagcaccccggtaaaagtatcataactctatgtttgaaacccctgtcaaggagctccccatgtctggagtcacagactcctcacactggtcctcaagattgtcctcagttatagatttattcctgtggggaagggcagtacaagaaccagactagattctttattcatttcacctttgttcacaagtccttccttgcagattttgagagtctccaatactatgcagtttattcaaattgttaccaatttttctcagagcaatttaactcccaagtatatgactatgctttcccagaagatgtgatgtttttttaattaagaaaaaacaaaaacaaacaaaaaacagagactgggtctcaccatgttgcccaggctggtactgaactcctggcctcaagtgatcctcctgccttggcttctcaaagtattagcattacaggtgtgagccactgcacccagcctcatggtgtaatttcttccttttagcttccatttatttagaccacttacactgcatgtactatatacatctgtgacatctgctgttttactctttaatgtttctcacgcatgcatatatagtagatagtaaatgaac

SEQ ID NO: 162778 - DNA, 878 bp, Homo sapiens
tgttcactgatggagaggggcacttagagcaagatacccgaccttgactggggaccaagcacgaaatccctaagaggtgacaggaagagagaagtctgaaacgttaagtgagttaaccagatggtgtcagaagtggaatccaaagaagagctaacaacccccaggagcgctgagcgtggttcccactcggcccattgtgcccattgctctcttggagcagctggggatcgtggctagagtacaatggcacaatcacgggtcaccgcaacctccaccccctgggctcaagtgattcccctgcctcagcctcctgagtagctgggattacagaatttgatcagagaagctgaaccactacaagcaatgttaagaatttattgctggaataccccttacacaattgagagagccagttaagctatgtgagcctgctacccctagaactggagctgggcttgaagtctgtaagactaggaaggaatgaggagggcaggaccaaagtggaacctgtgaaggtaaacttggcatccatatctgtttctcagctgaactggcagtggtatctcagcacctccaagcctccaactttgatgatgttctgcaaaagagcttgaacaaattggcaaaacatcagcccctgacatgagcagctttcagaaaaactgaaggaggagatccaggggcagtttgagaagctgcaaccaagctgctgcactatgcagatccacaagaatgtcataaactgtgtgagcagcaacagtgcgtgacccacacaggtctgagtgtaatcctggctgctggatccagttagactttaaattccatgcaaattcacttggtggcaaatcttaacttagaactgaacatggaagagaata

SEQ ID NO: 162779 - DNA, 799 bp, Homo sapiens
  misc_feature (285)..(285): n is a, c, g, or t
tgttcactgatggagaggggcacttagagcaagatacccgaccttgactggggaccaagcacgaaatccctaagaggtgacaggaagagagaaggacaaaaacagaaaagaaaaaaccaaacaataacaaaaataaaataccaaaaaaaaacaaacaacccccaaaaacactaaacaaaaaacccacacaggggcccagttgtgccctattgcgtcgtctttggagcagcgtggggagtcgtgagttttcgcgtcgttggtttcccgagggctagagttaacaanaagagcatcagtatacacgagtacagccagtcaagcctacctacccctcaaaatctacaaataaataatcccctatcctacaatcctacctagaatgaaatcaaataataaacattaatataaaatacataataaaatctaaaagctcagtgtaagcgtagattcaagtaatagaaagttaagtatagtagagtagcttagtagaataaccctctaggagtatcatatagtgaagtagaagtctcagggtagaaaagtctaataatgaggaaagtccgaagctgaagtctcttaaagtaaaactaagttaatatcttaagagttgtcttaggaggaaatttttgattaaagtaaatagtttaccttaaatgtataatattttgataaattaagtatttcattttattatttattgatactctatttatgtttggttatatctctttaattataaatttggtagtatatctgatgattttatgactttataaaatattaatttgttcttactatt

SEQ ID NO: 162780 - DNA, 399 bp, Homo sapiens
tggggatgatcaattgtttcttagtcctttgagccatctcagttaacactgtcaggacattaggcacagacaagagatcgacaggcaagagagcttttcagggcagcatgtaagcggcaatcagctataatcagtgaaaaaggttctctccacgaacgtgagggtattctgttagcttctactacagaggaaagagagagagagagagcgcgcacaatgtgaccacttttcagaagttataaataaggaacctccaggaggagccttctttgattacaatgtgctttgtcaattttcagtctgagtgctagcatgcctcttcaaagaaatgttagattagcaccactcttctgttatcccaaaaactctgtagaaattattaaatgtccttttcagtac

SEQ ID NO: 162781 - DNA, 856 bp, Homo sapiens
acagcatcagaaactggatgcctaacaagattcgcctgcacacagggactgggccatcacaatgggaagtaaccaggactggggtagcccaggaggtatgggaacttgtgcctcttattaagacctgatggtagacaaactcctgactcctcaccccccctcaaataaaaagagtcacctgcctgccttcccccgaggctatgcagtctggaatacacggatactaaacaaaatcaacctcttcttcagctggccaattgtgaatctcccaggcacaatgactgtgtggctgcctcaaaaccgtgaaaatcattacgacaatgaagaattcacataatctatgaacagcacagcaactcacgcaactcatcggcactactcacatctccaacccccacacacctagaaacatctcctggtacacaacactgtgcagcagccctcaaacaggctggagtggagagggagggataccagtctcttaaagccaactgcttcatggcagttgagaacaaacaatactgtgcccttagacttttcaaagcctaagctagtgtgattggcagctgagtgattttgggattgcagagtatggggtcacatacctgactgcacttcagagccaagttaatacctttcattgttcactgcctccagttcccactagatcaggggctcttatcaagcacctgcatcacaatctcataggtcccctggtaaaaatgcagattcctgtggcccactgaaaataaacatctgcggagtagcctgacaaactacttttaaacactacccaggtcatctttatacacatttaagtttgaggacctctgccttaaagcgatgcttctcaaac

SEQ ID NO: 162782 - DNA, 2208 bp, Homo sapiens
cctttccggtgtcttgggtcccttcctgagatgttctctgcagccttctgcatggcgttcaacatcatttccttcatcaacagtcgaggattacggtcccataataacaacagtaattaacgtttattagcatttcccaggtgctgacctttgcacccgttctcccactgatggtcatttggtttatttccaacttttcctactatgcacagtgctaaattaaaccacctgataccaccaatctgcacacgtgggcaggtacatgcaagatctgcagcagggtctggaataacgtcctttagttacaacgttgatgataaaaagttgattcccttctgcacccactgcctgtgtggagtttgtgtgctctcacgactccgtgggctttctctgtactctgctttctttcacatctccgagatgtgcacattcagtgaactggacatctaagtggtcccagtctgaccaggtgtgggtgcgagtgtgtcctgtgatggaacggcgtcctgtccaggctttgtgccctgggagaggctctagccacctgcgaccttgaactagaataagcgggctggaaaatgaatgaatacaagtaattgtcaactaaaaactgttgaagtctacaacaatcacacaaatgcatgacaataaatgatgggatccgaatgcagcctgagcccgacacttctgttcttgtttggttttgaactgtgtggtggtaggaggtgctgtggcataccctcgatagctgcggggagtggggggaaggggggtcctgaagcagaccgttcaggtgtggcttgtgcacacaccccttgacacccaagtgccacaggggaccccaaattccgtcccagctgtgcatctgcaaagctcaaatggactcttgtttcaaattcgacctaatcggtggcacagaaaagctgtgaagatcgtccccagagaaaccgagcggcagcaggccctggaacaggcagagattgtgctgttctgtcctgtccctccctttgggtgacagagaaccacgaacgtctgtgtcctcagagggtcacgggacacgttccagaggggggtggtggggagcacagtgagcacagaacatggtattttcaatccaggctgtactggcgaggagagagagtctctgtgcccagccctgctgatcccccccgctatcagggaggaactgttttcagggacagtctcaccaccctgtgaagaaggatccatttccgtcagcaccctgcctttcatgctcctccctgctgttgagcagcgtgtgctccctccctgcgcccacgctgcccaccccctgttggcatggcctctggaagctgcggacttgcagggactgaatgtgtgtgcaggtacagagtggcccagacgaggacgtgcctcccgtctgctgggctgaaaagctgtggcagccccagacccgcctgaaaagcactgcttttgcccaagaggatggacagattgtcacagctatggttatcataagtggcctgtggctttgtgaggtattagcctcagggagctgagtggagacacacaggcctgccctgtgctgtttttgcaactttcctgaaaatctaaaagtgttctaaaataaaaggtaaaaaatgccacggttggctgggcacagtggcccatgactgtaatcccagcattttgtgaggttgagtgaggcaggtggattgcttgggcacaggagtttggaagcagcctgggcaacatagcaagaccccatctctacaaaaaaatataaaagtcacacctgtgatcccagcactttgggaggctgaggcgggtggatcacgaggtcaggagtttgagaccagtctggccaatatggtgaaaccccatctctactaaaaatacaaaaattagccaggtgtggtggcatgtgcctgtagtcccagctactcaggaggctgaggcagaagaatcacgtgaacccgggaggcggaggttgcagtgagccaagattgtgccactgcactccagcctgggcgacagagtgagactccgtctcaaaaataaacaaataaataaataaaaattttgttaaaaagggcatggtggcacatgcctgtagtcccagctatttgggagtctgaggtgggaggatcatctgagcccagggaggtcaaggctgcagtgagctgtgattgtgccactgtactccaatctgggttaccttgtctc

SEQ ID NO: 162783 - DNA, 579 bp, Homo sapiens
ctgacaaactcagtaaagttgcaggatacaaaatcaacacacaaaaatcagaatcatttctatataggagcaacgaactagcaaaagaagaaatcaagaaagcaatcccattctcgatagatttttttaaaacttccaaaaacaaccgtaggaataaatctaaccaaggaggtgaaagccctctttacaaggaaaactataaaacactgatgtaagaaattgaagaggtcacaaaaaaattgaaagagacaccacatttgtggactgaaataattaatattgtgaaaaaaaccatactaccaaaagctacctacagattcaatgtaatctctacaccaatgacattcttcacagaaatagaaaaaacaatcctaaaatttgtatggaaccacagaagacctcaaatagccaaagcatttctttttttttttttctttttttttttgagacagagtctcgctttgtttgcccagggtagaatgtagtggcgtaatcttggctcactgcagcctcctcctcccgggttcaagagattctcctgccccagcctcccaagtagctgggattacaggcacccac

SEQ ID NO: 162784 - DNA, 506 bp, Homo sapiens
cgtcagtgtcctgggtgtaaacctctgcgagatgcccctgggtgtcaggtcctggctgcaccccatcgttaggactgggggcagcagcagatgagggaagacttgtctcctctggcccatggagtgtccctgtttttcagctcagccagcatcccatactcaattctgccggcgagagctgtgggcctgttttgcaggttgtgtcgtttcagcgggtaactggtatgtgtgtgcatgcgtgcaaaagaaaacatcaaaatgtttggggagtgttttaggaaaatagcaaggagcagattgccaagattcgcttatatgtttctttttctttccttttcgctgtgtacatgtgtgatcagcatcccggagtgttctgaaatacagctttggctttcttaccccaactattcttccgtatagcagagaggatacaattcaccaccaataataccgagcaataaataacccagagaagatgaatagccttgtgtggtggtaaattaaag

SEQ ID NO: 162785 - DNA, 529 bp, Homo sapiens
ctgccaatgggaatgttcagccgcaggtgcagtggctgcactcgaggcctgagctaggaggccctgcctggtgaagggcagtggggtgggagttcacagggaagagagactgggttccactctgtatggtggctgtagtgtgctggaggtacgagtaaagcactcaggctctattgcttccccagcccgagggcagcaagggtggaccccatgcagtggcaatggcagagagcccatggctcgtctctgagatttcctttttccagagaagtgcacagccaccgcagaagtgatcaagcagaggcagggcggctgtgctaggggcccagatccggaagccccgcccagtgtggagtagcagggacagagaccttgtggagagtagacttgtcaatttttcataaggcagctagctgtactgtgcaggaggcccaccatcaaatcctttagctcttcactccctgtccagcctgaaggcagtagggtcaggggctgtggccgtggctaaaatggcgggcttgtctgttaa

SEQ ID NO: 162786 - DNA, 300 bp, Homo sapiens
tacctctgacagacatccaagggaattattcttgttaatagtgttctcgtttaactttggctttagagatgatgttaaaaaaagtttgttcctctcctgattctctcaagtgaaatagaatcatgattctctcaagtagaatacaatagtttctcactctgttagaatagttcttcacataattcatacaatttattgttatcccttgttagatatggcatggcacagtattattgtaataggatacttttatcagcagcaaggcggaagttcacgctcttgtttttagcaaggctgata

SEQ ID NO: 162787 - DNA, 130 bp, Homo sapiens
cagatatgaaaatgattgattatattacagataagataaaatgccaaaaaaagtctaagaaatcagctgacatcatggtagacgattaattatgaccaagggatcaacgagatgacatttaaggtagaca

SEQ ID NO: 162788 - DNA, 322 bp, Homo sapiens
cacctacgatcggttcactttcggattgcgaagcacacaggacagaatggcgttgctgcaccatgaggatggctagacccccctgagggagcgacacagatgctgaagatgtctaaaccccccctgagggagcgacacagatgctgaggatggctagacacccctgagggagcgacacagatgctgaggatggctagacccccctgagggagcgacacagatgctgaggatggctagacccccctgagggagcgacacagatgctgaggatggctagacccccctgagggagtgacacagatgctgaggatggctagacccc

SEQ ID NO: 162789 - DNA, 151 bp, Homo sapiens
gaagcaggagaatcacttgaaccttgggaggcagaggttgcagtgagcgccattgcgcttcagcctgggcgacaaagcgagactgcgccttgccagattttttgttttagaaaatagccttcctaatgattgtgaagtggtatcttgtaga

SEQ ID NO: 162790 - DNA, 536 bp, Homo sapiens
gtggttttcccacccatctttgttgttgttaagcatctgttgagggctaagtgctggggtaaatgcctcacctatatcacttaactcttctcagtctactatgaagcaagtattttatcattactctgcagacaaggaaatagaggctcagaaacattatgggatatgcctaagatcactcagcaggacagtgatgggacagaatcagaactcgggactgctagcctcaaggctgtgctctcaggccacagtcccccagacaagcaccctagtcagactatgaccaaccaaccctggagacccagggcccaccccatggggtccaccacatctctgggaaagctgcaggaggcagtggccaggccagaatatcccatgccaggcttcttccatctcactcttccctagaccagcctccagcactgaccccagggtaccctgctgccttagccctttcccatccaggaattagcacctccaacccaagaggcaacctgttgattccagaacaggcagaccgccaatgagaagacagc

SEQ ID NO: 162791 - DNA, 545 bp, Homo sapiens
tgagctacccctgaagccgcgaggtcatgggactgagggggagtcgttagcatgccctgtggggacaagcagccaggcagtgtggtgcttgccatcgctcttccctctggctgtaagatgaatgggtagcaggctgctcatcgccctccaaccagccccctccccagctcctcccagcaggccttgcagttgcatgggcattcccttgccatggcagccctgccccacaaggacagggtatgctggtcctcttatgggggtggcagatgaggtgcgtgcccagtgacgtccctggcctgtgaacactctggttctggccctttgaacttccacctgactgcaggttggagaagagagatggggaaagcctgacctggccttccctttcttcttcagcgtcagagtgcgtatctctctccccctattggtgaacagaagcaaagccatcacccctgcaccccaagacctcggccaccatagccaaaatgatgggtgctaaatgtactgggcaggaccatgtattccgtggttttaaacttacttag

SEQ ID NO: 162792 - DNA, 491 bp, Homo sapiens
tttaaaagagctgatgaaggtaatgtgaagtcattaaggtggttcttaatccagtatgactggtgtcctcctaagaagagattaggacacagacgcgcacagaaggctgcatctacaagccaaggagagaggcctcagaagaaaccagccatgtgcacagcttgacccaggactttcagcatctcaattgttataaaataaatttctattttttaagccacccagtctgtggtactttattatggcaaccctagcaaatgaacacaggctataatcctattctgtatataacatgaaaaaatgtataatttaccatctttaccagttttaagtgtacagttcagtggtaataaacacattcatattctttttctcccccatcacctcctccccttctttcccagtctctggtaaccaccaatctatcttcatccaatccacttttttagctcccacatatcagtaagacaacatttttttttacagaaaag

SEQ ID NO: 162793 - DNA, 285 bp, Homo sapiens
cacaaataaactgcagcaagtttatggtccatagaaatatcttcccagagcattaacactttcatattcatgagttcaatggattccaataataaacatgtgaaattggctgtgcaggtttcatgcgattctgcagggaggtgggaaacaggagctaagtgggttgccatagctacaaagacatttgatgtcagctctgggaccaaaacctacttcaagttctctacatcagccagtccctgacccccaactcccaggatctccactccctgtgacagctcttgc

SEQ ID NO: 162794 - DNA, 499 bp, Homo sapiens
agatggaccggtccatgcccagttgagaatattatcttgatctactaaataaatagattttatttccataatgacttatttagaattaaaagcgaagccctgagttatatatatattaaaaaaaacttacatgcatttgctagtcaggccagtttaacttatgtgagagccaaaaatcttacataattattaacagtttaatgatgatagattattgattataattaaacctaggctgtcagactaatcaatggtaagtttagtcttaggccttgagttgctaggtcagatctggttttcccaggctgatatttcaaaagtcttacagtcttctttggttgagaatccttcacttttccagttactccaaaggagacctcagtcaggccaaagtttgatggaggtcaagttaaaatttaaaccatatctggaagcaaggtcagtgcagcaaaggcacattctaaagcattacttcatataccttaattcttccggaaac

SEQ ID NO: 162795 - DNA, 252 bp, Homo sapiens
cagaaatatacctaacactgactgtgctgacttacttagcatcataacttaagatacaaggccagaagttgcatcagaatataaatgaattcaccacaactggcaggaaagtatctggatagtggattgtggctcatctggagctgctcacaaaaagccttttaaaagagaaagatggtccatcttcttccagtgaagcttgtagaacacttttcctcagaaaatgttcctattagcttttctccaactcag

SEQ ID NO: 162796 - DNA, 397 bp, Homo sapiens
aaaataaaaaataaaaaataattttcacctatatatgactgtaatgaagggaaaaaaataacttcaggattatataataaggagtctggaggctggaggctggggtggtcagagaaggcctctctagggcagtgagccaaaagatgaagtggcagctatggagaggactgggcacagaacattatagatgaaggggccagccgcatgcgaaggagcttgtctaaggagctgaaaggaggccattggggttggagctgagtgaatgaaggagagaaggtgggcaggatcaggtcaccaggggcactgcaggtcttcataagaccttaggtgtctacagtaagctctttgagggttttaagcagggagtgcactatcttattgaggtttttatttactt

SEQ ID NO: 162797 - DNA, 436 bp, Homo sapiens
  misc_feature (61)..(61): n is a, c, g, or t
agctgttcctgatgtacccgccctgcgcagaccttaccggtctctgaattggataaacctncggcacctatatatgactgtaatgaagggaaaaaaataacttcaggattatataataaggagtctggaggctggaggctggggtggtcagagaaggcctctctagggcagtgagccaaaagatgaagtggcagctatggagaggactgggcacagaacattatagatgaaggggccagccgcatgcgaaggagcttgtctaaggagctgaaaggaggccattggggttggagctgagtgaatgaaggagagaaggtgggcaggatcaggtcaccaggggcactgcaggtcttcataagaccttaggtgtctacagtaagctctttgagggttttaagcagggagtgcactatcttattgaggtttttatttactt

SEQ ID NO: 162798 - DNA, 259 bp, Homo sapiens
tggggggtaccggcgtaagcatggggccctcaaacattgaaactgactgaggccaaataggcaggaggatatgggtaaagccaggtggatgggcaggggtggcactgagaagatgccataggctgaaggcagtccctgaggtcttctcacctacctaatctgcccaggcagctgaagctgcactgtaccacctcccagattaagtgagtgagcacagagattagaatcacgagtaaggggctcagtccttgccttcagg

SEQ ID NO: 162799 - DNA, 306 bp, Homo sapiens
atttttcaaacaataataaaaactagcctttccctctgttagcttaaatgagtgatatttagctattttggagacttattattattatattttaaaaggcagcccaggaatttgcaatgctcagagcctcttcctgcacatgcgcccctggtcttggcctgtggggaataagggaggggacagtgagcagcatacccagatggattccttaaggtcactcacccagcacgagaaaagcaggtctcttttcatatctttaaaggagaaaaacaaagtagagagaaccccaaatacccaataatcccc

SEQ ID NO: 162800 - DNA, 358 bp, Homo sapiens
cggggaacaatcacttccatgagccaccatgcctggccataactgacttttatgatgaaaccagcgtagtttttatagtactttacaggccagcgaacatagtaattagaacctcatggaagtgattgccaaaatataaaaattagaaaaaaagaaaactgtatctttgtcttttactccataccagggtaaattcttgatttttcccagagttcaagataaaaaaggaaaaccttaaaaatactaggagaaaacatcggtcaatataaaaactcttgggtatggggagggctttcacaagaagccttatagagaaatatttataagtgtgcctgatttgtaagtaagattgttctgt

SEQ ID NO: 162801 - DNA, 167 bp, Homo sapiens
ctcttagcaacaacagtggccagatgggagctgagtcttcaggtggcatgtgggaatcagcagaaaacggcagcgagtgagaccaggtgagaattcatttaaacaaatatgctttggacttatcatgtatgcttacctgattctttgggggataaagagataaagtt

SEQ ID NO: 162802 - DNA, 942 bp, Homo sapiens
tgagtcacagggctgcttcaaggagcacaactgaggccaggatctgcaggcctgcctccagggtcatggctgggtgtgtcttcctgcaggtctcttgatgggaaggaccatttctggactacagctgagattgagaactgcttcataatcctcagtaagaccaagctgcatgcaccattttcttgtctgtagccatgtctatgggctctggagttggccacctgggtgagggcctgctttttccaaataacccttccttggtctttgactccactgaggtttcacaaccctaactataggcaagcaccattctacttatgttttctaggaatttactacttaaaatatcttatgtaagtggaatcatacattgtcactttgttagtgtcttattaaataatggtgtctaaatagtgtcttattaaaataatggctttaagatttatccttattgtatgatccgacaagatattttcatttgattctaaagaatttttcattgtatgtgtaagccatgtaggccacatccttttttgtttgtttgttttttttttgagatggagtcttgctctgtcacccaggctggagtgcagtggcgcaatctcggctcactgcaagctccacctcctggtttcacaccattctcctgcgtcagcctccagctgggactacaggtacctgccaccacgcccggctaattttttttttgtatttttagtagagacggggtttcaccgtgttagccaggatgatctctatctcctgaccttgtgatctgcctgccttggcctcccaaagtgctgggattacaggcgtgagccaccgcgcccggccaagccgcatccttttaaattattcatctgttgaaggatgtttgaggtttttcactttttggcttttgtaagtaatatggtttggatctgtggcgccattcaaatctca

SEQ ID NO: 162803 - DNA, 461 bp, Homo sapiens
aatttattttcctgcatttgctacatccatctcctcaaaaattctgatataggcaggtagaaaccaagaactgaggaaaacacaggcggttcataaatgggtcaacttcatttctagcaatatggcaactagagacaaagcctggaactgcagcacaatgcaaacttgggtatatccccgattccaggagctcttggtggatgaactaggagaaaacccatcccactgattatgatatgcctactttggtattggttcaggattggaaagaaaaaaggaaagcagtatcccctgagaatttctaatcttaaatccaaaaccatccagatgaagggctggaattcataccagctctactacctaaataattctaagctagaagtgtagtttaaaattattccagattattccactgcactccagtctgggtgacagagcgagactccgtctcaaataaaaaa

SEQ ID NO: 162804 - DNA, 509 bp, Homo sapiens
ggctcaagtgatctttccatctcagcctcccaagtagctggaattacaggcgcatgctgtcacatccagctaattttttatttttcgtagagacagggtctcattatgttgcctaggctggtctcagactactgagctcaagcaatccttccacttcagcctccctaagtgctaggattgcaggcatgagccactatgcctgacctcagaaattttaatttgaggaaatgtagacaccatttaggaaattgattgtggttttaggatcctgcactctggcaacaatagtaggctttgagagatgaaggatgtgatattcgatgaactgcatgagttaaggatgaatctgagatagaggttctgaaacttgagtgtgtattaggatcgcctaaggagcttggtaaggttctgattttggcaggttgggtaagaggacagaaattgcatttttaaaggcagtctcggcatttctgatgtaaatggtaaacaagttcctagccagagacacc

SEQ ID NO: 162805 - DNA, 409 bp, Homo sapiens
ccccttttttacagaagaaaattatttcattccctcctctttcccacctctctctctccctgacttgctcatattagagatagaggcaaatgatcagagtaaattcgttgtccaatagtaagttcatggtattttctcactatcccatatgtagtgaacaataataccttgctcttgcacaagaatcacataactaatagaatcaatataattgaaaattgatatttaaaaattatgaactcttaaaaatcatggtttataaatggataaccaagtaatttttgttggtttctttttaaagaagataataaaggtgtacaaaatacatatttacttactttttttttttttttttgagatggagtgtcactctgtcaccctgactagagtgcagtggcacgatctcggc

SEQ ID NO: 162806 - DNA, 321 bp, Homo sapiens
ctcagccaccctgagaagagagaaggtaaattttgcgatccatttgcaaatcaagctagaatgtattttcagacctgggtgtgtattcagggcccgtctatttccttctaccattaaacctgcgaggacgaaagtaactcaagttcattgttctccaccacgtaatctttcttcctatcctggattgtagcgggggcagctcagagggcatgtcaagaaggaaggaaggggaagggctatacaggatatggtgctggggcacacagtcagtgctttgggtgatcaacatcaacgtggtggtcctgggttaggattttgagg

SEQ ID NO: 162807 - DNA, 790 bp, Homo sapiens
aaaattgccttagcatgtcacaccagcatttgtcatccagctctggagaaatgacatgactgttagatactatgcctgtttaattgcctctggattaagtcattgatagctagacttttgagctagttagctgtagaaataatagaatccagtgtttcccaaagtgtgttccaaagaacacaagttccaaagatgctcttctaaatataggattctaggatgaaataagtttggaaaacacataccatcttagaaagttagtgaacatgagcacatcaaaggctctaatttaaatgtcctgtgaggagagaaaaacacaacaaatatctactgtcagttagcccagtgttttccagattaatttgaccacagaaacttttttgagtggcacctagtaacactgcaaggaacttgtgttctaaagaacaccctttgggaaattctggtatattgaaatattgctgtgttttcattcacgatgactcttagtagcagtacaatttgcaacttagaagcatgagcctttcatatatgaagctgacttgttaataaaagcagtgttaagaagtagtatgacttaatatgaccaacagcagcctcatattgatagcagaacaatcctacttaaagctctaaacatcatccccccctttttttttttaacggaatctcgctctgtcacccaggctggaatgccgtggcgcaatgtcaggtcactgcaagctccgcctcccaggttcacaccattctcctgcctcagcctcctgagcagctgggactacaggcggcc

SEQ ID NO: 162808 - DNA, 144 bp, Homo sapiens
aaggaagataccctcatcaacccaattttacaaatggagaaatagaagttaagggaagaatctgaagtagtctcaaaggcagtgacaggaaggatgtggagaaagctgagtgtcaaagtcagtattcaggaccggctttactgc

SEQ ID NO: 162809 - DNA, 221 bp, Homo sapiens
atgtgattaagaggaaatgaattttaagctgagaactgacatatgagagcatgtaggtagggcaaagagtggagaagggcattctaagcagagtgagcagtatgcaccaaggcccccaagtggaaaggaatttggggtattagatgacctcaaaggtcagtgtggccagaacatattttgattactgaggagtaagatgaacctggagagttaaggaggaa

SEQ ID NO: 162810 - DNA, 153 bp, Homo sapiens
cctagactagtgatatgctctgctgcagtaaatgattcaggcttcagtcaaaagccctaaattcagtttggaaaaatattgagtgtttttcaataagccaggattaatgcaaaagccaatttgcaaccacagttggtgctttttctactcctg

SEQ ID NO: 162811 - DNA, 367 bp, Homo sapiens
tttaaaactaacaattctatttaaaatttagaatccccaggtacattttcaactcagttatttttgtcaattaattatgagtctaaaattaattaatattcacacaacattaaaataagattcctctgtcaaaagcaggccaaaattatcaccagtagataaatataagctccaataatttagcatgagaaagtctgtagggcaggttttgtaaaaatggaaatttcaaacaatgcaaggcaaacaccaccaatctcaatactgtcaagactgtgtggatactgaaacctgctcttagaagtataccacactcctgagatacagagccagttggttaaggagcgtaagaagagatcgaggtcttgag

SEQ ID NO: 162812 - DNA, 301 bp, Homo sapiens
tggggatgacatgggtggaatctcatgctgacctttaagaggtatgctatcccacctacaaggggacactgggttcttgaggccaccgtcacaggcatttgtggaccctgaaaacatatcagggctctatgagaactgaaagattgttcagcaaatagctgatcccttctggagtctgtggatggcactgaggaccaaaaatccaaacaatactcatctatctgtccccctttcatgtcccacaagaggaccccacaatcttcataggtaatgaaactgcaggaattctttcattgactta

SEQ ID NO: 162813 - DNA, 768 bp, Homo sapiens
gatgctttatctccagcctgctccctgcccacccccttccttccctggtttatggcattccatggcccagagttaggcactcctgcccacaccccaaacagtgccttggccgaggggaaggagaccctctcccttggagggcagggccctgcaaggctgccacagtgatgagaaaaagccgggaggttgtatcggccagcctggcatgccgcctgctgggagagtatgcaatccaggaatccaggcctcagccaaaacatcccttccacacccagacttccatccacccatggaccaggcgccacgtcctaactgtgtgaccttgggcaagttgcttcccctttctgggttccccccatctgtaaaatgtggaccctaacagtacctacccccatgatgttattgtgaggattacatgagttaatactggcaaagtgcttagaacagggtctggcacatggcagctacaatatcagtatttgttggccgggtgcggcggctcacacctgtaatcccagcactttgggaggccaaggcaggaggatcacttgaggtcatgagtttaacacaagcctggccaatagggtaaaaccctgtctctacaaaaaatacaaaaattagccgggtgtggtggcacatgcctgtagtctcagctactcgagaggctgaggcaggaggatcgcttgaacctgggaggcagaggttgctgtgagttgagatcatgccactgcactccagcctgagtgacagagtgagactctgtctcaa

SEQ ID NO: 162814 - DNA, 145 bp, Homo sapiens
aaaaatcagtggttataatgcaaacacacacaaaaaggcatatgcccattactgcattctactccatactgtatgtgtatttgagttagtataaaagttattttaacattgctcactatttaattaattctcccttggaaactga

SEQ ID NO: 162815 - DNA, 348 bp, Homo sapiens
attgcttctcattgtctgtctccccacatcctcccattagaatgtaagctccacgagggaaaggatctttgttttgttattcaacgtatcccaagtgtctagacctgtgtctggcacatagcagttgcttgataactatttctggattgaataaatgaatgctgggctgtggtatgcaaaaataggatcactgaaatttcaagtcctggtggtttaatttgcagtgctgatgttatttttctcattcattggctaattttttcttttcttttttttttttgagatggagtcttgctctgtcgctggagtgcagtggtgcaatctcggctcactgcaaactccacctcc

SEQ ID NO: 162816 - DNA, 601 bp, Homo sapiens
agacggataagcaaattatgctctagtcacaaaacagaataccatttagcaataaaaaagaactagttcatgccaacaacgtggatgaatctcagaaaacaagttgtgagcaaaagaagccttataaaaaagcacatactataagtcatcacactacatgattccattacgtgaggtctgagaacaggcaaagcaattcatggttacagaaattagcagctgggcgcggtggctcacacctgtaatcccagctacttgggaggcggaggtgggaggattgctttaggccaggaatttgacaccagcccgggcaacagatcaaaatcctatatcaacttttaaaaagttgatgtttgttatacaaaattagcacagaaatgtctagaaaagaaaatcttgcctgtaagcctatcatccagtcatacttagcgctaaagaaaacatactcctgatgttttctctaccagtcttttatctataattatgtatcttttttaaagtcaaagttggagtagtatttccagttaactttttggctgattattttctgtaacacaaacggaatgaatgtttagcataataatttagggtgaagattttc

SEQ ID NO: 162817 - DNA, 396 bp, Homo sapiens
atggtcatagctgactctagaggataaaccgaggctcaagctgctggatgctgtcttctgattccattccatcaaggtggtgccgccaggaagacaggtaggtcaactctccatgaaccagaatgtcagtttctccagtgagcctcattccccacctgcagcatagggtacctgtggaccaactttgacactaatatttcactgctcttctgtgagccatcagtcctcccagtgtccctttgtgcctgtcagggagagggctacacaacaaggaacccaaatgaagtaccttccaagactgattacaccaaaacaagattttctaattctatatgatcagctaaacaaggaattttttttccttttttttttgagatggagtctaactctgtcacc

SEQ ID NO: 162818 - DNA, 443 bp, Homo sapiens
tcatgctgcaaatttaaaaatgtttcagatccgctgttctagaaaaacatgcctaaaccaaacatgccctatccgtgtctgtgcagactgctggatgctgtcttctgattccattccatcaaggtggtgccgccaggaagacaggtaggtcaactctccatgaaccagaatgtcagtttctccagtgagcctcattccccacctgcagcatagggtacctgtggaccaactttgacactaatatttcactgctcttctgtgagccatcagtcctcccagtgtccctttgtgcctgtcagggagagggctacacaacaaggaacccaaatgaagtaccttccaagactgattacaccaaaacaagattttctaattctatatgatcagctaaacaaggaattttttttccttttttttttgagatggagtctaactctgtcacc

SEQ ID NO: 162819 - DNA, 467 bp, Homo sapiens
caaggtgacataaaaaataggccctgcaatgggagtgatgacattttaaatacttggtgtcaggaaaaccagaaacctgtcaccaagcatttagcatcgcctctctttttggtcttatcttctggggcctcaaacaatgaaactgtgttaatgggaggtcctcacagagcgaatatgcactggccggttttggagacatgtagtcaagtggtggaaaacggaactggaaaggtggtatgggttagagttaggaggcttaaacaaagacatctagctttgatgtggtaggcagcaagcagccaatgattatttctgagcacagaaatgaaagtaagttctgtaaaaaaaatcacaaacaaaataaaaatttaagttggttcatgatgtgatgctggttgctgggcattttggcaaagttctccaaaggtaacaactttcacaggcaacagttttttggatctgatctt

SEQ ID NO: 162820 - DNA, 419 bp, Homo sapiens
aggcgggcaaaaactcccaaatcccctcgctgctatgttcgattctcctaatgagatacactcatgggatatttggaaaacaaaagtgggcagagggaatttttcttgagcagggggcgtggttatgtgcaggcttcagcagacacaagtttgtgcagtagccagtctctgcagccccctctattcccctgcttcagcgtgaagtagctgtgaggttggcataatttttccttcagggttcccaccttggagtacagatgctgtgatgcctgatatcaactctttgacttctgcagtggcagccattcctgtgcccatgttagtacctatttctgcttgaaacaccaagagtagtttctgatttgtgcactgatttctggtaaaagtggtgttccctgcttctctgcgacttgagtctg

SEQ ID NO: 162821 - DNA, 503 bp, Homo sapiens
tattttaaaataaaataaataaaataaaaatacccaagtctggacagaaagactctgttccagtaataatatcattcatgtatcacatatttattattacatgccagtgctacataccaggcacaatagatgacttctctgaccttccatctattgtgcaatgtctctgggaaaaggcagccactggaagccaggagcagtaggtaggaagctgcagtggtttctcttgagaccaagcaaagcggcagtgcctacagagattctgcaatttgaaggctatggagagaaaaacatcaaaggaagagccatccccacttctctccctcaaagttatacaaggatttcttttgcttctttggtttgttttggttttggtttctttcttttatttttttttggagacagtatcactctgtcacccaggcagaggttgcagtgagctgagattgcaccattgcacttcagcctgggagacatagcaagactctgtcccacctcccaaa

SEQ ID NO: 162822 - DNA, 185 bp, Homo sapiens
tatttacatttttaaactaagactaaaggttgtttgaaaggtagattttttgggagctttctgcaataatctctgaaggcatgcactttggtttggactgagaaaaaattataggtgaggaagaaggggagatcaacaatatacatctcctcaatagccttgtttttaagggaagcagagaatgg

SEQ ID NO: 162823 - DNA, 423 bp, Homo sapiens
aattccctgggtctgcaaaatgctacttgtggtgtggctggctttgaatctctgtggtttcagtcatcctgcatatcctttcctgtattcaaaatgctttctatcccttgcctcaagttttaaaaataggggcccaattttagcatttgcactccacagaaaggctgcaaattaacagtgtttgtgttgaccttgcatttgaaatgataaaaataaaactggggttatattctttgctcatgcctattcaaatttatataatttgttaattacataaaatgtttttagtctcctataaccaggcaaaagcaccatgtaaacttatcaaaaaagcaatttacccatacaacgttgtttcctatctttaaagctttgtttttatagctaataagtgtaaagatgttgctttgaatcctttggcat

SEQ ID NO: 162824 - DNA, 203 bp, Homo sapiens
acagtgaccagagggaactacaaccgggcagagggaaccacaacaggcagaaggaacagccacaggcagggggaacagcgaccagagagaactacaaccgggcagagggaaccacaacaggcagaaggaacagcaacaggcagagggaaccacgaccaggtggagagaactgcaacaggcagagggaaccacaaccaggcaga

SEQ ID NO: 162825 - DNA, 281 bp, Homo sapiens
gtttaaaaactttttccaacattacatctatagacggtagttttcttatagagctttatacaaacttttaattttgctctgatcttatttggcactcaaataagaattaaatgtaacaattttttttaaaatgagtatttaaatggaagagaaaacatccctaaattttgttttagaaagactgatgaaatgggatcattctgttgggtcttatagatggcctatttcttttagttagtgatgcaaaacttcttgctagagcccagttctaatgtgaggta

SEQ ID NO: 162826 - DNA, 902 bp, Homo sapiens
ggtagacacagccccatttggggaatggagaggttttcagcctctgctcaccgccttggctgggcatccatatgtagtcagcaacctacacaactgtacgtggtggtcatgggtccttgtcagtgagagcctctgttttagtctatgttgtgttgctataaaggaatacatgaggctggatcatgtataaagaaaagaagctgatttggctcatggttctgcaggccatgtaagacacatggctccagcatctgcttctggtgagggccttagggagcttccactcttggcagacgggaaaggggaagctggcatcccatggcaagaggaaggaagcaagagagaagggaggagataccaggctttttccaacaagcagttttcatgggaactaacaaggcgagaactcactcatgacccaaggacagcaccgagatgttcatgagggatctgcactcaggacccaaacacctcccacgaggctccatctccaacactggggatcacatttcaacgtgagatttggaggggacaaatatccaaactgtatcaccgcatgcacaggtggtgtttgtaattattgaggaggtgtgttgccatgttagaaacaggccagcactggctgggcgcagtggctcatgcctgtaatcctagcactttgggaggccgaggtgggcggatcacaaggtcaggagatcgagaccatcctggctaacatggtgaaaccccgtctctactacaaatacaaaaaaattagctgggcgtggtggtgggtgcctgtagtcccagctaatcagagactgaggcaggagaatggcatgaacctgggaggcggagcttgcagtaagccgagatggcaccactgcactccagcctggacgacagagcgagactccgtctcc

SEQ ID NO: 162827 - DNA, 111 bp, Homo sapiens
tgagactggggagggacaaaggctgctctgtcctggtgctcccacaaaggagaagggctgatcactcaaagttgcgaacaccaagctcaacaatgagccctggaaaatttc

SEQ ID NO: 162828 - DNA, 557 bp, Homo sapiens
caagtaaaatcaagttgcattaagaattatggaggaaagaaaaaaaaggacaaaaatcaattcaacaaattctacttcataggaaagtttggatttttctttaaatcctatttgtgccttttaattttctaccagtgggttttaggtcattcatttgtaatttttttttcaatttgggttaataaagaaatcatgcaataaatatccttcattcttggcattcaatgctcaaactttcttgctaattctagagtcccacttttgcaataaggaaactattcctgacagtccaaggctacacaaaagaaaaccactgaaagggtaaggttgctctctctgtttaaatcactaacactgttacagacgatgtcaataagcttcttctgtagcaaaaatacatgagtgtttttttgtttgtttgttttttgttttaagatcagatctacaattaaagaggcaatgtggctgaatgaattaatctcaaggctggaagccaaaagttttaaactgcaaattcacctctgccaattactttctgaccaactctgacaatcttc

SEQ ID NO: 162829 - DNA, 368 bp, Homo sapiens
  misc_feature (348)..(348): n is a, c, g, or t
  misc_feature (351)..(351): n is a, c, g, or t
gtcttacgagatttctagaaatcactattaattgattttaactagctttataatctcccccagttactcaaggcttttatttatttatttatttatttagagacagggtctctgtcacccagactgaagtgtggtgacgtgatcaaggttcactgcaaccttgatctcgtgggcttaattgatcctcccacctcagcctccgaacacagcagagttaatggcaggttggctctacttcatcagaggttctggaggaggaaaccaagatcttccctgaaaggcaagatctggcatgtgccaccacactggctttttttttttttttttttttcttttttgggtcgtaanacntacccgcgggacgactc

SEQ ID NO: 162830 - DNA, 353 bp, Homo sapiens
gtcttacgagatttctagaaatcactattaattgattttaactagctttataatctcccccagttactcaaggcttttatttatttatttatttatttagagacagggtctctgtcacccagactgaagtgtggtgacgtgatcaaggttcactgcaaccttgatctcgtgggcttaattgatcctcccacctcagcctccgaacacagcagagttaatggcaggttggctctacttcatcagaggttctggaggaggaaaccaagatcttccctgaaaggcaagatctggcatgtgccaccacactggctttttttttttttttttttttttggtagagacaaggtgtcact

SEQ ID NO: 162831 - DNA, 226 bp, Homo sapiens
gcggcagcctgccttaagtcagcacacctgccttcgaatgtggcggctctggctcgtggttcctgcaactaccaaacagcatgacacaaataagagaagaggaggcaggaatacccttctaacccgcctgcctgccctgccaggacttctttttttgtttttgttttgttttgttttttgagacagagtctcactcggtcacactgtgtctggagtaatggcgcga

SEQ ID NO: 162832 - DNA, 182 bp, Homo sapiens
cagtgcagatgtggaacgattccaatttaattttagtaggaaaaaaaaggaaagagggctgccaatggctttggcttaaaaccataattacttttaaaaatcatttctatccaaggcagataagatttaataagaactgaagcttgtatagttgtttatttgggaggaagggggtagtgctt

SEQ ID NO: 162833 - DNA, 216 bp, Homo sapiens
aaagctgggtgagttaatgcctggggatagaggtttttcttagtcttctgggattcagaggaagagttccaattgtaattagaagcaatgatcttggcatgtactagaacccattagtctagttttaattttacttttataaacccttctgagaaattaaagctccatctcccactttgcacaattttgacttaagtacaaggaagggctcatgtt

SEQ ID NO: 162834 - DNA, 510 bp, Homo sapiens
agcgatcattttgagaagtgtagtggaaggagagagagaaaaaatgtgggtagttcctagatatattctaatcaatcttaccattcagatcatgtccaaggccccaaggtatatttctcaagccccatgagagtagaaagaatcccctgaaaactttctgatagattgaatgcagatagagaaaatgaaaaaatcaagaataacactcagatgtttggcatgggaaaacagatggcaggtggagccattttggggatagaggcaactgagaaaagagtgtgttggtgaggagtgtgcagggaggagggtacttttttagttccgtactaaggaaactaaatttgagatagctattaaacatccagatttagatgtcaagtaggcaactggatacaaaggtctgcacttttgtctagtgaggtcaagactgaggatataaatttgggagccatgaacacaaatgatctttaaagttctagaactggatgaaacatctcaataagacagtgc

SEQ ID NO: 162835 - DNA, 367 bp, Homo sapiens
ttgaagcaaaggaacagcaagtgcaaaggccctaaaacaaaaatgtgcctgccatgtttaaggagcagtaacaaggctgaagagtaaaggacaagtgggaagaatggtaacagaggccagatcatactggtgaccatggtaacaaattggcttttctccttttttttttcccccttaagacagggtctcactttgtcactcaggctggagtgcaatggcgtgctcatagctcactgcagtcctgaacttctgggctcaagtgatcttcctgccttagcttccttagtaactgggactacaggcatccagcaccacgcccagctaagtttttttttttaagagatggtatttcattatgttgcccagg

SEQ ID NO: 162836 - DNA, 288 bp, Homo sapiens
ccccctccccgggtactaactcccaacagaggtaaccactattcagttctaacctactctggcttttgtcaccatagtttagtttgcctgtccttaaacttcatataaaaggaatcatgtagtatatatactcttttggatctggcttctttcactcaacattatgtttctggaattcatccaggttattgtgtgaatcagtcattccttcttttttattgctgcatagtagtctattgttagcaggtagtaattttttttttttttttttttgaaatggagtttcac

SEQ ID NO: 162837 - DNA, 647 bp, Homo sapiens
agtacccttagcatgcttgtcattgtttaggagctacccagagaaatatggcctttctgtgaacatggtggtgaatccatagggtggaactgtcaactatgctccaaatagtagtagtagtggtagttgttgttgttttaaggagatttgagcagtccacctccatggcaaccccataaagtaatttaaaaaaaaaagaaccaagttggagagctcatcctccaatttactaatcttgcttttatatttcaagacctactatagctatagtaatcaaaatagttttgtgttggcaaaaaataaacatatagattaatggaacagaacagaaaatccagaaatagacccatgcatatattgccaatttttaataaaagtactaagacaattcaatttgaggggggaaaagggccttttcaaaaaaacggtgctggatatatccataagaaagaaaaaataataaccctattaacccttacctcataccatatacaaaatttaactcaaaatggatcatagacctacatataaaacctaaaactattacacttacagaagaaaagaggaggtgaccttggagtagacaaaggtctctcagaacacaaaaaaagtaggagccataaagacacttgacaaacttgatcaaa

SEQ ID NO: 162838 - DNA, 540 bp, Homo sapiens
  misc_feature (145)..(145): n is a, c, g, or t
ggagtattgggggttatgatatcactcggctcatcgaagctcacagaatatgtaaggttctggcacgtccaaagatgttaggcaaatgtaagtagaaggcgcaccgggcgtgacacacgtgtttcatcgatacaaagtcttctgngcattccttcattcattccaacgcttcccaggcatccaggatgcgccgagcgcggtttcagctcacagtgaatcctacatcctaggaaacaagaacatgtcaggagttgggaagatcatgaaaacaaagctccctgttacaaaataggcagcaagcaggggccagagatacaacccacttcactccctgcccacttctgccctctccagtgctttctcaaattgagatattaataaaatccacaaaacacagaatcagtctttaacagtaaacaaacttagcggcattgagtatgttcatcatgttgtgtgaccatcacctctatctagttccaaaacatttatatcaccatccccccaccaaataaaacccagatccatcaagcattctcccca

SEQ ID NO: 162839 - DNA, 512 bp, Homo sapiens
atgtagacttggacaagctacttaagcttactaagcttcaatttccttctctgtaaaatggggataacagaccttatctcatagggtgattatgagcattagatgaaatcgtgggtgaaaggctcagtacagtgccaggtatacaagaagcattcagttaagtaatagctgttattgttataactgaggttttcacaagccgcacacttttgctcctgatattttttcttaccatgacagcaggccattgtttggttttctgtgctgagggaagcagaaagttaattaaaatggaaacccccaccaagtgacaagttgagagagaaaaatgatcgttcacatgatgcataaaaaaagaataaaaggtcttttttattagggaaaatttcaaacatacaaaagcacaaagaagagtgtaaggaaccctatatcatatcccttggcttcaactatgactgaaacgcatggctgatccgtaaccccatggtcaaccccagattacgtgcaagtac

SEQ ID NO: 162840 - DNA, 459 bp, Homo sapiens
caggcacccccacggcccatgtcacccggccgtggagagaactgcctgtttagaagtgacatttcgggctctcctgcaccgtgaagactgtgaactcattcagttcactgcttcaggggctgctggtggaggctgtgatggaggagacctgaggccggggggtggggcctccctacacctgatttgatggacagctggggtttggtgtcccaggagcagagcaggctgtgctcagggtccagctcagcaactgcacccactcgaggcagttccttccccatggagaagcctttgtccatgggagagtctaggcctgtgtccccagctctgtccaggtgagaggcacgtgccaagaacctgcaaggcaggtctgggccgcagcccagctcatgaggttccacgggaagagtgatgtgcaggctcgggagcgtgctctgtggtgaggccctgagtgtcagc

SEQ ID NO: 162841 - DNA, 1198 bp, Homo sapiens
ctcctgacctcaagtgtgccgcccacctcgaccccccaaagtcctgggattacggcattaagatactgtgcctgcctgagtttgtaaatttctttctttcttttgttcgttttttggaaagaagaataagagatgaagaaaaatcagactggaagagggttgttttttcccttttgtagttgcaaatcctaagtgggcagtggtaaatttctagaatcatttgtagcattctgttttaaacttggcaatttaaagatgttataaatgaggagtccccagaaaatggtcatttcattatcaaaagcagggttgcaaatttcagattgatcttttcaaaagttagatttgtacttgttctcagtgttcctatctctggaaactaaagaacctcctccattgttagctgaaaattgcacagtgaatttgaaagtcaagatgtcccagtcatggacataatgctgcgataggttactttttggaatggagaaaacatcttagagattgagtctgcatcagaatatattctgaatgagcatggaatgttctttacccatgttagatattaattaattaagtttttccatgtttaacttttttaaaaaagcaagacaataaaaacagtcttgtaatctgaacacatatttgggttttgttgctagcataaaaattattacctagtggatggtaacactgttttgaaattctagcttggaggagatgtttgttacaagagaaaaggtgtttcattgaaacctaacagggtaatttacatggagagatacttgtttctcttttgagttattgttaggttaagacataaacttagaaaaattgagatgctcatctttcccatcttagatttactttcactatgaactttataaattcttttttttgagacagtctcactctatcgcccagactggagtgcagtggcgtgatcagaattattcaagcttatgtatgtgtgtgtattacacatatattacacatatgtataaatatcaaatatcttttttacattatatataatggtatatatggttgctatatgttttatgtgtgtatagcagtatctatctatactgccttatttcccaggcatatttatatgcgaaactttttttctgtgaaatcttattgtaccaagaggaataagtatatatgcccacaaaaagactgggtcatagcagctttt

SEQ ID NO: 162842 - DNA, 557 bp, Homo sapiens
tcatatagtaatgaggcctgtcctctgatctgttccatgttaagagttttctgtttcacagaaaatgtatgatttgtccctaaaatatttgcacttaatattcacctataaacagtaggtttctgtgtttaagtattctttataataccagatttgcacagctatgggcacaaatggggttattgaagaattttttttttcttgcttgagcttacttgaatagacaaaaggtgttttgtggtatgttgatagtcagtgtaatttggagaaaaataacaaaaacagtaaattgctaccccctgccgtttaaaaaagtactggaacattttgacctgttaaaacattagggaatttgaagcagaaaaagagattagatacagaaaaaaatcatcagaagtgagctcataaaatacttagagatttattttattgatttgttatatcctaatattacaggaattaatagcacctattaacagtttctcatagtagattgatagtatttacaataatgacttttttttttttttttaagacagcaactcactctgtcaccc

SEQ ID NO: 162843 - DNA, 233 bp, Homo sapiens
tccctcctggttgagcagcattaatactctggctagatttaaattctggctttctccagttagaactgaaagttatgacaatgtaatcaaaatagaatgtgggtttacagctggccccctggcctggtttgtgaacataaaacagaaacagaaagtgtaagtggtgacatcatattctctcattcaatgtgaaaggccaccgaagtctttccagaattatttttgagaataat

SEQ ID NO: 162844 - DNA, 860 bp, Homo sapiens
gtttgaaaacctatatacatgcgttaagcaagatgctacagcttatttctctactagctggctgtgactttccctttcgttttccctatttactctattagtgaggagccccttatctcgtattttaggtccacatttgtacatagttcacaacaggaattagtaaataaaagctgctgacagcagtactttaatttccccctgaagctcattcatctgggaggtagccagcctctgttacaccacaaagacctggcttcaagcttcccgccttattttatgagaacatcagcctctcaagtccagctgattattttgtttcttaagctacatcagtatagaaacagaaggaaaagtggaggaagttaggagaatagaccctgagtgtagcaagtagtaaaggttgacaatctgctggaggaaagtcagcatgcaaaagtccagagatagctaaaacacacagtacgagggggagtggacatgaagggcaacccagacagtccggatgcttagctgagtgagcatcagtcaccccaaagcctgactcatctcaaacaccttgattttctctactgtataccccacacctcaccatgaatggagagttgctgtggttgatttcactcctgagttaccatttctacagatttcaccaacaagaacatgagtgattgtttcagtattgacctaaactttgactcttggggttgagacagttttctcaatgaactgagtttgaaccctggtggcaaggtgggtgccaggtggtgttgatggtaggacaacccagagctgtgatgactccccaagagcacggcctatgaaacctcatggacttggcatgttgttgatggaacatc

SEQ ID NO: 162845 - DNA, 294 bp, Homo sapiens
tcagcttggtgcagccctgatttcaccatgagctatgttcatcctgaaccttctccctagaggcttgatcagcgactggaagtgtcactccctcccttctgagtctctggcagctccagcccaggtactgcttttgggatggcagcatggccaggtggccttgcctgccccacccagctcctcaccccacccctgctctgtagatcctgcctccagtagcaaacttgggccccatgataagaagtgcccaccagtctggcagctgttatggaaatgagcaatgcacacaccatc

SEQ ID NO: 162846 - DNA, 411 bp, Homo sapiens
gcggttcagcgtctgcgcgccttccgggccgcctgctgcctgtgtggggctgaatgttctcctcaaggccatccttaccgttgggcacttcccttgggcttacactgccctgcccgaggcagcctggcaaggggccccacccgtcaggaagtaattcccctccaggaaagtgaaacactgtggcgatacggcttacgggttcctcacctccagttccaggaaaaacccaagacaaacagaccagatgctaggaataagcctcaacccacagcacttagaaagccgcaggctttgtgtgtcttcagggagtggcttcacccttcttggaatctgtcttctgccagcgtcactcatactgctgccactccttctcccgagccaacagcacacctgtcacctcggcacacctgt

SEQ ID NO: 162847 - DNA, 504 bp, Homo sapiens
ttctcaaggtacctctaggccaaaaggaatccctaacagttctacttaagtagttagggccaaataagtatttaagtcctaacaacttagtagcaatttgaaaaaataatacacataaaaagatttccatttcatctttttttttttttttttttttaaccagggattaattcaaggcctctgtgattttagagaaaaaaaaattgcaaacccagcgattgtgttttgttaaaaaagtgtttaaaaccagctaggaaaaatgtgagtgaaatcgatagttgtgtcgcaaatacctggggagagtgtacaggatgcgcataaaattggcattgaaattaaaagtgattttaaaagtacaaaataggacttcaccagggtaaaagtatcgaagggtgccctgtcaccaaagtccatctatccactctaaagaggagtcaaaattgccgaatgggggatagtcccaggagatatccgctacaagggttgggagaaaaagcttaaacc

SEQ ID NO: 162848 - DNA, 232 bp, Homo sapiens
gaaatgcattttgtatgagtgtgggtatatatgctgaatttgaccagtttgtaaatcagtaagtgggtggtaattcaaagtcaaacgaaaactattcagttggtgaaaagggtggggtaagagaatatttaattgttttggaatgtactcaataaaaatatttctttttttaactctaggaaaatacactggatactttgtttctaaactcactgttgcacaaataaataaa

SEQ ID NO: 162849 - DNA, 515 bp, Homo sapiens
taaaaaaatttcaagtgtcatcgaaatcagcaacttagggtattttgtgtaactgaatattctgattaagtgggggctgccctgtatgccacttaacatgaccaatttccaaagattagatggccataattgcccttgacactaaaatcatgtgaaacacagccagtttctttgatgactcaaaacgtactttgtgatcttgccaagctttgagatcatcgttacaagcagcattttggttgtgaaaaacaactctccttatttaaccttttggggtggattctgagcaagaagttccctaggctacggtcaatctcgctgaaatacaaccacccaccgctcctttctgggtttagaaatctggttttcagaggtgggagtggcttcaagcagcgtctacctgtgttcagaaaagatgaagaaagacaggctcaggctccctgtataggagaattcaagttcattgtagtcactggtgactggttctgaaattgaggaactagtttgaggaactt

SEQ ID NO: 162850 - DNA, 203 bp, Homo sapiens
taccagttatatggcaaatcaatggtctgtggtcagttttgtttggaaatataccccgagtccctctgctagggatctataatacacagactacttctcccttctcccctccagcacctccaaaatatattaagcatctcacaggtacaggtggtgctaaaccatttttccatctcgaatatatttctataggtctgctatgg

SEQ ID NO: 162851 - DNA, 195 bp, Homo sapiens
actcgttattcttctgcttggaacattttttttgccctcagatcttcatatctgcctccttttcatttaaattttatttcaaattccatgtcttgacagaggcttctctgactactttctgtcaaaatactctattttctattttctgtagcatttactaaggtcttcaatcttcagtccctgccccaaccttaa

SEQ ID NO: 162852 - DNA, 435 bp, Homo sapiens
attgagcaggatgtgcagagagaagtgtgtagttgttggagagagaaatacttgaacagagcttcatggagtcagcttattttacttccactgcaggaagaaggggcattggagaggcaggctgcatttaaatagtatgactttccatcgtctgaaaacatgggttgttttaaaggcagatttatactgacattttatattcaacatttatctatggatcacagttgttaccctctcactctgccacatcccggtgataagtcgttatttttatccccatttgttggggaagggagtagagatatagaagggttaagtgacttgctaaggatcatggaaccagacgctaaacagagtcatgattagaacttagagttcctgactcctatgctcagacacagatcactaagcaacatttgcttgcctgcaggaaga

SEQ ID NO: 162853 - DNA, 218 bp, Homo sapiens
attctaatttaaatttgatttagattagaaaataatttccaagtgtgatggatataatgcatggtgttgggttttgagaggtcatggagtgactgcccccacagtaccagaggtcagagtattttgcccttagcagagacacttgataaatgtttgtagaatttcatttcattttcccaggactaacacctgaatatgtctgtgttgcagtgatgctg

SEQ ID NO: 162854 - DNA, 242 bp, Homo sapiens
tgataataaatttgtgttgcttaaagacaccaagtgtgtggtaaattgttgcacagccgtagcaaacaactctactagcaagcactctctcctgtctctttgccttattcgaccccagacctatcaccccattgctgttcctcaagcatattctatgccaaaccttctcctgcttcaggacctttgcacttacagttcccccagcctgaagcaatttttgcattgcaaaccacatcccttga

SEQ ID NO: 162855 - DNA, 117 bp, Homo sapiens
ggagtttgagaccagcctaggcaacatagtgagaccccatctctacaaaaaattaaaaaataagccggaagtggtggcatgtgtctgtagtcccttctacacaggaggctgaagtgg

SEQ ID NO: 162856 - DNA, 463 bp, Homo sapiens
  misc_feature (430)..(430): n is a, c, g, or t
actttcatcaccctaaatttattataattgtcataactatacccatttcacaaaagaagaaaaagggaattagagttgttaagctgccaaggctgggacacgaacaccccatacggttactacactatactctctctttcaagaggcttgattaattctgctctcaactctttaattctgcttaattctaattcaattgacattaagtgaatgcctactctgtggctggcacaagtaggcaccccttatatctgtcatcttctttctttttccagttatgtggtgaggtattaaaattcccattttgcagataaagaaatcaaagctacctaagtaacccctatttttgtttccttttcttttctttttttgagatggagtctcactctgtcgtctaggctgattggtcaggtcttctgtcacagagacntaatacatttagggttgatggggtaccgagctc

SEQ ID NO: 162857 - DNA, 222 bp, Homo sapiens
cgctctaagagatacagagaaagcatataataaaattcaacattctttcatggtgactaaaaaaaaaaagtagcaggccagactcagtggatcatgcctgtaatcctagcattttgggaggccaaggtgggcagatggcttgagttcaagagttcaagaccagtctgggcaacatggtgaaaccctgtctctataaaaaatacaaaaaagtggccaggtttg

SEQ ID NO: 162858 - DNA, 420 bp, Homo sapiens
agacacagaaggactgactgatgacagttaaagaccaaagtgccttagtttgtctaaataatgactttggggttgtcatatgtatgtataagataaaacctaggacaaggtgatttgttgaggataagaaaaaaggaatgagggagattattgctgactttaaatagtgtggaatgatggagtcattctgcggatggatttgcactgatattttctattttatttagtttctggcctatgatctattgggttagtattagtacaatttatttaagtaaggtgaatgcctctctttgcatgttttccctacagaatctgacatatgagattctttctagcataaagttgagaaactaaagacgtttgggtatcagcagaattatagactgaatccagggacacttgtcatctgcagtggat

SEQ ID NO: 162859 - DNA, 244 bp, Homo sapiens
ttgtcgccagctatatgggcataggtgagagccaccacatggtactaaaatatggacggttgtcggatatatgcaataggttcatgagggtgtgtaaatttgcataagttaaacaagaaagcttttctaaaacttgaaggggagcctctaaactttactcaagtcagcttactttagggcttaagttcatgaggcaaacaagaatgttggcatctgttgttcctttgctgctgcacattagagg

SEQ ID NO: 162860 - DNA, 327 bp, Homo sapiens
actgggtggcttaaataacacaaatctgtatgtatacagttttagagcctggaagtacaagattaaggtgctaacagggttggtttctagtaaggcctttctatttgatttgtaagctgccttcttgctacctcctcatatgaccttttctctctatgcatggaaagagagatctggtatcttctcctccttagaacgataccatttctataggattagggtcccctgtatgacctaatttaaaattaattattaatatctccttaaagaccctatctctaaacacagtaacattgggggtaggccaacccttaattagtgaatacc

SEQ ID NO: 162861 - DNA, 323 bp, Homo sapiens
ggaaaataaaattgaaaaaatttcattgctgttaatactggtgtgaacagaaaagcaaggcacagaaaaggaattagaaaagtaacaattttcttaattctttcacattgaaaaaaacaaaaccacaatttttaaaaacagggtccatatactaacagcctgaaagatgatctaatctcaacgataaaggcaaatgagttcaactgctctgttaaatttcttgaccctctgaattttctactaaccagttcttaattgcatttcatcagtgatcacatgtattagctttttttttttttttttttgagatggagtctcgttct

SEQ ID NO: 162862 - DNA, 205 bp, Homo sapiens
ctcctaatgtctgcctagaattgaattttggcttaaaaaagtctagccaaattaacggtcagaaataaaggattgctggctgggcacagtggctcatgcctgtaatcccagcactttgagaggccgaggctagcagatcatctgaggttaggagttcgagacaagcctggccaatatggcaaaaccccatctctactaaaaatac

SEQ ID NO: 162863 - DNA, 621 bp, Homo sapiens
aaaaccaggctatgttcaacccaatcctctccatgtggccaaagtataatgagattgttgtaataaatactgcagtaaatattatgattttattttttatgcctgacgttgttgtaactgtaaatggggcaaaatcaaatcaagtatcatagattgagtagctgttgtgtacatggtagctttgaaaaaagagaaatttacttgtgatcaaaattcctttcaatgtctagaaatgcttgcctcttcttatgacatgataccattcttatctttgaaacagaataccttatataatagaaacctagagcaagcaatttcacatgaggtaacaaaagagttcccagagtttttccagatcagtggaagacttaagtacaggatggagggaaattttaaaattgttcaaaacaagaaagcatttccccattagagaatcaaataactgaagagagggtgtgtgtgtatctctttacagtttcttttctttttgctgtttatgtgcttgcattatcaagacattttcccaatatcctacttttattttagtagcattttcaaaatctgtatcaaataaagatagcaagtagtagagcaagatgaatgagggagggagaaagaatg

SEQ ID NO: 162864 - DNA, 446 bp, Homo sapiens
agtccccttcccaagccactcacaccaacaagcggccctgctagcccttctcctccatgcccctgcagtgagctcggccagagcaggcctggtacagagaaaaacatgggtgccagcatcacaccagggggatcccaagtcaggcctgggacagagaaaaacatgggtgccagcgtcacgccagggggatcccaagtcaggcctgggacagagaaaaacatgggtgccagcgtcacgccagcaagatcccaggtcaggcctgggacaacccatgcgtgcgtgtcgtctctgatggtcctgaatttcatatgtataattgttcactttcacactggtaattaagtgttatgaatcagagtgatttgactttactgtaatgtccacggtatttatttactgaaaaagaacaagtaaagatattttagtaaagataacaagcaaaatcc

SEQ ID NO: 162865 - DNA, 307 bp, Homo sapiens
cagaaactttttcagctatgggatcttgggaagcaattttggatcttcgtcggtgtctacactttgaggtgctctggagttttgggccaagtggccaagacagtggcagacatctctcatcagtgagcccatctcagctttgggaagtcacatcccatcccagcccactgatgtattatgctgctccacactgatgcagttatactccctcaccaccaccaggagctcatctgaaatattttacaagaaaaacacccagtggaggttattgacagtaaattcggggaatgaagcaattgtgatgggc

SEQ ID NO: 162866 - DNA, 132 bp, Homo sapiens
gattataggagtgacctgttacgcatggtctcatttattgtttttagtgtttttaatgtttctttttttgagagtactactcatgcctctgattcacttgctctggtacctatttcagcaatctgttgactt

SEQ ID NO: 162867 - DNA, 240 bp, Homo sapiens
cttttgcaatttactcactttaattagcatgatgcactgcttctccataatgggagtcctaaatataggagatttcaacataataaattaaagacaattaggcaagacagaaaccaaattcattatttgcaattctaatcctcttattggatatacttgacatttaatgcaaaataagtgctccactgccactactatttatacaatagtagatactcattaaaaagttagtgttagaaa

SEQ ID NO: 162868 - DNA, 221 bp, Homo sapiens
tcctcgcccagctaggggtcattttcaacattaacatcaccaacaagaagcacacaaatgcgaaaaccgtggtactccatagaccttcaacagggcatgtgtttacagtgtgagaggctgaacgagaaggtggagtgtcgcctcgctcagcctcagctgggaacctgtgtgggaactccaagttttctccactctgcaccaatatgaatggattcatgttg

SEQ ID NO: 162869 - DNA, 352 bp, Homo sapiens
atgataactggggggcggcagcagggtcagttttccccagcgatgaggaggctgcaccgtgggcgagggtcgtcctcgtaacagggaggcagggataaaggagcagcggctcccaggagaggggcgcgggttggggaaacttccatccaggcctaggatttccagggactcgtttctgagaagtggctgtgattctgaggcaagactttgatttcgagcactagaccatggagtgaaattctgtgttgtctgaagagcaggactcctgtctagggcaggacgtagttagagacggagggagaagggtgatgtccccagggggaagatctgccgggagccaccaccatctgtc

SEQ ID NO: 162870 - DNA, 454 bp, Homo sapiens
atattcactgtggctcaatgttcacgttcaagcatagaactacattactatattctctactgtagcggttggtgtctaagcacttaaatgttgaaacatatgttttaagtagcttttattttgtttttcctttatatctgttagggtgttatattgatcgttaaattacatagtagatcagatttacctattggttttatctgaggataataaaggggactttgcaaagtacccattataaaaaggggtttcaaacaaattgtcaaaaatgtataagttactcagggaagtatgaacatggtaattaaggaattattattaattatctctagtgtaataatcatattgaggttatgttttctaaacgagtactttattttaaaagattacatccagaagtattttcagataaaatgctatgatttgccctgaaatcatcagggtggtagagtgg

SEQ ID NO: 162871 - DNA, 458 bp, Homo sapiens
aagtttaagaactgctattgtttcacatagtatacagggaccatgtatagatttgggtctttgagtatttttaaattttcagtgggcatccatccttctgtttaatgatattattactaatatatttccaattaaaaaaacacttaggaaaagttaccatatgaaactcagaactctcaatgtgtagttccgtgatacaggcatataagctcaaaagtgtactgtattctactttttaatcttgtaatcttgtgacttacactgctgtgattagggaaaccattaaaattttacaaattgggtgtatataaaggctttagaataatttacaaattaaaagtgtaatttcaatgcagttttattgctaggactatttcagttttttattctagtaattgcatataagatatttgataaaaggtttttgttgactgccacgaaagataatatggtatata

SEQ ID NO: 162872 - DNA, 295 bp, Homo sapiens
atggtgagcgagaacccaacccccgggggggtggggggcatccagtgtacctgcctgccattgtcactctccagtgtacctacctgccattgtcactcttggattaagagagacctggcgcagtggctcatgcttgtaatcctaggactttgggaggccgaggctggcagatcatgaggtcaggagttcgagactggcctggccaacacagtgaaaccccatctctactaaaaatacaaaaattagtcaggtgtggtggtgcacacctgtaatcccagctacttgggaggctgag

SEQ ID NO: 162873 - DNA, 330 bp, Homo sapiens
tggagtcctgataagtagcacaataaggaagggtccccaggttggggagagccccaagttgagaacaataatgaacaattactgtatgaacaattgttagagacagctaatcacaaacaacctgcgggcacaatgacctcattccacacgtagcacccttcagcaggaccctataaaactttcctccagcccctgcctctttgcaggtagccccttctctgctgagctgcccactgcaacatattttcataatttctctaataaatctgcccttctttacctacaactatcttggtaaatggctttaccacctgcaaaactgaccctagg

SEQ ID NO: 162874 - DNA, 328 bp, Homo sapiens
agccactttgtcttaaagccataaaacaagttcttgtggcatccagatgtgttgggctagagacctaaaatagcagttcttctcccaaagtgctaccactgaagagtggacctcctctgcgccttctcggcatgactctcataactgtgcagtcactctcgggtctcaggatgggctcattccagtcctatctcttctaaacttttgtctaccatctaaaggactccttggtacctggcacaggccagcccatgaggctggtccccatttagaatggaagagagttgtggttctttctcctgagtcttctctcccctctatggggcag

SEQ ID NO: 162875 - DNA, 177 bp, Homo sapiens
aatggggagaagaataatcactcccctattagcaggcaggggccatggggatggaatcagagaatggagtaaaaaccctccgtagactctgtggaccccacaagggggggggaacacataccccccaaaaaaaaaaaaccggcagatgatttgtctctgctttcctggtgcccaaag

SEQ ID NO: 162876 - DNA, 464 bp, Homo sapiens
ctcaaattaaatacttataagtgaagcttaaaagcctgcatggaacctgaggacatgcatttggattgcatcctccgtgttaaatctacttccttttgtctctgcttcttcctccccctacacacagatatttgaaaagtcactacaaagtaaaaacaggaaaaagaggaggcagaaaaaagataggggtgtaataaagcaataatgatagctaaaaacacaatctatcataattactgctgcgggaactaacaaactgttagcacgtgctcctgtcatattgtcaactcagctgttctacttcactattggcagccatgacagaacaggaaatcagacggagggtgtagcaaacataaaaaaagacacctcgttttgactacatactttatttggctctcttatagtctaaggatgccatgaatttggaaacaagcccggtaggaacaactattcttcctgtc

SEQ ID NO: 162877 - DNA, 518 bp, Homo sapiens
cacatctgcacagctgatttctgacaaaggcacaaagacaatccagtagagaactaatctttacaacaaactccactgaaacatctgaacaccttaggcaaagaaatgaactcaggtccacaccttgcattgcacacaaaaattaactcaaaatggatcacagacctaaatatacaacttaaagctacaaaatttctagaatacaggagataatctctgtgaccttgagttagggacaaagttcccagctaggaaaccgaagtccaaaccaaaagaacaaactgaggccggacgtagtggctcacacctgtaatctcagcactttgggaggccaaggcaggcggatcatttgagctagagttcgcaaccagcctgggcaacatagcgaaaccccgtctctacaaaaaatacaaaaattagccaggtgtggtggcatgtgcctgtagtctcagctagccaggaggctgaggcaggaggatcacctcagcctgggaggtaaaggctgcagtgagcccaga

SEQ ID NO: 162878 - DNA, 299 bp, Homo sapiens
ccccataggcactgccctcatctgtagggctgtggcatgtgggagctcagagaggctcctcagaccctagcttggcaggagacagggagaccaagcccaggccatccccctatcatcctgttttcctgcttgtttgggtccctaggttagctttccctaaccccccagaggctgcccctggcctgggcgctgctgaagccccgtgtgcttagatgcagcaaggggactgggcagagggaggtgggtatcattgagtcttgggcccaagttcatctcctggcccagccatggactcagag

SEQ ID NO: 162879 - DNA, 345 bp, Homo sapiens
ctttttattatagagagacttaattataaaagattcaaaccatgcagaaacttgcagactaaaaaccctaaaaatccttcctctgtccccgacctagagaaatggagaccaattcatcaatttgtttttatatggattttgtttttggtgtcacatctaagagatctttacctaacccaggtcagaaagattttctcctagaaattttctagtcttaggttttatgttaggtctatgatccattttcagttaattcttatatgtggtagaagtatgaattgaggtttttacatatgggtatccatttgttccagcatcatttaatgaaaagactgtgttttctcc

SEQ ID NO: 162880 - DNA, 403 bp, Homo sapiens
taccttgctttgcatctttctaaatataaattctgactacatctaggtgtgattctcttacatctgatacttctctgcaacttttgtctcagcatagtaaccacctaattgggccaacatacaaatccttgaggaaattaatgaagaactgacggttaagaaaccttcctgataatttaactcttgcttccctgaacagattcactcctttcacgacagggaaggtgttttgattcctctaatttcttcagtttaacacactgatagaccagagggacaggaagaaaatgtttaataaatctctccatagctgtcctcgctctcacatttgccctcacactcaaccttattctactatcaagagtcaaaaagtgccatcggcacctggctcctctacctcctt

SEQ ID NO: 162881 - DNA, 230 bp, Homo sapiens
tcaagcgtcaggaggggaaacacctgctcctccacccctcctgtggaggagaaagtgcttgagaaatagacaccaatgattacgaaacaacagactgaatagtacaggaaatgtcacgctgtgctacaacaggagtataaataattcaagaagaatttcagttactaacacaacaggttgcttagcatacaaaaccacatggtccacagtaaaacctatgtacgatatca

SEQ ID NO: 162882 - DNA, 495 bp, Homo sapiens
tttttaaaagttttttttttttccccccaaaagggggtcgttcagggggggagaattgcttgaacccgggaggcaaaggctgcagtgagccaaaattgcaccactgcattccctgggcgacagagcgagactccgtcccaaaaaaataataataaataaactggtttccaataataatttgtttgctgaagacagctttggttgttaaccacaaaaagcaaagacatgaagtcctttgtgtaggagaaatcttgatctaggtttacactgtagtgggatgttaaaaatacttttgtaggggtagagagaggtgttacttgttttcgctctctaagccaagttctctacaggtcatgttttctgtatatggccaacaactatttaaactttataagaaagagtgtcaacatagtatttgatagagggtgtatgttctaatgtatttcatacctaaagaatgtctgaatgtgtcttttttttttcccccagatgggg

SEQ ID NO: 162883 - DNA, 473 bp, Homo sapiens
gtcccagctacttgggaggctgaggcaggagaattgcttgaacccgggaggcaaaggctgcagtgagccaaaattgcaccactgcattccctgggcgacagagcgagactccgtcccaaaaaaataataataaataaactggtttccaataataatttgtttgctgaagacagctttggttgttaaccacaaaaagcaaagacatgaagtcctttgtgtaggagaaatcttgatctaggtttacactgtagtgggatgttaaaaatacttttgtaggggtagagagaggtgttacttgttttcgctctctaagccaagttctctacaggtcatgttttctgtatatggccaacaactatttaaactttataagaaagagtgtcaacatagtatttgatagagggtgtatgttctaatgtatttcatacctaaagaatgtctgaatgtgtcttttttttttcccccagatgggg

SEQ ID NO: 162884 - DNA, 248 bp, Homo sapiens
catggtgtgagcagggcatctgggccaggtgtgacctcatcacatggtgtgacctcacttttttttaaagaagggaatgaattttttttttaaggagggaacaaatataaaaaatctttgtcctagagtcagaaaaccaaggttcaggtcctacagttgagaccttcttagctctgtaactttgagtaatttactgtagagagctgatgttggttccttgaagtgtaacatgggaattgtgcctatta

SEQ ID NO: 162885 - DNA, 666 bp, Homo sapiens
caaagtattttctttgatatgacttcattaaatctcaaatcaggattatcatgcccattagggaaatcgaggtttagggaaaccacaggacttcggtaggggcctggaaagagaaaattcaatccagaccttctaactccaaactccaagctcttccactctgccacctggggtggatttgtcaatcccagctaagagaggtcaccctggacaactgcatggaggaaaataatgatgtatgtttagcataactttctctgttaaatgccagggagccttagatacattcttgatattgtaattaaatagctttttaatattaatttgtgattatgcttgcaaggaaagtcctaggaaacttaaaatatgctatacatctgagcacatttttatcgcacatcagaattctcgcagagtttaattgggcccatggtgtaaacagttcctcattttcatccagaacgcgtggcatgctgttatgttttcaggaaagagaaaattatcttaatttatgtaaagagtattcctaaagatatgtataatgtagtccacgaggattaaacaccaaatgtgtaaatatcacaaacttatctcagcacatattgtctctgaaatggaaacaactttctttgctgcaaacagtcactcaggagagccttgaatttt

SEQ ID NO: 162886 - DNA, 219 bp, Homo sapiens
ttttagcttttaagattttaaagataatttcaaatttacagaccaattccaagaatagtataaagaactgatatataccctttacttggattcaccaactgctcatatgttgccatatttgccgtgatcattactttttaaccatttgaaaataagttgtagataacatagccccaagccttcagtgtgtatgtcctaaaatcaagggcattctcttac

SEQ ID NO: 162887 - DNA, 314 bp, Homo sapiens
agcccttctgcccccagaagctcagagaagacaaggccaatatgtaagtcacattcctgggaagaactgaaaattttaatttcaaatgttaaagcactttgtcttttttttttttccaagtagtttaacatctctttggcaaataaaactagcatattgtgacaattgctgaggttttccttgcttgtaggagacatttattaagtcttatgaaatctgaaaggattatttccaaatatcaaagtaacattcacaaagcaatactgtataacttggaaatgtcccaagctttaggtcagtcaaaatgttctctt

SEQ ID NO: 162888 - DNA, 1101 bp, Homo sapiens
ttagctgtatgtgcatgtgttcctctggatgcaagtgtccatgcgatcgtgctggagcactctggtttccaggtgacagacacgattcacggtatagtatgagacctctgaagttggagcattctctacagctttaatttctttcttttagttcttggattcaagaattgcttttaaaaaagaaagttgtaatgcttgttaagtagcaccagctacagtttgtgctgtgcttaaagaggtacagtgattaagatttcagaatgttgtgtaataaatatatcacttattttttttgtccaaagcaaatcagattcctttcttctgtttcctcagtagaaaatgacaaacatttaggaattttagaaatttatgggcctcaacttgataacttaattgaagtaatcaagttcttccttcatatcacttccagcattaaggagacaccatatatattttgatattttggtcagaattagaaacaaaccttcttctttgtccttaccagtcagtatactttcatatgtcttagctgggtacctgagaccttagggagctctgcagtgctgacttgatgtagtgaaggcacacttcccgtaaaagtgttgcttgcaagtcaacctttgggatacttagagggagggtattttatttagtcttggaagtctgaggagtgttgggtcagcaggttgccctagatcagacatagattttgagaaggtcctgaaataggcctttttaaaacctgggcttccactcacctgtctttctgctggcttgtgttgcctaaagtgttttagaagttctagtttcctacggatattcatcaagtcatccaattttgaaattattaatgtccaaaaagatcaaggtgttttaggctggtccttgggataattgaagacactctagagactaccataaaatgttagaaatcacttatctgtttaaattcttgtaattcatatgtgcttattaaataatcacataagctatactttaaatcattgcattgagatctcacattttaatgtgttctgtaaaatgttttcagaaagtgctaaaagtggccgggcatagtggctcacacctgtaatcccagca

SEQ ID NO: 162889 - DNA, 610 bp, Homo sapiens
tcaagacccatttatagctccccaggtctactagcatcagtcttacttgccagccatgttcagggccttcccaccagagtctgccctgtagccatcagcagtctctgttgctgacaaacagagcagttctttctggcattatgtgccttggaattgccatctactaacccagcagctcttgagagctgttcatctgacactgcagaatccagcagtttttcacacagttccagtgtcagttctaggggaaaagaaactccttgctcaagggtatctcctccttccattctccaggtagtataaagcatttccgttttattatggaactcttccggacactgccatccccattagaatgtttctctgacatcactggagacagtatgggtgtttcaggtgtcatagggatagcttcagctaatgtttcatagcaagacagtaaatgcccctcaagtggaaatactctagtccaaaccccagtagttgttgctgggagctactcagaagctttagccataagctcgaggagctgtttcacagagggtgatgaagtggagaatttatccttcccagcactctagcttctaccctgcgacctatgagtggttca

SEQ ID NO: 162890 - DNA, 201 bp, Homo sapiens
aagaaatgaagtgaaaagtgaaaattttgcctgttctaatccctgccgaatacctttgggagctttttaaaaaaggcagctgcctgagttccacccatgaagttggattcagtaggtggggcccaagcccctgcattaaaaaaatcctatcatcagtaacagtagctattaacaccaacctaatacaataatacaggctca

SEQ ID NO: 162891 - DNA, 434 bp, Homo sapiens
cacactctcagttgcttacaccactttcctgttctaaataaagtaactgtcttaatttttttaaaaaaagaaaaaggccaaatgaattgcgtcatgtgaaaagtacagcattacatttgctgtctatatttaatcattaaggaaattaaatactatatttaatccatgtcaagataaataattaaaacaggcccatttttattatttacaattaggccctatttggctaatgggaaataactcaaaagtcagagaagttatttctttagttttcctaattcttccaaaagacaataactaaactttattatatcaaattttgactatggttatagttcctcaggaatacctgggctctcctaattagtagcactataaagattacttcccatataatggttcagaattgatacctattacctcatcagatgacc

SEQ ID NO: 162892 - DNA, 319 bp, Homo sapiens
cacactctcagttgcttacaccactttcctgttctaaataaagtaactgtcttaatttttttaaaaaaagaaaaaggccaaatgaattgcgtcatgtgaaaagtacagcattacatttgctgtctatatttaatcattaaggaaattaaatactatatttaatccatgtcaagataaataattaaaacaggcccatttttattatttacaattaggccctatttggctaatgggaaataactcaaaagtcagagaagttatttctttagttttcctaatatcatgttgtaagaaaggcacatggctttgtgaagcaagt

SEQ ID NO: 162893 - DNA, 105 bp, Homo sapiens
tcttaatatagaattgacttcttcccaggtaagttttaattgcttctcatgcttgtagaaaggtgtatcatgtgttctaataggttaggatttaattatggctta

SEQ ID NO: 162894 - DNA, 245 bp, Homo sapiens
ttatgcattcattcaacaaatactaattcagaggcagccaagtgtaggcctccattagctactgtaggtacaagggtgaccaagcaggacatgccctgggcctcaccctgtagcagagagacagtcagtcaagcataacttccatgacacaaaattgctatgtgatgagtgctgggagggaagaggagtaactattccacacacaacttgcccattttccaacttattcctggaggaaaagctct

SEQ ID NO: 162895 - DNA, 237 bp, Homo sapiens
atgtccccagtggctggcttacctgagctaagagccagctggtttaaaagagagactggggcttgccagggatccagaattaagtgatataatgttaaagtgatttgattgtgaagagttaaagggtgagctataaaagtcacattctagcttcaggttaaacatatgagcacagagctgaaaactagaggcaaagcctaacattttgggtagactgtgaactgagtatggaaggag

SEQ ID NO: 162896 - DNA, 315 bp, Homo sapiens
tttggaggagtggcagtaccagttacagaggtagataagtctcaagacccaacaggtttgaaggagaaagtcagaggttctgctggggcgcagcagaatacagcgcaagcctgcagttgttggcagttgacctgtaaggggtagtgccgagtcaggtattcagaagtctgcaggctctttaggagccaagtttaatggttactgcttgaggacaccagaggggagaaaaacagctctgtgcagggaagagctggtaccctgggtctgacgagtgggatctttgaccagagagctgcatcccacagattgggcagg

SEQ ID NO: 162897 - DNA, 183 bp, Homo sapiens
ctcccggagagagcatgatcatctgctttttatgatctcctgggacttcctgagctgagccctaacattcactttttcctaaattcaagcccctcctaccaagggcatcccaggcgccagacgcttgtgctaatagctgctggcaattcacagagggaacgatgggcacattttctgttcttc

SEQ ID NO: 162898 - DNA, 312 bp, Homo sapiens
cttaaatgttctgttggatgaaagtgtttcacttatagtactaatcgccatgtggtattcctttactttccctaacatttgcttgtttgtttttattgtgtatctacatgtattgagtagttaggtgcttgtacaaatcttctaccttcactcatggtcaatcaactgtaaaccttacctggggccaacttgccaaaggttttacagttaacaaatggtatttgaaatttgtagtaagagtaaatgctttggagtaggaatgcctatctcagcaatcctgctaagcactatactctggataaggtaattacc

SEQ ID NO: 162899 - DNA, 380 bp, Homo sapiens
gcaaaataccaacaatgccagaaaacagtaccatggaaagctgagctattcagaagctaccagtattgaaaacccaccctggatgacatgaccgctacttctcatggctaagtaaccacatcacagaagcagcaacatgaactggtgagggggtatataccctgggcaggccggatgctgaacctctgttggattctcagccctctctcctaacaggcaaaggaaaaagccagaaaacacttggcttttcccactgactttgcaggaacagtaatcccaaattgcatagaggtcaatttacttcatcttattatctggttacactttgtcccaaacttagaacaagttaaagaatgaaagtgttaattcatctccactgg

SEQ ID NO: 162900 - DNA, 479 bp, Homo sapiens
tggggagccacttaatcttggggagcctgtctccccacctggaaaaggacgatgatgtgacctcacagggtcgtagtgggactcaaataagataatgtgtgtgaaaacgccttgcaaagtgctaagtgagttgttgctattatgattaggctcaggggctgcctatctgacactcatttttctaatgcctcaacagctgtctctcttaccctcccagggcaggtaccacgttggagaaacttctgagggtgaaggacacccaccctagagtagtgggcagttaagctgcccgcatagacacacacacacacactttagttacacaagcagaacacctttttataaaaattcgaaaggcatcatgtgcctacagcctcagttactcaggaggccgaggcaagaggattgcatgagtcctgggcaacagagtgaaacccatttctactatttaaaaaacactaataagaaaaaatagataa

SEQ ID NO: 162901 - DNA, 792 bp, Homo sapiens
ataattaagatatttctaggagtgtatgctttttctaaataataatcagagggataatctctcccatccacatatgtacgtagaatgtttcaaactcatagtagtttttcataaaataaagtcatttacaaactgccatgctaacttatgatttccctttcaactggtattgctggagaaagaacattttctttcttcatacaactatttctggtataattcttccctatctcttttacagatagtttttccattgtaacagattcctttgacttcaaacatgtccttcttctctccatactccactgctgttgtcactaataaagattttatgtccctccgctgcctaggaaatcttgctctggccactataatgcagacaagggaatggtttcaactttaagatagatcatatgataggaaaaaaaacaagtatcagtaaatttaagaaaatataaattatatcaagtactctcttagaccatggtggaataaaattggaaatcaactccaaaagtaaccctcaaaactatgcacatacatggaaattaacctcctcttgaatgatcactgagtaaacaatgaaatcaagatggaaatttaaaaattctttgtacttgactataatagtgatacaacctatcaaaacctctggaatatagcaaaatcggtgctaagagaaaagtttgtaacattaaatgcctacatcaaaaagtctgaaagagtacaaataaacaatctgaggtcacacctcacagaactggagaacaagaacaatccaaacctagaccc

SEQ ID NO: 162902 - DNA, 191 bp, Homo sapiens
agaaggaacatggaaggaggtctgctgactaccaacccaacaccacaagcagattctaggaaggtctatctggagcttagaggaaatcacttaataaggagccaagggagtgtgacctccaccagctccaaaacgaggctggggcttttccaagctccattaacaatagccaggcttttaaaaaaaattct

SEQ ID NO: 162903 - DNA, 378 bp, Homo sapiens
aataaactttaagtacagtaacagagactatccaaactgaagtacaaaaaaaaaagacagacaaaaaaagaaggcctcagtcatctgtgacaatattgaatgggctaacctaagtgtaactgaatattaggataagggtttaaggatgtaggaaaatgtgatgaaatcacgaccaaaactttgtaaaattttatgaaaactctaagcatacagactcaggaagctcaatgaacaccaaagagaataaacatagaaaactattccaaggtatatcagaatcaaatagctacaaagtaagtgactaatagaaaatcttaaaagctaccaggggaaaaaagacatagtacatacagatgaataaagataataatggaagca

SEQ ID NO: 162904 - DNA, 448 bp, Homo sapiens
tgaggataccctacgaatactatgccgaggactctgtctcctctgcttgcctccgtgcaccctgcgaggtcacaggcccctcctttggtttgctggggacacgctgagactgtatttagagaaagggtctgggagagagaaactcctgccccttccccctgggatggttgccaaggggttgagacaggcaccccatggaatgtggggagcatctgctccgggtccaccagcaagagacgttgaatgccagtgtgttttgatctctgttttaaaatctcaggccttttgggatgatttctttgatgttctgaagcgacggttctgaagtgccgctaggtggggctctcttcattgacctgatgagcctttcgtttgggacgcgtttctcagggaaattctttttctgttctcttgggctgtttttcctagtatagggggaccgagctca

SEQ ID NO: 162905 - DNA, 157 bp, Homo sapiens
gaagtataaattcagtcccttttatttcaaatgagcagaagtcctgaacttgtatttctacttagaaaacagacaaaattctatggccgggcacggtggctcatgcttgtaatcccagcactttgggaggccgaggcgggcagatcatgaggtcagg

SEQ ID NO: 162906 - DNA, 535 bp, Homo sapiens
gataagaagtcatttactccatggggaaattcttctcatttctttaaactgaaaatagtggtataccaaaaggcaaacctgtatcatagtaccttccatctgttgggaaacaattctcattttagtctgttaattttaacttctactttcccactcttctttccaaagtcagaaaaaggagaaaaataggattattttaaaaagggattaaaacaacccctctaattttaatatttacatagtgattcacttttcaagttcttcataaccatttcctggtgatgttatatatttccaataaagtgtccattaaaatgaaaaaaccttcgaagaaatgtaacattacagaaatgcttgttttcaatgtataaactatcattacttgcattttccccctagaaatgagacagtgaaatgtgcatagtttcaaacttcttaatataaagcacaaagcaattatttagaaaaaaaatctggcatttggacatcacagatacattgtggtgtttgccaagatattactaaactaacatgt

SEQ ID NO: 162907 - DNA, 135 bp, Homo sapiens
ttctctgtgcagacagttccaaagaaggctgcccctaagagccgtcaacctcaacctccggacaggtacctcctagaaacccctagaaaccagggtcagggcagtaagagactccaggctgcagctcgctcagct

SEQ ID NO: 162908 - DNA, 280 bp, Homo sapiens
ataatggttaaagtaacgcaatggtttcaagtctcaattggtctctcttctgttatgttcattggaagatcagggcaagtatatcccctgcaactccccctcccctcatataaacattagttgtgtgtgtggatctttctgctttgtccttcatgtggcctccaagggtgataaagtgagagtcatctgatctacaatgaaaagaactgggaaatgattctcagcagacccagctgttctaaaaggcaaaagcttagtatatcaagaggtcaaacataca

SEQ ID NO: 162909 - DNA, 384 bp, Homo sapiens
ctgtcttgttccttgcaatgtaaaatgagacttctaaagcccaccttgatgctgatatggagaatgctgaggttctaggatttcacacagcaggaatttttttttaataggtgtcagctgtggggtttattttttacaaagtaaggacattaaaaaaaccaacccgtctatcaattcataaaagaaaggatgttctgataccaagactgaaagaagaaaggatgtattccaaaacaaaggaacatccttccaagaaaggacctatggcttctttattccgacataccccaaaataactgcatgataaataggtctatatttaaaaagctctagtgtcgaatgttttcaaaataaaatttaattttatgagattaccctgaatgc

SEQ ID NO: 162910 - DNA, 504 bp, Homo sapiens
gctatactaagggtctaaatctgattcaggttagctgttgatgcctttgactgtaactgtaattctctaactttcaacccttttatcatcaaggacctcaactattattttttgttccatatttgaaaacttttggtgttccagacacactgcattggttaataactaattttcccgttgtaaaaacagacacgtgtaactgaacacacaaatgagccatcaacagtatgaatataaaagtgtttgtgcaatgagttggttgacgtttcagctagcttgttcagttgtttcatgggtaagtgtatagtttttgtttgaagttttgatatatgaaaaatagttccgaggtcttctgccttattagacatgtgatagacaaaggattctaggtgagaacttagtttattcttttatgagttgctgaactgccctggtcattagagcatcaagtaagttgtttatccacatgcagttcatgtcttttcagttgtctccttattggtc

SEQ ID NO: 162911 - DNA, 333 bp, Homo sapiens
  misc_feature (47)..(47): n is a, c, g, or t
cgggcgacctgaggacccacgtcagcggatgcattaagaaagacatntatttcaatcgtgtctaaagcctgaatcccaagagttcctccttttagaaactctctagatatcaatttagcaggatacagttaaatattacaatagattaaacaaaaaggaaaatgggtatccggcagggttttcaggagagaaaattataaaaactgaactacaactactattaataaaattatggggctgagtgtgatggctgagagtccttttagaaatgctcatctatgtgtttatggatgaaatgatttgcactctggcatttcctttgcaatccgcttg

SEQ ID NO: 162912 - DNA, 132 bp, Homo sapiens
cacagttgttctaccattgagcagactagctagttgaagtggcccaacatgaagcaagaaagactctttgttgttaggcctcagtctgtctttgaaaatttatgttggtactcagagttatgcagtcaaagc

SEQ ID NO: 162913 - DNA, 522 bp, Homo sapiens
ctttgatcctatctactgagacgtgtatcctctttggaacatcaggctgccttagttgagagtatttgcactgcctggcccttgtcagctcgtgatctgtatgggcatggcctttcaatttccccttgtgcaattatggtcaagcttgttggatcccccaatcagcatcatgtgggggtggcagacctcagagataacccctcttgtccctgcacctgacctgtgtttaaactagggcaggagcaggttcttgggcttaaagtcttccagaaggggccttcttggcatttataaatagatatccttttttattagtgttcagaattatccttaataattaacctttatcagagaggaagggaagggacagccaaccgtatggggccaggaccaaaaattaaaagtgtattaaaacagtgggacgtggttaattgttaaccagcagataaagccagaggtgtgtccgtaaatctttggttggaccagttgtgtgaaagacttgggggaaagcagagactctta

SEQ ID NO: 162914 - DNA, 157 bp, Homo sapiens
cccgtccgtcagtcggcatcaacgcatcaccaggtccctacccatcagtcggcatcaccgcatcaccaagtccctgtacgtcagtcagcatcaccacatccgcaggtccccgttcatcggcttcaccgcatccgcaggtcccgtccatcagtcggca

SEQ ID NO: 162915 - DNA, 158 bp, Homo sapiens
gcaggctgcattcagaaactgtaagtcatttgttagttagagtgtaaagtacactggggtgcaacagtagatgagattagaacatctagcaggagcaataggtggaaactctctttaaccttccgaggaactgccaaacttttccacagcagctgtac

SEQ ID NO: 162916 - DNA, 339 bp, Homo sapiens
aaagaaatgaaattctaatacaagctatgacatgaatgaacattgaaaatattatactaagaaaaagaagcctttgacctttgatatgataagcagattgggaccccatcccactccactgaaaaaactacagagattgtatttgaagataaaatactttcttttctcctgagtattctagagcagcactgtccacaacagccactcacacatatttcaaaaacatagtacaaaaacagaaagaaagaaaaaagaattctcatattttcttgataacatgtttaaatgataatatttggagttaaaatatattagaagtagctgggcacagtggtatgc

SEQ ID NO: 162917 - DNA, 241 bp, Homo sapiens
gtattcaaagctgatagaagtaacacacagaggggaagttgagaaggactctagccctactgggtatttaaggatgggactgaaggaaggaaaggataatccaaaggaccaagtgatcaggagctcagctgcaacctggaagctactaacagcataactggaaacagaatatttttatattttgagaaaaactaggatttggtaactaattgaagaaagaaagactcagggatgattcctg

SEQ ID NO: 162918 - DNA, 602 bp, Homo sapiens
tccaggcatttgcacctcatcccctcattttgatgcagctggtctggggaggacactttgagaaacaaggataccttaggcttcattctctgctaggagagcagatctgaaaaatgtgacaatcagatgtgagtgagtgtgataatcgattactgtgttgcctttgaagagcatgtatgaaaggcaatatgatgtcctggttaatagcatggaggctgggttcgaatctctgctcatcagggttatctcatctcactgcaacctctgccttccaggttcaagtgatccgtgtttcagcctccccaatagctgcgattgcaggctcctgccaccactcccagctgatttttgtattttgttttgttttctttttgagatggagtctggctctgtcaccaggctggagtgcagtggtgcaatcttggctcactgcaacctccaactccctggttcaagcaattcccctgcctcagcctcccgagtagctgggattacaggcacacgccaccacgcccagctaatttttgtatttttggtagacacagggttttatcatgttggccaggatggtctcaatctcctgaccttgtgatccatctgct

SEQ ID NO: 162919 - DNA, 146 bp, Homo sapiens
atgtcacaaaatgcaatatgtgaatacattaaagtttaaacaaaaatcttaaccagctcacccattgtagtcccttatcctatgcttcactttccccttaaaattcttttcagaccgggtggtggctcatgcctgtaatcccagca

SEQ ID NO: 162920 - DNA, 221 bp, Homo sapiens
tgaactttgttctagatgagaatctatagatcttttctcatacttttttagtgattgcagtttccttgtagggccgaactctgatatatttaattattcatctcttgagtgacatttgtgttgcttccggtcgttgctgcttgacactgagcacctgtgcatttcctggaccccagtgctgctgattctgtagaatgggttccttgaggtggaactgttgg

SEQ ID NO: 162921 - DNA, 138 bp, Homo sapiens
tataagatggaataaatgggtggatggacaaacaagccccaatgatgcaagatccctgggcagttcctctaagaaaagaaagaattctagagaagggacttacattaagtgtcctttgtgaagtcaccaggcactggg

SEQ ID NO: 162922 - DNA, 221 bp, Homo sapiens
cacaagcacacagaatttcactgtggaattggcaaggaataagtgagccaaatttggcctgtagaaattaacactggcaacttcgtgagtaaaaattacatgaaaagcactcatgagggaaggaagaaggaaaaaaaaaaaactaggataacagtgcaacagaccacatttcctatccacagtctgtcttctcgggggtgtttgtctaaacagcattgcca

SEQ ID NO: 162923 - DNA, 211 bp, Homo sapiens
gctgtatgtgataatctgattaagcagatatgccactaatgtctgccacacaataaggcatgttagtgactatgtcaatgtaggcttgaaagctacattgatagagaagttgtctccccgctatttgacttcttgagtcgtttctttgaactgtcgagagtattttacaagtgcttttctgtttgaggtcatttcactcagagtatagcaa

SEQ ID NO: 162924 - DNA, 218 bp, Homo sapiens
aaaggcaaaaggggggaaaaggaaaccaaaaaccactcaaatccctttagaaacactatttaataatgcaaactctcttttccatagaattccaatcaaggggcactttggccatgaggaagcaattaggaacatctatgatttaatgaaaatgtaaaaaaccaagggcaaagaaaacaaccatgtaacaagagtctacttctcatatcctgcaccat

SEQ ID NO: 162925 - DNA, 186 bp, Homo sapiens
atctctttcaaacattatacagaaagaaatcaattccagatgaattaaagacaagtgtgaaaagcaaaatgtggccaggcacggtggctcatgtttataattctagcactttgggaggccaaggtgggcagactgcttgagtccaggagttcgagaccagcctgggcaacatggagaaattctgtc

SEQ ID NO: 162926 - DNA, 357 bp, Homo sapiens
gaagacaaagaaagaaatcttgttagcttgtcaggggcaggggttatggcggtggcctcggggggggttttggcggcggcctcggtggaggtcttgccggaggaagcagtggaagctactactcagcagctgtgggggggccggcctaggtgggggcctcagtgtggggggctctgttttcagtgcaagcagtacccggggagggggggattacaggggcataacacacctggttaatttttatagagatggggtttcaccatgttgggcaggcttgttctcgaactcctgacctcaggtgatctgcctgcctcggcctcccaatgtgctgggattacaggcatgatccaccgcccc

SEQ ID NO: 162927 - DNA, 430 bp, Homo sapiens
gttaaagattccacctgccatcttgtacttttatgctgcccactgctgccaccaagggatacgtgaaagacattccagcgtgatcttcgtctttgccacataacaattctatacaactgtgttcacaagtaagtcatatcagtgcctcatagccctggtggtagttaggaaatccttcctttttttctatcctaaatctctatttctgtagcactctaagcctggatcttcttagcttctctcaggagggagaggacaacacccttgggtgtcttcagcattctccaactgcataggtgtttgttctccataatggccttgggcacatttttccttcctcctcgcagatgggtcacctattgaaaatgctgcggtgctgtcatgtggcatccccaggtaggtatgatgaaggatgtcatccgcctctcac

SEQ ID NO: 162928 - DNA, 180 bp, Homo sapiens
caaaacttatgttgaaaccctaatccccagtgctatggtacttggagataaggcctttaggaggtaataagctttagattaagtcaggagggtgaggttctcctgatcgaattaatgcccttttaaaaagagtaagagaggtgagctagttctctgtccaccatgtgaggacacagtgaa

SEQ ID NO: 162929 - DNA, 356 bp, Homo sapiens
caggctttttcctgtagcagtaataagtgtaagttgcacaaatacctgaaagatatcagaaccatcatatttgcttcctacctgggtttctagggaactgggattgaagaagggttacaactagattggtactcaccatacagttaggctaaacattagagttgtttttagatagtgatttctcagaggaacagaagataagcccacctaccatttaggcatttgtaaagcatcattcacttccagtagaagatcacagtgagtaaagcataagagctactgggatagataaatgaatgggagaatggaaaaattagagcaaagaagagaattgaaattgagggccagataaagta

SEQ ID NO: 162930 - DNA, 183 bp, Homo sapiens
cttcttcatccgtggccctccctcgcttccttccttccttcccttcctcctcctgcatccatccttccctcctttcctttctttcttctctctcttcctccctcccaccctctttatttctttacttccttccttccctttttttttttatatcctttacagttctaggctacagtagggaga

SEQ ID NO: 162931 - DNA, 233 bp, Homo sapiens
cccagaatgttctgagtcagaaagacagtgaatcctctcctctgggtcagtggggagggagagagagagatttcagagggaagaaagcagaaaaagatgtcacaaaattgcctaatcaaaagttaccatgatgcctgcctcatctggaactgggctcccagtctctagtgagggagacatagtccagtccagtcccagtctccagtctgagccaaagcagaacaaagctggac

SEQ ID NO: 162932 - DNA, 180 bp, Homo sapiens
cgagttggatcactgaggtcaggagttcgagaaagaatgctgtaagaaaccataaaagcaagaaatacgggatgatttcattttttttcatagaaatcaggaagaagtaaggttagggtccatgataactctgagaagaaaacatattgccaagaaaatatactgcaaaatgttaattga

SEQ ID NO: 162933 - DNA, 247 bp, Homo sapiens
gctgggacgtacagggcacaagctactatactctgctaatttttaaactttttgtggagacggggtttccctatgtttcccaggctggtcttgaactcctgggctcaggcaatcttcccaccttggcctcccaaagtgctgggcttataggagtgagccaccatgtgcacccagcctgtggtttcttttatcaatgtttttgttccacttctacatccacttttatctaactcaggatgcttcttga

SEQ ID NO: 162934 - DNA, 226 bp, Homo sapiens
ttgatattttgggtactgaataatatttcattgtctgcatgtaccacagtttatccattcacttttacattcctcctccacagtttattcattcatttactggttgcttccaagttttggcaatgatgaataataaagctgccataaacattagtgtgcaggtttctgtgcagataaaagttttcaactcggtcgggaacggtggctcatgcctgtaatcctagca

SEQ ID NO: 162935 - DNA, 193 bp, Homo sapiens
aggagaaacttagaggagctaattttggaggataacttctatatctggtatatattgtgcctcagttgctgaaacttaaatcaaattaactgcacaagcccaaggcgtgaaaactattatttagcagactttgaagaaagacctgggcttttcacctttgttgttgctcctgatgactttattcaatagcaat

SEQ ID NO: 162936 - DNA, 144 bp, Homo sapiens
cactgtcagctcttctggatggcaagaacgtcaatgctggtggccacaagcttggtctaggactggaatttcaagcataaatgaatactgtacaattgtttaattttaaactattttgcagcatagctaccttcagaatttagt

SEQ ID NO: 162937 - DNA, 199 bp, Homo sapiens
gaatggtttgcatattttcatgtgggttcagatcagttatctgattcatgagagaagttaagttaaataaaatgtgtacaagtgacatttcagcctgagttaacagaatgtgtttttggtagggcaaatgaccttttatcacataattatctggaacatcttagagacatgaaaacacattttatcataagtacagttt

SEQ ID NO: 162938 - DNA, 422 bp, Homo sapiens
accccctctcagagctagaacatggttaggaagatggatactgggaggcaattgttctgatgggaaagcacagcatgtaaagaagcccataggaggcacttaacctggcgcagaagaacagggtaggcttcctggaggaggaggtaatctctgagccgatacctgaggagtgaatggaggaggggacaatgaggcaaggcattccagggaaaggtccagagcctagacagaactcttttaggagaattatgagaatcacaattatcgaggacacagtgaagactcagataactcaaatataggttttgcccgcaaagccttcctgtctggtgggtgagacagtctacagcaagctgctccaaggatatggaaaaaaaagtttttcctctggccttgtaggattggttattactgagcctgga

SEQ ID NO: 162939 - DNA, 278 bp, Homo sapiens
cctagaggatccccattggatagcggatagggctgggttggtcaaggagctttctgttagctgctgtaacaaatcatgaacatagtgacttaaaacaacacaaattgattatcttctcattatctttcgtttctggaggtcagaagcccaaaacggtttcacctggctaaagtcaaggagtctgcagggctgcatcccttctggaagctctaggggacaatccgtttcctcacctttttcagcttctagaggtcgcctgcactccttggctcacggcc

SEQ ID NO: 162940 - DNA, 238 bp, Homo sapiens
gaaattggagacttatatgtagctggagtggatgacttctttcttttgggggaagaatgagagatgcacatttcgttagtaaattgtgaacaacttgaaacaaacccaaatccaattttgaatttaagaagtagagttaaaatgaaaggtagccattcaaatactatgccttgctgccttcacttattaagttaggattttcttccttttagccctttagggatacagtagtttaaaa

SEQ ID NO: 162941 - DNA, 334 bp, Homo sapiens
cttaataaatgattgctgaataaaatcctgactgaagcatacgggaaaatctgaaaccatgaagggatctggagttatttactttaagaaaagttatggaagctgattatctttggggtaaaaaggaaatggatttttaaaagcctataaacttcagggaagaagcgccaagatacatgtgacaaggcaatctgagctccactcagatccaagaacaaagggttcctggtttaagctatggaagtatctgttccagaaagcagctgggcagaatttcctcacacgaatagctcttaatgtatgggaaaaagaaaagagcaaaacaaaacaagca

SEQ ID NO: 162942 - DNA, 334 bp, Homo sapiens
ttatttccagctccaaatgttattattttcctcaaacccattataaaatggcctctcttagcactatgagatctgtaatacaagaagtagaacaaacacatgaagttcctgttggaaattcaaacttctcatacagccttcactgagttctactcattatggataaaggcttctgctttgagtcacctaagtacttttgacccccaacttaatcaatgccttgaagtgaaaatacagtgtcaggcagtccctattcatgacacaaacaaaccaaccaactcatatcatgacttaatggtgtgagacctcagtaaaaactttatatgaactaaat

SEQ ID NO: 162943 - DNA, 643 bp, Homo sapiens
catggcatacaagctgtatctgggtgtcttgtctactgctgtagcctcatctggtgtcccttgacctcttgctggctgcatcctggccttgcttgtcatctctggattcctttgacatgcgctacttctttcttccttaaggcctttggctgtcttgttccctcttccttgatagttcctcctctttctccttttcttcctcctcctcttcctcttctttctcctcatcatcactcttgtcaatcagggatgctgctgtatctcttatgtcaagccctgtgccttgcatttggtaggtactcaataaatacttgttgaatggatgaatgctgcatattggaacttaagttcactgggcacagtggctcacacctgtaatcccagcattttgggaggccaaggcaggtggatcacttgaggtcaagagttcaagaccagcttggccaacgtggggaaaccccatctctactaaaagtagaaaaattagccgggcacggtgatgcacgtctataatcccagcaactcaggaggctgaggcacgagaattgcttgatcctgggaggcggaggctgcagtgagcccctgcactccagcctgggcaacagaatgagactgtctcaaaaaaaaaaaaaaaaaaaaaaaa

SEQ ID NO: 162944 - DNA, 549 bp, Homo sapiens
aatgtgccaaagagcttatatccaagccaaacagcgtttgtattggagaagttgcctttctctcaaaaaggatggataggaagcagtttttaaaaaaaatctgcctgctttctgaagatgaacacaaatctggttacatccaacagaagatagaatgattatacaacatgaggcttaaatgtttgtcttttaaaatgttcttaggttatgcagcaagagtttacagtagccaacctgtatttccaaggagatttaatcagaggaagtatcaaagaattgaagattagtatgattttgaaggttttcctaattatttttctgatgatctcttctcaactaacagagctgttaagtagagttgattaaacaatgtcaattttttgaaaagcccttaatgacatatttacacagtagttatgaagagccccccaaagcccatcatggattataggagcaagttatagccattaaaaccatctgtgattatttttttgtagtagagagtgatgtcaagccatcagcttctgttcaacatatttcttagaaaag

SEQ ID NO: 162945 - DNA, 526 bp, Homo sapiens
cagctacttgggaggctcaggcagagaactgcttgaacccgggaggtggaggttgcagtgagccgagatggtaccactgcactccagcctgggtgacagagggagactctgtgtcaaaaaaagaaagaaagaaaacaaaagatccctgggaattcacagaaaccttgggggtgattaccagactttctgaaacatttggaagggggaagatgatgtaactccagccgatatctgcattacaatatatattatttcattttaatattacaacagaaaagaaacagaagatcagaaaggtgaagtgacttgcccaagattattcagctaaatagcagtgcaggaatcttaaatcagctatttctgactccagaaaccatattttttccaagacccagcacaactgaggagaaaacgtggcaacaagtgtgtactcagttaggtaatggttcaaagaattgagcaaatgcttcatagagaaagtgacagctaatttggtattttgatatcagataatcttatggagaga

SEQ ID NO: 162946 - DNA, 284 bp, Homo sapiens
atgctcgcaaaatacagaagcagagatcatcatcccttcctgtattggtattaacgagtcagccaacgtgggtgatcaagctctcaggaagatgatgacaggtgtcgttgacctagactactgcattgctgatgaagcagtagagactgctacatatgctgacagaagtggccaatccgccatggtatagttgaagattgggacttaatggaaaggtttatggagcaagtgatctttaaatatttaagggcagaacctgaagaccattattttcttttggtaag

SEQ ID NO: 162947 - DNA, 653 bp, Homo sapiens
tcattctggttctcaccactgaacttatatatgtacctgtttgcttacttctttactctggtcccctagtctggacggtacattttgtgagggcaggtacattttgttcaccgtacctagcatcctaccccacacagtgtccagagtgaggtagtgcccattattgaatgaatgactcaacatctcatatatttctcactttacctctccctaaggcaaagtgatcgtaaccccactctgtatctgggaagttctagctttctccctggtgttgaggagagcaaggcatcctaaagcatgaggatactttaaatagtggcaggttactagaaggatttctttggtgtaaaatactgtcccatcactcatctgctatgcaagactaccggctcatttgaaaagcccatttggctgccagtaacagacaccagaaataacagtggtgtaaactcagtggaaggcagtttctgtcctgagtaagacatccagagataggcagtccgtgcctggtgtggcagcttcacagtcatcaagaaaagcagagtgctttgatgcagggtccttctgctcaccatccctagcacagggcctttgtccttaaggtggcttcatggcccagtgtgactgctggagtcaagctagtgagtctggag

SEQ ID NO: 162948 - DNA, 628 bp, Homo sapiens
gcacccgataaagtaatgatgatgaaggcacataaggtataacaaagttttaatatgagaatcttcttgttcattaaaggttgtgcccatcatgtatatatataatataatctgttagatatatatttgttagatatctaatatatatacacagaacagaaagcttattagatatcatatatatattagacataatagtgaagaaaaacaaaatattctctaaatcacttgaggtaatccgtgagggccctcacggattacctcaaccaactaatgcagtctcaggtgtggaatgccaagtaattctaatgtttaaccaaggttaagaacccctgttctaggagtccaaaataggcagctcttgccattcatcaaagtacatagttgtaggatcttcattagcctcatatcaataatttaggtgaaaatggctctaacaaaattaaaaactcatactattttccctatctagtttcagggagcccagcttgaattatagctagtctcttttggtaccttctgagaacacaagaattagccaatcaaatcaattatcctgacattttgctaccacattcccccaaaccctagccttgtggcctaacagcttgaggtaatcgtgaaggga

SEQ ID NO: 162949 - DNA, 119 bp, Homo sapiens
cactttcaaaatgagggcactgacactgactcggtactactctccaatcctcacagctcatccagagctgccaactgacctcatgcggtcctctatggagacacaacccctgattcctg

SEQ ID NO: 162950 - DNA, 201 bp, Homo sapiens
tgcccaccaacaccgcaatcttattttttaatttttgtaagataagatcttgctctgctgcccagcttagagtgcagtggtgtgatcatggctcactgcagcctcaaactcctaggcttaccttcacatctggggtagttacgattacaggtgcatgtcacaatgcctgactaacttttttgactttttatagaaaagggg

SEQ ID NO: 162951 - DNA, 639 bp, Homo sapiens
aagtttaagccaccaggcaaactgccctgggtcccctgacaccagaccccatccacgcccagtaacactcttctgcttctatgaaaatgggatgcgtggtgagcagtttgtgctcatttgcacacacacacagagttagatacaggatagattaattggaaaaaaaccaccctggcttgcgctgcctcctggcctctgcctaaactgttcctttaatctaaaatgcttcacctacttacctccccgcaagtcctcccccaacatattcaaaatctggcccccttgtgctggcccagtacatagggcatatctgcaaattggaatagtagacagccatgaaaacctgcctttaaggtgttggcaaaaaatgaaataagactcaatgtgccacatatgaaagatcgccaggatatggcggctcatgaagaaaaccacggttcggaacagcgtgtaggctctgccccatctgtgtttttaaaaaaatgcacacagatgtaacatatatatatatatttgcataggctgagaacgtttttggaaggatacacaagatcacacaagaaaccattaggaaaggtgcctttggagagaagaatagggtgtaaagctgagagagatttcttactattgtataccctt

SEQ ID NO: 162952 - DNA, 439 bp, Homo sapiens
aagaggctcatctgtcagctgtggctcccggagcagtagcccggcagtaagtgtctccaggaggaatgtgaacaatgcggaaccacccacatctggaggctcccagtctcaatggagtagtagggacagagttactgtttgcactggcattggggattggcactatgctatccgctctcactcagcttattacccatggaaggaatttggcaaacttttttttttaagacaaggtcttgctctgtcatccaggctggaatacagtggtgtgatcatagctctctgcaacctcaaactcctggactcgtgatccccccacctcagccttccaagtagtgacgactacaggcttatgcaaccacactcaactaattttgtaaatttttgtagacacaagggttcactgtgttgtccaggctggtcctggtctcaaactcct

SEQ ID NO: 162953 - DNA, 334 bp, Homo sapiens
ttggtagagacggggtttcaccgtgttgaccaggctggtctcgaactcctgacctcaggtgatccgcccgcctcggcctcccaaagtgctgggattacaggtgtgagccaccgcgcctggccatgattttttttttaacctataaaagccttgagtagtgatggacgcgattcctagtaatgtggtttactaaagggtcaggctgtcagttcaccacaaatacgccacagtagtgtttggtattctctcaatgttccacccaccagagcatacaaaacagccacattccccaaacacttaattctcaaaacatacttgtagaggagggaagcct

SEQ ID NO: 162954 - DNA, 213 bp, Homo sapiens
ctgctgagagtatgtgaataaatccatggctgtgagagccttcctgtgcattttgttcccattctgcttccaagtataattccaagtccaccgtgtctagtagagcctccttcacgaagacggccctacaatggcatgaacggtttttgagtcttgcctccactggagatttctcccacctcgccatcctgctgacattctcatataactgcc

SEQ ID NO: 162955 - DNA, 339 bp, Homo sapiens
catttccactggattccatttctgaaggcattgacccatccattttatccaaagaaggtatattaaaacttctgagttctgctagtccagagcgtctagcagaattagaataaaatctgtcttgcctttgtggaggaagagctgaatcaggatatgattgtcctggtggaggaaacatcatcctacggtcctgttcccacggaggtgacaggggcccagtgtcagaaggagccttgtgaggatcagtaaacctatcacagcttgattctcctctttccttggtaatctggtggtccagaggattccctgggcctcttgggtctcttcctcctccccctg

SEQ ID NO: 162956 - DNA, 256 bp, Homo sapiens
tggatgattatggctgaatcttcatcatttctactgtcacaaagaataattaagaggtaacagtaaaatataataaaaggagtggtaagagaaatgaaaggactgtctaaatgttacaaaataatatggaagtaaagtagtaggagcaaaagccatattgctatgaaagaagttaacacatccatcttcttcgttgttacctacaaagaagaattgaatttgaatggttcttggccagagataatttgtgtcaact

SEQ ID NO: 162957 - DNA, 507 bp, Homo sapiens
atctttcttaaatgtatatatagctcacatttatttcaatgtttgatattagcagtgtttggggtctttatttagaagtttggttacatctttgtgaccagaaatgtcgtagaaacttaactctagttcatatcaattggcctatggtaaaattggtttcattatacgttgttttgcttaaagtcacagttttcgagaacctgttaacaaggttaagtgaggacttactgtactagctgacttaacagtttcagtcgggtttgcttctgctgttaacagtaatctcttgtcagagctagggccctgcagttactacctctgcctgccattgtacctttcctggaagatagtctaaacttggacttcacacatatgcgtgagctatttgctcttacacttcccagcagaggctgcattatgctgtggatttgtgcagaatgagggttgagtaataattacccttcacttgccaatcatgtgttccatttgcattcattattagcatgc

SEQ ID NO: 162958 - DNA, 252 bp, Homo sapiens
aatctacttttcttcctaactacaaatgtctcctctcaagaagttaaaactgggcataatgccatggagaatgaccaggttcacacttttccagaattagcatttctcagataaacacgcaacccacatatcaggaaaattaccatttatcagaggggaccaatcctaaaagttctgttagaacaccagaaatgatattgatatgcaagcaacgcgacatatcgagggttctgtgagtgtatattcctttgg

SEQ ID NO: 162959 - DNA, 323 bp, Homo sapiens
agccactgtgcccggcccagaacatgttcctttaaataaaaaggcatggtaaaattgttcaatgatgacagaataactgtatctagacacttaccctctaaattactgacagtttaaaaagtgactgtaacttactatggtaagtgtccgtatctctttatgcagtatcactgtaaacttctaagagaatcgtaaagatgaatgtaacagcaatccccatagtgagtcacagcacaggagaaccagcactctaaggtggggaggcagggaagctcttccccgagcccagggaagccctctgagcagcagctgatgttttcagg

SEQ ID NO: 162960 - DNA, 132 bp, Homo sapiens
tgacagatgaaagagtaagtgagcttgatgacagattaacagaaattgtccaatatgaacaataaaaagaaaaaggagtgattaaaaatgaacagagctctggtgtggtggctcatgcttataatcccagca

SEQ ID NO: 162961 - DNA, 369 bp, Homo sapiens
gccattcaagaaattttcccatttcacttaaatcatcaaatttattggcttaaagtcattcaaatatttccatgttatccttttagtatctgtagaattagaagtaatgtcacctctctaattttctgaatattgatcatttttacctcctatgttttattcctgaccagtctgactagaggtttatcaattttattaatcttcttaaagaatgaaatttgtgttatattgtttttcttaatttttcctatttaattgagttctgttctgatccttattatttcacgtcataaacttactctgggtttaatttgctgctatttttctagtttcttaagttggaaatttatagcacttagttgaaatctt

SEQ ID NO: 162962 - DNA, 576 bp, Homo sapiens
attgaatagtgtctcaccctcaattaatgtccttcccagaatctcagaatgtgagcttatttgggaatagggtggttgcagatgtaattaaggtaacatgaggtcacactggagtagggtaagcccttaatgcagtatagctggtattcttgtaagaggagactcagagacagacacagagagaagaacaccatgggccaatggaagcagggatggcagtgaagtgtctacaagccaatggatgccaagtatgcctggcaaccaccagaactaggagaggggcatggaacacactctcccttgaggtctccagagggaactaaccctgaggagaccttgactttcgactttcagcctccagaactgtgaaagaataaatttctgttgtcttaaactacctggtttgcagtgttttgttatggcagccacaagaagctcatacacacagctgtatctgtctgctttgcattgctataaaggagtacctgaagctgggtaatttataaagaaaagaggtttatttggcttacagttttgcaggctgtacaagcatggcatcagcatctgcttggcttc

SEQ ID NO: 162963 - DNA, 175 bp, Homo sapiens
tggcgtgaagtcccaacgggaggctccgcatcacttgactgtcttttctgttatgttccaggtgtctctgattgtctttctcctctgagcgtcccttatcttctttctaacctttgtcaccttccagatgtctctgccaccacagatctcttctgaggctgcccgtggccaccag

SEQ ID NO: 162964 - DNA, 402 bp, Homo sapiens
ggcaggagactagagagacatcttctctgaagcctacaggacttagcttcagggtatggtataaaagggtcagaatctaaaaactgagaaagtcattctgaggtactccaggccttcactcggaccactgcagtagccctccaaaagctggggcacagcagctgtacagggaagatttcttgaggtacagaaacttggtgcaagactgacacaaagacaactccccagtgacccaaaaagccggcagtcaggctgaaaaacagaaatcttccactgtttggtaagctggtcctggactgtgaagcatttaaaaacctccagagtttttccagggctcagatttcaagccctgctaagggggaagtcctgattgtgccttcaaaacatttgaagccagtgata

SEQ ID NO: 162965 - DNA, 575 bp, Homo sapiens
ttcctaaattatcccgctgcagggggagagagggagcagggtagtggagtcataccaagcaacaagaaagacagggtagtggccaggagttcgagaccagcctggtgaacatgatgaaacctcatctctactaaaaatacaaaaattagctgggcatggtggcaggtgcctgtaatcccagctactcaggaggtcgaggcaggagaatcacttgaacccaggagatggaggttgcagtgagccgagattgtgccattgtactccagcctgggcgacaagagcgagacttcattgaaagaaagaaagagagagagagagaaagagagaaagaaagaaaggaagaaagacagggtagtacattttccacgaatttcaattttactctcttcccccaccacacacacacaaaaagcatttgagggatgggaagaagaaactgagatcacagggaaaatagtaagagacatttagaaggacaggtcttagaaacgtactttgggggggaggtcagagaacagtagcatataaaagaacgctaagacagttcccaggttgaggcatgggtgactagtttg

SEQ ID NO: 162966 - DNA, 152 bp, Homo sapiens
acccttttgctaatagtaactaatcgtcactccacatcaccttcccagtttgcttaaaacccatctctttcaaatggcctcgtctggtgaaggctcttctgatttgcattattcttataaatatggaagtatacatagaccattaatccaag

SEQ ID NO: 162967 - DNA, 197 bp, Homo sapiens
ctacaagcagcttgacaccaccaaagcataccgcaccgggtggaaagagatggagcacacaacctcaccggcctgtgtgacatctcaccctaccttgaagatggcttgagcagagaaagaaagatgatgggagagtatggaacaaaactgagaagttgcagtgatgtaaaaaagatttcctaagctcagccctgctc

SEQ ID NO: 162968 - DNA, 449 bp, Homo sapiens
agggatagaagggatgcttcccacatctgagaaggttgatcaacattttggtaatcgtattctatctgttcataggctacttcaatttccacatgcaaatttaattttgaggctttctttagaatgacttctgcgtgtctgtgttaacagagttcagttccttaaaatgagaaagtgtccatggacctttaagtctacagttcttagtcttcggttgaaaagaatgtgtcacatttctgtcttttaacctttttataatgtaaccttttctatctttttctaaaagatagaaaattgtaaaaataatggaaattttatggaaaagtgtagttaaataaattatccatagttttacatagccagggtagtacctcatgtttattctgatatgtttgtttccaaattattttttctgtgtgtggcatatgatttttaaatacaatatcccg

SEQ ID NO: 162969 - DNA, 586 bp, Homo sapiens
ccccttaataaagaaataaaggatagatcttccaaaataacaaggatgtagtggaatgaataaaaatgtatcaagtcagcagcaataaggtaaaaatattagaaaagtaatgttaaatagttgtcagatggaaggatatatttgagcaaatattttgttaaatagatgacaaaaaggtaatatttatacattacatatatgtgtttgtatgtatgtatgtatgtatgtatgtatgtatttattttgagatatagtcttgcctgtcacccaggctggtatgcagtggcacgatctcggctcactgcaacctccgcctcccgggttcagacaattctcctgcctcaacctcccgagtagttggaactgcaggcgaccgccaccacacttagctaatttttttctttttagtagagacgaggtttcaccatgttggccaggctggtcttgaactcctggcctcgtgatctgcctgcctcagcctcccaaagtgctgggattacaggtgtgagccaccgtgcccagcctcacagatgtcttaaaattcacctgataaagttaggagcctcaagaaaaattagcagaggaa

SEQ ID NO: 162970 - DNA, 160 bp, Homo sapiens
tcctagcctcgccagtgtcctagcctcgccagtgtcctagcctcgccagtggcgtgtcatctgataatagtcctgctgatgggatctaccctggaaaatgaggaaaaaggaaagccgagaggttggccatctcaaggtttgacaggacaaagacaggttc

SEQ ID NO: 162971 - DNA, 404 bp, Homo sapiens
gacagagaccaggcagggcctggaagacgagggactgtgtcccaggaggtcccaggaggtcccaggaggctgtgctgcctcaggtaaaaggcaacaaaaccaggcactgagcctccaaatctgcctttttttctgagatggagtctcactctgatgcccaggctggagtgcagtggcatgatctcagctcattgcaacctctgcctcctgggttcaagcaattctcctgcctcagcctcctgagcagctgagattgcagatgtgtgccaccacgcccggctaatttttgtatttttagtagagatggggtttcaccatgttggccaggctggtctcgaactcctgacctcaagtgatctgcccaccttggcctcccaaagtgctaggattacaggcatgaacca

SEQ ID NO: 162972 - DNA, 451 bp, Homo sapiens
tgcccagcgcaggtcacgttctcctgtgatgtttacggttctccttgatacggggtaacttaataggcaatatgtgtgtattacataagaggataagagagggaagaaaactgctatgtgcctaaatataacatgcatagattatatatgacaagtattggtcacaaaataaggaggaaatactccaggcattgatggtcctcgttcctgtaactggtcctgtggacacagccactttcttccactgcccattctgtggtcttgtggccttcagcaggcacctcactggttgtggttctttctggtgaggtaaagtaaaaaagaagttggtagcacatttgattaacacgtgtcttaagatttatttctaaggtataaaagtatgatcagttgtttataaatccaaaagtaataatacatgctgggtttaagatttgaaaatgggaatgag

SEQ ID NO: 162973 - DNA, 239 bp, Homo sapiens
gtttcctcatctgctatgtgaagatggtaatgcgctccctatctcactaaagagcactgaacgagacaagctatctggaagcatgttttaagctgtaaaagggtacacaaagaagagatgtaataattgtgctgtcatctttagttttttttagctaaaaaagctaaaagctactatcatctttagccacacattcaccccatcaccttatgttaccatttcctttatccctgtacttc

SEQ ID NO: 162974 - DNA, 385 bp, Homo sapiens
taagttaccccagggctgccagctcttgagaaatttctgtagctttttcaagtgtgtcttcacatacaaaatgaaaataacatcgtcagtcaattttatctgataaggtatactgaacacctgttatttttgcatcccagcctctgttcaccattctcccaataattacccccatttctctctggactccaccccttcatacatgatctcaaagactgagtatacagcccaagcctaagccatgggaacacatcatgacccgggattcagtggttggttctccaatgagtttatgacctaagtagagaccctgagatgcaactgaaacttttgctgggaatagctaagataaaaactctttttctttccccagtggatgtgatct

SEQ ID NO: 162975 - DNA, 1222 bp, Homo sapiens
gtgggtggatcatctgaggttggaagttcgagaccagcctgggcaacatggtgaaaccctgtctctataaaaatacaaaaaattagccaggcatggtggcacatgcctgtagtgccatctactcaggaggctggggtgggaggatcacttgagcctgggaggtggagattgcagtgaaccaagattgtgccactgcattccagcctgggtgacattaaaaaaaaaagagagatcatcagtgtaaaagatacacaattataaaatcaagtaagtaaaaactctaatattacatttaattgggaatatcagaattaactcttatttttaaagtgcaaaagttttaaattttcattaagtctgaccaatttttgttcttttattgcttgtacttttggtgttgaatctaataaatcattgattaacctcaggtcctaaaggtttacttttgttttcttctcaggattttctaattagaaaattaggtctgtcattttgagttaaattttgtgtatggtgtgaggtaggggtccaaattcatccttttgcacatggatattcatttgcttcagcaccacttgttgaacagactttttttcctattgaagtgtcttgtcactttttttcaaaaatcagtatttcatggatgtttgggtttatttctggactttctatttcattgatctacttgtcacttcttatgccagtacgacactgtctcaattactatagctttgtagtgagttttgaaatcaggaagtgtgagaccttcaactttgtttttttcccaaggttatttggctgcgtcttttgtatttccataagaattttaggatcagcttgtcaattgttgccaaaaaaaaaaaaacttcctgggattttgataatgattgtgttgaattcatagggcagtttggggagtgttgccataatgatagtaaatcttctaatctatgagcaggatgtttttccatttatttaatctttaaatattttattattttagatctattgagaatggaattgttttcttaatttcattttcaaattgtttgttgctagcatatagaaatacaagtgattttgtatattgctcttgtatcctgtgactttgctgagcttattttagtagttttttttcactgaattctttaggattttctacataaaaaattcatatcatctgtgaataaagacagttttatttcttaatttttaatctttt

SEQ ID NO: 162976 - DNA, 618 bp, Homo sapiens
ccatcaggttattatgctatgacagaattttagacctgaaaatgtcattttaagtcatcccattcgatcatttttagttctactcattttcataccatcctcacaatttttgccatatctgcatactacttgttcttttttccttaaaattgatttactttttttaaactttaatcagttgagccttatatcagtaaaatcccaggtttcatttgctaattagtttttttcaaatatgcattaaaataaacatataactagtcaaaacattttcacctttgtgacacctataatctctacaccttaggaaacactggtctaatttaaatccttcattttgcaaactgagaaataggcccaaaaagatagactgatttaggcaggagctctcacagcttcagtgagacatccagggctagctggattctgcctgtttgtatatagttcttttcacaaggcaggagtgatgcacattagaattttaaagactgcctttgctactgtaacaaagatggcacccttttgtgattggttacttgtttccctggcactgcaactacacagtgtacaaatggattgagggaggaaaagtggtaaagaaaaccaattctcaaggac

SEQ ID NO: 162977 - DNA, 565 bp, Homo sapiens
ccatcaggttattatgctatgacagaattttagacctgaaaatgtcattttaagtcatcccattcgatcatttttagttctactcattttcataccatcctcacaatttttgccatatctgcatactacttgttcttttttccttaaaattgatttactttttttaaactttaatcagttgagccttatatcagtaaaatcccaggtttcatttgctaattagtttttttcaaatatgcattaaaataaacatataactagtcaaaacattttcacctttgtgacacctataatctctacaccttaggaaacactggtctaatttaaatccttcattttgcaaactgagaaataggcccaggctagctggattctgcctgtttgtatatagttcttttcacaaggcaggagtgatgcacattagaattttaaagactgcctttgctactgtaacaaagatggcacccttttgtgattggttacttgtttccctggcactgcaactacacagtgtacaaatggattgagggaggaaaagtggtaaagaaaaccaattctcaaggac

SEQ ID NO: 162978 - DNA, 261 bp, Homo sapiens
gaagggacagaataaggagcagactgacttggtgggacgagaggcagcaggtagtcaggagcctcagtggcttgctgcctttagccttcccagtacttttcagaagctcagagaaacgtgcgtgattccagggagggtagggtcaaatgacttttgggagattctctgacctgctcttatttaggttggcactgtacaactccagagggtgccagttacataatctgtgcagggcacagtatgtgccatcatgcacagcag

SEQ ID NO: 162979 - DNA, 384 bp, Homo sapiens
gaagttacctcaacacagaagcccaggtcccatcctacagcacagctaagccaaggcaagagaaagactgtttaggatgttccatttccgcagtcaagagagggagagtacaggaggagaagaaacacgcttcattcctacatagccacacacacatttaattgtagcccagtttaaattatactctttgctatttaacgtcctccattacttatgaggctttgagaattaaggcaactttctaattcttaggagacttaagtcactcccctgttacgctactttgaattacttggtatcatccaaaccgagcaagaaagagccagcctagttcaggaaggcttcagccagacacgcaggcagctgccggccgactctgagtct

SEQ ID NO: 162980 - DNA, 1988 bp, Homo sapiens
  misc_feature (1)..(1): n is a, c, g, or t
  misc_feature (5)..(7): n is a, c, g, or t
  misc_feature (264)..(264): n is a, c, g, or t
  misc_feature (1627)..(1627): n is a, c, g, or t
  misc_feature (1693)..(1693): n is a, c, g, or t
  misc_feature (1744)..(1744): n is a, c, g, or t
ngacnnnggggaagggagtgctcccccaccagcagcctggagaggctctgcaggcacaagcatcagcgggaacgcagccacgagcggccagacaggaaggagagtgtggcgtggccccgagaccggaggaagcggaggtcccggtccccaagctcggagcacagggcacgggagcacaggcggcctcggtcccgtgagaagtggccgcagacccggtcccattccccagagaggaagggggctgtgagggaggcttccccagcnccccttgcacagggggagccagggcgggaagacctccccaccaggttgccagccttgggggaagcacatgtctcgccggaggtggctacggccgacaaggcccccctgcaggctccccctgtcctggaggtggcagctgagtgtgagccggacgacctggacctggattatggcgactccgtggaggccggacacgtctttgatgatttctcaagcgacgccgttttcatccagctcgatgacatgagctcgccaccttctcccgaaagcacagactcttccccagagcgagacttcccactgaagcctgcgttgcccccagccagcctggccgtggccgccatccagagggaggtgtcattgatgcacgatgaagacccttcgcagcccccacccctgccagagggcacccaggagccacatttgctcaggccggacgcggctgagaaggctgaggcacccagttccccggatgtggcgcctgcggggaaggaagacagcccctctgcgagtgggagggtacaggaggcagcccggcctgaggaggtggtttcgcagacccccctgctgcggtccagagccctggtgaagcgggtcacctggaacctgcaggagtcggagagcagcgcccccgccgaggacagagccccccgggcaccacttcacaggccacagaagccccgagaaggagcctgggacatggaggatgtggcccccacaggggtcaggcaggcgttctccgagctgccctttcccagtcacgtgcttccggaacccgggttcccagacacagacccctctcaggtttacagccccggcctgccgcctgccccggcccagccctcaagcatcccaccctgcgcactggtcagccagcccacggtccagttcatccttcaggggagcctgccgctagtgggctgtggggcagcacagaccctggccccagtgcccgctgccctgaccccagcctcagagccagccagtcaagccactgcagccagcaactcggaggagaagaccccggcccccaggctagctgcggagaaaaccaagaaggaggagtacatgaagaagctgcacatgcaggagcgtgctgtggaggaggtgaagctggccatcaagcccttctaccagaagagggaggtgaccaaggaggagtacaaggacatcctgcgcaaggccgtgcagaagatctgccacagcaagagtggagagatcaaccccgtgaaggtggccaacctggtgaaggcgtacgtggacaagtacaggcacatgcgcaggcacaagaaaccagaggccggggaggagccgcccacgcagggggccgagggctgaggccaggcaatcacgggctatgccnggggagctgtcgggagtggcgggaatcggggccatgcccggggagctgtcgggagtggcgggaatnggggccatgcccggggagctgtcgggagtggcgggaaatggggggcatcancatgcctgccgtcgggttcctgcgctgacacctggtctgtgcacctgtgttgctcacagttgaaaactggacacttttgtatgtatattatagagacactgtttccattctaatttatcaaaaatggattatctttagaaacctcttgattgacttactacttggaagataaagcacttggtgatcaagaggggctcctggtggggtggcgcgtccttgataaatctctaggtggcctcccgcc

SEQ ID NO: 162981 - DNA, 416 bp, Homo sapiens
tgggcagaacaggtcatggtcggggatcagtggctaggagctggcacacctcgcaacctccccttggtgctgggggtggatctgagggctgctctgtggtccttgctcctggtgcttttctggatttttccagccatgaaacagcattctgggcaggggtgggcacagagcacccacctccctgtctgtcgggcccccaggggcaccacttcacaggccacagaagccccgagaaggagcctgggacatggaggatgtggcccccacaggggtcaggcaggcgttctccgagctgccctttcccagtcacgtgcttccggaacccgggttcccagacacagacccctctcaggtgggtgtctgggctggagggctgtgggccgtgggcagtggcctggcacccgtgccacacacac

SEQ ID NO: 162982 - DNA, 477 bp, Homo sapiens
gatacatatacccacctggggaccttcctccaaagactagtagcagtaagtctacaaaaagaagagagatttcctctttctagctcattgcttgaaatcacttctggtttctagggagcataaattctgaggctatattctccaaaaggaagtcgaaggggtacctcttttccaacaatgttaaagtaattctagggttaatgttttgccaaactgggagattccacagaaatatgtcccagtgactcaggaggctgaggtgggagatcactttagcctggaagtttgcaaccagcctgggcaacatgacgagacctcaactctacaaaaaaatgtaaaaacttagccaagcatggtggaacacacctgtagtcccagctacacaggagactgaggcaggaggatggcttgagcccaggagttcaaggctgcagtgagatatgatcgcattatcaaaagagagcaagatccccaatt

SEQ ID NO: 162983 - DNA, 278 bp, Homo sapiens
gggaggggtgtgcaaagctctggaaggcccatttgagcaaggtgtgaagccctcaggagactcctttaaagaagtcatgtgccctacccaaggtcacagagccctttgtgacaaagtctcgaggttcatactttggtgcgccattcaatgagacatctagttctaattaaagaaaatgccaggccgggaacagtggctcacacctgtaatcccagcactttgggaggccgaggcaggtgaatcacctgaggtcaggagttcgagaccatcctggccaa

SEQ ID NO: 162984 - DNA, 122 bp, Homo sapiens
gagatactgatgcagccatctttggaaacattctacttagctaattttatgctaggctttaggtcaagaaggagagagagagctgacatgctgtggtacacacttatagtcccagcgacttg

SEQ ID NO: 162985 - DNA, 284 bp, Homo sapiens
ttttaaattaatatttaaccaacttattaaaatttctacacatcattcagtgaattggtttgttataaatgtttatggttggtgtaagatgaaaattggttccttcaagtgcttttattctcttttctcctctttcccttttacccataaataggaacttattatcatacttagctcctgttttcttttatagatgatatttatgcacaggatagattatccaaaaattagagtgaaagagggcagtgaacaataatgtattgcaaaataataatgaggtatga

SEQ ID NO: 162986 - DNA, 198 bp, Homo sapiens
cttgagcaagatctcagcagctccacttggatgctggaaatatatgccagaggagacttatgatgctaatttcctttagtaaacagttcaaatcttgtcttggacaccaatgaaataagaaaagctagccacaggctgtgtggaattccttcctcttaacactaagcatcaggcattccatgacttttgctcttggga

SEQ ID NO: 162987 - DNA, 484 bp, Homo sapiens
gtctcaccttctgtcataaatagctttatcgaacattttaatgcaggcagactctcgtgaaagaaattctggtgaattccattgtttttttctccatcttattacagtatgattaataagttagtgactacaaggttgtagtttttaagagcaagaagtccactccctttcaagtcacattgggcagtccttctgttcatacctgacatattgtgggaacatatgtctgcgtaggattttaatacagagattgtcttagataagaataatcgtcagagaagcaaatggtctataagttatttaattttattcttaatatggtcaaagataatggttgcactgacttcaactttactttcttaaattccattaattgcatagcactagaattttccatataaaataaaatcagatcccatgtcacacagtactctgagtcactctgtgactcctactcttgaagatatagtcctacctgcagatg

SEQ ID NO: 162988 - DNA, 328 bp, Homo sapiens
gattggagggcgcagcaggaagcagggaggcggctcaggtgacgggcaggtgaggagtgacggggcggtatttgggcgggaggcggggagtgaagaacaaagagccgttccggagacctgggaggcattgcccatgggtcagggctacactggttttctggctgggctttctgtctttctccaagctctggacacaccgcaccgtgagaaaggctcctggaagcagagcaaccctgcccgggggctgtttctgaaggggcagagcagaggctggaaaacctgcaagccttccctcagagtcactgcgttccctcgtgccacgctcccc

SEQ ID NO: 162989 - DNA, 296 bp, Homo sapiens
cctggcagaccttgccgggctttacattggaaaacgcttgcgggtggatcacttgaggtcaggagttgataccagcctggccaacatgatgaaaccctgtgtcggccgggtgcagtggctcgcgcctgtaatcccagcactttgggaggcctaggcaggaggatcacttgagtccaagagtttgagaccagcctgggcaacatggagaaactctacaaaaattacaggaattagctggacgttgtagtgtgtgcctgtgttcccagcttcctgggaagcagaggcaggaggatcac

SEQ ID NO: 162990 - DNA, 249 bp, Homo sapiens
gtgaatagggattttcagtaactgtgattgtttggtgatagattttttaaaataactcttgtatgtagatgttctggaactagagatttgttccccaaagagaggcagcagaatgctgtgcagaacatggcatggcatgtcaagagactcttgagctaattttagctctgccaccttggggaaggaagccatttctcttctcagggcttctgattcttctgtgaaataaaatgaactttgcacgctcta

SEQ ID NO: 162991 - DNA, 196 bp, Homo sapiens
ggacaatctttcctccaagaaagaggatagtaaactaaagagttatttacatcaatgacttttttgttgtgccttttgtagggaggagccagagatactctggtggtgggagggatctaaaggagcctttgaatgaatgctgccctttaaaaagagaaaattagctgggcgtggtggctcacacctgtaatcccag

SEQ ID NO: 162992 - DNA, 1141 bp, Homo sapiens
aggaactttctcacatttagtagcttgaggaaagggatgaagaaaattgattgtgtttgtgactaagtgattgattttccagagaggaaaaaaggtggccttgaaagaaaacagtgagaagacttgggctacactggtgtgagttttaagggtaaggaaaatgctgtagaatactgtccttgacttgatggaactctttatgggagagagagtaggcctcaggtgtgcttgcatggttttgagacaggtgatgagtttctcttggtcttgtgctgatgctggtcctgcagctgcaagaacagatcataactttcctctgtgtagggtggaaaagcatttgttctctggatgtgcattatctcattttgattctggcagtgggcccaaatgctaagtgtcttgcccaaagtagaaatttccagttgctacttccatggtgtgccgcacaggcaatggctgagttcttgtagcttcacagacatgtagacacgagagaaagccaagggtacgagctggagacatggatgtgcgactcattcaggtatagattaaaatggaaccatgtatatggaggagcatccccagagattacatgaataacaaactgaacattttttcattcaatgtgtttgttttggcttgtaagccagtttttccagagatctacttgatagagggaaaggagaaaggaagatgtcattgaaccaagagaaaattgtctttctccataccttggaatattatttggcaataatgaaggaatattatttggcaataatgaaggaatgaaggactgatatatgatacagcacagatggactttggaagcatactaagagaaagaagctagtctcgaagaacacattgtatgattccattcctatgaaatgtccagaatagcaaagctataaagatacaaagtagattagtagtcacctttggccagtgaggttggggagaaatggagagcgattgctaatgattacaaactttccttttagcgtaatagaaatgttctaaaagtgatgattgtacaatgttgtaaatatattaaaaaccattggcttgtgtacttcaagtaggtgtattgtattgccatatctcaataaattatatctcaataaagccattttatttatat

SEQ ID NO: 162993 - DNA, 353 bp, Homo sapiens
cacatttggccttgaagctccacccaacatgacatttccaacaaaatgcctgctgcccaagactaatgaatggaatataggtcagccagaagctagagactttgaaaagccagaggttccccccagcctcatttgtttctgtttgcccagaaaatgtctgtgcagtcctaaaacaccctaggaaaaagttgagcaccatttaataataaaattgacaagataagagtgattcattcacatgttctgcttgtagaaaagtgctaaaaaatatgaggaaaaaccctagtctataaatagagcaatgcagagccgaacatattacttattatggcaggtacgcattaattatctcc

SEQ ID NO: 162994 - DNA, 730 bp, Homo sapiens
taagcctgtcttctgttctccttgtgggccccagggttcctgtggatgtccccaccctcagattgctggagtagaaaacttaactttccaaaacactgagttgttttcagcccagcattagaggttaaagatgctcatgtagaaagcacgcaggatggatctgacgaaggaaacagcttctgatacttgagcaggctttggacagtgcagatgaagggggctgagatactgaggcagtaaagagaacggtcagcttggggtctggagtcgctgggcactgagtgcgcgttctgagtgccattcaagcaccacgtaacggttggggctggtgttgggtcctgagatgggccatgggccaccgttaaactcaggaagcacgtgctgcccccccccactctagaaggcgggctgttttcctggcgctgtgtgtgccatgctttgtgtgaacatctcactgggtgtcgctctcatgtggtaactgggcatcttgtagaagtcgttgctcctaaacgtaagccagtgcccacattgggtacgttctggaagaaacagtgtggcccaacatgggcttatccagagacaggacacctgctgcctggtgacgtcaccacctcccgatggcaccactctgttctactccactgcccccgggtcctgacttgctactatggaactaaccctgtaggatgaggccgccatgcccgtgtgtgtgtctgtccagatctgtccc

SEQ ID NO: 162995 - DNA, 151 bp, Homo sapiens
ttgaggatgaagatctgtcatcaaggagtgtttaaaacattctcctcatacaaaacccctctaattaaggccttttgatggaccgtttggaaagtttccctgggtgtgggttatagcaggatacatttgatgtccactgagttccgggtac

SEQ ID NO: 162996 - DNA, 141 bp, Homo sapiens
atgccttggctgatagtgatttcctgctagggctgtggagttgaactgcctgcattcaagtcctagtttgcttactgttttgtttttgttgttgttttgagatgaggtctcactatgttgcctgtgcttgtctcgaactcc

SEQ ID NO: 162997 - DNA, 332 bp, Homo sapiens
ggctatgcactagttggaggtcctgaactgaagaccccagcggcagggctgtctaggggtgggagatggaacctgaaaaaatcctgccctcacatggcagaaaatagtcagctgggggcagaagacccaggtcttaaattgcagtgacagtggtgtacatgcattgctctccctctgatgaaagctgttgacttcagttgagagagacttctgctgcaatctgaggctgaatgtcaggaaggccatataaaaggcaaggcctaagcacaattttctccaattttaaaaacttgtcagcagatacctctacagtaagagcaacaggctatgaa

SEQ ID NO: 162998 - DNA, 259 bp, Homo sapiens
ttattctctgcaggcagccaagcgatcgttgtaaaacaaaaatccaaccagatctctcaatcaaaacacttcaatggctcatccttgtctttaggataagattcaaactcctcagtgtggcacccagagtcctatgaggtctgcacctcctatctctatccaccttgaactatttatgatttgttaatttgcctcccaaacctctatgatttggtacaaaccacctacttggaaatgtgcctctcccctgccaccttct

SEQ ID NO: 162999 - DNA, 398 bp, Homo sapiens
agaaaaccaactcatgtctccagtaagaagataatggctgaaatttgtgaattgaatttggcaataaggacattattggcaataactgccaagataatttcaatagagaagaggcaaaagcaataatgcaatgagctaaagagcatatgagaaaccaagaatcagggatgttactggagccttgacttctaaaagcccatctgagtagtaagggagggtgatgtcacagcagtacagtaacaggagtcacaacatctgttgtgactgctcttcaggtttgagaacatatgtaaggcagaggaaagaagtcattagcaagcctaaaacaggaaacttagaaaaagcaacaagacatgatgaataactactaaagttaagggaataatgactggaaacat

SEQ ID NO: 163000 - DNA, 233 bp, Homo sapiens
cagacatctcccacccacaaggaggctcaggaggctgggcagggacgcagcacctcctggggatttaacccagccggggcttgcaggcaagaggggagtgaaggaatgacactctgtcctcacccagggccgtcctgctggatggagtcacagggacggcaggggcctctccagagctgcctgtgggcacagaagcaagcctgggggtgccccaccagcctgagcccatcacg

SEQ ID NO: 163001 - DNA, 276 bp, Homo sapiens
tccatgttggtcaggctggtctcgaacttccgacatcaggtgatttgcccgcctttgcctcccaaactgctgggattacaggcatgagccaccatgcccagacaagacctccacaagttttaatggtctccacagggagactggatagcactgtgattatgagcatgaagtgtcattatgaggagtgtgtgtgaaagagatatctggctcaatttctagacctaccacttatgagctctgtgatcatggcaagttacctaacataccttagtctct

SEQ ID NO: 163002 - DNA, 525 bp, Homo sapiens
acctggaccgtcatagcagtgggctcctcacctccagagaaaacacttattaaagccacatgaatccctaacatagtacttgtattaatgatgactcgtagggcaaactatttatgcagcttttcccacgtgaactcatcatagaactttttttccccctgaaaatatcatgggcagagttacataatgaagagacaggaaagtctttagagcatcttccatgccctgatattttagtcttttaggaagagataaagcattgcttcttccctatctgtttaatggaaagggaactgtttctcatgcagctgacaggcaaagacacatcttcctctcccctttccacccctcaagcaaaaggcaacaaagtcattagaagctgggcattaaacaactaaaatatactgatattcctaggggatagtccaagacacaccccagctcaggtacactctgtatctgccctcagggtgcagaagcagaagagcttttacagtttttataaaaaaggagtacatacaaaaa

SEQ ID NO: 163003 - DNA, 152 bp, Homo sapiens
caattgtatctctaacattatcaacttttaatttcattaatcttctggcttgtatgtttgggttttttggggtctcaatttcattcattcctgccttgatctttattatttctttccttttattttatttaataaattaattttttttttgg

SEQ ID NO: 163004 - DNA, 140 bp, Homo sapiens
tatgtgaacgtgtggaaacaaaagtctacctggggtgatgctgtctgcatcactcgtcttcagagcccctactaccccagggcgccaggcaactgtgcaaggctacctcagagatgccgagccagggagagggggaaaaa

SEQ ID NO: 163005 - DNA, 195 bp, Homo sapiens
tgctgagactacaggcgtcagccaccacacccggccagtaaaagataaaattgtttatgattagaagccattcttctatttgagatgtgaaggaaaaacaggataggaagtattgatggttagtggcctctagtatatgcaaacagtaacatctttctcataggctgtttcttgactaccttggatttaattacg

SEQ ID NO: 163006 - DNA, 240 bp, Homo sapiens
cccaccccacccaggatgtctcatcccgagatcttaactagttacacctgcaaggccccatttccaaacaaggccccaattctgaggctctgggtgaacatgaatctgggggcacaccgtacagcccaggacagcaggcagcgccggagtgactgtctcctgccacgtggtccactgaacactagcacagaaaacgtttctttgaaagccctacctaaaaataaatctcactgaaaaatg

SEQ ID NO: 163007 - DNA, 134 bp, Homo sapiens
tactccaggaggttttatactgcagaccaatgtaccatagtactatttgggatgtgtgagggtgataacttggtaaaatagcaaaggaccaattagaaaagaataagtggaaaagataacccagcacccacttt

SEQ ID NO: 163008 - DNA, 360 bp, Homo sapiens
tgtcttagtccttggaccaatgcaaacctcacagagatttttctgcaagagggggaacagttttgtcttcaaagtcaaggtgaatgcagcataaggagccctggaccagcagttgattaagtaccagctctatcactcttccactatgcgtccttgattcaaaagcccgcttcccaccctccccgcaaacagcaagttcactgaatgtaaaatgtgggcaataaaccctgctttgtcttgctttcaaggttatttgtgcaatacgctttgcaaagtataaattgataggtgtcagggatgtgttcatttgttttaatcatgaatactgaaataaaataaagtatggagaaagtacaataa

SEQ ID NO: 163009 - DNA, 373 bp, Homo sapiens
ggcgctcccactggtcctgctcacagctctgccatgccccctgaccttggtgtgctgtttcacaagagcatgccctggtgcaggatgagggacaggtggctggagaggatgggcagtcaacacagtccatccttgtgtttggaaacacatgttcacttgtgtgcaatgttgggattcgtggagaagctggctggaaagttggtaaagtatccagaagacaaggttttgccccagctactcatcatctgaacagccaggtagattctactttgcagactgagcctaagccttgaactctatcgggaaataaacagagatggtgaactgcgatggaacccaagtgcagttagttacagcaaacacatctcatgtg

SEQ ID NO: 163010 - DNA, 495 bp, Homo sapiens
catctgcccggcatccgaagactcgcgccactctcccgtcgggctgcgcctccctcgcccgcgcggcaccgccggtccaggtcgcagttggagcgcggtcggggagggcagaggtggcgtcggaccctcagggccccgcaggagtcgcagcgcagggccggagcgcgccgggccgcagcttcccgcgaacaggaattcgctgggggctgcgacggcgacagcggcggggactgagggcggggaggcggccagatcaaagagagccgcccacagggtcaagacgggtcggggagcgccgaggggcccctcggaggagggtgggggacgtccaggtgcgcggaccctagagctgtgcgggcgcccacgcgaggagccggggccagagaggctgtgcgagctgcgcgcccccgccccgcgcggccccgtgccccgcgcgcccctcaggatcgccgggtcccgcccccggaggaggcgaggcggggcgcgactgggttc

SEQ ID NO: 163011 - DNA, 593 bp, Homo sapiens
  misc_feature (441)..(441): n is a, c, g, or t
  misc_feature (484)..(484): n is a, c, g, or t
  misc_feature (579)..(579): n is a, c, g, or t
  misc_feature (583)..(584): n is a, c, g, or t
  misc_feature (587)..(587): n is a, c, g, or t
  misc_feature (589)..(589): n is a, c, g, or t
  misc_feature (593)..(593): n is a, c, g, or t
aaccagaactccagagagggaaaacatctatcttgctgtgtttggacaggccagcccctgaaacatcttgggcaatggagggttaacttctcaaagtttaataggcaagaccagcaaccatgcaacaaggacttcaactaaccaactaaagaactgttccccagagcattgttcctgagaaggaaaagagtccaaacacctacccacacctgctttgtgccaagaatccacagttggattgcaaggacagtgcgttcaagacccagctgttgagagtagaaaagcagaagaaaggacccgaggtcagcaagtgccctccccacaatggggcagatctgccagcgagaatcggctacagcagctgaaaaaccaaaacttcatctacttgctgaaagtgagatggtccacagaccgaggcttgcagtggaagcagctggaagnggtgctgtgcggtgtcctccccaactcccaaatggagtgtggngagggattcttcgggcactgatgtttggctggagcagtaaagcagcggtgatgtggaggcagcacctaagagaaggggacaggattatggagatntganngtntntgtn

SEQ ID NO: 163012 - DNA, 589 bp, Homo sapiens
  misc_feature (19)..(19): n is a, c, g, or t
  misc_feature (24)..(24): n is a, c, g, or t
  misc_feature (27)..(27): n is a, c, g, or t
  misc_feature (482)..(482): n is a, c, g, or t
  misc_feature (491)..(491): n is a, c, g, or t
  misc_feature (561)..(561): n is a, c, g, or t
  misc_feature (580)..(580): n is a, c, g, or t
tcaattcgagctttttccnttttntgntaacaccccctgcggaccacggttggtgtcgacggatctctttacaagacgcacccacagtattcccggcgtttccacaagactctaaggcgcttggtgccagactccgatgtgcgcttcctcctctcggagagtggcagcggcaagggggctgccatggtgacggcggtggcctaccgcttggccgagcagcaccggcagatagaggagaccctggctcatttccacctcaccaaagacatgctgctggaggtgaagaagaggatgcgggccgagatggagctggggctgaggaagcagacgcacaacaatgccgtggttaagatgctgccctccttcgtccggagaactcccgacgggaccgaagaaatgggtgactttctttgggcccctgggatctttgggagggaacccaaattttcccgtgccgccttgcttgggaaaatgcttgaccngggggaatncctttttaaaaagttcgaacccttgcaaggccattgccaaaagcctttgggcaaccttgggcccgtccgntttttaacaaaaccgttcngtggaactt

SEQ ID NO: 163013 - DNA, 3631 bp, Homo sapiens
atccttaattaaattaattcttccccccccgggaggagccgccgagcagccgccggaggaccacggctcgccagggctgcggaggaccgaccgtccccacgcctgccgccccgcgaccccgaccgccagcatgatcgccgcgcagctcctggcctattacttcacggagctgaaggatgaccaggtcaaaaagattgacaagtatctctatgccatgcggctctccgatgaaactctcatagatatcatgactcgcttcaggaaggagatgaagaatggcctctcccgggattttaatccaacagccacagtcaagatgttgccaacattcgtaaggtccattcctgatggctctgaaaagggagatttcattgccctggatcttggtgggtcttcctttcgaattctgcgggtgcaagtgaatcatgagaaaaaccagaatgttcacatggagtccgaggtttatgacaccccagagaacatcgtgcacggcagtggaagccagctttttgatcatgttgctgagtgcctgggagatttcatggagaaaaggaagatcaaggacaagaagttacctgtgggattcacgttttcttttccttgccaacaatccaaaatagatgaggccatcctgatcacctggacaaagcgatttaaagcgagcggagtggaaggagcagatgtggtcaaactgcttaacaaagccatcaaaaagcgaggggactatgatgccaacatcgtagctgtggtgaatgacacagtgggcaccatgatgacctgtggctatgacgaccagcactgtgaagtcggcctgatcatcggcactggcaccaatgcttgctacatggaggaactgaggcacattgatctggtggaaggagacgaggggaggatgtgtatcaatacagaatggggagcctttggagacgatggatcattagaagacatccggacagagtttgacagggagatagaccggggatccctcaaccctggaaaacagctgtttgagaagatggtcagtggcatgtacttgggagagctggttcgactgatcctagtcaagatggccaaggagggcctcttatttgaagggcggatcaccccggagctgctcacccgagggaagtttaacaccagtgatgtgtcagccatcgaaaagaataaggaaggcctccacaatgccaaagaaatcctgacccgcctgggagtggagccgtccgatgatgactgtgtctcagtccagcacgtttgcaccattgtctcatttcgctcagccaacttggtggctgccacactgggcgccatcttgaaccgcctgcgtgataacaagggcacacccaggctgcggaccacggttggtgtcgacggatctctttacaagacgcacccacagtattcccggcgtttccacaagactctaaggcgcttggtgccagactccgatgtgcgcttcctcctctcggagagtggcagcggcaagggggctgccatggtgacggcggtggcctaccgcttggccgagcagcaccggcagatagaggagaccctggctcatttccacctcaccaaagacatgctgctggaggtgaagaagaggatgcgggccgagatggagctggggctgaggaagcagacgcacaacaatgccgtggttaagatgctgccctccttcgtccggagaactcccgacgggaccgagaatggtgacttcttggccctggatcttggaggaaccaatttccgtgtgctgctggtgaaaatccgtagtgggaaaaagagaacggtggaaatgcacaacaagatctacgccattcctattgaaatcatgcagggcactggggaagagctgtttgatcacattgtctcctgcatctctgacttcttggactacatggggatcaaaggccccaggatgcctctgggcttcacgttctcatttccctgccagcagacgagtctggacgcgggaatcttgatcacgtggacaaagggttttaaggcaacagactgcgtgggccacgatgtagtcaccttactaagggatgcgataaaaaggagagaggaatttgacctggacgtggtggctgtggtcaacgacacagtgggcaccatgatgacctgtgcttatgaggagcccacctgtgaggttggactcattgttgggaccggcagcaatgcctgctacatggaggagatgaagaacgtggagatggtggagggggaccaggggcagatgtgcatcaacatggagtggggggcctttggggacaacgggtgtctggatgatatcaggacacactacgacagactggtggacgaatattccctaaatgctgggaaacaaaggtatgagaagatgatcagtggtatgtacctgggtgaaatcgtccgcaacatcttaatcgacttcaccaagaagggattcctcttccgagggcagatctctgagacgctgaagacccggggcatctttgagaccaagtttctctctcagatcgagagtgaccgattagcactgctccaggtccgggctatcctccagcagctaggtctgaatagcacctgcgatgacagtatcctcgtcaagacagtgtgcggggtggtgtccaggagggccgcacagctgtgtggcgcaggcatggctgcggttgtggataagatccgcgagaacagaggactggaccgtctgaatgtgactgtgggagtggacgggacactctacaagcttcatccacacttctccagaatcatgcaccagacggtgaaggaactgtcaccaaaatgtaacgtgtccttcctcctgtctgaggatggcagcggcaagggggccgccctcatcacggccgtgggcgtgcggttacgcacagaggcaagcagctaagagtccgggatccccagcctactgcctctccagcacttctctcttcaagcggcgaccccctaccctcccagcgagttgcgctgggagacgctggcgccagggcctgccggcgcggggaggaaagcaaaatccaactaatggtatatattgtagggtacagaatagagcgtgtgctgttgataatatctctcacccggatccctcctcacttgccctgccactttgcatggtttgattttgacctggtcccccacgtgtgaagtgtagtggcatccatttctaatgtatgcattcatccaacagagttatttattggctggagatggaaaatcacaccacctgacaggccttctgggcctccaaagcccatccttggggttccccctccctgtgtgaaatgtattatcaccagcagacactgccgggcctccctcccgggggcactgcctgaaggcgagtgtgggcatagcattagctgcttcctcccctcctggcacccactgtggcctggcatcgcatcgtggtgtgtcaatgccacaaaatcgtgtgtccgtggaaccagtcctagccgcgtgtgacagtcttgcattctgtttgtctcgtggggggaggtggacagtcctgcggaaatgtgtcttgtctccatttggataaaaggaaccaaccaacaaacaatgccatcactggaatttcccaccgctttgtgagccgtgtcgtatgacctagtaaactttgtaccaattcaaa

SEQ ID NO: 163014 - DNA, 3633 bp, Homo sapiens
tcatataagtcggtcctcgagaacgtgtatcggagaggagccgccgagcagccgccggaggaccacggctcgccagggctgcggaggaccgaccgtccccacgcctgccgccccgcgaccccgaccgccagcatgatcgccgcgcagctcctggcctattacttcacggagctgaaggatgaccaggtcaaaaagattgacaagtatctctatgccatgcggctctccgatgaaactctcatagatatcatgactcgcttcaggaaggagatgaagaatggcctctcccgggattttaatccaacagccacagtcaagatgttgccaacattcgtaaggtccattcctgatggctctgaaaagggagatttcattgccctggatcttggtgggtcttcctttcgaattctgcgggtgcaagtgaatcatgagaaaaaccagaatgttcacatggagtccgaggtttatgacaccccagagaacatcgtgcacggcagtggaagccagctttttgatcatgttgctgagtgcctgggagatttcatggagaaaaggaagatcaaggacaagaagttacctgtgggattcacgttttcttttccttgccaacaatccaaaatagatgaggccatcctgatcacctggacaaagcgatttaaagcgagcggagtggaaggagcagatgtggtcaaactgcttaacaaagccatcaaaaagcgaggggactatgatgccaacatcgtagctgtggtgaatgacacagtgggcaccatgatgacctgtggctatgacgaccagcactgtgaagtcggcctgatcatcggcactggcaccaatgcttgctacatggaggaactgaggcacattgatctggtggaaggagacgaggggaggatgtgtatcaatacagaatggggagcctttggagacgatggatcattagaagacatccggacagagtttgacagggagatagaccggggatccctcaaccctggaaaacagctgtttgagaagatggtcagtggcatgtacttgggagagctggttcgactgatcctagtcaagatggccaaggagggcctcttatttgaagggcggatcaccccggagctgctcacccgagggaagtttaacaccagtgatgtgtcagccatcgaaaagaataaggaaggcctccacaatgccaaagaaatcctgacccgcctgggagtggagccgtccgatgatgactgtgtctcagtccagcacgtttgcaccattgtctcatttcgctcagccaacttggtggctgccacactgggcgccatcttgaaccgcctgcgtgataacaagggcacacccaggctgcggaccacggttggtgtcgacggatctctttacaagacgcacccacagtattcccggcgtttccacaagactctaaggcgcttggtgccagactccgatgtgcgcttcctcctctcggagagtggcagcggcaagggggctgccatggtgacggcggtggcctaccgcttggccgagcagcaccggcagatagaggagaccctggctcatttccacctcaccaaagacatgctgctggaggtgaagaagaggatgcgggccgagatggagctggggctgaggaagcagacgcacaacaatgccgtggttaagatgctgccctccttcgtccggagaactcccgacgggaccgagaatggtgacttcttggccctggatcttggaggaaccaatttccgtgtgctgctggtgaaaatccgtagtgggaaaaagagaacggtggaaatgcacaacaagatctacgccattcctattgaaatcatgcagggcactggggaagagctgtttgatcacattgtctcctgcatctctgacttcttggactacatggggatcaaaggccccaggatgcctctgggcttcacgttctcatttccctgccagcagacgagtctggacgcgggaatcttgatcacgtggacaaagggttttaaggcaacagactgcgtgggccacgatgtagtcaccttactaagggatgcgataaaaaggagagaggaatttgacctggacgtggtggctgtggtcaacgacacagtgggcaccatgatgacctgtgcttatgaggagcccacctgtgaggttggactcattgttgggaccggcagcaatgcctgctacatggaggagatgaagaacgtggagatggtggagggggaccaggggcagatgtgcatcaacatggagtggggggcctttggggacaacgggtgtctggatgatatcaggacacactacgacagactggtggacgaatattccctaaatgctgggaaacaaaggtatgagaagatgatcagtggtatgtacctgggtgaaatcgtccgcaacatcttaatcgacttcaccaagaagggattcctcttccgagggcagatctctgagacgctgaagacccggggcatctttgagaccaagtttctctctcagatcgagagtgaccgattagcactgctccaggtccgggctatcctccagcagctaggtctgaatagcacctgcgatgacagtatcctcgtcaagacagtgtgcggggtggtgtccaggagggccgcacagctgtgtggcgcaggcatggctgcggttgtggataagatccgcgagaacagaggactggaccgtctgaatgtgactgtgggagtggacgggacactctacaagcttcatccacacttctccagaatcatgcaccagacggtgaaggaactgtcaccaaaatgtaacgtgtccttcctcctgtctgaggatggcagcggcaagggggccgccctcatcacggccgtgggcgtgcggttacgcacagaggcaagcagctaagagtccgggatccccagcctactgcctctccagcacttctctcttcaagcggcgaccccctaccctcccagcgagttgcgctgggagacgctggcgccagggcctgccggcgcggggaggaaagcaaaatccaactaatggtatatattgtagggtacagaatagagcgtgtgctgttgataatatctctcacccggatccctcctcacttgccctgccactttgcatggtttgattttgacctggtcccccacgtgtgaagtgtagtggcatccatttctaatgtatgcattcatccaacagagttatttattggctggagatggaaaatcacaccacctgacaggccttctgggcctccaaagcccatccttggggttccccctccctgtgtgaaatgtattatcaccagcagacactgccgggcctccctcccgggggcactgcctgaaggcgagtgtgggcatagcattagctgcttcctcccctcctggcacccactgtggcctggcatcgcatcgtggtgtgtcaatgccacaaaatcgtgtgtccgtggaaccagtcctagccgcgtgtgacagtcttgcattctgtttgtctcgtggggggaggtggacagtcctgcggaaatgtgtcttgtctccatttggataaaaggaaccaaccaacaaacaatgccatcactggaatttcccaccgctttgtgagccgtgtcgtatgacctagtaaactttgtaccaattcaaa

SEQ ID NO: 163015 - DNA, 3984 bp, Homo sapiens
aaccagaactccagagagggaaaacatctatcttgctgtgtttggacaggccagcccctgaaacatcttgggcaatggagggttaacttctcaaagtttaataggcaagaccagcaaccatgcaacaaggacttcaactaaccaactaaagaactgttccccagagcattgttcctgagaaggaaaagagtccaaacacctacccacacctgctttgtgccaagaatccacagttggattgcaaggacagtgtatgttgtccttttggaaaaatgagagtgagcccaaatgaagaacaagcaaaggcgttcaagacccagctgttgagagtagaaaagcagaagaaaggacccgaggtcagcaagtgccctccccacaatggggcagatctgccagcgagaatcggctacagcagctgaaaaaccaaaacttcatctacttgctgaaagtgagcattgttgatgctcttgagagcatcagccaggacattaatgtgcaccactgtggtggcgtggaaagatggcaaaaagagccctgcatgattttattgacaagtatctctatgccatgcggctctccgatgaaactctcatagatatcatgactcgcttcaggaaggagatgaagaatggcctctcccgggattttaatccaacagccacagtcaagatgttgccaacattcgtaaggtccattcctgatggctctgaaaagggagatttcattgccctggatcttggtgggtcttcctttcgaattctgcgggtgcaagtgaatcatgagaaaaaccagaatgttcacatggagtccgaggtttatgacaccccagagaacatcgtgcacggcagtggaagccagctttttgatcatgttgctgagtgcctgggagatttcatggagaaaaggaagatcaaggacaagaagttacctgtgggattcacgttttcttttccttgccaacaatccaaaatagatgaggccatcctgatcacctggacaaagcgatttaaagcgagcggagtggaaggagcagatgtggtcaaactgcttaacaaagccatcaaaaagcgaggggactatgatgccaacatcgtagctgtggtgaatgacacagtgggcaccatgatgacctgtggctatgacgaccagcactgtgaagtcggcctgatcatcggcactggcaccaatgcttgctacatggaggaactgaggcacattgatctggtggaaggagacgaggggaggatgtgtatcaatacagaatggggagcctttggagacgatggatcattagaagacatccggacagagtttgacagggagatagaccggggatccctcaaccctggaaaacagctgtttgagaagatggtcagtggcatgtacttgggagagctggttcgactgatcctagtcaagatggccaaggagggcctcttatttgaagggcggatcaccccggagctgctcacccgagggaagtttaacaccagtgatgtgtcagccatcgaaaagaataaggaaggcctccacaatgccaaagaaatcctgacccgcctgggagtggagccgtccgatgatgactgtgtctcagtccagcacgtttgcaccattgtctcatttcgctcagccaacttggtggctgccacactgggcgccatcttgaaccgcctgcgtgataacaagggcacacccaggctgcggaccacggttggtgtcgacggatctctttacaagacgcacccacagtattcccggcgtttccacaagactctaaggcgcttggtgccagactccgatgtgcgcttcctcctctcggagagtggcagcggcaagggggctgccatggtgacggcggtggcctaccgcttggccgagcagcaccggcagatagaggagaccctggctcatttccacctcaccaaagacatgctgctggaggtgaagaagaggatgcgggccgagatggagctggggctgaggaagcagacgcacaacaatgccgtggttaagatgctgccctccttcgtccggagaactcccgacgggaccgagaatggtgacttcttggccctggatcttggaggaaccaatttccgtgtgctgctggtgaaaatccgtagtgggaaaaagagaacggtggaaatgcacaacaagatctacgccattcctattgaaatcatgcagggcactggggaagagctgtttgatcacattgtctcctgcatctctgacttcttggactacatggggatcaaaggccccaggatgcctctgggcttcacgttctcatttccctgccagcagacgagtctggacgcgggaatcttgatcacgtggacaaagggttttaaggcaacagactgcgtgggccacgatgtagtcaccttactaagggatgcgataaaaaggagagaggaatttgacctggacgtggtggctgtggtcaacgacacagtgggcaccatgatgacctgtgcttatgaggagcccacctgtgaggttggactcattgttgggaccggcagcaatgcctgctacatggaggagatgaagaacgtggagatggtggagggggaccaggggcagatgtgcatcaacatggagtggggggcctttggggacaacgggtgtctggatgatatcaggacacactacgacagactggtggacgaatattccctaaatgctgggaaacaaaggtatgagaagatgatcagtggtatgtacctgggtgaaatcgtccgcaacatcttaatcgacttcaccaagaagggattcctcttccgagggcagatctctgagacgctgaagacccggggcatctttgagaccaagtttctctctcagatcgagagtgaccgattagcactgctccaggtccgggctatcctccagcagctaggtctgaatagcacctgcgatgacagtatcctcgtcaagacagtgtgcggggtggtgtccaggagggccgcacagctgtgtggcgcaggcatggctgcggttgtggataagatccgcgagaacagaggactggaccgtctgaatgtgactgtgggagtggacgggacactctacaagcttcatccacacttctccagaatcatgcaccagacggtgaaggaactgtcaccaaaatgtaacgtgtccttcctcctgtctgaggatggcagcggcaagggggccgccctcatcacggccgtgggcgtgcggttacgcacagaggcaagcagctaagagtccgggatccccagcctactgcctctccagcacttctctcttcaagcggcgaccccctaccctcccagcgagttgcgctgggagacgctggcgccagggcctgccggcgcggggaggaaagcaaaatccaactaatggtatatattgtagggtacagaatagagcgtgtgctgttgataatatctctcacccggatccctcctcacttgccctgccactttgcatggtttgattttgacctggtcccccacgtgtgaagtgtagtggcatccatttctaatgtatgcattcatccaacagagttatttattggctggagatggaaaatcacaccacctgacaggccttctgggcctccaaagcccatccttggggttccccctccctgtgtgaaatgtattatcaccagcagacactgccgggcctccctcccgggggcactgcctgaaggcgagtgtgggcatagcattagctgcttcctcccctcctggcacccactgtggcctggcatcgcatcgtggtgtgtcaatgccacaaaatcgtgtgtccgtggaaccagtcctagccgcgtgtgacagtcttgcattctgtttgtctcgtggggggaggtggacagtcctgcggaaatgtgtcttgtctccatttggataaaaggaaccaaccaacaaacaatgccatcactggaatttcccaccgctttgtgagccgtgtcgtatgacctagtaaactttgtaccaattcaaa

SEQ ID NO: 163016 - DNA, 3930 bp, Homo sapiens
aaccagaactccagagagggaaaacatctatcttgctgtgtttggacaggccagcccctgaaacatcttgggcaatggagggttaacttctcaaagtttaataggcaagaccagcaaccatgcaacaaggacttcaactaaccaactaaagaactgttccccagagcattgttcctgagaaggaaaagagtccaaacacctacccacacctgctttgtgccaagaatccacagttggattgcaaggacagtgcgttcaagacccagctgttgagagtagaaaagcagaagaaaggacccgaggtcagcaagtgccctccccacaatggggcagatctgccagcgagaatcggctacagcagctgaaaaaccaaaacttcatctacttgctgaaagtgagcattgttgatgctcttgagagcatcagccaggacattaatgtgcaccactgtggtggcgtggaaagatggcaaaaagagccctgcatgattttattgacaagtatctctatgccatgcggctctccgatgaaactctcatagatatcatgactcgcttcaggaaggagatgaagaatggcctctcccgggattttaatccaacagccacagtcaagatgttgccaacattcgtaaggtccattcctgatggctctgaaaagggagatttcattgccctggatcttggtgggtcttcctttcgaattctgcgggtgcaagtgaatcatgagaaaaaccagaatgttcacatggagtccgaggtttatgacaccccagagaacatcgtgcacggcagtggaagccagctttttgatcatgttgctgagtgcctgggagatttcatggagaaaaggaagatcaaggacaagaagttacctgtgggattcacgttttcttttccttgccaacaatccaaaatagatgaggccatcctgatcacctggacaaagcgatttaaagcgagcggagtggaaggagcagatgtggtcaaactgcttaacaaagccatcaaaaagcgaggggactatgatgccaacatcgtagctgtggtgaatgacacagtgggcaccatgatgacctgtggctatgacgaccagcactgtgaagtcggcctgatcatcggcactggcaccaatgcttgctacatggaggaactgaggcacattgatctggtggaaggagacgaggggaggatgtgtatcaatacagaatggggagcctttggagacgatggatcattagaagacatccggacagagtttgacagggagatagaccggggatccctcaaccctggaaaacagctgtttgagaagatggtcagtggcatgtacttgggagagctggttcgactgatcctagtcaagatggccaaggagggcctcttatttgaagggcggatcaccccggagctgctcacccgagggaagtttaacaccagtgatgtgtcagccatcgaaaagaataaggaaggcctccacaatgccaaagaaatcctgacccgcctgggagtggagccgtccgatgatgactgtgtctcagtccagcacgtttgcaccattgtctcatttcgctcagccaacttggtggctgccacactgggcgccatcttgaaccgcctgcgtgataacaagggcacacccaggctgcggaccacggttggtgtcgacggatctctttacaagacgcacccacagtattcccggcgtttccacaagactctaaggcgcttggtgccagactccgatgtgcgcttcctcctctcggagagtggcagcggcaagggggctgccatggtgacggcggtggcctaccgcttggccgagcagcaccggcagatagaggagaccctggctcatttccacctcaccaaagacatgctgctggaggtgaagaagaggatgcgggccgagatggagctggggctgaggaagcagacgcacaacaatgccgtggttaagatgctgccctccttcgtccggagaactcccgacgggaccgagaatggtgacttcttggccctggatcttggaggaaccaatttccgtgtgctgctggtgaaaatccgtagtgggaaaaagagaacggtggaaatgcacaacaagatctacgccattcctattgaaatcatgcagggcactggggaagagctgtttgatcacattgtctcctgcatctctgacttcttggactacatggggatcaaaggccccaggatgcctctgggcttcacgttctcatttccctgccagcagacgagtctggacgcgggaatcttgatcacgtggacaaagggttttaaggcaacagactgcgtgggccacgatgtagtcaccttactaagggatgcgataaaaaggagagaggaatttgacctggacgtggtggctgtggtcaacgacacagtgggcaccatgatgacctgtgcttatgaggagcccacctgtgaggttggactcattgttgggaccggcagcaatgcctgctacatggaggagatgaagaacgtggagatggtggagggggaccaggggcagatgtgcatcaacatggagtggggggcctttggggacaacgggtgtctggatgatatcaggacacactacgacagactggtggacgaatattccctaaatgctgggaaacaaaggtatgagaagatgatcagtggtatgtacctgggtgaaatcgtccgcaacatcttaatcgacttcaccaagaagggattcctcttccgagggcagatctctgagacgctgaagacccggggcatctttgagaccaagtttctctctcagatcgagagtgaccgattagcactgctccaggtccgggctatcctccagcagctaggtctgaatagcacctgcgatgacagtatcctcgtcaagacagtgtgcggggtggtgtccaggagggccgcacagctgtgtggcgcaggcatggctgcggttgtggataagatccgcgagaacagaggactggaccgtctgaatgtgactgtgggagtggacgggacactctacaagcttcatccacacttctccagaatcatgcaccagacggtgaaggaactgtcaccaaaatgtaacgtgtccttcctcctgtctgaggatggcagcggcaagggggccgccctcatcacggccgtgggcgtgcggttacgcacagaggcaagcagctaagagtccgggatccccagcctactgcctctccagcacttctctcttcaagcggcgaccccctaccctcccagcgagttgcgctgggagacgctggcgccagggcctgccggcgcggggaggaaagcaaaatccaactaatggtatatattgtagggtacagaatagagcgtgtgctgttgataatatctctcacccggatccctcctcacttgccctgccactttgcatggtttgattttgacctggtcccccacgtgtgaagtgtagtggcatccatttctaatgtatgcattcatccaacagagttatttattggctggagatggaaaatcacaccacctgacaggccttctgggcctccaaagcccatccttggggttccccctccctgtgtgaaatgtattatcaccagcagacactgccgggcctccctcccgggggcactgcctgaaggcgagtgtgggcatagcattagctgcttcctcccctcctggcacccactgtggcctggcatcgcatcgtggtgtgtcaatgccacaaaatcgtgtgtccgtggaaccagtcctagccgcgtgtgacagtcttgcattctgtttgtctcgtggggggaggtggacagtcctgcggaaatgtgtcttgtctccatttggataaaaggaaccaaccaacaaacaatgccatcactggaatttcccaccgctttgtgagccgtgtcgtatgacctagtaaactttgtaccaattcaaa

SEQ ID NO: 163017 - DNA, 4192 bp, Homo sapiens
aaccagaactccagagagggaaaacatctatcttgctgtgtttggacaggccagcccctgaaacatcttgggcaatggagggttaacttctcaaagtttaataggcaagaccagcaaccatgcaacaaggtcagggaatgcactggggctgacgacaaggctggaacgtcccgggattgaagcttggatccgaactgttggacggcgtctggagttttgcacaaaagagaattgaattgtagatcagctgggaagttactgtggtagtcctggtgccctgcggcctccagcgactggaaccctgtgggagcacatagctggcattttttgctagagattaggaagtcttttgcttcctctgtgaaaaggcttgaattcaatggactgtgtggacttcaactaaccaactaaagaactgttccccagagcattgttcctgagaaggaaaagagtccaaacacctacccacacctgctttgtgccaagaatccacagttggattgcaaggacagtgcgttcaagacccagctgttgagagtagaaaagcagaagaaaggacccgaggtcagcaagtgccctccccacaatggggcagatctgccagcgagaatcggctacagcagctgaaaaaccaaaacttcatctacttgctgaaagtgagcattgttgatgctcttgagagcatcagccaggacattaatgtgcaccactgtggtggcgtggaaagatggcaaaaagagccctgcatgattttattgacaagtatctctatgccatgcggctctccgatgaaactctcatagatatcatgactcgcttcaggaaggagatgaagaatggcctctcccgggattttaatccaacagccacagtcaagatgttgccaacattcgtaaggtccattcctgatggctctgaaaagggagatttcattgccctggatcttggtgggtcttcctttcgaattctgcgggtgcaagtgaatcatgagaaaaaccagaatgttcacatggagtccgaggtttatgacaccccagagaacatcgtgcacggcagtggaagccagctttttgatcatgttgctgagtgcctgggagatttcatggagaaaaggaagatcaaggacaagaagttacctgtgggattcacgttttcttttccttgccaacaatccaaaatagatgaggccatcctgatcacctggacaaagcgatttaaagcgagcggagtggaaggagcagatgtggtcaaactgcttaacaaagccatcaaaaagcgaggggactatgatgccaacatcgtagctgtggtgaatgacacagtgggcaccatgatgacctgtggctatgacgaccagcactgtgaagtcggcctgatcatcggcactggcaccaatgcttgctacatggaggaactgaggcacattgatctggtggaaggagacgaggggaggatgtgtatcaatacagaatggggagcctttggagacgatggatcattagaagacatccggacagagtttgacagggagatagaccggggatccctcaaccctggaaaacagctgtttgagaagatggtcagtggcatgtacttgggagagctggttcgactgatcctagtcaagatggccaaggagggcctcttatttgaagggcggatcaccccggagctgctcacccgagggaagtttaacaccagtgatgtgtcagccatcgaaaagaataaggaaggcctccacaatgccaaagaaatcctgacccgcctgggagtggagccgtccgatgatgactgtgtctcagtccagcacgtttgcaccattgtctcatttcgctcagccaacttggtggctgccacactgggcgccatcttgaaccgcctgcgtgataacaagggcacacccaggctgcggaccacggttggtgtcgacggatctctttacaagacgcacccacagtattcccggcgtttccacaagactctaaggcgcttggtgccagactccgatgtgcgcttcctcctctcggagagtggcagcggcaagggggctgccatggtgacggcggtggcctaccgcttggccgagcagcaccggcagatagaggagaccctggctcatttccacctcaccaaagacatgctgctggaggtgaagaagaggatgcgggccgagatggagctggggctgaggaagcagacgcacaacaatgccgtggttaagatgctgccctccttcgtccggagaactcccgacgggaccgagaatggtgacttcttggccctggatcttggaggaaccaatttccgtgtgctgctggtgaaaatccgtagtgggaaaaagagaacggtggaaatgcacaacaagatctacgccattcctattgaaatcatgcagggcactggggaagagctgtttgatcacattgtctcctgcatctctgacttcttggactacatggggatcaaaggccccaggatgcctctgggcttcacgttctcatttccctgccagcagacgagtctggacgcgggaatcttgatcacgtggacaaagggttttaaggcaacagactgcgtgggccacgatgtagtcaccttactaagggatgcgataaaaaggagagaggaatttgacctggacgtggtggctgtggtcaacgacacagtgggcaccatgatgacctgtgcttatgaggagcccacctgtgaggttggactcattgttgggaccggcagcaatgcctgctacatggaggagatgaagaacgtggagatggtggagggggaccaggggcagatgtgcatcaacatggagtggggggcctttggggacaacgggtgtctggatgatatcaggacacactacgacagactggtggacgaatattccctaaatgctgggaaacaaaggtatgagaagatgatcagtggtatgtacctgggtgaaatcgtccgcaacatcttaatcgacttcaccaagaagggattcctcttccgagggcagatctctgagacgctgaagacccggggcatctttgagaccaagtttctctctcagatcgagagtgaccgattagcactgctccaggtccgggctatcctccagcagctaggtctgaatagcacctgcgatgacagtatcctcgtcaagacagtgtgcggggtggtgtccaggagggccgcacagctgtgtggcgcaggcatggctgcggttgtggataagatccgcgagaacagaggactggaccgtctgaatgtgactgtgggagtggacgggacactctacaagcttcatccacacttctccagaatcatgcaccagacggtgaaggaactgtcaccaaaatgtaacgtgtccttcctcctgtctgaggatggcagcggcaagggggccgccctcatcacggccgtgggcgtgcggttacgcacagaggcaagcagctaagagtccgggatccccagcctactgcctctccagcacttctctcttcaagcggcgaccccctaccctcccagcgagttgcgctgggagacgctggcgccagggcctgccggcgcggggaggaaagcaaaatccaactaatggtatatattgtagggtacagaatagagcgtgtgctgttgataatatctctcacccggatccctcctcacttgccctgccactttgcatggtttgattttgacctggtcccccacgtgtgaagtgtagtggcatccatttctaatgtatgcattcatccaacagagttatttattggctggagatggaaaatcacaccacctgacaggccttctgggcctccaaagcccatccttggggttccccctccctgtgtgaaatgtattatcaccagcagacactgccgggcctccctcccgggggcactgcctgaaggcgagtgtgggcatagcattagctgcttcctcccctcctggcacccactgtggcctggcatcgcatcgtggtgtgtcaatgccacaaaatcgtgtgtccgtggaaccagtcctagccgcgtgtgacagtcttgcattctgtttgtctcgtggggggaggtggacagtcctgcggaaatgtgtcttgtctccatttggataaaaggaaccaaccaacaaacaatgccatcactggaatttcccaccgctttgtgagccgtgtcgtatgacctagtaaactttgtaccaattcaaa

SEQ ID NO: 163018 - DNA, 3927 bp, Homo sapiens
aaccagaactccagagagggaaaacatctatcttgctgtgtttggacaggccagcccctgaaacatcttgggcaatggagggttaacttctcaaagtttaataggcaagaccagcaaccatgcaacaagaagatactctataaatgatgattcaatgaatgccaagccctgttctatgcactgaagaccaaaagaaataaaagacatcattcctgctctgacttcaactaaccaactaaagaactgttccccagagcattgttcctgagaaggaaaagagtccaaacacctacccacacctgctttgtgccaagaatccacagttggattgcaaggacagtgcgttcaagacccagctgttgagagtagaaaagcagaagaaaggacccgaggtcagcaagtgccctccccacaatggggcagatctgccagcgagaatcggctacagcagctgaaaaaccaaaacttcatctacttgctgaaagtgagattgacaagtatctctatgccatgcggctctccgatgaaactctcatagatatcatgactcgcttcaggaaggagatgaagaatggcctctcccgggattttaatccaacagccacagtcaagatgttgccaacattcgtaaggtccattcctgatggctctgaaaagggagatttcattgccctggatcttggtgggtcttcctttcgaattctgcgggtgcaagtgaatcatgagaaaaaccagaatgttcacatggagtccgaggtttatgacaccccagagaacatcgtgcacggcagtggaagccagctttttgatcatgttgctgagtgcctgggagatttcatggagaaaaggaagatcaaggacaagaagttacctgtgggattcacgttttcttttccttgccaacaatccaaaatagatgaggccatcctgatcacctggacaaagcgatttaaagcgagcggagtggaaggagcagatgtggtcaaactgcttaacaaagccatcaaaaagcgaggggactatgatgccaacatcgtagctgtggtgaatgacacagtgggcaccatgatgacctgtggctatgacgaccagcactgtgaagtcggcctgatcatcggcactggcaccaatgcttgctacatggaggaactgaggcacattgatctggtggaaggagacgaggggaggatgtgtatcaatacagaatggggagcctttggagacgatggatcattagaagacatccggacagagtttgacagggagatagaccggggatccctcaaccctggaaaacagctgtttgagaagatggtcagtggcatgtacttgggagagctggttcgactgatcctagtcaagatggccaaggagggcctcttatttgaagggcggatcaccccggagctgctcacccgagggaagtttaacaccagtgatgtgtcagccatcgaaaagaataaggaaggcctccacaatgccaaagaaatcctgacccgcctgggagtggagccgtccgatgatgactgtgtctcagtccagcacgtttgcaccattgtctcatttcgctcagccaacttggtggctgccacactgggcgccatcttgaaccgcctgcgtgataacaagggcacacccaggctgcggaccacggttggtgtcgacggatctctttacaagacgcacccacagtattcccggcgtttccacaagactctaaggcgcttggtgccagactccgatgtgcgcttcctcctctcggagagtggcagcggcaagggggctgccatggtgacggcggtggcctaccgcttggccgagcagcaccggcagatagaggagaccctggctcatttccacctcaccaaagacatgctgctggaggtgaagaagaggatgcgggccgagatggagctggggctgaggaagcagacgcacaacaatgccgtggttaagatgctgccctccttcgtccggagaactcccgacgggaccgagaatggtgacttcttggccctggatcttggaggaaccaatttccgtgtgctgctggtgaaaatccgtagtgggaaaaagagaacggtggaaatgcacaacaagatctacgccattcctattgaaatcatgcagggcactggggaagagctgtttgatcacattgtctcctgcatctctgacttcttggactacatggggatcaaaggccccaggatgcctctgggcttcacgttctcatttccctgccagcagacgagtctggacgcgggaatcttgatcacgtggacaaagggttttaaggcaacagactgcgtgggccacgatgtagtcaccttactaagggatgcgataaaaaggagagaggaatttgacctggacgtggtggctgtggtcaacgacacagtgggcaccatgatgacctgtgcttatgaggagcccacctgtgaggttggactcattgttgggaccggcagcaatgcctgctacatggaggagatgaagaacgtggagatggtggagggggaccaggggcagatgtgcatcaacatggagtggggggcctttggggacaacgggtgtctggatgatatcaggacacactacgacagactggtggacgaatattccctaaatgctgggaaacaaaggtatgagaagatgatcagtggtatgtacctgggtgaaatcgtccgcaacatcttaatcgacttcaccaagaagggattcctcttccgagggcagatctctgagacgctgaagacccggggcatctttgagaccaagtttctctctcagatcgagagtgaccgattagcactgctccaggtccgggctatcctccagcagctaggtctgaatagcacctgcgatgacagtatcctcgtcaagacagtgtgcggggtggtgtccaggagggccgcacagctgtgtggcgcaggcatggctgcggttgtggataagatccgcgagaacagaggactggaccgtctgaatgtgactgtgggagtggacgggacactctacaagcttcatccacacttctccagaatcatgcaccagacggtgaaggaactgtcaccaaaatgtaacgtgtccttcctcctgtctgaggatggcagcggcaagggggccgccctcatcacggccgtgggcgtgcggttacgcacagaggcaagcagctaagagtccgggatccccagcctactgcctctccagcacttctctcttcaagcggcgaccccctaccctcccagcgagttgcgctgggagacgctggcgccagggcctgccggcgcggggaggaaagcaaaatccaactaatggtatatattgtagggtacagaatagagcgtgtgctgttgataatatctctcacccggatccctcctcacttgccctgccactttgcatggtttgattttgacctggtcccccacgtgtgaagtgtagtggcatccatttctaatgtatgcattcatccaacagagttatttattggctggagatggaaaatcacaccacctgacaggccttctgggcctccaaagcccatccttggggttccccctccctgtgtgaaatgtattatcaccagcagacactgccgggcctccctcccgggggcactgcctgaaggcgagtgtgggcatagcattagctgcttcctcccctcctggcacccactgtggcctggcatcgcatcgtggtgtgtcaatgccacaaaatcgtgtgtccgtggaaccagtcctagccgcgtgtgacagtcttgcattctgtttgtctcgtggggggaggtggacagtcctgcggaaatgtgtcttgtctccatttggataaaaggaaccaaccaacaaacaatgccatcactggaatttcccaccgctttgtgagccgtgtcgtatgacctagtaaactttgtaccaattcaaa

SEQ ID NO: 163019 - DNA, 3388 bp, Homo sapiens
atccttaattaaattaattcttccccccccgggaggagccgccgagcagccgccggaggaccacggctcgccagggctgcggaggaccgaccgtccccacgcctgccgccccgcgaccccgaccgccagcatgatcgccgcgcagctcctggcctattacttcacggagctgaaggatgaccaggtcaaaaagattgacaagtatctctatgccatgcggctctccgatgaaactctcatagatatcatgactcgcttcaggaaggagatgaagaatggcctctcccgggattttaatccaacagccacagtcaagatgttgccaacattcgtaaggtccattcctgatggctctgaaaagggagatttcattgccctggatcttggtgggtcttcctttcgaattctgcgggtgcaagtgaatcatgagaaaaaccagaatgttcacatggagtccgaggtttatgacaccccagagaacatcgtgcacggcagtggaagccagctttttgatcatgttgctgagtgcctgggagatttcatggagaaaaggaagatcaaggacaagaagttacctgtgggattcacgttttcttttccttgccaacaatccaaaatagatgaggccatcctgatcacctggacaaagcgatttaaagcgagcggagtggaaggagcagatgtggtcaaactgcttaacaaagccatcaaaaagcgaggggactatgatgccaacatcgtagctgtggtgaatgacacagtgggcaccatgatgacctgtggctatgacgaccagcactgtgaagtcggcctgatcatcggcactggcaccaatgcttgctacatggaggaactgaggcacattgatctggtggaaggagacgaggggaggatgtgtatcaatacagaatggggagcctttggagacgatggatcattagaagacatccggacagagtttgacagggagatagaccggggatccctcaaccctggaaaacagctgtttgagaagatggtcagtggcatgtacttgggagagctggttcgactgatcctagtcaagatggccaaggagggcctcttatttgaagggcggatcaccccggagctgctcacccgagggaagtttaacaccagtgatgtgtcagccatcgaaaagaataaggaaggcctccacaatgccaaagaaatcctgacccgcctgggagtggagccgtccgatgatgactgtgtctcagtccagcacgtttgcaccattgtctcatttcgctcagccaacttggtggctgccacactgggcgccatcttgaaccgcctgcgtgataacaagggcacacccaggctgcggaccacggttggtgtcgacggatctctttacaagacgcacccacagcacaacaatgccgtggttaagatgctgccctccttcgtccggagaactcccgacgggaccgagaatggtgacttcttggccctggatcttggaggaaccaatttccgtgtgctgctggtgaaaatccgtagtgggaaaaagagaacggtggaaatgcacaacaagatctacgccattcctattgaaatcatgcagggcactggggaagagctgtttgatcacattgtctcctgcatctctgacttcttggactacatggggatcaaaggccccaggatgcctctgggcttcacgttctcatttccctgccagcagacgagtctggacgcgggaatcttgatcacgtggacaaagggttttaaggcaacagactgcgtgggccacgatgtagtcaccttactaagggatgcgataaaaaggagagaggaatttgacctggacgtggtggctgtggtcaacgacacagtgggcaccatgatgacctgtgcttatgaggagcccacctgtgaggttggactcattgttgggaccggcagcaatgcctgctacatggaggagatgaagaacgtggagatggtggagggggaccaggggcagatgtgcatcaacatggagtggggggcctttggggacaacgggtgtctggatgatatcaggacacactacgacagactggtggacgaatattccctaaatgctgggaaacaaaggtatgagaagatgatcagtggtatgtacctgggtgaaatcgtccgcaacatcttaatcgacttcaccaagaagggattcctcttccgagggcagatctctgagacgctgaagacccggggcatctttgagaccaagtttctctctcagatcgagagtgaccgattagcactgctccaggtccgggctatcctccagcagctaggtctgaatagcacctgcgatgacagtatcctcgtcaagacagtgtgcggggtggtgtccaggagggccgcacagctgtgtggcgcaggcatggctgcggttgtggataagatccgcgagaacagaggactggaccgtctgaatgtgactgtgggagtggacgggacactctacaagcttcatccacacttctccagaatcatgcaccagacggtgaaggaactgtcaccaaaatgtaacgtgtccttcctcctgtctgaggatggcagcggcaagggggccgccctcatcacggccgtgggcgtgcggttacgcacagaggcaagcagctaagagtccgggatccccagcctactgcctctccagcacttctctcttcaagcggcgaccccctaccctcccagcgagttgcgctgggagacgctggcgccagggcctgccggcgcggggaggaaagcaaaatccaactaatggtatatattgtagggtacagaatagagcgtgtgctgttgataatatctctcacccggatccctcctcacttgccctgccactttgcatggtttgattttgacctggtcccccacgtgtgaagtgtagtggcatccatttctaatgtatgcattcatccaacagagttatttattggctggagatggaaaatcacaccacctgacaggccttctgggcctccaaagcccatccttggggttccccctccctgtgtgaaatgtattatcaccagcagacactgccgggcctccctcccgggggcactgcctgaaggcgagtgtgggcatagcattagctgcttcctcccctcctggcacccactgtggcctggcatcgcatcgtggtgtgtcaatgccacaaaatcgtgtgtccgtggaaccagtcctagccgcgtgtgacagtcttgcattctgtttgtctcgtggggggaggtggacagtcctgcggaaatgtgtcttgtctccatttggataaaaggaaccaaccaacaaacaatgccatcactggaatttcccaccgctttgtgagccgtgtcgtatgacctagtaaactttgtaccaattcaaa

SEQ ID NO: 163020 - DNA, 4348 bp, Homo sapiens
atccttaattaaattaattcttccccccccgggaggagccgccgagcagccgccggaggaccacggctcgccagggctgcggaggaccgaccgtccccacgcctgccgccccgcgaccccgaccgccagcatgatcgccgcgcagctcctggcctattacttcacggagctgaaggatgaccaggtcaaaaagattgacaagtatctctatgccatgcggctctccgatgaaactctcatagatatcatgactcgcttcaggaaggagatgaagaatggcctctcccgggattttaatccaacagccacagtcaagatgttgccaacattcgtaaggtccattcctgatggctctgaaaagggagatttcattgccctggatcttggtgggtcttcctttcgaattctgcgggtgcaagtgaatcatgagaaaaaccagaatgttcacatggagtccgaggtttatgacaccccagagaacatcgtgcacggcagtggaagccagctttttgatcatgttgctgagtgcctgggagatttcatggagaaaaggaagatcaaggacaagaagttacctgtgggattcacgttttcttttccttgccaacaatccaaaatagatgaggccatcctgatcacctggacaaagcgatttaaagcgagcggagtggaaggagcagatgtggtcaaactgcttaacaaagccatcaaaaagcgaggggactatgatgccaacatcgtagctgtggtgaatgacacagtgggcaccatgatgacctgtggctatgacgaccagcactgtgaagtcggcctgatcatcggcactggcaccaatgcttgctacatggaggaactgaggcacattgatctggtggaaggagacgaggggaggatgtgtatcaatacagaatggggagcctttggagacgatggatcattagaagacatccggacagagtttgacagggagatagaccggggatccctcaaccctggaaaacagctgtttgagaagatggtcagtggcatgtacttgggagagctggttcgactgatcctagtcaagatggccaaggagggcctcttatttgaagggcggatcaccccggagctgctcacccgagggaagtttaacaccagtgatgtgtcagccatcgaaaagaataaggaaggcctccacaatgccaaagaaatcctgacccgcctgggagtggagccgtccgatgatgactgtgtctcagtccagcacgtttgcaccattgtctcatttcgctcagccaacttggtggctgccacactgggcgccatcttgaaccgcctgcgtgataacaagggcacacccaggctgcggaccacggttggtgtcgacggatctctttacaagacgcacccacagtattcccggcgtttccacaagactctaaggcgcttggtgccagactccgatgtgcgcttcctcctctcggagagtggcagcggcaagggggctgccatggtgacggcggtggcctaccgcttggccgagcagcaccggcagatagaggagaccctggctcatttccacctcaccaaagacatgctgctggaggtgaagaagaggatgcgggccgagatggagctggggctgaggaagcagacgcacaacaatgccgtggttaagatgctgccctccttcgtccggagaactcccgacgggaccgagaatggtgacttcttggccctggatcttggaggaaccaatttccgtgtgctgctggtgaaaatccgtagtgggaaaaagagaacggtggaaatgcacaacaagatctacgccattcctattgaaatcatgcagggcactggggaagagctgtttgatcacattgtctcctgcatctctgacttcttggactacatggggatcaaaggccccaggatgcctctgggcttcacgttctcatttccctgccagcagacgagtctggacgcgggaatcttgatcacgtggacaaagggttttaaggcaacagactgcgtgggccacgatgtagtcaccttactaagggatgcgataaaaaggagagaggaatttgacctggacgtggtggctgtggtcaacgacacagtgggcaccatgatgacctgtgcttatgaggagcccacctgtgaggttggactcattgttgggaccggcagcaatgcctgctacatggaggagatgaagaacgtggagatggtggagggggaccaggggcagatgtgcatcaacatggagtggggggcctttggggacaacgggtgtctggatgatatcaggacacactacgacagactggtggacgaatattccctaaatgctgggaaacaaaggtatgagaagatgatcagtggtatgtacctgggtgaaatcgtccgcaacatcttaatcgacttcaccaagaagggattcctcttccgagggcagatctctgagacgctgaagacccggggcatctttgagaccaagtttctctctcagatcgagagtgaccgattagcactgctccaggtccgggctatcctccagcagctaggtctgaatagcacctgcgatgacagtatcctcgtcaagacagtgtgcggggtggtgtccaggagggccgcacagctgtgtggcgcaggcatggctgcggttgtggataagatccgcgagaacagaggactggaccgtctgaatgtgactgtgggagtggacgggacactctacaagcttcatccacacttctccagaatcatgcaccagacggtgaaggaactgtcaccaaaatgtaacgtgtccttcctcctgtctgaggatggcagcggcaagggggccgccctcatcacggccgtgggcgtgcggttacgcacagaggcaagcagctaagagtccgggatccccagcctactgcctctccagcacttctctcttcaagcggcgaccccctaccctcccagcgagttgcgctgggagacgctggcgccagggcctgccggcgcggggaggaaagcaaaatccaactaatggtatatattgtagggtacagaatagagcgtgtgctgttgataatatctctcacccggatccctcctcacttgccctgccactttgcatggtttgattttgacctggtcccccacgtgtgaagtgtagtggcatccatttctaatgtatgcattcatccaacagagttatttattggctggagatggaaaatcacaccacctgacaggccttctgggcctccaaagcccatccttggggttccccctccctgtgtgaaatgtattatcaccagcagacactgccgggcctccctcccgggggcactgcctgaaggcgagtgtgggcatagcattagctgcttcctcccctcctggcacccactgtggcctggcatcgcatcgtggtgtgtcaatgccacaaaatcgtgtgtccgtggaaccagtcctagccgcgtgtgacagtcttgcattctgtttgtctcgtggggggaggtggacagtcctgcggaaatgtgtcttgtctccatttggataaaaggaaccaaccaacaaacaatgccatcactggaatttcccaccgctttgtgagccgtgtcgtatgacctagtaaactttgtaccaattcaaaaaaaaaaaaaaaaaagaaaaagaaaaataaataaaataaaagaaaaaaaaaaaataaaaaaataaaaaataaagaagaaaataaaatcacaataaaatatataaaagaaattggacagtcataatgacagacaggagagtcgaggagtagtgaatgcacgatatgaagagcctggtaaagattatcgagctcctcgtactgcaagtctgaaatagggcccagcatagagggtgataaagaagaacatctctatgaactggaccagtaaaagtgtatgcatatgtttaacgaaacaagcatatatggacatctggataaacatgaacctttacaaaatgcgtaaaaactataaaaactaatatacggagacacgttactgaaaaaaagaattcgtcatcagatgcatcctgagttgttacaccctttaatcacacttgattgcacccggtcagagggccctcactgaaccaattacttgaggtacagtaaaaatatggttaaaaacttaacaatggtccaaacaacatcccagatctatcccttagcgccaaacgttcattaataacgcgggaagacctggtggattcataggacagaattgagccacactgaacctttggatcaaggtacagtactcaggggtataaaaccatttatatcttcctttcattgccccaaggacgtggtatttttggtgaaagaaggtctcatacatat

SEQ ID NO: 163021 - DNA, 4182 bp, Homo sapiens
  misc_feature (4182)..(4182): n is a, c, g, or t
atccttaattaaattaattcttccccccccgggaggagccgccgagcagccgccggaggaccacggctcgccagggctgcggaggaccgaccgtccccacgcctgccgccccgcgaccccgaccgccagcatgatcgccgcgcagctcctggcctattacttcacggagctgaaggatgaccaggtcaaaaagattgacaagtatctctatgccatgcggctctccgatgaaactctcatagatatcatgactcgcttcaggaaggagatgaagaatggcctctcccgggattttaatccaacagccacagtcaagatgttgccaacattcgtaaggtccattcctgatggctctgaaaagggagatttcattgccctggatcttggtgggtcttcctttcgaattctgcgggtgcaagtgaatcatgagaaaaaccagaatgttcacatggagtccgaggtttatgacaccccagagaacatcgtgcacggcagtggaagccagctttttgatcatgttgctgagtgcctgggagatttcatggagaaaaggaagatcaaggacaagaagttacctgtgggattcacgttttcttttccttgccaacaatccaaaatagatgaggccatcctgatcacctggacaaagcgatttaaagcgagcggagtggaaggagcagatgtggtcaaactgcttaacaaagccatcaaaaagcgaggggactatgatgccaacatcgtagctgtggtgaatgacacagtgggcaccatgatgacctgtggctatgacgaccagcactgtgaagtcggcctgatcatcggcactggcaccaatgcttgctacatggaggaactgaggcacattgatctggtggaaggagacgaggggaggatgtgtatcaatacagaatggggagcctttggagacgatggatcattagaagacatccggacagagtttgacagggagatagaccggggatccctcaaccctggaaaacagctgtttgagaagatggtcagtggcatgtacttgggagagctggttcgactgatcctagtcaagatggccaaggagggcctcttatttgaagggcggatcaccccggagctgctcacccgagggaagtttaacaccagtgatgtgtcagccatcgaaaagaataaggaaggcctccacaatgccaaagaaatcctgacccgcctgggagtggagccgtccgatgatgactgtgtctcagtccagcacgtttgcaccattgtctcatttcgctcagccaacttggtggctgccacactgggcgccatcttgaaccgcctgcgtgataacaagggcacacccaggctgcggaccacggttggtgtcgacggatctctttacaagacgcacccacagtattcccggcgtttccacaagactctaaggcgcttggtgccagactccgatgtgcgcttcctcctctcggagagtggcagcggcaagggggctgccatggtgacggcggtggcctaccgcttggccgagcagcaccggcagatagaggagaccctggctcatttccacctcaccaaagacatgctgctggaggtgaagaagaggatgcgggccgagatggagctggggctgaggaagcagacgcacaacaatgccgtggttaagatgctgccctccttcgtccggagaactcccgacgggaccgagaatggtgacttcttggccctggatcttggaggaaccaatttccgtgtgctgctggtgaaaatccgtagtgggaaaaagagaacggtggaaatgcacaacaagatctacgccattcctattgaaatcatgcagggcactggggaagagctgtttgatcacattgtctcctgcatctctgacttcttggactacatggggatcaaaggccccaggatgcctctgggcttcacgttctcatttccctgccagcagacgagtctggacgcgggaatcttgatcacgtggacaaagggttttaaggcaacagactgcgtgggccacgatgtagtcaccttactaagggatgcgataaaaaggagagaggaatttgacctggacgtggtggctgtggtcaacgacacagtgggcaccatgatgacctgtgcttatgaggagcccacctgtgaggttggactcattgttgggaccggcagcaatgcctgctacatggaggagatgaagaacgtggagatggtggagggggaccaggggcagatgtgcatcaacatggagtggggggcctttggggacaacgggtgtctggatgatatcaggacacactacgacagactggtggacgaatattccctaaatgctgggaaacaaaggtatgagaagatgatcagtggtatgtacctgggtgaaatcgtccgcaacatcttaatcgacttcaccaagaagggattcctcttccgagggcagatctctgagacgctgaagacccggggcatctttgagaccaagtttctctctcagatcgagagtgaccgattagcactgctccaggtccgggctatcctccagcagctaggtctgaatagcacctgcgatgacagtatcctcgtcaagacagtgtgcggggtggtgtccaggagggccgcacagctgtgtggcgcaggcatggctgcggttgtggataagatccgcgagaacagaggactggaccgtctgaatgtgactgtgggagtggacgggacactctacaagcttcatccacacttctccagaatcatgcaccagacggtgaaggaactgtcaccaaaatgtaacgtgtccttcctcctgtctgaggatggcagcggcaagggggccgccctcatcacggccgtgggcgtgcggttacgcacagaggcaagcagctaagagtccgggatccccagcctactgcctctccagcacttctctcttcaagcggcgaccccctaccctcccagcgagttgcgctgggagacgctggcgccagggcctgccggcgcggggaggaaagcaaaatccaactaatggtatatattgtagggtacagaatagagcgtgtgctgttgataatatctctcacccggatccctcctcacttgccctgccactttgcatggtttgattttgacctggtcccccacgtgtgaagtgtagtggcatccatttctaatgtatgcattcatccaacagagttatttattggctggagatggaaaatcacaccacctgacaggccttctgggcctccaaagcccatccttggggttccccctccctgtgtgaaatgtattatcaccagcagacactgccgggcctccctcccgggggcactgcctgaaggcgagtgtgggcatagcattagctgcttcctcccctcctggcacccactgtggcctggcatcgcatcgtggtgtgtcaatgccacaaaatcgtgtgtccgtggaaccagtcctagccgcgtgtgacagtcttgcattctgtttgtctcgtggggggaggtggacagtcctgcggaaatgtgtcttgtctccatttggataaaaggaaccaaccaacaaacaatgccatcactggaatttcccaccgctttgtgagccgtgtcgtatgacctagtaaactttgtaccaattcaaaaaaaaaaaaaaaaaaaaaaaaaaaaaaaaaaaaaaaagaaaaaaaaaaaaaaacaaaaaaaaaaaaaaaaaaaaaaaaaaaaaaaaaaaaaaaaaaaggggggggcgcggccaaaaatttcccccggggggcccccaggttccgggttcccccaggttttgttggtcaccaagggtgcgcccctatatggggggcgccgatataattacgcgcttagggcacgggcgccggctgttttaacccaaccggtcggacgctggggagaaccccgtggaacccttggcgggaccctttgggcggaagagacccctttatttcggggggggggcgagacatatattggggagaaaaaattatccccttatcaaagagatttttaaagcgcctcaagggggaaaattttttaaaaatttctaagggtgttataacgggggcttaaaacacctaaaggctcgacattgaggccaggacggcctgaaaagtttggggcctacccgggagctattgcctttagaaaacatttttttaccacgggggccgcggttgaatan

SEQ ID NO: 163022 - DNA, 3659 bp, Homo sapiens
atccttaattaaattaattcttccccccccgggaggagccgccgagcagccgccggaggaccacggctcgccagggctgcggaggaccgaccgtccccacgcctgccgccccgcgaccccgaccgccagcatgatcgccgcgcagctcctggcctattacttcacggagctgaaggatgaccaggtcaaaaagattgacaagtatctctatgccatgcggctctccgatgaaactctcatagatatcatgactcgcttcaggaaggagatgaagaatggcctctcccgggattttaatccaacagccacagtcaagatgttgccaacattcgtaaggtccattcctgatggctctgaaaagggagatttcattgccctggatcttggtgggtcttcctttcgaattctgcgggtgcaagtgaatcatgagaaaaaccagaatgttcacatggagtccgaggtttatgacaccccagagaacatcgtgcacggcagtggaagccagctttttgatcatgttgctgagtgcctgggagatttcatggagaaaaggaagatcaaggacaagaagttacctgtgggattcacgttttcttttccttgccaacaatccaaaatagatgaggccatcctgatcacctggacaaagcgatttaaagcgagcggagtggaaggagcagatgtggtcaaactgcttaacaaagccatcaaaaagcgaggggactatgatgccaacatcgtagctgtggtgaatgacacagtgggcaccatgatgacctgtggctatgacgaccagcactgtgaagtcggcctgatcatcggcactggcaccaatgcttgctacatggaggaactgaggcacattgatctggtggaaggagacgaggggaggatgtgtatcaatacagaatggggagcctttggagacgatggatcattagaagacatccggacagagtttgacagggagatagaccggggatccctcaaccctggaaaacagctgtttgagaagatggtcagtggcatgtacttgggagagctggttcgactgatcctagtcaagatggccaaggagggcctcttatttgaagggcggatcaccccggagctgctcacccgagggaagtttaacaccagtgatgtgtcagccatcgaaaagaataaggaaggcctccacaatgccaaagaaatcctgacccgcctgggagtggagccgtccgatgatgactgtgtctcagtccagcacgtttgcaccattgtctcatttcgctcagccaacttggtggctgccacactgggcgccatcttgaaccgcctgcgtgataacaagggcacacccaggctgcggaccacggttggtgtcgacggatctctttacaagacgcacccacagtattcccggcgtttccacaagactctaaggcgcttggtgccagactccgatgtgcgcttcctcctctcggagagtggcagcggcaagggggctgccatggtgacggcggtggcctaccgcttggccgagcagcaccggcagatagaggagaccctggctcatttccacctcaccaaagacatgctgctggaggtgaagaagaggatgcgggccgagatggagctggggctgaggaagcagacgcacaacaatgccgtggttaagatgctgccctccttcgtccggagaactcccgacgggaccgagaatggtgacttcttggccctggatcttggaggaaccaatttccgtgtgctgctggtgaaaatccgtagtgggaaaaagagaacggtggaaatgcacaacaagatctacgccattcctattgaaatcatgcagggcactggggaagagctgtttgatcacattgtctcctgcatctctgacttcttggactacatggggatcaaaggccccaggatgcctctgggcttcacgttctcatttccctgccagcagacgagtctggacgcgggaatcttgatcacgtggacaaagggttttaaggcaacagactgcgtgggccacgatgtagtcaccttactaagggatgcgataaaaaggagagaggaatttgacctggacgtggtggctgtggtcaacgacacagtgggcaccatgatgacctgtgcttatgaggagcccacctgtgaggttggactcattgttgggaccggcagcaatgcctgctacatggaggagatgaagaacgtggagatggtggagggggaccaggggcagatgtgcatcaacatggagtggggggcctttggggacaacgggtgtctggatgatatcaggacacactacgacagactggtggacgaatattccctaaatgctgggaaacaaagacaccccaggcccctcctcctgtctcaggtatgagaagatgatcagtggtatgtacctgggtgaaatcgtccgcaacatcttaatcgacttcaccaagaagggattcctcttccgagggcagatctctgagacgctgaagacccggggcatctttgagaccaagtttctctctcagatcgagagtgaccgattagcactgctccaggtccgggctatcctccagcagctaggtctgaatagcacctgcgatgacagtatcctcgtcaagacagtgtgcggggtggtgtccaggagggccgcacagctgtgtggcgcaggcatggctgcggttgtggataagatccgcgagaacagaggactggaccgtctgaatgtgactgtgggagtggacgggacactctacaagcttcatccacacttctccagaatcatgcaccagacggtgaaggaactgtcaccaaaatgtaacgtgtccttcctcctgtctgaggatggcagcggcaagggggccgccctcatcacggccgtgggcgtgcggttacgcacagaggcaagcagctaagagtccgggatccccagcctactgcctctccagcacttctctcttcaagcggcgaccccctaccctcccagcgagttgcgctgggagacgctggcgccagggcctgccggcgcggggaggaaagcaaaatccaactaatggtatatattgtagggtacagaatagagcgtgtgctgttgataatatctctcacccggatccctcctcacttgccctgccactttgcatggtttgattttgacctggtcccccacgtgtgaagtgtagtggcatccatttctaatgtatgcattcatccaacagagttatttattggctggagatggaaaatcacaccacctgacaggccttctgggcctccaaagcccatccttggggttccccctccctgtgtgaaatgtattatcaccagcagacactgccgggcctccctcccgggggcactgcctgaaggcgagtgtgggcatagcattagctgcttcctcccctcctggcacccactgtggcctggcatcgcatcgtggtgtgtcaatgccacaaaatcgtgtgtccgtggaaccagtcctagccgcgtgtgacagtcttgcattctgtttgtctcgtggggggaggtggacagtcctgcggaaatgtgtcttgtctccatttggataaaaggaaccaaccaacaaacaatgccatcactggaatttcccaccgctttgtgagccgtgtcgtatgacctagtaaactttgtaccaattcaaa

SEQ ID NO: 163023 - DNA, 2314 bp, Homo sapiens
  misc_feature (23)..(23): n is a, c, g, or t
  misc_feature (29)..(29): n is a, c, g, or t
caattcgagctcgtcttttgagnattccntgcggaccacggttggtgtcgacggatctctttacaagacgcacccacagtattcccggcgtttccacaagactctaaggcgcttggtgccagactccgatgtgcgcttcctcctctcggagagtggcagcggcaagggggctgccatggtgacggcggtggcctaccgcttggccgagcagcaccggcagatagaggagaccctggctcatttccacctcaccaaagacatgctgctggaggtgaagaagaggatgcgggccgagatggagctggggctgaggaagcagacgcacaacaatgccgtggttaagatgctgccctccttcgtccggagaactcccgacgggaccgagaatggtgacttcttggccctggatcttggaggaaccaatttccgtgtgctgctggtgaaaatccgtagtgggaaaaagagaacggtggaaatgcacaacaagatctacgccattcctattgaaatcatgcagggcactggggaagagctgtttgatcacattgtctcctgcatctctgacttcttggactacatggggatcaaaggccccaggatgcctctgggcttcacgttctcatttccctgccagcagacgagtctggacgcgggaatcttgatcacgtggacaaagggttttaaggcaacagactgcgtgggccacgatgtagtcaccttactaagggatgcgataaaaaggagagaggaatttgacctggacgtggtggctgtggtcaacgacacagtgggcaccatgatgacctgtgcttatgaggagcccacctgtgaggttggactcattgttgggaccggcagcaatgcctgctacatggaggagatgaagaacgtggagatggtggagggggaccaggggcagatgtgcatcaacatggagtggggggcctttggggacaacgggtgtctggatgatatcaggacacactacgacagactggtggacgaatattccctaaatgctgggaaacaaaggtatgagaagatgatcagtggtatgtacctgggtgaaatcgtccgcaacatcttaatcgacttcaccaagaagggattcctcttccgagggcagatctctgagacgctgaagacccggggcatctttgagaccaagtttctctctcagatcgagagtgaccgattagcactgctccaggtccgggctatcctccagcagctaggtctgaatagcacctgcgatgacagtatcctcgtcaagacagtgtgcggggtggtgtccaggagggccgcacagctgtgtggcgcaggcatggctgcggttgtggataagatccgcgagaacagaggactggaccgtctgaatgtgactgtgggagtggacgggacactctacaagcttcatccacacttctccagaatcatgcaccagacggtgaaggaactgtcaccaaaatgtaacgtgtccttcctcctgtctgaggatggcagcggcaagggggccgccctcatcacggccgtgggcgtgcggttacgcacagaggcaagcagctaagagtccgggatccccagcctactgcctctccagcacttctctcttcaagcggcgaccccctaccctcccagcgagttgcgctgggagacgctggcgccagggcctgccggcgcggggaggaaagcaaaatccaactaatggtatatattgtagggtacagaatagagcgtgtgctgttgataatatctctcacccggatccctcctcacttgccctgccactttgcatggtttgattttgacctggtcccccacgtgtgaagtgtagtggcatccatttctaatgtatgcattcatccaacagagttatttattggctggagatggaaaatcacaccacctgacaggccttctgggcctccaaagcccatccttggggttccccctccctgtgtgaaatgtattatcaccagcagacactgccgggcctccctcccgggggcactgcctgaaggcgagtgtgggcatagcattagctgcttcctcccctcctggcacccactgtggcctggcatcgcatcgtggtgtgtcaatgccacaaaatcgtgtgtccgtggaaccagtcctagccgcgtgtgacagtcttgcattctgtttgtctcgtggggggaggtggacagtcctgcggaaatgtgtcttgtctccatttggataaaaggaaccaaccaacaaacaatgccatcactggaatttcccaccgctttgtgagccgtgtcgtatgacctagtaaactttgtaccaattcaaa

SEQ ID NO: 163024 - DNA, 1995 bp, Homo sapiens
gtctgggtgactctagcaggatctttgtcatcccccttcgtccggagaactcccgacgggaccgagaatggtgacttcttggccctggatcttggaggaaccaatttccgtgtgctgctggtgaaaatccgtagtgggaaaaagagaacggtggaaatgcacaacaagatctacgccattcctattgaaatcatgcagggcactggggaagagctgtttgatcacattgtctcctgcatctctgacttcttggactacatggggatcaaaggccccaggatgcctctgggcttcacgttctcatttccctgccagcagacgagtctggacgcgggaatcttgatcacgtggacaaagggttttaaggcaacagactgcgtgggccacgatgtagtcaccttactaagggatgcgataaaaaggagagaggaatttgacctggacgtggtggctgtggtcaacgacacagtgggcaccatgatgacctgtgcttatgaggagcccacctgtgaggttggactcattgttgggaccggcagcaatgcctgctacatggaggagatgaagaacgtggagatggtggagggggaccaggggcagatgtgcatcaacatggagtggggggcctttggggacaacgggtgtctggatgatatcaggacacactacgacagactggtggacgaatattccctaaatgctgggaaacaaaggtatgagaagatgatcagtggtatgtacctgggtgaaatcgtccgcaacatcttaatcgacttcaccaagaagggattcctcttccgagggcagatctctgagacgctgaagacccggggcatctttgagaccaagtttctctctcagatcgagagtgaccgattagcactgctccaggtccgggctatcctccagcagctaggtctgaatagcacctgcgatgacagtatcctcgtcaagacagtgtgcggggtggtgtccaggagggccgcacagctgtgtggcgcaggcatggctgcggttgtggataagatccgcgagaacagaggactggaccgtctgaatgtgactgtgggagtggacgggacactctacaagcttcatccacacttctccagaatcatgcaccagacggtgaaggaactgtcaccaaaatgtaacgtgtccttcctcctgtctgaggatggcagcggcaagggggccgccctcatcacggccgtgggcgtgcggttacgcacagaggcaagcagctaagagtccgggatccccagcctactgcctctccagcacttctctcttcaagcggcgaccccctaccctcccagcgagttgcgctgggagacgctggcgccagggcctgccggcgcggggaggaaagcaaaatccaactaatggtatatattgtagggtacagaatagagcgtgtgctgttgataatatctctcacccggatccctcctcacttgccctgccactttgcatggtttgattttgacctggtcccccacgtgtgaagtgtagtggcatccatttctaatgtatgcattcatccaacagagttatttattggctggagatggaaaatcacaccacctgacaggccttctgggcctccaaagcccatccttggggttccccctccctgtgtgaaatgtattatcaccagcagacactgccgggcctccctcccgggggcactgcctgaaggcgagtgtgggcatagcattagctgcttcctcccctcctggcacccactgtggcctggcatcgcatcgtggtgtgtcaatgccacaaaatcgtgtgtccgtggaaccagtcctagccgcgtgtgacagtcttgcattctgtttgtctcgtggggggaggtggacagtcctgcggaaatgtgtcttgtctccatttggataaaaggaaccaaccaacaaacaatgccatcactggaatttcccaccgctttgtgagccgtgtcgtatgacctagtaaactttgtaccaattcaaa

SEQ ID NO: 163025 - DNA, 1970 bp, Homo sapiens
aagcgcgctacggccggaattcgggatccgacgggaccgagaatggtgacttcttggccctggatcttggaggaaccaatttccgtgtgctgctggtgaaaatccgtagtgggaaaaagagaacggtggaaatgcacaacaagatctacgccattcctattgaaatcatgcagggcactggggaagagctgtttgatcacattgtctcctgcatctctgacttcttggactacatggggatcaaaggccccaggatgcctctgggcttcacgttctcatttccctgccagcagacgagtctggacgcgggaatcttgatcacgtggacaaagggttttaaggcaacagactgcgtgggccacgatgtagtcaccttactaagggatgcgataaaaaggagagaggaatttgacctggacgtggtggctgtggtcaacgacacagtgggcaccatgatgacctgtgcttatgaggagcccacctgtgaggttggactcattgttgggaccggcagcaatgcctgctacatggaggagatgaagaacgtggagatggtggagggggaccaggggcagatgtgcatcaacatggagtggggggcctttggggacaacgggtgtctggatgatatcaggacacactacgacagactggtggacgaatattccctaaatgctgggaaacaaaggtatgagaagatgatcagtggtatgtacctgggtgaaatcgtccgcaacatcttaatcgacttcaccaagaagggattcctcttccgagggcagatctctgagacgctgaagacccggggcatctttgagaccaagtttctctctcagatcgagagtgaccgattagcactgctccaggtccgggctatcctccagcagctaggtctgaatagcacctgcgatgacagtatcctcgtcaagacagtgtgcggggtggtgtccaggagggccgcacagctgtgtggcgcaggcatggctgcggttgtggataagatccgcgagaacagaggactggaccgtctgaatgtgactgtgggagtggacgggacactctacaagcttcatccacacttctccagaatcatgcaccagacggtgaaggaactgtcaccaaaatgtaacgtgtccttcctcctgtctgaggatggcagcggcaagggggccgccctcatcacggccgtgggcgtgcggttacgcacagaggcaagcagctaagagtccgggatccccagcctactgcctctccagcacttctctcttcaagcggcgaccccctaccctcccagcgagttgcgctgggagacgctggcgccagggcctgccggcgcggggaggaaagcaaaatccaactaatggtatatattgtagggtacagaatagagcgtgtgctgttgataatatctctcacccggatccctcctcacttgccctgccactttgcatggtttgattttgacctggtcccccacgtgtgaagtgtagtggcatccatttctaatgtatgcattcatccaacagagttatttattggctggagatggaaaatcacaccacctgacaggccttctgggcctccaaagcccatccttggggttccccctccctgtgtgaaatgtattatcaccagcagacactgccgggcctccctcccgggggcactgcctgaaggcgagtgtgggcatagcattagctgcttcctcccctcctggcacccactgtggcctggcatcgcatcgtggtgtgtcaatgccacaaaatcgtgtgtccgtggaaccagtcctagccgcgtgtgacagtcttgcattctgtttgtctcgtggggggaggtggacagtcctgcggaaatgtgtcttgtctccatttggataaaaggaaccaaccaacaaacaatgccatcactggaatttcccaccgctttgtgagccgtgtcgtatgacctagtaaactttgtaccaattcaaa

SEQ ID NO: 163026 - DNA, 1863 bp, Homo sapiens
ataggcttaggtacgaggcccgggagtagcaacaagatctacgccattcctattgaaatcatgcagggcactggggaagagctgtttgatcacattgtctcctgcatctctgacttcttggactacatggggatcaaaggccccaggatgcctctgggcttcacgttctcatttccctgccagcagacgagtctggacgcgggaatcttgatcacgtggacaaagggttttaaggcaacagactgcgtgggccacgatgtagtcaccttactaagggatgcgataaaaaggagagaggaatttgacctggacgtggtggctgtggtcaacgacacagtgggcaccatgatgacctgtgcttatgaggagcccacctgtgaggttggactcattgttgggaccggcagcaatgcctgctacatggaggagatgaagaacgtggagatggtggagggggaccaggggcagatgtgcatcaacatggagtggggggcctttggggacaacgggtgtctggatgatatcaggacacactacgacagactggtggacgaatattccctaaatgctgggaaacaaaggtatgagaagatgatcagtggtatgtacctgggtgaaatcgtccgcaacatcttaatcgacttcaccaagaagggattcctcttccgagggcagatctctgagacgctgaagacccggggcatctttgagaccaagtttctctctcagatcgagagtgaccgattagcactgctccaggtccgggctatcctccagcagctaggtctgaatagcacctgcgatgacagtatcctcgtcaagacagtgtgcggggtggtgtccaggagggccgcacagctgtgtggcgcaggcatggctgcggttgtggataagatccgcgagaacagaggactggaccgtctgaatgtgactgtgggagtggacgggacactctacaagcttcatccacacttctccagaatcatgcaccagacggtgaaggaactgtcaccaaaatgtaacgtgtccttcctcctgtctgaggatggcagcggcaagggggccgccctcatcacggccgtgggcgtgcggttacgcacagaggcaagcagctaagagtccgggatccccagcctactgcctctccagcacttctctcttcaagcggcgaccccctaccctcccagcgagttgcgctgggagacgctggcgccagggcctgccggcgcggggaggaaagcaaaatccaactaatggtatatattgtagggtacagaatagagcgtgtgctgttgataatatctctcacccggatccctcctcacttgccctgccactttgcatggtttgattttgacctggtcccccacgtgtgaagtgtagtggcatccatttctaatgtatgcattcatccaacagagttatttattggctggagatggaaaatcacaccacctgacaggccttctgggcctccaaagcccatccttggggttccccctccctgtgtgaaatgtattatcaccagcagacactgccgggcctccctcccgggggcactgcctgaaggcgagtgtgggcatagcattagctgcttcctcccctcctggcacccactgtggcctggcatcgcatcgtggtgtgtcaatgccacaaaatcgtgtgtccgtggaaccagtcctagccgcgtgtgacagtcttgcattctgtttgtctcgtggggggaggtggacagtcctgcggaaatgtgtcttgtctccatttggataaaaggaaccaaccaacaaacaatgccatcactggaatttcccaccgctttgtgagccgtgtcgtatgacctagtaaactttgtaccaattcaaa

SEQ ID NO: 163027 - DNA, 3383 bp, Homo sapiens
atccttaattaaattaattcttccccccccgggaggagccgccgagcagccgccggaggaccacggctcgccagggctgcggaggaccgaccgtccccacgcctgccgccccgcgaccccgaccgccagcatgatcgccgcgcagctcctggcctattacttcacggagctgaaggatgaccaggtcaaaaagattgacaagtatctctatgccatgcggctctccgatgaaactctcatagatatcatgactcgcttcaggaaggagatgaagaatggcctctcccgggattttaatccaacagccacagtcaagatgttgccaacattcgtaaggtccattcctgatggctctgaaaagggagatttcattgccctggatcttggtgggtcttcctttcgaattctgcgggtgcaagtgaatcatgagaaaaaccagaatgttcacatggagtccgaggtttatgacaccccagagaacatcgtgcacggcagtggaagccagctttttgatcatgttgctgagtgcctgggagatttcatggagaaaaggaagatcaaggacaagaagttacctgtgggattcacgttttcttttccttgccaacaatccaaaatagatgaggccatcctgatcacctggacaaagcgatttaaagcgagcggagtggaaggagcagatgtggtcaaactgcttaacaaagccatcaaaaagcgaggggactatgatgccaacatcgtagctgtggtgaatgacacagtgggcaccatgatgacctgtggctatgacgaccagcactgtgaagtcggcctgatcatcggcactggcaccaatgcttgctacatggaggaactgaggcacattgatctggtggaaggagacgaggggaggatgtgtatcaatacagaatggggagcctttggagacgatggatcattagaagacatccggacagagtttgacagggagatagaccggggatccctcaaccctggaaaacagctgtttgagaagatggtcagtggcatgtacttgggagagctggttcgactgatcctagtcaagatggccaaggagggcctcttatttgaagggcggatcaccccggagctgctcacccgagggaagtttaacaccagtgatgtgtcagccatcgaaaagaataaggaaggcctccacaatgccaaagaaatcctgacccgcctgggagtggagccgtccgatgatgactgtgtctcagtccagcacgtttgcaccattgtctcatttcgctcagccaacttggtggctgccacactgggcgccatcttgaaccgcctgcgtgataacaagggcacacccaggctgcggaccacggttggtgtcgacggatctctttacaagacgcacccacagtattcccggcgtttccacaagactctaaggcgcttggtgccagactccgatgtgcgcttcctcctctcggagagtggcagcggcaagggggctgccatggtgacggcggtggcctaccgcttggccgagcagcaccggcagatagaggagaccctggctcatttccacctcaccaaagacatgctgctggaggtgaagaagaggatgcgggccgagatggagctggggctgaggaagcagacgcacaacaatgccgtggttaagatgctgccctccttcgtccggagaactcccgacgggaccgagaatggtgacttcttggccctggatcttggaggaaccaatttccgtgtgctgctggtgaaaatccgtagtgggaaaaagagaacggtggaaatgcacaacaagatctacgccattcctattgaaatcatgcagggcactggggaagagctgtttgatcacattgtctcctgcatctctgacttcttggactacatggggatcaaaggccccaggatgcctctgggcttcacgttctcatttccctgccagcagacgagtctggacgcgggaatcttgatcacgtggacaaagggttttaaggcaacagactgcgtgggccacgatgtagtcaccttactaagggatgcgataaaaaggagagaggaatttgacctggacgtggtggctgtggtcaacgacacagtgggcaccatgatgacctgtgcttatgaggagcccacctgtgaggttggactcattgttgggaccggcagcaatgcctgctacatggaggagatgaagaacgtggagatggtggagggggaccaggggcagatgtgcatcaacatggagtggggggcctttggggacaacgggtgtctggatgatatcaggacacactacgacagactggtggacgaatattccctaaatgctgggaaacaaaggtatgagaagatgatcagtggtatgtacctgggtgaaatcgtccgcaacatcttaatcgacttcaccaagaagggattcctcttccgagggcagatctctgagacgctgaagacccggggcatctttgagaccaagtttctctctcagatcgagagtgaccgattagcactgctccaggtccgggctatcctccagcagctaggtctgaatagcacctgcgatgacagtatcctcgtcaagacagtgtgcggggtggtgtccaggagggccgcacagctgtgtggcgcaggcatggctgcggttgtggataagatccgcgagaacagaggactggaccgtctgaatgtgactgtgggagtggacgggacactctacaagcttcatccacacttctccagaatcatgcaccagacggtgaaggaactgtcaccaaaatgtaacgtgtccttcctcctgtctgaggatggcagcggcaagggggccgccctcatcacggccgtgggcgtgcggttacgcacagaggcaagcagctaagagtccgggatccccagcctactgcctctccagcacttctctcttcaagcggcgaccccctaccctcccagcgagttgcgctgggagacgctggcgccagggcctgccggcgcggggaggaaagcaaaatccaactaatggtatatattgtagggtacagaatagagcgtgtgctgttgataatatctctcacccggatccctcctcacttgccctgccactttgcatggtttgattttgacctggcacccactgtggcctggcatcgcatcgtggtgtgtcaatgccacaaaatcgtgtgtccgtggaaccagtcctagccgcgtgtgacagtcttgcattctgtttgtctcgtggggggaggtggacagtcctgcggaaatgtgtcttgtctccatttggataaaaggaaccaaccaacaaacaatgccatcactggaatttcccaccgctttgtgagccgtgtcgtatgacctagtaaactttgtaccaattcaaa

SEQ ID NO: 163028 - DNA, 1907 bp, Homo sapiens
atagaagataatccccttatattttatacacatatatataggcatgtatatattgtatattcatgtgtgcatgatgttgtgtgtgtacgtatatatttcttcttctggtctgaatgttgcctaaacctctaccattgatgctccatctcttcgctataaagccatcttctattaaaataaacataaccctgcctggacgggtgaacacattggctcttggttgaaagtcagctaagcaggtgccctctgggtgatgtggctcagactctccatttacatttcaaatttttccatttcaaaattgggaaagaaaaactattactttgttcatcacaaaaaacgtgccccctgcctgtggaacctcaggccccagaccccaggcccagttgcaagacccccaaatgcaaggccaccgctcctcattgccccctcgtgtgttccggaccggcagcaatgcctgctacatggaggagatgaagaacgtggagatggtggagggggaccaggggcagatgtgcatcaacatggagtggggggcctttggggacaacgggtgtctggatgatatcaggacacactacgacagactggtggacgaatattccctaaatgctgggaaacaaaggtatgagaagatgatcagtggtatgtacctgggtgaaatcgtccgcaacatcttaatcgacttcaccaagaagggattcctcttccgagggcagatctctgagacgctgaagacccggggcatctttgagaccaagtttctctctcagatcgagagtgaccgattagcactgctccaggtccgggctatcctccagcagctaggtctgaatagcacctgcgatgacagtatcctcgtcaagacagtgtgcggggtggtgtccaggagggccgcacagctgtgtggcgcaggcatggctgcggttgtggataagatccgcgagaacagaggactggaccgtctgaatgtgactgtgggagtggacgggacactctacaagcttcatccacacttctccagaatcatgcaccagacggtgaaggaactgtcaccaaaatgtaacgtgtccttcctcctgtctgaggatggcagcggcaagggggccgccctcatcacggccgtgggcgtgcggttacgcacagaggcaagcagctaagagtccgggatccccagcctactgcctctccagcacttctctcttcaagcggcgaccccctaccctcccagcgagttgcgctgggagacgctggcgccagggcctgccggcgcggggaggaaagcaaaatccaactaatggtatatattgtagggtacagaatagagcgtgtgctgttgataatatctctcacccggatccctcctcacttgccctgccactttgcatggtttgattttgacctggtcccccacgtgtgaagtgtagtggcatccatttctaatgtatgcattcatccaacagagttatttattggctggagatggaaaatcacaccacctgacaggccttctgggcctccaaagcccatccttggggttccccctccctgtgtgaaatgtattatcaccagcagacactgccgggcctccctcccgggggcactgcctgaaggcgagtgtgggcatagcattagctgcttcctcccctcctggcacccactgtggcctggcatcgcatcgtggtgtgtcaatgccacaaaatcgtgtgtccgtggaaccagtcctagccgcgtgtgacagtcttgcattctgtttgtctcgtggggggaggtggacagtcctgcggaaatgtgtcttgtctccatttggataaaaggaaccaaccaacaaacaatgccatcactggaatttcccaccgctttgtgagccgtgtcgtatgacctagtaaactttgtaccaattcaaa

SEQ ID NO: 163029 - DNA, 1427 bp, Homo sapiens
gcaacatatgacgcactctcccctgaactctacacaacatcaacatggagtggggggcctttggggacaacgggtgtctggatgatatcaggacacactacgacagactggtggacgaatattccctaaatgctgggaaacaaaggtatgagaagatgatcagtggtatgtacctgggtgaaatcgtccgcaacatcttaatcgacttcaccaagaagggattcctcttccgagggcagatctctgagacgctgaagacccggggcatctttgagaccaagtttctctctcagatcgagagtgaccgattagcactgctccaggtccgggctatcctccagcagctaggtctgaatagcacctgcgatgacagtatcctcgtcaagacagtgtgcggggtggtgtccaggagggccgcacagctgtgtggcgcaggcatggctgcggttgtggataagatccgcgagaacagaggactggaccgtctgaatgtgactgtgggagtggacgggacactctacaagcttcatccacacttctccagaatcatgcaccagacggtgaaggaactgtcaccaaaatgtaacgtgtccttcctcctgtctgaggatggcagcggcaagggggccgccctcatcacggccgtgggcgtgcggttacgcacagaggcaagcagctaagagtccgggatccccagcctactgcctctccagcacttctctcttcaagcggcgaccccctaccctcccagcgagttgcgctgggagacgctggcgccagggcctgccggcgcggggaggaaagcaaaatccaactaatggtatatattgtagggtacagaatagagcgtgtgctgttgataatatctctcacccggatccctcctcacttgccctgccactttgcatggtttgattttgacctggtcccccacgtgtgaagtgtagtggcatccatttctaatgtatgcattcatccaacagagttatttattggctggagatggaaaatcacaccacctgacaggccttctgggcctccaaagcccatccttggggttccccctccctgtgtgaaatgtattatcaccagcagacactgccgggcctccctcccgggggcactgcctgaaggcgagtgtgggcatagcattagctgcttcctcccctcctggcacccactgtggcctggcatcgcatcgtggtgtgtcaatgccacaaaatcgtgtgtccgtggaaccagtcctagccgcgtgtgacagtcttgcattctgtttgtctcgtggggggaggtggacagtcctgcggaaatgtgtcttgtctccatttggataaaaggaaccaaccaacaaacaatgccatcactggaatttcccaccgctttgtgagccgtgtcgtatgacctagtaaactttgtaccaattcaaa

SEQ ID NO: 163030 - DNA, 2601 bp, Homo sapiens
atccttaattaaattaattcttccccccccgggaggagccgccgagcagccgccggaggaccacggctcgccagggctgcggaggaccgaccgtccccacgcctgccgccccgcgaccccgaccgccagcatgatcgccgcgcagctcctggcctattacttcacggagctgaaggatgaccaggtcaaaaagattgacaagtatctctatgccatgcggctctccgatgaaactctcatagatatcatgactcgcttcaggaaggagatgaagaatggcctctcccgggattttaatccaacagccacagtcaagatgttgccaacattcgtaaggtccattcctgatggctctgaaaagggagatttcattgccctggatcttggtgggtcttcctttcgaattctgcgggtgcaagtgaatcatgagaaaaaccagaatgttcacatggagtccgaggtttatgacaccccagagaacatcgtgcacggcagtggaagccagctttttgatcatgttgctgagtgcctgggagatttcatggagaaaaggaagatcaaggacaagaagttacctgtgggattcacgttttcttttccttgccaacaatccaaaatagatgaggccatcctgatcacctggacaaagcgatttaaagcgagcggagtggaaggagcagatgtggtcaaactgcttaacaaagccatcaaaaagcgaggggactatgatgccaacatcgtagctgtggtgaatgacacagtgggcaccatgatgacctgtggctatgacgaccagcactgtgaagtcggcctgatcatcggcactggcaccaatgcttgctacatggaggaactgaggcacattgatctggtggaaggagacgaggggaggatgtgtatcaatacagaatggggagcctttggagacgatggatcattagaagacatccggacagagtttgacagggagatagaccggggatccctcaaccctggaaaacagctgtttgagaagatggtcagtggcatgtacttgggagagctggttcgactgatcctagtcaagatggccaaggagggcctcttatttgaagggcggatcaccccggagctgctcacccgagggaagtttaacaccagtgatgtgtcagccatcgaaaagaataaggaaggcctccacaatgccaaagaaatcctgacccgcctgggagtggagccgtccgatgatgactgtgtctcagtccagcacgtttgcaccattgtctcatttcgctcagccaacttggtggctgccacactgggcgccatcttgaaccgcctgcgtgataacaagggcacacccaggctgcggaccacggttggtgtcgacggatctctttacaagacgcacccacagtattcccggcgtttccacaagactctaaggcgcttggtgccagactccgatgtgcgcttcctcctctcggagagtggcagcggcaagggggctgccatggtgacggcggtggcctaccgcttggccgagcagcaccggcagatagaggagaccctggctcatttccacctcaccaaagacatgctgctggaggtgaagaagaggatgcgggccgagatggagctggggctgaggaagcagacgcacaacaatgccgtggttaagatgctgccctccttcgtccggagaactcccgacgggaccgagaatggtgacttcttggccctggatcttggaggaaccaatttccgtgtgctgctggtgaaaatccgtagtgggaaaaagagaacggtggaaatgcacaacaagatctacgccattcctattgaaatcatgcagggcactggggaagagctgtttgatcacattgtctcctgcatctctgacttcttggactacatggggatcaaaggccccaggatgcctctgggcttcacgttctcatttccctgccagcagacgagtctggacgcgggaatcttgatcacgtggacaaagggttttaaggcaacagactgcgtgggccacgatgtagtcaccttactaagggatgcgataaaaaggagagaggaatttgacctggacgtggtggctgtggtcaacgacacagtgggcaccatgatgacctgtgcttatgaggagcccacctgtgaggttggactcattgttgggaccggcagcaatgcctgctacatggaggagatgaagaacgtggagatggtggagggggaccaggggcagatgtgcatcaacatggagtggggggcctttggggacaacgggtgtctggatgatatcaggacacactacgacagactggtggacgaatattccctaaatgctgggaaacaaaggtatgagaagatgatcagtggtatgtacctgggtgaaatcgtccgacatctagtcggctaccagagggatcctcggggcaatccgaaccgtaagacgggctttgaacagttctcggaatgagaatacggataacgcccagcggtaccaaacaagtagaaccggaagactaaagcggggcgacaggcaattgcgctcgcggaaagacagcgccacaggagcacaccacgagacagggctccttcggcctctcc

SEQ ID NO: 163031 - DNA, 671 bp, Homo sapiens
aggtcgtctagaggatcccagaggaggtggactgcacagtgaggaaagcaaaatccaactaatggtatatattgtagggtacagaatagagcgtgtgctgttgataatatctctcacccggatccctcctcacttgccctgccactttgcatggtttgattttgacctggtcccccacgtgtgaagtgtagtggcatccatttctaatgtatgcattcatccaacagagttatttattggctggagatggaaaatcacaccacctgacaggccttctgggcctccaaagcccatccttggggttccccctccctgtgtgaaatgtattatcaccagcagacactgccgggcctccctcccgggggcactgcctgaaggcgagtgtgggcatagcattagctgcttcctcccctcctggcacccactgtggcctggcatcgcatcgtggtgtgtcaatgccacaaaatcgtgtgtccgtggaaccagtcctagccgcgtgtgacagtcttgcattctgtttgtctcgtggggggaggtggacagtcctgcggaaatgtgtcttgtctccatttggataaaaggaaccaaccaacaaacaatgccatcactggaatttcccaccgctttgtgagccgtgtcgtatgacctagtaaactttgtaccaattcaaa

SEQ ID NO: 163032 - DNA, 1559 bp, Homo sapiens
atccttaattaaattaattcttccccccccgggaggagccgccgagcagccgccggaggaccacggctcgccagggctgcggaggaccgaccgtccccacgcctgccgccccgcgaccccgaccgccagcatgatcgccgcgcagctcctggcctattacttcacggagctgaaggatgaccaggtcaaaaagattgacaagtatctctatgccatgcggctctccgatgaaactctcatagatatcatgactcgcttcaggaaggagatgaagaatggcctctcccgggattttaatccaacagccacagtcaagatgttgccaacattcgtaaggtccattcctgatggctctgaaaagggagatttcattgccctggatcttggtgggtcttcctttcgaattctgcgggtgcaagtgaatcatgagaaaaaccagaatgttcacatggagtccgaggtttatgacaccccagagaacatcgtgcacggcagtggaagccagctttttgatcatgttgctgagtgcctgggagatttcatggagaaaaggaagatcaaggacaagaagttacctgtgggattcacgttttcttttccttgccaacaatccaaaatagatgaggccatcctgatcacctggacaaagcgatttaaagcgagcggagtggaaggagcagatgtggtcaaactgcttaacaaagccatcaaaaagcgaggggactatgatgccaacatcgtagctgtggtgaatgacacagtgggcaccatgatgacctgtggctatgacgaccagcactgtgaagtcggcctgatcatcggcactggcaccaatgcttgctacatggaggaactgaggcacattgatctggtggaaggagacgaggggaggatgtgtatcaatacagaatggggagcctttggagacgatggatcattagaagacatccggacagagtttgacagggagatagaccggggatccctcaaccctggaaaacagctgtttgagaagatggtcagtggcatgtacttgggagagctggttcgactgatcctagtcaagatggccaaggagggcctcttatttgaagggcggatcaccccggagctgctcacccgagggaagtttaacaccagtgatgtgtcagccatcgaaaagaataaggaaggcctccacaatgccaaagaaatcctgacccgcctgggagtggagccgtccgatgatgactgtgtctcagtccagcacgtttgcaccattgtctcatttcgctcagccaacttggtggctgccacactgggcgccatcttgaaccgcctgcgtgataacaagggcacacccaggctgcggaccacggttggtgtcgacggatctctttacaagacgcacccacaattcccggcgtttcaactaacctcctcggactcctgcctcactcatttacaccacccacccaactatctatatacctagccatggccatccccttatgagcgggcgcagtgattatagcctttcgctctaagattaaaaatgccctagcccacttcttaccacc

SEQ ID NO: 163033 - DNA, 423 bp, Homo sapiens
acacggctcacaaagcggtgggaaattccagtgatggcattgtttgttggctggttccttttatccaaatggagacaagacacatttccgcaggactgtccacctccctcccgggggcactgcctgaaggcgagtgtgggcatagcattagctgcttcctcccctcctggcacccactgtggcctggcatcgcatcgtggtgtgtcaatgccacaaaatcgtgtgtccgtggaaccagtcctagccgcgtgtgacagtcttgcattctgtttgtctcgtggggggaggtggacagtcctgcggaaatgtgtcttgtctccatttggataaaaggaaccaaccaacaaacaatgccatcactggaatttcccaccgctttgtgagccgtgtcgtatgacctagtaaactttgtaccaattcaaa

SEQ ID NO: 163034 - DNA, 3619 bp, Homo sapiens
ctcgcgaacgtgttatccgggaggagccgccgagcagccgccggaggaccacggctcgccagggctgcggaggaccgaccgtccccacgcctgccgccccgcgaccccgaccgccagcatgatcgccgcgcagctcctggcctattacttcacggagctgaaggatgaccaggtcaaaaagattgacaagtatctctatgccatgcggctctccgatgaaactctcatagatatcatgactcgcttcaggaaggagatgaagaatggcctctcccgggattttaatccaacagccacagtcaagatgttgccaacattcgtaaggtccattcctgatggctctgaaaagggagatttcattgccctggatcttggtgggtcttcctttcgaattctgcgggtgcaagtgaatcatgagaaaaaccagaatgttcacatggagtccgaggtttatgacaccccagagaacatcgtgcacggcagtggaagccagctttttgatcatgttgctgagtgcctgggagatttcatggagaaaaggaagatcaaggacaagaagttacctgtgggattcacgttttcttttccttgccaacaatccaaaatagatgaggccatcctgatcacctggacaaagcgatttaaagcgagcggagtggaaggagcagatgtggtcaaactgcttaacaaagccatcaaaaagcgaggggactatgatgccaacatcgtagctgtggtgaatgacacagtgggcaccatgatgacctgtggctatgacgaccagcactgtgaagtcggcctgatcatcggcactggcaccaatgcttgctacatggaggaactgaggcacattgatctggtggaaggagacgaggggaggatgtgtatcaatacagaatggggagcctttggagacgatggatcattagaagacatccggacagagtttgacagggagatagaccggggatccctcaaccctggaaaacagctgtttgagaagatggtcagtggcatgtacttgggagagctggttcgactgatcctagtcaagatggccaaggagggcctcttatttgaagggcggatcaccccggagctgctcacccgagggaagtttaacaccagtgatgtgtcagccatcgaaaagaataaggaaggcctccacaatgccaaagaaatcctgacccgcctgggagtggagccgtccgatgatgactgtgtctcagtccagcacgtttgcaccattgtctcatttcgctcagccaacttggtggctgccacactgggcgccatcttgaaccgcctgcgtgataacaagggcacacccaggctgcggaccacggttggtgtcgacggatctctttacaagacgcacccacagtattcccggcgtttccacaagactctaaggcgcttggtgccagactccgatgtgcgcttcctcctctcggagagtggcagcggcaagggggctgccatggtgacggcggtggcctaccgcttggccgagcagcaccggcagatagaggagaccctggctcatttccacctcaccaaagacatgctgctggaggtgaagaagaggatgcgggccgagatggagctggggctgaggaagcagacgcacaacaatgccgtggttaagatgctgccctccttcgtccggagaactcccgacgggaccgagaatggtgacttcttggccctggatcttggaggaaccaatttccgtgtgctgctggtgaaaatccgtagtgggaaaaagagaacggtggaaatgcacaacaagatctacgccattcctattgaaatcatgcagggcactggggaagagctgtttgatcacattgtctcctgcatctctgacttcttggactacatggggatcaaaggccccaggatgcctctgggcttcacgttctcatttccctgccagcagacgagtctggacgcgggaatcttgatcacgtggacaaagggttttaaggcaacagactgcgtgggccacgatgtagtcaccttactaagggatgcgataaaaaggagagaggaatttgacctggacgtggtggctgtggtcaacgacacagtgggcaccatgatgacctgtgcttatgaggagcccacctgtgaggttggactcattgttgggaccggcagcaatgcctgctacatggaggagatgaagaacgtggagatggtggagggggaccaggggcagatgtgcatcaacatggagtggggggcctttggggacaacgggtgtctggatgatatcaggacacactacgacagactggtggacgaatattccctaaatgctgggaaacaaaggtatgagaagatgatcagtggtatgtacctgggtgaaatcgtccgcaacatcttaatcgacttcaccaagaagggattcctcttccgagggcagatctctgagacgctgaagacccggggcatctttgagaccaagtttctctctcagatcgagagtgaccgattagcactgctccaggtccgggctatcctccagcagctaggtctgaatagcacctgcgatgacagtatcctcgtcaagacagtgtgcggggtggtgtccaggagggccgcacagctgtgtggcgcaggcatggctgcggttgtggataagatccgcgagaacagaggactggaccgtctgaatgtgactgtgggagtggacgggacactctacaagcttcatccacacttctccagaatcatgcaccagacggtgaaggaactgtcaccaaaatgtaacgtgtccttcctcctgtctgaggatggcagcggcaagggggccgccctcatcacggccgtgggcgtgcggttacgcacagaggcaagcagctaagagtccgggatccccagcctactgcctctccagcacttctctcttcaagcggcgaccccctaccctcccagcgagttgcgctgggagacgctggcgccagggcctgccggcgcggggaggaaagcaaaatccaactaatggtatatattgtagggtacagaatagagcgtgtgctgttgataatatctctcacccggatccctcctcacttgccctgccactttgcatggtttgattttgacctggtcccccacgtgtgaagtgtagtggcatccatttctaatgtatgcattcatccaacagagttatttattggctggagatggaaaatcacaccacctgacaggccttctgggcctccaaagcccatccttggggttccccctccctgtgtgaaatgtattatcaccagcagacactgccgggcctccctcccgggggcactgcctgaaggcgagtgtgggcatagcattagctgcttcctcccctcctggcacccactgtggcctggcatcgcatcgtggtgtgtcaatgccacaaaatcgtgtgtccgtggaaccagtcctagccgcgtgtgacagtcttgcattctgtttgtctcgtggggggaggtggacagtcctgcggaaatgtgtcttgtctccatttggataaaaggaaccaaccaacaaacaatgccatcactggaatttcccaccgctttgtgagccgtgtcgtatgacctagtaaactttgtaccaattcaaa

SEQ ID NO: 163035 - DNA, 3837 bp, Homo sapiens
aaccagaactccagagagggaaaacatctatcttgctgtgtttggacaggccagcccctgaaacatcttgggcaatggagggttaacttctcaaagtttaataggcaagaccagcaaccatgcaacaaggacttcaactaaccaactaaagaactgttccccagagcattgttcctgagaaggaaaagagtccaaacacctacccacacctgctttgtgccaagaatccacagttggattgcaaggacagtgcgttcaagacccagctgttgagagtagaaaagcagaagaaaggacccgaggtcagcaagtgccctccccacaatggggcagatctgccagcgagaatcggctacagcagctgaaaaaccaaaacttcatctacttgctgaaagtgagattgacaagtatctctatgccatgcggctctccgatgaaactctcatagatatcatgactcgcttcaggaaggagatgaagaatggcctctcccgggattttaatccaacagccacagtcaagatgttgccaacattcgtaaggtccattcctgatggctctgaaaagggagatttcattgccctggatcttggtgggtcttcctttcgaattctgcgggtgcaagtgaatcatgagaaaaaccagaatgttcacatggagtccgaggtttatgacaccccagagaacatcgtgcacggcagtggaagccagctttttgatcatgttgctgagtgcctgggagatttcatggagaaaaggaagatcaaggacaagaagttacctgtgggattcacgttttcttttccttgccaacaatccaaaatagatgaggccatcctgatcacctggacaaagcgatttaaagcgagcggagtggaaggagcagatgtggtcaaactgcttaacaaagccatcaaaaagcgaggggactatgatgccaacatcgtagctgtggtgaatgacacagtgggcaccatgatgacctgtggctatgacgaccagcactgtgaagtcggcctgatcatcggcactggcaccaatgcttgctacatggaggaactgaggcacattgatctggtggaaggagacgaggggaggatgtgtatcaatacagaatggggagcctttggagacgatggatcattagaagacatccggacagagtttgacagggagatagaccggggatccctcaaccctggaaaacagctgtttgagaagatggtcagtggcatgtacttgggagagctggttcgactgatcctagtcaagatggccaaggagggcctcttatttgaagggcggatcaccccggagctgctcacccgagggaagtttaacaccagtgatgtgtcagccatcgaaaagaataaggaaggcctccacaatgccaaagaaatcctgacccgcctgggagtggagccgtccgatgatgactgtgtctcagtccagcacgtttgcaccattgtctcatttcgctcagccaacttggtggctgccacactgggcgccatcttgaaccgcctgcgtgataacaagggcacacccaggctgcggaccacggttggtgtcgacggatctctttacaagacgcacccacagtattcccggcgtttccacaagactctaaggcgcttggtgccagactccgatgtgcgcttcctcctctcggagagtggcagcggcaagggggctgccatggtgacggcggtggcctaccgcttggccgagcagcaccggcagatagaggagaccctggctcatttccacctcaccaaagacatgctgctggaggtgaagaagaggatgcgggccgagatggagctggggctgaggaagcagacgcacaacaatgccgtggttaagatgctgccctccttcgtccggagaactcccgacgggaccgagaatggtgacttcttggccctggatcttggaggaaccaatttccgtgtgctgctggtgaaaatccgtagtgggaaaaagagaacggtggaaatgcacaacaagatctacgccattcctattgaaatcatgcagggcactggggaagagctgtttgatcacattgtctcctgcatctctgacttcttggactacatggggatcaaaggccccaggatgcctctgggcttcacgttctcatttccctgccagcagacgagtctggacgcgggaatcttgatcacgtggacaaagggttttaaggcaacagactgcgtgggccacgatgtagtcaccttactaagggatgcgataaaaaggagagaggaatttgacctggacgtggtggctgtggtcaacgacacagtgggcaccatgatgacctgtgcttatgaggagcccacctgtgaggttggactcattgttgggaccggcagcaatgcctgctacatggaggagatgaagaacgtggagatggtggagggggaccaggggcagatgtgcatcaacatggagtggggggcctttggggacaacgggtgtctggatgatatcaggacacactacgacagactggtggacgaatattccctaaatgctgggaaacaaaggtatgagaagatgatcagtggtatgtacctgggtgaaatcgtccgcaacatcttaatcgacttcaccaagaagggattcctcttccgagggcagatctctgagacgctgaagacccggggcatctttgagaccaagtttctctctcagatcgagagtgaccgattagcactgctccaggtccgggctatcctccagcagctaggtctgaatagcacctgcgatgacagtatcctcgtcaagacagtgtgcggggtggtgtccaggagggccgcacagctgtgtggcgcaggcatggctgcggttgtggataagatccgcgagaacagaggactggaccgtctgaatgtgactgtgggagtggacgggacactctacaagcttcatccacacttctccagaatcatgcaccagacggtgaaggaactgtcaccaaaatgtaacgtgtccttcctcctgtctgaggatggcagcggcaagggggccgccctcatcacggccgtgggcgtgcggttacgcacagaggcaagcagctaagagtccgggatccccagcctactgcctctccagcacttctctcttcaagcggcgaccccctaccctcccagcgagttgcgctgggagacgctggcgccagggcctgccggcgcggggaggaaagcaaaatccaactaatggtatatattgtagggtacagaatagagcgtgtgctgttgataatatctctcacccggatccctcctcacttgccctgccactttgcatggtttgattttgacctggtcccccacgtgtgaagtgtagtggcatccatttctaatgtatgcattcatccaacagagttatttattggctggagatggaaaatcacaccacctgacaggccttctgggcctccaaagcccatccttggggttccccctccctgtgtgaaatgtattatcaccagcagacactgccgggcctccctcccgggggcactgcctgaaggcgagtgtgggcatagcattagctgcttcctcccctcctggcacccactgtggcctggcatcgcatcgtggtgtgtcaatgccacaaaatcgtgtgtccgtggaaccagtcctagccgcgtgtgacagtcttgcattctgtttgtctcgtggggggaggtggacagtcctgcggaaatgtgtcttgtctccatttggataaaaggaaccaaccaacaaacaatgccatcactggaatttcccaccgctttgtgagccgtgtcgtatgacctagtaaactttgtaccaattcaaa

SEQ ID NO: 163036 - DNA, 3949 bp, Homo sapiens
aaccagaactccagagagggaaaacatctatcttgctgtgtttggacaggccagcccctgaaacatcttgggcaatggagggttaacttctcaaagtttaataggcaagaccagcaaccatgcaacaagacagagtctcgcactgtcacccaggctggagagatctcggctcactgtaagctccgcctcctgggctcacgccattctcctgcctcagcctcccaagtagctgggactacaggacttcaactaaccaactaaagaactgttccccagagcattgttcctgagaaggaaaagagtccaaacacctacccacacctgctttgtgccaagaatccacagttggattgcaaggacagtgcgttcaagacccagctgttgagagtagaaaagcagaagaaaggacccgaggtcagcaagtgccctccccacaatggggcagatctgccagcgagaatcggctacagcagctgaaaaaccaaaacttcatctacttgctgaaagtgagattgacaagtatctctatgccatgcggctctccgatgaaactctcatagatatcatgactcgcttcaggaaggagatgaagaatggcctctcccgggattttaatccaacagccacagtcaagatgttgccaacattcgtaaggtccattcctgatggctctgaaaagggagatttcattgccctggatcttggtgggtcttcctttcgaattctgcgggtgcaagtgaatcatgagaaaaaccagaatgttcacatggagtccgaggtttatgacaccccagagaacatcgtgcacggcagtggaagccagctttttgatcatgttgctgagtgcctgggagatttcatggagaaaaggaagatcaaggacaagaagttacctgtgggattcacgttttcttttccttgccaacaatccaaaatagatgaggccatcctgatcacctggacaaagcgatttaaagcgagcggagtggaaggagcagatgtggtcaaactgcttaacaaagccatcaaaaagcgaggggactatgatgccaacatcgtagctgtggtgaatgacacagtgggcaccatgatgacctgtggctatgacgaccagcactgtgaagtcggcctgatcatcggcactggcaccaatgcttgctacatggaggaactgaggcacattgatctggtggaaggagacgaggggaggatgtgtatcaatacagaatggggagcctttggagacgatggatcattagaagacatccggacagagtttgacagggagatagaccggggatccctcaaccctggaaaacagctgtttgagaagatggtcagtggcatgtacttgggagagctggttcgactgatcctagtcaagatggccaaggagggcctcttatttgaagggcggatcaccccggagctgctcacccgagggaagtttaacaccagtgatgtgtcagccatcgaaaagaataaggaaggcctccacaatgccaaagaaatcctgacccgcctgggagtggagccgtccgatgatgactgtgtctcagtccagcacgtttgcaccattgtctcatttcgctcagccaacttggtggctgccacactgggcgccatcttgaaccgcctgcgtgataacaagggcacacccaggctgcggaccacggttggtgtcgacggatctctttacaagacgcacccacagtattcccggcgtttccacaagactctaaggcgcttggtgccagactccgatgtgcgcttcctcctctcggagagtggcagcggcaagggggctgccatggtgacggcggtggcctaccgcttggccgagcagcaccggcagatagaggagaccctggctcatttccacctcaccaaagacatgctgctggaggtgaagaagaggatgcgggccgagatggagctggggctgaggaagcagacgcacaacaatgccgtggttaagatgctgccctccttcgtccggagaactcccgacgggaccgagaatggtgacttcttggccctggatcttggaggaaccaatttccgtgtgctgctggtgaaaatccgtagtgggaaaaagagaacggtggaaatgcacaacaagatctacgccattcctattgaaatcatgcagggcactggggaagagctgtttgatcacattgtctcctgcatctctgacttcttggactacatggggatcaaaggccccaggatgcctctgggcttcacgttctcatttccctgccagcagacgagtctggacgcgggaatcttgatcacgtggacaaagggttttaaggcaacagactgcgtgggccacgatgtagtcaccttactaagggatgcgataaaaaggagagaggaatttgacctggacgtggtggctgtggtcaacgacacagtgggcaccatgatgacctgtgcttatgaggagcccacctgtgaggttggactcattgttgggaccggcagcaatgcctgctacatggaggagatgaagaacgtggagatggtggagggggaccaggggcagatgtgcatcaacatggagtggggggcctttggggacaacgggtgtctggatgatatcaggacacactacgacagactggtggacgaatattccctaaatgctgggaaacaaaggtatgagaagatgatcagtggtatgtacctgggtgaaatcgtccgcaacatcttaatcgacttcaccaagaagggattcctcttccgagggcagatctctgagacgctgaagacccggggcatctttgagaccaagtttctctctcagatcgagagtgaccgattagcactgctccaggtccgggctatcctccagcagctaggtctgaatagcacctgcgatgacagtatcctcgtcaagacagtgtgcggggtggtgtccaggagggccgcacagctgtgtggcgcaggcatggctgcggttgtggataagatccgcgagaacagaggactggaccgtctgaatgtgactgtgggagtggacgggacactctacaagcttcatccacacttctccagaatcatgcaccagacggtgaaggaactgtcaccaaaatgtaacgtgtccttcctcctgtctgaggatggcagcggcaagggggccgccctcatcacggccgtgggcgtgcggttacgcacagaggcaagcagctaagagtccgggatccccagcctactgcctctccagcacttctctcttcaagcggcgaccccctaccctcccagcgagttgcgctgggagacgctggcgccagggcctgccggcgcggggaggaaagcaaaatccaactaatggtatatattgtagggtacagaatagagcgtgtgctgttgataatatctctcacccggatccctcctcacttgccctgccactttgcatggtttgattttgacctggtcccccacgtgtgaagtgtagtggcatccatttctaatgtatgcattcatccaacagagttatttattggctggagatggaaaatcacaccacctgacaggccttctgggcctccaaagcccatccttggggttccccctccctgtgtgaaatgtattatcaccagcagacactgccgggcctccctcccgggggcactgcctgaaggcgagtgtgggcatagcattagctgcttcctcccctcctggcacccactgtggcctggcatcgcatcgtggtgtgtcaatgccacaaaatcgtgtgtccgtggaaccagtcctagccgcgtgtgacagtcttgcattctgtttgtctcgtggggggaggtggacagtcctgcggaaatgtgtcttgtctccatttggataaaaggaaccaaccaacaaacaatgccatcactggaatttcccaccgctttgtgagccgtgtcgtatgacctagtaaactttgtaccaattcaaa

SEQ ID NO: 163037 - DNA, 3660 bp, Homo sapiens
atccttaattaaattaattcttccccccccgggaggagccgccgagcagccgccggaggaccacggctcgccagggctgcggaggaccgaccgtccccacgcctgccgccccgcgaccccgaccgccagcatgatcgccgcgcagctcctggcctattacttcacggagctgaaggatgaccaggtcaaaaagattgacaagtatctctatgccatgcggctctccgatgaaactctcatagatatcatgactcgcttcaggaaggagatgaagaatggcctctcccgggattttaatccaacagccacagtcaagatgttgccaacattcgtaaggtccattcctgatggctctgaaaagggagatttcattgccctggatcttggtgggtcttcctttcgaattctgcgggtgcaagtgaatcatgagaaaaaccagaatgttcacatggagtccgaggtttatgacaccccagagaacatcgtgcacggcagtggaagccagctttttgatcatgttgctgagtgcctgggagatttcatggagaaaaggaagatcaaggacaagaagttacctgtgggattcacgttttcttttccttgccaacaatccaaaatagatgaggccatcctgatcacctggacaaagcgatttaaagcgagcggagtggaaggagcagatgtggtcaaactgcttaacaaagccatcaaaaagcgaggggactatgatgccaacatcgtagctgtggtgaatgacacagtgggcaccatgatgacctgtggctatgacgaccagcactgtgaagtcggcctgatcatcggcactggcaccaatgcttgctacatggaggaactgaggcacattgatctggtggaaggagacgaggggaggatgtgtatcaatacagaatggggagcctttggagacgatggatcattagaagacatccggacagagtttgacagggagatagaccggggatccctcaaccctggaaaacagctgtttgagaagatggtcagtggcatgtacttgggagagctggttcgactgatcctagtcaagatggccaaggagggcctcttatttgaagggcggatcaccccggagctgctcacccgagggaagtttaacaccagtgatgtgtcagccatcgaaaagaataaggaaggcctccacaatgccaaagaaatcctgacccgcctgggagtggagccgtccgatgatgactgtgtctcagtccagcacgtttgcaccattgtctcatttcgctcagccaacttggtggctgccacactgggcgccatcttgaaccgcctgcgtgataacaagggcacacccaggctgcggaccacggttggtgtcgacggatctctttacaagacgcacccacagtattcccggcgtttccacaagactctaaggcgcttggtgccagactccgatgtgcgcttcctcctctcggagagtggcagcggcaagggggctgccatggtgacggcggtggcctaccgcttggccgagcagcaccggcagatagaggagaccctggctcatttccacctcaccaaagacatgctgctggaggtgaagaagaggatgcgggccgagatggagctggggctgaggaagcagacgcacaacaatgccgtggttaagatgctgccctccttcgtccggagaactcccgacgggaccgagaatggtgacttcttggccctggatcttggaggaaccaatttccgtgtgctgctggtgaaaatccgtagtgggaaaaagagaacggtggaaatgcacaacaagatctacgccattcctattgaaatcatgcagggcactggggaagagctgtttgatcacattgtctcctgcatctctgacttcttggactacatggggatcaaaggccccaggatgcctctgggcttcacgttctcatttccctgccagcagacgagtctggacgcgggaatcttgatcacgtggacaaagggttttaaggcaacagactgcgtgggccacgatgtagtcaccttactaagggatgcgataaaaaggagagaggaatttgacctggacgtggtggctgtggtcaacgacacagtgggcaccatgatgacctgtgcttatgaggagcccacctgtgaggttggactcattgttgggaccggcagcaatgcctgctacatggaggagatgaagaacgtggagatggtggagggggaccaggggcagatgtgcatcaacatggagtggggggcctttggggacaacgggtgtctggatgatatcaggacacactacgacagactggtggacgaatattccctaaatgctgggaaacaaaggtatgagaagatgatcagtggtatgtacctgggtgaaatcgtccgcaacatcttaatcgacttcaccaagaagggattcctcttccgagggcagatctctgagacgctgaagacccggggcatctttgagaccaagtttctctctcagatcgagagtgaccgattagcactgctccaggtccgggctatcctccagcagctaggtctgaatagcacctgcgatgacagtatcctcgtcaagacagtgtgcggggtggtgtccaggagggccgcacagctgtgtggcgcaggcatggctgcggttgtggataagatccgcgagaacagaggactggaccgtctgaatgtgactgtgggagtggacgggacactctacaagcttcatccacacttctccagaatcatgcaccagacggtgaaggaactgtcaccaaaatgtaacgtgtccttcctcctgtctgaggatggcagcggcaagggggccgccctcatcacggccgtgggcgtgcggttacgcacagaggcaagcagctaagagtccgggatccccagcctactgcctctccagcacttctctcttcaagcggcgaccccctaccctcccagcgagttgcgctgggagacgctggcgccagggcctgccggcgcggggaggaaagcaaaatccaactaatggtatatattgtagggtacagaatagagcgtgtgctgttgataatatctctcacccggatccctcctcacttgccctgccactttgcatggtttgattttgacctggtcccccacgtgtgaagtgtagtggcatccatttctaatgtatgcattcatccaacagagttatttattggctggagatggaaaatcacaccacctgacaggccttctgggcctccaaagcccatccttggggttccccctccctgtgtgaaatgtattatcaccagcagacactgccgggcctccctcccgggggcactgcctgaaggcgagtgtgggcatagcattagctgcttcctcccctcctggcacccactgtggcctggcatcgcatcgtggtgtgtcaatgccacaaaatcgtgtgtccgtggaaccagtcctagccgcgtgtgacagtcttgcattctgtttgtctcgtggggggaggtggacagtcctgcggaaatgtgtcttgtctccatttggataaaaggaaccaaccaacaaacaatgccatcactggaatttcccaccgctttgtgagccgtgtcgtatgacctagtaaactttgtaccaattcaaaaaaaaaaagaaacggaaacaaacaacggg

SEQ ID NO: 163038 - DNA, 4377 bp, Homo sapiens
atccttaattaaattaattcttccccccccgggaggagccgccgagcagccgccggaggaccacggctcgccagggctgcggaggaccgaccgtccccacgcctgccgccccgcgaccccgaccgccagcatgatcgccgcgcagctcctggcctattacttcacggagctgaaggatgaccaggtcaaaaagattgacaagtatctctatgccatgcggctctccgatgaaactctcatagatatcatgactcgcttcaggaaggagatgaagaatggcctctcccgggattttaatccaacagccacagtcaagatgttgccaacattcgtaaggtccattcctgatggctctgaaaagggagatttcattgccctggatcttggtgggtcttcctttcgaattctgcgggtgcaagtgaatcatgagaaaaaccagaatgttcacatggagtccgaggtttatgacaccccagagaacatcgtgcacggcagtggaagccagctttttgatcatgttgctgagtgcctgggagatttcatggagaaaaggaagatcaaggacaagaagttacctgtgggattcacgttttcttttccttgccaacaatccaaaatagatgaggccatcctgatcacctggacaaagcgatttaaagcgagcggagtggaaggagcagatgtggtcaaactgcttaacaaagccatcaaaaagcgaggggactatgatgccaacatcgtagctgtggtgaatgacacagtgggcaccatgatgacctgtggctatgacgaccagcactgtgaagtcggcctgatcatcggcactggcaccaatgcttgctacatggaggaactgaggcacattgatctggtggaaggagacgaggggaggatgtgtatcaatacagaatggggagcctttggagacgatggatcattagaagacatccggacagagtttgacagggagatagaccggggatccctcaaccctggaaaacagctgtttgagaagatggtcagtggcatgtacttgggagagctggttcgactgatcctagtcaagatggccaaggagggcctcttatttgaagggcggatcaccccggagctgctcacccgagggaagtttaacaccagtgatgtgtcagccatcgaaaagaataaggaaggcctccacaatgccaaagaaatcctgacccgcctgggagtggagccgtccgatgatgactgtgtctcagtccagcacgtttgcaccattgtctcatttcgctcagccaacttggtggctgccacactgggcgccatcttgaaccgcctgcgtgataacaagggcacacccaggctgcggaccacggttggtgtcgacggatctctttacaagacgcacccacagtattcccggcgtttccacaagactctaaggcgcttggtgccagactccgatgtgcgcttcctcctctcggagagtggcagcggcaagggggctgccatggtgacggcggtggcctaccgcttggccgagcagcaccggcagatagaggagaccctggctcatttccacctcaccaaagacatgctgctggaggtgaagaagaggatgcgggccgagatggagctggggctgaggaagcagacgcacaacaatgccgtggttaagatgctgccctccttcgtccggagaactcccgacgggaccgagaatggtgacttcttggccctggatcttggaggaaccaatttccgtgtgctgctggtgaaaatccgtagtgggaaaaagagaacggtggaaatgcacaacaagatctacgccattcctattgaaatcatgcagggcactggggaagagctgtttgatcacattgtctcctgcatctctgacttcttggactacatggggatcaaaggccccaggatgcctctgggcttcacgttctcatttccctgccagcagacgagtctggacgcgggaatcttgatcacgtggacaaagggttttaaggcaacagactgcgtgggccacgatgtagtcaccttactaagggatgcgataaaaaggagagaggaatttgacctggacgtggtggctgtggtcaacgacacagtgggcaccatgatgacctgtgcttatgaggagcccacctgtgaggttggactcattgttgggaccggcagcaatgcctgctacatggaggagatgaagaacgtggagatggtggagggggaccaggggcagatgtgcatcaacatggagtggggggcctttggggacaacgggtgtctggatgatatcaggacacactacgacagactggtggacgaatattccctaaatgctgggaaacaaaggtatgagaagatgatcagtggtatgtacctgggtgaaatcgtccgcaacatcttaatcgacttcaccaagaagggattcctcttccgagggcagatctctgagacgctgaagacccggggcatctttgagaccaagtttctctctcagatcgagagtgaccgattagcactgctccaggtccgggctatcctccagcagctaggtctgaatagcacctgcgatgacagtatcctcgtcaagacagtgtgcggggtggtgtccaggagggccgcacagctgtgtggcgcaggcatggctgcggttgtggataagatccgcgagaacagaggactggaccgtctgaatgtgactgtgggagtggacgggacactctacaagcttcatccacacttctccagaatcatgcaccagacggtgaaggaactgtcaccaaaatgtaacgtgtccttcctcctgtctgaggatggcagcggcaagggggccgccctcatcacggccgtgggcgtgcggttacgcacagaggcaagcagctaagagtccgggatccccagcctactgcctctccagcacttctctcttcaagcggcgaccccctaccctcccagcgagttgcgctgggagacgctggcgccagggcctgccggcgcggggaggaaagcaaaatccaactaatggtatatattgtagggtacagaatagagcgtgtgctgttgataatatctctcacccggatccctcctcacttgccctgccactttgcatggtttgattttgacctggtcccccacgtgtgaagtgtagtggcatccatttctaatgtatgcattcatccaacagagttatttattggctggagatggaaaatcacaccacctgacaggccttctgggcctccaaagcccatccttggggttccccctccctgtgtgaaatgtattatcaccagcagacactgccgggcctccctcccgggggcactgcctgaaggcgagtgtgggcatagcattagctgcttcctcccctcctggcacccactgtggcctggcatcgcatcgtggtgtgtcaatgccacaaaatcgtgtgtccgtggaaccagtcctagccgcgtgtgacagtcttgcattctgtttgtctcgtggggggaggtggacagtcctgcggaaatgtgtcttgtctccatttggataaaaggaaccaaccaacaaacaatgccatcactggaatttcccaccgctttgtgagccgtgtcgtatgacctagtaaactttgtaccaattcaaaaaaaaaaaaaaaacaaaaaaaaaaaaaaaaaaaaaaaaaaaaaagaaaaagaaaaataaataaaataaaagaaaaaaaaaaaataaaaaaataaaaaataaagaagaaaataaaatcacaataaaatatataaaagaaattggacagtcataatgacagacaggagagtcgaggagtagtgaatgcacgatatgaagagcctggtaaagattatcgagctcctcgtactgcaagtctgaaatagggcccagcatagagggtgataaagaagaacatctctatgaactggaccagtaaaagtgtatgcatatgtttaacgaaacaagcatatatggacatctggataaacatgaacctttacaaaatgcgtaaaaactataaaaactaatatacggagacacgttactgaaaaaaagaattcgtcatcagatgcatcctgagttgttacaccctttaatcacacttgattgcacccggtcagagggccctcactgaaccaattacttgaggtacagtaaaaatatggttaaaaacttaacaatggtccaaacaacatcccagatctatcccttagcgccaaacgttcattaataacgcgggaagacctggtggattcataggacagaattgagccacactgaacctttggatcaaggtacagtactcaggggtataaaaccatttatatcttcctttcattgccccaaggacgtggtatttttggtgaaagaaggtctcatacatat

SEQ ID NO: 163039 - DNA, 4111 bp, Homo sapiens
  misc_feature (4111)..(4111): n is a, c, g, or t
atccttaattaaattaattcttccccccccgggaggagccgccgagcagccgccggaggaccacggctcgccagggctgcggaggaccgaccgtccccacgcctgccgccccgcgaccccgaccgccagcatgatcgccgcgcagctcctggcctattacttcacggagctgaaggatgaccaggtcaaaaagattgacaagtatctctatgccatgcggctctccgatgaaactctcatagatatcatgactcgcttcaggaaggagatgaagaatggcctctcccgggattttaatccaacagccacagtcaagatgttgccaacattcgtaaggtccattcctgatggctctgaaaagggagatttcattgccctggatcttggtgggtcttcctttcgaattctgcgggtgcaagtgaatcatgagaaaaaccagaatgttcacatggagtccgaggtttatgacaccccagagaacatcgtgcacggcagtggaagccagctttttgatcatgttgctgagtgcctgggagatttcatggagaaaaggaagatcaaggacaagaagttacctgtgggattcacgttttcttttccttgccaacaatccaaaatagatgaggccatcctgatcacctggacaaagcgatttaaagcgagcggagtggaaggagcagatgtggtcaaactgcttaacaaagccatcaaaaagcgaggggactatgatgccaacatcgtagctgtggtgaatgacacagtgggcaccatgatgacctgtggctatgacgaccagcactgtgaagtcggcctgatcatcggcactggcaccaatgcttgctacatggaggaactgaggcacattgatctggtggaaggagacgaggggaggatgtgtatcaatacagaatggggagcctttggagacgatggatcattagaagacatccggacagagtttgacagggagatagaccggggatccctcaaccctggaaaacagctgtttgagaagatggtcagtggcatgtacttgggagagctggttcgactgatcctagtcaagatggccaaggagggcctcttatttgaagggcggatcaccccggagctgctcacccgagggaagtttaacaccagtgatgtgtcagccatcgaaaagaataaggaaggcctccacaatgccaaagaaatcctgacccgcctgggagtggagccgtccgatgatgactgtgtctcagtccagcacgtttgcaccattgtctcatttcgctcagccaacttggtggctgccacactgggcgccatcttgaaccgcctgcgtgataacaagggcacacccaggctgcggaccacggttggtgtcgacggatctctttacaagacgcacccacagtattcccggcgtttccacaagactctaaggcgcttggtgccagactccgatgtgcgcttcctcctctcggagagtggcagcggcaagggggctgccatggtgacggcggtggcctaccgcttggccgagcagcaccggcagatagaggagaccctggctcatttccacctcaccaaagacatgctgctggaggtgaagaagaggatgcgggccgagatggagctggggctgaggaagcagacgcacaacaatgccgtggttaagatgctgccctccttcgtccggagaactcccgacgggaccgagaatggtgacttcttggccctggatcttggaggaaccaatttccgtgtgctgctggtgaaaatccgtagtgggaaaaagagaacggtggaaatgcacaacaagatctacgccattcctattgaaatcatgcagggcactggggaagagctgtttgatcacattgtctcctgcatctctgacttcttggactacatggggatcaaaggccccaggatgcctctgggcttcacgttctcatttccctgccagcagacgagtctggacgcgggaatcttgatcacgtggacaaagggttttaaggcaacagactgcgtgggccacgatgtagtcaccttactaagggatgcgataaaaaggagagaggaatttgacctggacgtggtggctgtggtcaacgacacagtgggcaccatgatgacctgtgcttatgaggagcccacctgtgaggttggactcattgttgggaccggcagcaatgcctgctacatggaggagatgaagaacgtggagatggtggagggggaccaggggcagatgtgcatcaacatggagtggggggcctttggggacaacgggtgtctggatgatatcaggacacactacgacagactggtggacgaatattccctaaatgctgggaaacaaaggtatgagaagatgatcagtggtatgtacctgggtgaaatcgtccgcaacatcttaatcgacttcaccaagaagggattcctcttccgagggcagatctctgagacgctgaagacccggggcatctttgagaccaagtttctctctcagatcgagagtgaccgattagcactgctccaggtccgggctatcctccagcagctaggtctgaatagcacctgcgatgacagtatcctcgtcaagacagtgtgcggggtggtgtccaggagggccgcacagctgtgtggcgcaggcatggctgcggttgtggataagatccgcgagaacagaggactggaccgtctgaatgtgactgtgggagtggacgggacactctacaagcttcatccacacttctccagaatcatgcaccagacggtgaaggaactgtcaccaaaatgtaacgtgtccttcctcctgtctgaggatggcagcggcaagggggccgccctcatcacggccgtgggcgtgcggttacgcacagaggcaagcagctaagagtccgggatccccagcctactgcctctccagcacttctctcttcaagcggcgaccccctaccctcccagcgagttgcgctgggagacgctggcgccagggcctgccggcgcggggaggaaagcaaaatccaactaatggtatatattgtagggtacagaatagagcgtgtgctgttgataatatctctcacccggatccctcctcacttgccctgccactttgcatggtttgattttgacctggtcccccacgtgtgaagtgtagtggcatccatttctaatgtatgcattcatccaacagagttatttattggctggagatggaaaatcacaccacctgacaggccttctgggcctccaaagcccatccttggggttccccctccctgtgtgaaatgtattatcaccagcagacactgccgggcctccctcccgggggcactgcctgaaggcgagtgtgggcatagcattagctgcttcctcccctcctggcacccactgtggcctggcatcgcatcgtggtgtgtcaatgccacaaaatcgtgtgtccgtggaaccagtcctagccgcgtgtgacagtcttgcattctgtttgtctcgtggggggaggtggacagtcctgcggaaatgtgtcttgtctccatttggataaaaggaaccaaccaacaaacaatgccatcactggaatttcccaccgctttgtgagccgtgtcgtatgacctagtaaactttgtaccaattcaaaaaaaaaaaaaaaaaaaaaaaaaaaaaggggggggcgcggccaaaaatttcccccggggggcccccaggttccgggttcccccaggttttgttggtcaccaagggtgcgcccctatatggggggcgccgatataattacgcgcttagggcacgggcgccggctgttttaacccaaccggtcggacgctggggagaaccccgtggaacccttggcgggaccctttgggcggaagagacccctttatttcggggggggggcgagacatatattggggagaaaaaattatccccttatcaaagagatttttaaagcgcctcaagggggaaaattttttaaaaatttctaagggtgttataacgggggcttaaaacacctaaaggctcgacattgaggccaggacggcctgaaaagtttggggcctacccgggagctattgcctttagaaaacatttttttaccacgggggccgcggttgaatan

SEQ ID NO: 163040 - DNA, 3750 bp, Homo sapiens
atccttaattaaattaattcttccccccccgggaggagccgccgagcagccgccggaggaccacggctcgccagggctgcggaggaccgaccgtccccacgcctgccgccccgcgaccccgaccgccagcatgatcgccgcgcagctcctggcctattacttcacggagctgaaggatgaccaggtcaaaaagattgacaagtatctctatgccatgcggctctccgatgaaactctcatagatatcatgactcgcttcaggaaggagatgaagaatggcctctcccgggattttaatccaacagccacagtcaagatgttgccaacattcgtaaggtccattcctgatggctctgaaaagggagatttcattgccctggatcttggtgggtcttcctttcgaattctgcgggtgcaagtgaatcatgagaaaaaccagaatgttcacatggagtccgaggtttatgacaccccagagaacatcgtgcacggcagtggaagccagctttttgatcatgttgctgagtgcctgggagatttcatggagaaaaggaagatcaaggacaagaagttacctgtgggattcacgttttcttttccttgccaacaatccaaaatagatgaggccatcctgatcacctggacaaagcgatttaaagcgagcggagtggaaggagcagatgtggtcaaactgcttaacaaagccatcaaaaagcgaggggactatgatgccaacatcgtagctgtggtgaatgacacagtgggcaccatgatgacctgtggctatgacgaccagcactgtgaagtcggcctgatcatcggcactggcaccaatgcttgctacatggaggaactgaggcacattgatctggtggaaggagacgaggggaggatgtgtatcaatacagaatggggagcctttggagacgatggatcattagaagacatccggacagagtttgacagggagatagaccggggatccctcaaccctggaaaacagctgtttgagaagatggtcagtggcatgtacttgggagagctggttcgactgatcctagtcaagatggccaaggagggcctcttatttgaagggcggatcaccccggagctgctcacccgagggaagtttaacaccagtgatgtgtcagccatcgaaaagaataaggaaggcctccacaatgccaaagaaatcctgacccgcctgggagtggagccgtccgatgatgactgtgtctcagtccagcacgtttgcaccattgtctcatttcgctcagccaacttggtggctgccacactgggcgccatcttgaaccgcctgcgtgataacaagggcacacccaggctgcggaccacggttggtgtcgacggatctctttacaagacgcacccacagtattcccggcgtttccacaagactctaaggcgcttggtgccagactccgatgtgcgcttcctcctctcggagagtggcagcggcaagggggctgccatggtgacggcggtggcctaccgcttggccgagcagcaccggcagatagaggagaccctggctcatttccacctcaccaaagacatgctgctggaggtgaagaagaggatgcgggccgagatggagctggggctgaggaagcagacgcacaacaatgccgtggttaagatgctgccctccttcgtccggagaactcccgacgggaccgagaatggtgacttcttggccctggatcttggaggaaccaatttccgtgtgctgctggtgaaaatccgtagtgggaaaaagagaacggtggaaatgcacaacaagatctacgccattcctattgaaatcatgcagggcactggggaagagctgtttgatcagcagtgggtcgtccgtggccatcgtgcgtgcaccgtttcgtgtgccgcaccttaacaagtgggagttcattcaaagaaggggcgcgcggaaaagggggaattggcacgtttcattgtggggggccttttacaaacggattttcctttccgagtttttcttccgccgccctttggacccccaaagaccaaaggaaacccttgaatggcttccctaagggagccgctggcggaatcttgatcacgtggacaaagggttttaaggcaacagactgcgtgggccacgatgtagtcaccttactaagggatgcgataaaaaggagagaggaatttgacctggacgtggtggctgtggtcaacgacacagtgggcaccatgatgacctgtgcttatgaggagcccacctgtgaggttggactcattgttgggaccggcagcaatgcctgctacatggaggagatgaagaacgtggagatggtggagggggaccaggggcagatgtgcatcaacatggagtggggggcctttggggacaacgggtgtctggatgatatcaggacacactacgacagactggtggacgaatattccctaaatgctgggaaacaaaggtatgagaagatgatcagtggtatgtacctgggtgaaatcgtccgcaacatcttaatcgacttcaccaagaagggattcctcttccgagggcagatctctgagacgctgaagacccggggcatctttgagaccaagtttctctctcagatcgagagtgaccgattagcactgctccaggtccgggctatcctccagcagctaggtctgaatagcacctgcgatgacagtatcctcgtcaagacagtgtgcggggtggtgtccaggagggccgcacagctgtgtggcgcaggcatggctgcggttgtggataagatccgcgagaacagaggactggaccgtctgaatgtgactgtgggagtggacgggacactctacaagcttcatccacacttctccagaatcatgcaccagacggtgaaggaactgtcaccaaaatgtaacgtgtccttcctcctgtctgaggatggcagcggcaagggggccgccctcatcacggccgtgggcgtgcggttacgcacagaggcaagcagctaagagtccgggatccccagcctactgcctctccagcacttctctcttcaagcggcgaccccctaccctcccagcgagttgcgctgggagacgctggcgccagggcctgccggcgcggggaggaaagcaaaatccaactaatggtatatattgtagggtacagaatagagcgtgtgctgttgataatatctctcacccggatccctcctcacttgccctgccactttgcatggtttgattttgacctggtcccccacgtgtgaagtgtagtggcatccatttctaatgtatgcattcatccaacagagttatttattggctggagatggaaaatcacaccacctgacaggccttctgggcctccaaagcccatccttggggttccccctccctgtgtgaaatgtattatcaccagcagacactgccgggcctccctcccgggggcactgcctgaaggcgagtgtgggcatagcattagctgcttcctcccctcctggcacccactgtggcctggcatcgcatcgtggtgtgtcaatgccacaaaatcgtgtgtccgtggaaccagtcctagccgcgtgtgacagtcttgcattctgtttgtctcgtggggggaggtggacagtcctgcggaaatgtgtcttgtctccatttggataaaaggaaccaaccaacaaacaatgccatcactggaatttcccaccgctttgtgagccgtgtcgtatgacctagtaaactttgtaccaattcaaa

SEQ ID NO: 163041 - DNA, 3663 bp, Homo sapiens
atccttaattaaattaattcttccccccccgggaggagccgccgagcagccgccggaggaccacggctcgccagggctgcggaggaccgaccgtccccacgcctgccgccccgcgaccccgaccgccagcatgatcgccgcgcagctcctggcctattacttcacggagctgaaggatgaccaggtcaaaaagattgacaagtatctctatgccatgcggctctccgatgaaactctcatagatatcatgactcgcttcaggaaggagatgaagaatggcctctcccgggattttaatccaacagccacagtcaagatgttgccaacattcgtaaggtccattcctgatggctctgaaaagggagatttcattgccctggatcttggtgggtcttcctttcgaattctgcgggtgcaagtgaatcatgagaaaaaccagaatgttcacatggagtccgaggtttatgacaccccagagaacatcgtgcacggcagtggaagccagctttttgatcatgttgctgagtgcctgggagatttcatggagaaaaggaagatcaaggacaagaagttacctgtgggattcacgttttcttttccttgccaacaatccaaaatagatgaggccatcctgatcacctggacaaagcgatttaaagcgagcggagtggaaggagcagatgtggtcaaactgcttaacaaagccatcaaaaagcgaggggactatgatgccaacatcgtagctgtggtgaatgacacagtgggcaccatgatgacctgtggctatgacgaccagcactgtgaagtcggcctgatcatcggcactggcaccaatgcttgctacatggaggaactgaggcacattgatctggtggaaggagacgaggggaggatgtgtatcaatacagaatggggagcctttggagacgatggatcattagaagacatccggacagagtttgacagggagatagaccggggatccctcaaccctggaaaacagctgtttgagaagatggtcagtggcatgtacttgggagagctggttcgactgatcctagtcaagatggccaaggagggcctcttatttgaagggcggatcaccccggagctgctcacccgagggaagtttaacaccagtgatgtgtcagccatcgaaaagaataaggaaggcctccacaatgccaaagaaatcctgacccgcctgggagtggagccgtccgatgatgactgtgtctcagtccagcacgtttgcaccattgtctcatttcgctcagccaacttggtggctgccacactgggcgccatcttgaaccgcctgcgtgataacaagggcacacccaggctgcggaccacggttggtgtcgacggatctctttacaagacgcacccacagtattcccggcgtttccacaagactctaaggcgcttggtgccagactccgatgtgcgcttcctcctctcggagagtggcagcggcaagggggctgccatggtgacggcggtggcctaccgcttggccgagcagcaccggcagatagaggagaccctggctcatttccacctcaccaaagacatgctgctggaggtgaagaagaggatgcgggccgagatggagctggggctgaggaagcagacgcacaacaatgccgtggttaagatgctgccctccttcgtccggagaactcccgacgggaccgagaatggtgacttcttggccctggatcttggaggaaccaatttccgtgtgctgctggtgaaaatccgtagtgggaaaaagagaacggtggaaatgcacaacaagatctacgccattcctattgaaatcatgcagggcactggggaagagctgtttgatcacattgtctcctgcatctctgacttcttggactacatggggatcaaaggccccaggatgcctctgggcttcacgttctcatttccctgccagcagacgagtctggacgcgggaatcttgatcacgtggacaaagggttttaaggcaacagactgcgtgggccacgatgtagtcaccttactaagggatgcgataaaaaggagagaggaatttgacctggacgtggtggctgtggtcaacgacacagtgggcaccatgatgacctgtgcttatgaggagcccacctgtgaggttggactcattgttgggaccggcagcaatgcctgctacatggaggagatgaagaacgtggagatggtggagggggaccaggggcagatgtgcatcaacatggagtggggggcctttggggacaacgggtgtctggatgatatcaggacacactacgacagactggtggacgaatattccctaaatgctgggaaacaaaggtatgagaagatgatcagtggtatgtacctgggtgaaatcgtccgcaacatcttaatcgacttcaccaagaagggattcctcttccgagggcagatctctgagacgctgaagacccggggcatctttgagaccaagtttctctctcagatcgagagtgaccgattagcactgctccaggtccgggctatcctccagcagctaggtctgaatagcacctgcgatgacagtatcctcgtcaagacagtgtgcggggtggtgtccaggagggccgcacagctgtgtggcgcaggcatggctgcggttgtggataagatccgcgagaacagaggactggaccgtctgaatgtgactgtgggagtggacgggacactctacaagcttcatccacacttctccagaatcatgcaccagacggtgaaggaactgtcaccaaaatgtaacgtgtccttcctcctgtctgaggatggcagcggcaagggggccgccctcatcacggccgtgggcgtgcggttacgcacagaggcaagcagctaagagtccgggatccccagcctactgcctctccagcacttctctcttcaagcggcgaccccctaccctcccagcgagttgcgctgggagacgctggcgccagggcctgccggcgcggggaggaaagcaaaatccaactaatggtatatattgtagggtacagaatagagcgtgtgctgttgataatatctctcacccggatccctcctcacttgccctgccactttgcatggtttgattttgacctggtcccccacgtgtgaagtgtagtggcatccatttctaatgtatgcattcatccaacagagttatttattggctggagatggaaaatcacaccacctgacaggccttctgggcctccaaagcccatccttggggttccccctccctgtgtgaaatgtattatcaccagcagacactgccgggcctccctcccgggggcactgcctgaaggcgagtgtgggcatagcattagctgcttcctcccctcctggcacccactgtggcctggcatcgcatcgtggtgtgtcaatgccacaaaatcgtgtgtccgtggaaccagtcctagccgcgtgtgacagtcttgcattctgtttgtctcgtggggggaggtggacagtcctgcggaaatgtgtcttggggtttggccccttgcccccccaaatttttttgttttggggggggggaaggaaccaaccaacaaacaatgccatcactggaatttcccaccgctttgtgagccgtgtcgtatgacctagtaaactttgtaccaattcaaa

SEQ ID NO: 163042 - DNA, 2006 bp, Homo sapiens
gtcgtgactggaggcattggaatggcgcggcgaagatgcaggcctccttcgtccggagaactcccgacgggaccgagaatggtgacttcttggccctggatcttggaggaaccaatttccgtgtgctgctggtgaaaatccgtagtgggaaaaagagaacggtggaaatgcacaacaagatctacgccattcctattgaaatcatgcagggcactggggaagagctgtttgatcacattgtctcctgcatctctgacttcttggactacatggggatcaaaggccccaggatgcctctgggcttcacgttctcatttccctgccagcagacgagtctggacgcgggaatcttgatcacgtggacaaagggttttaaggcaacagactgcgtgggccacgatgtagtcaccttactaagggatgcgataaaaaggagagaggaatttgacctggacgtggtggctgtggtcaacgacacagtgggcaccatgatgacctgtgcttatgaggagcccacctgtgaggttggactcattgttgggaccggcagcaatgcctgctacatggaggagatgaagaacgtggagatggtggagggggaccaggggcagatgtgcatcaacatggagtggggggcctttggggacaacgggtgtctggatgatatcaggacacactacgacagactggtggacgaatattccctaaatgctgggaaacaaaggtatgagaagatgatcagtggtatgtacctgggtgaaatcgtccgcaacatcttaatcgacttcaccaagaagggattcctcttccgagggcagatctctgagacgctgaagacccggggcatctttgagaccaagtttctctctcagatcgagagtgaccgattagcactgctccaggtccgggctatcctccagcagctaggtctgaatagcacctgcgatgacagtatcctcgtcaagacagtgtgcggggtggtgtccaggagggccgcacagctgtgtggcgcaggcatggctgcggttgtggataagatccgcgagaacagaggactggaccgtctgaatgtgactgtgggagtggacgggacactctacaagcttcatccacacttctccagaatcatgcaccagacggtgaaggaactgtcaccaaaatgtaacgtgtccttcctcctgtctgaggatggcagcggcaagggggccgccctcatcacggccgtgggcgtgcggttacgcacagaggcaagcagctaagagtccgggatccccagcctactgcctctccagcacttctctcttcaagcggcgaccccctaccctcccagcgagttgcgctgggagacgctggcgccagggcctgccggcgcggggaggaaagcaaaatccaactaatggtatatattgtagggtacagaatagagcgtgtgctgttgataatatctctcacccggatccctcctcacttgccctgccactttgcatggtttgattttgacctggtcccccacgtgtgaagtgtagtggcatccatttctaatgtatgcattcatccaacagagttatttattggctggagatggaaaatcacaccacctgacaggccttctgggcctccaaagcccatccttggggttccccctccctgtgtgaaatgtattatcaccagcagacactgccgggcctccctcccgggggcactgcctgaaggcgagtgtgggcatagcattagctgcttcctcccctcctggcacccactgtggcctggcatcgcatcgtggtgtgtcaatgccacaaaatcgtgtgtccgtggaaccagtcctagccgcgtgtgacagtcttgcattctgtttgtctcgtggggggaggtggacagtcctgcggaaatgtgtcttgtctccatttggataaaaggaaccaaccaacaaacaatgccatcactggaatttcccaccgctttgtgagccgtgtcgtatgacctagtaaactttgtaccaattcaaa

SEQ ID NO: 163043 - DNA, 3194 bp, Homo sapiens
atccttaattaaattaattcttccccccccgggaggagccgccgagcagccgccggaggaccacggctcgccagggctgcggaggaccgaccgtccccacgcctgccgccccgcgaccccgaccgccagcatgatcgccgcgcagctcctggcctattacttcacggagctgaaggatgaccaggtcaaaaagattgacaagtatctctatgccatgcggctctccgatgaaactctcatagatatcatgactcgcttcaggaaggagatgaagaatggcctctcccgggattttaatccaacagccacagtcaagatgttgccaacattcgtaaggtccattcctgatggctctgaaaagggagatttcattgccctggatcttggtgggtcttcctttcgaattctgcgggtgcaagtgaatcatgagaaaaaccagaatgttcacatggagtccgaggtttatgacaccccagagaacatcgtgcacggcagtggaagccagctttttgatcatgttgctgagtgcctgggagatttcatggagaaaaggaagatcaaggacaagaagttacctgtgggattcacgttttcttttccttgccaacaatccaaaatagatgaggccatcctgatcacctggacaaagcgatttaaagcgagcggagtggaaggagcagatgtggtcaaactgcttaacaaagccatcaaaaagcgaggggactatgatgccaacatcgtagctgtggtgaatgacacagtgggcaccatgatgacctgtggctatgacgaccagcactgtgaagtcggcctgatcatcggcactggcaccaatgcttgctacatggaggaactgaggcacattgatctggtggaaggagacgaggggaggatgtgtatcaatacagaatggggagcctttggagacgatggatcattagaagacatccggacagagtttgacagggagatagaccggggatccctcaaccctggaaaacagctgtttgagaagatggtcagtggcatgtacttgggagagctggttcgactgatcctagtcaagatggccaaggagggcctcttatttgaagggcggatcaccccggagctgctcacccgagggaagtttaacaccagtgatgtgtcagccatcgaaaagaataaggaaggcctccacaatgccaaagaaatcctgacccgcctgggagtggagccgtccgatgatgactgtgtctcagtccagcacgtttgcaccattgtctcatttcgctcagccaacttggtggctgccacactgggcgccatcttgaaccgcctgcgtgataacaagggcacacccaggctgcggaccacggttggtgtcgacggatctctttacaagacgcacccacagtattcccggcgtttccacaagactctaaggcgcttggtgccagactccgatgtgcgcttcctcctctcggagagtggcagcggcaagggggctgccatggtgacggcggtggcctaccgcttggccgagcagcaccggcagatagaggagaccctggctcatttccacctcaccaaagacatgctgctggaggtgaagaagaggatgcgggccgagatggagctggggctgaggaagcagacgcacaacaatgccgtggttaagatgctgccctccttcgtccggagaactcccgacgggaccgggaccggcagcaatgcctgctacatggaggagatgaagaacgtggagatggtggagggggaccaggggcagatgtgcatcaacatggagtggggggcctttggggacaacgggtgtctggatgatatcaggacacactacgacagactggtggacgaatattccctaaatgctgggaaacaaagacaccccaggcccctcctcctgtctcaggtatgagaagatgatcagtggtatgtacctgggtgaaatcgtccgcaacatcttaatcgacttcaccaagaagggattcctcttccgagggcagatctctgagacgctgaagacccggggcatctttgagaccaagtttctctctcagatcgagagtgaccgattagcactgctccaggtccgggctatcctccagcagctaggtctgaatagcacctgcgatgacagtatcctcgtcaagacagtgtgcggggtggtgtccaggagggccgcacagctgtgtggcgcaggcatggctgcggttgtggataagatccgcgagaacagaggactggaccgtctgaatgtgactgtgggagtggacgggacactctacaagcttcatccacacttctccagaatcatgcaccagacggtgaaggaactgtcaccaaaatgtaacgtgtccttcctcctgtctgaggatggcagcggcaagggggccgccctcatcacggccgtgggcgtgcggttacgcacagaggcaagcagctaagagtccgggatccccagcctactgcctctccagcacttctctcttcaagcggcgaccccctaccctcccagcgagttgcgctgggagacgctggcgccagggcctgccggcgcggggaggaaagcaaaatccaactaatggtatatattgtagggtacagaatagagcgtgtgctgttgataatatctctcacccggatccctcctcacttgccctgccactttgcatggtttgattttgacctggtcccccacgtgtgaagtgtagtggcatccatttctaatgtatgcattcatccaacagagttatttattggctggagatggaaaatcacaccacctgacaggccttctgggcctccaaagcccatccttggggttccccctccctgtgtgaaatgtattatcaccagcagacactgccgggcctccctcccgggggcactgcctgaaggcgagtgtgggcatagcattagctgcttcctcccctcctggcacccactgtggcctggcatcgcatcgtggtgtgtcaatgccacaaaatcgtgtgtccgtggaaccagtcctagccgcgtgtgacagtcttgcattctgtttgtctcgtggggggaggtggacagtcctgcggaaatgtgtcttgtctccatttggataaaaggaaccaaccaacaaacaatgccatcactggaatttcccaccgctttgtgagccgtgtcgtatgacctagtaaactttgtaccaattcaaa

SEQ ID NO: 163044 - DNA, 3381 bp, Homo sapiens
atccttaattaaattaattcttccccccccgggaggagccgccgagcagccgccggaggaccacggctcgccagggctgcggaggaccgaccgtccccacgcctgccgccccgcgaccccgaccgccagcatgatcgccgcgcagctcctggcctattacttcacggagctgaaggatgaccaggtcaaaaagattgacaagtatctctatgccatgcggctctccgatgaaactctcatagatatcatgactcgcttcaggaaggagatgaagaatggcctctcccgggattttaatccaacagccacagtcaagatgttgccaacattcgtaaggtccattcctgatggctctgaaaagggagatttcattgccctggatcttggtgggtcttcctttcgaattctgcgggtgcaagtgaatcatgagaaaaaccagaatgttcacatggagtccgaggtttatgacaccccagagaacatcgtgcacggcagtggaagccagctttttgatcatgttgctgagtgcctgggagatttcatggagaaaaggaagatcaaggacaagaagttacctgtgggattcacgttttcttttccttgccaacaatccaaaatagatgaggccatcctgatcacctggacaaagcgatttaaagcgagcggagtggaaggagcagatgtggtcaaactgcttaacaaagccatcaaaaagcgaggggactatgatgccaacatcgtagctgtggtgaatgacacagtgggcaccatgatgacctgtggctatgacgaccagcactgtgaagtcggcctgatcatcggcactggcaccaatgcttgctacatggaggaactgaggcacattgatctggtggaaggagacgaggggaggatgtgtatcaatacagaatggggagcctttggagacgatggatcattagaagacatccggacagagtttgacagggagatagaccggggatccctcaaccctggaaaacagctgtttgagaagatggtcagtggcatgtacttgggagagctggttcgactgatcctagtcaagatggccaaggagggcctcttatttgaagggcggatcaccccggagctgctcacccgagggaagtttaacaccagtgatgtgtcagccatcgaaaagaataaggaaggcctccacaatgccaaagaaatcctgacccgcctgggagtggagccgtccgatgatgactgtgtctcagtccagcacgtttgcaccattgtctcatttcgctcagccaacttggtggctgccacactgggcgccatcttgaaccgcctgcgtgataacaagggcacacccaggctgcggaccacggttggtgtcgacggatctctttacaagacgcacccacagtattcccggcgtttccacaagactctaaggcgcttggtgccagactccgatgtgcgcttcctcctctcggagagtggcagcggcaagggggctgccatggtgacggcggtggcctaccgcttggccgagcagcaccggcagatagaggagaccctggctcatttccacctcaccaaagacatgctgctggaggtgaagaagaggatgcgggccgagatggagctggggctgaggaagcagacgcacaacaatgccgtggttaagatgctgccctccttcgtccggagaactcccgacgggaccgagaatggtgacttcttggccctggatcttggaggaaccaatttccgtgtgctgctggtgaaaatccgtagtgggaaaaagagaacggtggaaatgcacaacaagatctacgccattcctattgaaatcatgcagggcactggggaagagctgtttgatcacattgtctcctgcatctctgacttcttggactacatggggatcaaaggccccaggatgcctctgggcttcacgttctcatttccctgccagcagacgagtctggacgcgggaatcttgatcacgtggacaaagggttttaaggcaacagactgcgtgggccacgatgtagtcaccttactaagggatgcgataaaaaggagagaggaatttgacctggacgtggtggctgtggtcaacgacacagtgggcaccatgatgacctgtgcttatgaggagcccacctgtgaggttggactcattgttgggaccggcagcaatgcctgctacatggaggagatgaagaacgtggagatggtggagggggaccaggggcagatgtgcatcaacatggagtggggggcctttggggacaacgggtgtctggatgatatcaggacacactacgacagactggtggacgaatattccctaaatgctgggaaacaaaggtatgagaagatgatcagtggtatgtacctgggtgaaatcgtccgcaacatcttaatcgacttcaccaagaagggattcctcttccgagggcagatctctgagacgctgaagacccggggcatctttgagaccaagtttctctctcagatcgagagtgaccgattagcactgctccaggtccgggctatcctccagcagctaggtctgaatagcacctgcgatgacagtatcctcgtcaagacagtgtgcggggtggtgtccaggagggccgcacagctgtgtggcgcaggcatggctgcggttgtggataagatccgcgagaacagaggactggaccgtctgaatgtgactgtgggagtggacgggacactctacaagcttcatccacacttctccagaatcatgcaccagacggtgaaggaactgtcaccaaaatgtaacgtgtccttcctcctgtctgaggatggcagcggcaagggggccgccctcatcacggccgtgggcgtgcggttacgcacagaggcaagcagctaagagtccgggatccccagcctactgcctctccagcacttctctcttcaagcggcgaccccctaccctcccagcgagttgcgctgggagacgctggcgccagggcctgccggcgcggggaggaaagcaaaatccaactaatggtatatattgtagggtacagaatagagcgtgtgctgttgataatatctctcacccggatccctcctcacttgccctgccactttgcatggtttgattttgacctggcacccactgtggcctggcatcgcatcgtggtgtgtcaatgccacaaaatcgtgtgtccgtggaaccagtcctagccgcgtgtgacagtcttgcattctgtttgtctcgtggggggaggtggacagtcctgcggaaatgtgtcttgtctccatttggataaaaggaaccaaccaacaaacaatgccacctccgccatcccctggtcccctgacactggggttgtatgttaaaaaaaagtaataaaagaattt

SEQ ID NO: 163045 - DNA, 1542 bp, Homo sapiens
cacacagggagggggtaccccaaggatgggctttggaggcccagaaggcctgtcaggtggtgtgattttccatctccagccaataaataactctgttggatgaatgcatacattagaaatggatgccactacacttcacacgtgggggaccagatcaacatggagtggggggcctttggggacaacgggtgtctggatgatatcaggacacactacgacagactggtggacgaatattccctaaatgctgggaaacaaaggtatgagaagatgatcagtggtatgtacctgggtgaaatcgtccgcaacatcttaatcgacttcaccaagaagggattcctcttccgagggcagatctctgagacgctgaagacccggggcatctttgagaccaagtttctctctcagatcgagagtgaccgattagcactgctccaggtccgggctatcctccagcagctaggtctgaatagcacctgcgatgacagtatcctcgtcaagacagtgtgcggggtggtgtccaggagggccgcacagctgtgtggcgcaggcatggctgcggttgtggataagatccgcgagaacagaggactggaccgtctgaatgtgactgtgggagtggacgggacactctacaagcttcatccacacttctccagaatcatgcaccagacggtgaaggaactgtcaccaaaatgtaacgtgtccttcctcctgtctgaggatggcagcggcaagggggccgccctcatcacggccgtgggcgtgcggttacgcacagaggcaagcagctaagagtccgggatccccagcctactgcctctccagcacttctctcttcaagcggcgaccccctaccctcccagcgagttgcgctgggagacgctggcgccagggcctgccggcgcggggaggaaagcaaaatccaactaatggtatatattgtagggtacagaatagagcgtgtgctgttgataatatctctcacccggatccctcctcacttgccctgccactttgcatggtttgattttgacctggtcccccacgtgtgaagtgtagtggcatccatttctaatgtatgcattcatccaacagagttatttattggctggagatggaaaatcacaccacctgacaggccttctgggcctccaaagcccatccttggggttccccctccctgtgtgaaatgtattatcaccagcagacactgccgggcctccctcccgggggcactgcctgaaggcgagtgtgggcatagcattagctgcttcctcccctcctggcacccactgtggcctggcatcgcatcgtggtgtgtcaatgccacaaaatcgtgtgtccgtggaaccagtcctagccgcgtgtgacagtcttgcattctgtttgtctcgtggggggaggtggacagtcctgcggaaatgtgtcttgtctccatttggataaaaggaaccaaccaacaaacaatgccatcactggaatttcccaccgctttgtgagccgtgtcgtatgacctagtaaactttgtaccaattcaaa

SEQ ID NO: 163046 - DNA, 827 bp, Homo sapiens
  misc_feature (167)..(167): n is a, c, g, or t
  misc_feature (275)..(275): n is a, c, g, or t
tcatctccaacagagttattattggctggagatggaaaatcacaccacctgacaggccttctgggcctccaaagcccatccttggggttccccctccctgtgtgaaatgtattatcaccagcagacactgccgggcctccctcccgggggcactgcctgaaggcgantgtgggcatagcattagctgcttcctcccctcctggcacccactgtggcctggcatcgcatcgtggtgtgtcaatgccacaaaatcgtgtgtccgtggggtaggaggncaagacctcctcacttgccctgccactttgcatggtttgattttgacctggtcccccacgtgtgaagtgtagtggcatccatttctaatgtatgcattcatccaacagagttatttattggctggagatggaaaatcacaccacctgacaggccttctgggcctccaaagcccatccttggggttccccctccctgtgtgaaatgtattatcaccagcagacactgccgggcctccctcccgggggcactgcctgaaggcgagtgtgggcatagcattagctgcttcctcccctcctggcacccactgtggcctggcatcgcatcgtggtgtgtcaatgccacaaaatcgtgtgtccgtggaaccagtcctagccgcgtgtgacagtcttgcattctgtttgtctcgtggggggaggtggacagtcctgcggaaatgtgtcttgtctccatttggataaaaggaaccaaccaacaaacaatgccatcactggaatttcccaccgctttgtgagccgtgtcgtatgacctagtaaactttgtaccaattcaaa

SEQ ID NO: 163047 - DNA, 828 bp, Homo sapiens
atccttaattaaattaattcttccccccccgggaggagccgccgagcagccgccggaggaccacggctcgccagggctgcggaggaccgaccgtccccacgcctgccgccccgcgaccccgaccgccagcatgatcgccgcgcagctcctggcctattacttcacggagctgaaggatgaccaggtcaaaaagattgacaagtatctctatgccatgcggctctccgatgaaactctcatagatatcatgactcgcttcaggaaggagatgaagaatggcctctcccgggattttaatccaacagccacagtcaagatgttgccaacattcgtaaggtccattcctgatggctctgaaaagggagatttcattgccctggatcttggtgggtcttcctttcgaattctgcgggtgcaagtgaatcatgagaaaaaccagaatgttcacatggagtccgaggtttatgacaccccagagaacatcgtgcacggcagtggaagccagctttttgatcatgttgctgagtgcctgggagatttcatggagaaaaggaagatcaaggacaagaagttacctgtgggattcacgttttcttttccttgccaacaatccaaaatagatgaggccatcctgatcacctggacaaagcgatttaaagcgagcggagtggaaggagcagatgtggtcaaactgcttaacaaagccatcaaaaagcgaggggactatgatgccaacatcgtagctgtggtgaatgacacagtgggcaccatgatgacctgtggctatgacgaccagcactcaacgcctcactacaacgcctgggacct

SEQ ID NO: 163048 - DNA, 934 bp, Homo sapiens
ctgtcttaccactttgtaggagttctttatgaatatcagatacgagtcctttgttggttataggtattgcaaatatttctatgagtaaataaatacaaaagcccttggttttggtgtcttctgaagtgtcagggccactggaacaagaatataatctctatatctattttgatcactagtgtaaacccagctcctggcacatagtaggtacttaataaatatgttgaatgaatgatggatgaggtggataaagctgatgtaggtactttgctctgtattgtgctgatccctagagtcaaacaccaagaggacctgggggaagcagatttcctctggcttagccagctgtgaccttaggaagaggaagacatcctggcccttctctactgaaagagcagaaatagctacagtctgtgaaatgatgagcacagatgtagggagcggaggtcacagatgaaaagacaggaactaccagcaagtagcaggccagccagatacttcagaaggagagacgcagttgggggtatcaaaaagatagtgagggtctctgagcatcactgtggacctttgtatgacaagaacctccaaaggtcatgtggactctctcttgcctcaagacatgcccagtctttgagcttgttagccaagagagctcttccacacctagaaacacatttctttctccaaaggaggttccctgaaactttggttggagggtcttattcctaacctgcattgggcaactctttttttaaaatcagctttaacttcctcatggcctgtaatgtccatcctgaatatggaagaccaccgaatcagcctcttctccatgcactgttttcataggcctgttgcattctacagcgtttttctcttgctgtgtttctctccagcatccttgaccagctctggtcaagagtctcactgattcctg

SEQ ID NO: 163049 - DNA, 173 bp, Homo sapiens
ctgccgtgttcagtcccaaggtgtacagaggtggagagcttccagtttagccccaggtcctgtgtgccctgaaggcacaatctccctcacaccctggggccccactcccctcagccagccggctgttgcgcttcccatctgcctggggccgttcacgtctccccagctgttgt

SEQ ID NO: 163050 - DNA, 444 bp, Homo sapiens
cttatctgggaattcaaacatttattgaacacctactacgtacaaagtacatggtattttctctctcctatcttccttacactctcggtactacaaaagattttttaatgtgttaacataacatatctttactcaaggatcctgagatgaaatattttataggagaaatgaagatttctcagttaattaaaagtcctggattcacaaaagatttcttcatcatttctttatatgacaaaaatatagcaaacagctaatagtttacacagattgagtaccatagtagacaaattcatttcaacccaacctgaattctaatgcaggatctgacctttacaaggtatttgaacttgaggcaagttacttccctcctctgggtcttaatttcttcagataattaaggaatgagaccagctagcctcacgttaaataaagtaatattct

SEQ ID NO: 163051 - DNA, 368 bp, Homo sapiens
ttgcctcagtctaccaaagtgttgggattacaggcatgaatacactttaaagtgtgtaatctgtttgcagcacacacggtccaatccatcaatgaggtcatattaactcaattattcaagcaatcatcaccattagaattggagaaaccgaggcatagaggggctactttgccaataaccagctctgccagaactcgaatccaggtctcccagagagaccaggagagggtgtggtatggagtttgggggagtgggagtttgtttgattttttaaatttgtttgtttgtttgaaacagggtcttactctgtggcccaggctggagtgcaatggagccatcatagctcactgcagtctaggactcctggg

SEQ ID NO: 163052 - DNA, 423 bp, Homo sapiens
agcatcctcatgatgactgggatggtagtgaatatttataggtttcttttagtacctttttttttagcgttttccatagttccatgtttctacaacccctgggaacatcagaatcatgtgtgtgtgggtgcttattaaatacaccaattcctgggctcactcccagtgactcccagtttgatgattgggggctcagctaggacctatgttttcaaaagctcccaggtgatctcatgcagccagactggctctggctctggctctgggagctgggttgggaactagtctttggtgctattctgctgaaacttcaagttgggctctttgactccatcttgtattgtcatcacttgtattcaggtctgttcttcctctggattgtaaactccttgatgtctgggtcatctcagctcatgagctgag

SEQ ID NO: 163053 - DNA, 155 bp, Homo sapiens
agaactgctcttgaacttctactcctgaatcttctttctttaaaactccccattcttcaacaatagtttttgttgcttcacttctgatatctatgatcaaaattcgaaacacaagagtatgtctctgaagtgactgtactgctaatgccaatttc

SEQ ID NO: 163054 - DNA, 263 bp, Homo sapiens
tagtaatcttacatagaatgtccccatgctgatccctactcctcctcaccctcaacagcaaagacagatacaaaaacccatcacgtatgtttatacaatttttcaaaaagttgtctatacatacagttgtccttttcagttccaccgtccgctttccatacactcctatccaaatctcttaagaacacttaaaaacggtggccaggagcaatggctcaggcctgtaatcctagcactttgggaagttgaggtaggaggatcac

SEQ ID NO: 163055 - DNA, 1157 bp, Homo sapiens
ttttctctccagataacaggaacattgtctcgaagaatccaggacatttgattctgaaatctccaatgtgaaccacacttcctctcctagtatataaccaaccaattctttagttcaagcttttcaaatttatcctaagtccccttcaaatagcacagagaagtggaagcctatcgctggggtctgagacaaaggagttaaagcacctacatgttgacataattttactttaaattcttctttcttctttaaaagttctgctcatttgcattctccatggagagaaaaagtaaattatactgacgctccgagagggaaacgctcttctcacatggggatccttgctcatggcaacaacctgtgcaccccgcgggctggaactcccacgaatccactaggctcggctcccttaggggtcagcccccatagtatgctgggatcaacctgaacggatcacagctcaaggcttctgaggctttttctgttcgggactgtatttcccagcggccaccgcgccagtccacttccggtctccggggtcgacgacatagcggggtaaggtcttcacgtctgaggaagagatctgtggctgcgggagatctctgcggattggggctccagcctgactgacccgacagtgcgggtggcctagggggaggcgctcagagtaggaacccgggggtgcagacgggatctgccggatccccaggctcgtatttttatccaaaagaaggacctggaggaggatgagagcgttactgctgcacacctaaagtcaagggggagaagcccgaggaagattgaccagttttgtaattctagcaacatggtccatggatcagtgacattcagggatgtggccattgacttctctcaggaggagtgggagtgcctgcagcctgatcagaggaccttgtacagggatgtgatgttggagaactacagccacctgatctcactgggaagttccatttctaaaccagatgtaattacgttactagagcaagagaaagagccctggatggttgtaaggaaagaaacaagcagacggtatccagatttggagttaaaatatggacctgagaaagtatctccagaaaatgatacctctgaagtaaatttacccaaacaggttataaagcaaataagtacaaatc

SEQ ID NO: 163056 - DNA, 1113 bp, Homo sapiens
ttttctctccagataacaggaacattgtctcgaagaatccaggacatttgattctgaaatctccaatgtgaaccacacttcctctcctagtatataaccaaccaattctttagttcaagcttttcaaatttatcctaagtccccttcaaatagcacagagaagtggaagcctatcgctggggtctgagacaaaggagttaaagcacctacatgttgacataattttactttaaattcttctttcttctttaaaagttctgctcatttgcattctccatggagagaaaaagtaaattatactgacgctccgagagggaaacgctcttctcacatggggatccttgctcatggcaacaacctgtgcaccccgcgggctggaactcccacgaatccactaggctcggctcccttaggggtcagcccccatagtatgctgggatcaacctgaacggatcacagctcaaggcttctgaggctttttctgttcgggactgtatttcccagcggccaccgcgccagtccacttccggtctccggggtcgacgacatagcggggtaaggtcttcacgtctgaggaagagatctgtggctgcgggagatctctgcggattggggctccagcctgactgacccgacagtgcgggtggcctagggggaggcgctcagatcgtatttttatccaaaagaaggacctggaggaggatgagagcgttactgctgcacacctaaagtcaagggggagaagcccgaggaagattgaccagttttgtaattctagcaacatggtccatggatcagtgacattcagggatgtggccattgacttctctcaggaggagtgggagtgcctgcagcctgatcagaggaccttgtacagggatgtgatgttggagaactacagccacctgatctcactgggaagttccatttctaaaccagatgtaattacgttactagagcaagagaaagagccctggatggttgtaaggaaagaaacaagcagacggtatccagatttggagttaaaatatggacctgagaaagtatctccagaaaatgatacctctgaagtaaatttacccaaacaggttataaagcaaataagtacaaatc

SEQ ID NO: 163057 - DNA, 1001 bp, Homo sapiens
ttttctctccagataacaggaacattgtctcgaagaatccaggacatttgattctgaaatctccaatgtgaaccacacttcctctcctagtatataaccaaccaattctttagttcaagcttttcaaatttatcctaagtccccttcaaatagcacagagaagtggaagcctatcgctggggtctgagacaaaggagttaaagcacctacatgttgacataattttactttaaattcttctttcttctttaaaagttctgctcatttgcattctccatggagagaaaaagtaaattatactgacgctccgagagggaaacgctcttctcacatggggatccttgctcatggcaacaacctgtgcaccccgcgggctggaactcccacgaatccactaggctcggctcccttaggggtcagcccccatagtatgctgggatcaacctgaacggatcacagctcaaggcttctgaggctttttctgttcgggactgtatttcccagcggccaccgcgccagtccacttccggtctccggggtcgacgacatagcgggtcgtatttttatccaaaagaaggacctggaggaggatgagagcgttactgctgcacacctaaagtcaagggggagaagcccgaggaagattgaccagttttgtaattctagcaacatggtccatggatcagtgacattcagggatgtggccattgacttctctcaggaggagtgggagtgcctgcagcctgatcagaggaccttgtacagggatgtgatgttggagaactacagccacctgatctcactgggaagttccatttctaaaccagatgtaattacgttactagagcaagagaaagagccctggatggttgtaaggaaagaaacaagcagacggtatccagatttggagttaaaatatggacctgagaaagtatctccagaaaatgatacctctgaagtaaatttacccaaacaggttataaagcaaataagtacaaatc

SEQ ID NO: 163058 - DNA, 1312 bp, Homo sapiens
ttttctctccagataacaggaacattgtctcgaagaatccaggacatttgattctgaaatctccaatgtgaaccacacttcctctcctagtatataaccaaccaattctttagttcaagcttttcaaatttatcctaagtccccttcaaatagcacagagaagtggaagcctatcgctggggtctgagacaaaggagttaaagcacctacatgttgacataattttactttaaattcttctttcttctttaaaagttctgctcatttgcattctccatggagagaaaaagtaaattatactgacgctccgagagggaaacgctcttctcacatggggatccttgctcatggcaacaacctgtgcaccccgcgggctggaactcccacgaatccactaggctcggctcccttaggggtcagcccccatagtatgctgggatcaacctgaacggatcacagctcaaggcttctgaggctttttctgttcgggactgtatttcccagcggccaccgcgccagtccacttccggtctccggggtcgacgacatagcggggtaaggtcttcacgtctgaggaagagatctgtggctgcgggagatctctgcggattggggctccagcctgactgacccgacagtgcgggtggcctagggggaggcgctcagagtaggaacccgggggtgcagacgggatctgccggatccccaggctcgtatttttatccaaaagaaggacctggaggaggatgagagcgttactgctgcacacctaaagtcaaggaacaggagcattgggaatatgtgattcattgcgactgctggttgtatattaagaaaatgagtgaggggctcaaatgatctaggacagaaattctttctttttaaatcgacagatataattgtatgtatttatcatgtgcaacatgaagttttatggggagaagcccgaggaagattgaccagttttgtaattctagcaacatggtccatggatcagtgacattcagggatgtggccattgacttctctcaggaggagtgggagtgcctgcagcctgatcagaggaccttgtacagggatgtgatgttggagaactacagccacctgatctcactgggaagttccatttctaaaccagatgtaattacgttactagagcaagagaaagagccctggatggttgtaaggaaagaaacaagcagacggtatccagatttggagttaaaatatggacctgagaaagtatctccagaaaatgatacctctgaagtaaatttacccaaacaggttataaagcaaataagtacaaatc

SEQ ID NO: 163059 - DNA, 304 bp, Homo sapiens
gcagccttgaacttctggactcaagcgatcctcctgcctcagctagctgactagctgggaccacaggtgcttagcaccgtgcctggctgatttttcctggtctcattgttgctggggctggccttgaactccaaacctcaagcaatcctcctgccttggccacattttatgttgggattacaggcctgacccaccatacccagcctaatactatttttaaaaacaaaaagtaggaaatcaattttccttttaaatgaacactaaattataagaattaacttgggtaatctatgcaacattctca

SEQ ID NO: 163060 - DNA, 298 bp, Homo sapiens
taggttattttgaaagacctgtcttctgtctttgagttgtcagattccttcttctgcttaatctagactattgttgaatctaacattttttatttcattcaatgaattcttcagtttcaggatttctgtatggttcttttttatgataactatctctttggcaaatttttcattcatatcctgcactgtttttctgatttctatgtattatttttcataattccctggtatctcactgagcttcttcacaatcaagaatgtgaattatttgttcaggatttcgtgaatttctttttga

SEQ ID NO: 163061 - DNA, 255 bp, Homo sapiens
attgggggatgcagggagggtggagtgtgggggatgaggaaaaacagtgacactgggagggaacaggacagaggagcatctgggatgtttccaggctgtgggaaatggtaagacagagccgcgtagaggcagcacccggaggaccctacaggaagctgcagcagacgcagaggtggagagcgggcaggacgtcagggcgggcaggaggtcagggcacacacctggtctgggcacacacttggtctggacaggctt

SEQ ID NO: 163062 - DNA, 278 bp, Homo sapiens
actgaatcattcacaaaccacatgtaagggaactgagcatccttgaattttactatcctcaaaccaatctattgtggatacccggggttactatctctgtgtgtctgtgtgtgtgtgtgcacgcacacgtgtgtgtgtattttggcatccccagcacttagcacactataaggcacaccatgttttcaacgagtttggaatgatgggcaatttgaacaagcatagcccgatttcctctagcttgggctatcattttcaaattgctaacattggccatc

SEQ ID NO: 163063 - DNA, 308 bp, Homo sapiens
tctcctgcctcagcctcccgagtagttgggactacaggcgcccgccaccacacccagctaatgtttttgtattttgagtggagacggggtttcaccgtgttagccaggatggtctcgatctcctgaccttgtgatcctcccgcctcggcctcccaaagtgctgggattacaggcatgagccaccgtgcccagcccggtgatgctttttgactgctactctcgttaagcgtggcggtcacttgactcccatgcccgaattccttccatgtgtatgacggttatgttgtgtataggatctcagaatgact

SEQ ID NO: 163064 - DNA, 327 bp, Homo sapiens
ccctttgtgtccatagtgccctgtatcttgttgcctaaagtttgaggttacgcaggttgtctggattttgggaaagccgctttatttctgccctctctccacagtgtttatcactgataagatctccagcttctgtcttcaagtggctttacaggttttacaccgcaaacttccccagttttgcgctcatctctgcaatgctgtgattggctacctgagtactcgcggttcctcagtagatggcaggtatggtcagggcctcaggatcgacccaagttggcggggctgtgtgaaatgaatgaggtgatgtagtgcaactgtattttg

SEQ ID NO: 163065 - DNA, 467 bp, Homo sapiens
gaaatgtacataatggttacagattgtcaaagactggagctaaagggtaaagtaaccatggcctttttgttgtcactatttagtttgtgtagttgccaagtgtgtttctaatgcaaccttaggtcatcggcattaaaaaagttttgtgtaaatatcatttactgcctcaagtccttgctctttcaccctaaagatttggaaagttaaaaaaaaaaaaaagcctgctaatcgcctctgggtgttaccagcctgcattagctctaaggcaatccatccctcagcatgggactccccagtgtttgtaattctcagctattgattttgtttgtagttggaggttgtaccacaaataaattctaaggtctatttgtcctacatgagggggagccatagtaattcattctcacattggtgcccagtgtcagtgtgaaaaaaataaaagtcttgttggattcactctgggccgc

SEQ ID NO: 163066 - DNA, 377 bp, Homo sapiens
agcctggtgaggccccgttctggggctggactcctggcctcggagccctgaggtgggaagcgatgtcagcgactgcagggatcgcacgtgctggcgtccaccatgcaggcctggggaagacctggtctcgccctcaaggggctcacggtcaacaggggtgggcgcagggctgggtgtttgatgtggggtgacaggcggggtgcggatcagcaagggggggcttccctgggctggtcctgtctgagctcagtgccgaacaaggatgccgtgggagccggagggagttccaggcggagggaacggcagcacaaaggtcacaaggtggctgaggcagccacgctgcacggataacagcagcgtcctccaggctcatgcag

SEQ ID NO: 163067 - DNA, 367 bp, Homo sapiens
tctgcagatgctcctctcctgcttcactcctcccattctgctggtctcacctccaaagtcctctcctccaggcagccctccttgaatcctctagtctgggtcagatgccccctcctccaggaagccctctctaaacacctccccccatcccaggtccaacacccgccccctgtgagctcctccagttccttggcttcaccatcccagccctgcccgttctggggcatcaccatctggggatgggtctgtccccttcactagactttgtgccccatgagggcagggctgaggctgtcatggtcactgttgtgtccccaacattacccagcacagggctgggcacagaggggctcaggggatggatgga

SEQ ID NO: 163068 - DNA, 132 bp, Homo sapiens
gggcgaggaaggggcatttgcaccggggctgggcgggcgcacccagagccaggcgggcaggaacccctgcgcagccatccggtgcctgcatgtccctggcgcggaagggacgcctcaccagcctcggcgccc

SEQ ID NO: 163069 - DNA, 254 bp, Homo sapiens
cacaaagtaaacgctgcactttgcagattggtccctccagcttttgggaattgtaggacctgtagtgcagtgtctctgaggcacgtggagccctctggatgtttcacccgggcccaatctaccttgtgtaaaggccctcctgttcgactggagacatttcccaggaccttcctaaaaacattcaaaatctggtggtgaaagtccttgtgtaaaattttgacgctaggtgtcctccatcccttgctcctgttaga

SEQ ID NO: 163070 - DNA, 745 bp, Homo sapiens
aaaagttgtgttctctccccactagccctggtgggctctgcctaatcccatttctctttccttaggggtattctgcagtcttcccttctctctctgggaccaagtggttatttccatttttctggactccattctgactccagtacacaccctgtgacccccctcagcagctgagaaacagagcctcttccaaacccatccctaccttccaaatcaagcagaaccctctgctgcccactgggagtcacaaggaggggacggaactgagctgctgggcctcagtgtcccaggacagtggagtctgtgaccaaggtgccgattaggaagaagtctgagctgaaggcagagcattagggatagcagctgggggtgatgttggaagaaccctccctcagtataatcggtatacctgccctacttcggtatagtccttggcacatggcaggcactcagatgacagcactcatatacatccctgcctccagacccactcatgggaaactgatgcaggagagattgggcttttggagaggtggaggtgggggtactgtgaaactggaggagggaaccaggtcaggggatcttaggaatgcagaaaggagttcagagcctttctcaagtctggacaggaccctcggtatccaggtcagagccctcttcccaagaggttgggaccaggtgggccagagcttgtaaggagaggaggcagaagggctggtgccctggtactcacaggtgcgtgcag

SEQ ID NO: 163071 - DNA, 287 bp, Homo sapiens
aatggttcacagaattgatctcataagtttgttataaagattaaatgagatggtctacacaaaagatttaggacactgcccgttacatactaagtattgaatcagtattagtgaccactaactcctataaggagaaggcttcagcaaagactcaagccctctctttgttttgcctctaactccaattcctacacaggatcctctctgaggccagtgtggctggaggtggagaggggcagatggctctggaatggtgtgcatgcacccttcgccccctgcccctttcc

SEQ ID NO: 163072 - DNA, 228 bp, Homo sapiens
atttccggcgggcaatctcaattacaatatatacaccaacaaacaatgttcaaccagtaactactactaaggaacgctcataatcatacaaagcccccgcaccaataggatcctcccaaaacctgcccctactcctcctagacctaacctgactagataatctattaccttatagaagaactaatgttagtataagtaacatgaaaacattctcctcctcataagcct

SEQ ID NO: 163073 - DNA, 464 bp, Homo sapiens
aaattccagctcggtttcctccactagtgtaggccaaaggcttctacatgatttaatcacacatgaaatatgctgtggttgttttgtatgagataaaaactgaaactgagaaaaactttatcacgtgcacaggatcacaccagttggtaagtaatttgtagtgctagaaacttgtacaattataggatctggaccatgagtgacacatgaatcaggaaagaaagaacagcacctgtaggggttcagtttaaaggattgcacactcattgttctctaggttaatggatcctggatgaggccctgttaatactgcatcattcaagaagatttaacttaaacctcatgactcagtaatcccattcctatgtatatatctaagagaagtgagtgcatatgtctaccagaagacatgtttaagaatgcattagtaattttatctacagtaacccctaatagtaaatatt

SEQ ID NO: 163074 - DNA, 685 bp, Homo sapiens
agaccagcctggccaacatggagaaatcccgtctctactgaaaatacaaaaattagccaggtgtggtggtgggcgcctgtgatcccagctactcgggaggctgaggcaggaaaatcactggaacctgggaggaggaggttgcagtgagacaagatggcgccactgcactccagcctgggcgacagagcaagattccatctcaaaaaaaaaaataaaaagaggtaatatgagttggtctggaaatatagggaagaaaggcatcccagaaagagagcaaagactgagagagcaaagactgcaaagtcatgaagaaatgataagggatattttgtgaaatataatgctgagtgtggcaggggtcgatagtgggtatgggagccagttattggagatggaaagtagataaatgggttgggcctgcttgtgaaaggttttaaaattcacgtagtactactatcccatgtttacagatgagaaaactgaggagggtatgagaagttaaataacttgtctatggtaactcaattagtaagtgccagagccatgatttacactctatctgtactccgaatccctacatttatatctgtgaatctgtgctcaaggatgcaaatggaaaccagaaaaccttatcctttacatgcagaagctatactgtttcctctttttaagacacagcaacagg

SEQ ID NO: 163075 - DNA, 300 bp, Homo sapiens
gaagaggttcagtagtgtgatgagtgctgaacctaaattagaagtgatcaaggagtgaaattggaaaaaaagtttaagactatcatttaaggaattcagaagtagaagcaagtagagaagtagattgaagagaaggacttaaatatttttagaaaatgaaagggtataatagaagacttggagaataagtgaagagtttagccttattaaaggaacaaaacactccttcctttgagagaggagggaaaggaagaagaatgaatagaatagaataggaggaagttaagagaaaagcagaga

SEQ ID NO: 163076 - DNA, 278 bp, Homo sapiens
tatagagaggagggatacaaagggaaagaatcaggaagtgccttatccccacgtagggtcaaccagtaggtctataccagctttgtgggaaagctcttaattatttgtctgagagctttgtctatgactctgacctattcaaatagtcattatgaacttgaatgaaaacaaggatatgaaaataaaatttgtgaacaacacagagttagagaaaacctttaatgcattggcttcaataatcaaaaagttgagtgtagttaaacctggataagattatc

SEQ ID NO: 163077 - DNA, 1206 bp, Homo sapiens
gaagtactaactagacatatatatgtcttagttcagtgctatatatttgttggtgccaaacagctctttattgaatagatggatatatgtatgtattactgcacataatgtactcaaaatccaaatgagaacctatagagtatctattttttaggatttttgccatactggttccttgtgtttgcatgaaaaactgaaaattgactgtggagcttttaggcttgggttggaacaatatgtattttagaaagattactctcttaataataactacaactcattcttagaataataaaaatcatatcagtactaagtaatatttatcaactgcttactgtgtgccaggcagtatgctaagtgtgtatgttatcttagttcatatctacagccctgaaagaagacacaacaaggcatgttgtgttattatttccatttatagatgaggtctctttgggagccagcaaggaggtggtacaaggtctaatctttgaacagttgagaaatgggtagttagttttcatagtgctgcttcttattttcaaggttgagggcccttctaggcgaggtgaaaggaacccttaaatctagagactgcctagagggagaaactgacacttacttttggctttctgggaaccagggtaggtcctctcttaattgaagagaattaataggatcctgtggctgggcattgggcagagtgtttgaatagctgctggccatggtaggtaatgccaaagtggcagtgaaaacaagctactgtgggacattagaccctgcctgtcacttttcttcccaggccactcacttgttggagggcccttctgaaactcctcttgctctgtagtctggatgcttgtgaacaagctgcttgcaggtgccgaaacaaacagcagtgtgggtctcagggcctgggcttggaagctgggcagagggtggaagggctccatttgggagcagtgttgatggaagtgatttttctagctgaggtgcgaggttggttctgagctgaatttaagagaaggctatggtcttttgtccttccacacttttgggacccagcagatactacaaatgcaatctttacaaacccactcactgccagaaatgaatctaaaaaagtgctagtctgtgggcctcttggtcaggaaggtgacagcagtggcaacagcagaaaaaccaatcaaacaaacaaaatgcctgtgg

SEQ ID NO: 163078 - DNA, 132 bp, Homo sapiens
atcacagggggtcacctggtgatttaaacaattgaggacaataaactggtttcttataccctcactcattataaaaagataaatttgcatctaaacattaatggaatacttaaaattattcttatctcttca

SEQ ID NO: 163079 - DNA, 377 bp, Homo sapiens
aatgtagtagaatcacagcatttgtccttttctgtcaaattcactatgtgtatttatcaggttcatcctgttacagcacttatcagtagcttaaattcttttgagtagctgggaccacaggcgcgcgccgtcacgcctggctagtttttgtatttttagtagagatggagtttcactatcttggtcagactggtctctaactcctgaccttgtgatccacccgcctcggcctcccagagtgctgggattacaggcatgagccaccgtgcccagccaacatttaaccttttaagatactgtgaaacgtttttcaaaaatggctgcagcattttacattcccataaaatatgagggttccagtttcttcacaacctcag

SEQ ID NO: 163080 - DNA, 433 bp, Homo sapiens
tggggccaggcgcagtgcttcacccctgtaataccagcactctgggaggccaaggcaggcagatcacttgagctcaggagcttgagaccagcctggtcaacatggcgaaaccccgtctctactaaaaatacaaaaattagccaggcatggtggcacacacctgtagtcccagctactcaggaggctgaggcaggagagtcacttgaacccgggaggcagaggttgcagtgagtcgagattgtgccactgcactccagcctgggcaatagagtgagactctgtctcaaagaagaagaagaaaaaaaaaggttaattaattaaagaaaataaaaatcaaatgttacagaaaagccagatttctccacattcccttaaaaaatgggaagatctggcatggcatggtggctcacacctgaaatcccagcactttggg

SEQ ID NO: 163081 - DNA, 192 bp, Homo sapiens
aatgtaatctctaacatcaatgtggtcactcaaatgctgaatggaagaagacatcaggatgggatgaggaggttggggcaatgcctgcagggccctggaattcatcagtgtgctcaggaaaacagcatttccacatcttcctccaaagcttagggacaagtaaaaatataatggaaagtaaacattacaaca

SEQ ID NO: 163082 - DNA, 238 bp, Homo sapiens
cattgactattaattttgcctctttttgattactgttgaggcaaatgtgatgagagtagacctggtttaatttgagtggaaacagaaaggcatagtggaagtgaatgggttttcaagtaagacacacctgggcacacaatgtcctgttgtctctctctttgtgctagtagcagccactggtgatcattgcctagatccactaattaattagggattacaaaacaataatattctagtt

SEQ ID NO: 163083 - DNA, 716 bp, Homo sapiens
tgtcgagctcggtacctacttttccacaggaagataaaagcaggcacgcacaacaggaatgctctgaaggagacagaaaggcagaagagagcaggaggaggaggtccaaggaactgaaaagcgccacaaggtaatgctaagaatcaccaggctccaaaatatccaagaatattgcaagtattgctcccaaataatcacaagcattgcctacagaacataggtcaaagtctttatatcataccaacctcccctcccaactcgtcctcacttttctgggttcatttgcagttacggacatatgtgttccttaaaaaaaataaaaaagcatcttgctatgcaaaaacccaccatttgtgaggaaaaatggaattagggcacaacactgaaaaatgttgtcagtgacacacacacacaaaacaatctagtgaaaatggtagtaaagctctacacatgagaaatggttaagaaatacaagtaactgtgatactttaccttgaaaaaggcctgaagcttgctctgtggaagcgggcctcagtcagtttacagattgtgagttattgagaagtggaggcaaagagagtgaatgctgtaacatcagatggacacaaatgtggctcacatacaagtcaactgaggtgactgatctatgtggaaggtgtgtatattacatggcttggttcagctggcctcaactttttgcgttcacctaatatttc

SEQ ID NO: 163084 - DNA, 239 bp, Homo sapiens
gacagagctagactctgtctcaaaaaataaataaataaataaaaaataaaagccttgatcttttgttgaggcgtcccctcttcaaggtcctgtacaatgtgggagtctttcccacatgaataaatacgaagtgataaagagtgaagtcagactattgccctctaagaatttcaacatcaacaaagtagactactgacaaggaggcagaggtacacagatcttcagtcttaatgacacta

SEQ ID NO: 163085 - DNA, 359 bp, Homo sapiens
cctcgcctccttcagaagccagtgcctctggaaatgcctggatctgcgaccccagcctgagcctagtagggcccaagggaagctgaacgccccgacggctctcatggtaggtagctctttctgtttttttgcgccgccttcaggcaatcatctactccgcttgctatcccctcactcaactcggcttcagtagatggggttggtggggcgggagtgggaaagaggcaggggagtcaaaagggaaaacctgaaaagaaggagggagaagaagcaggggagaccaggacgagacaatgggacagcccaggatgccggtgcagagggcagcggctggatgcagagaagatgggacacgtatc

SEQ ID NO: 163086 - DNA, 850 bp, Homo sapiens
cagcgtctcctcacctgcaggctgagacttactgacacttttcaccctcttggccccacatgtgtggcccactggaggggagcaatggctggcagaaaaccaccaggtctggaggtcaggggctgggttctggcctggccctgcatctggccaacacgtgatctggaactgttttgtgggcctcggttttccttccagaagcagagaatcattctctatttctgagtggggcaagggggctctgacctctcccctggggctgccttttccctttatttccaagcagtattcacaagggcccaccaaagtggcatctggaagtatgtgtttccaacaaatccagtcttttttttttcttttccccttattggcttaccatgatatggtagaaatttattcaggcctgcctttaaaattccccttgattgagtctttggtggatcttacaaagactttggtgagttgcagagtctctcagtatatcacctggatggaggtagaggggcagagggccacgatgggcaggattgggcctctgggagaacagaagggccaaggcaaagcagaaaggagcagggaggtcctcggcaggggagccatctggaagatgtcaacttgcaggccctgaggtctgccctgggctgagttcctgggtctcctactggagagatcagccaaaatacacctctgttcccccaagcactctttgctttctgccttctctctggtcttggaattttcagttcaattgggatcttacaggaaaacaattccaggccaattcctgacttcccaccctagaagggaatgttggagcccttggcctgtggttccctctccctccttcttg

SEQ ID NO: 163087 - DNA, 511 bp, Homo sapiens
gatccagactgtatctagtgggatacagagcaccttgggcagaggagtggccccagcaaagacctagaggcagaaatgcacagctgtggggagggatgattagaattctttttttcctgaaaacatttactctgcaagaaaagcgaaggaatggtgttgttgttgttgttgttgttgtttttgagaagttttcagggaaagtgattgttctcagtgcaaggccagtatcagccatggtgtagagatggagagagcactcatggaaaagggggaggttaggggcttgcccagagcagaaccagaattttccagggcttgatagaaggagccggtagaggaggaaacgagaacagcactggctgaggagttggggttgtgcaggctcaggctttggacacaagatgaaagcatgtaagcatgttataaggaaggcacattgttaatatcatgctaatgttacctacccttccggctgaacagagcctgtggtggtcttgaacagattttcata

SEQ ID NO: 163088 - DNA, 250 bp, Homo sapiens
agggtgtacgtctccaaggcaagttatttaacaacttcttctacttcatacagaaccattcttagtgtttttctttgagattggtataaactcttctaagaatattaattttttgtcctgtggtcaaatatttaaccagtttgccttttaattttgtatatagtatattattacttatctatagatttttttttttttgagacagtgtgtcactcagtcacccaggctggagtgcagtggcacaatctcg

SEQ ID NO: 163089 - DNA, 272 bp, Homo sapiens
cagcatagcctagcccttgatgtctctgagttgggagaacctgttactccagttaggaaatgggataccctattgatgcggctgggaacctctgttgcttattgtacctgagggcagagaccatgtgccaaaggctttattttaggggaagtggtaagaaagttcaggctgtaggtatgttcttagccacttctttcagcttcagcaaggtcttacaagagataaatttaggctacactggattctaagagcatagagggaagatcatgcag

SEQ ID NO: 163090 - DNA, 269 bp, Homo sapiens
ttaaatctcccactagctattccatctctttctatcactttttgtcctagggtggctccagggtcagatgtagtctgtctggcttgtaacttgcttcccctcaaactgacaggccctttctattttaagtgacttgctactgatgcctataagaaaatagagaagagacaacaaaagtaataaacagttaaagccattataagcctgtatctgcaattttaacaggactagacacagattaggaagagaaaagtatatttcatttatat

SEQ ID NO: 163091 - DNA, 195 bp, Homo sapiens
ctgcctcagaagtgaacaagaaagacagagacacacagaaacatggagagccactgagagaccgataatgaaggagtcaggcctactcttcccaatggttatgctaccacttctgacacttgggtggaagagaggtgagaatgagacagaacaagcaggccagaggtccttgagcagtgaagtgggtcctagccc

SEQ ID NO: 163092 - DNA, 154 bp, Homo sapiens
ttggccgaggatagagagctggtctcctatatgagaatgatgatgaaaagcaagtagacacaaactgcatatgagccaccaatgtagaaactccgctgtttgcggtctttacacggtcccacctcccaaatcacgagtgatggtcccacatttc

SEQ ID NO: 163093 - DNA, 270 bp, Homo sapiens
tgctgggattacatgcgtgagccactgtgcctggcctgttaagtattaccataaactcttctcctatctgtcttgtaagttatgtacacctcatctatgttcttgatgtagcttgttacttagtctgttatagtaataatctctttaattattagcttttatgtcttctccattgtccactgacagccataactgcgtatatctttttgtatacctgtctacagaccagccatcctaggttgaagaatagaattacttctcattgcttcc
